United States Patent Application Publication US 2013/0129668 A1 - sequence listing, part 3

SEQ ID NO: 32718 - DNA, 122 bp, Homo sapiens
ttctgccgccatcttgattccacgttccctccacaaaatgcctggcgaagccacagaaaccgtccctgctatagagcagcagttgctgcagccccaggctgagacagggtctggaacagaat

SEQ ID NO: 32719 - DNA, 122 bp, Homo sapiens
ttatctgctgatatctccaaagcaagttatatggtcaagtccaaggtcaagaagcagggacgtacattccatataccatgaagccaaagcatgtcacacagtcaaactcaacatcaataggt

SEQ ID NO: 32720 - DNA, 122 bp, Homo sapiens
gttcccagaattcaggcttctaagatcattggcagaaacgagatcccccaaatcattacgcgccattgaaaaaataaaaatactcacagtttgtaagtttaaaaataaatggcagggtgggt

SEQ ID NO: 32721 - DNA, 122 bp, Homo sapiens
agactgagacacgatcgccatgaatggagacctctggaaaagctcaggagccgaggcccacggggcccagcagaggcctgaggggagaccctgggcgggggctgaatcactgcctcccgaca

SEQ ID NO: 32722 - DNA, 122 bp, Homo sapiens
tatgtgattgatcctctttaaataaatttggctagctaacaaatagctttcccttgccaacgttttctcaatatggtctccagactctttatggttttaaaaaaattaccaaataaaattca

SEQ ID NO: 32723 - DNA, 122 bp, Homo sapiens
agccccccgcccggccagccgccccgtccgggagggaggtgggggggtcagccccccgcccggtcagccaccccgtctgggaggtgaggggcacctccctccggccacccctactgggaagt

SEQ ID NO: 32724 - DNA, 122 bp, Homo sapiens
attccgccaagctgcaaggtcagcctgcagctgctgcccgcctggaaccccagatgccgccgagagaatggcagcaacaggatggagcgaagcaattatagctcaactgggggctgctgggg

SEQ ID NO: 32725 - DNA, 122 bp, Homo sapiens
agtcccgcgcctctaaagcccgcctttcgtgacaaataaaggtcgtagccgcagagtcaacgggcggagctaaagtggtcgtgattcatgctgtcgcgggaaccccgaaggtggggccccac

SEQ ID NO: 32726 - DNA, 122 bp, Homo sapiens
ggatctggccccagtccaagcgccttctccatcgcatgcaatcagttacagttataaaatcgatggagggcagattctctctaagcctgacgctaagtcccgaagcagggggccagggcctt

SEQ ID NO: 32727 - DNA, 122 bp, Homo sapiens
tccagcctcccctcaggctttccagtcaccagggacactcggagccacagcctagagccccgtgttccctggcctgtgcgtctgcccccttctgagatgcagccagaagctctgtgcctgct

SEQ ID NO: 32728 - DNA, 122 bp, Homo sapiens
caggatcttttgcagaagagactggggaggtggggggagagaagagagtggcggcagaggcgaggatcaaaagagcagggggtcctgtccccactgagaactggagaagggcggctggctcg

SEQ ID NO: 32729 - DNA, 122 bp, Homo sapiens
ctcctccacatggtctagagcttttatgaaccaaatgaacctgcgcatacacaacgcatacgtgagttaccacaaagccattttggaagtcgaaggaatacaaatataaacagcttagtcat

SEQ ID NO: 32730 - DNA, 122 bp, Homo sapiens
cccgagccctcctgactctctcgccaatgcccagaggcgccgcagcgattccagggaggccgcgctctcgccccaaggcaaccagaagcccacgtgccaggagaggcatcggaaccaacaac

SEQ ID NO: 32731 - DNA, 122 bp, Homo sapiens
catatatatatcgcggggcgcagactcgcgctccggcagtggtgctgggagtgtcgtggacgccgtgccgttactcgtagtcaggcggcggcgcaggcggcggcggcggcatagcgcacagc

SEQ ID NO: 32732 - DNA, 122 bp, Homo sapiens
cgtcgtccaggtagagcagcagcgcgcgcgtggcgttggtgcgcaggctgaagctgagctcgccgctgctcgccgcgcccgcccagcgcgcgtagcgagcccactgcccggggccgccgccg

SEQ ID NO: 32733 - DNA, 122 bp, Homo sapiens
atttcaaattaatattaccttaaaagatatttccacttcttgggcgggcatggtggctcacgcctgtagtttgagaccagcctgaccaacatggtgaaaccccgtccctactaaaaatacaa

SEQ ID NO: 32734 - DNA, 122 bp, Homo sapiens
gaggcagccctgtatgcagcctgcgacgaggtggagtctgagctaaatgaggcggcctcccgctttggcctgggctccccgctgccctcgccccgggcctcccctcggccatggacccccga

SEQ ID NO: 32735 - DNA, 122 bp, Homo sapiens
tacccagagaccattaacgcctggatgaaggtcagaaagcacatgcacaccaggaagcaacgggaatccgtgaggaccacgtagaggcaccttctctcctggagcatggccaaggcggagga

SEQ ID NO: 32736 - DNA, 122 bp, Homo sapiens
ttatgagcagaaactgcaatatgctcttacaatattgccaactgcagaaacttcctactacgttaatcacaaaaacaataatttcacaatcacgttgtgcttaggagccagaggaatgataa

SEQ ID NO: 32737 - DNA, 122 bp, Homo sapiens
gcctcctgcaggggcctgtgtgtcgccgtgccctgcatggcggggtagaagcggttacagcggcgaccgccctttgtttttttcttgttgatttgcttaagttccttgtagatcgtgtatct

SEQ ID NO: 32738 - DNA, 122 bp, Homo sapiens
gcggcgcttgcaggccagctggagttccgggtgggcgtggccttgttgggccctgcactccgagcagccggccggccctgccggccccgggcaatgaggggcttagcacccgggccagcggc

SEQ ID NO: 32739 - DNA, 122 bp, Homo sapiens
tttttaaacaacagcctcacctctggagactccctggctgggtgtagccccaccgcagggcgggtctcaggaatctggcagccgtcacacccatctgtcgtcactgcacccccacctcccag

SEQ ID NO: 32740 - DNA, 122 bp, Homo sapiens
gggttcgcgccttcctcttcctcctggcgcgagcgggttcctgatggaagggtgggtttgcgcgctcctcgcgcgagcgggttcctgatggaagggtgggttcgcgccctcctcgcgctagt

SEQ ID NO: 32741 - DNA, 122 bp, Homo sapiens
gaggctcgttctgagcaggaaagcaccacccgtagcctgctgttctacgcctgctcaggacgatgtgaaaagcatcgcaaagatgtgcagcctctgtggcaaaatgctattcccattgctat

SEQ ID NO: 32742 - DNA, 122 bp, Homo sapiens
gaggcgagcaccgccccaccgcgcacgctgcggttgccccggcagccgcgccctgcgtggcggaagctcacaatcagcccggtccctccggcttccaccccgccccctgcgctcacctgccc

SEQ ID NO: 32743 - DNA, 122 bp, Homo sapiens
gccacgtgcacaccttgcctccagctcaacagttaaccaaaccgcatcaaaatcattgaccgtccctcccccgtgacgctgtgcgctccctgaagggacagactgtgcctcttcttcacagt

SEQ ID NO: 32744 - DNA, 122 bp, Homo sapiens
ccattctggtcgtccttggccagcaggtccatgaggtaggcgatgtagctggtggccaggcgcagggtcttgattttggagagtttggtgtcggcgggtacgttggggatgcactcgcgcag

SEQ ID NO: 32745 - DNA, 122 bp, Homo sapiens
ggtgggcgcgggtggcgctggggcgaccccaaatccaggccaggagcccaaatcaggccacgaccccaaatccaggccaggacctcaaatccaggctaggaccccaaatccaacctgcaacc

SEQ ID NO: 32746 - DNA, 122 bp, Homo sapiens
ctgggcgcggcgcctcggggttgtctgtgggcgtcgtggctgactcaactttgcgagtgccgcgagagcgcaggaaaggcactggggtctcaggggccgcagcgaagccctggctgtggacc

SEQ ID NO: 32747 - DNA, 122 bp, Homo sapiens
aaaaatatggctcagtgaatcatttttgtcacttaagaatgaaatattaaaccagaaccccgatgtatagatttcaaaatgtttaacctttgttttaatttcttgattgtgtttaattaaag

SEQ ID NO: 32748 - DNA, 122 bp, Homo sapiens
acaacctgcgcttctgcgcaatcagcggctcctgagcccgggtctccggcaccacctggtcgctggattcccaccctacaggagcacagctagtacactgaacagtctggaaggtgttggca

SEQ ID NO: 32749 - DNA, 122 bp, Homo sapiens
cttgtaactagttcatccgtgtgcttgcatcgcactgctcataagttttcaaatatgggacggagtgctcaactctcgaagacatcattttcattacccgtttcccaaataaaatattaagg

SEQ ID NO: 32750 - DNA, 122 bp, Homo sapiens
gctagggaagcacgcccgacccccgcggtccccgcgctccaggattcggcagactgcgcgcgtcctgcctcccgcggatcgcactgggtcccaacagggttcccagctccaggctgcgccca

SEQ ID NO: 32751 - DNA, 122 bp, Homo sapiens
gggagggactgggggatgccgcctggggcgggagacggctgcctggcgaggccaacagtccggaaacctctggcctcacaaatggcggaactggggacagagtggggcaggggtgaagggtg

SEQ ID NO: 32752 - DNA, 122 bp, Homo sapiens
gaggcctggggcctgcccttaccttgcctcgcttcttcccagaccctccaaagttgacctcgcccctgtgcaagcccagctcccgccggtcttcagcatccccggggcttccgggacggggg

SEQ ID NO: 32753 - DNA, 122 bp, Homo sapiens
caagatcacctgcgggatcacaggtgaggcgggcaaggaggatggctgggagagggaaagcgaatttgtcctggacacaccgagtcctgatagacattcccagtgtcattataatcccctgt

SEQ ID NO: 32754 - DNA, 122 bp, Homo sapiens
catcatagataccccttagggctaggtgagtggaaggtgaccatacactgctacctggtgcgtctgagaccacgatgagcggtgctccaggtcttccagcttcctctctctccttttttttc

SEQ ID NO: 32755 - DNA, 122 bp, Homo sapiens
cagtggaggcaacgctgggaagcccagaacctaccataatagtaagggtagattcccatccgattctggtttaccctggataaggaatttatctttctggactttcactgatgtattcatca

SEQ ID NO: 32756 - DNA, 122 bp, Homo sapiens
aaaaattgtgaaaaccacctaaacatctcatccatttttttcccctctaatctgcagaaccgcaaccagagaggtgcgcgggtctgatgtgtgtttggggaaggggtggggaggggagagag

SEQ ID NO: 32757 - DNA, 122 bp, Homo sapiens
aaacacgattttctgtcctctgcggctgagccctagcgtcccctcttctctaaggcctttcgcctagttccagcctggatacgcttccatagcaaagggttgcccttggctacaggaggacg

SEQ ID NO: 32758 - DNA, 122 bp, Homo sapiens
cctgccttctccatgctgaatgactcggatgatgatgtgatttatgggtaagtccctgtccgttagaaggccggcacaccttgggcatcccggcacggccttgcatgtttctgaatgggtta

SEQ ID NO: 32759 - DNA, 122 bp, Homo sapiens
aattattccacttacctccccacacacctaagatgcccgccctgactactgtccacagttcgggccatgggtagttggtgatggaaggacacctctgataatattatgccaaatgcgccctt

SEQ ID NO: 32760 - DNA, 122 bp, Homo sapiens
ggctgtagtccacaaaaagcaacaaaaaccccataattataaatgttcctgttcttgggtcgagatggttgttgatggatattgatcacacaaagaaatgtgggccgggggcggtggctcac

SEQ ID NO: 32761 - DNA, 122 bp, Homo sapiens
attttttacttttaaatttttgtacagactgaagtatcactatgttgcctgggctgttctcgaactcctgggctcaagcagtccttccatattggcctcccaaagtgttgggattacaggca

SEQ ID NO: 32762 - DNA, 122 bp, Homo sapiens
acaacacagcacgtctaacgccagggagccgggcgcccggggaactactgagccgcgccgcgccgggctccgccccccaggccgctcgccattggtccattagaatgggtaagggcggtgcc

SEQ ID NO: 32763 - DNA, 122 bp, Homo sapiens
aagcttaacatccagtctgtggctcaatagaaactgtgaagaatcatcttctagaataggcgacttgattagctaatttctaaattatctgacagttgatttcctgcattatcttcactcta

SEQ ID NO: 32764 - DNA, 122 bp, Homo sapiens
tttctgcaagaccttgagcaggtgatgtcatgtttcctactcatattctcatctttaacacggggaattaaaaataaggctggaattaccagagtctatggtgctctgcataatcagaaccc

SEQ ID NO: 32765 - DNA, 122 bp, Homo sapiens
ctcgtgacctaaacatctcccaaaaggccccacctgcccacactgttgcattggagattacgttttcaacataagaattgagggggacacactgagaccgttaacacccattaaacacaaat

SEQ ID NO: 32766 - DNA, 122 bp, Homo sapiens
ctcaaagtcacacagctcacgcgggagccgcgccgctgcccacctgttcttttaactcaccgcatgtggtacaggagcccacaaactggaaaattacctacagggctaaaatacagggaaga

SEQ ID NO: 32767 - DNA, 122 bp, Homo sapiens
aggccgggaccctccctccccttccgtccactcccttccccaccgcctccggtcccctcccggtctccgccaccccgcttcggggcccccgccccccagccgggcagccaatcggagctggg

SEQ ID NO: 32768 - DNA, 122 bp, Homo sapiens
tcttcctgctcctggctccttccgacgagtttggtttgaacttttgaatccgccaatcagcgccgcgcgcccccactccgcgggtgcggccgggcgcaggccagggctcgaaggtggggccg

SEQ ID NO: 32769 - DNA, 122 bp, Homo sapiens
tccgctgtgagggctcctccatctcctcccaccccgtgacctgctcgacgcgcaacagcccgagttgtctttaacttgctgcggcagcctctttgtcccgacccagggtcgggggcacctct

SEQ ID NO: 32770 - DNA, 122 bp, Homo sapiens
gccaccgcgcccagcctgtgacacactttaaatgaattcagggttgactcatacacagcacgcctggtaataacattgaaaacaaagtctcctgcccaaattctaacagttaccaccacaat

SEQ ID NO: 32771 - DNA, 122 bp, Homo sapiens
ggagcctacagcccggatgggacgactgaggccctcccgctggcgagctggccgagggctcgtccctctccagctaaagcgccagcttacgatacagccaaactgccggctctcatcggctg

SEQ ID NO: 32772 - DNA, 122 bp, Homo sapiens
gaacctgtgtccctggatgacacatctttagaaaatactaccatttaaagtgacagtgtgcgatacataaggctaaaagcatttgcctataaccagtgtttatcaaggatgctagtgtaggc

SEQ ID NO: 32773 - DNA, 122 bp, Homo sapiens
cttttgatgaacaaactattttccactcttgtagagtgaaatagtgccttgcagaggcagcgtgagtgccagcagcagagatgtatccagtctgttacccaaacgggaagttagctctgata

SEQ ID NO: 32774 - DNA, 122 bp, Homo sapiens
actcccaaccttagggtccgccaccacgggtaggtgggcagtgtcagcgcccgaacttggcgatacccttgcatgaagtcagcctcgcgacatctaagcgggcagggaaacaaaggcagtgt

SEQ ID NO: 32775 - DNA, 122 bp, Homo sapiens
ctcgctgctggcctggtcagggcctgtggctttggggcctgaccacggtgaggccacgcccgcctcggtctacagtgcgctggagagtggtcctgtggcgtggcccccaagcgcctcttaaa

SEQ ID NO: 32776 - DNA, 122 bp, Homo sapiens
agatggcaggttgtccgtcttgtcttaaggctgaagagcacccactgggtctatgcaccacgctttcctgcccgctcgtccctgggggacatgtgcttccatgtcttggctcctgtgaacaa

SEQ ID NO: 32777 - DNA, 122 bp, Homo sapiens
ctcttttttttttctaaacctcttcctagcagtctaaattagggccattgaatgaattgccgggttgtgtgtgtgtgtgttttttttttttcctcacttggcacaatgcacaagaataaatg

SEQ ID NO: 32778 - DNA, 122 bp, Homo sapiens
cgcggtcctagaggggccgctggctgggacgcttcgctcggcgcgcgcaggtggagccagcgagaggctctgaggctgccagagtggttgtgtctgttcctccggtaaggggtgattcgccg

SEQ ID NO: 32779 - DNA, 122 bp, Homo sapiens
ccttgagtcgtcatttaattaacagacggtaatcggttatggtgggaattggttttagcccgaacaatctaactttgagcagagagtgctattttgtgttggtcagaatgtaatccccttag

SEQ ID NO: 32780 - DNA, 122 bp, Homo sapiens
gcactcacaaaacagcctggaggggcgggagaaagtggagccagggagcgcgtgtatgtgcgtgcacatttgcccacatgcagaacaccccagggcactcagcaccaactctccatgggcat

SEQ ID NO: 32781 - DNA, 122 bp, Homo sapiens
caacccctgagaagcttactccccagacaccatctgtcagggcactcaaagtttagcctacgaccttccagacgcagaggccggaggcagaggctggagctcagagggtcacctgctcccac

SEQ ID NO: 32782 - DNA, 122 bp, Homo sapiens
cggccgactgcgctgcgagtgaagaactccccgtttcctagatgccagctcctgagctcacgagcacgtccagagcggaggacactcgggacaccggggtccagctccggaaacggaaaatt

SEQ ID NO: 32783 - DNA, 122 bp, Homo sapiens
aaatgtgcatcagtccttcggtagcctccaaagcgccccactgcaccccatctctcgctgcggcgcgccgccaccaactcacctggcacccccaacagccccggcgcccggccgcttcctac

SEQ ID NO: 32784 - DNA, 122 bp, Homo sapiens
cccaacagcatgctgtctgcagcaaatctgttgctggggccgactcccaaacggggctgtcgaggcccggttggctttcagaggcgtatccatgggagtaggtgtcatgtatcaaataggag

SEQ ID NO: 32785 - DNA, 122 bp, Homo sapiens
cggcgctagggtccctccctcctcccggctctccgcaggcgccctcccctcgccgggggccgcgagttgcatttggtaaaacccagccccggaatatatagatcgttggagcgcaatgaagt

SEQ ID NO: 32786 - DNA, 122 bp, Homo sapiens
ctgctccactccccggagctgcagactgagtcgccaggtttctgtgccttcaaagccctgcgcgacggccacaccaaacacccaaaccttgggcagggaccaaacggtcacttccccgccct

SEQ ID NO: 32787 - DNA, 122 bp, Homo sapiens
agcacagcagagcagaagaaccagggatgaatgtagaccagttgttatggagatgtccgtcgctctgaggagcgctagtgccctgggaagtccccagacgcatttcaggtttcgtcgttttg

SEQ ID NO: 32788 - DNA, 122 bp, Homo sapiens
cccgagggctcgcaacggctgccgtgaggaggtggggggtccgcgggaagaggtatctggcgctcccggaacctgggaatcagaaagagagaacacaatactaaaaacacgaagcctaaaaa

SEQ ID NO: 32789 - DNA, 122 bp, Homo sapiens
acaggggcggggccgcggggtgtccggggcggagcaggactaagtggggcggcggaagggcgcaaggaggagctcttttgtttccagcgccttgcgtctcagtgcgcctgtttaaggatagc

SEQ ID NO: 32790 - DNA, 122 bp, Homo sapiens
tgtctgtattgatcaaatcaaccccagagaaactttcctagggccagagagcatctcaaccgcgaaagtccgtttgcggcctccttctccacttcaggcctgcaaagcggctgacggcattc

SEQ ID NO: 32791 - DNA, 122 bp, Homo sapiens
agagttccacagttctagtctggaaaggaccaaacatttcttaaaagctaagtatgttgccggaaaaaaaagggagcagagctttccccaggaagcttggctctggtttagatttttcagga

SEQ ID NO: 32792 - DNA, 122 bp, Homo sapiens
agaagaggcgggaggtcggacacgatcagtactggacacagggcaccgtggtcggatgggcgacggtttcaagtgattctcctgcctcagcctccctggtggctgggactccaggcgcccgc

SEQ ID NO: 32793 - DNA, 122 bp, Homo sapiens
ttgaggtttgagacaaggttccttatccctgtgaattaaagacattgaatgaatatacctcgagccccggccaacttgcagaaggagatccttcaactctgcttctttaaagtaactcgtga

SEQ ID NO: 32794 - DNA, 122 bp, Homo sapiens
ttcaatcgtttctttggaaggcagtggatttttctcttgcgtctctgtcttcttcagtttcggcttatcgaatttctcgatctcagccatatcgggtttgtcagacatggttgcggaggaaa

SEQ ID NO: 32795 - DNA, 122 bp, Homo sapiens
catcacagtggatatctgtttatcccaaggctttcaaagtcatttagaccttcaggggggcgggggggtggggtggctggaagataaaaacgaggtaagttggagaggtagcagaaacacaa

SEQ ID NO: 32796 - DNA, 122 bp, Homo sapiens
ccactttatttccaggcctctggtcttcagccttcttcatttaatgacagttctctttctcggccataggtaggcctccgccttgcgcgctcctcggcccccgccgccgcccactccctggg

SEQ ID NO: 32797 - DNA, 122 bp, Homo sapiens
tgagggcactggcctagttcccgacttgtttctcaggtgaggttctttgctccagtcctgcgggagcagggaatggggtgggggtgggggttgtaaccggggtagagcagatccttggactt

SEQ ID NO: 32798 - DNA, 122 bp, Homo sapiens
cgaccttccattaatcacctcgcttcctggccaggcaaccaagaaatgtagcaggatgagcggcagacaaaacccctcagacacctggttaaagaaagaagacactttattccaccaggagc

SEQ ID NO: 32799 - DNA, 122 bp, Homo sapiens
aaaggccgtgcccaattaccctaacataagcagaaacacaccaactgacatagctgctcccgcccaccattcacaccccacgaccccaccagttactaatttcatctgcagtcagacaggtc

SEQ ID NO: 32800 - DNA, 122 bp, Homo sapiens
gcccagccccattagcaggcagctcactcggccgcctgcacacagccagctcctccagcacgacccaaactccctgtgctgactggctagaacagggtaggggcccaaggcaggatgtggcc

SEQ ID NO: 32801 - DNA, 122 bp, Homo sapiens
gtctggggagattctctgtgtctgtttcaggacaccatccagcagctggaaaatgagcttcggggcacaaagtgggaaatggctcgtcatttgcgcgaataccaggacctcctcaacgtcaa

SEQ ID NO: 32802 - DNA, 122 bp, Homo sapiens
atccccacacacctccccacataaagtgggcagttgcagacaggctgtgccccagagcctcgagacctccctgggcactaactcatgtattcatccctattggagtctcagtttcagacagg

SEQ ID NO: 32803 - DNA, 122 bp, Homo sapiens
aagagaattggttaaacaaaggaaatgacaatcagttcaggcccttactgtgattgggcacgaatgttctcagagctgccatagatattttaatcaggatgtccttttcacttgaatgagag

SEQ ID NO: 32804 - DNA, 122 bp, Homo sapiens
cgaggggaatttcaaaatttatgccttcttcaccttctggagaaggcaagatccggcaggcgacgctgattagctgggggtctccgatgcgaccccggactcggagcaggaaatcctgggtg

SEQ ID NO: 32805 - DNA, 122 bp, Homo sapiens
cttgcttcctctcttaccatgggatctttgcacacactggctcccctttgcctttctccacgggtagaagcatcctgaggtcctcaccagcagccaagcaattgctggtgccatgcttctta

SEQ ID NO: 32806 - DNA, 122 bp, Homo sapiens
aaacacatcccaaacactcatagtgttgaaccatttagcatgtggttgctttgtatacttcgtgaaattgtgtccaatctctgctagccatagataagataaatcctggggctctaaagact

SEQ ID NO: 32807 - DNA, 122 bp, Homo sapiens
agtctgtgctctcatctggaccagccaagacctcattactgctatgaagtccatctaagccggcagcaacagttgcagccagcaccaagtaagggtttgctgttgctgagcctagtttattt

SEQ ID NO: 32808 - DNA, 122 bp, Homo sapiens
cagccctgcaaaagtctacaaatcccatgggtgggccaaactttgatgacttgacctagtcggccccaatttatcataataaaatgaaaataatataatagcttccacacagtgagtgctta

SEQ ID NO: 32809 - DNA, 122 bp, Homo sapiens
cttaataaaacagactgtttcctcatctcctttatccatatgaggattttattccctgtccgtgtgtgacctgtgcacatattagatcttaaactggcttgccctgcctgacataggtaatt

SEQ ID NO: 32810 - DNA, 122 bp, Homo sapiens
ggaatgcacgccccatccaggggcgtagagcagaggctcacgggaagcaggtcacaactgcgaacaccctggaactactagaaggccatgaagcgaagggcgaggtgcctggacagcaaaaa

SEQ ID NO: 32811 - DNA, 122 bp, Homo sapiens
cctcaagtgatcctctcgcccgggtcggcgttactattctagtccaacctcctacttacccggtaaacccacaaggctccgcccctttgccgaagctggccccgcctatgccctcttccacg

SEQ ID NO: 32812 - DNA, 122 bp, Homo sapiens
ggcgggctatacatagccagtcaaagcttcttacaagagaaacctctttcacaccctccacgggtcccacccacaggccacaggactcactgtaaatcccttggacgttgtctcacccggga

SEQ ID NO: 32813 - DNA, 122 bp, Homo sapiens
gctggctcaggagtgaagctgcagaacctcaaggtgagtgttacagctcctaaggcagcgcgtctggagttgttagttcctcccggtgggctcctggtctcgctggcttcaggagtgaagct

SEQ ID NO: 32814 - DNA, 122 bp, Homo sapiens
cagggaccaaaggtctctggcacccatttatttatcagtttccttctctgaggctcatttcgccagctcctctgggggtgacaggcaagtgagacgtgctcagagctccgatgccaaggcca

SEQ ID NO: 32815 - DNA, 122 bp, Homo sapiens
acaggagcccccacttaggtgaacatttcggacggggccccggcggttcagacccggaggcggctcctcccggaggcagatcctcccggcgtcggccttcggtcctccccgccaaagccctc

SEQ ID NO: 32816 - DNA, 122 bp, Homo sapiens
aattttttagagttggggtctcactcttgtcaccaaggctggatcgcagtggtgagatcacggctcactgcagcctcaaattcctgggctcaagctatccttctgcctcaacctcctgagga

SEQ ID NO: 32817 - DNA, 122 bp, Homo sapiens
actttccacaacccctgcccactcaatgatgaggcaagaaggcatgcttcctccaagactcgggactggggtggaaagcaagactttgccttgaaagctcagaagctatagtctgaacccag

SEQ ID NO: 32818 - DNA, 122 bp, Homo sapiens
agcaggagcagcaagagcccggttctggagtgggagtagaaggtacaggcattgctgcagcggcaggacaggagcccattgctgacagagtgcctggcctcaaattacactgtatcagagct

SEQ ID NO: 32819 - DNA, 122 bp, Homo sapiens
ggctctaggctgcaggttcaccagaagcagcagctgcaggggtaagcccacacccccttccgcccgcccgcccgcctcgcgcgcaccgcccgcggagggacctgcggggtcagggccactcg

SEQ ID NO: 32820 - DNA, 122 bp, Homo sapiens
tggctgtggtttcgctggatagtaggtagggacagtgggaatctcgttcatccattcatgcgcgtcactaattagatgacgaggcatttggctaccttaagagagtcatagttactcccacc

SEQ ID NO: 32821 - DNA, 122 bp, Homo sapiens
ccgcctgagtctcctggaggagtacggctgctgcaaggagctggccagccggctccgctacgcccgcactatggtggacaagctgctgagctcacgctcggccagcaaccgtctcaaggcct

SEQ ID NO: 32822 - DNA, 122 bp, Homo sapiens
tcttgtcgcccacccccggggctctgggagggggaggcatggactgttcctcatttgcctcggatttctcaattcgcattctgccccaggcacgtggaaggtaacactgcaatgggtctctt

SEQ ID NO: 32823 - DNA, 122 bp, Homo sapiens
tgtctttggccctcacagtgagattatacacttgcttcttctcaaagtccaactgctggacgatcctaactgctccactgagtttatccacatcgaagtttccttctccgtggtccagaagg

SEQ ID NO: 32824 - DNA, 122 bp, Homo sapiens
cagtcccaagcccgagggtcttcagccttcgggaacaaccctctgcgctttttccaggagcgaataaggttgatttttgtgtccgtggagcagggtcaaggaggcgcctttgccaatttcag

SEQ ID NO: 32825 - DNA, 122 bp, Homo sapiens
cagagaggcgtccctgcaatgattaaacaccaagggaaggttgccttcccagtccgtgaccggcgccggagttttgggttcacggataaaacatgtctcttttgtctctaccagaaaatgaa

SEQ ID NO: 32826 - DNA, 122 bp, Homo sapiens
ggggtcacggcggcggtcagagggtaaaggtcttgctcccagcagcctccgcggtggatacgtcgccatcttggatccgcgggacaagaaaattcatgcggtgagtttttggtaaattttcg

SEQ ID NO: 32827 - DNA, 122 bp, Homo sapiens
gggtgaatcagacacatagcccgatgtggctcccatgaatgtcctatccctgatgacccccgtgaaccctgcggcgcctggcttgcgggacccgggacgtttccgcgggcgaaccccagctg

SEQ ID NO: 32828 - DNA, 122 bp, Homo sapiens
gtgcggggtgaagggagggtcggtcctgctttgctgaggacggagcggcctgggaaagaacggcctgtcttcagggctcatcctcgcctcgctctgtctgcccctgagggtctgtccgccac

SEQ ID NO: 32829 - DNA, 122 bp, Homo sapiens
cgagggaaccgccgggccgggtcctcgcgcggggaagcggttccgaaggctcgcggggagcggctagccctgagtccctgcatgtgcggggctgaagaaggaagccagaagcctcctagcct

SEQ ID NO: 32830 - DNA, 122 bp, Homo sapiens
actggaatgtgaattcactacttgcctttcccccttcttttgaaaaagcacttcccaggacgtcccttctaagaaatggctctagctatttaatttgctctctcagattgggaactaagagg

SEQ ID NO: 32831 - DNA, 122 bp, Homo sapiens
ttgagatagatctcgcctgtcttaaagctgccatttgctcattctacccactctggctgccgttgtcctgtcctgcttctgcgccagagtgtttaataagcactcccttcctgctgtgttat

SEQ ID NO: 32832 - DNA, 122 bp, Homo sapiens
ggaaagtagaagccttggttacaggtcctaatgttaggtgattcctggagaaatagcctccgcggaggcagaagccgctggggccccgcccccaatgagcccgcccccgccctctcattggc

SEQ ID NO: 32833 - DNA, 122 bp, Homo sapiens
ttggattgaagcatcctgggtgtcccacggtggaattcatagacattagagagtgggtgacgggctaggaaaggctgcatagactccaattaacacagttcattgccagggagactaaaagg

SEQ ID NO: 32834 - DNA, 122 bp, Homo sapiens
ctcccagttttgtggcttctcatcctttcgtgtctcagcctctggatacctccctacccacgcccacctgcccctgcacccgggcgtcacggcagtctgtgcacttggaaccatgatgccac

SEQ ID NO: 32835 - DNA, 122 bp, Homo sapiens
aaagtggagagtccagccgcttctcagggccacggagcctcccagtcagggattctctcccgttacataactaaggcctagggccctgcttctgcgattagtcctctggaaggagacggacg

SEQ ID NO: 32836 - DNA, 122 bp, Homo sapiens
tctcacacacaaacgctgcccaggattacccgccagctcacgccgcgcagtgcgcttttccgctcctcgcgccccaccaccaacattgttctctcaggactcctgggtcccaggggccggaa

SEQ ID NO: 32837 - DNA, 122 bp, Homo sapiens
caaatccagagtaatccagtttctaccataaagggcccacaaaaagtgttctgaaacatccggtgtcatccaagtccaaaattggacagcttttttttcagttcttcctgtaacatttggca

SEQ ID NO: 32838 - DNA, 122 bp, Homo sapiens
cattcattcagcagtattagtcaatgtctcttgtatgcctggcacctgctagatggtccccgagtttaccattagtggaaaagacatttaagaaattcaccaagggctctatgagaggccat

SEQ ID NO: 32839 - DNA, 122 bp, Homo sapiens
gtatggtgctcacagcagcagcatgcaaagagaaagatggctggctttaggaagtaaaaacgagacaatatcttaagatgatggagcaaagccaggtgactgaatgaatgatgatggtgcca

SEQ ID NO: 32840 - DNA, 122 bp, Homo sapiens
tgcagattaccggccccccactcccccgcccaccgtgcctggcccctccggatgcactcacgttctgataaggccccaccagaaagcggtcgtgcacgtagcgctccaccaggctagtcttg

SEQ ID NO: 32841 - DNA, 122 bp, Homo sapiens
atgcctgtagtctcagctattctggatgctgaggtatgagaatcgcttgaaccccagaggcggaggttgcagtgagctgagatcacatcactgtactccagcctggggaacagagcaaaact

SEQ ID NO: 32842 - DNA, 122 bp, Homo sapiens
ctctgtcctctggagccttgagaatattcgcttttagagacagataaatggagaatatcccgggcacaccaccaagccctgccaggagctgaagccagggcttaaagcatcatgtgtgaagg

SEQ ID NO: 32843 - DNA, 122 bp, Homo sapiens
gacggagacggctggcgtggggaactgagactgcacccctggaggccgctctggaagcctcgagggcccagacttgaaggaaggagttcaagctgagaggggctggggacaggcaggcgcca

SEQ ID NO: 32844 - DNA, 122 bp, Homo sapiens
ggagaagccctagaagtgatacaggctctggccgggggacccgatgtgctcgtgtcgcggcgtggggcttggtgaggaaccaccggagtgctcttgcatttttcatgacaaagaccacacag

SEQ ID NO: 32845 - DNA, 122 bp, Homo sapiens
cggctgggaagtcctgccgtgaatgcggagcaagtttgcggagacttgctccctgggctgcggctccgtagttgcttcgagcttgtaaatacaagctccgtggacaaagtcccaaatgacat

SEQ ID NO: 32846 - DNA, 122 bp, Homo sapiens
ccgagatgaggaggatcttctaggaggggccccggggccacagaacgagaggggagtgtgcgctgagcccaccttgcaaagacgctctggtccccgaggggcggcaccttcggcctccagcc

SEQ ID NO: 32847 - DNA, 122 bp, Homo sapiens
ccccatggggcagtcctcccacctgaggagcccccgccgacccgcggtgttgggtccacacgtgattcagatgtgctgagtctccccagtgtcctttccggtcttgggagtccacatggcgt

SEQ ID NO: 32848 - DNA, 122 bp, Homo sapiens
ctgaggcccccattggccccctcccaggtatccaagaataaatcacatggtgacagctgccggcatgggtgagtgggacccaggcctattacccggccagagggtttgggggcctctctcct

SEQ ID NO: 32849 - DNA, 122 bp, Homo sapiens
gagcccacaccatgaaggcgttcatgggccgcttgacgtgcggcttgcttttgctggcgccgttgacgcgcacgggcatgggcaccagcgtccagtcgtagccgctgagcacctggctgacg

SEQ ID NO: 32850 - DNA, 122 bp, Homo sapiens
ggtgtgggacgaggtgagtggccagtggcggcggcgctggggctaccagcgcgcccgggacgacaccaaagaatggctgattgaggtgcccggcaatgccgaccccttggaggaccagttcg

SEQ ID NO: 32851 - DNA, 122 bp, Homo sapiens
gacgtgaagagctctgggtaagatgtccttcctcccgggagcggtcgtttgggagtgctccgtgggttaagcaaacgcaagctgtaagtgatgactgtggtcgagggcttccttgactgaga

SEQ ID NO: 32852 - DNA, 122 bp, Homo sapiens
tttcagcctggtgctcccaccttgttagacgtatactgaagactctgggaacatcgggaacgtcagagagctttcagcaggagatctcatctaattgggcaatagaaaactcatactgaaga

SEQ ID NO: 32853 - DNA, 122 bp, Homo sapiens
cagaagtactactatggcaacctgattgctgtgtctaactccttcttggcctatgccattcggggtgagtaaagacagtgaggaggaaggaatgttctgctggatgtcccacagagccagtt

SEQ ID NO: 32854 - DNA, 122 bp, Homo sapiens
agtacagagatgctcgggtccagaaccatggctgggcggctgcagctgcacccggaagtgcgggcttcctgcccctccaacttggtggagggcagcggtgccacctgttcccggtccctgct

SEQ ID NO: 32855 - DNA, 122 bp, Homo sapiens
agggtctgcggcatggagcctgcctggcatggcccaggcagccgccatcctcaccagccccggcccagccttgctctgctagttctggggtagtccagttagcacccccactccccactctg

SEQ ID NO: 32856 - DNA, 122 bp, Homo sapiens
ggggcttcttgctggagtgaagaggactggatctcttcaaggtctctggattttgagtttcgggctctaggtgaaattgaaaaagtccaacttgctcagggggccctggaggctcgtctgag

SEQ ID NO: 32857 - DNA, 122 bp, Homo sapiens
ttaaaccaaagtgtgccctccccgttgggcaggcctgtgtgttggtccaagggttgggagcgcctgagctgtgtgagggtcgctgggaagggtgtttgaggccgtgggcggtgcggagcgtg

SEQ ID NO: 32858 - DNA, 122 bp, Homo sapiens
tgtcagcacgtgcctggatacatgagatggttgaccagagagcacacgctttatttgtgccgtttgtgacctggtccactaaccctcagtatctaatgcccccttggagaacttcctggaag

SEQ ID NO: 32859 - DNA, 122 bp, Homo sapiens
gctaggcacagccccttggctttgcgggcacctcccatagggtcagcatacacagagtcacgggcaacccatggaactgaaggaagatgtcaccgcgctgctaacacagcctcactagtcaa

SEQ ID NO: 32860 - DNA, 122 bp, Homo sapiens
aaggacaagcgggggtctaaacgagagcacgaaccctcagcgtatgacggctccaggctccgggggaaagtcctttagccatccatcccaaaattaagcacgctgggagctggagtcacagc

SEQ ID NO: 32861 - DNA, 122 bp, Homo sapiens
ggaggcgtcactgaggatcgtcgagggccaatcaaaaagaaaacatggaagggaaagagccgagagactcgatctcattcactagaatttggtcctcctgcgcctgccaagattgtctgagt

SEQ ID NO: 32862 - DNA, 122 bp, Homo sapiens
tgattttcttgttcctctcataaagaggagggatctatttctttactctcttgagctaagcgggccttatgacttggcttttaccaatgaaatggaagtgacactgtgggaataggagttcc

SEQ ID NO: 32863 - DNA, 122 bp, Homo sapiens
cacctctcggatctggagcgcattggccttgttctgctccaacttgtagaggatcttcagcgtctccatggcccggatcatggcctgcatggcggtgaaaatgttctggtagacgagcttgg

SEQ ID NO: 32864 - DNA, 122 bp, Homo sapiens
caggccaggcgggggcccagaggggcttcccgggatggtgggcgaggccggggccggggccgcccagggaagagagtggcctgagcccaagccgcaccggagcagcggctggattgaacgcc

SEQ ID NO: 32865 - DNA, 122 bp, Homo sapiens
gccaaagaggagggatcccagctatgaatctggacctttttcctctgcatgcagcttacacgcagctcgcgagctatacggcaatagttggcgaatctgaggaaacctagctggttctttcg

SEQ ID NO: 32866 - DNA, 122 bp, Homo sapiens
agcagtgatccctccgcggccaacctccccagggaaaccagcgattcgcggttcagatagcgaccttcgcccgcaggttcctgctctgccttcagacttcggcttcagtggcacctgctcag

SEQ ID NO: 32867 - DNA, 122 bp, Homo sapiens
accagggacccgtcctcaagcagccaaccaccaccgccccacgccagttcagcctatcgccgtcctccggggcgggatcagaacaacttctccaccaatgagaatcttcttctgctgggcct

SEQ ID NO: 32868 - DNA, 122 bp, Homo sapiens
ccccccacccaaagttcacatgctgaaatcctaactcccaaggtgatgacattggagctgcggccttcagtagataagcaggtcatgggggtgtgaaacctcataaatgggattagcgccct

SEQ ID NO: 32869 - DNA, 122 bp, Homo sapiens
tctgggctcagccctcccaggcctaggccaccgtgccctgagtccctccccaagacttctcggactaagtgggccagactcttgtcaggggagggatcaccaggacctcagattgctggggg

SEQ ID NO: 32870 - DNA, 122 bp, Homo sapiens
agagacagagaatgggggaagggaggtttcgctatgttgcccaggctggtcttgaactcccggcctccagagatcttcccgcagggcctcccaaagcgcggggattgcaggtgcgcgcgggg

SEQ ID NO: 32871 - DNA, 122 bp, Homo sapiens
atgaggatgggaaggtggtaaagtttatgcaaacaatagtgtgagggatgcctctccttccggtcggccctcctccaggaggcgcatgggtggtggtagcaagtgggagtcttgggtgccct

SEQ ID NO: 32872 - DNA, 122 bp, Homo sapiens
ctgcggggaccccaggagcgcagggcggaggagcagcgccacaggaggcgagggcgcaggcggcgcggccgggaaggaacgcgggaggggacagaaggaagaggaagaggaggagagggagg

SEQ ID NO: 32873 - DNA, 122 bp, Homo sapiens
ctcgagctcctgacctcgtgatccacatgcctcgacctcccaaagtgctgagattacaggcgtgagccaccgcgcccggcctaatgggcgttttaacagttcatacagtttggtattattat

SEQ ID NO: 32874 - DNA, 122 bp, Homo sapiens
cggagcgcggcagagggcaggcgcggtgccggcaggaacgcgggggtgtgcagcacgaagcgcctctccaggctgcgggcagggagggagagcgcaccgcgcgaccggccgccacagtctga

SEQ ID NO: 32875 - DNA, 122 bp, Homo sapiens
gaaatgctaatgtgtatttaccaggactttttcttgcgagaggcagatgaaatgtatctccgtttcatgagtaagttcagagaatataagtgacttgtccaaggtcagcaagctaatgagtg

SEQ ID NO: 32876 - DNA, 122 bp, Homo sapiens
ggcagccgtgggcagggaaagcctgcagacagctagctggtctaaggccggcgcaaggagcgggggcaggaaggagaatggggagaatgcgctcagaccaaaagcacagttctcagcctcag

SEQ ID NO: 32877 - DNA, 122 bp, Homo sapiens
cttaaaggcagagggagaaacactccatcttggagccacagccttgcactttgtgcttcacgagggctgcggcacattggccctgggtccatcaggaaaacaaaaggagctctcttcagaga

SEQ ID NO: 32878 - DNA, 122 bp, Homo sapiens
cagggcgacctcaccgcagccccagagtctgtgaggcgccagggagtggagccgtcctgacggggctgcacctccggccacagcagctggagcgtcagcccggctgtccttaagtagcaaga

SEQ ID NO: 32879 - DNA, 122 bp, Homo sapiens
cttctggtcgacaatggagcaagccatctcgcggacgtgcgccaggctgtagtccccggacgagtcctgcagcagcagcaccggctcacggctcaggccgatctgcagatggaacgagatgc

SEQ ID NO: 32880 - DNA, 122 bp, Homo sapiens
gttcgccctggctcgcgcggccgagccgccaggcgcagctctgggccgagggcagcacagcgcccagggacccctaacccccgctgaccgcaaggcgatctccgactccgaacgaacgcctc

SEQ ID NO: 32881 - DNA, 122 bp, Homo sapiens
gaacccgaggcctacggagcagttaccttctacggcaatttcaagggtggatggtgcgagcgccgctggggcagctggcgttctggttcttactccgtgggaaaatggccctgagcccgact

SEQ ID NO: 32882 - DNA, 122 bp, Homo sapiens
cagacacctgggagagccatgagtccccatcccgacacagaggagccggggccagggaggcggaggctggaactggtcaccggtgttcagttcagggcccgccgcggagtccacgtgccagg

SEQ ID NO: 32883 - DNA, 122 bp, Homo sapiens
tcttccttgccagcgtctgcaactgtggggtgcttgggtgggtgaatgagttagggccggcgctggggaaagaaccagcgtctgtagcctggccgcctagccccacctcgcccggcccctcc

SEQ ID NO: 32884 - DNA, 122 bp, Homo sapiens
aaagctcttggttacacaggggagtccacggtggtgcaatgtcggctgaggcatggccagcgcagggcaggagctgggggactggcgcctctgaggacagggagacactcatcggagcagca

SEQ ID NO: 32885 - DNA, 122 bp, Homo sapiens
ggagttataattatccactttgagagcagccccttcccactgaaatgtccctaaagtgggcgccctgcccctcgggcccccgtccgaatctcagggcctcacggaggtggccataccctgcc

SEQ ID NO: 32886 - DNA, 122 bp, Homo sapiens
accctacccttacatcacacccaatgtccaacaaagacagagagtgggacttgacttccacgttcattgaatcccaagcaattactttaagaaccctgaaagaaatcattttgggacattta

SEQ ID NO: 32887 - DNA, 122 bp, Homo sapiens
ggatcgcgtgagcagaaacatggatgatcatggctcactgacagggaggtctgaggattgcgtgagcagaaacacagataatcacagaatcactgagggggccactgtgaggatcgcatgag

SEQ ID NO: 32888 - DNA, 122 bp, Homo sapiens
atcccggatcacgcgcccccgggcgccgccccgcccccgcaccttggcctagcgcggtggcgtcacagtcgcgcagtcctgactacggcctccgggccctttgtccccgctagcggcgctcg

SEQ ID NO: 32889 - DNA, 122 bp, Homo sapiens
tgaggtgcctgccattcagagccgcctctagtggccacacacctcatctgccgtgggccacgcacgctcactgcccgtgacctggcagcttggaaggcagctgcaactgcaccagcccggcc

SEQ ID NO: 32890 - DNA, 122 bp, Homo sapiens
ccagttgccggggttggctgggatgccctcagccaagcagctgcagtgcatggtccactccggcgagatgggctgtgtctgggccttggggaaatggtcaccacttaagaggaagggaagga

SEQ ID NO: 32891 - DNA, 122 bp, Homo sapiens
gtttggagaagctggagggcagatgaggagtggagggaaggcgggtagggggcttgcactcgaaaccacctctgaaggcgttgtcaatacagcaacagcaacgaggacaaacatgccacacg

SEQ ID NO: 32892 - DNA, 122 bp, Homo sapiens
cctgtccgctgtggggatggagagacactaacagaactgggatgggcgatgttggctgaacggatccacctattattagtgcgcggggattggctccttggcgcagcgtacccgaggtggag

SEQ ID NO: 32893 - DNA, 122 bp, Homo sapiens
agcctgccccgccctcttcccgcccctcccaggtccctaaaacccagttccgggacccaccgctgaaggtcctctggtcacctacccaacctagggtgtatgcactcacagacaagggtatt

SEQ ID NO: 32894 - DNA, 122 bp, Homo sapiens
agggcaagacctctcctctgagtgacctacagtctccatcccagctcccccagtagtgaccgccctgcactctgcgcctgccttcctgaggggccctgctcgcctccagtgtctggttttcg

SEQ ID NO: 32895 - DNA, 122 bp, Homo sapiens
gcgagtgccggacacacgcgcagaggatgtgacggactgacggaccaggcgtggacggaccgtgtgtgcacggactgacggacccggtgtggacagactcacggaccgaatgtggtgcggaa

SEQ ID NO: 32896 - DNA, 122 bp, Homo sapiens
atacagaaactctcagtcgtggtagcacagactcatatgattatagtaccatgacatggccggtaacagtgacatgggcaaccgtttctcgaaattgacacagcactccattcacagtgtca

SEQ ID NO: 32897 - DNA, 122 bp, Homo sapiens
acggctgctctatgaacacagcatcactaccagtgaggtggtgcagcttaacacacgccacgtactcatggaaagctgtgtgagaaacccactggtaggttaattgatattttaagtccaat

SEQ ID NO: 32898 - DNA, 122 bp, Homo sapiens
ttagttggatttatccacaagataatggaaacagttctctttgagttgcctctcaggcatcgctggggggattgttctccttggagaattttcactaggaatgacaatgtgacttgatactg

SEQ ID NO: 32899 - DNA, 122 bp, Homo sapiens
ctcgccggccggaggctaccaggagcaggagcagcagcgccgcccgcagtagccggggagcgcgggggacagcggggggcgcggcgcagttcaccgggctcagaaggcaggtcgggcggcgg

SEQ ID NO: 32900 - DNA, 122 bp, Homo sapiens
gaggaggtgggggcacatggtgacccgagtcccacctacagtgctcaacaggaaccggtacggggtggagccactgtggagggcatcagactacgtgccctccctgtcggcaccccagcgcc

SEQ ID NO: 32901 - DNA, 122 bp, Homo sapiens
ccaaacctggggtccctgagatcaaggtccccctgccctcccggaagcttcgaattagttcggaccctttttgagtgaatgcagaggggacctcctccggctgcttctccagcaaagggaac

SEQ ID NO: 32902 - DNA, 122 bp, Homo sapiens
ctagcgtcccaagagcgggatcaggcggctgctagcgaaagacctacaggagcccagactcgaggcccgccaggatgcggagactgagggcgggttcggccgccaggaagcgctcccgcccg

SEQ ID NO: 32903 - DNA, 122 bp, Homo sapiens
aaaaactacagagtaggaacagcctcctaatcatatggaagaagcccagaatagaggcatcggcagcggatccacgagccctgaatgcctgcattcatcaggggagcagctggcgcgttctg

SEQ ID NO: 32904 - DNA, 122 bp, Homo sapiens
cccccttgccttcccctgtcctcacaagccgaaaggcttttccctctcagacctccactccgtgggctccacatcgggctccttcagatttgctcgttctgtcgccccttctctctttccta

SEQ ID NO: 32905 - DNA, 122 bp, Homo sapiens
ctgggcccagaccaccctgcagttcccgcgccaggctggcacggcgcccgcctttcccaccggcctccctggtgccagactgcgggcctccttgggccctagggcttgaaccagcctgcctg

SEQ ID NO: 32906 - DNA, 122 bp, Homo sapiens
ggcggaacccaggcctgcagcgaaggcagtagccccgtggttgaccacagtgggcattgtcgcaggctgcttcagggtgacgtgggcgttgtgacagactccacagctctcagtagctgtgc

SEQ ID NO: 32907 - DNA, 122 bp, Homo sapiens
cagttcgttctaggcactgagaatattgcagggacaggacagacagagtctctgatttcacgaaccttacagtcagttggaagtcaggctggaaaacaaataaacacactaatcacatgaca

SEQ ID NO: 32908 - DNA, 122 bp, Homo sapiens
gagccatcgtggctggctagcaatctgtatttcaacaagccctctggtgagtctgatgtgcgcctgaatttaagaaccactgatcttgacaacacactatgtgttgactggcgtttttgttt

SEQ ID NO: 32909 - DNA, 122 bp, Homo sapiens
ttcagacgttcactgccagtccctacgctcctgctgtagcagacatcactaatggatccccgcagtctttctccctaggagtctggctggcagccactaccaatcgattgaaatggcacaag

SEQ ID NO: 32910 - DNA, 122 bp, Homo sapiens
gcccccggcgacttataaatatttgcgtattcaaatgaggcctggctcccgttgctatggcgcccaggccgcaaccccgcggcggccggaagaacagcctggagtaggagacagcgcctgga

SEQ ID NO: 32911 - DNA, 122 bp, Homo sapiens
gtgggccgtgacggtgagcgtgagctggggtatgcgtagggcacggcctaggggtgagcacgacacaggggcgggccttgggtggacgcagaaggcgtgggatgggaggggagggagtgggt

SEQ ID NO: 32912 - DNA, 122 bp, Homo sapiens
ccaggcatccaggtatcagagggggacaccaaaggccagagcaagctgggaggggatctgcggcatgaccctggaacctcacatcagaaacgacccctctgccaccctcagggaagccagtt

SEQ ID NO: 32913 - DNA, 122 bp, Homo sapiens
tctcccctcttgtgttttagggccacaattagcgttgccatggccacactgctcagttgtcgcagggccgggccctgggcccacaaagctggcatcaggtgactgcctggctgcccccgcga

SEQ ID NO: 32914 - DNA, 122 bp, Homo sapiens
tgagtccctgcattgtcctagcaacttattctgctaagtggcagagctcacttgtgggaccgccaccccgctccagggattgtctgtatttttttgtttgttttttaaagggttggggggta

SEQ ID NO: 32915 - DNA, 122 bp, Homo sapiens
gtgttccagcagggaatatgaggacacaagggtgagcgtgcggctgcccgtcccaccgtgcgtgtgcaggtgtgtctgttcctgcctccgcgccaggtcctggggtgagcacacatggctgc

SEQ ID NO: 32916 - DNA, 122 bp, Homo sapiens
actcagggtctaagctggggggaacgtcagccctggggccctggagcccaagtgggagtgcgggcctggggaagagagagcggcgaggcgctgcaggcccacgcggcggcctcggcctgctc

SEQ ID NO: 32917 - DNA, 122 bp, Homo sapiens
gcagggccagcccagggcagcgtcacgaataggagcttcccaggccgaatcggagctccccgaaggctccatcctcgtaaatcagcctggcctccgcttctcgctggcacttcccgctccgg

SEQ ID NO: 32918 - DNA, 122 bp, Homo sapiens
cagcacaacaccgtgttcagctaaccctggggacaaagcagcgtctggctcgagtggaagcgtccaaacctgcttttcccatctccccccaagtctgttccgtcagagcttctggctgctcc

SEQ ID NO: 32919 - DNA, 122 bp, Homo sapiens
cccgtttctaccaaaaatacaaaaaatttgccaggcgtagtggtgggcgcacctgtagtccgccgccactgcactctagcctgggcaacagagcgagactccatctcaaaaaaaaaaaaaaa

SEQ ID NO: 32920 - DNA, 122 bp, Homo sapiens
tttcttgaaaaagctttcggagaagaccaacaaaagtaactttctagaaaattaccgtttcggaaaaaatagcactagcagaagtctgaggtaaagcttacattatgagaaggagttgggga

SEQ ID NO: 32921 - DNA, 122 bp, Homo sapiens
gggcagacgcaggtctggtagacgtcttggaggccagggaggtgccagtagctggaggagcgccgggagttgaagccccgcgccaactacgcagagaaaactgggcgccagatttcctagag

SEQ ID NO: 32922 - DNA, 122 bp, Homo sapiens
ccccgctgctggtggaaagcctgggtctgaacccacatcttccacagtatgaaggaggctcgatcaattccggaagatgctagacttcttccagaaattccagccccagatcctgcctcttg

SEQ ID NO: 32923 - DNA, 122 bp, Homo sapiens
gccagcttcagcagggcgatgtctgcccccaggaagaagacagagtagttgggtggacgacgatctggctgacattcagcagcccccggcccccgtacagatacacatccctggtgtgaatc

SEQ ID NO: 32924 - DNA, 122 bp, Homo sapiens
cttcaatcactaaaccgctttcacagccctcgaccctgccgcgagatgtccgccgcccaccgtcaggtcaccgcctccctaacgacttcggctgcccgggccctgcccctgaacctcgcacc

SEQ ID NO: 32925 - DNA, 122 bp, Homo sapiens
atgctgggcctggccctgcggggagctgcaagtcgtacccatcggcactccatggagatccgcagtgagtgcctggacccctgtcagcctcccttaccccaccctgcctcaccccagaacct

SEQ ID NO: 32926 - DNA, 122 bp, Homo sapiens
gggctggcggttggcgggaccggctttagaggtgatgcgaccaccctggaccacgtgcagcggggagaaactgggcaccgtggggtggagggagcccccgctttatcctcggccactcccga

SEQ ID NO: 32927 - DNA, 122 bp, Homo sapiens
gcaggacagtgacctaaaggaatatatggaccacacccaccattcagcacatagggcttccgtacaagctctttaggcctctcctctatgtccacctccatggccttcacctgcagagaaca

SEQ ID NO: 32928 - DNA, 122 bp, Homo sapiens
gccaggccgcggccggggaggcgggagcatgcgcaatagggtgtgcgggcctccccgccccgcccccagttcctgtgacgtcagacttccgcgtcccccgcggcgctctcccgcgtcccctt

SEQ ID NO: 32929 - DNA, 122 bp, Homo sapiens
cccttaagttagagagaaaaaggggaccccgtgcagcgatgacagagctgggaaacagcgcgggcaggtgggtccccggctcccggactgcgccctctgatgctcccttccccacaggcgga

SEQ ID NO: 32930 - DNA, 122 bp, Homo sapiens
aattctgacttttgtcagaatttgtgttttctcagtgtgcttctctccgataagatcttacgatatctgctcaattcaacaagttgagaatcagttacatgcaaggcactgtactgtcctca

SEQ ID NO: 32931 - DNA, 122 bp, Homo sapiens
ccgggaagctaccctcctgggctgcgtgggggctccagcccttgcgcccctccccgcaagcggatcagggcgaggcagccccaggcttacaggtgggcaacagcccagagtctgtctcccca

SEQ ID NO: 32932 - DNA, 122 bp, Homo sapiens
agcaagcaagttgcgttgccgaaggaagggcggcgcgcccctgcttaagaagtatctggacgacctgcgacagtgcccatcagcgactccagaggccacaaacgctccccgggaagctgggc

SEQ ID NO: 32933 - DNA, 122 bp, Homo sapiens
gttctgccactctcaatgacatctgctgtaattttggttgcttttgccctgttgatctgccggagtcttgaaattcagctgattggaagtggtttctttgactttcaaggtcattccctatc

SEQ ID NO: 32934 - DNA, 122 bp, Homo sapiens
gcagacacactcccagcagccacacgaaaaaacaacacagaggcagaggagccgcccccacggccccaggcacaggtgtgggctactgaatcagcagtgcccatccctgctcctgcttgcca

SEQ ID NO: 32935 - DNA, 122 bp, Homo sapiens
gaggtaggccgggcaggaaaactaagccagacaccaaaatctaaagctttgctgcagtcgcgaaaatgcgggtgctcagaaactcgcgagcaaacaagacaaagaaaatcaagacgctgtct

SEQ ID NO: 32936 - DNA, 122 bp, Homo sapiens
tgaaggtggaagggacacctgagctgagctatcctgccgttgcccatgatgggaatgccacgaggtcctgagaagccagctttgacctcactgacctgctgacccgaggtcacagcagagct

SEQ ID NO: 32937 - DNA, 122 bp, Homo sapiens
tatgttttattgaaagatattttgttttaactttaccaaattctgtgcagaagtactggacgccatttccattttcccaatgaaggggatcccttttgaggagcagaaagacataaaactct

SEQ ID NO: 32938 - DNA, 122 bp, Homo sapiens
atttccatccactgcacagccatagctgtagccagaaagaaggtaagagccgtgctgtcgcgcataccagttgccatagcggtaactctggctgggctggaactcctgcttcactctaatag

SEQ ID NO: 32939 - DNA, 122 bp, Homo sapiens
gggcctggcgggcgcccctggaacaccgggagagcccgcgagaacccgaggactcagagacgccctggactgtgcccccactggcccccagctgggacgtggacatgcctcccacccaacgc

SEQ ID NO: 32940 - DNA, 122 bp, Homo sapiens
ttctgaaacacggctacagactataactttaaaacacggggcttagctccccctcaataacgacacggccgtcagtatttaccacgttattgaccctctcccagccggcccgcggcaagaag

SEQ ID NO: 32941 - DNA, 122 bp, Homo sapiens
cctccggcgctgggaagtccgggcggcgaggcagcctctcccggggcgttcgggctcctccggctctgccccgatgtcgttattacggccgtttgcagcctccgtgccagggccgggggtgc

SEQ ID NO: 32942 - DNA, 122 bp, Homo sapiens
gcgaggctgcggaaggaaagccttgggtgtcggggctgggcctggcgtcggcccctgggtcgggggggtgggggttgcgccgagacgcctctaggagaagtctcgccgccgccgccaccgcg

SEQ ID NO: 32943 - DNA, 122 bp, Homo sapiens
tggaaagttaggggaggaaaaattcaaaagaaagggtgcccagtaagcaggttataccttcgtgaccctggagtgaagctatgagggaggatgctctgaggctgtacagacctcagaactgt

SEQ ID NO: 32944 - DNA, 122 bp, Homo sapiens
gtcaggctccctttggtgtgtcccggaggccagcctccctggagctccatggcttctcaccggcacctgtgtgaggacgacatcccgcctttgtcccctgagcccacacctgctccccagag

SEQ ID NO: 32945 - DNA, 122 bp, Homo sapiens
acacacacacacaccccaccctgcaaaactcaaatgtgatgtcaccagcccaagtcacagcgctgccgagctgggagctgggactcacagtctactctgagcaggagccagggctccctcct

SEQ ID NO: 32946 - DNA, 122 bp, Homo sapiens
caggaagcaggtgtgccgaggagtctacctcagaacagggttggggcggccacagtggggcgccagggagctgacctcagacagacagggatgggcaggtcactcggtgagctggcgccctg

SEQ ID NO: 32947 - DNA, 122 bp, Homo sapiens
ggggcacagtggagcctcggagaccacgctctgcctaggggcgcggggttgggggggactcgaaacgatctcagtccctggaggtgacggaaccatctgccgacactgacggcccagagtgt

SEQ ID NO: 32948 - DNA, 122 bp, Homo sapiens
actcaccgctcctcctgtggggcctgaaaccaccgtttggctggagacccaggatgtggacggcccccgcctggccaccaggtggcagcattcgcccagccagggggtccagcctccacctg

SEQ ID NO: 32949 - DNA, 122 bp, Homo sapiens
ggctgcaggtcctgagccctgccccgcggggaggcagctaaggcccggcgagaagtggagcgcagcagctgctggcctggctgctaagcccctcactgcccatggcggtggggctggctggc

SEQ ID NO: 32950 - DNA, 122 bp, Homo sapiens
tcctggaaacggcttagggcccgtcagggagggcagttccacgcctgctggagggcaggccgcctgctgcgcgcttctaatccggcccagcttgtctttcccaatgcatacattcatctgct

SEQ ID NO: 32951 - DNA, 122 bp, Homo sapiens
ttccctgttggtttttattatcattcttcccactttcaaaagagggaatggttggccgggcgcggtcttgtatgtgcttggtagttgaatattacatattaagaactttgggctcggctcgg

SEQ ID NO: 32952 - DNA, 122 bp, Homo sapiens
tgtcagcggacccagagttgtttttccaggtgtgggggagggcttcccctgagccttctccgcccactcctgtctgttcattccacagatttttttactaccttccttaagagaaagtatct

SEQ ID NO: 32953 - DNA, 122 bp, Homo sapiens
tacacccagccaatcagaccctctctctggagacttaacggggacagcagaaagggttagcgtgcattcacatagcagcagtgtccaagggtaactgtttagaggtctttggcaccaagact

SEQ ID NO: 32954 - DNA, 122 bp, Homo sapiens
tgctttaatccaaaaatgtacggcaataataattaatccccacctgttgctgttctgtttcggttcaatatttagacacaccaaaataatgacatgcttaaactcttatttgactataaagt

SEQ ID NO: 32955 - DNA, 122 bp, Homo sapiens
gcctggctgaaccgctccaacatcctgtatgccggcaatgaccgctggaccagcgacccgcgggtgcggctgctcatcaacacccccgaggagttctccatcctcatcaccgaggtggggct

SEQ ID NO: 32956 - DNA, 122 bp, Homo sapiens
attcctctgtgatgggggcctttccttcttggcttcctggatggccgccactaagattttcgcatgtcttttggatgccttatcggcggccttttcagttgcctgagctgcccgttttcgct

SEQ ID NO: 32957 - DNA, 122 bp, Homo sapiens
aggggagcctcagcgtggtgggtgcacccgagtggcatggaagcctcggggcagggagagcgtgggagtcccaggactccacgccaggggctaatcttccagagagggacttccaggccagg

SEQ ID NO: 32958 - DNA, 122 bp, Homo sapiens
caagcagcacaggcagtgtgacggcagctttcaactcggaaacgcgtgtctggcagcatgcgtcctgtgtcttaatccaacactggtatgggcaggcgggactcggcccctgctatggacaa

SEQ ID NO: 32959 - DNA, 122 bp, Homo sapiens
ccttcccccacctgtgaggcccagcttcggcatcgtacggggtggttctgggccgggtggcgcatcagggtcccccagtgcctgtgaccaggcccgcccgccccatcttacagcaccactgc

SEQ ID NO: 32960 - DNA, 122 bp, Homo sapiens
atggtgatgtaacgcaaagaggagatctttatatactgacatgggctttccaggacaaagcgtcaggtgaagaatgcctaatacagaacagtgtatatggtgtgctagcttttgtatgagaa

SEQ ID NO: 32961 - DNA, 122 bp, Homo sapiens
tgatggagtgaaccagaggggagtctttacaagtgatttgattgccaaatcctttgccctcggtgagtggtgttgacgacgttgccggatgtggtgctctaccattgagctatacagccgga

SEQ ID NO: 32962 - DNA, 122 bp, Homo sapiens
tccacagcttttaacatttcagcgagaggtgagaaagcatgtcaggaacacaggcccggccgatgaaagtgtctgatgctaacacatgaactgtcttctgctgggcacactaaggggccaca

SEQ ID NO: 32963 - DNA, 122 bp, Homo sapiens
gtaaaaaagaaaaaaaatcctacctgaacaaaaaataattataaaaattagaggttcaagcgtctctgggtgagaaagaaccagtgtaaaattgctggcaccagagatctggttggcaccct

SEQ ID NO: 32964 - DNA, 122 bp, Homo sapiens
tggcatgagggcggagccaggcgcaggaaactgccgttttgattggtttccagtgtggcgcgggggtctcctgggatccgaaagaacctgcctttccgcccggaagtcggcgtcttgagtca

SEQ ID NO: 32965 - DNA, 122 bp, Homo sapiens
ttcgaccccggcgtctgggttagaagctagagtctccgcccgctaagggacccaggcttccggttcccgctgtcccagccaagcggaagacagactgggaggagagtggggccctagagggg

SEQ ID NO: 32966 - DNA, 122 bp, Homo sapiens
cacgataaggcagtagagccacagttaaaatttggcctcagcaagtcccgggttcgaatgcggcttgtgcagcttttgagttgattaccctgtgtctcttgttcagcatctcagagcctgtt

SEQ ID NO: 32967 - DNA, 122 bp, Homo sapiens
aaggagcggggaaaggagagctgccagggagcagctgcaccagccaagagagcctccgggcgagttcctggggcgggttctggctccgactgctgcgctttaggtcattgctccacgcttcc

SEQ ID NO: 32968 - DNA, 122 bp, Homo sapiens
acgcctgtaacctggcccacacctacaagcttggggctccaggctctgaatatctggggacgtgcagtgtcgggtgacttcctcgtcaccacgctgtgttccttctccgagtgcccacctac

SEQ ID NO: 32969 - DNA, 122 bp, Homo sapiens
gactgcccactgggatctccctctaccctcaggtaccctccccctcaacccctacccacccggcacagggagacactgggtcctggcccccctcgcctatgcccatagagtcccctaaactc

SEQ ID NO: 32970 - DNA, 122 bp, Homo sapiens
tccggtcccgccctgtccccggacacgcgcaagccgccctttatttcccagcccagctcccgccagacccagcggggaaaggtcaccgtaggcagccccctgcctgcgccctgggggtggtg

SEQ ID NO: 32971 - DNA, 122 bp, Homo sapiens
ggactgagggagtcctggacgcaggaggtcgaggcgcccgcaggggctggcaggagggaccgcagaacaggctggtcccaggggcctccgggcagcaatgaggagccgtgtcagagcaggct

SEQ ID NO: 32972 - DNA, 122 bp, Homo sapiens
ggggagccccgccgccagccaccccaggggcacaacctccgaggagcggcgccggccgaacgtccccacctagagagcccttggggtgccgggtcccacccatcagccctggaattcaaggg

SEQ ID NO: 32973 - DNA, 122 bp, Homo sapiens
aactgaatgaatggacgtaataacgcccaggggtctagcccatgggaggtgttctgccaacgcgggtccctcccgtccccttcaggagccgcggtgcgctgaccacttcgaccccagccttc

SEQ ID NO: 32974 - DNA, 122 bp, Homo sapiens
gctgcgcccccttaaggcattgccccttcctcacccacagctccgcctacccccgccccgcgaccgctgggcttgtggccaaagcctaggttccaggaaacacctgctgtgggtagcaatgc

SEQ ID NO: 32975 - DNA, 122 bp, Homo sapiens
aaaaaatgacagaggtgaggactatgtcaacatagacaagtgtgtatctatctgcaggaacgttaagtagaaaaaagaacacaggctagtgtttaaacactagtgattaaggatgtgtgtgt

SEQ ID NO: 32976 - DNA, 122 bp, Homo sapiens
acacttcttgggcattcactgagatgagaaacggccccggccctgccactgcccacccttcgggaaacgccccaccacagacccagcccccaggctcgccctcaccgggcgccaggggatgt

SEQ ID NO: 32977 - DNA, 122 bp, Homo sapiens
cagactttggggagggcagttcaggaatgttgatcaaatgcatttctccagcaattccaccgctagaagtttacccaaaacaattaggaaaacaaagggagtgagatgcataaggatattca

SEQ ID NO: 32978 - DNA, 122 bp, Homo sapiens
ctggaggctgtgtgatgcaacttcttccagtacatggctgagagcaaacagatatgacctcgaactaagcaaacctagtctatccttaagatgggtcctgctgccatcacctgaattaccaa

SEQ ID NO: 32979 - DNA, 122 bp, Homo sapiens
aattatttcattatatactacaatgtaataatggaaataaagtgcctaataaatgtaatgcgcttgaatcttttggctcagctcctgcctcccggcagcctctccaggtccagaactttctc

SEQ ID NO: 32980 - DNA, 122 bp, Homo sapiens
accgcgagggtctgtggcttcattcttgaagtcagacaacccaccaattccggacacagtcgcacgctgggtgaggaggcagtcgctgcggtgctgcgcgtgggcggtccgacctgctctca

SEQ ID NO: 32981 - DNA, 122 bp, Homo sapiens
ggtgggtacaggggctcgacccccgaggttcaagctcagagcgggagaaccactggcactcgctcaaatccccagaggtggtagcatgaaaggatggggagtgggtcacaaaaatactttta

SEQ ID NO: 32982 - DNA, 122 bp, Homo sapiens
aggttgaggacccggttgtcttaacaagccccaaagaaacagccaccccggtgtcggcctcggaggttccagctacagtggcagctgcacagcttctgccccagctaagagcactggaatct

SEQ ID NO: 32983 - DNA, 122 bp, Homo sapiens
acagtggaggccgtaatccacgtcccctgagcaacctttcacgcagccactctacactcccgtgtaccagagagctctgccccacccagagcaggacctgtgtcctgagaaaccacccagca

SEQ ID NO: 32984 - DNA, 122 bp, Homo sapiens
ctgggctgcctgctcctcctgcacggggcgaaaagcccacctgggatccgagcgggcggccgcgccactctcgcaggctccatacacccgccactacccgcctgtaccacctgcagccggca

SEQ ID NO: 32985 - DNA, 122 bp, Homo sapiens
gtaggtcccacccgccccacctctacacagacacaggaccctggggaagtaggtcccacccgccccacctctacagacacaggaccctggggaagtaggtcccacccgccccacctctacac

SEQ ID NO: 32986 - DNA, 122 bp, Homo sapiens
gttatgtggggggatggcgtactgtgggcctcaggttggagtggggctagtgccccaaggcggcttggagacctctcagcctgagagcgaagcaggagtcggggtggagagcaactccaatg

SEQ ID NO: 32987 - DNA, 122 bp, Homo sapiens
gcggactgggagaggccaggccaggcccgggtataaaggctgtggagggggcggccgccgcgggcgcagaaaggcgcgccgctagctgctgtctctcctcacctcccgggccgcccctgcga

SEQ ID NO: 32988 - DNA, 122 bp, Homo sapiens
gctccctctcctctcgcactcccacgacctctcagatccagctgtccctagccgagtctccgccgctcactggcccaaccccgactgaggccctccagtgtcccctccacgtgacctcccgt

SEQ ID NO: 32989 - DNA, 122 bp, Homo sapiens
aagcgcaaggcgcgatatagagtatccttgcactcccaaaagtttgggacttactgtcttcgtcttggccctcgacttggccttcctcttggccgtgcgtcaggagggcggtggccgctaag

SEQ ID NO: 32990 - DNA, 122 bp, Homo sapiens
gatgggctcaggcagagtttggcactcatatttattacaggttggcaagagtgaggttcccgaggcagtgtcactcctcatcgtgcattttttgctgcaaaaagaataagaggtgtgagggg

SEQ ID NO: 32991 - DNA, 122 bp, Homo sapiens
gctcccgggagatgtgtgcccgctcacccaccctcccgagaccgtcctgcagttcaatcacgctctgcatctattctaggccacgctcatttcctgtggtggaaattggtttttgacagtgt

SEQ ID NO: 32992 - DNA, 122 bp, Homo sapiens
ggcgctggtgcgcgcactcgtctgctgcctgctgactgcctggcactgccgctccggcctcgggctgcccgtggcgcccgcaggcggcaggaatcctcctccggcgataggtgagttgtccg

SEQ ID NO: 32993 - DNA, 122 bp, Homo sapiens
gcagcgaagcctccatgtgggcagctcaggcttagcgattgttcccgggtgataaagggtcgattagggaagtagagctaggaaggtgggggcgggggagcgggcgataattaagcgagtcg

SEQ ID NO: 32994 - DNA, 122 bp, Homo sapiens
ctggtctgtgctgggagaggcatcttccaatccccccaaaactgagttcagccaagttggcgtatgcaaaagcttcaccattttatctttcaaagaagaaacacgtcagggtaaaaacaaga

SEQ ID NO: 32995 - DNA, 122 bp, Homo sapiens
agggggccaacagcacaatacaggttcgcttcttaaatgagcggtaggcatggccctctgcgctcccggggggccacgaagctgtcctaagggtgtgggcgacagcaggcgggtactgggga

SEQ ID NO: 32996 - DNA, 122 bp, Homo sapiens
actactgcgccttcgttccaccctcctcactgacccatttcaaggcagaggtgtcattcacgtctcacagtgcagggcacagacactcagagaagagaacaacttgtccaagacccctcatt

SEQ ID NO: 32997 - DNA, 122 bp, Homo sapiens
gcgagctaaggagggagcgaaagagcgagcggtggggacagccaccgctaaatgccagcccggtggagggaggaaggcggaccccaggccggtgggaccacatctcccagaagccccggcgc

SEQ ID NO: 32998 - DNA, 122 bp, Homo sapiens
tctggctgggtcggggccttgcaaacagtggatttatgctgcccttgccaaaaacaccgccgatttccacgccctcccatggctaagataacgaatgctgccttcggcctctgagagctgca

SEQ ID NO: 32999 - DNA, 122 bp, Homo sapiens
tagtcaaaaaaatactagctgtaatgatctctgtcacagcttccttctggatgacctctacgttatgtagaggagggattggtttggaaataaggagcccaggaaaaacccgtgtgaactaa

SEQ ID NO: 33000 - DNA, 122 bp, Homo sapiens
cccgagaccctagcaaggcaaacacacaaaaacggctggacgttgagagaagcacattggcggaggaacacacaagcggttggatttcgagaggacatcaagagcacgtcaagagcacgtca

SEQ ID NO: 33001 - DNA, 122 bp, Homo sapiens
agatggccttgccttggcccagaagggtcagaaggacctggtcagccaagctcagacagccggcaggatgccttccaccctgcagagggtcctatcttgtcccacaggtagatctacatcac

SEQ ID NO: 33002 - DNA, 122 bp, Homo sapiens
gctcatctctctaaacagagcatgaggtagctcgcgtgttctcaaactcatcatatgaggcgtgactgcattcgggtcatgggcaatgggaccacaatacagcttgtgagattttaggatta

SEQ ID NO: 33003 - DNA, 122 bp, Homo sapiens
cgaagcatggggaggtagtgctttcgctgaagttctgccgacgcttttctaggccttttacgggtcctctccgcgagaagtcgataattggccttttctttttttcgcagcatcctgttgga

SEQ ID NO: 33004 - DNA, 122 bp, Homo sapiens
acccccatgccaggccttgtctgaggaggcttccgcccaccagctccatgtccccacatccggctccccacaggggtgtgtccccaccccatgctgtgcccatactggcaggaaaaactggg

SEQ ID NO: 33005 - DNA, 122 bp, Homo sapiens
aaacaaaaacctgtaattgtttgaaataacaaagcaaggaatctttcttaaaggagacagcggaaagaaaagtaacctaagaatgcctagttggtttgatgctaaactgagggaaggaagta

SEQ ID NO: 33006 - DNA, 122 bp, Homo sapiens
gggcagcccgaaatgacacagctaaccggccaatcccaagtttggattccgggagaagcacgatctattggatacaagtgctggtggcctcggccaatggtgggagaggggccggagcccgg

SEQ ID NO: 33007 - DNA, 122 bp, Homo sapiens
tctcgtgctgaaaagagacctcctaatgttcatgtcttgataaaatgtcacctgcagccacgcgtgcggcaggacgtgccacccagcactcctggtgtccctctccacgggaactcagggtg

SEQ ID NO: 33008 - DNA, 122 bp, Homo sapiens
gacgctttcaatgtgaaaaagcatccagggacccagcaattccactcccagacacgcacccggaggaaatgacccatgcgccaggttctcccggggtttcctcttaaagcagaacgcggagg

SEQ ID NO: 33009 - DNA, 122 bp, Homo sapiens
ggtagaggatgctgtcccagttagagcaaggatgaggtccaaagcttagccctgccacttcgtaatgaatgaccttgtatgaagcttctcagcctgctgttcctctgtgaaatgggaaatga

SEQ ID NO: 33010 - DNA, 122 bp, Homo sapiens
tttcctagattcctttatgctgatgttaggaagagaaggtatagaaactaccttgtttgacgtggctcctgattatgttattccagcgctgtggtatgcccagccttctactcccaaccaat

SEQ ID NO: 33011 - DNA, 122 bp, Homo sapiens
agggtgcgggcggcgccttggaggttcctgctgttcctgcttttcggggcgggggccttccgggtcactgtcccgccagctgttggatctgcaccagtaacttctccaggaaaatcccccgg

SEQ ID NO: 33012 - DNA, 122 bp, Homo sapiens
tatgaaagataaaaactccattgaaactagaccaaccatggaattaaacatagtgggaaacgggtcctaaagagataaagtgcctggaaccatgatctccttattatcaatacccttttttc

SEQ ID NO: 33013 - DNA, 122 bp, Homo sapiens
cgggagggggcggaaccgagatagactcggcccccagctcatgaatataagacgcaggcgcgccctctgattggcccaggatgtgtagggggcggggcccggcggaagcgtatataaggccg

SEQ ID NO: 33014 - DNA, 122 bp, Homo sapiens
atccgcctacatctctctccggtggggatcccaggttcagccagaccctcaaggctggagcgtgtggcccgggagatcgtggagacagaacgggcctatgtcagggacctccgcagcatcgt

SEQ ID NO: 33015 - DNA, 122 bp, Homo sapiens
cctgaacctccttgggtactctgtacctgtcctaggatccccagcccctctgcatcttaccggcccctctgcagactctgaaaccccaactcacctggccagctaccggagtggatgcagct

SEQ ID NO: 33016 - DNA, 122 bp, Homo sapiens
accccacaagctcagagcccccagagtataggatccgaggcagcaagtgtgagcgaggcccgtcctgggggaggtggcctctggccgcggggccaggttgccctcagaggcgcaggcggcca

SEQ ID NO: 33017 - DNA, 122 bp, Homo sapiens
gctgggacaggaagaagggagctggcctgaattctgacttcccacagacagtgttccattcggctggacagatcttcccctggggtggaaagagcctctctctggaacagaggtggtctctg

SEQ ID NO: 33018 - DNA, 122 bp, Homo sapiens
catagcaaccgcaccattttgcattctcactagcagcacgcaagggttccagcttctccacgtccttgccagcacttgtaagggtccatctctttgatgacagtctctcctgggtgtgaagt

SEQ ID NO: 33019 - DNA, 122 bp, Homo sapiens
agctgtgtgcttgaactggggaaacgcttcaggagtcacaggagcgatctcttccatgtgcggatgggatgcatttaacccttgccattgacagtgacagctttaggtcaggatggaagcaa

SEQ ID NO: 33020 - DNA, 122 bp, Homo sapiens
atgagtgtccaaggcggcgcggtgatgagtgtccataggggatcctgtgggaaggcggcgcggtggtgagtgtccgcaggggatcctgtgggaaggcggcgtggtggtgagtgtccgcaggg

SEQ ID NO: 33021 - DNA, 122 bp, Homo sapiens
tataacgtattataatgttccatcctttaaggttagaaacgacgtcccatacctgtctcccgtcactctgagaacagtgcggtaacaggatcagcgattctcaaccatgggcaatttagccc

SEQ ID NO: 33022 - DNA, 122 bp, Homo sapiens
gctgattgtcagttatgtgccaggtgttagaatacgtgttaaactcaattcatatgccaacgcgtgcgtaagcaatatgccagttttatagctcagaacaccgaggctcagggagtcacgta

SEQ ID NO: 33023 - DNA, 122 bp, Homo sapiens
attactaaacttcttgaaaaggaatctgcaatttacatgctgcatttccactttctctttcgatacctctgcatgctcaattctgtccccactcctctacttgcactgctctttaacataat

SEQ ID NO: 33024 - DNA, 122 bp, Homo sapiens
gcggggtactgctccaacccgggcatccccattggcacaaggaaggtgggcagccagtaccgccttgaagacagcgtcacctaccactgcagccgggggcttaccctgcgtggctcccagcg

SEQ ID NO: 33025 - DNA, 122 bp, Homo sapiens
gtgtaacacactatcagtccatgattcatagtgtccatataaaaaagcaaaatggtcgggcgtggtagctcatgcctgtaatcccagcactttaggaggctgaggtgggtggactgcctgag

SEQ ID NO: 33026 - DNA, 122 bp, Homo sapiens
agagaaagtaagaatgtcaccaagtgtaattgttatgctgaataccactattcatgccatcgttaaaaggtccgtttaaagggggtgagagacaaaagctaagcttgactggatggaggagc

SEQ ID NO: 33027 - DNA, 122 bp, Homo sapiens
ggggagaatgtgtcctttgactcttccagcttctggtgactataagcattcctcggcttgcggttacatcactccaatctccgcctccatgagcacactgcttcctccttttctgcgcgtcg

SEQ ID NO: 33028 - DNA, 122 bp, Homo sapiens
tcgcttctgccgaggtgtccctggtaagtagtggaagagcccctgcactggttggctctgcggactccgcgtccgtctgtgacaccccctgcacacttacccaatccttttagatgccaaga

SEQ ID NO: 33029 - DNA, 122 bp, Homo sapiens
gggggttcccttctgctccatggaggcaccagagccaggggcttaggcaagggtgtgtggcgttggttttaactgcattaaaagtacttttgtaaaatcctgtctggcccctcagtgctctc

SEQ ID NO: 33030 - DNA, 122 bp, Homo sapiens
actcagtcctgttctcagggcaccggcactacggtggctgggaaggctcatgagacctgccgtgtctgttcggctgtctgtccccagaaccctgcctgcagggggagctagggagccgtggg

SEQ ID NO: 33031 - DNA, 122 bp, Homo sapiens
ctcacgggactggtagttcgaggcggtcccgcgatgctttccctgccgaggtgaggggagcgactacaactcccagagggtatggcggccgcagcagtgggcagttgagtttccggggcgac

SEQ ID NO: 33032 - DNA, 122 bp, Homo sapiens
atgaaatattctctgtactcccaaatccaggcctgagacccctctgctgtccagttacatcgtggagaggaccataacaactgtgaccttgtgaaattcttcccagtgtgctaagtcggttt

SEQ ID NO: 33033 - DNA, 122 bp, Homo sapiens
gggggcggaccatgaagcgtggaggggtctccggtgttgctggagggcagctggagcctgcggagagcctcggcgcgctcctccctctcccccaccctccccccaccccgggcggggctccg

SEQ ID NO: 33034 - DNA, 122 bp, Homo sapiens
ccacctccctgcagctcactgcccacaacacatggatgtaccatgggacagctgcaaggacgggtcaggtggcccatgggctctggggaaccctttctgggaggtgccaacagcacatgttg

SEQ ID NO: 33035 - DNA, 122 bp, Homo sapiens
agccctcgtctgtcgctgcgggtctcctcgcatctcggcgtctctctccgcgtctctctccgtcccggcgcctgtgtcccgggctgtccccagctccgagcctcagttccctgcgcgcctcc

SEQ ID NO: 33036 - DNA, 122 bp, Homo sapiens
attggttgacaacaaacccgacgccttgagtcgcgtttaagggcgcacaccgcgcgcaggcgcacttgctccctaagaacccggaagtggtggagccaacggccagccagacctgtggcagt

SEQ ID NO: 33037 - DNA, 122 bp, Homo sapiens
gagcaaaggggaaaatgcaggctagaaagaatcaggtgcttcctgtgaggttctggtcagcgatccagctgcaagggatgagtcaatttgcagcagtgggggacaactgtattagttttaaa

SEQ ID NO: 33038 - DNA, 122 bp, Homo sapiens
aggccgccggcccgaccctctgtagctccttgcagggcacctgcaggtgtcggcagtggtcgtagtcgcaggggacagccggcaaaggcggccacgccgtctcagtctcatctgcctcctct

SEQ ID NO: 33039 - DNA, 122 bp, Homo sapiens
cttaagcatagttgtttataatgggatgtttctaaacgacctatccttatcctggtaccacgctgatttgagctacagggcaaatgggtgcaccatggtgggcgaggtcattcacggaaaaa

SEQ ID NO: 33040 - DNA, 122 bp, Homo sapiens
actgacggcaaaggtgtgcagcttcactcctgaagtcagcgagaccacgaacccaacaggcggaactaaaaactccagacgcgccgccttaagagctgtagcactcaccgcgagggtctgca

SEQ ID NO: 33041 - DNA, 122 bp, Homo sapiens
cccacgatggcggccagtctcccgaagcgcgaggccccgcccagctctcggcctctcccgcggccggtccctgcaccaagctcgcgagctgactggctccaccccccgcgccctcgtattgg

SEQ ID NO: 33042 - DNA, 122 bp, Homo sapiens
tgtcttcgtttcagaggcggtacatctacgaaagccctaatcatagagggaaagactcctcgttcctggcccagaaatgagatgagaaatccagggccccgtacaggaaggcctttcgcaaa

SEQ ID NO: 33043 - DNA, 122 bp, Homo sapiens
cgggcctcgcgcggcgtccctagcaacgcgcgcgcggtcttccggccccgcccaggcgggcggcactgcgcctaagctgggccacaaccgccagtcagggctctccccttcccctccctccc

SEQ ID NO: 33044 - DNA, 122 bp, Homo sapiens
tgaactcccagcctcaagtgatctgcctgctttggcatcccaaagtgctgggataataggcgtgagccaccatgcctggcatgaaagaagaaatttaaatcctcatataactactgctacta

SEQ ID NO: 33045 - DNA, 122 bp, Homo sapiens
agccctcctccatccacagggtccacctctgtcctccctggtggctccttgccatattaacgtgttcaaattctaccccagtcagaaaactgcaccccttgagccctgatgctcccttggcc

SEQ ID NO: 33046 - DNA, 122 bp, Homo sapiens
ctctccaggttggcagggcctcctggacctcaacgggtaccctccaccctcccaagtctgcgggccccgcccctcggtcccaccctctgggtcctcagcttctctggccggcgccagccggg

SEQ ID NO: 33047 - DNA, 122 bp, Homo sapiens
gcctgtctccagcggcgccgcttggtgggcccggctgtcgctccgctcagggcctgaatacgttccctcggcggttgttcgaaagttacttccggaggggaatttgagccccccgggaggcg

SEQ ID NO: 33048 - DNA, 122 bp, Homo sapiens
gcgcgggccgaccctggcggcctccccggcagcggaggcgggagcctccggggagaaggacgcttcctggagggggcgccattctcctgagatcgctcttaccagacgcgaagccctttccc

SEQ ID NO: 33049 - DNA, 122 bp, Homo sapiens
catgatgagtagataaacaaactatgcaaacaatggaatattattcagccttaaaaaggacgagagcctgggcaacatggcaaaatcccacttctacaaaaagaattttttaaaaaattagc

SEQ ID NO: 33050 - DNA, 122 bp, Homo sapiens
actcccctcgtccttgatgttgctcccccagggccccagccagccagctcctgccctggccgtgacagctgctattctgtgcccggcactgtggtgtccccagcgggttgttcggcactccg

SEQ ID NO: 33051 - DNA, 122 bp, Homo sapiens
gtctgatccatgcagatggccaggctgctaggcctctgtgcctgggcacggaagtcggtgcggatggccagctccaggatgacccgccgggacccgctcacaaataaggtggccctggtaac

SEQ ID NO: 33052 - DNA, 122 bp, Homo sapiens
ggaagttaggactccagggggtgcggggggtgggtgggaattccccgcttcagacagcctcgcccagatgccctggagagggtgacttcatataaagacccctcacacgaagaagaaagctc

SEQ ID NO: 33053 - DNA, 122 bp, Homo sapiens
tggggtgggctgggggtcagctggcctcaacggggtgaacacagcagctctcccagacatcgaaggagattcaaggagcctgaaactcaaacaagtggaagaggctggaacgtcacctaagg

SEQ ID NO: 33054 - DNA, 122 bp, Homo sapiens
gtgagaataaggcattgctggaagcaacagtttggcagcctggggtacactcaggttattcgttacaactattattatttgatgtctttttttaaactcaggtcatccacttttgactgtca

SEQ ID NO: 33055 - DNA, 122 bp, Homo sapiens
ggggaaggcgcatccgagagtacagcgttcttgggtcacctacctggagggacacctcgtcgccagtcagggcagctagaagctctttaaagcaagcaggactccttagctctgcccaggca

SEQ ID NO: 33056 - DNA, 122 bp, Homo sapiens
acagcaggcgccctgcggggtatgcaggggccagggagtgcgtgacacacgatccagctccgagttgtagccttgctctgggcctgaggccaaggagggcgcggagaggaagagacagtgtt

SEQ ID NO: 33057 - DNA, 122 bp, Homo sapiens
ctggcaccatttggaggtacaaatctgcaaatccaaggttcacatcccagggagtgaccacgtggtcacaaaacacagcctacaaatgcccccacctgaggtcatacagagataagctaccc

SEQ ID NO: 33058 - DNA, 122 bp, Homo sapiens
catgactccgcgggcagggctgacgtgtgcttggggcaagggatttctccgttgaagctgcggcagcggggtgcaagtttggagacgcgcttcttcgggacattacggcgcttccacgacgc

SEQ ID NO: 33059 - DNA, 122 bp, Homo sapiens
cttccaggtgcgcttctggaacgcacggagatcccccggcggggaaggggccggggctcgcgtcacttagtgtctgctcaccgatttccctctgaagagggggcccagggcctctgctgagg

SEQ ID NO: 33060 - DNA, 122 bp, Homo sapiens
ctcgatctcctgacctcgtgatctgcccgcctcggcctcccaaagtgctgggattacaggcgtgagcctccacgcccggcacccgggagaggctcttaagagaaagaattccctggccaagg

SEQ ID NO: 33061 - DNA, 122 bp, Homo sapiens
ccacctttccagcccgcctgtaagctaggccataataggggccgtagccctccttacagccgcgttcttgtcacctgcgcggtgtccagcgcacactcgcctcctacgtatttgccttgtga

SEQ ID NO: 33062 - DNA, 122 bp, Homo sapiens
tgtctctattagctgagccccccaagtctggggtgaaagagaagcgtaagaaggcagcatcgttccagacggtgtcccagctgcacaaggtaaggccccatctgggagacagaccctccctc

SEQ ID NO: 33063 - DNA, 122 bp, Homo sapiens
gttctaattaggaatcatttttacatacttgcatataaattataccacccaggtgaaaaccggcatttcagttgatttattcaactgatagaaaaagaaaagcttacagtcgctactgatca

SEQ ID NO: 33064 - DNA, 122 bp, Homo sapiens
gaaggagatgagggaggaggagggggtgggaagctgagctctggcggccccactgattcccgtgtttattctaaccatgtgttaaaggaatatggcctatgctccagggagaggaattcata

SEQ ID NO: 33065 - DNA, 122 bp, Homo sapiens
attaaggaggctgccccctggagattctgagacagtgagaattctaaccattcttaaccacgcctgccacctcccccacatccgccactcacagctcccttgctccctccactggtgatgta

SEQ ID NO: 33066 - DNA, 122 bp, Homo sapiens
ggctaaaccagacctgacctcggctctgagggagatccgcgcccagtatgagtccctggccgctaagaacctgcagtccgcggaagaatggtacaagtccaagtttgccaacctgaacgagc

SEQ ID NO: 33067 - DNA, 122 bp, Homo sapiens
gcatggaattcagtggccgcaggagctcaagtcggctgcagccctttcaaagagggaccccgaagaggcctttctgccaccccagccccagagaggctatgaggctctacaagcagcagaga

SEQ ID NO: 33068 - DNA, 122 bp, Homo sapiens
attcattaaacacagaaaagtcaaagtaagcttttaacttggattcaaataatctcatctcgatgctgaaaaaaaaaactgcaattgtatgccactgaaaatttaaagcatataaatattag

SEQ ID NO: 33069 - DNA, 122 bp, Homo sapiens
ccatgatggctgggaccagctgctggtatccttcatgtcctttaataggctccaggatgacgcctgagccaaaggccctacctcctgtggccttggttagagacaccgaaggccagctgtgt

SEQ ID NO: 33070 - DNA, 122 bp, Homo sapiens
gtacaggaagcacagtggcttctgcttctgaggaggcctcaggaaatttacaatcatggccgaaggtgaacagaaagcaggcacatcttaaatgacaggagtaggagcaagagagagagtgg

SEQ ID NO: 33071 - DNA, 122 bp, Homo sapiens
gcggggcttagcggccccgaggccgtagagaatcctgggcggagcgcggtcgctctcaggcgtcctctggggagactcgacctgccacttgagagcgcagcattatatcaaggcggggagca

SEQ ID NO: 33072 - DNA, 122 bp, Homo sapiens
cttgtgcgagtcggcgcggacgactgctagtccagccgttgggcgccgcctggatcccggcgcctggcccttaaagagacccggtcgcatttcatctcagcaagaggagaaatactcgaagg

SEQ ID NO: 33073 - DNA, 122 bp, Homo sapiens
aaaaaaaagctgctggaggctgaataattatttcatgtctgatccctaggtctaatacctcgtgagtgaagcaaaccctttagtaaaacaaatacccacattacacctataggagcaaagag

SEQ ID NO: 33074 - DNA, 122 bp, Homo sapiens
agctggtgaagggctgtcagtgaggccaggggcccacctcatggatgttcaaggtccccccgttgtaaatgccatctggagctcacacaagcacagtcacactcactacaccaggggccccg

SEQ ID NO: 33075 - DNA, 122 bp, Homo sapiens
actggcccgcgcaggcctcctgcccggctgttggcggttggggcgaagccggcgggaggccgccccgcccccgcccccgccgcagagtcgcggcgcgcagcctcttcacccgtcgcggccgg

SEQ ID NO: 33076 - DNA, 122 bp, Homo sapiens
gagacggtgatgcgcaggagtattttcaccagttcctacgtgcaggccggagctgcagcccggtcagcgaagcgctccaccctttccctcctcctgagtgcgccggaacggcgccgtcgcct

SEQ ID NO: 33077 - DNA, 122 bp, Homo sapiens
gtttccccaactataaaatggggagagcagccatgcgccatggctaaccaaagacggtgtcgccaggaacttaggaaaagctcagtaaactgggtcatcatcactacattcctgggtcaaag

SEQ ID NO: 33078 - DNA, 122 bp, Homo sapiens
tgtaagagaaagcacctccctcaccctgctccaacgtcctttctgtccatcctgctacctcgtctttacttctggtggccccagctcagagcaagcctggggacccattgaacatctccctg

SEQ ID NO: 33079 - DNA, 122 bp, Homo sapiens
cagaagcaatttcacacaatgttcatgtgatgaacaagaattcaccacataggcaatgagcgggaagcctttccaggcagaagaaatggcacaggcaaaagagtggggagagaaagcaaatg

SEQ ID NO: 33080 - DNA, 122 bp, Homo sapiens
gaacaggctacacgtagtcagtttcctgggtttaaatgtgaattctgattttactaactgcgattgtgggcagtgtaagcctcttgctttctccgtaaaatgagatacactcagcacctgtt

SEQ ID NO: 33081 - DNA, 122 bp, Homo sapiens
aggagttcaacatgattccctcgaggacaagcagctggttagttagcagtaacccacccgcggcttctctgagcctcagaactctttccactctaacacgcggtctctctgcatagaactat

SEQ ID NO: 33082 - DNA, 122 bp, Homo sapiens
gccagtatcacagatactgcctgtatttagaacagactgccacaactacaatgcactacacgcagcacagtcttcttagctttgaagctgagttggggggtggggtggggggggggtagaga

SEQ ID NO: 33083 - DNA, 122 bp, Homo sapiens
tatcttgtataaatgctaggttcacttctcagggaatcttactctaagacataagatgtgcgtgtacatggaaaacaactctaaagaggcaagggttgtttttattgactaatagtccacac

SEQ ID NO: 33084 - DNA, 122 bp, Homo sapiens
ttcaccatcaaaatcgcagactttggcatgagccggaacctctatgctggggactattaccgtgtgcagggccgggcagtgctgcccatccgctggatggcctgggagtgcatcctcatggt

SEQ ID NO: 33085 - DNA, 122 bp, Homo sapiens
gagcgcctctccacactcccttttttcctgctattcttgcctggagtgatatcaagtgagcggtagctaggcggcttctcctcgggccagtgtggggagtgcgagccgcggcggtgggcccg

SEQ ID NO: 33086 - DNA, 122 bp, Homo sapiens
aagggttgatttatttttagtgactctagtgacaggcatttgtaaatgacccccctacgccgctcatctttctgaaaattcttcatgtgtatgcatacattattccaatttccaaaacagaa

SEQ ID NO: 33087 - DNA, 122 bp, Homo sapiens
gacctggaactcagggatcctaggcagatcagctggaagggaagacacgcctctccataccgagtcagaggttcaccgcgaaagagaggccgccgccctgcccccaccccgccccaaccccg

SEQ ID NO: 33088 - DNA, 122 bp, Homo sapiens
agtgctcagtccaaggatggggactgaattaagaagcagacacatgggaggatccatgaccgatcagatcaagctgtggtatcaccccatggcaggatccagtcagatcatgcctcccggca

SEQ ID NO: 33089 - DNA, 122 bp, Homo sapiens
tcaggctctcccgactaacaacaaaagagacatcaggaatgatctgatgggaggacccgacgacggaacgccacgatgcgcgtgacgtcagctcgctgatgtggcttccttggtgggaggga

SEQ ID NO: 33090 - DNA, 122 bp, Homo sapiens
gggagggggctggcaaccctggggacaagtcagacaggggccagggtcccaggggcagggcgggcaccaccgccagacgtccccggccccacctgagcaccgtcttctgcagggtctccagg

SEQ ID NO: 33091 - DNA, 122 bp, Homo sapiens
agagctgctgcagctgaggccccacatcgcttcgtcctacatattcctgtcctcacagagcgtctcctgcagcctcagagggcagcagtgggcaagaggccgcagaggaagggaaagaccag

SEQ ID NO: 33092 - DNA, 122 bp, Homo sapiens
aataaagcctcttaagattttggctgaagcaggttgccaggagccaggggtcaggggctgcgctgagcgctggctcgggctgcaggagggaggcttcatttgctcacactcaggtggaaacc

SEQ ID NO: 33093 - DNA, 122 bp, Homo sapiens
gagcgcgctcgcctctcaggtccgcagagggaacggatttctggcctggagggtggggtgcggggtcagtgtcctctacaggatataggaggacgtgcccccgaagctgctccgtccctcca

SEQ ID NO: 33094 - DNA, 122 bp, Homo sapiens
tcagaacttcacacctactttttcttcttcaggggttcgggcgcttgagccacgggagggcgaggcagcttgaaatagaccttgaccaggtcatagataaaccactgcagggccgtgagggt

SEQ ID NO: 33095 - DNA, 122 bp, Homo sapiens
cagttaacagttataaattctctccagccctctggatgacttttgccacaagcccatcatcgtcatattggttaattacttattaattaaacacaattcaaaatactgtattgaggcatctg

SEQ ID NO: 33096 - DNA, 122 bp, Homo sapiens
tagccctctccgaagccgctccaggctctcgccagtcaccagtgccgagagaactgcgggcgagaggccaggccgcatcagacacccgcccagacccctgaccaacacgcaccgatgccgac

SEQ ID NO: 33097 - DNA, 122 bp, Homo sapiens
ctgaattccgccaaccacatcggttcgactgaaaacccacgaaacatctcccctcctctacgagagaggagttatcccataacctcgtggtcccccattttctgtgacgaggaaagtcagtc

SEQ ID NO: 33098 - DNA, 122 bp, Homo sapiens
gggccaaacgaatgaggcactgccttggatgcaaaatttaagagggtgccaggtaaactgcggttatcaaagtaagtaattttttaatgtaatatttcaaaaaatcgtaataaattttcaga

SEQ ID NO: 33099 - DNA, 122 bp, Homo sapiens
agccctcttccctccctcatgatgggcagctccagtaacgcccattggctaactaggaggcggtgccaggcctacttcgtcccctcattggattgaataactgagggagccgccaattctcc

SEQ ID NO: 33100 - DNA, 122 bp, Homo sapiens
gtgagctcactaccttctctgtagaagctccttctatcttctcactgggagagagttgcccgatttatgctttcctcacttggaccccagagcagaccataccagactggagatcacagtcc

SEQ ID NO: 33101 - DNA, 122 bp, Homo sapiens
actgaaatttggggtgggggtgtcctcaacagctgagcttgtcctagcagtgaaaatgctcgcctccaagcagggctcagaaaggtctggagccctccaggcagagggctgagctcaggggg

SEQ ID NO: 33102 - DNA, 122 bp, Homo sapiens
cgagtgcaagagaaaaaacacttttattgaaacgatccaaccagcggcggcggagaaaagcgaccggccgcgggagcttaccccacccccgcctgagcggctcgccgggggcagcgcgaccc

SEQ ID NO: 33103 - DNA, 122 bp, Homo sapiens
tccgggggacaggtttgcagggtggggcccgagaggctggcgggcaggcagcagtggagccggaagggtaggcagccaggggagagagagaggagctatggagagggcccgcaagttctcgg

SEQ ID NO: 33104 - DNA, 122 bp, Homo sapiens
cgacctcactgagcatgtgcagccctggccgggcggcctcaaagttctgacatcacagggcggttcctgaagtggacatagttgtaagagctagttattttagacaatgcctctgtgatcag

SEQ ID NO: 33105 - DNA, 122 bp, Homo sapiens
ttcccggccgcctgggaatctgtatttcaacatgatcccaaaggcctggggaggggaaggcggattgggaccaccaatcgggaggcaccgccccatgtccccattcccccctccccacgccc

SEQ ID NO: 33106 - DNA, 122 bp, Homo sapiens
ggcccgagtgtggacagagatggcggtgggaaaacggctaggggtggctgagggggagcacgtaggcagtgggcagagggtgaggaaggcgagcacccccaagtatccatgctcgctttcca

SEQ ID NO: 33107 - DNA, 122 bp, Homo sapiens
agctttctgtatcctgagaacttgcccagtgccctgaataaattggatcacgcgagggctcgaaggatgagtgaaaggtgttattgagtggtggatgtggctctcagtgagattgatggaga

SEQ ID NO: 33108 - DNA, 122 bp, Homo sapiens
tatctcatctctcagtggcctctggctctgaaccctcgccatctcttgaatatcttttctcgcaatttcttttttttttttgagacagaatctcactgtgtcactcaggctggaatacagtt

SEQ ID NO: 33109 - DNA, 122 bp, Homo sapiens
gggctgggagggaggaggggcggattgcagaggagggagggggggcgtcgccaggaagggcggcttgctacctggctggaatggttgcagtaacctttgcatagggctgggccggcctgggg

SEQ ID NO: 33110 - DNA, 122 bp, Homo sapiens
attttggggggaggaggggcgcgaggcaggaacgagctgactggccgggatcctccgacccgccactgtggcagcaccgggaaggcggggagagagaaagagggagggagggagggaccggg

SEQ ID NO: 33111 - DNA, 122 bp, Homo sapiens
gggatggccgaggaggagccgccgccgccaacgctacccccgctcccgctcccgctcccgcgcccgctcgctgcctgctgctggcgctgctctggccgctgctcctcgcctgagctgccggc

SEQ ID NO: 33112 - DNA, 122 bp, Homo sapiens
gcctataatcctagcactttgggaggccgaaacgggtgggtcacttgaagcttagcagttcgagaccagcctggataacatgggaaaagcccatctctacataaaatacaaattagccgggc

SEQ ID NO: 33113 - DNA, 122 bp, Homo sapiens
gttggtcgttgagcctgcctctgattggctggtttgtacctgcaatgcgtcactgggactcgcagccgccgccgggacgcggtgcggcttctgccgttgctgctcgggccgcgctgtcctgg

SEQ ID NO: 33114 - DNA, 122 bp, Homo sapiens
ctagaaagcccttccagatctttcttctgcttacatttacaggctgttgtcttggcactccgaaactgcttgaagttccgccacaagatatgggaactcctaagcaacccccaactccactt

SEQ ID NO: 33115 - DNA, 122 bp, Homo sapiens
atcaattttgtgcacttctgcatatattttattcaacattatgcatgtgaaaatcatccacgaactactgctaaatgtatgttgttgcatgctatatgcctgtagcagtagttcatgcagca

SEQ ID NO: 33116 - DNA, 122 bp, Homo sapiens
ctccgtgtaacatgactttaacttgcagtaatatcctttcatcatttaatatttattgagcgcctaccatacaccaggctcagatactgcactgaacaccgaccctgtcccatgaagcctta

SEQ ID NO: 33117 - DNA, 122 bp, Homo sapiens
aaaaaacgaatagacccagccgatgggtttttatcctgtgcgctccttcctttattcttacgatagcaaactcaaagatctaatggggcctgacaggcactgtaactgggggaaggcgaact

SEQ ID NO: 33118 - DNA, 122 bp, Homo sapiens
tctctcgggtctctggtatctcgtcgtctctccgagtctctgtcgcctcccgggactctgcgctcccacgctcctgccatcccctgggaagctcgctgacacttccaggttcctgccacctc

SEQ ID NO: 33119 - DNA, 122 bp, Homo sapiens
tagggagatactggcacctccccagtgagatctcaactattatgacctaagctgtagtcacgcggtctcacattgaagcaagaatccccacccgggggttttcacactggttgctgctaagc

SEQ ID NO: 33120 - DNA, 122 bp, Homo sapiens
cccctcccccctccgccgcctcccggagccagggctgcggggtgtggggcggggaggaggcgctctgctgtggagcctgccgccgagtgaccgctcgactacaaatagcctggggagctgcg

SEQ ID NO: 33121 - DNA, 122 bp, Homo sapiens
cgcggcgagctgagggtggcggcggtcgacatgttccaggtcccggatagcgagggcggccgcgccggctccaggtgcggcgcggggcacacgggaggcgggcggatagcgcgaccacgtgg

SEQ ID NO: 33122 - DNA, 122 bp, Homo sapiens
aagagcagaaagaagagaaaaagaaatcccagaaaagagagtaaggaagctggagacagccgggaaggaagcaccttttgaatctacagaggggaaagtgtgtatccagatttgaagacagt

SEQ ID NO: 33123 - DNA, 122 bp, Homo sapiens
ctaccaaagaccgagggtgaccaaagtgactgtggtgggaagcgacaactaacaagagtccgaacatctgggaggaagctgggtcccaccaggtgagagtccaaatgtgggagaagcctgtg

SEQ ID NO: 33124 - DNA, 122 bp, Homo sapiens
gaaaaccaccggcaaggagcactgtcaaacttcccaaggatagcattcctttcccagatccgagatgcaaactacgccacatcctctcctaacacaagctgcccactccagaggcagcctgc

SEQ ID NO: 33125 - DNA, 122 bp, Homo sapiens
aacatcctcaagccaggactgcatgtgaggaagacagcgccagcatcactgtttcatagtcggatccacaaagcccggggaagtggccggcagaagacaacacggaagccacacagcagaga

SEQ ID NO: 33126 - DNA, 122 bp, Homo sapiens
tggaaggggtgtgagacttcaaaatgtctcagagataggacccaaccaaatccttggcctcgccaagcgcccccatcactctggcagaacagctccagagaccagccctggccagccctggg

SEQ ID NO: 33127 - DNA, 122 bp, Homo sapiens
agctcctgcttctcctcctgtgcatctgggaccctgaccccccggctcgcctcttaaagtcggtgctggagaggaatctgattcgtccacagaaggccactccgcccacttggtagatgtgg

SEQ ID NO: 33128 - DNA, 122 bp, Homo sapiens
gtgtagaaggcctgtctccaaaaagatcacaggaaagaagccttgcaaacctcagctctccgtttgtttgtaattttgctccttttggtctcttccactctcccccctcaccccttcgtttt

SEQ ID NO: 33129 - DNA, 122 bp, Homo sapiens
aaatcatgggttaggagttacaacatcaccacaaatccagcgctgctcagagttaaaacacgtcctcgccccgcacacgcacaggctctctctgtgccatcaccatccatctggtctccggg

SEQ ID NO: 33130 - DNA, 122 bp, Homo sapiens
ggtagctcatgaaaagaactcactctttgactaaacttgagtcaggctcctctcagtcctcgttttgactaggccctgaccctgggctggtccttaactcacttagttcagttttagcaaga

SEQ ID NO: 33131 - DNA, 122 bp, Homo sapiens
gtgccggggccttagaccaatcattgcccaggaaaggggcacctccgtaagtgcgcaatacgccagaatcttccggcgtctttccggtggtggtcgtttttgctgcctgcgagcgcgtccgc

SEQ ID NO: 33132 - DNA, 122 bp, Homo sapiens
catacttccatctaaatatcctgcaaagtttgtttctgacgctgaggtttttatacaaatcggtgtggagttccagccacaaccttagcaagcctccgatgctaagctagacctttcttcag

SEQ ID NO: 33133 - DNA, 122 bp, Homo sapiens
gtgccccgcacacagttcacccccaccgagcgcctcccccgggacgcccaccacccagcgcggccgcaccacgcgaggcttccactcccacccgcccagctcgcgccacatacagtccctca

SEQ ID NO: 33134 - DNA, 122 bp, Homo sapiens
tccaaggtacacactggcccaaagaccaggaaaccgtgccacggagctggaaggcaaggccgatgggacggtgcaaggaccacgcccacgatagcgcctgccgccccgaagggcctcgtgac

SEQ ID NO: 33135 - DNA, 122 bp, Homo sapiens
tcccctttaggagcgttttcagattttggttgctaagacctgaatcccatattgagatctcgagtagaatccttggtgtggtttctggtgtctgctcagctgtcccctcattctactaatgt

SEQ ID NO: 33136 - DNA, 122 bp, Homo sapiens
gtcttcatctcatttggtttggaaacggctcgcagggggagtgtccaggcctcagggacacgcccgggcgctctgggcatcggacacatggcaggtgttccggcctcgcctgattcagcccg

SEQ ID NO: 33137 - DNA, 122 bp, Homo sapiens
atgcatgagtcatgcccagcaattctgaggcagggaccaatcagaggtatgtgctgtcctcgtcactgtccgactgaactcttcattcattgaacaaacagttcaaaaggtcctttgaggaa

SEQ ID NO: 33138 - DNA, 122 bp, Homo sapiens
aaggcggggtaggtaccggccgtggttgacgtagggcacacatgccacacggtaaagcctcgacagccaaacacagttctgctttccctgatgccaaaaatgaggtgacgggcacaggcaat

SEQ ID NO: 33139 - DNA, 122 bp, Homo sapiens
aaaagtgtatgaaagccaccgtggcggttaatgagctgtgagatgaggcgctgctgcggccgctgctgctgacactcgctcccaggctgcacccgccgcccttggcgcttcatgtacatgtg

SEQ ID NO: 33140 - DNA, 122 bp, Homo sapiens
agctctcttgggtaggtgtgccagcacccacaggggcccaggatggggtagctcctctttcggctgtccttccctaacctactaagattctactgggccttccatggacctgtcctgattct

SEQ ID NO: 33141 - DNA, 122 bp, Homo sapiens
ccgccctccctggcagccgcattccctgtggcagcgctctctgaggtaggtggtggcagccgtggcagcggggccccggcggcaggactgggcggaggctccggcgtccctgagggggtgcc

SEQ ID NO: 33142 - DNA, 122 bp, Homo sapiens
tggctgacggcagttgcagccaagcaacgccagaaagccggcttcacgttcaggagaaaacgctacctctcttcctcgtggttttcggtgctctacacgttcagagaaacttctctagtaac

SEQ ID NO: 33143 - DNA, 122 bp, Homo sapiens
acaaacatggggccagatgtgcgggtgccgtcccgcggcgggaacgaggcaggtggctggcggccggagtctatgcactctcgttttctcggcggagccacttgtgtgtgctggagcgagga

SEQ ID NO: 33144 - DNA, 122 bp, Homo sapiens
acatgtgtatctcttttactgcctctgtcataagttttcaaaggtggtttcaccacctcacgaaggaattcaagaacaagtcggaaagtcgtgaaagtacagaggtttactgcaaagtacac

SEQ ID NO: 33145 - DNA, 122 bp, Homo sapiens
ctgtcggaacctaacgagcttccttccaccgcaaaagagctggagaacaatgctaggcaacgtgctggagaccttggccctcggaacccaagtcacgcctcccatgtgagctctggagggag

SEQ ID NO: 33146 - DNA, 122 bp, Homo sapiens
actgagacaaagcaagggtcccaccggcccctgtcccctccctaaggcgcgccctcagggcgggagacccacctcagccagccccccagctcagtggtccagaggctcgggtcccgcgctga

SEQ ID NO: 33147 - DNA, 122 bp, Homo sapiens
cctgagccccaaacagtgccgtgaaattctccatcgtaccctccgccccggcgctgtctccgtgtctgccgttggtaattttcattggacaatgctttcaaggagtacccccccgccctttc

SEQ ID NO: 33148 - DNA, 122 bp, Homo sapiens
cgatccgccctgctcgagggctcagggctgacccaggtgagccccggcggggagggcgggcgcctcggcctccccgccccggaaccctgcaccgcccagagccgccacgcctcccggctgta

SEQ ID NO: 33149 - DNA, 122 bp, Homo sapiens
atgatcactttggagagctgattacaaaggcacattttgaaacagaacttctgagatcagcgtttggatagtcattgaaccacactatctccaagaagaggataatgaaaataaatctctgt

SEQ ID NO: 33150 - DNA, 122 bp, Homo sapiens
gtgccctggactcgccgcccgcggctcggaagctggagagtcagcgacggggcccgactgcgggaccgagggctgcaagaagaagcgaacaaatagtccccagcgcctcctctggatgcggt

SEQ ID NO: 33151 - DNA, 122 bp, Homo sapiens
gacaaaggctttcacatacattatctcatcagcccacgtaacgcccctggaagagtggggcgggctgagaaggcagctcagcaggcgggtggaagggccagctggaggctgtgcagagggaa

SEQ ID NO: 33152 - DNA, 122 bp, Homo sapiens
taactaatgggagatatgtgtgtcatcaaaacaagggagtaaaccaagaaagggaagatgcgaaatccaaagacaaggttctcacagaggaaaaaggtgaaggaaattcttaggatggtagc

SEQ ID NO: 33153 - DNA, 122 bp, Homo sapiens
cacgtttgcagggatcgtgtgcgctggggcctataaccagcacttccttccttctgaggccgaacgatgcaccacattttgttcattcattcatcagtcgatgaacacttaggttattctca

SEQ ID NO: 33154 - DNA, 122 bp, Homo sapiens
ggaaacatatccagggtccttaataaagtgaatgacgaggcttcggtgtaattgggcttccgtttggtggctatttccttaaactgagagtggaaaaaaatgtaaactcacagcgctcagat

SEQ ID NO: 33155 - DNA, 122 bp, Homo sapiens
ccgagctgcagcggtggagcaagccaatgtggcgatgccatcaggcaacaggcttccagacgggaagccacccagaatgtttgccgtgtttggagaggagggagagagcacctaaaccagcc

SEQ ID NO: 33156 - DNA, 122 bp, Homo sapiens
tgaagtaggggtgacacacttcaatcaaataatcacaaacaggctggcaaggtggctagtcggctttgggaggctgaggctggagcatcacttgaagccaggagttccagaccagcctgggg

SEQ ID NO: 33157 - DNA, 122 bp, Homo sapiens
ggccggcgctaaccacagaactgagctttaagactcaaataaacccaccgtcctctccagcgatttaagcagtctcactctccctcctttccctcttttccctcctctttccccccggcccc

SEQ ID NO: 33158 - DNA, 122 bp, Homo sapiens
aaaaaaaaaatgttctaagacagacacagggctcaacaagttgaaattgggatttattcccggtattacttggattttcaagaatttttggaaatcttgcctttcggccacagctctcctca

SEQ ID NO: 33159 - DNA, 122 bp, Homo sapiens
tgcacgcttgtgagacccgctccccaggaagtgatggccacaggtgggaaaatgcctccacggccactaggagcgggggaattacagggacacggccgtacagcagaacccagggccctctg

SEQ ID NO: 33160 - DNA, 122 bp, Homo sapiens
ccgccaggcagggacagactgacagaccgacggaaaggtcttcccagcgaagacttggaacgccccagggggtgggggaggctgcaccgcctcttcagtaattggtttggagacaattggcc

SEQ ID NO: 33161 - DNA, 122 bp, Homo sapiens
ccgggcatcacggtgggccggctcacctgtagacatcggtccagaggtaggtgcccagcacgtacaccgcctccacgcggctcccgtactgcagccgcacggtccgctcgcgcagcatcctc

SEQ ID NO: 33162 - DNA, 122 bp, Homo sapiens
aggactcgcgggtgaggaagtggggaccccttactctgcctagcagtcacagtccttacgcggaggtgaatctgattctgtgagttcatcaggccaaattcaccagcagaactgacaggagc

SEQ ID NO: 33163 - DNA, 122 bp, Homo sapiens
gtcagagtagtgggtcctgagaatgccaggcgacggagcctggggcgagagggagctacccgcccgggcctgattttgttatttggaggaagtaggataaacgctgttttgccttatataat

SEQ ID NO: 33164 - DNA, 122 bp, Homo sapiens
cggggtgtacgtagttaacagcaagtggaagctcagaatccgaagccctgggcctggttccgtggcttcctagctgctgactctgggtgagctgtaatacgtgactgcctgagatttccgag

SEQ ID NO: 33165 - DNA, 122 bp, Homo sapiens
gccttcccagaactctgcggccgatgccatcaacccctggcccgggcgcagccagccgtccgcgctctagggcagctgttccacatcgcctgcttcacctgccaccagtgtgcgcagcagct

SEQ ID NO: 33166 - DNA, 122 bp, Homo sapiens
cgggtggccctcgtcatagaaggctgtgttgcccccagcaagagcaaagccaccgctccacgcctgcccggggaattggtggccgagcttatctgggaccactggtccacgcgatgccccgt

SEQ ID NO: 33167 - DNA, 122 bp, Homo sapiens
gggccgggggccggagcgcgccgacgccgaacccgctgccgccgctgccgggcctgtgtgcgaactgagtgcggggattgccacttctgccgagacatgaagaagttcggggggcccgggcg

SEQ ID NO: 33168 - DNA, 122 bp, Homo sapiens
ggcactctctgtcacacagaaaggactattcatccctggaaagattgtgcactggttctgcgctgagcacagaaatccaagtctgtcccacagagaaaagagagcctgcttctcacatcaca

SEQ ID NO: 33169 - DNA, 122 bp, Homo sapiens
gcgcgaacggccaccatcgcccagcaggtgctcctgggacatgacccgccgggggttgggcgcgggcgccaggcccagctcctctgggccgccccaggcctccatgcgatagccgccccccg

SEQ ID NO: 33170 - DNA, 122 bp, Homo sapiens
ggggaggggggggagaaggtgatattaatccccatattgtgggatgtatacacgaccctgcgatatggttcgtaatattgagggtaagagagggtgatattactcctcatatagcagggggt

SEQ ID NO: 33171 - DNA, 122 bp, Homo sapiens
gcactcctcaacccttgggtcgttgatgggactggacaccatggagcagggggtggggctcgtggaggaggcttgggccgcacaggagcccacggagggggtgggaggctcaggcatggcgg

SEQ ID NO: 33172 - DNA, 122 bp, Homo sapiens
tcagcggtagctggagctccagctcttggcagcgctcagatcctatgcctgtactgtaaccgtcgccccaggttcctcccgtggctgggaagctgcagtaaaggcacgttcaggactcagga

SEQ ID NO: 33173 - DNA, 122 bp, Homo sapiens
tcgggtctgcagcgccgccgggcgcccgggccccgtggtgagggccagcgccggcccctccggccatctcgctccctgctctgactacaccagcgccccacggggatgctccgagcgcctcc

SEQ ID NO: 33174 - DNA, 122 bp, Homo sapiens
ctgtgaggattaaatctgccggcaccttgtctgtaaaaactgtacaaaaatgttcagaagcgtctgctgagcattgggttggcgaaggacatgggggaggccagtgtttcgcggcctcagtg

SEQ ID NO: 33175 - DNA, 122 bp, Homo sapiens
ctgctttgctagcagtgttctgtccttccacatcagcagcccttgggatgatggcagctccgatgggatctcagtgggttttttaagccccgtcagggttttttgcccgtgggcgtacgtgg

SEQ ID NO: 33176 - DNA, 122 bp, Homo sapiens
ccgccgcggctttttgcccccgccgtcgcggctttttgcccccaatgctgcggctttttacggctttttgtgcccatcaccgtagctttttgcctccgccaccacagctttttgcctccgcc

SEQ ID NO: 33177 - DNA, 122 bp, Homo sapiens
cagagaaaaaaaaaagacgcggaactgtcttcagggccctcagaagtggtttaaattctccgcaaggaaaccgaggcgggtactgaggtcggtctcgccctttccagggcgcgcagtgaggt

SEQ ID NO: 33178 - DNA, 122 bp, Homo sapiens
agtgccgcggcggcggccgctgccgggagtgtctgttccgcggttacgcggggtcctctccggtcctgtccagtgaggtcctgacagctgtaccctggcccaacccctgcccacggctgtta

SEQ ID NO: 33179 - DNA, 122 bp, Homo sapiens
atgttttcaagtatgaacttttcactgacctaacactgatgttagccaaaaacaaacacacgaaccttttctttgcccttttattttaggtcatggtttttaaacttttatactcctaatct

SEQ ID NO: 33180 - DNA, 122 bp, Homo sapiens
tgagttttacacacacccacagaagtctgatactgggaggtgagctaaggacagagtatccgtttaagctctaactattgctgggttttgtgggattcaagcaaaccctcaatgctagaaga

SEQ ID NO: 33181 - DNA, 122 bp, Homo sapiens
tctttgcagcctcctgttaaatgagtctgtgatgttgagtgatggatcctgggagaattacgagcttgccctcttgagtctctggagggatctctggcttaccatactgagtgctggaagga

SEQ ID NO: 33182 - DNA, 122 bp, Homo sapiens
tggacaatggattctgaaactgagatcctatactgcattcacacacgttaaggggcagggcgctgggaaaaccccatctcagtctggggttcaaagagtggaaaagctaccctagtccaact

SEQ ID NO: 33183 - DNA, 122 bp, Homo sapiens
acgggggtttccctggcacggggatccacatactcgtctgtgtatcctgagttccgcccgcgcctgatattagccaagtggacactccgtgaatatttagtgtccccggtggcaatgattgc

SEQ ID NO: 33184 - DNA, 122 bp, Homo sapiens
caccgcaagccttggtgacgtcctacccacggtgaacggagtggccgggaccagcgtactcgggaaacttagtctggggattctctcccagagctcacaccaccctcgcagctgcactgacc

SEQ ID NO: 33185 - DNA, 122 bp, Homo sapiens
gacagacaactgtgatactgaaaagtaaaggtgaagataaacaggctttttccttgacagcggggcaccagctgcctgtgagctcctgtctgtctggcacctgggttattcctctgactccc

SEQ ID NO: 33186 - DNA, 122 bp, Homo sapiens
taaaaccctgtagttcactcagctttccacttgaagctgcctgcagaggattctattacccgcggatccctcacaaggggccgcccgcatctgtgagcgcaggagtggcacagctcccccag

SEQ ID NO: 33187 - DNA, 122 bp, Homo sapiens
attggttccgaattagttggtacggccccctggcctgtagcgacaggtgattggctgagacgccctttatcacagcgaatgctaggcgttcggctcgtggtatcccctagcaaccgcctctt

SEQ ID NO: 33188 - DNA, 122 bp, Homo sapiens
ggcgcgctcagactttgaatagggcgtcaggcgaagaatggccaaacccagggcaatttccggggtgggggggggggggcgcttagactgctggtaaactgtaccacgtccactcaccacca

SEQ ID NO: 33189 - DNA, 122 bp, Homo sapiens
caagcccttaagtttcttagcccaatcaccagcacctctaaaggcatctaaaacttcattcggtatcagagaattataggggtggggaggtgcagatcccggttctggtcttgactttgcca

SEQ ID NO: 33190 - DNA, 122 bp, Homo sapiens
gttgccctggtcccggcagatcaagtagccacggcctctgctcagaggctcagctctggtcggcctgcttgtccttcccctcctcgtggcttggtgaccctcctgtgcactcgggcctggct

SEQ ID NO: 33191 - DNA, 122 bp, Homo sapiens
gctgctgccaaatgacacagcccatgtgttacgggccctgcaggaatctctgtgtgtccacggcggctctgagaggtgaatatttgtgtagtgtggggcaccgtccgtgtttcccgccgtgt

SEQ ID NO: 33192 - DNA, 122 bp, Homo sapiens
ctccaagttactggcgtgctgtgggcgttctcgggtttctactcttcctgctgtcgccagcgcagccgaagcaccaagcaggaagctctgccgagttcttggcttcaggtaacgtgtcagac

SEQ ID NO: 33193 - DNA, 122 bp, Homo sapiens
gagagtaaaatggtggttgccataggctgggtaggttaggtgaaaggggagatgagtagacgctggtcaaaggatatgtaattacatttagatgggaggaacatcctgggttgatatccaag

SEQ ID NO: 33194 - DNA, 122 bp, Homo sapiens
agaaatgcttccacatcaagatgtttcaaaaggtactttataaacgaatctggattctaccgaaagctgttacacatctgctttgctttaccaatgaagaacacaaacatgttgatggtttc

SEQ ID NO: 33195 - DNA, 122 bp, Homo sapiens
agctgcggccaggccagctcgaggcgagacatcagccagtccttgtgaaacctccctgcacggtggagacagacagagacagggcaccaggccaggccccttccagtggagggggcagcaag

SEQ ID NO: 33196 - DNA, 122 bp, Homo sapiens
gcaccgggggctgcaagggggccgaagcgacctccccgtcgccaccccgggcccccgagccgcacttcagatttcgcagcgcatcctccagctcagccagttcttcatcccggagccggtcg

SEQ ID NO: 33197 - DNA, 122 bp, Homo sapiens
ataaaagtaccttctctggggcagacataggcaatggctggtgctctagtacgtgatgaccgctgtcacaggtaatagtatcttaagccacaaatacccatttgcatagtattacccagttt

SEQ ID NO: 33198 - DNA, 122 bp, Homo sapiens
aacaggctcgcgggagaaccaaagggtggcaagctcagcacggccagtagctttcaccctcggttgccagtcggcttcgtttcctacaacaccgaccggaagtgtttctgtcggccgcgttc

SEQ ID NO: 33199 - DNA, 122 bp, Homo sapiens
agaggacacattccacaggcaaggggaacagcaagtacaagaggcctgagcagggaggtgcgaatctgccctgctttaagaaaccacaggaaggaagccagtatggatagagagcaataacc

SEQ ID NO: 33200 - DNA, 122 bp, Homo sapiens
ctcaagcgatcctccggtctggggcccccacagtgctgggattacaagcgtgagccaccgcgcccggccaaggaagtcttaatgtacctcttttcagacaggaaaactaaagtgtagcgcgg

SEQ ID NO: 33201 - DNA, 122 bp, Homo sapiens
cctgaagcccgaccccctggcccacctgtccatgatgcctccgccacccgccctcctgctcgctgaggccacccacaaggcctccgccctctgtcccaacggggccctggacctgcccccag

SEQ ID NO: 33202 - DNA, 122 bp, Homo sapiens
cgggtgccggtgagtggggaatgagtggcggagagtgcggcattcttcgcaaggtgtatccgggaaccctctgcagatcctaattgattttccctattgcgtactgaattggccggttacgg

SEQ ID NO: 33203 - DNA, 122 bp, Homo sapiens
tggagggtaagcctcgggcagggctgactcagcaggcacaggagaggcctccatacaactcgtgcaagcccggagtggcagggaagccttggctccatgccaccctggaaaggccccaccca

SEQ ID NO: 33204 - DNA, 122 bp, Homo sapiens
agctttcccctttttactcagctaccaggaagcttagtactaaattacagtaaccacccccgggtgcatagaaacacccgtttatctgtgtctgtagttggtctttgttcttgtattttttt

SEQ ID NO: 33205 - DNA, 122 bp, Homo sapiens
ctcttagcctctcccctcccatacttaacgccgtcgacagtagtcgtctgtcccggtgcccggtaattgatacaaaataaaatgcattctttgtatgcagccaggaggagcggatggcgctc

SEQ ID NO: 33206 - DNA, 122 bp, Homo sapiens
ttcccattacttaaaactttgcaaaggctccctaaggctcctaaagtaaatttaaaaattcgttaagaatggtttacaagcccctgaaccatctagtcaaggcttttgtacttagattcatg

SEQ ID NO: 33207 - DNA, 122 bp, Homo sapiens
cggctgatgtaaggactgcagcttttccctggcatactctgcgccttcagatgtggtctgcgtctgcctgggtctcttcccacctcaatctgagatccttgcccctcacaataaattcgttt

SEQ ID NO: 33208 - DNA, 122 bp, Homo sapiens
gcagaaccaaggtttctgaacttccagtccaatattctctagatctcagcctccaaaatacgtcattagaaaattcctggaagaatgtgcagatattcacagggctatccttgggtaatgat

SEQ ID NO: 33209 - DNA, 122 bp, Homo sapiens
attggccagatgcggaggctcacgcctttaagtcccagctacttgggaggctgaggcaggcggatgaactgatcccagaagttcgaggctgcgcctccagtgagctatgattgtgccacttc

SEQ ID NO: 33210 - DNA, 122 bp, Homo sapiens
gcgcccgggtctctgccccacacgggcggggagctctccccaggagacccgggtgccccccgcctggggcagtcctcaggagttctaggacagcggtgcctgcctcttccccagagacactc

SEQ ID NO: 33211 - DNA, 122 bp, Homo sapiens
tacccgtgctgtgcaacaaattaccttgaacttggtgacttcaccaccactgcatgtcagcgcccagccgtagacgagggtttgggaggcatggctgggcctgcccagggctccctggctga

SEQ ID NO: 33212 - DNA, 122 bp, Homo sapiens
tgccctgttttgcactgtaggcttgggttaccaaacccacctaccactgttaccagtgaccgcccgccacctaccccgacacattccctaagccttttaggggaaaaatcaaaataagaaca

SEQ ID NO: 33213 - DNA, 122 bp, Homo sapiens
atgccctcttttctcctgttgatgtggatgtttggctttcctgtgccaggcaagtgaacccgtttggttctgtagcagtaatgaactactaaatttaaatcatctaaaatgtttatattttc

SEQ ID NO: 33214 - DNA, 122 bp, Homo sapiens
aaggggaggagcaaagggcggggagggcgagtccgggccgggggcggggtcggagcggggcggtgctctccactctgaagcgctgccttggtcttcagcagaactgtttggcgggagatcat

SEQ ID NO: 33215 - DNA, 122 bp, Homo sapiens
tggtagtggccttgaattcagcttagccatctggaaacaagtacagtagcagtgtcgcagcgaggtactaggactgcaattctgctgtacttcgtggcaccttggcttcttgttagatgagg

SEQ ID NO: 33216 - DNA, 122 bp, Homo sapiens
aggacagaagcaaggcaaagaggggtcagggacgaggtaattggagagagacaacacaaacgtctaaagaaaacaggtaagtggggggacctcacaggggtcagagatggagtaattggcaa

SEQ ID NO: 33217 - DNA, 122 bp, Homo sapiens
tggacatgtttcctgtgatctaaatctgatgtaaggaaatgacaattgtgaaagacccagcgtgagagaatctgatgggagggtgggtcatcagggaccagctggcctggctgatgatgtat

SEQ ID NO: 33218 - DNA, 122 bp, Homo sapiens
agccttgttgttgtgttttctctctgttccttgtgctttggtgtcatggaagcacttctgcgggggcgggagtctggactgaggccgccacgttcctgctgtgaaaaccttcacgtgcgctc

SEQ ID NO: 33219 - DNA, 122 bp, Homo sapiens
gctcctgtctgtttgtttgtctaaggctatcaaaagaagtcaagagaggaggctgtggtccggatcctgaccctgattgtatgaataagtaagcaggatgcaagtgattgggttagatggtg

SEQ ID NO: 33220 - DNA, 122 bp, Homo sapiens
cgccgcacccggcccatctggagtttaaaaaaagcttcttcggcaattccaaggtgcagccgggggagagcgctgaatacaacgggcgtcgctatcagtagctccctgggggaaaaaggggg

SEQ ID NO: 33221 - DNA, 122 bp, Homo sapiens
tgacctgctcgggaggggtgggggcagcgtgggtcctgagccgctgttgccgtcggtctccggccccggaccgagtcccctccccggcttttccgtacccccttgaacccccccgccgggct

SEQ ID NO: 33222 - DNA, 122 bp, Homo sapiens
ggagcggggagcggggagcgatgcccggggcggccgcgacgtcagcgtccccgcccctgccgcccctactcccggccaggcctcggggacccccgccccacaaaggggcgcgaaccccaagt

SEQ ID NO: 33223 - DNA, 122 bp, Homo sapiens
tgtcatagctagtaagtgatggaagcaggctctgaaagctgtctctctggctctgacacacgtactctcaaacacctccttaggaagttactgctaccttttggtaataaatgggagctttt

SEQ ID NO: 33224 - DNA, 122 bp, Homo sapiens
cgacccccctcatgtgtgctgccccaaacctcgccgctccctagtttggtattctgtgtccggcctggggtagtagctggacaccagactcaatcttgggctccagttcccgacttttcgcc

SEQ ID NO: 33225 - DNA, 122 bp, Homo sapiens
tctgttcccaagtttgagaaccactggcccagagagggtagcatcctgtgccgtttgtcccggaacgcagcttacggcacactctgggtgccctgcgatgtctgggctgtgtccataggaac

SEQ ID NO: 33226 - DNA, 122 bp, Homo sapiens
agtacgccgtgggcggggccggcgggtcgtgatgttagttcgcgctgtgtggaggcgggccggcgtggcgctgtgacgcagcgggagaagacgggctgggagggcgctgtgctgaacgcccc

SEQ ID NO: 33227 - DNA, 122 bp, Homo sapiens
tgcagttgggctcattgttgtcagggtccctggcgaagcggcgaagcatggtccgcagcacgttatccagggaggtggccgtctcgttcaggacgatgctggcctgcgccaggaagccatct

SEQ ID NO: 33228 - DNA, 122 bp, Homo sapiens
gaaaaattatttgttcagcaggaattgccaagtcaaatacagccatataaagccccccttcgacgtgccaggtgtgcctccggagagcagccaccaaaaccaccagcagcccgtccgcgccg

SEQ ID NO: 33229 - DNA, 122 bp, Homo sapiens
gaggcgtggaacacagacccatggggccttcccactggaacagggagcttggctgtcacccgaccttcgcttccttaagtagaaaagcccagggttccaggctccgtctcctttcccgcaga

SEQ ID NO: 33230 - DNA, 122 bp, Homo sapiens
gtaatgtcttgtttgtggctgaatatttttcgtagatgtttttgaagttgacatgacttacgtgcatttaaatatatattgccatccttagtttgtaattaagatttggaatatggttgtgg

SEQ ID NO: 33231 - DNA, 122 bp, Homo sapiens
gtgattcttagtcacattagaatgagaacaactgccctttggtatctcacaaattgtactcgaccaaatactggaaagctcgagggtgagtagcatgcccctgcaagcctgtgatgattcat

SEQ ID NO: 33232 - DNA, 122 bp, Homo sapiens
ttgaggctagtggggccccacttgattgcaatccctttaaaagcctaaatcagattgcatcgcccgctgtgcaacccgcaaacctgcttgggagctggcgtacgtgccgtagatacttgcag

SEQ ID NO: 33233 - DNA, 122 bp, Homo sapiens
cacggtatcgcgagaacttgctgagcccgggattggttccgccgctccctgccagccaaccggattctctgggctttatttctgtgaatttacccatagcaacagtaattttacctacgtaa

SEQ ID NO: 33234 - DNA, 122 bp, Homo sapiens
ccaccagtggttactttgctctttacacggcattctcaaaactaatgataatagaatgatcggttctgagacaaagctatggggcaagttgaaaagctctaagtgcttcatttaaaacccag

SEQ ID NO: 33235 - DNA, 122 bp, Homo sapiens
atctgttgtaaaagcagcagaatgcttgggttggagaatggtcacaaactggctatgacacgaggtctcaagtgtcactgaaaagtcccattgaaatggaggtcggttctaagcccttttgt

SEQ ID NO: 33236 - DNA, 122 bp, Homo sapiens
tgtttatcttatttttgagactggctatgtctttttgtttttttctgttttatttataatcgccaagggttatggcagtacagtgttctactagattctaaattttctcatgaaatatgtca

SEQ ID NO: 33237 - DNA, 122 bp, Homo sapiens
cctacagccgggaatctcaggagcctggtgcagtgggggctgcctctccgagtccacactcggtcagctacactacactgggcccatgtgagtgactgtctttgttaccgtctcaccctctt

SEQ ID NO: 33238 - DNA, 122 bp, Homo sapiens
ggaccggtcattactcattcatgtcctttcatttcatttcaatattttctgcaaagtcatcgcccgcgccgcatctgcgtggcggggggcggggtggggcggagccacgccgcggagtcgcc

SEQ ID NO: 33239 - DNA, 122 bp, Homo sapiens
catctttcacaactatgaaaagattgcaaccaatatctattatgtgtacgatatttcacacgtgttgtgattatacatgtaagataaattcttaaaagtaaaatttctgactcactgaaagt

SEQ ID NO: 33240 - DNA, 122 bp, Homo sapiens
cttccttccttgccgcatcctgtagcaactgtgtgtcgacctcatctgctggcagctgcacgtatcggaccactgagccccgaatgaagcagttcttcactgataactagacaaagatggac

SEQ ID NO: 33241 - DNA, 122 bp, Homo sapiens
gtcccagctgcctcgtcctgagtataggatttagcctctctatgccaaagtttctccatacgtcagaagggggaaataaaatgagctgacctcacagaatcattgagggataaatcctagct

SEQ ID NO: 33242 - DNA, 122 bp, Homo sapiens
ggcccggccccagagcttccttggtttccttagaaggggccaggaccctggggtccccagcggggagagaacggaggcccgaggctgctgggctggggaagctgatgctcagcttaagctgg

SEQ ID NO: 33243 - DNA, 122 bp, Homo sapiens
cctaattatctatgtatataaattttcatctaaattaccacctcctgggaaatgcaaagccggtggagtaggttttagagctctgtgctctggacaagccaactgttttaattcccagtaca

SEQ ID NO: 33244 - DNA, 122 bp, Homo sapiens
taccagaacatgaatatcagttgaggcagctgaacacagaggaagcccgtggagcctggccgtgagccaggtgctcaaggcgggcggcgggcggcggccttcaaatggcaggggggtcattg

SEQ ID NO: 33245 - DNA, 122 bp, Homo sapiens
gcagcacggtctgctctgtgtcgctgtgtgtctgaaactgtctagggagaggctgaaggacgcaggccagggaagtggggaaatttgaacacagcttggagttcttgaggggggagggggca

SEQ ID NO: 33246 - DNA, 122 bp, Homo sapiens
cctgggcccggaccagtcctgatatacccagggagggcggtggggtggagcagaaccgcccgaccacagctgattacaggctccttggggtgacctctaggcctgggcacctcaggcattcc

SEQ ID NO: 33247 - DNA, 122 bp, Homo sapiens
ttcctctttgcatgaaagaccgaagaacctcaccccccaccctaaaacttatcaaagaaacgagagagaatgaagttaaacatggaaaaataccactcattccacaagcttttactaagcac

SEQ ID NO: 33248 - DNA, 122 bp, Homo sapiens
gaaatgggattgttcctggtgccctcggaggagtgtggctggagggctataaaagaagagcgtcataggattaatgttaattgctgtagcagcaattgcagcaggcatgatggagacccagc

SEQ ID NO: 33249 - DNA, 122 bp, Homo sapiens
agagcgtaaagcatagcttgcaccccaatacacttttggcttcttgggtttgggccgtctcgatctgagcttgcaccctgctcttcatttccttcttttccccaagctggggggcaccaggc

SEQ ID NO: 33250 - DNA, 122 bp, Homo sapiens
aagttgttgagcacagggctgttgtcattctggtcaaccaggcggacgtgcacagtggcccggctgaccaaaggagcagatgtggcctgcaccacaatcacatattcttggcgagcctcata

SEQ ID NO: 33251 - DNA, 122 bp, Homo sapiens
aagacacaatgaccccgacgccagactcaagcggggaaaagcgggcctagagctccagggcgggagcgacgccgacgcctaaaacattcttgaaaaagaagaataaagtgagttgaaaatca

SEQ ID NO: 33252 - DNA, 122 bp, Homo sapiens
taaagacagaaaagtaatgatgcaaatgaatagaataagaggtgttctatgtgggggtctcgtagaaaaccagagacaacattagtgcatagagagaaactatagctttggaaagggattag

SEQ ID NO: 33253 - DNA, 122 bp, Homo sapiens
ccagccagagcagcttgcgggcgggtgtgcagaagaaccagccctccagacgcgtgggcacgtccacgtccagcccgtcgccgcccaggtagcggtggtggtccacgtggtacttcttgaag

SEQ ID NO: 33254 - DNA, 122 bp, Homo sapiens
gctcttggaggataccaccattgttggctgagagctctgggaagtactttacccagaaggcgctagttgcaaggcccaggatgagggatttctgggcatgcttgtcaggccagggagtactg

SEQ ID NO: 33255 - DNA, 122 bp, Homo sapiens
tagctggcttcaggctgggactcagtccctgcagttcctgccaggccttgccagccggggcgagggttgggatgatcctggcggcctatgcctgtgtgggctgcccctcccgctgtgaaccc

SEQ ID NO: 33256 - DNA, 122 bp, Homo sapiens
ttggccgccggcggcaagctgactggctgctaggctgctggctgcttggccacagacgggcgcacggagacactcgacgccgctcccgccgccgccgcgctcagcgccgtctgccccctccc

SEQ ID NO: 33257 - DNA, 122 bp, Homo sapiens
ttgcaacattcctgtgggatactccctgtcagaggtgtcctgatgtttcctgatggccagcgcctgactcaacacgctccggctcccaaagcatcccagtctgccaggactccctggttgtc

SEQ ID NO: 33258 - DNA, 122 bp, Homo sapiens
ggacagaggcaggtctgagccgggctgtaggcccgctgcgacttttacaccgaggcctgccggctcaggatctgtcccctttgcaggtggtttgtagagaaaaactacattaactacaaggc

SEQ ID NO: 33259 - DNA, 122 bp, Homo sapiens
aacccagacagcttgctcccaaaccagcccagagctcagaggatttgtgctacattcctacgccggcctgagactctgagcctgggggttaaactgtaaatcaggaatgactgaaagcaata

SEQ ID NO: 33260 - DNA, 122 bp, Homo sapiens
gcgttagggcggtgctttctggccacgtggtctggcggccgattgtgcttctgggctccgcggggctacctgccagtgattttgtgcgcctagtatgtgccagaacgttatttacaatgaag

SEQ ID NO: 33261 - DNA, 122 bp, Homo sapiens
cccaagtgtgcaatctggcctggtccaagcacgccaacgagctggtgagcacgggcggcccggcctcccaccaggcctcaggatgtgcgtcctgctggccccttacctgccacctgagagca

SEQ ID NO: 33262 - DNA, 122 bp, Homo sapiens
cgcccttctatacttctcgctctttcttcaagtcacttctacccggcgagcccgccctcccgccaatcgtcatttccggcgggtgctctgcgtcatttacgtcgtcacttcctgccgatgcc

SEQ ID NO: 33263 - DNA, 122 bp, Homo sapiens
catctcatacatcaaataataccctcatctcatatgtcatttaaagaactcctccttcttcgaagagtaccagtgagaggtaaggagaaggcagacatatctacttgatcctttctagagga

SEQ ID NO: 33264 - DNA, 122 bp, Homo sapiens
tgaggcaggagaatcgctagaaccgggaggtgagtccagatcacaccactgtgctccagccggggcgacagagcaaggcggctccatctcaaaaaaattaaaaagatccgggaacaatgaag

SEQ ID NO: 33265 - DNA, 122 bp, Homo sapiens
ttcccagatgggacggtggccgggcagaggcgcttctcatttcccagacggtgaggaggccgggcagaggcacgcctcacttcgcagacgggatggcggcgaggcagaggcgctccttactt

SEQ ID NO: 33266 - DNA, 122 bp, Homo sapiens
attaattccagtttctcaattgcaaaagtgaggctggtcatggggcttggaaccacgccacggacgcatgaagcctccccgtttacatgccaaatccagagcttatgcatccgtgctcaggg

SEQ ID NO: 33267 - DNA, 122 bp, Homo sapiens
aggagagtaggcgtgtggactctgggcctttgggctggagtgtctattggtcagaggtgtcgggttcggccatttcaccctcacctctaggctggccctgctgagagggagagagagtcaca

SEQ ID NO: 33268 - DNA, 122 bp, Homo sapiens
ttttcccttttctctaagctctgatgtaaggtagtgtctcaggtaattgactcatctgcccgtatttgttcattacagctgttgctaggaagttattatgtaaatggccctgctcctcaatc

SEQ ID NO: 33269 - DNA, 122 bp, Homo sapiens
aggaccatgagggggttgagtgggacgcagctccagcatctaaggagcctacaggtccttcgtggctgggaagaaagcctggatcctgactcactaagctgctctgagggagagcctcaggg

SEQ ID NO: 33270 - DNA, 122 bp, Homo sapiens
gggaaaacggaacctgctgataactcagtgaattaattgctgcggggtagtgcggtggagcggagcagggagggaccataatatcaccctccactggtgagcacagatttttacccctgcta

SEQ ID NO: 33271 - DNA, 122 bp, Homo sapiens
ccctgtcactcagggctgaggggcggagcctggaaccccatccaatcaggggccctgggacggggccctgccaactgtcaatccggggaagcagaaggccgcactcagagtctctgcactcc

SEQ ID NO: 33272 - DNA, 122 bp, Homo sapiens
gaagtatttttcccattttgcggctgagcacgggagcctcggggctcagtgggtgggtcgcgcaggcttcctgtgtctctttaagctcccttcggctttcccttgagaggccccctgtcctc

SEQ ID NO: 33273 - DNA, 122 bp, Homo sapiens
tgtttgggcagttgcagctgtgcctgggagtggggcaggactcctgcctgctccacggagcgaggctgtgtatgcagctgtggtttgggcagctgcagcagcacccggggagctaccacccc

SEQ ID NO: 33274 - DNA, 122 bp, Homo sapiens
cttctttatgctttgtgtcccttaggttaactccgttgactgccaaaatagcatccccaacgtgcagccctccgcatctatcagcaggttgccccggatggatctcagagatgaggattgga

SEQ ID NO: 33275 - DNA, 122 bp, Homo sapiens
ctgccagccccaggcgaccacgtggtggtaccttctcatggatctcctgcgtggactgcgcgtcgcagaaggccacagtggccacgtccttcaggatgggcatctccactgtgcagtcccgg

SEQ ID NO: 33276 - DNA, 122 bp, Homo sapiens
ataaatacctgctgagtgaatggcagctccccgcagcccacccaaaataattagttggtccgtgtgacaaggccttagctatgcctgagccacatagcttcctctctcctgccattttccaa

SEQ ID NO: 33277 - DNA, 122 bp, Homo sapiens
tatctaatcagcagggactgcagggccatctatttttctgctccactattctcagtgcttcggttccaacctcaaagtaacctcatggcccagggtggctactgtgagctacacagccttgt

SEQ ID NO: 33278 - DNA, 122 bp, Homo sapiens
tctggggccgccaggcgaccagggcgcaggcgggggcggacagctcattgggaggggcgccggggcacagtgcggggctcgccccacccccaggtgccccttccccgctctcgcctcgcagg

SEQ ID NO: 33279 - DNA, 122 bp, Homo sapiens
ttcatggatgcctgctgccctgacgttattgttaaaaatgactccttttatttaaaaaagcgttaatttagttgacaatgaatagagtgggttttcctggcagaggatctaaactgagtaag

SEQ ID NO: 33280 - DNA, 122 bp, Homo sapiens
aggggcgtgtgttcgggagggggtcgcggacaggtcaggcggcttgggacccaccccacccgggcaatagtgacctactgcttcgctagcgtcccctttcaggtcttaactggactttaaag

SEQ ID NO: 33281 - DNA, 122 bp, Homo sapiens
cgctgatgtgttgtaggagaaagacgttgttatgacaatgttagcctctcagcagattgccgagcctggaggattgcatgcgagacgtcacacaaacactttttggagctaataatgtcgcg

SEQ ID NO: 33282 - DNA, 122 bp, Homo sapiens
cctgccccaatctcggattcccaaggctcccccaggcggccctccctcagctgggagtcgcgtcctcccggatctgcccagaggaaaagccctgtgccggtcgttcccccgaccctttgatg

SEQ ID NO: 33283 - DNA, 122 bp, Homo sapiens
caatgaattcttctgctgtctccgcgagagcctggctggaaattctgagccagaacccgccgtaatggagcagaaaggacagacagaggcgggaggccgacgcccgggtgcgggtgccaggc

SEQ ID NO: 33284 - DNA, 122 bp, Homo sapiens
acccatctggtagggcgaaggcgtgggatggccaattgcttggtcacacacaaaaccttccggcaacgtgccttttccaggggaccagctgtgctggagtcagtgatgctgagagattattg

SEQ ID NO: 33285 - DNA, 122 bp, Homo sapiens
cctgaaaagagaggttatcttggcacctagactgctttcctctcacaggtttctgtccctcgagtcccaagcctccagtggatccttggccggggccggggcggaggcggcgaggccaggcg

SEQ ID NO: 33286 - DNA, 122 bp, Homo sapiens
atatctcccctggtctcagactctaccactcatcatttattaagtaaagattttgcaacccgaacatgaaagagaaacaactttctgctcagttgctcaagacatcataaatgattgctgtg

SEQ ID NO: 33287 - DNA, 122 bp, Homo sapiens
ccgtgaccgtcacgtgccggaggccgcggctgctcgcggccagaccttcgcatcgagggacgtgagggacatttgtcctagagggcccaagataagaacgagaggaagaaccgggaggcaac

SEQ ID NO: 33288 - DNA, 122 bp, Homo sapiens
caaggcagacgtgcagatgccaagccgcacttgctcactaaactcacgtcctcgctacaacgtagttgtcgagtaaatgctctccatggattaaaaatataagcagagatggccgggcgcgg

SEQ ID NO: 33289 - DNA, 122 bp, Homo sapiens
tgacgccgtgcccggtgtcctcgactacaagtcttcctccacagccctgtatggcgagagcgacctgtgaggccccagagagacccggacccaacaccccctatggcctccaggaggggccg

SEQ ID NO: 33290 - DNA, 122 bp, Homo sapiens
gaagcagaagctctctctcaaaggtcgccccatctggccctggctcatcacattcctcagcgtaaagcaccctctgcccttgttctcgttgcagcaatcctatgagggttagggctaggggg

SEQ ID NO: 33291 - DNA, 122 bp, Homo sapiens
tactgtttttcattttcatacagtacagtttctactgactgcatgatgcttttgtagcatcggaaaatcaaaaaattgtgtcaaaccattgtaagtcaggggccatctgtagttcataatcc

SEQ ID NO: 33292 - DNA, 122 bp, Homo sapiens
gaagaaagaggtgaaggcgtcgtgaagagctgacagatttacagcgctcagggccataaacgggtccctggcgggaagaagggcgcgttcccggctgcacgcccccgccgccccgtcgggaa

SEQ ID NO: 33293 - DNA, 122 bp, Homo sapiens
gggttggcggaggcacagaggcggggcagggagctgcgggcctgcctctggcctgagtaccgtttccctgcgtctcggcctctcctgaagggagctgggccctggggagcctctggccaagg

SEQ ID NO: 33294 - DNA, 122 bp, Homo sapiens
gaacttctggaaggagttctcaggcccgcgctacttttgtagtgcaggaagcaggcggggcgcggagaggaggtagaaacgcggagctccttcgcaaagagggcggcggcgccgcgtctgcc

SEQ ID NO: 33295 - DNA, 122 bp, Homo sapiens
atgaagtctgggcttaagcgaaccgcctgacacagcctcctgagtatctaggactacaggcgtgcactaccacatgcagctaattttttgctgctgttgtaaagacagggtcttgcccaggc

SEQ ID NO: 33296 - DNA, 122 bp, Homo sapiens
ttctgatcaaatcacagcatgagcgactctagatttatatactgggtgccttcctggaaacgtcagtgtcagtgaaaaccgtgccagtgacacacccgtagtttttacccgcacggttgttg

SEQ ID NO: 33297 - DNA, 122 bp, Homo sapiens
ttttaaaggaagaatatgacatattcaatccagcagttaagattctccacaggtctcccgcgggcgtcagcaggggcggcggcgggtgggaaatggcggagtgtccagcctccatctttggc

SEQ ID NO: 33298 - DNA, 122 bp, Homo sapiens
cggcggtgcgcgcaggtaggcggggaagtcccagagctgctccaggggtgtcctttccagcgggctggggcgggccggcgggctggagtcggggtgcagccctcacggccctttgtcttcac

SEQ ID NO: 33299 - DNA, 122 bp, Homo sapiens
ccgaacgcaactgatttgttttcttacaaactcgctactgtgtagcggcaccgcgttgcccggcgcgcgaccttacggcgttccgcccacagggcctgcataaccagtggctgcgcgtcgcc

SEQ ID NO: 33300 - DNA, 122 bp, Homo sapiens
cctcctccagccagagtcggtgggactggctgcgctgccctgaagtggttctccaagcagcgcggagggtggcggacggcggacggagcccaggggccgcgtcgggtggggaaacccgaact

SEQ ID NO: 33301 - DNA, 122 bp, Homo sapiens
aggaggaagtttttttttagggggctgagatgctccatgcctttccccgggcagccttgacgcgcggccctctcggcagagactgagcggcgagaaagtgcgagccgggccggcagaatctg

SEQ ID NO: 33302 - DNA, 122 bp, Homo sapiens
tggtaacacaacagagtgtcagacagagggaagggcaaacctcgccgggccctggaggctcgtcctcagcggggacacaacatcctggggaccccggccctgcctcctaccaccctgggccc

SEQ ID NO: 33303 - DNA, 122 bp, Homo sapiens
aaaaaaaacgaggcccaggtcccaaatgttcaggactcagcctgcttcctaaggtggctccgaccaggcatctcagagcattccagaaaccctggagacagaatgcagccggatgcggccga

SEQ ID NO: 33304 - DNA, 122 bp, Homo sapiens
ccggggggccgcggcatgcccttgtcgaagcgggaagccgggagccagggggctgggctgcgggcccggccgtggacgcgagcgttccccggcgcccgcgcgcggcgggctccgggctccgg

SEQ ID NO: 33305 - DNA, 122 bp, Homo sapiens
tcgcagccgcctcctgtgtgggcatctttcacggaaatttctgcccacgttcaatgcgtacgggtctctagcactgaggctagctcaactcttcggggcaggagaagttgcgcccagccagg

SEQ ID NO: 33306 - DNA, 122 bp, Homo sapiens
gaactgtacaaacaaggcccaggattttttcgtgtaaatcctcatctggagctagtaacacgtgtcctgaatccctggttgtacggggccagttccttctccttcccaggagcaaggaggaa

SEQ ID NO: 33307 - DNA, 122 bp, Homo sapiens
aaggccagaaataacacatggtgtgagcgctgctgaatagggcaccgtcctagccctttccgggggatgactcatcatgctaccattccagcaccagctggtacggggctccaggctagcgg

SEQ ID NO: 33308 - DNA, 122 bp, Homo sapiens
ccgcctctctcatgaggctatagggccagcaggcagctctgggctgctctgatgcaaagtcgtggctgctgacacgtgattctgtggcgaaacttcttcctaggtctgctgccaactggact

SEQ ID NO: 33309 - DNA, 122 bp, Homo sapiens
ccgagcttcccggtgaaaacagctctccccagagaagacccagctctggcgggaaagccccggaatcgcaaccggcctttccccaagtacggctgggcgctgggatggggcctgctgtaacg

SEQ ID NO: 33310 - DNA, 122 bp, Homo sapiens
tgcaggctattcattgtcatgcaaattgtgctgcccttgtggcctgagtggtagagccaccgtattgacctctgaattactttcagtgtctgcagttatcagatcttagaaatgaacagcag

SEQ ID NO: 33311 - DNA, 122 bp, Homo sapiens
gaaatatgaatgctatgcttcagtttgacatagatgattaacaatgtctagtgtcttcaacgatctgatcctacaaattctttccaccaaaacagtgtcctaacctttctgggcctcaattt

SEQ ID NO: 33312 - DNA, 122 bp, Homo sapiens
aggctgaggtaagaggatcacctaagcctgtgaggtcatggttgcaatgagtcatgatcacgccactgcgctacagcctgggcgacacagtaagaccctgtctcaaaaaaaagaagtgtgtt

SEQ ID NO: 33313 - DNA, 122 bp, Homo sapiens
tttccatatttacttacttagatttgtaagagaatctactggggctgtctacacagtgcacggatcccctctacaatatgcctaccagttggccatgcagactctgaacactgcttttgtta

SEQ ID NO: 33314 - DNA, 122 bp, Homo sapiens
tgacacagggtgtgtgcgggtctgcactctgctggggcagtgccggaggccattaggcagcggagcccacctcctcctcccggggccaccacagccccgcccagctgcgccgggagctgggg

SEQ ID NO: 33315 - DNA, 122 bp, Homo sapiens
gtgggaatataggggccaggccagccaccaccatctatgtgtttggagccacagcgcccccggtggccatgtccaacacagctgggcaagccatgggctcaaagggattccaaccagaggtg

SEQ ID NO: 33316 - DNA, 122 bp, Homo sapiens
ctcctgcctcccagcccttgggcaagggcagggggctgattgccacgagctggaacaggacgcagtgtctcctgaaaagccggttgaggcagccacggggaggggccgaagacccagggcag

SEQ ID NO: 33317 - DNA, 122 bp, Homo sapiens
ctggcctggcctggtctgatttccgcctccgtggttaggtctggttttagctttgatgaccgtgccctgccccaccctgcctggtggcctggggaggctcctagtgcagatatgtggagggt

SEQ ID NO: 33318 - DNA, 122 bp, Homo sapiens
ggtcacctggatgtgcagccagggccaactatccctcagctcctccctgtcacaggtgcgcgctgcccacagattgccacgactggggggctccctaccagtcgcagcccaccctcgcctca

SEQ ID NO: 33319 - DNA, 122 bp, Homo sapiens
agattggaaactcgtaatttcccgctttttggtgaaactcgttgacagacaccatctgctcgctactaccaggctgttgaaagcagatggtggctgaggtttctccaaagctggctgcctcc

SEQ ID NO: 33320 - DNA, 122 bp, Homo sapiens
ggagcctggccaggacctggccaatcccaggcctggggccctggtctggttcctagttagcgggcgggtgtaaaagcctggaaaggggcgatgcctggcctgaggagttgaccaatcccagg

SEQ ID NO: 33321 - DNA, 122 bp, Homo sapiens
gcagtggcttctgccatcatcaccacatgtttctctgctgcccactgtcctgaggtgggccgtcgtggaagccctgcttcctgccgtttgcgggacgagtcccgccctcttttttcctgtcc

SEQ ID NO: 33322 - DNA, 122 bp, Homo sapiens
cactgacggtgggaggctcgagttagaaattaggataggaatcttcgcccagttttggagcgcctgcctcctcttccctcgttgctcgcagccaaggcagccgcgaagctgggggcctcggg

SEQ ID NO: 33323 - DNA, 122 bp, Homo sapiens
aaacgtagtaattacggcgatgataaagtttccagcgggtctccgccctccgactcctggcgagcctccaggaccgctccccttaagcagagtcctgtccagtccgggcaccgccctcgcag

SEQ ID NO: 33324 - DNA, 122 bp, Homo sapiens
taggatgtttacaataaatgtgtgccagagagtgaagcccctgtaacacagtgttaacttcggcttgagtaaaatgagtgaggactaaagctagcactgctttcccacttcctctggcccca

SEQ ID NO: 33325 - DNA, 122 bp, Homo sapiens
gcaccggtggcgtgaaaatgcagggaataaatccaggtagtcagagcacagggctcctagcgcggactttcccctgggaagatgattcaggctcataccaatgggcgataagcagatggcaa

SEQ ID NO: 33326 - DNA, 122 bp, Homo sapiens
aaatcccttagacttgctcccgagcaagtctttccctatgaaaggccaaactctaagcttcgtgaagaagcctcctacaaggacactggtctggagcgcccgggcctccgcgtctccaggag

SEQ ID NO: 33327 - DNA, 122 bp, Homo sapiens
taggaatcaggggagtgtcttctggaggccactaaagcaggaatagcattttcatgttagcgtgcacgggcggtctccgcagcccctcctcgtgccggagcctgtcctggggcctgcggggc

SEQ ID NO: 33328 - DNA, 122 bp, Homo sapiens
ctgacctgatctctactctccccctggccagctgaggaggagaacccggccttctggaaccgccaggcagctgaggccctggatgctgccaagaagctgcagcccatccagaaggtcgccaa

SEQ ID NO: 33329 - DNA, 122 bp, Homo sapiens
ttctcccccaaggctgctgtgtggaaggctggctatgcgcactttgtcctcacccaaacccgttctccaactagggtacatgaggctcagaggtctcacacttcatgggacagaaggatgaa

SEQ ID NO: 33330 - DNA, 122 bp, Homo sapiens
agcaaaaggtctggagcacagaggctggtcatttaccccagggccaggaagatgaaagcacgttcacccgccatttgcggctgccctagcgcgttagtaccatctccccgtgcccacagata

SEQ ID NO: 33331 - DNA, 122 bp, Homo sapiens
cgccccctcccaggccccgccccggccccccagacccctcaccgtgtagtgtatgtgaagcgtgtctccaaaagcagcgggctcggcacatggttctgggggctccacctacgatcggacta

SEQ ID NO: 33332 - DNA, 122 bp, Homo sapiens
tgaggtaagtgggggtggctcctgtccaggcagcccggccggtgggacagtggggagggtcggctccaagccctcctgagccctagagggggtgcgggacggggactcacaggagatgcagg

SEQ ID NO: 33333 - DNA, 122 bp, Homo sapiens
tccctcaaagcggcaggccaggaagtggggagccccaggtgtgggtgcagcaggctgcaacgccccccacacacagacttggcctcagacagctgtcacatggcaccagggaggtggccagg

SEQ ID NO: 33334 - DNA, 122 bp, Homo sapiens
ctctgagcagcaagactgcgcaggacccgacatttgcatttctaaacagctcccaggggacgccaatgctgcgggctgaggcccacgctggaggaacaccggccagtgggcagctttgggtg

SEQ ID NO: 33335 - DNA, 122 bp, Homo sapiens
ttgtaagcaggagatatcctgaaatctggttctccctacataggatgaccagccagaggccgatgggtggaatgttcccacagagtcagagaggatgtgagtcatgccttcttacatcattt

SEQ ID NO: 33336 - DNA, 122 bp, Homo sapiens
ggctcagctttgcagcaagcaaaggtctcctccccatcacttaccaaaggccagcaaggacgcccacagcagcatggaagcctgctccaggattggagaaggagttctgaggagacaagcca

SEQ ID NO: 33337 - DNA, 122 bp, Homo sapiens
tcccacactggcccgtggcagggcccccaagccttttcccaaactgatcacagaaagtgacgacccgttcgcccggcggaccgggggcgtcgggcaggtcctggtccaagtgagtgcccgcc

SEQ ID NO: 33338 - DNA, 122 bp, Homo sapiens
caccgtggccctccacagaggggcggcccggtgggcagtgtggggtgctggaggtgttgacggtggccctgaggagcgggggtgcctccatacatggagattgggtggcaccggcttggggg

SEQ ID NO: 33339 - DNA, 122 bp, Homo sapiens
gacgtgaatgtagtagggactgtgcggatgctgcaggccttcctgccagacatgaagaggcgcggttcgggacgcgtgttggtgaccgggagcgtgggaggattgatgggtgagtggtaggg

SEQ ID NO: 33340 - DNA, 122 bp, Homo sapiens
gtttagaaaaagtggcaaattccaggctgctagtaaacaaaggagggaagacagacaaaacggaacagcaacaacagaaaacccaagaactagatgcccaacaatctgggtctgtatcttga

SEQ ID NO: 33341 - DNA, 122 bp, Homo sapiens
ccggccgcgccctcggcctgtgacgtgctgaagatgagcgaggagcgcagcctggagctgcgctggaccagggggttcaggcgcgagcggaatgagtcctgcttggccaggccaggctcctc

SEQ ID NO: 33342 - DNA, 122 bp, Homo sapiens
ataaaaaaacaggcatgtatgagactagatgttctacagtcatccaaagaatgacaaaaccgtttcaagaggaacatgataagatctgctggcaaggatctttattggcatcctgggaactt

SEQ ID NO: 33343 - DNA, 122 bp, Homo sapiens
gcaccgaagcgccacggggtcaggcagcctggctttgccccagagcggcgggagatgggacgcccagcctttgggatttggggtgggggtccctgagtcaagagccaagcaccagtagcggt

SEQ ID NO: 33344 - DNA, 122 bp, Homo sapiens
tcctttggggaaccttggaaccacggtcagaaaggttaggactgatcatttggctcttgccggaaatcgttccgcccggtgaggtttcggcgtgagacccgaggagggcggggaagaggcgt

SEQ ID NO: 33345 - DNA, 122 bp, Homo sapiens
ataaaaaggtccatcgtggccagtgcttttggggacttgagatgatgggtatccggtgcccgggccctgcgtggtgcctcagctggatgctctgcaggtgggggaggccatgttggctgagg

SEQ ID NO: 33346 - DNA, 122 bp, Homo sapiens
ctgctttgagtggcttctgggcgcctggcgggtccagaatcgcccagagccgcccgcggtcgtgcacatctgacccgagtcagcttgggcaccagccgagagccggctccgcaccgctcccg

SEQ ID NO: 33347 - DNA, 122 bp, Homo sapiens
tcagctgtggattgagtctagatcattctttaatagtggtaatcattggagtcttttattcggttcttttaaattttttgaggagggtggagaactggcctttacttatattcctttgctta

SEQ ID NO: 33348 - DNA, 122 bp, Homo sapiens
gactctggctgggatggggggtgaggtcaggcaaggggaggatgctttaggagtccagtgcgaatggggatcttgcaatcatgattatgagggggaacaaagaccctttccttccgacgaca

SEQ ID NO: 33349 - DNA, 122 bp, Homo sapiens
ggtcgggcactggtgtcttcctgcagctccttctgagcgcggagacacaagcgtgcacagcgcaggaaattccaggctcagtttccagaaaaaggctctttgtccacagcgaaaaaggacgc

SEQ ID NO: 33350 - DNA, 122 bp, Homo sapiens
gccacccacctctgagtgacggcactgcaccgctcttcaccagggtacagggaagggagacggccacccacctctgagtgacggcactgcaccgctcttcaccaggacacagggaagggaga

SEQ ID NO: 33351 - DNA, 122 bp, Homo sapiens
gccgagaacaatggccgcctgtcactgtggacagctgtctcccaggctaaggcaaggctgcgctcccagggaatgcgggcagggagccagggcggagggcagaggacgagagcgaggaggag

SEQ ID NO: 33352 - DNA, 122 bp, Homo sapiens
actggagggagggctcctctatggcaatgcagcggacggccctgaggtgtgtggcgtccccgcccgacctgcctggatgtcctagtgggaagctggcgtcacggatgctggtgtgatgggcc

SEQ ID NO: 33353 - DNA, 122 bp, Homo sapiens
catttaacagtccaaagtcccactaacctacccaccctgatgtttattcaacacacatatcgggtatctcattggggtaagggtgatgagttggctacctctcccctcttccacttctcacc

SEQ ID NO: 33354 - DNA, 122 bp, Homo sapiens
ctccgcagagggagggaggcggtggcctcagcagttcctccagcagcgttcctgagcgggcggcagctgggccctcttcccacagccacgctggggttgccatgcctgcaggtcttggggcc

SEQ ID NO: 33355 - DNA, 122 bp, Homo sapiens
ggccgaaggtgattgtcaggactgcgggcacggtgaggaaaaagaccgggtgccggctcacgcacaaacccagcctgtggcagaacgactggagccctctgcgaagcacctgccgcagcatc

SEQ ID NO: 33356 - DNA, 122 bp, Homo sapiens
gggacctgcctgttagctaggcatgccacattaactgcagctcacatgtagtgccaggggcgaccaggctgttgcttaacaaggatgcataatagctaattgcattttaggccattggtttg

SEQ ID NO: 33357 - DNA, 122 bp, Homo sapiens
ggtcacgcagggttctgcagatgggttttatctccagagcagagaaccttaggagggttacgcaagctgcagaggggcaaggtcccactccaaagtggagatgcatctggccgtggagcgcg

SEQ ID NO: 33358 - DNA, 122 bp, Homo sapiens
actgatatcttcattggacctagctggcctgtcagattccaacccttggttttcaaaggacgaaatgtaaattagattggaaggagtgtgggattagcaggaagaagtgcatgtttcctcca

SEQ ID NO: 33359 - DNA, 122 bp, Homo sapiens
accttcccacttgctgaattttttttccctgcagcttaatttcccctaaacactttgcatcgctccctccccccaccatggccctgaagattctccatcttaaataacaaggaccctgctgg

SEQ ID NO: 33360 - DNA, 122 bp, Homo sapiens
tcagcgcagcccttgcttgggtaattttttaggaaatacttttggggagatgtgttcatgcgagattgcacctttcagctgttgccctgacagccgctggggttccctcgcgtcatcagtga

SEQ ID NO: 33361 - DNA, 122 bp, Homo sapiens
tcatttaaaacaatcaacgtttccagtgtaaaaatacgtgggcttattgcatctaccccacggatggtttatctttttctttccatcagacttgccgcaaggttatgtggctgttattttgt

SEQ ID NO: 33362 - DNA, 122 bp, Homo sapiens
gataatgatagcgtcagcctcgttggcttcctcttcagatgcacgctcaggaaaagagcgcggagacctctccaagattagaacaacttaaaaggatttggagggcaggcgaagacaggttc

SEQ ID NO: 33363 - DNA, 122 bp, Homo sapiens
attgaggtcttcctaacagtgtgcatacagttccttctgcctctttgtgcctaccttgagcgccactcgtaacacatgatgagaacatcttgatggggcaggatgtgtggacactggcaaga

SEQ ID NO: 33364 - DNA, 122 bp, Homo sapiens
gggcagggaggggtgctgggaaacacgagaggggcaggcatttgacctgggtcctgaggacgggctgaggttcccagaagaagaaaaaccacatcagtcagaggcaccagtaggtgcccata

SEQ ID NO: 33365 - DNA, 122 bp, Homo sapiens
agaatgaacaaatgttttaggcggtttttcattctttgaaagaaaaatggcaagtagtcacgtttgttaggtgatggcttattttaaataatcacaaaatttatgtttgagacattttattg

SEQ ID NO: 33366 - DNA, 122 bp, Homo sapiens
acacttccttatgtgggttcttctgccaggagcacctgctaccttcacctggaaaagtcacgctcctctatcagaatgcaaatctagcatttcctcccctgagaagccccctagcatcctct

SEQ ID NO: 33367 - DNA, 122 bp, Homo sapiens
ggccccgcagctcccgcctccccgcgccgctgcggagacggctcaagggggagggcgcggcgcgcactcgcaaccgagccttactccctgccctgcagcctggccggccgggtctggggctt

SEQ ID NO: 33368 - DNA, 122 bp, Homo sapiens
tgtgacatttgtgcaacaaagaaattgcctaacaacacatttctcagatctttatttgttcgattatttctttaagagactggatcttactgtattgcccagactgttcttgaactcctggg

SEQ ID NO: 33369 - DNA, 122 bp, Homo sapiens
gaccttttttgtgaagctgggcctttcaacagagtgttaggttaggattctttccaagcccgtagagcaatgcagacaagagatagtcccttggtaagccaattctctatttcagccttctt

SEQ ID NO: 33370 - DNA, 122 bp, Homo sapiens
agctcccagatggtctcagccctccatgctccccgctacttcaggcgggatggagatggacggctcaggttgctctgatgcctgcctgcataagggctgccctgccagcccattcccctgcc

SEQ ID NO: 33371 - DNA, 122 bp, Homo sapiens
aggcgtgagccaccccgcccggccagcaggtttcaataagtatgttgtgacagaaagggccgctttgtcagcaaagaaagaaatagaaaaactcactccgcccacagttttttttaagagac

SEQ ID NO: 33372 - DNA, 122 bp, Homo sapiens
ataccaaaaaagcatcagtgagatgctcccctgcctgccagtggcaagattcagggcttgcgttttggaagcttctccctgtgtggtcgggccatcacagccacatttcacaatttcttttt

SEQ ID NO: 33373 - DNA, 122 bp, Homo sapiens
cactcgacctacaggaaagttgctcccgagctgtggaggggcgtcatcgcctcctagcaacgctcctagcaaccgggtaacatctgctccctgtggtccaatgcgagctgagaacagctgcg

SEQ ID NO: 33374 - DNA, 122 bp, Homo sapiens
ggagggggccgtgttcttctgcgctgacgccgccgatcctcgcaggggcttcgtgtgcatcgtcaccaacgtggcctcccagtgaggcaagaccgaagtaaactacactcagctcgtcgacc

SEQ ID NO: 33375 - DNA, 122 bp, Homo sapiens
gtaataataataataaataattcattggagaatgatcaggagagaaagtttgcaaattaacgacggcagagcaagtgaaggaattccatgcatgtataaataattttgccttaaggtttgaa

SEQ ID NO: 33376 - DNA, 122 bp, Homo sapiens
gttaataataattattgcttctctctgaccagaaagtagttttgatgaggttgtttagagcggatgagattgtgctaagtctgggaaatgaagtcagccaatggcaggaagaggtttctatt

SEQ ID NO: 33377 - DNA, 122 bp, Homo sapiens
cctctgggcaaggaagctgcagagctacactgagggttagggctcttgccaaataggctgcgatttagggcacattccagttccaatagccaactggagtctggcaggagaaccagtgcaaa

SEQ ID NO: 33378 - DNA, 122 bp, Homo sapiens
gctcagcacagactcggagagcatcgcgagggcggagcagtgttctccttggcacagacccgggcgggccaggggcaccgcgagggcggagctgcgttctgctcagcacagaccagggggac

SEQ ID NO: 33379 - DNA, 122 bp, Homo sapiens
agagagaggacaggggagagagggaagggggaggatggatggctgtgtgcggctcggcgccgttctgccacccctatttatacgccgggaggctcctgacgcagcctgcgatcgatcacggc

SEQ ID NO: 33380 - DNA, 122 bp, Homo sapiens
cttgaattcctgggctcaagcgatcctccagcaaagcgctgggattacggacaggagctgcggcgccggcctaaaccagattgtgtgcgggaggacccaggctccagctatcccagaagatg

SEQ ID NO: 33381 - DNA, 122 bp, Homo sapiens
caagatgccctttggggaactgatgttcgaatccagcagtagctgcggctgggtacatggcgtctgtttctcagccagcgggagccgcgtggcctgggtaagccacgacagcaccgtctgcc

SEQ ID NO: 33382 - DNA, 122 bp, Homo sapiens
ccctacaaatgatgcctgatgcaagccacacaccttagtcctgcacgcctgaatagctaacgccattttaggcatcttcttgggtggattgttagggagttaaaatgctcattagattccca

SEQ ID NO: 33383 - DNA, 122 bp, Homo sapiens
ttgccgacgccctgggagggggtggaaccggcttaggtcacccattcgttttccagcagccgctgggttacttcccaccagctttgcaaagacgcctgcgatttcctttggtctacagttct

SEQ ID NO: 33384 - DNA, 122 bp, Homo sapiens
aacctggggggaccactgtgtttgtctaaaggtaaaaatccaaaacaaagagagagctatcggcacaaagtttgtcatacatatggctatgtgcttcctagatcccccttcaaggtataagt

SEQ ID NO: 33385 - DNA, 122 bp, Homo sapiens
gagccggcggggcagcgcggggtggagctgagaccggcggggagtttcccgcgtggaaggcgctgggcaggcagggaggggtgcgtagagccgtgccacgctctccgccaaggtatactctt

SEQ ID NO: 33386 - DNA, 122 bp, Homo sapiens
aaaacaaaacaaaacaaacaaacaaaaacaagaaattgtttgaacattatactaccaaggcgcaaggctttcaattgccatcaactcatcagatgaggcacagctcacaatgagttctgaaa

SEQ ID NO: 33387 - DNA, 122 bp, Homo sapiens
gccgtgagttgcccaccctgggaggtgcatggctttgccatgttttgccttttctcaccccgcttcggacaggtgggactcgaagacggcgactcgccgccttgccctgggtcgcgatgccc

SEQ ID NO: 33388 - DNA, 122 bp, Homo sapiens
gtagaaagagaagtaaaaagttgtcctttgaaagcccatgaggcattaccttttttgtgtcgtggacccttctggcagtggtgagcctgtggataacttcttagaataatgtttataaatgc

SEQ ID NO: 33389 - DNA, 122 bp, Homo sapiens
ctctctgttgggaaccaggtcttggaaggctatgtcgaaataacctgggggtctgtgttgcgtcactgccattgtgcagctccttcaagatggccgccgctgcagcggcttagatctgcgca

SEQ ID NO: 33390 - DNA, 122 bp, Homo sapiens
cttggtggggaaaagtgcatcctccctggagggccactctggtcagaactcagtctgggacgcatccccggggtgaagaggagacggtggtcttgaggcccaaaccgccaccccgagcctgg

SEQ ID NO: 33391 - DNA, 122 bp, Homo sapiens
tgcaattttattttgcaaaaggtgcacccaacgccagtcccggtagagttgaacccaccacgagagggagagggggcgggagcggggggccgagcggccgcgggctcctcccccggcgcctc

SEQ ID NO: 33392 - DNA, 122 bp, Homo sapiens
cagctcgtcctcagacatggcgaagtacccttcaccctccgccatgtagtgcccgccgagcgccacttggccctggtcagtcctaaaaagaaagggaaaggagcgcggtgaggacgcgcggc

SEQ ID NO: 33393 - DNA, 122 bp, Homo sapiens
cgccgggcgaggagctcctggtctggtacaatggggaagacaaccctgagatagcagctgcgattgaggaagagcgagccagcgcccggagcaagcggagctcccccaagagccggaaaggt

SEQ ID NO: 33394 - DNA, 122 bp, Homo sapiens
ctcttacccagaaacatcttcatctccctctgcagcgggagggcctgctggggaaagtcccgaatcctctggcccagctctggcgacacagccaccggtttccggcactttctggtttcaca

SEQ ID NO: 33395 - DNA, 122 bp, Homo sapiens
ggctcgggggagagtgggcacgggcccagcggctgcgctctcagacactggattgggaaacgtgtgcagtttcttgtgacgttaagtacacacctactccctgaccagctgtcctgttccta

SEQ ID NO: 33396 - DNA, 122 bp, Homo sapiens
ggcgagcgcagagcggcgggcgagaccacactgcgtgtgctgagggcgcactggtcttagcgggagggaagcctcacgagcctgtacacttggaggagccctaagcgttaggatctgctgcg

SEQ ID NO: 33397 - DNA, 122 bp, Homo sapiens
tgacctcttggtccgctcgccttggcctcccaaagtgctgggattacaggcatgagccaccgcgcctggccaactgtagctcagtttcaataggaaatctaaaatcttgcaaaataagcagc

SEQ ID NO: 33398 - DNA, 122 bp, Homo sapiens
gctagccgtcccgcagcgccgccatcttgttgtcacgcggtttcctaggcgaccaggacccgtgcacttctcattggctagtttgagggaggcctgagcaacctgcagacagcgaaggtgga

SEQ ID NO: 33399 - DNA, 122 bp, Homo sapiens
cgtaatctgcccgcctcagcctcccaaagtgctgggattacaggcgtgagctgccgcgcccggccacgctctcatattttcaaaggaagccggaaacctggacttttaaagtgaaataccca

SEQ ID NO: 33400 - DNA, 122 bp, Homo sapiens
gctgtcagagtcaaagccagtggtctagagcagcattctcaagtttggcatattgacattcgaggtcggatcattctttgctgtgggagctcatttggacagtaacctgggtgtttaagtct

SEQ ID NO: 33401 - DNA, 122 bp, Homo sapiens
gagctggagttattttctctggactggttgtggagcactcgtctcctcctcggaacagcccgccaagaggggcagaaggggtcgagtcggccgcagggtcttctggggcttgtggtctccgg

SEQ ID NO: 33402 - DNA, 122 bp, Homo sapiens
tggcttggtggttatagcagtggaagtgttgaaagtggcttgataatgaatatattttaacgatgaagccgacagaatttgtggataaatcacaggtgaattttggatgaaaaaaagaagag

SEQ ID NO: 33403 - DNA, 122 bp, Homo sapiens
gccttctgtcctgcagcagggcacggggacgcctaccaagacccccaaccctaccacacccgtacccccactcagctgcaaccccagagtcaccacgttgtctggcgcgggttgggatctcc

SEQ ID NO: 33404 - DNA, 122 bp, Homo sapiens
aatgctgctgtactctcctctcaccaccttttggcttcagtctcctctggagtaaaatgacgacgacccctgctcagagatcagggtaggctagatggttggcagctggatcgtggaggctg

SEQ ID NO: 33405 - DNA, 122 bp, Homo sapiens
gcacgagctgcccccgtgcccctccccttggggggagggagggctgaagagatagcttcacgcctgcttttgcttccaggctggaactgcgaagtttcctgtctgattttccaacaatgtaa

SEQ ID NO: 33406 - DNA, 122 bp, Homo sapiens
gacctgcagcccgccatgcccgagccttccttcctgtccttctcccaaccccgcagggcccgagcctccctgaggagcaccacctcctgctccgcagcacacgggcgggactggcgggcagc

SEQ ID NO: 33407 - DNA, 122 bp, Homo sapiens
ggccgctgcagccgcttctccccctcctcctagtgcctcaaactcggaaccggttgaaaccggttcagactgggagattccatctcggttgagttttcagcccatggcgccgcggagcgttt

SEQ ID NO: 33408 - DNA, 122 bp, Homo sapiens
aggcgggcccggggtggtgtggaggcggccgaaggagctgggggctccctgtccagggcccggaacagctttccaggggtccacccctgcagggtctcccgctcgcgcgggccaggcactca

SEQ ID NO: 33409 - DNA, 122 bp, Homo sapiens
gggagctggttgcggggcaggcatcagggaagcccgggaggggctcagcttcgaggcccccggctgagcgcatccttgaggagcccgtgccagttatttactctgggatttatcttgaagtt

SEQ ID NO: 33410 - DNA, 122 bp, Homo sapiens
gcacctctcagaggcctctgtgcctttggggacatgtgggaagggcctccattgataccacgggcctcagaacctgggccaggattgctattgtccagatggcgagggccacgaggtgacaa

SEQ ID NO: 33411 - DNA, 122 bp, Homo sapiens
tacctcggtcggcctccccgcccctgcggggctcccgcgcccagctcggccctgggggtccgagaaccctggcttcggggactggcattttcaccccattaaaaaatcctcatggttggggg

SEQ ID NO: 33412 - DNA, 122 bp, Homo sapiens
cagagtaccttgatcaattaaatggtagggagcgctgtggagacagcatcctccccagtccgggaagagaggcctaggatgcctggggcccagcggcctcttccctcctggcgtccccggct

SEQ ID NO: 33413 - DNA, 122 bp, Homo sapiens
acatttagcagcctaaaagaacatttattttttcatggtatccgcggtcaggaaagtgggcgtggctaagctctgtgcctttgcctcaagggttcaccaagttgtggtcaaggtgtcccccc

SEQ ID NO: 33414 - DNA, 122 bp, Homo sapiens
catctatcctcaccgtacatgcatttacacttctgttttgcttatcgttttccccatccccgcaggggagaataggaacctcactagggcagaggctttgtttgttcactgattcatcaccg

SEQ ID NO: 33415 - DNA, 122 bp, Homo sapiens
tatgaagaagtagataagcttgtcaatttcactgggttttgggtactcacttttgtttctcgtgctgctcccatccgtgtaataaatgtgcatgtttttttctcctgttcatctgcctactg

SEQ ID NO: 33416 - DNA, 122 bp, Homo sapiens
aggggccagtgaggtcctgccacgccctgctgagttctacgtgcttgcgcgcttcttcctcgggagagcttccactgatttaattggatatggggatggagagaggaaacagaaacagggaa

SEQ ID NO: 33417 - DNA, 122 bp, Homo sapiens
tcaatagagctgctcttccacaaacgaaccaagaggctgatgtcagggggagccaggcaccgggcggaagggccaaggggtcctggcctttgtagaaaggaatttgttccatttcgaacctt

SEQ ID NO: 33418 - DNA, 122 bp, Homo sapiens
tggcgctcaccgcgggataaactaaagagtaggactgagcccgcggtgggaactgtaatccggaaatccatgggcgtcggaattacctggctagaccccggggaggtgtcctgaattatctc

SEQ ID NO: 33419 - DNA, 122 bp, Homo sapiens
caaactcctgggctcaattgaatctcctgccttaggctcccatagtgttgggattacagacgcgagccactgcgccgggccggtttttttccccctctcagcccccgcgctccgccccggga

SEQ ID NO: 33420 - DNA, 122 bp, Homo sapiens
agtcccagccgcccctcgcgggggtgggggaccgccccgtgggccgggcatcccctcaggcgctgccaccccgcctagcctgaggggaggaacccgccgggcctcatctagcggcccagcca

SEQ ID NO: 33421 - DNA, 122 bp, Homo sapiens
cgtagctggtggcgggcgggtcgggcgaggccatgctgtcagcccctgccgggtgctccgcggcagctcgcccgcgcgcagcctgtcaaatatcacctcctgcccgacacacccatcggacg

SEQ ID NO: 33422 - DNA, 122 bp, Homo sapiens
cttgaaaccaaaactgaaaaatgaaggtgatactatatggaaatggtttgataaaaaggccggtggattgaactacagacttcaaataagtcttcaaaaaagtctttgggtgaactcacacc

SEQ ID NO: 33423 - DNA, 122 bp, Homo sapiens
gacgcccggggggctggctgtcagcgcagccgccatcttatggtccaagtggactgaggccgcctgggcgaggagaactcagggcgcaaattgtggagctgactgcggcgaggtctgagtcc

SEQ ID NO: 33424 - DNA, 122 bp, Homo sapiens
tgtagcccacctcacaaactcttgttgcttggagaccctcatccagagggtggctatcttcggggggcagaggggggcacagcaagtcagcccaggcccagtaccttcctcagcattctttt

SEQ ID NO: 33425 - DNA, 122 bp, Homo sapiens
gagcaggtctgaggagggggaaagtgtattgggaagggactcagacaaccacctgtcccccggtctccctggctggctggcagagggcccctcaccatctcgtggcaggcccggctcttgag

SEQ ID NO: 33426 - DNA, 122 bp, Homo sapiens
ggcgggactgggagttttcctgggcgacgtcttctgcatctcgcttgcttcctggccttgcggcagggggcgcgcgtggcaccagtgtgagcctccacccccctctgcctgctccagggtcc

SEQ ID NO: 33427 - DNA, 122 bp, Homo sapiens
cccagcacagggcagaatcataaaccgcccacttgctctccttcccgtctgtgaagcgctcgttcagagccgcaggactccgcaaacaataaaaccggctgcgtggctattgcctggattac

SEQ ID NO: 33428 - DNA, 122 bp, Homo sapiens
ctttgatttcctgagttgaaggcagggtctgcctccacatctcataggattcttctcaaacgggaagggcttcagatgttgggaactaaaacaacaacaagccagccccctcccctcagctt

SEQ ID NO: 33429 - DNA, 122 bp, Homo sapiens
ccgtgccccgcggggaagagctgcacttgggtccgcagcgccagcccagcctgcggcaggcggagggggcctagggctcagccaaccaccccgtcacgccgcacaggagccagccggggtcc

SEQ ID NO: 33430 - DNA, 122 bp, Homo sapiens
ggccgggcggcggcggcggcggtggctatttatagtaggtgacgtcaccttgaaatagaccgttagggccggcccgcccttcccccctcccactcccgccgctccccgccgcccggcctggc

SEQ ID NO: 33431 - DNA, 122 bp, Homo sapiens
cctgtccctgaacactgtctgcctggatgaggggtgaggctgaggtgcccccttgcccggcgctgagtcatgggcatcccccaggatcactgcctcagcgctctcagccctgccccctcctg

SEQ ID NO: 33432 - DNA, 122 bp, Homo sapiens
cagcagagcggcactcccactcccacacctgtgcaaacatccgcccgctggccgggaacacggcccctttgtgcccggcttggcatcagtgccccggcccacaccgtcagctgcagcccgag

SEQ ID NO: 33433 - DNA, 122 bp, Homo sapiens
tagtttctagggcaggactcacgggtcagggaggtaaggactggggctcgggagacgggtcgttagtgtcaggtgtggagggagacattagtgcccgcaataactcagtgcacactagaggc

SEQ ID NO: 33434 - DNA, 122 bp, Homo sapiens
atctctgtgaggtcgggttttcttcatgtccttcaaccaaaacgccaagtcacaccagaccggatgcaaaagcagatttgggaatccagctctcttctaagggactggacgtgaaagaggtt

SEQ ID NO: 33435 - DNA, 122 bp, Homo sapiens
ttcccagcaaagtcccccaactccagaggcattctcagtgacttcttgagttgcagacaccgggagctctgcttaatgcagccaccactgcacaagcataatatttctttgaattctccatt

SEQ ID NO: 33436 - DNA, 122 bp, Homo sapiens
gtgggaactgagcccaagcaaagcagcccaatctaccttctttctgttgcaccctacaaacgctctgaaagcagctgaagacagagttctccaagaaggaaccaaaggtcaagataatgctg

SEQ ID NO: 33437 - DNA, 122 bp, Homo sapiens
cccccggaatgtcccacgcgtaacgccctctgcgtgcgccggcgccctatgaagatccggcgcagctaaagtcagtggaaggtagaaagacgccacagccgcctttcgacaactttttgtta

SEQ ID NO: 33438 - DNA, 122 bp, Homo sapiens
tgtgaagcacagaaagcaaagcctggcctgaccagcctgccgcacacacagtaaggagaccggcacaggacaaaacacgtgtgtcccggagacacagcctgctgggtggagcgggctggcat

SEQ ID NO: 33439 - DNA, 122 bp, Homo sapiens
cagcagcacgggacacgcgtgacctgtgctcctttcgagccgcagacgtcacagtgacgacgtttaagctcctaatctccccaaatcggcgggaaggattagaggggctgcctgctcctttg

SEQ ID NO: 33440 - DNA, 122 bp, Homo sapiens
agaggctgagtttaaaccacgtgagacctggccgcggcgagagtcctgtccaatgacttgcgacttggggtgttcaaaaagggcttttcgcatgatctctaataagacctcgttatcttgaa

SEQ ID NO: 33441 - DNA, 122 bp, Homo sapiens
agctgaatattaacaactttaaactgaagcatgcttttagcatggtatggatggaagtcacggtagggcagtgctaggtccctcggaggttaaaattatagttatgtttcttacacactgtt

SEQ ID NO: 33442 - DNA, 122 bp, Homo sapiens
gcggggcggactgcccccgctccagagtaccagtgccggcagtgcgagctatgacgcaatcggagctcggtcggtcctttgattggctagtcctggccactttggattggccgcgcgggctg

SEQ ID NO: 33443 - DNA, 122 bp, Homo sapiens
ctcgccccgccccctccccgcccccgccccgcccggcgccggcagcaccacggacagcgccgcgtgcccgccaggctgcctggagcccagcccctgcgctcacagcagctggctgggagccc

SEQ ID NO: 33444 - DNA, 122 bp, Homo sapiens
caaaagataaattgggaggaattttctgattggccataggcagtccccgtgagaggctcacgaaagttttgtaaagatgtactatatgactgtaatctctctttttcaggttctgccacttg

SEQ ID NO: 33445 - DNA, 122 bp, Homo sapiens
cccacactcctctagagctgtcctccagtggggaccacgggggccgtttctcccagcttccggtggtctgtctggcctcactcaccggcagtgtggaggctgggccctgaactcctctgggc

SEQ ID NO: 33446 - DNA, 122 bp, Homo sapiens
agaagccagatgtggccggaccacaggaactcaccttcatccccatccacatccaccagccggtccaggaagtctctcacacgtgagacacactgcagcaggaaggggtgcaggggggccat

SEQ ID NO: 33447 - DNA, 122 bp, Homo sapiens
tggaagagaagaaaaagcaatctgcgccaacccggcagccctaataaatcaaagggggagcgccagggcagcggggagacagaaacgtacttttggggagcaaatcaggacgggctgggagg

SEQ ID NO: 33448 - DNA, 122 bp, Homo sapiens
aggctggtgttgggcagggagcagagcatggcaagaccccagacggccccaagcactcggcgcacatgggcccgcgtcaccatggacctggcctggagtgggtgcaccacggccacatagcg

SEQ ID NO: 33449 - DNA, 122 bp, Homo sapiens
catggttacaccctgagatgagggaaccctgacgatgctcccggctgagccttgccttcccgcagttacacgttgcacggggcctccccgtagcatccactgtgtcaatgccccctccgtcc

SEQ ID NO: 33450 - DNA, 122 bp, Homo sapiens
cccgaactgtgcggtccttgatttcactgctgtacccacagtgcgcagagcacaggggcacgcggtacattatttgaatgaataactttcttatcctggcctttctctaactctctcacttc

SEQ ID NO: 33451 - DNA, 122 bp, Homo sapiens
ccatcttcatatcttcaggacccacccctctactcctcaccctcagcacaacgatgtgatcgaaaggcaaatatttatttttcaggaagagaaacaggagacctcgaggcttctggacttag

SEQ ID NO: 33452 - DNA, 122 bp, Homo sapiens
agacttatccattttgtcccatagcagccgccatatggtggcagacagcaacaacctcgtcgcactgattactgggagctgtagtcttgacgtgagctagctggcatggcggcctgcattgc

SEQ ID NO: 33453 - DNA, 122 bp, Homo sapiens
ctcagggggagacagcagctggcacctggggcctcagaatgagagtacggggggccagggcgccaggcctgcccgggtgggaagggagaggtgcatgcacggggctgagtcgccagcctcgg

SEQ ID NO: 33454 - DNA, 122 bp, Homo sapiens
aggaggggcgcctcaacagcctggctagaggcccctggccagacccaagcaggacgctggcgctccagaaagccagcgggaacattccgcagctgctgtcctgtctcagggccgaccctgtg

SEQ ID NO: 33455 - DNA, 122 bp, Homo sapiens
aggaccctgcacccccatcccccgcccccggggctcctagggttctccgctggcctagtccgctggccgcactaggttctcgaatcaagggttccacttactctcaacacaaatatttgggg

SEQ ID NO: 33456 - DNA, 122 bp, Homo sapiens
gcggcgtgccggggtgagtcagccccgggggaaggtggccttgaaggcgggaggggcggccggcctgcagcagcaacgtgagaacagaagcaaccttcatctggctctaaaacttccagaac

SEQ ID NO: 33457 - DNA, 122 bp, Homo sapiens
atatagcccaggagagttttgaatcattgaactgctatagacccctttatgaagggaggacggacgttgaatgatctttgagttccttcccggactggatcattcatctgcttctcatttat

SEQ ID NO: 33458 - DNA, 122 bp, Homo sapiens
cgcagtcttccatttcatcacccctccgggtcccctgggggtggggacccaggtgagaaacgtgcaaggatgctattgttctgtctggtttgtgcttaggacacttggaatgttgttaacca

SEQ ID NO: 33459 - DNA, 122 bp, Homo sapiens
aaagaaaagaaaagaaaagagaagaaaagaaaagaaaagaaaagaaggcaggtgggcgggcgggcaggcaggcgactgacaattttaaaacattaataacagctgaaccgctgtggcggcag

SEQ ID NO: 33460 - DNA, 122 bp, Homo sapiens
tcaccaagtcctctaaagtgttgcataaggcaaagataacgttaagtctgtggaggcttccgttatcgggaaaagatgctgtagtgatcttttctgagtgtctcctacttgcgacaaggtgg

SEQ ID NO: 33461 - DNA, 122 bp, Homo sapiens
cgggctgtttattcgcatcaggaggcgcgggtggctcgcagagggcgagaagacccttcccgctttcacactgcaggcagctaagtcgccgagaaaggcagcaacttgacgcccgaccccgc

SEQ ID NO: 33462 - DNA, 122 bp, Homo sapiens
gcagcaccgcccaccatgctcccggaagctgcgacactacgccctgcgctagtcccgggacgtggggttttatatccggattcttagcgcggactcagaacccagctcttccctacacggtc

SEQ ID NO: 33463 - DNA, 122 bp, Homo sapiens
agcaggataccattctttttttcttaaagttgaaacttgaaagcatcaactgaaaactaacggaaaagttaggaaaattctccatttttcactcctaactcatctgggtgagtttgtctttt

SEQ ID NO: 33464 - DNA, 122 bp, Homo sapiens
gcgctgcggacgtccgtgcgctcggggcgcccgctggacggattcactgcgagtctttgtcgggcttatctcagccaattcccgtcaagcatgcaagtggctctgttggctgcagtcgccta

SEQ ID NO: 33465 - DNA, 122 bp, Homo sapiens
gatggcattactgaggtccaaaaactagagccactcgctctgggtcatacagccgataaacgcacgcagccgagctcagttcttccctgaccctgttacaaactgcctcactaaatgaggac

SEQ ID NO: 33466 - DNA, 122 bp, Homo sapiens
caagtgccaggtttatctagaaaaaaaagagaaggggctaggacctccattattaccagtcgcccttgctgagtcctttacctgcagctctcagagcatctaaggacactgctgcactgcct

SEQ ID NO: 33467 - DNA, 122 bp, Homo sapiens
aaaatgttccaggcaaagggaaaaaactgttcaaaggctccatggcaagaacaggcttggcgaaacagagaaggaggaataaagcctgtgtgattcgattgtagaggaagaaccgtgagtgg

SEQ ID NO: 33468 - DNA, 122 bp, Homo sapiens
aggtggtattggccaggattttctgcttgatcttgttctaacacaagccttaaatgaatacgcaagaagggctggacaactgcaaacagccatgcccctggctcagctgatgaaggttgtgg

SEQ ID NO: 33469 - DNA, 122 bp, Homo sapiens
ccctcggccccgcccccagcatgatggagtactcgttggacggacacaacgtgagcctctcggctatcaggaccgtgcgggtgctgcggcccctccgcgccatcaaccgcgtgcctagtaag

SEQ ID NO: 33470 - DNA, 122 bp, Homo sapiens
ggggactaagggtggagttgcggcgtcataggtcactgggcgggctatgggcggggtccacgtcgcctaccggggcggagcgggggtggctggagcagtctggacagtcatggcggcgactg

SEQ ID NO: 33471 - DNA, 122 bp, Homo sapiens
cacacacacacacacaccctgctgacctattcagtctattcctataacctattttgttttcgtgtcactgtctcagtccatttgtgatgctataacaaaatacctgagactggttaattggt

SEQ ID NO: 33472 - DNA, 122 bp, Homo sapiens
cggcccacgggccgactttgcgagcctccagggggcgaacccgaccgccttctttgcccgcgcagcgcctcggccgtccagcctgtgacttcaccagcgtccccgggccagcgggacacccg

SEQ ID NO: 33473 - DNA, 122 bp, Homo sapiens
gcctccgaggccactgcctgggctggacccgccggcagccgccaccacccgggcgcgactcgagctgccgggaccaccaggacgctcctgctccgagatcccaggccctggctcgcttgact

SEQ ID NO: 33474 - DNA, 122 bp, Homo sapiens
atgtattttttatactctatcccctgggcctgtgttaatcagaggttggtgtcatggccacggataacttctccattactccatagacaaaatgtaaaacaccacatgtcacttcccccttt

SEQ ID NO: 33475 - DNA, 122 bp, Homo sapiens
taaccaagcatctcaaccgagcacaaggccgagcctcccgcagctcagttctctcagcctcgaagcctcctggttcctatcctgccttggggctccatgtgcactggcccacgctgcagggg

SEQ ID NO: 33476 - DNA, 122 bp, Homo sapiens
tggatatcaactctgatttaaaacatcagtttaacatatagataatgctgggactacaggcgcacaccacacccaactaatttctttttcagtttttagtggaggtggtggggggggggtct

SEQ ID NO: 33477 - DNA, 122 bp, Homo sapiens
ctgaggaggcggggttggcctaggcgaagatccggactctgggtgttttgctaccgtgaccgtttaggtgagtggaatagccaagaacatttcggcaaataacaaaaacaaaacgtgcggtc

SEQ ID NO: 33478 - DNA, 122 bp, Homo sapiens
cgctgcggcggggcttgttcggtgcggacaactggattcccgagtccgtaacttgggccccggagcgacgcaagggtcgggccccagccagccagggcaggtgggaggcggcgagcgtggcg

SEQ ID NO: 33479 - DNA, 122 bp, Homo sapiens
gtgacggtcccatgagagaagcagacagaccctgtgcacacaagggcctgcagggagaagcgctctacacgtggcgacaccctttcctcccaggatggtctcctctgcattcctgctgtcat

SEQ ID NO: 33480 - DNA, 122 bp, Homo sapiens
ctcgatctcctgaccccgtgatctgcccgcctcggcctcccaaagtgctgggattacaggcgtgatccaccgcgcccggccagatcgttttaaaataataatacttggttacaagaattaat

SEQ ID NO: 33481 - DNA, 122 bp, Homo sapiens
atccttgctttatctactctgttctgtgtgggggtaacatacaggtccttttgctttcttcggggatgatacagccacctggccaaaactgatcaaacccctgcttctgtgggaggaagacc

SEQ ID NO: 33482 - DNA, 122 bp, Homo sapiens
ctgccacacctgtctttcttgctttcctttttatacggatttctcacctctaggtactcccgagagcgcctcctctatcaccacagatccgcgtagcctgcatcactgatctcacctctagg

SEQ ID NO: 33483 - DNA, 122 bp, Homo sapiens
gcccaggtgcgcgctccgccctgttacgtcacttccgtaggtcgtcccgcccccaggccccgcccacttacccgccccccgggcgccctctctgccagcgcccggtgactgcggacggatga

SEQ ID NO: 33484 - DNA, 122 bp, Homo sapiens
ttttgactgtttgatggtgccaaagcttcacgcgttcagtggaaagccgtaggatactctcggaatgctgggcagtgacggccacagctccctgtcagccacatgccctctgcagtggacgg

SEQ ID NO: 33485 - DNA, 122 bp, Homo sapiens
gaatttaggaagaatcagccttcagcctcaacctcaaaccttttgtgcaaatgggcacttcgtttggaaagggactagaaattgtccccagtctggccctgcaccagcaccttcctctgctc

SEQ ID NO: 33486 - DNA, 122 bp, Homo sapiens
tcctgggattggtagttcgctttctctcatttagccagtttctttctctaccggggactccgtgtcccggcatccaccgcggcacctgacccttggcgcttgcgtgttgccctcttccccac

SEQ ID NO: 33487 - DNA, 122 bp, Homo sapiens
gtatcctcgagtctgtcggaatccaaggcctctcagctgttcctcctctgaatggatagacgtgaaatcagagcctgggcaggctgaggccatggctggccatcccttcccccttcccagaa

SEQ ID NO: 33488 - DNA, 122 bp, Homo sapiens
aggctgaggtgggagaatcacttgagcctgggaggttgaagctgcagcgagccaagatcacgccgctgctctcaggcctgtacgacaaagcaagaccttgcctcaaaaaaaaaaaaaaagaa

SEQ ID NO: 33489 - DNA, 122 bp, Homo sapiens
aacgttataaaaataatctgacgtcagtgactaaagagtacgggtcatcaggctgccggccggcctcctgcaagggcactggccagggaggccacagctgccaaagcggggaggtgcgccag

SEQ ID NO: 33490 - DNA, 122 bp, Homo sapiens
tcggcacccacactagctcggtctcctcaaaactccgtgtccttgtccaccactgagcggcgtgcacacacagggtggggcagcagtggccccagggctgcctccgtctccagggatgagtc

SEQ ID NO: 33491 - DNA, 122 bp, Homo sapiens
agtttccagctttcccactttatctaaaaggggaaaaacggtgtctggcactcagcttttcgaatgtgcaaaactgataaactagtctgttaggggaaaaaaaaaagacaatgaagaaataa

SEQ ID NO: 33492 - DNA, 122 bp, Homo sapiens
aaaagagacacagagattttctacaatacagtgtcagaggattagtctttgtttccttttcgtgggaaatatttacaagcggataacacatcttcttaaaagcgccatttaatgctttgtca

SEQ ID NO: 33493 - DNA, 122 bp, Homo sapiens
gtggcccccactcgccgtccccccagctccagccgcactggcctccatctcctctgagcacgctgccctcgccagcctcagggccctctgaggctgggcatggcctggaacacttgccccga

SEQ ID NO: 33494 - DNA, 122 bp, Homo sapiens
ccagtcccgggacccggtgttctgacccacttcgcacgcgacccagggtgattctgagaacggcgtctccgggagacacttgcggtctctctcactagcagacctgcggccaactttcgggg

SEQ ID NO: 33495 - DNA, 122 bp, Homo sapiens
gtgcccgtccccgccccgaagaggttgattggcaggccacgctcggagatccgccagccgcgtagcccagtttcgggagagtccgcccccgacccgcccccgacccgccccgtaggcttgtt

SEQ ID NO: 33496 - DNA, 122 bp, Homo sapiens
ggggctcggtttcctcatcaggtgaagccagggtccactctagctttaatagtctctcctcgagattcccggccccatactaaagggacctggtccactggggggagctgcagaacttccct

SEQ ID NO: 33497 - DNA, 122 bp, Homo sapiens
agggcaggtgggaggacagctgagcctccttctcttggttggtaggaggaaaggttcaggcgccgctgaccctacctggacagtgctgtctgcctgtggtgagggcctgggccctgggcaga

SEQ ID NO: 33498 - DNA, 122 bp, Homo sapiens
cgccaacaaccaggccggattccgcgcctccagccggtcagtgccttggcaaggcaggagcgggtgaaactcccagccctcccagggagcagtcagatgatgacacatccacacccgtccac

SEQ ID NO: 33499 - DNA, 122 bp, Homo sapiens
acgatgtgtttctgtgattcaaattccaaagattccattctgggcaacaacacaagaccccgtctctacaaaattaaaaaaaaaaaaattagctgggtgtgtggcacacacgtgcatttcca

SEQ ID NO: 33500 - DNA, 122 bp, Homo sapiens
ggggcccgtcttgccaggtgggcgcgggaacaggcatactggtttccaggaagccgtccccgtgggggagaggggccagggggccgccctccaggaccagctcagggtttctctgcacggtc

SEQ ID NO: 33501 - DNA, 122 bp, Homo sapiens
gcggacggctcacacagacccacaaggaccaaagaggaacgtgcaggactccaacacaaacggaggacgatggcagaacagaagagctgattaagtttctgctgcttgtaccataaactttt

SEQ ID NO: 33502 - DNA, 122 bp, Homo sapiens
acacacacccactggtccccagggcctcaggaaccagggagggtttctcctggaagagaacggagtgtgtgaatgtgcgtgcctgtgcatgtgggtgtgtggtggggcacaggagggctctc

SEQ ID NO: 33503 - DNA, 122 bp, Homo sapiens
gccaggtcctaaggccggtctgcaatcgtgaaaggggtggagtgatacccgcccaagccccgcctcctgccccgcctcccgactgcaacctgaatccagtagaggcagcatagcagccattc

SEQ ID NO: 33504 - DNA, 122 bp, Homo sapiens
gattttaagacaactaaaaaaaatggtttgtaagtttaacttcaaaaaaccatgtaagctcggttcctggattgttcgtagaccttcacattgcctttggcaaactgagctagaacatactg

SEQ ID NO: 33505 - DNA, 122 bp, Homo sapiens
atcctcatactccctcagtgctgctcccacccgctgggagagcccatactctttcccctccgcactgaagatgctcgcgatagtgcctctactctgtggccacagatgagaaaatttgcact

SEQ ID NO: 33506 - DNA, 122 bp, Homo sapiens
gacggaggggaccaggttttcttttttaaacatccaccaccaattgctctcagcctgtaccggttaagcatcagaccctgcgagtgtttgtttctaaaaatttggattagcttattcagagt

SEQ ID NO: 33507 - DNA, 122 bp, Homo sapiens
aactgaaattccagaagccggagaaacaagccgccgtcaagactgctgaagcgaggcctacggccctgtaatcacacaagctcaggcttcacggaagctggaggccatgtcgcctgatcccc

SEQ ID NO: 33508 - DNA, 122 bp, Homo sapiens
aaccaacttgctgttgaggggctgggtcggtggtgacttctaacgcctttgcccttgtcccgcccctttcttctcctcactgtctccagcacaacggccactgttagactggaaagcaaatc

SEQ ID NO: 33509 - DNA, 122 bp, Homo sapiens
gtacggccagccccgaaggtccctgctgagccaggccagccgccccggcggtcgctgctgcgcctcaggtagccccagtggttagtggaagccccagagctgtagggcccactcacgccttc

SEQ ID NO: 33510 - DNA, 122 bp, Homo sapiens
gtgtggtgtgtatttagctcaatagtcaccagagtccaaccagacgtgtatgtcgcgcaacgggtcttgtagttcctctcttcgtattcacatttgtgttaggagagagcagtgaccacggc

SEQ ID NO: 33511 - DNA, 122 bp, Homo sapiens
caaagaggccagggtgtgtggcccaggagccagagacagaaggcaagccaggtcccctgacgtcgcttcgggggctggagtccagctgcggcctcttctcttctccccgcagggtccccgca

SEQ ID NO: 33512 - DNA, 122 bp, Homo sapiens
tttagaaaacaggcaattaaatagtaaagcttaacatggagcagcacggaccccgtgactcgacgaagtggcgtggaccttacccgtggaccaagtgtgcgaacacagcacagcaagcgccc

SEQ ID NO: 33513 - DNA, 122 bp, Homo sapiens
tttatatgtaaattaactcacttggcagaggttgcagtaagccgagatcatgccgctgcacgccagcttggatgacagagtgagaacttttctcaagaagaaaataaaaataagttaactca

SEQ ID NO: 33514 - DNA, 122 bp, Homo sapiens
cttcctcaggaaggggtccttagggtggatggccggcggcagtgggagccaggcctctgccgtccctaagctagtctcagtggctgtaagtgcagtgtcattccaggggtccaagctgcagt

SEQ ID NO: 33515 - DNA, 122 bp, Homo sapiens
gaatttccaattaaagatgatttttacagtcaatgagccacgtcagggagcgatggcacccgcaggcggtatcaactgatgcaagtgttcaagcgaatctcaactcgttttttccggtgact

SEQ ID NO: 33516 - DNA, 122 bp, Homo sapiens
acgcatttttgtgggtgccctgggtaattctccctggcccttacattagtgtccaggccccggggaccccggccccgctctggggcaaggggtcgcatggcagccaaaggcccctccctgag

SEQ ID NO: 33517 - DNA, 122 bp, Homo sapiens
tgctgctcagcagaggatatgggtgggagcgaaagttgtaacaagtgggggtggggggtgcgggccgccaccactgctccttgactctgccgtttcctaataagacctggttccacatctca

SEQ ID NO: 33518 - DNA, 122 bp, Homo sapiens
gtttgcttctgaaacttttctccagactgtcatgtcattgcaacactctttgtcattacccgaactgtttcccttggggtcattataatgtaaacttctgaatgtcagtaatgtggaagaca

SEQ ID NO: 33519 - DNA, 122 bp, Homo sapiens
catggcaccaagctcacttaagaaaggaaagcagagatgaagaagaactccagaaagccacgcagagtttaatgcggacaacttcaggggtagctgccatccacattgtctgtccaccacac

SEQ ID NO: 33520 - DNA, 122 bp, Homo sapiens
gctagggaggctcccagcattccatgcagtctggccgcttctcctatctgcctgcctcaacgtcctcctgcgtttctcctgcccacgcacgccaccctgcggccctgttttcgcttgtgggg

SEQ ID NO: 33521 - DNA, 122 bp, Homo sapiens
gtaggtgacagtgtgcacaggtaggtgacagctgtgtgcacgtgtaggtgatggtgtgcacgggtaggttacagtgtgcatgggtaggtgacagctgtgtgcacgggtaggtgacagctgtg

SEQ ID NO: 33522 - DNA, 122 bp, Homo sapiens
tccatggtagcctgggagaccttgacctcagcatcttccctcactccgcatccccctgcccggctctcagtgcttgttcctacccattggcttgcatgatggaatcaccacctcttcagaca

SEQ ID NO: 33523 - DNA, 122 bp, Homo sapiens
tacttcggcatttgacagttgacgacaccagcaacaacattgaaatcctattaaattgcgcgtgggagtttaaatgggtaaaatcactcttagaagacaaattagtaatatgtttcaaatac

SEQ ID NO: 33524 - DNA, 122 bp, Homo sapiens
cgcgcgcgcgaagcaagggggcagtgggaggctcctggcgttcccctttaacgggaacaacgccctgtttgcgtcgctgcagtagggtgtgtccctgggtcagcgtgtgcgggagggcggga

SEQ ID NO: 33525 - DNA, 122 bp, Homo sapiens
aagagatctgcttccgggtttgcaagaaactgcccgcgcagtaggcaaaggggcgggttgcggtggggaaaggccaggcgttgggagggactgagagcatagggtgggcggggccggggcgg

SEQ ID NO: 33526 - DNA, 122 bp, Homo sapiens
cagtcacatgtgcagctcacacagggcagttgatgagagcaggaaccggcagggcacccccgcattcagtaggcactggcttctcagcagagatagagcctcaggagatcctggtggatgcc

SEQ ID NO: 33527 - DNA, 122 bp, Homo sapiens
cagtcccctagttctaggcccattcggaacggctactgtggcgggggcagaaatggagtgcgggatgctgagagcctggactccgtcccgtgaccctcaaggcaagtgcggagaaaagcgtc

SEQ ID NO: 33528 - DNA, 122 bp, Homo sapiens
ggagatgccaggaagccccttgacacatgtggcatgggctccttcagaggcttttggatccgtcgtgaatgtaagcaagcccttcccaaagccctgattttcctcatttgcagaaacaaaga

SEQ ID NO: 33529 - DNA, 122 bp, Homo sapiens
gtttggttttgttttgttggtcaaaccccagtgcagtgcagtctgtttaagaagtagtgtcgcatagctgtggcctggatctgctcagcagccccagtaggcagcatttattccctttcgca

SEQ ID NO: 33530 - DNA, 122 bp, Homo sapiens
gcatcacggagcggttaggggccaaaactcatcttcctgtgcacttgctgtgtgcactggcgctgtgtgtaaatgccacctcgatttaggaaaaagatgacgtaagtacggcacaaagtggc

SEQ ID NO: 33531 - DNA, 122 bp, Homo sapiens
catcgcaccggtctccctgtccctggcctctcaatgcagcggctcttcaaggttgcagagcgcagccttcagccatgccggccactcgccccagcccccgccgtggctctcgcacaaacacc

SEQ ID NO: 33532 - DNA, 122 bp, Homo sapiens
gtttggcgtttccagggagtactacatcaccatggtgaagtgggccaccagcaccaaggtcgccgtgacctggctgaaccgggcgcagaacgtgtccatcctcaccctctgcgacgccacca

SEQ ID NO: 33533 - DNA, 122 bp, Homo sapiens
gagctgtcagctcagatccgctacctcacccaggtcggtgtgtctggggggttctgcgagcgaaccccagctctgggtcaaagcctcaggcttgggtgatccagggtggagcattaactggg

SEQ ID NO: 33534 - DNA, 122 bp, Homo sapiens
acccaatgtccagggagcgtgcaaaatttgtcaaaagtggccttttattgtaaaacgacacgagagctaatgctgcatgcccgttgctgcctgaatcagaagggcaccatcttggggtgagg

SEQ ID NO: 33535 - DNA, 122 bp, Homo sapiens
tgaataccagagcccggtccaggggcaaacacttcagtgccaatatccagggagagattccggggtgtgctccaggaaacaccatcatccttgctccataccaacatggtagaggccacctg

SEQ ID NO: 33536 - DNA, 122 bp, Homo sapiens
agagagagagatcctaatgtgcactccaaagcctacattggtacctatgtaacatggacacggagttgaaagccacaagcctgccatggggcctgctgtggcactgggatagatgatcccac

SEQ ID NO: 33537 - DNA, 122 bp, Homo sapiens
gaagcccaggagcgtcaatgtgaggtcaggtccagcgggttagggttacgaggtcagggtcgaagtctcagaattgactcgggagtatgaccaataagcccaagagatttgtggaggccacg

SEQ ID NO: 33538 - DNA, 122 bp, Homo sapiens
atggctgttaatttacagttaattcaggctttcccttctctggagttaatgctttctccccgtaccagccggtctgtggcacgttctttcgtgtgggtccaggctcaccgtcgctgtctcag

SEQ ID NO: 33539 - DNA, 122 bp, Homo sapiens
aataaattagttctaagccccatgtttctcatagggcttttgtgagcatttaaatgcaaacgtatgtaaacgtgagcagtatctctagcacttacaagcacccaacaatttacaactatttt

SEQ ID NO: 33540 - DNA, 122 bp, Homo sapiens
gggagatgtccgcccccagtcgtagcctcggacggtttctgagcgttggtgtttggcacgcgccaccctctcttgctttggttccgccatgccgatgtaccaggtaaaaccttatcacgggc

SEQ ID NO: 33541 - DNA, 122 bp, Homo sapiens
actaaaagtatatgaaagttacacatttagaggtcaaattaggataagatcaccgagggccgattgaaaacatgactatgtacacccgtaaaagaaaaccttgttgggctgaaatttatgaa

SEQ ID NO: 33542 - DNA, 122 bp, Homo sapiens
gagaaggtctagggagtccacacagtccagcggagactaatccgtgagcctgacccacgccgagagggtccaggcacctctgttagcggcatctgaaattgtaggctggtgatgggagccag

SEQ ID NO: 33543 - DNA, 122 bp, Homo sapiens
aatcacttgagcccaggaattcaaggctgcagtggccaggatcccacagcactccagcctcggtgacagcaagacctggcctccccggaaaaaaaaaaaaggaagggagggggattcaggcc

SEQ ID NO: 33544 - DNA, 122 bp, Homo sapiens
ccaggtggccacgtccgcgtcatctgtcagcaggctcaagggatccaggccattcgtgatcgggatggggacctgcccagggaggcacactttcttagagggggtaatgcgaccttattact

SEQ ID NO: 33545 - DNA, 122 bp, Homo sapiens
cggggccgccgggggtggggggtcatgggtgtggagctgcacccggatcttggtgacccgcgtctcttggctcagtgagcaagacggaggaggagctgcaggccatcctggaagccaaggag

SEQ ID NO: 33546 - DNA, 122 bp, Homo sapiens
tttctcccaggaatttttaatgatcattaggcttttgtagttactgtgaaattttgtttacgtggatttatttttgtgcaggattgtatacagggcagatgctccttaatttaagaagggag

SEQ ID NO: 33547 - DNA, 122 bp, Homo sapiens
tccacgtttaacatccactgaaaagcacacaacaggcctagaaggctctcagttccttgacgtaattcgtacagaaggtgaggtgggcgtgtcttggtagaggctgacacctactggtgagt

SEQ ID NO: 33548 - DNA, 122 bp, Homo sapiens
gaggcctctcctgcatcctccttccttcctggtagcagtaatcactcccacatagagtaccgtccatgcatgctacctcacaggattagtggtttgcaccatgagtgactccatggcaatgc

SEQ ID NO: 33549 - DNA, 122 bp, Homo sapiens
ctatcttccccacgccttagtaactgcgacgcgacggcagacagtgtaggcggcaaccgacggccgggacgtctaacctcaagtcccagcaagccccgcggccacgtcctctgactacctcg

SEQ ID NO: 33550 - DNA, 122 bp, Homo sapiens
cccgtcacatcccacggcggacacccacccccgtcacatcccacggcggacacccacccccgtcacatcccacggtggacacccacccaccatgtagaccccacggtggacacccacccacc

SEQ ID NO: 33551 - DNA, 122 bp, Homo sapiens
ggaggccaggagcagagactgtgggagcagagacacctgaccacagtgtccccaaggtgccggagcccaggcaggctacacacatacacacacattcacacacacattcacattctcacgca

SEQ ID NO: 33552 - DNA, 122 bp, Homo sapiens
tccaggtgaggataaccagactgggagagggtaaggaggtcacagctccaaaaagcggcacggctggggtttgaggctgtgcctgactgtgaagctggctctccttatccgtggcgcttcct

SEQ ID NO: 33553 - DNA, 122 bp, Homo sapiens
gaggcccggccagtggggagggcaggcagacagggggaggggtgggcccgcaatctatgacgtcacggtgccccttcagtcttcttaagacatcacaatgcagccaagaggatgggtccctg

SEQ ID NO: 33554 - DNA, 122 bp, Homo sapiens
gatgtgtccactttgtcctaggaagtcttcaggaagacaggttatggcaggagtggggcccggagatgtggtcccctcttacccagtctaagggcagcactgtaaaataccacgtcaaatag

SEQ ID NO: 33555 - DNA, 122 bp, Homo sapiens
tgtcaggctggaaggggatcagggcaagttagagccaagcccacttcctcttctctccagcggaagggtcattagcagctgaccaccagtgtcagctgggcagcgatggaactgttgacaaa

SEQ ID NO: 33556 - DNA, 122 bp, Homo sapiens
cgctggttgggccctaaatccacccttcagtgtttggctggcgcttgctggctctgccggcgtctctccagccagcaggacagctctgccggaagccccatccctcctcctccccatcctgt

SEQ ID NO: 33557 - DNA, 122 bp, Homo sapiens
tcgatgaagagaggtcctggtctaccagagggtcgttgattgtttcagctgggtggggagcgaggcccccacccagggtcggggtgcgagagaagcagcacagagctggagtcagaactggg

SEQ ID NO: 33558 - DNA, 122 bp, Homo sapiens
ggacctggctgagcgcagcggcaaacagtgaatgtgggtctccaacctcctgggccagggcgtcctgttgcctcttggagacacgagaggcttgtttctgcaccactaccacctcctccgta

SEQ ID NO: 33559 - DNA, 122 bp, Homo sapiens
ggacaagtggagggaaagtggggccgggcggggggtgcctgggaagccaggctgcgctgacgtcactgggcgcgcaattcgggctggagcgctttaaaaaacgagcgtgcaagcagagatgc

SEQ ID NO: 33560 - DNA, 122 bp, Homo sapiens
tcgcacagtgtcctgaggggggagactggaaaagcagacacgcaaccgtgggaagaaacccgaaggagtaaagaactcagagcgaaagtccaaaatctcctcggcacgcgggcctccctgcg

SEQ ID NO: 33561 - DNA, 122 bp, Homo sapiens
acgccaaagaggggggcccttcctggaaactgaccactctggcacccttatttcagatttcgtgatccagaaatgtgagaaaaataaatgtttgttatctaagcctcccagcctgtagtact

SEQ ID NO: 33562 - DNA, 122 bp, Homo sapiens
gctgactaattgtaggtcagagctagtatagtaactgagcaatttcaactgctcaggaagcgtcactatgccagtgtctggcactgctcctggcatattctgttagttcctggaaaggggga

SEQ ID NO: 33563 - DNA, 122 bp, Homo sapiens
aggctcttggggcgcgggttttgtgcaagccacaatggtccgtggggctctccccttgggcggagtggggcgcggtggggaacacagcttggacgcctaggcgtcctgagcccggcaccctg

SEQ ID NO: 33564 - DNA, 122 bp, Homo sapiens
cccgccatatgggaagtaggagcaacccccctttccccgcctgtctcctacgatccacatcgcagggaggtgcacacccccgcaatatggggagtaggagcaacccccgtctcccccactgg

SEQ ID NO: 33565 - DNA, 122 bp, Homo sapiens
agtagaacccgcgggcccagagctccatctgagcatgtgcaggctgcggggtgtttccttcgtctgctggcgggagaggagtggggaggagctctttacccgctgagcattgtggggcccgc

SEQ ID NO: 33566 - DNA, 122 bp, Homo sapiens
ggtgaggcaaggaaggacatagaaagactgctcaagtgcatttctggttttgcttcctaccgcaaacgactcttgtcatatgactgggggagtgtggtggtggcaataagcagaaaaatttg

SEQ ID NO: 33567 - DNA, 122 bp, Homo sapiens
agaccaacccatcattccaagtttgaaaatctaataacattcaaatggaattttgtctttcgaggcaaacatacacttacacaattcaatagcatttttagcaattaaatttatttgtctcc

SEQ ID NO: 33568 - DNA, 122 bp, Homo sapiens
gtaacacgtgtataccggctcagcacgcggctgggtacggtttgcaacgccgagagcccgcggagaagcttgagcctgtgagcccccgtctccgaccacggactcaccgggaagcaccaagg

SEQ ID NO: 33569 - DNA, 122 bp, Homo sapiens
ctgggattacaggcgtgagccaccatgcccggcctcactgaagggatttttttaatgtcacgtggctctcacaggtgcagtgtgttcgggtgcaagtgaagattacgactgatgcttaaaaa

SEQ ID NO: 33570 - DNA, 122 bp, Homo sapiens
cgttccccacgtcaagctcaacgtgcgtgctggtaacggggcccatcctggactcgtcttcgcgggctactgctatgttcttagagctctctgtttttaaaattagcttttatttttattag

SEQ ID NO: 33571 - DNA, 122 bp, Homo sapiens
gaccagggacaaactgtgttgaagctcaatgactttctggcagaagtgaacctccagcttcgttttctgacagccgtggttcttcacaggcctggtttcccactccggaccctccactgccc

SEQ ID NO: 33572 - DNA, 122 bp, Homo sapiens
tcaggcgcggggaggcctctgcggcgcggcggctccgcggagggatggagctgggggctccgagcgccccgggatcccctaggccccagccagagcccacctggggctgcggggccgatggc

SEQ ID NO: 33573 - DNA, 122 bp, Homo sapiens
actgccagctctttcttatctacatcaaggttatttatttattgtgaaaactaatctcagcgaatatttagactagaaactggagtcagcctgtcactcagcatgcttgtggcctgtcttct

SEQ ID NO: 33574 - DNA, 122 bp, Homo sapiens
atgtcatgaaaagtggtgcccaatgaggctcacctttccctggggacaacttagcaataacgctagataatttcatctcattcctttgctttttcttctttctctcctaaatctcattccct

SEQ ID NO: 33575 - DNA, 122 bp, Homo sapiens
gcgtccacgtgcacacctggccccatgctcacgcctgcaggagcgctcgcatgcacacaacgcacatggtctccaaaccatggcagtgatggagaggggtccctggccgccctcggggcaca

SEQ ID NO: 33576 - DNA, 122 bp, Homo sapiens
atgataggtgtgagcccctgcgctttgccagggctggtttttggatgtgattctcagggccgtctttctttacccttctgctctgctgaggcccacagcagcctagtctccttgggtgtggg

SEQ ID NO: 33577 - DNA, 122 bp, Homo sapiens
gggaacccagcgtggtatggcaggaaaggtcgagcagggaaacaggcccagccagaggctcgggatccggggctcgcgagcgtggtgctcctgggccgggcggtgggggaggggccgcgtgt

SEQ ID NO: 33578 - DNA, 122 bp, Homo sapiens
attagtgagccaggcagagaacggcgttgtgcaaatagcacatctcccctggaaaacgcgcgtccccccaaacgttccccggttattcttagaaatcttctctcatctccctgtgagacagg

SEQ ID NO: 33579 - DNA, 122 bp, Homo sapiens
tgactgattcacaatgtccaggggcagagcccagagacctgtgcgttttgcagtttccaccgtacactgaaggcagtcaagatccagggctccagctcaatcatgatgtccagccttcatcc

SEQ ID NO: 33580 - DNA, 122 bp, Homo sapiens
gaaggtgctctgtaaaggcccacccagcgcacagtaggtgctctgtaaacgcttacccagcgcacagtaggtgctctgtaaacgcttacccagcgcacagtaggtgctctgtgaacacccag

SEQ ID NO: 33581 - DNA, 122 bp, Homo sapiens
cgcttcagccgctcctccagcttctcctcggcctcccgcgtgcgctgcacagcctccaggcggtggatgagctcctccgcgaacttctgaggctccacgcggacctccttcggcacccggta

SEQ ID NO: 33582 - DNA, 122 bp, Homo sapiens
cccaaaggaagattccacttggcgcaggcatcaggagttatccaatgtgacttccaaagacgccttgaaaaggttttctgctaacgaaactcttcttagtcaaatgaggaaccaaaagcaga

SEQ ID NO: 33583 - DNA, 122 bp, Homo sapiens
actccacaatcagtaattagagcgtgccccctgccccagaactggtcaaacggtgcagagcgctcggcaaatggtcttaaaagcatccgcgcttgcatggaaatgcatttccaatggtgacg

SEQ ID NO: 33584 - DNA, 122 bp, Homo sapiens
caagcctctgcagggcaccaagtccaaccccttcccggccagcaccccagcccggcctcccgccactggcctttgtccccagctggcaccacccctgggcccgcctgccctgcgggtgcccc

SEQ ID NO: 33585 - DNA, 122 bp, Homo sapiens
tccagtgtggaaggggaggcagctgttctcccaggcggccgtggggggcagcagaggggacggcgacaggtgcgggagcccctcccggggtagaagtggaaaggcgggctccggggtctgtt

SEQ ID NO: 33586 - DNA, 122 bp, Homo sapiens
tgagattgttgacagctttgatgacatgaacctctcggagtcccttctccgtggcatctacgcgtatggttttgagaagccctctgccatccagcagcgagccattctaccttgtatcaagg

SEQ ID NO: 33587 - DNA, 122 bp, Homo sapiens
ggaaaagtgagggaggcttcacggaggaggtgtcataggagctcagcctcaacggctgctcggaaccctccgagtccacaagatgggaagcaagtccacaagatgggaagcgtgctctatac

SEQ ID NO: 33588 - DNA, 122 bp, Homo sapiens
tccgccgggagcaggtcagggaagggacgcgaggcggcgctgtcaccgcattctgagcgccgcagctccctgggccccttgtatcatttcagtgaaggtcactccagtctttcatggaggcc

SEQ ID NO: 33589 - DNA, 122 bp, Homo sapiens
cttcctcactccgggcctgggcaggcactggggtgaggctctgagaccctcaggaagccccgacccatgcagggactgcagggtgacaggtgtcagcaggcaccccgaggcccccaggggaa

SEQ ID NO: 33590 - DNA, 122 bp, Homo sapiens
gcccttggctgtcagaggttctgaacctctgtgagtttgaaccagggtgagctcagacagcgggagctcctggtgttatgataggtaagggtgtttttccctttttctttttcttttagaga

SEQ ID NO: 33591 - DNA, 122 bp, Homo sapiens
gatcccagccgaggaggtgcgcggtgctgagaggccgtgggagcgaccatagagaacgcgcgggcggagcgagcggccggatgcggtcaccatagagacgggtgactgacaggcagcggaag

SEQ ID NO: 33592 - DNA, 122 bp, Homo sapiens
ggggagtgttttggggccgcagagctctcaatgctgcctatcgggcgggggggggcctcccgcccgactgtccagcttcaccctccagtctgaaagtgaagagcagagtatttatttaaaaa

SEQ ID NO: 33593 - DNA, 122 bp, Homo sapiens
caggtaaagggctcaacaatcatgcttttgtgtagggaactggcaagagtgtgccccagacgtgatgaatcatgttcttaggaggacagcaagatttggggtttctttctccaatgggtttt

SEQ ID NO: 33594 - DNA, 122 bp, Homo sapiens
caccacctccaacgcccctaagccgaggagcgagaggggccccgcccgacggccaccgtccgcacccagtccctggccgcgttggccccgcagccgcccgcctcacctgcgtgtccgccgcc

SEQ ID NO: 33595 - DNA, 122 bp, Homo sapiens
tacctctgggcttttctcaagctctccctaggattactgcggtttcctcctggcgcctctcgtcttggacagccatgcccccctccatgctgcactaatggctcagcctggggccctaggga

SEQ ID NO: 33596 - DNA, 122 bp, Homo sapiens
catgaccagctgtttggcggaagaggcctttcgacctgtcagctttcaacatgccttcctcgctgagcttagtcatttctagcatttgatttagagtgggagacgtgtgactctacctttca

SEQ ID NO: 33597 - DNA, 122 bp, Homo sapiens
agctgtatgcaagcacaattttggttcaggacaaacactaacaagaagcaaagctgaagccgggcacagtggctcatgcctgtaatcccacaactttgggaggccgaggtgggcagatcact

SEQ ID NO: 33598 - DNA, 122 bp, Homo sapiens
ccatcttcgctggtaagcacacgacagtctgtgtccacatggatttctcacgtctacaggcgcgtgtccagcagattcccgatgcagccacacaggagcttttagtccagaagaaaatccca

SEQ ID NO: 33599 - DNA, 122 bp, Homo sapiens
cgcctgtggggacgcgcccatgggccctcggcgagggcggcgtctcaggtcgcacgcgggcgtctcttcggggtcccaggagggttgtagaagcgtgccccctccatccccccgggtcggtc

SEQ ID NO: 33600 - DNA, 122 bp, Homo sapiens
ctcttggcccagaagcccagctggaccctgaggccacaaactgccccctactggagaaatcgctgcaggatttctcctccatcaaatcgctgtgtcagagccagttgggggcttttaaaaga

SEQ ID NO: 33601 - DNA, 122 bp, Homo sapiens
gaagcaagaaagtgagaactcccagaaaggtgggagccacagtgagggctgagatccgaccgtcagattgatagaatgaagagttgtggtcatcctgataagctgttttaagggaagcccgt

SEQ ID NO: 33602 - DNA, 122 bp, Homo sapiens
taagggctctctccattctaaaattcttgtactcctggtctagatccatggctttctcaccgtggcccccttcccaaggtgggtggtctcaccctaactcactctgcacagtgtacctttac

SEQ ID NO: 33603 - DNA, 122 bp, Homo sapiens
gggagctagaagaacttggctggatagaattctgattttcatgggagggaattagttttccgttttctgccttagaagtcatatactatacttgctatttgggctgaactgacttgaaaagt

SEQ ID NO: 33604 - DNA, 122 bp, Homo sapiens
ggagtgaaggcatctggactgggaacaccagggcattgcactggtgcaggcaggatgagccgaggggaaaggagtgccaggcatcattctctggtgacagtttgggtttgatctggatggag

SEQ ID NO: 33605 - DNA, 122 bp, Homo sapiens
aaggcgggagagcgttaacttctgagcctgcgcggtgggagttgctcaagcaggtggtagcgacttggcttccgggcagcgggtaaaggtgagtctggggcatgggttcagtgggcaagtct

SEQ ID NO: 33606 - DNA, 122 bp, Homo sapiens
cttttattaattcactgaaatatttttaagtttgaatagggagagaaatatggaacagggcgaagaaagcatttacacacaaggacaaattatacattatgagctgactacactcaatatct

SEQ ID NO: 33607 - DNA, 122 bp, Homo sapiens
ttcatcttggctttcctctgttctagcaaaacaaaggcgagcctgatgctgcctcagctgcggtctgctctgctgcaaaggcccaggagcagccgcccccactctcgactccaccgcacttc

SEQ ID NO: 33608 - DNA, 122 bp, Homo sapiens
aggaaacttcactcctcgccctctgcggagccccacacaaagaggggccactacttcctgcgaagacaactccaggagcggacagaacatccgtgtctgcatgagagtccattcggatgcag

SEQ ID NO: 33609 - DNA, 122 bp, Homo sapiens
ttataataacttttattccaattgtagcatggtctatctccaagggcaagttcctgcctgcgtcttcattgaaaacagtggaactttgaagcaatgggggagtttgttgcttctcttgacaa

SEQ ID NO: 33610 - DNA, 122 bp, Homo sapiens
ctccagtgtgtgtacggagagcctctttgaagcgctgttgcctttctgtggctagatccacgatcttctctctgggatcaccccataggacatttgctttccaccttctccagtcccagtga

SEQ ID NO: 33611 - DNA, 122 bp, Homo sapiens
caggagggaagaaagaaccggccacacaatggcgtccatcttctggacaagggctggagccgcagagccgggcagggcctgggcgggggcgggggcgggggcgctgctgcctgcgctctggc

SEQ ID NO: 33612 - DNA, 122 bp, Homo sapiens
gctgctgtccagtagcatctgcgggcggcgcctgcacccgtaagtgcatgttcagatcctcgccctcctcacccactgcactctgcgggcagcacttgggcggctggtccgttctctggatc

SEQ ID NO: 33613 - DNA, 122 bp, Homo sapiens
ggaatcctcgccgcctgggcgagtgctgggacgcacaccggaggtgaccgtctagctgcacgcccccgaactcacccctcacccctcttcccccataaacgaccactggctgacttctcatc

SEQ ID NO: 33614 - DNA, 122 bp, Homo sapiens
acgggctgtacccgcccccaaccgggtgcaacgccctggaggccctggagcgacctgtcccgtgaggacgtggccactcggaccctctccgaaagttcactcagtggccgccccgcgtcccg

SEQ ID NO: 33615 - DNA, 122 bp, Homo sapiens
ctgttgaaagccttcccacactgggtgcaattaaaaggtttctcccctgtgtggattatccggtgcatagaaagctgatttctggtcttgaatgctttcccacactcattacacacatgggg

SEQ ID NO: 33616 - DNA, 122 bp, Homo sapiens
tgactcccagcatctgagggaatacccgcagcagcgctaccagagcgcatttgctctatgcgctggaggtcggggtgggagggtgcgcagatcaagatctttttttgcgaacctcagggaaa

SEQ ID NO: 33617 - DNA, 122 bp, Homo sapiens
aaatattcaccatccgttggccatcctggccctcccaggagaagctgactttcctgtgtgcgtgagcaccaagccggagcccgaggacgatgcagaagagggacttgggggtcttcccagca

SEQ ID NO: 33618 - DNA, 122 bp, Homo sapiens
ggaggataagagcaagaaaaaggtcctcagggtcattccaagttcatctgatactgatatcgaaagatttcagaccaaattctgagccagtctcatctcagtctcccctctttctctctctc

SEQ ID NO: 33619 - DNA, 122 bp, Homo sapiens
cagaacttgtgcctgtggcaacttctctcaaaactgtatattgcagatctgtttacagcacgctgtacattctgtttagtcaagtcaatggaatgcagtgcttggagggcctgagtgggatg

SEQ ID NO: 33620 - DNA, 122 bp, Homo sapiens
agatctgcaaggaggcaaggttccaaaatctatgggctgggacagcaaagatgtggcctacgaagagaaaggtctggagaatcagaaggccttcaaatggtggttccaaatccctccagcaa

SEQ ID NO: 33621 - DNA, 122 bp, Homo sapiens
gtggcaggggcaggggggccgcacttactctgaagggtccaggctcttcctttcgatggccgaggacattggggagggaggcggggtgccgggcggcgggggcgctccctttgtggcgcggg

SEQ ID NO: 33622 - DNA, 122 bp, Homo sapiens
gcattttggaaccttattccagctacctccatgctaagccctctttttcctcccaaaatacgtcacttaactgtctgtcaaataactcttgcccattctacctgatcacactctgaagctgc

SEQ ID NO: 33623 - DNA, 122 bp, Homo sapiens
gccaagaaaagtctagatacagccattctgtttaaatgaaaatgtacacggcatgaattacgcatgtgcatttaaagaaataaaaagctaacagacctaaacgaagacaaaatgtaaaaatt

SEQ ID NO: 33624 - DNA, 122 bp, Homo sapiens
gcacaagcagctctgccccgccaggcccacgtgttgcacgcgcgggagaggggtcggccgcgcagaggtggcgtctcaggacttcctgtggcgtcacacagatgggaagaccgaggcccggg

SEQ ID NO: 33625 - DNA, 122 bp, Homo sapiens
ccagctggcatgaaggcagaaagaataacagccagtggcagtggaaggcatgagcgcccccggagagcagggccagaccatcagcagggcccctccaagaggagctctgtatgccgggggag

SEQ ID NO: 33626 - DNA, 122 bp, Homo sapiens
tattgaagtttttatcttcagcaaatgaagaggtaatttaaactgcttacagagagaaaccgaatgggggaaagggtatatgttgttagtaaccccccacagtttaagtgtttttaattgta

SEQ ID NO: 33627 - DNA, 122 bp, Homo sapiens
ctttgacagatcatcttggacttcaggaaatgcaattatgataacgtttgtagacagtcacgtcatgttaggtgtttgtactccatgaggatgagaactctaaatgaggtggtgtatggaaa

SEQ ID NO: 33628 - DNA, 122 bp, Homo sapiens
cctagtcccgccagatccgaacgcgactctgatcccgacccagggtcttaccgcggctagcgcctccacttggtgcagcaagatgggcttattgcagaagtccaccagtggcttcggggtgc

SEQ ID NO: 33629 - DNA, 122 bp, Homo sapiens
tgctgggtatccgcgccggaaccgcgagggggttggttcaggcctaggcgcggggcaggacgggaccggtgagtggctcctccaaacagctatagagacccagaaatgcctgtggaaagcta

SEQ ID NO: 33630 - DNA, 122 bp, Homo sapiens
gaggagtgggtgatgacttcgtgacctcaacgtcctcccccgtccctcgacatgttcccgcgcctgaaaggtgcagaaaactccccccaccgctctggacgagactgagctaggcgtcgagg

SEQ ID NO: 33631 - DNA, 122 bp, Homo sapiens
caatcaacggcgggctctctcctaccccatcccaatctccctcccctcggccaatccgcgcgctccattccgctgcccgcccagccaacccgggccttgaaaccagcaggcgaatgggcgcg

SEQ ID NO: 33632 - DNA, 122 bp, Homo sapiens
ggagatgttcaactcctgtagaaatctgtgtaccagcgaatgcgattcatttaggtttagcgatgaccagtttagcagtgcctgggagctcttacaccaaggctagctgcgcaacatcaagt

SEQ ID NO: 33633 - DNA, 122 bp, Homo sapiens
cagttggtggccaggggatttaacactgatgcaatgccagcacggaaggtatagcgagagcgctgcagtgtgcctttctgcggacggccacggccacctggccaggaagcggctgctgcagc

SEQ ID NO: 33634 - DNA, 122 bp, Homo sapiens
aagccattcatgattttggtgacgttattccaggagtgggcgagggagggcggggcctctcggggccaagccccgcccccgcccctataaatacggcttcccgggctctttgtggggctgag

SEQ ID NO: 33635 - DNA, 122 bp, Homo sapiens
aaagttgccggtggaatttaggttgctaataggctaaccctaagatggggagattagcctcgattatcagggtgagcttactgtcatcacagggacccctataagtgagagagggaggcaag

SEQ ID NO: 33636 - DNA, 122 bp, Homo sapiens
tcacgacgcacataaagacgtacgaagccgtcgccaagtaagggcaaagacctagcaacccggagggagctgggctggaccatttttttttcttgttttacgggaatggagcggggaggata

SEQ ID NO: 33637 - DNA, 122 bp, Homo sapiens
aagtggcaaggggcagggcgatgcgggtgttgtattcgggcagccttccctctaagctggcgaggaactaagcggggatgggaagcgagagaggaaggtgggcggggccaggggccaccgag

SEQ ID NO: 33638 - DNA, 122 bp, Homo sapiens
gagccttggagaaaagttgaacctagaaccctgaaaataccaacagcaggcctgagaacccggagctgcctgggtgtgtggaccctggcaagcgcaggaggggtccgccctgagagcagagt

SEQ ID NO: 33639 - DNA, 122 bp, Homo sapiens
tgtgggttggccttacgcaatcagctgaaagcctcagtagaacaaaaaggcgaacactcccgtgaatgagagacaatcagccctgcctgcctgagtgtcttggagctgggatatcggatgtt

SEQ ID NO: 33640 - DNA, 122 bp, Homo sapiens
acctaaaatttgaaagttgtctgaactccatgcaaaactgtgcaagcacgcttggacatacgtatttttttctcaggatggagggttcatcatgcaaatcagattcttaaaaaggtctgcag

SEQ ID NO: 33641 - DNA, 122 bp, Homo sapiens
aacaaagactccacaagcccccaaccccgggctcgacccaactttccaggacagtagacacggccggtgcccccgcgacagcagcccggcccagttctctccgccagagatctcccgcttac

SEQ ID NO: 33642 - DNA, 122 bp, Homo sapiens
tctgttctctatatgccactttccattttttgtccataaatcttcttccacacatggctgcgctggagtccctgagcctactctggctgggaaggccatccaattcgcgaatcgttcattgc

SEQ ID NO: 33643 - DNA, 122 bp, Homo sapiens
cacacaagcatgctcccacacatacacacatacatgctctcacacactctatcacacatacgactgttcctggggctgtgctgccctcctgtggctgctgacaactccatgtccagcccact

SEQ ID NO: 33644 - DNA, 122 bp, Homo sapiens
cggccggaccagcagagcaatccgaaacccagcccacgtgggttcccagaccaccaactccggccgtgagacttccgggttgtgttatcgcgagaactgtaactgactttgccgctgagggg

SEQ ID NO: 33645 - DNA, 122 bp, Homo sapiens
gaaaatagtgtgggacagactagactagctgaggatgcatggggctcccattacaggcagcgaacagggcggggaccggctgtggggagaggaaggggattatgctggaggtagcggtttgt

SEQ ID NO: 33646 - DNA, 122 bp, Homo sapiens
ataaacaggagagagggagggagagatgggagaagggcccgcctcctgcccgatggggcacgaggggttaaccgcaggccatctccagcctggaagtcccctggactctcctctgatccacc

SEQ ID NO: 33647 - DNA, 122 bp, Homo sapiens
tggaggctaaccacaccagctctggagtcagaatgcttaggccatgtcaggtaacatctccgcttgtgacaaggttgtggcctcagggaaggatggctagcttttacaaatctgatgtaatc

SEQ ID NO: 33648 - DNA, 122 bp, Homo sapiens
agtcctcccctcacagcctctgacccctcctcactggccatccctcgtggtccccaacagcgacatagcccatccctgcctggtcacagggcatgccccggccacctctgcggaccccagct

SEQ ID NO: 33649 - DNA, 122 bp, Homo sapiens
ttggcgtctgtgtagaaggggaaatgtgggcacagacgtgatgcaaggaggacaaggtgacgcttccacaagccaaggaacctggaggatactggccaccactaggaactgggagattcccc

SEQ ID NO: 33650 - DNA, 122 bp, Homo sapiens
caccatgatgctgtgaagtttgctgtaagaataaaaaaacattcccagcctcgcagacgacgcttgttactaatcaccacattgctggtcatcagatccaggggagagggtaactagtgggc

SEQ ID NO: 33651 - DNA, 122 bp, Homo sapiens
tctgtgcagcccacttctggctgagtccagacctcaagaaccccatcagctatccaccatcgtttcagcaagtgtgtattacctgtacagtgagttagctgggccctgtgtttggtgctggg

SEQ ID NO: 33652 - DNA, 122 bp, Homo sapiens
tcctgcaggcctctctcttctctagcctccatttccccctttggggagaatggctggggacgaggggggcaagggaggctcaggccccaggtagactctaatggcggacctcacacagcaga

SEQ ID NO: 33653 - DNA, 122 bp, Homo sapiens
agagtaagcgatttattgctttataagtctaattgggaaactctccatttatttagtgatcgaaacacgatagcatggtagtaaattaggcatttcctaattcaatgtgaaataatttagga

SEQ ID NO: 33654 - DNA, 122 bp, Homo sapiens
caatcagagccccacttcttactcctgggatttggtaaacggaagagacctctcctgttccgggagtaggccgggaccgtggatgagtgacagttcgactttccaataggcagagccctagg

SEQ ID NO: 33655 - DNA, 122 bp, Homo sapiens
agccccacctacatagacttgtaaggattaaatgagatcgtgcatgtggaatgcttaactcgtgctagcctcatagtaattgatgcttaacctgtcttcctagggacacactgctgtttggg

SEQ ID NO: 33656 - DNA, 122 bp, Homo sapiens
aataaccatcttggaaacatcctgagagtcacattccagccctccagccataggaccatccggggctttctccagggaactgaactgtcaggccccagtggggcagcctggagagatctaca

SEQ ID NO: 33657 - DNA, 122 bp, Homo sapiens
gggcagggcggcgaactggaggaagagggtggacgttggtgagaaccgcagtttcagccacgccagtgcagcgaaggcccccgatcaaaaagacagatttgttactagatgattcatcggtg

SEQ ID NO: 33658 - DNA, 122 bp, Homo sapiens
aaatgaaaaccaggagctcaaggtagttggacacttccacatcagaaggcttggacattccggaagtgtagtccaggagggcggtactgttctgtttttcccccaactccagcattctgtga

SEQ ID NO: 33659 - DNA, 122 bp, Homo sapiens
agttgggggacgtgatctcgaaagttggcacctgcgtggccagcgagtagtggaagtccacgggcgagaggcgcgcgggcgtggtcagggccgacacgtacctgcggggagaggcagaggca

SEQ ID NO: 33660 - DNA, 122 bp, Homo sapiens
ggggcagctctctgtgtccctggagctcctgtccctggggaatttgagagagccttagggcgttcttctggctgggactccaggactgctctgtggacagggctgatggccagctcaggcca

SEQ ID NO: 33661 - DNA, 122 bp, Homo sapiens
cctcgactttgcagcgcaccaaccccctatcgccccgtccgctgctcaggtgcgaggattcgccagacgccacaggactgggggcgactcgcaagggcatcatgccacctagaggaaacgcg

SEQ ID NO: 33662 - DNA, 122 bp, Homo sapiens
ctctttggctgagggactggtgggcgctggaaatattagaggcgccggtgcctgtgatgtcgccgcctctgtgacgtccccgccgcgaccccacaggcagggagccgcatttaggtttcggg

SEQ ID NO: 33663 - DNA, 122 bp, Homo sapiens
gcggccccacgtttccagcctgtggatcaacaaggcggagaaccacctttgcaccctcgccgggaaaccagctcctacctccggccccctgttgggccttctggccctggtgttctctggcg

SEQ ID NO: 33664 - DNA, 122 bp, Homo sapiens
ttctgcagcgtttcctctcattctggatggaaaggcctgtttgtctccctcaatctttggcgagggtggcaggcagccaggcggccattacgggccgcgcctcccaccagccagtcgctggc

SEQ ID NO: 33665 - DNA, 122 bp, Homo sapiens
ttatgtttggagcctgtgttctgtaaagagaaggttgatttggtttttagctatcgtattcggagtggaactataatacaattgtataatattcttgttgatcaattcaaagttactctgca

SEQ ID NO: 33666 - DNA, 122 bp, Homo sapiens
ctgctgtggttggggtggaggcacagcagtgatcgagctttagggccacctggccagccccgtgtgaggtctcttctctctcctcctacagaggtctctcagtttagcccctccctgatatc

SEQ ID NO: 33667 - DNA, 122 bp, Homo sapiens
acagatttaggaggaaggcggtcataggaaactgaaagtgcgtcacgcccactcccgtcacggaaactggtctctgaaaggtggggtaaagataaagcctttcaaatttgaggaagaccttc

SEQ ID NO: 33668 - DNA, 122 bp, Homo sapiens
caggtcagagcctctacttcctcatctcaagagttagtaaataacacttcccctgaagatcgtggccctcttcgagatcatgtctgcagggggcctggcatctagtagccaccaggaggcca

SEQ ID NO: 33669 - DNA, 122 bp, Homo sapiens
gggcctcctccaaccacctcggccatactccgcaaatcgttctgctggtcagtgacctgccggcatccacctgtcagtgtactcctatgcccgtgcgttcccctcgacgtccagccacttct

SEQ ID NO: 33670 - DNA, 122 bp, Homo sapiens
ggatgagcagaattcagacgtacgtggtgcccagctccagcggaggagacagtcagtcttcgcccaggcggccagggcagcagcggattccacgcgggcgctgtcccttcagcacctccagc

SEQ ID NO: 33671 - DNA, 122 bp, Homo sapiens
gctgggactcaggggctccttgcgtttagccaccaagagtgggggcaggctgcggggtgccggggagaagccagatctcactcattttacaccgactaattagatcccgccgcccacctggg

SEQ ID NO: 33672 - DNA, 122 bp, Homo sapiens
ccatttctacttctgctctcttttctgacccttcccttacatacctggttctgagttcatcgtaaccctcaccttactccactaaacaactctctcctgacttccatattaatgctattggt

SEQ ID NO: 33673 - DNA, 122 bp, Homo sapiens
ggaggtctctggcccttggtacgctaggtggagagacagctttcccgcccagggtggaaccgccccactgagattaacattgggtggctcccaaccactgacctcaggctcaccttgacatc

SEQ ID NO: 33674 - DNA, 122 bp, Homo sapiens
gaggcggctgcaggtctgagccggggctgtggcttggccgacaggcacccacaaggcacccgcagccgctccgaggccctgctctgaatgctctgcctttagattccgtccttagcatcagg

SEQ ID NO: 33675 - DNA, 122 bp, Homo sapiens
tccccaaatgcttatgtgtatcaacagatttctcctctgggtataccaagtgtctaagtgcggtgggcatgttgcctgcaatgtctgtagtttcagaggctaggtattggtgatctctgtat

SEQ ID NO: 33676 - DNA, 122 bp, Homo sapiens
gtctgcgccgccctagccgaggatgctgaggatgaagctgccgctgaagccaacgcaccccgcggagccgccgcccgaggcggaggagcccgaggcggacgcgcggccgggcgcgaaggcgc

SEQ ID NO: 33677 - DNA, 122 bp, Homo sapiens
gttccgttgaggtcgaccatcaagccatgctgtacatgctcctgaatgagctgcaatgtccgttcaaagatttctcccgcccgtgcctgttcaactgtgtaaggatccctcggataccggaa

SEQ ID NO: 33678 - DNA, 122 bp, Homo sapiens
tgccggaggcgcgtcctgcatcgtctgccgctttgggtaaggtggggtcagggtcgggggcgaggcttgcccggtgggcccggtgcggcgcggtgcccgccgttttcgggacggggaggggc

SEQ ID NO: 33679 - DNA, 122 bp, Homo sapiens
ggcctctggttggctggagtagcgctggcaggggcggggccggggcgcggccacagagcgcgcggggcgggggccgaggggagtcgcccagtcccgccgcttccccaccccctctcctccct

SEQ ID NO: 33680 - DNA, 122 bp, Homo sapiens
ctacagcaccactacaggcactgcgaggacataacaccagagagctgctcctctgccctccgaaacgacaactttcctaccatcttggaggcagagcaaaggggggccagggggaaaagtgc

SEQ ID NO: 33681 - DNA, 122 bp, Homo sapiens
actcgggctttgagagcgggccaagttgccaggcgagaggagcggcaactgacaggggcacggcgaggcgtagggagcgccgggggcgccatggcggaaggcgggcacaccggcgactcttc

SEQ ID NO: 33682 - DNA, 122 bp, Homo sapiens
gtccccggcctccgattggtcgggggggcgggggcgtggcctctggagcctggttccgcgcgccggagcgcgctagccgcattgcgagccgaacccgggagctggcgccatggtgaggagtg

SEQ ID NO: 33683 - DNA, 122 bp, Homo sapiens
acttctcctcccgtcggtcatgctcgcattcggccttttgtacggggtcagctcattgggcggatgagaaggtgtccccgcctaccgccccgaactggccaattgcaaggggtttcacaggg

SEQ ID NO: 33684 - DNA, 122 bp, Homo sapiens
agcacacttcaccgacagcaggactcaggttttatacaagtctctactcgccattgcttacgtccaagaacccagcctaccaggtttaaacaatttccagtcacatacctgagccaccacca

SEQ ID NO: 33685 - DNA, 122 bp, Homo sapiens
agcaccaggccctggcaccttgtctgccccttccactgcgggtgccccaggcagaaggcacggccattcatctctactgggtgcttccactagctccaggaagtggagccggcctgttcccc

SEQ ID NO: 33686 - DNA, 122 bp, Homo sapiens
ccggggctcaggtgagccaggctggcaccggacgcctcccgtggagacagcgcggggtcccggttccaccaggatgttccacagtctccttcggggctggcagcgaggccgaggggaggaag

SEQ ID NO: 33687 - DNA, 122 bp, Homo sapiens
tccttcctggccttttataggccgtgcctagaaacgcttggcttgaccagttagaagtaacgccacgctgtgaatgtttaccacctgcgcactgtcagcgctgagtaaaggggcccgaaccc

SEQ ID NO: 33688 - DNA, 122 bp, Homo sapiens
tcccagcagcaggtggacagggtgcctcctgaggggcagccctgggctgaggggccctggcggggacttctccaagtgaggagcctggcaagcggggaagggccttgtgcccagcaccccgt

SEQ ID NO: 33689 - DNA, 122 bp, Homo sapiens
tagtcattccaaatgttacagattagtcttgtcctttcttaacttgatagtatattcccccgtctctgcccagagaaaatacttggatgttttaacatgtgataattcacgataggttgagc

SEQ ID NO: 33690 - DNA, 122 bp, Homo sapiens
gagccgcccctctgggcacaagatcccggaagaaatgcagggtcagcctcctgcccgggacgcttctcactctgatattagtttattggtttcttgtgcgttcggcccccggagcatcaggc

SEQ ID NO: 33691 - DNA, 122 bp, Homo sapiens
acaggaccaccttgtccagcgaggactccacaaacaggtatgcgctgcccacccactcttcgtgcccattttgcccagctgccatctcacctcctggagatgcagacagtcaggtatccagt

SEQ ID NO: 33692 - DNA, 122 bp, Homo sapiens
agtgctgggaaaggaagagcacggtccctttaaatgatacggaagccgggaaggaaagcgcggggtagaaagggcagagtccgtgactaggcctctagccccagggacctaggcgaggacag

SEQ ID NO: 33693 - DNA, 122 bp, Homo sapiens
gtgatagaccctgagtagcaaaagacgaagactaattacctgacagagctcccctccactcgcctgggtcattgaaattaatttctgctttcaagcttggcagaaagcagctgcagaatttc

SEQ ID NO: 33694 - DNA, 122 bp, Homo sapiens
ttccagcaggccttgcagaaagcgagtgcccagctgaaggagcgaggccgcagcgtctcccgccagcgaaagtagctcaggtagcgggcgtggtccttgtccagctcctgcaggtaccgggc

SEQ ID NO: 33695 - DNA, 122 bp, Homo sapiens
cagatcccctcccagcctgcctaccctcgctcagagcttccctccctcctggattcctctcggagcttttttcagaagcccatttgcagccgaaagctgagatgtgcaggatgatacgcagc

SEQ ID NO: 33696 - DNA, 122 bp, Homo sapiens
tcggcctctgccagcccagtggccgcctcccggcctcctctccgggcccagctccttgctcgtggctgcgcccgcgggcccagctcctgcctctgaacatcctcctgtgactcggctcctgc

SEQ ID NO: 33697 - DNA, 122 bp, Homo sapiens
gaggaggacaacgtatatcaacattaacagaagtttggaagaagctgattccaaccttcacggatggaccttcaagacatcagtggaggaagtaactgcagatgtgatggaaacagcaagtg

SEQ ID NO: 33698 - DNA, 122 bp, Homo sapiens
gaacgaggtcacgaaggaaaccttgccggaaaggaaattgcagcagtgcctgtgtgcgtgcgtctgttggcaaaacgctgctaataacgtcaatgcccatccgctattgaataaacctgctt

SEQ ID NO: 33699 - DNA, 122 bp, Homo sapiens
ctcgggtgatccagccacctcgggttcccgaagtgctaagattacaggcatgagccacggcgcctggccaggatttttaaggttgaagcatccacaacaattttgtgtgtgaaatgaaatga

SEQ ID NO: 33700 - DNA, 122 bp, Homo sapiens
tccccgtccacgtgctaccctgtgggcccaggagagccctggggtccctgggtagcagagcgcctggccatgcctctgaggcccctagtgccgcagagttgagctgagggtctcgcgctcgc

SEQ ID NO: 33701 - DNA, 122 bp, Homo sapiens
ggccggggtggcaggggggttgccataaccagttgcgcttccccctccggtcgcggaggtcgatttgagtgtgtagcgggtagcctgtctagtcagagtttgttttgttttgtttttatatc

SEQ ID NO: 33702 - DNA, 122 bp, Homo sapiens
gctggaaggagaaagtgcatctcttattttctgatttctctctggatccctggagatgtacgagagcattaagccatcatcattcacccatgatacatttacctatggtcttgatcggctct

SEQ ID NO: 33703 - DNA, 122 bp, Homo sapiens
ccttctcaacacgcggctctgccttcttccccagtaccactgcactgccgaaaataagcccggagactaacgcaccttgtagggaagagaaggacatctgtatctccaagcttatccaagca

SEQ ID NO: 33704 - DNA, 122 bp, Homo sapiens
ttgttctttctttgacacagacccagacaaaagctgagtgtagcaaggaaacagacagaacgcctccagtagtggcccccgcctggctccaggatttgtaaacagaaacatcccaggctcca

SEQ ID NO: 33705 - DNA, 122 bp, Homo sapiens
aggcaggagaatcgcttgaggtcaggggttcgagaccagcctggctaacatggcgaaacccggtctctacttaaaatacaaaaattaggctggcgtggtggcaggcgcctgtaatcccagct

SEQ ID NO: 33706 - DNA, 122 bp, Homo sapiens
gcctctcccccggctcttctagaaccgaaggttttagttcccatgggcacagccggaggccgcctgcgccacccggccctcagccgccagaaccaggacaggactccagggcgcgcgcgacc

SEQ ID NO: 33707 - DNA, 122 bp, Homo sapiens
acctcagctgatccacctgcctcagcctcccaaagtgctgggattacaggcgtgagccaccgtgcctggccaccacagtgcttttaatggtggcaatttttaattgtaaaaattgggctttt

SEQ ID NO: 33708 - DNA, 122 bp, Homo sapiens
tacacccccattgcaggggagccctagatggggcagtacagccccctttccacccatcttcggcctcctcattccccacccaagcagccccaatcatgcacgcggccccccaggtggaggca

SEQ ID NO: 33709 - DNA, 122 bp, Homo sapiens
cttactcacctgtcacacccacagcggacactgggcccacgcgctgcccctcgtggaggccgtacaggtgcatcttgtatttgcacccgggctccaggccccccacggtgacctcgctctcc

SEQ ID NO: 33710 - DNA, 122 bp, Homo sapiens
ctgcctgatcacacagttatgggaaccagaggaatgtcttacaggcagaggtggcgcctccgtgaccggaagccagggccttgcctcccaaggcacttgaatttgagggggaaaagattgac

SEQ ID NO: 33711 - DNA, 122 bp, Homo sapiens
tccatggaaagccaggatctggacgccgccccttccgcgaccaccgtgaccgccttcgagcgcgcagatggcgggccgcccctgctgcttgctgtgtagatgcccttctctccgactcccgc

SEQ ID NO: 33712 - DNA, 122 bp, Homo sapiens
aatggaccaatcagcaggatgagggtggggccaaataagggaataaaagctggacaccggcgccagtagtggcccctagttggggtctccttccaggttgtggttgctttgtgcttttgctt

SEQ ID NO: 33713 - DNA, 122 bp, Homo sapiens
tcaaaggaagtgccgaccacagctaatgaggccaatgattgtattcggaaggtggagtcacgcacaaacggagagaagcagaggccaccgctgcagggcccgaggggtggctcccaggccca

SEQ ID NO: 33714 - DNA, 122 bp, Homo sapiens
ttatttccattgcagtttagcaactttccatgtttccctttccatttttcttgtgaatcccgtagtacaggatcaaagataggaattatttaacatacatggctgaggattccttttctagc

SEQ ID NO: 33715 - DNA, 122 bp, Homo sapiens
ggtggtggtagcggtgggtggctgacctggaagtccttaggcacccttttccaaaatccacgtccacttttgcctctcaactgaatctggttgtaattctcagaattggtttgtttaggatc

SEQ ID NO: 33716 - DNA, 122 bp, Homo sapiens
ggacgccgagaaggacggctcaggcccggaaggcggcattgtggagccccgggtcggcggcgggcttggctccagggcccaggaggaactgctgctgctcttcaccatggcctcgctgcacc

SEQ ID NO: 33717 - DNA, 122 bp, Homo sapiens
tgcgagtgagcaggctgccaatcattctcatgcctgcccttgtctgctaaatgccatagtcgtaaatgttcaaaggctgatctgaccagcattcacttctatttagcgccatgtctggtctg

SEQ ID NO: 33718 - DNA, 122 bp, Homo sapiens
caaacagcagcatgtgggtgggtgaggccaaataagggaataaaagcagcccaccctagccggcagcagcaacccactcaggttcccatgcgcaccgtggaagctttgttctttcactcttt

SEQ ID NO: 33719 - DNA, 122 bp, Homo sapiens
gccgccacgccggccacgccccgccccgccgcccgctgacgcgctgcattattcatgagacgcggctggccacgccccccgagtccgaccaaaccaacagtcgccgccacaccggcaggcag

SEQ ID NO: 33720 - DNA, 122 bp, Homo sapiens
agagaaggaagaggcttttatggtctgaataactgtttgactgcacagtttccggacatacgtactgggtatgttatcccaggtagtgattcaaagccctaactcccagtgagcatggcttt

SEQ ID NO: 33721 - DNA, 122 bp, Homo sapiens
agggtggggactactgtactgcctttcagtcaggcggatcccaaagaactgctgcctggacgggaatgggaatatggtctggctgggaggatagaaaggtgcagatgaaagaaaatgtgata

SEQ ID NO: 33722 - DNA, 122 bp, Homo sapiens
aggaactcccaagtggacatttagacacttgggagtactttagaaatgccatgttactaccgaggtccctaaaagttaaggttgggaagcaggcagcatgtctagaatgcagatgtgcttta

SEQ ID NO: 33723 - DNA, 122 bp, Homo sapiens
gagggcagtggtggcctcttggacattacatctttcttggctctttttgacccaggtgagcgaatcctctgctgcgcggtccggtggggtcggctggctctgctgccgccctctggacccgc

SEQ ID NO: 33724 - DNA, 122 bp, Homo sapiens
aggagggtaaggttggttagagcgcaggggccaaggccgcggcagcgaggccgtccagcgcgggctaggatcccgccagcccagccctggagcccggccgcctggccccagccctggcccgg

SEQ ID NO: 33725 - DNA, 122 bp, Homo sapiens
cctcccatctggaatcctggggtctgtccgggcgccagcccctttccaaacaccccttcccgcacccccaccgcaggccagcgtctcgggccccgtctgtcattcgtgaacagctgtccggg

SEQ ID NO: 33726 - DNA, 122 bp, Homo sapiens
gggggttagtagggaagcgcggggatgcggggagcgagaactccccccggtgtctacggccggaggaggtgggggttttattcttctgaaaaagttgaaagtgtggcttactggtacattca

SEQ ID NO: 33727 - DNA, 122 bp, Homo sapiens
taggtcaccccagcagaatgggccatatatttgtgccacctgtcccaagaatacactatgcgccagccctctctctccacgacagaattccactggtccataccttgggcatcctagtcatg

SEQ ID NO: 33728 - DNA, 122 bp, Homo sapiens
tggaagcccagggcgaggacagccagcccaggcacaggccttgcagccatgcgtgggcttcgggcccgccgccgaggctggaacacatggaggtaaccccaaacctgctccaatcatgccta

SEQ ID NO: 33729 - DNA, 122 bp, Homo sapiens
accacagggacaatgcctgtgacagcagtcattgcagcatctccagcatccagcacaggtcgatacgtgggggttttcggcaaatgttaattcagtgaatgaatgagaaattctcacggcag

SEQ ID NO: 33730 - DNA, 122 bp, Homo sapiens
tttccatttaaagactcacagtagcttcactacacatatatttatactgaacatgtacagcggaacataaatatgatgagcatttatgaaaaaactactatctaagtggtttacactgactt

SEQ ID NO: 33731 - DNA, 122 bp, Homo sapiens
gagcccgctcggcgtagctcatcctccagttgtcgcgtgcgctcggcgtggccggcgttgcgttcctccagctgccgcacctgccgccgcagctccctcagctcgcccaagcggcgccggca

SEQ ID NO: 33732 - DNA, 122 bp, Homo sapiens
aactcctccgccagcaatgcaagatctctctatgtgaaacgtatctttataaagaggagacgaaagttctcttgccctctagtgcaggctctgccgggaagcaactgcaccatgacagcgcc

SEQ ID NO: 33733 - DNA, 122 bp, Homo sapiens
ccgaggaaggcgaccgggcggacccccaaccactcccgctgtctgcacgcgcagcagcagcgcccagctcaccccgccattggtgttccccgcgcctgcagcgcgccgccggaagtgcctgg

SEQ ID NO: 33734 - DNA, 122 bp, Homo sapiens
cgccgccggtcactacggactttgtcttgtccacgccgctctgcacagcaccgcgggtcgcgtccaccgcctccgacaattgggtggccaccgtgtccttggcgctagacaccatctcttgg

SEQ ID NO: 33735 - DNA, 122 bp, Homo sapiens
cacaagggaagcacacacctgaggtgggagtggtggccccgggaatgaccgaatggcgaacgcagtgaatagatcaggagggaaaagaggcatcctggaatgaagaccactgcggccggggt

SEQ ID NO: 33736 - DNA, 122 bp, Homo sapiens
ggggcctctggggtggcagcctgggcccagtagagctttgcatctcttggatatctttcccgggcgcagaagctgcggggcttagggagtcgccattgcgctggaaagtcctcccgcccacg

SEQ ID NO: 33737 - DNA, 122 bp, Homo sapiens
tttagtagaaaccgtgtttcactatgttggccaggctggcctcaacctcctgggctcaagcgatcctcgtaccttggcctcaggactacagatgtgtgccattctgcccctgctagttttgt

SEQ ID NO: 33738 - DNA, 122 bp, Homo sapiens
atgtttactcactgactctttcatcaggtcatcctccccaagataataagctgaggtactcgagcaagttctgcctttgaaaagcttggaatccccaaagggcggggcaccagggtgggcac

SEQ ID NO: 33739 - DNA, 122 bp, Homo sapiens
cctctgctgcatacatcagctgaaatggcccagctggggcacttccttggcaagttggtgcgggctgtcagctggggcatcagttcctctctagctaggcttctagactgggtttcaaaaga

SEQ ID NO: 33740 - DNA, 122 bp, Homo sapiens
aagggtgggtgggggagggggcagtgggcagccgtgaatggcggcctccctgccacggcacgtgagctcggcccagcggttcccggggcagcagcagctcccgcctaagtactatgttgaag

SEQ ID NO: 33741 - DNA, 122 bp, Homo sapiens
caggtaagaaaaggttaccctgaatttatgattcctgccaggccccaggaggcaagagatcgcaaacttagcactggctctcgcaaaattcctcccaggagtttgtacaggtcccagcaaaa

SEQ ID NO: 33742 - DNA, 122 bp, Homo sapiens
tgttactgcattgaaaagccctatttaggcttggccctgagaaatttttctcttgggtcacgcatgttcacggtcctcccaggcgaagccgccctggggacgaaaaccgatcacagaggcaa

SEQ ID NO: 33743 - DNA, 122 bp, Homo sapiens
gtacatgcagaggcggcggctgtcccagcagcctggccaggagataccgtggagaaggcacgtgtttgagttggcatcactgtccccagacgccctccctcgggtagagccgcctgtcctag

SEQ ID NO: 33744 - DNA, 122 bp, Homo sapiens
aaaaacttccaggtggaacaagcaacccaggttctgctgcaagcttgaaggagcctggagcgggagaaagctaacttgaacatgacctgttgcatttggcaagttctagcaacatgctccta

SEQ ID NO: 33745 - DNA, 122 bp, Homo sapiens
catgggctccctgttcaacgtcattggtgcctgcatcgttatcctgctggccacgcccatcgccgccatcatcatcccgccccttggcctcatctacttcttcgtccaggtaaggggtgagg

SEQ ID NO: 33746 - DNA, 122 bp, Homo sapiens
acaaaattaatcagaaagagggcaactggcagggcgccagacctcagaaggggaaagaatcgcaggccttgggtttggccttgtcacttgtcatgagccagagccttgattacctaaaccgg

SEQ ID NO: 33747 - DNA, 122 bp, Homo sapiens
agttgaaccggtaagttctaccaagaaccacatgaaactaccagcagacactattgtaagcgccaaggggacctttctccttggccctctgaggtttggctgaaaatcactaacatgaggaa

SEQ ID NO: 33748 - DNA, 122 bp, Homo sapiens
ctgtgctggtggagtgggggtggctggctttgcacacaggcctgctcctgtaccgtgctgcgacagccatgaaggaagaacctggctgagtctccacctgccgtggactgtaccaggtgctt

SEQ ID NO: 33749 - DNA, 122 bp, Homo sapiens
ctagttctcggcctctaatttagctgcgtgttgggagcagggagagagacaaggggcttccgggcagagaccagtgccgtggaaacagaagaggacagggaaaatcacatcagaggaaatgg

SEQ ID NO: 33750 - DNA, 122 bp, Homo sapiens
tggccaaggcaacccaagtgagagttgtgtgctgctttcagggagtgtctcatggtgggacgcgcgccctgctcctcttcttcccccttcctgctggctgaaatgagacctggatggtggga

SEQ ID NO: 33751 - DNA, 122 bp, Homo sapiens
agaccagcctggtcaacatggcgaaaccctgtctctacaacaaatacaaaaattagctcgcgtggtggcgggtgcctgtaatcccagctactcgggaggctgaggttcgagaatcgcttaaa

SEQ ID NO: 33752 - DNA, 122 bp, Homo sapiens
gccgccgccgccgctggtctacttggagctcaaccgaacgtggctacccgggcgagggagcgaggcgggcggcaacgtcccgcgatggatggccgcctcggccaatcggcgcacgcgggggc

SEQ ID NO: 33753 - DNA, 122 bp, Homo sapiens
ccatttcatatagtatatgtttttcttcatactgactccccttggagaaggaaaactccacgagagcaaggatttttgtcagtttttcattgttatttcctcagtgcttagacatgcatcag

SEQ ID NO: 33754 - DNA, 122 bp, Homo sapiens
ggggcggggcggggccgggcgactgagaggggcggggcctggcggctgggaggggcggggcggatgcggggacagcggcctggctaactcctgccaggcagtgcccttcccggagcgtgccc

SEQ ID NO: 33755 - DNA, 122 bp, Homo sapiens
ctccacgccgcttaattcgtccgttgcccaaatgacccctccgcgctccagagcggagatcgcggccgtacattttagaagagtgccatcaataccctcagagttgagctggggttaccact

SEQ ID NO: 33756 - DNA, 122 bp, Homo sapiens
ggttttgccatgttgccccggctggtctcaaactcttgaactcaggcaatctgccggcttcggcctcccagagtgctgggattacaggcttgagtcattcggcccggcctgaacaacacttt

SEQ ID NO: 33757 - DNA, 122 bp, Homo sapiens
cacggaactttccaaagcagccttggcctccttcatgtccagcaacctgagataaggccacgccaccggctaagagttccgccaggggcccagctctcaggaggcctcttcggtgccgccag

SEQ ID NO: 33758 - DNA, 122 bp, Homo sapiens
agctggagccagtaggggagctcagaggattttctatttacttcatctggcctgttatcccggcaggtgcgcccttctctcccacttgcccctctgactcccaatttcccattcccacttct

SEQ ID NO: 33759 - DNA, 122 bp, Homo sapiens
tgccccccgcccccgcattgccacctcttcttttttttctgcacacttacattttttgtacgcttgccatttatacttcggttttctgcactgttaaaacaattccatggctctgttcaaat

SEQ ID NO: 33760 - DNA, 122 bp, Homo sapiens
cggagccggtcggctcggcggctgcaggtggggcggccgggcggggtcgcacccaccgcgcggggcttggccctgagctgctgcttctcggggccagtttatttacagagttgagataagcc

SEQ ID NO: 33761 - DNA, 122 bp, Homo sapiens
gtctgatggggaaggtagacacgtaggtacatagttacaaccggtgtgataacgatgagacgactaggtgtttccaaaaaaatagtatgtgcaggagaggattttggagtggtacacaaagg

SEQ ID NO: 33762 - DNA, 122 bp, Homo sapiens
ggaaagattctacccaatgggcagccggtccccggagaacggccgccgttgccatggcagcgacagggccgctcccgtgccattggctcaaacctgcctccgcccactcccgccctagccac

SEQ ID NO: 33763 - DNA, 122 bp, Homo sapiens
gagcatccgtgggtggcttggggctgataggaaatgggaaacccaagaatgactggactacgagcagccccgaaaataaactcttggtgtatttcggagccgtcgtggcggcacggccgtcc

SEQ ID NO: 33764 - DNA, 122 bp, Homo sapiens
ggcttgtacccaaaaacacgcttctccaccacgtgaccatcctcatctatcccagtataccgctgctctctcaggggcatttgtgtccccgttttggttggtaaacgagctgccgagggagg

SEQ ID NO: 33765 - DNA, 122 bp, Homo sapiens
ctgtatgtatacacgtacatgtctgtgtatacacatatacacatacagtcacacatcgcccgatggcagggatggttctgaggaaggcgctgttaggcgatttcgtcgctgtgcgagcatca

SEQ ID NO: 33766 - DNA, 122 bp, Homo sapiens
ataaggacaaatattgtttagaacttctttttaaacctacgagccttacctttcaagaaccgcagatttgttcctgaaagttacctgtgtagtgagggttttataaatcaaattttactttc

SEQ ID NO: 33767 - DNA, 122 bp, Homo sapiens
ccccgagaggcagggactcagagctaggccctcttaccccctggctcttaggaccccaatcgcaggcggggaggcacccatcgagaggcgagtacagagagccagcccctcatccccccctg

SEQ ID NO: 33768 - DNA, 122 bp, Homo sapiens
agcaggatcttagccctctccagcttcctttgcagttgcttcagattgagtcgaaatcttcggtcactaggacttgaagcttctcttctagttctgagttcttctgcttccggtcctcgttg

SEQ ID NO: 33769 - DNA, 122 bp, Homo sapiens
ggcagccccccggatcacttccctcagatgtccccaggccctgtccctgggcgtaaagggcgcgcagcccggggcagcccctcctcgccacgcccagcgatgggaagttgtggacgtcgtct

SEQ ID NO: 33770 - DNA, 122 bp, Homo sapiens
aaatggatacggtgcaaccccaaacagtgaggcagccttgtagagtaggttcttccttctcgctgctggccccagatgggtctggtcttccttccatttagcccatgtttcccttctgttca

SEQ ID NO: 33771 - DNA, 122 bp, Homo sapiens
cggggggttggaggaacctgacccactgcaggtgggagaccatgctctgaagctgggcagcgtgctgggagtgcaggctgtgttcagaacaggcacccgccaagggggcgactggaggggac

SEQ ID NO: 33772 - DNA, 122 bp, Homo sapiens
tcccctagtgatcccagtgcacactgaagtttgtacagcacagatggcgattcaccagatcggctgcacattggaatcacttgagggatttcaaaaatccttagtgcccaggccatacaccc

SEQ ID NO: 33773 - DNA, 122 bp, Homo sapiens
tctgaggtgggcagggcaagtcaccgccaattaacaccaagggagatgggctccaagggccgctagctgggtgagtgatggagggtgccttccaacaacattttctgattccaaaaagggcc

SEQ ID NO: 33774 - DNA, 122 bp, Homo sapiens
ctcccgcccaggtccctcctgctacatggccatgacccaagagccccacggcatctagggcgcatgtcgcccgcggcccaggcgggacgcccagctctataaccttgcccacaacggtgagc

SEQ ID NO: 33775 - DNA, 122 bp, Homo sapiens
ttctcacttttatgttcctgactccgggtccaagtgcaagcagacagtgcattttgagggcgagaggaggaaagcccactaaagccttacgtgggactggacgaggagcagacaggctgtcc

SEQ ID NO: 33776 - DNA, 122 bp, Homo sapiens
ccggagagttcaggggcaaagagattcattccaaaaggcagcagaaacaagacagatttgcgacatgcttaaccagagaggggctatcaaaaaacccagggtgtcagagccaggaaatgcag

SEQ ID NO: 33777 - DNA, 122 bp, Homo sapiens
ggagggagcatggggccaggtgccagtcatctgtgaagctagggcgcctacccccccacccggaggacccctgcggccccctgcctagaggagcaccatctacagttgtgccattccccagc

SEQ ID NO: 33778 - DNA, 122 bp, Homo sapiens
aggaaaactgagtcagggttgccgaggcaggtgccaggtcagcgggtcctcggtgcctggcggatcctccaatcctctagctccctggaggcttagcggacagcgactggggatcccgggaa

SEQ ID NO: 33779 - DNA, 122 bp, Homo sapiens
cagctccatgcagcaaggcgccgtcggggctcccggcactgctccctcctcggtggctgccgcttctgtgtgtccccggccaccctggcgcccagagcccccacctcgcccccgcccccggc

SEQ ID NO: 33780 - DNA, 122 bp, Homo sapiens
cgtctgccctggccagggaaggtgcccagaggcgggaggccggccggatcacacggacctcgcaggcccttcccagacgctgggttctgaccccgtgggggcccctccctgcccagttctgc

SEQ ID NO: 33781 - DNA, 122 bp, Homo sapiens
caacgtggctgtggagcgtaagaacctgatcaccgtgtgcaggtgggcaccgctagtgggcgggggctggggtggtgagggagaggggttggggtggactgcggaaacccggactgagcgct

SEQ ID NO: 33782 - DNA, 122 bp, Homo sapiens
cctctccccccctggctcttaggagccccatcgcagggggttgaggccccaccccgggtacggggagtaagagccagcccctatcccccctggctcttaggacccccatcgcaaaggggtga

SEQ ID NO: 33783 - DNA, 122 bp, Homo sapiens
tttttcctcccggaaacaacggtgtcattctctagttccggatctaaggtgacccagttgcgaagtccagccttctcgtctgctcatggagccttcagggccatatttgtccctgcgaattt

SEQ ID NO: 33784 - DNA, 122 bp, Homo sapiens
tgtgggcatgagcctgagatgcccagggtcccctgggtcccacgcatgcatggtggggaccgactttctcccatgggtgggacctctgccgtgccatttgtgttttccttcctcatcacagg

SEQ ID NO: 33785 - DNA, 122 bp, Homo sapiens
ggagccgcgggagtggggaggattttcgggctccactgggcgattgtggggtccacggggcgtgggggaatcccctgatcatgggtgtccttgtcacttctgcagcctgactctccttcact

SEQ ID NO: 33786 - DNA, 122 bp, Homo sapiens
aggtgcaggacacactatgtttgctgcttgctattcacttatggtacatacacagtcagtcggggagtgaagggaggaacctttttgttcctcttttcaagctttgctgtttccataacaaa

SEQ ID NO: 33787 - DNA, 122 bp, Homo sapiens
cgaccccgatcacaaggagctggactccaagagcccggacgagatcattctggaggagagcgactccgaggaaagcaaaaaggaaggcgaagcggcgccaggcgcggccggggcgagcgtag

SEQ ID NO: 33788 - DNA, 122 bp, Homo sapiens
tcccactttttggccccgctgcccccgggcagttcttggagtcccgccctggccactccccgccctatcgcggcggctcccactgcacgactttgttgccacctaagggagggggtgcgcgc

SEQ ID NO: 33789 - DNA, 122 bp, Homo sapiens
tgctaaaggttaaacttacagtcttcagggaagggcttcctgccaactggaacagtggtgcgcgctgccacgggcgctcctccaccccagcctggcccctccaggtacagttcacatcacgg

SEQ ID NO: 33790 - DNA, 122 bp, Homo sapiens
cctggcggtgaccttcactcgctccacgcccacagcaacaaacagcctggcatgccttagcgctgcccaggcctcgcatggacacaggggtaggccctgcaagcgcctagagaaagtggggg

SEQ ID NO: 33791 - DNA, 122 bp, Homo sapiens
gaaggagaaaatgcaggctgaagaatcttctgtccctagcacagaatgctatttggctcccgtcgcaatgggggcctggggctaggttatggtgttgttcaaaaaccacagctaaccacaca

SEQ ID NO: 33792 - DNA, 122 bp, Homo sapiens
cgcgcctattttttgttggctgggtgttctcgccagtgattgggtcccggcaaggcgtgccggtgcgctcggctgcggctgctccgtcgacctttgcaggaccgggcggtgcagggctcact

SEQ ID NO: 33793 - DNA, 122 bp, Homo sapiens
atggtacctgatagggttgcttcaaggattaaaggtaccaggtatttaaagcaatggcaccgtgtctgacataaaataagcactgaaaatagctattactagaacataaaaataatccccac

SEQ ID NO: 33794 - DNA, 122 bp, Homo sapiens
gctctctggtgtcctgggtctacgtgggacaccctttctccttcacctcttccagagctccggcagtcactagtacgcacctctgtggaagcacctctgttttgttccccggtttatcccca

SEQ ID NO: 33795 - DNA, 122 bp, Homo sapiens
tccgttccagggcattgcatgcttttgcagatgttttcacttccagccccagcaaacacacgtataagctaacccttttaataacgaaccagggcagccaagataaataaaaagtcttctgc

SEQ ID NO: 33796 - DNA, 122 bp, Homo sapiens
taaacatcctggctctaatttggatagttatgaatactgttcctttcatcctctctcatacgtctcctccacccgcaagccatttcctctgtacggtcttctgtcagtctaatgaaagtttc

SEQ ID NO: 33797 - DNA, 122 bp, Homo sapiens
gagtgctgcgtggcctggcctggtcgcgtgttaggcatgtgagtgggctccacatgtgcacgtcctccttgtgtcccggaatgaggccaggtctcctccgtcctccctctagaccagaatgg

SEQ ID NO: 33798 - DNA, 122 bp, Homo sapiens
tctcacaccagcaaaggcaggccattaaggatgggttccagattcatcagatgatagtggcggcacagccctcatcctggagggcggcactccggagaggggaggcagggcccaagcactgg

SEQ ID NO: 33799 - DNA, 122 bp, Homo sapiens
gctgcggtaaacgcattgaaggaacgcacagcttatctaatagggttttgaaataattttcggtatgccagctggggtgtggtttgcccaattctgatcctgtttccagagaacacagctgc

SEQ ID NO: 33800 - DNA, 122 bp, Homo sapiens
atgtggtgaatcatcttactgcggcaggactctgccaatcagaaagtgaatgtgtaacgccggacaggctctggagatcagtgcgtccagctttcccattttacacagagtaaacctgaagc

SEQ ID NO: 33801 - DNA, 122 bp, Homo sapiens
aaaggcttttaccctcacccccttcccgatgaactagtccaggcagtcggcctcatctcacgtctgttgggcttctcgggaagccaaatggtatcgcacgtgttaaaggcgggtgtctggaa

SEQ ID NO: 33802 - DNA, 122 bp, Homo sapiens
ccccacccggggtctctggcactcgtatcacttagcaccagtgtgactggcggtgcattccggccccctcgcgccccattaaagcccctgcacatcctctcccacgctgcgcttctgctacc

SEQ ID NO: 33803 - DNA, 122 bp, Homo sapiens
gcctgggagcagttttactgtttcacatttctttcattcatcacttttcaggccctgcgccgtctggcacagccccagcctctttgtgtggatatctggctctcattgctgcagagaagtga

SEQ ID NO: 33804 - DNA, 122 bp, Homo sapiens
agcacagcagctgctggcccaggtgctaagcccctcactgctcggagcttgtgggccggccgtccgctcagagtgcggggcgcaccgagcccacgcccacctggaacttgcgctggcccgca

SEQ ID NO: 33805 - DNA, 122 bp, Homo sapiens
tcccgactgggctctacctgaggaccctggggagcctgggcctggccctcctcaggcaagcgggggtgggagggagcctggtggcggggcagggcactgtgcccgccagcaggggcgggtgg

SEQ ID NO: 33806 - DNA, 122 bp, Homo sapiens
cccatccctggcctcctgttacccacagaggggtaggcccttggctctcttccactatgacgtcagcttccattcttcctttcttatagacaattttccatttcaaggaaatcagagccctt

SEQ ID NO: 33807 - DNA, 122 bp, Homo sapiens
actacaatttgcggggagagaagtcccacgagggcatgccccggagcctggctggtcccacggctgacgcacgcggcaggacctcccgtgtccatctctgtccccaagcatctccgcctctg

SEQ ID NO: 33808 - DNA, 122 bp, Homo sapiens
gtgacagagtcaattcgctaagtgggtcatgagctcggttaattaacgcttcttggagctcggctgtcccagagcggtaggtccccaggagcggcagtggggcagtggactctcagggtcgc

SEQ ID NO: 33809 - DNA, 122 bp, Homo sapiens
gacactgttgttaagtaatttatgggacatccatgcagtggaacaatctagaaggcaatccgccatgtggttaagagcttgggttctggtggatttaaatgcgttccactactgattggatg

SEQ ID NO: 33810 - DNA, 122 bp, Homo sapiens
gagtctgcacggggaagggaaatgcatgctggtccagcggggggcgcctgcaggggacatcggtgccgcggttgggatggaggcgtatgggatgagactagggcagaggtggacatgccgtt

SEQ ID NO: 33811 - DNA, 122 bp, Homo sapiens
ggcgcgctcacccctgtgaggaggccggaggtcggactcaggaggctccttctccactcccggaagatcatgtaccagcccagccggggtgcggcccggcgtctcggcccttgcctgcgcgc

SEQ ID NO: 33812 - DNA, 122 bp, Homo sapiens
gctgccgcctcctcgtcagcttccagctcgtgtctggtgcggagcagaggcttcctacttcgtcgacgttcctgaatgaggtcatcatctggtgtaggcctgaaaacaacccgattaggtag

SEQ ID NO: 33813 - DNA, 122 bp, Homo sapiens
cagttcctgttttattagctgtaaaatgggaatggcaattatcttctttagaggttgttgcgaaggttaagtgggaacattgtaaactgtgtgacacagcatctggaacataggaggcctag

SEQ ID NO: 33814 - DNA, 122 bp, Homo sapiens
gccgagaaggagctggaggagagccgcccggctccagccggaccgcttgcccgccatcaccgttgtaatctatgcagcaaacaagctggaacccgctgggtggcacctgcaagcagccgccc

SEQ ID NO: 33815 - DNA, 122 bp, Homo sapiens
ggccccgccccgcccaggagccgccaatcgaaagccctaatgagcagtgggggcgggactcgcgcctttaaagggacctcttggctcgcggccacggggtggctgggggtagggggcgggat

SEQ ID NO: 33816 - DNA, 122 bp, Homo sapiens
gctgtggtctgatgagtcagcctgcattagcgcctcattgaaatggatgggaacttgtcccgggctgctgggggaagctggccgctgtgtctgaggatggcttagggtactgccttggctgg

SEQ ID NO: 33817 - DNA, 122 bp, Homo sapiens
tattatccttccagcaaggcagtcagagtggctggagagcatgagagtaaaaatagctgccgttacatttcctacagactcactagatcccaaaaattgcagtggccttggaagcatgtttg

SEQ ID NO: 33818 - DNA, 122 bp, Homo sapiens
ctcccattggctgaaagttactgtgggaaagaaagtttgggaagtttcacacgagccgttcgcgtgcagtcccagatatatatagaggccgccagggcctagggatcacacaggatccggag

SEQ ID NO: 33819 - DNA, 122 bp, Homo sapiens
cactttgaatagcagtcacacatctgcagtcacacatctgcaatacaaactacagatcaacgccaaacacgttataaggtacttagcacttctctgatgcatcagagattaagaatgttttt

SEQ ID NO: 33820 - DNA, 122 bp, Homo sapiens
ctctgagatgccaaaggagagccggtccctggccgcgcggctggaccccagcctccctcgcgctgcgctgcacctccgcggcccctcctcgcgcagctccgccctggaccgccgccctgtgg

SEQ ID NO: 33821 - DNA, 122 bp, Homo sapiens
gccgcccgtgaggatctgagagccatgtcggccagcagcctcttggagcaggtacaggcccggcccgcatgcctcggccattgtgtgaggcgagaaggagcccgactaggcccgggcccgcc

SEQ ID NO: 33822 - DNA, 122 bp, Homo sapiens
gcttgtcctaaggaagaaactcccagggtattcagctgggttccccagaatttggacagccgggttggaataatatctcccggccccttgccctcgccgcagccggctcccgtagtaaacag

SEQ ID NO: 33823 - DNA, 122 bp, Homo sapiens
cttgctgggttttccagagcccgggctctgagcacaaactcagatcccaagttggcatgtcgaccatttcatccaaagagagatggttttgtaatgggagaaggtgcagctgtgctggtgct

SEQ ID NO: 33824 - DNA, 122 bp, Homo sapiens
ccccggctccagccctggcagcgacttctagaagggcaggttggccatgccgcctggtgccgggaggtagcccatctggctgtccagggacacactgcgctgccgaagggggtgggacacca

SEQ ID NO: 33825 - DNA, 122 bp, Homo sapiens
atgatggagaagtgaactgaaattcgattttcttgcctctcactggggactgtgtttggtcgtaagctgctgctcggtctacctatagaggtgggggtgcctgagcaggaagcggtgctccc

SEQ ID NO: 33826 - DNA, 122 bp, Homo sapiens
gagttggatcaaagggcgtgctcatgctggaagtgtattattagtctgctaccaggtacacggttcagctgagatatagctaccaagttgacagactattaaagtcaaagttataaagtaga

SEQ ID NO: 33827 - DNA, 122 bp, Homo sapiens
ctgcctaaatggctgccctgttttgcgcttgaaacccagggccctggtagtgtcagcactcgagggaatctcctggtctgtgggttgtaaagaccatgggaaaagcatagtatctgggttgg

SEQ ID NO: 33828 - DNA, 122 bp, Homo sapiens
gggggcgggggcagggcaagagagaggcctgggcacatgtgtcttgcttttctgtccccacgttcccaggttcacctggagttcctcccatgtggacagaaacctcctcctgctcctgacag

SEQ ID NO: 33829 - DNA, 122 bp, Homo sapiens
gcccagcccaagcttcttgctgcagttgcccagttcctgctggcagagctgtgcgggctgcgaggacagagctggggcaagcaggacccgggtgggtgggaggacaggcgcgaggccctcca

SEQ ID NO: 33830 - DNA, 122 bp, Homo sapiens
tggtagtcgggcaaattgtattcctcctccttggaattccgctcacagaggccttcccggcgtggccggcccagcagggacgcgccgccgcagcggaggagagaacgcgggcggggggctgc

SEQ ID NO: 33831 - DNA, 122 bp, Homo sapiens
gacagccactgaatgcccaaaatacgacgccatctgcaagatgaggagcaccatcattcacgccgctggacaagcatcctctttaagaaatgggccctcacctcccatgaaatattctgaag

SEQ ID NO: 33832 - DNA, 122 bp, Homo sapiens
caaatataagaaaatagaaaaaaatctgttaaagtgaattacaaatgtgtatggattaagcggctttttaaggattagaatagttaccaaatgtaaaaaggaggaagaagctcatccttgaa

SEQ ID NO: 33833 - DNA, 122 bp, Homo sapiens
aacatctattgtatgcttttcctagcatacagacagtctcccccaaccccatccccaccccgctctgcattctacaagtaatgtgtgtcctctgcccacagggggtgctgcagaatgtgagg

SEQ ID NO: 33834 - DNA, 122 bp, Homo sapiens
gcttgcgggccagctggagttttggtgggtgtgggctcggcggcccagcactcagagcagcgggccggccctgccggccctgggcaatgaggggcttagcacccgggccagcggttgcggag

SEQ ID NO: 33835 - DNA, 122 bp, Homo sapiens
acagagcagagtgcgcgttgaaaccacaaggttagtctgagttctgatgtgaagctatttcggttttttattcccccggcctccacccattcccgctcccccaccccccaccccccccaaaa

SEQ ID NO: 33836 - DNA, 122 bp, Homo sapiens
tccagggggtgaaggcagaagtcaactgctcattcattcaacaaatatttattgcgcgcccgcttagtgccaggcaccggaggtgccccgagcaagaagccgctctcgctgatccgtttccg

SEQ ID NO: 33837 - DNA, 122 bp, Homo sapiens
gatttctgcatttccatctgaggtaccgggtttatctcactaggagtgtcagacagtgggcgcaggtcagtgggtgtgcgcaccatgcgtgagcccaagcagggcgaggcattgcctcactt

SEQ ID NO: 33838 - DNA, 122 bp, Homo sapiens
aaacccacgtcatcatctgatcataatggaaatcaatctcctcaaaccaccatgcaaaggcgtatccatggcaacctcaaaaggaaggacacagagatgatgcttcagtggctgcagcagga

SEQ ID NO: 33839 - DNA, 122 bp, Homo sapiens
gctacggcgagcgactccggatcttgtggctatttatccgctccagactttttggcctgccgggatcgcaggagcctggggttggaatgtgcgcggcggcgtggagggggagagaaggagga

SEQ ID NO: 33840 - DNA, 122 bp, Homo sapiens
cagacaagccggcttctcaggcatttaaacaagttgtctggaggttgtcagactctgcagcgcatcagcccctccttttgttcgttcgtaatgccacagtgtttatggagccctgccttttg

SEQ ID NO: 33841 - DNA, 122 bp, Homo sapiens
cgagatggtaaaaattctccccaaatacctacagtccgtctcagtcgtcttaatcctagccgggcctcttcgtttacagccactgaaataaatgagtaaatggctcagttcaaaaacacaac

SEQ ID NO: 33842 - DNA, 122 bp, Homo sapiens
aagattctggcttctatggaagcttgcaaagatatgagggagggcaaacaactgcttctacgtgttttgttttgttttaagaactcaaaaaagcatggtaggttctttgagcaaggccttag

SEQ ID NO: 33843 - DNA, 122 bp, Homo sapiens
ggggacccggccggagaaggcgccgctggggccgcccggaggagcccctctgcacgggcccgtggagacgcttcctgcgtggaaccttctggaatccaccgcccccctttccgcccgcgtca

SEQ ID NO: 33844 - DNA, 122 bp, Homo sapiens
ctgaaattctgcgtggggtggtgatgaacggctctagcactcggtaaaaggtatttaaagcgcatgtagtttacaacactaacagcccgccgcccgcgagcacagcccgtctggtcatccgg

SEQ ID NO: 33845 - DNA, 122 bp, Homo sapiens
caagacttcctgctgccttgggctggaccccatgggccgagactctccatgggcacaaaccggggatgcccagggtcccctgggccctgcttatgcccggtggggaggcactttttcccgtg

SEQ ID NO: 33846 - DNA, 122 bp, Homo sapiens
tgtgatccacctgcctcggcctcccaaagtgctgggattataggcatgagccactgcgcccggctggtctctgacacatctaagctatgaaccattagggtaagtttctgaccatctctgag

SEQ ID NO: 33847 - DNA, 122 bp, Homo sapiens
agtacacaggatatatttgagacatctcttttcctatctcccaccaaaggataattcaggcggatctcagtgcacaggcacaggcatttgcctcattcttgttttgtctgttttgaatttag

SEQ ID NO: 33848 - DNA, 122 bp, Homo sapiens
tctgagttacacatcttttccgtctcctcctctttcttctcctcgtccagggagtaattccggaaggtcttgtagattttctgaacgtcctcgggcaaggtctttttgaggtccttgttttt

SEQ ID NO: 33849 - DNA, 122 bp, Homo sapiens
tgttagtaccatcaatcctgtgagtaaatttctgcgtgtgcgttttcgtgtgtgcagattcgtgtgtttgtaattgtgtatggtcctgctaatgtttgtgtttatcactgtgtgcactttta

SEQ ID NO: 33850 - DNA, 122 bp, Homo sapiens
caggggaggtgagacacctctaggggaggccccgtgtttcagccaggctcccagatggtccgcttgtcccctcaccacgcaggctggggtgttggaaagagcccgtccagccttgatcctgt

SEQ ID NO: 33851 - DNA, 122 bp, Homo sapiens
cgggcaggcggacgccctggggcggcgggcggcggctgccggggctcgccggggctcggccgcccgctgcccatcgataggtattaggaattgatctcgccgctgctctttgttcggttcag

SEQ ID NO: 33852 - DNA, 122 bp, Homo sapiens
cttccctcctcgaagcgaagtcctcaacacagacacgattacatagcctctgcccaagcgcgtctcagtccagaatcattgcacctaaaggaggagacgggaggataagaagaaagtgcaat

SEQ ID NO: 33853 - DNA, 122 bp, Homo sapiens
ggcttcagggcgctgtcagaacttccaggcggcggggactattaacggtcacatggaggccgccgcatctgtgatggcagagcgggtcggtgggtccccactgctgtgtttactgctcctta

SEQ ID NO: 33854 - DNA, 122 bp, Homo sapiens
tactcagattcagttcagtcatattagccagccttgttcttctgtaagcttagcagccaccgaactaatcctccaggagtcactgtactaaaagttctcaaggaggccaggaaatggctctg

SEQ ID NO: 33855 - DNA, 122 bp, Homo sapiens
tgaatggcaccctagccccactgtcttctgggtggcttcaggatccttgaggaggttggccgtgtaggttcccctcaggtaggacctaggtgagctggggagtcttaactcacccagggcag

SEQ ID NO: 33856 - DNA, 122 bp, Homo sapiens
caatgaggtactgcaatgtcccggaccgtatagtttccaggacgtctcgccgcgcgcatgcgcagaaacactgggcacagggggaggtaactgcagtaagtcccgcttggccctggagtcca

SEQ ID NO: 33857 - DNA, 122 bp, Homo sapiens
tttattgggagtaatatcatcctctgccttcttggatattaggaacaatatcacactgtgcgtgtacgcctgtcgcgaaattcaatgaaatgtcatcctgcgcctccctggatatgacgaac

SEQ ID NO: 33858 - DNA, 122 bp, Homo sapiens
cagcaagcccccacaattaaaagcccagcgccgacccttcctgtcaattaggcgctgaagcgcaggcggtcagcatcgccatggagaccaacacccttcccaccgccactcccccttcctct

SEQ ID NO: 33859 - DNA, 122 bp, Homo sapiens
gggccggggagggacgccggaaggactgggtagggacgcccggaggactgagcgtagggccgagaggaggggcgcaaggaggaacggggggagggccctgtctcaccctaaacccctccccg

SEQ ID NO: 33860 - DNA, 122 bp, Homo sapiens
tccatggagccttctgcctgtccctagaaagggcacccactcctcgttgagcgtgttttacggtgtgatctggtggtttgttcacaagtctgcctcttgctatgaaccagagtctggggctc

SEQ ID NO: 33861 - DNA, 122 bp, Homo sapiens
tggcggaaagcagcgggaggaggcacctagccctggggttgagatcccagttcccgcgtgcgcaaaccacgcccctgtagattctcgctgctgcgtgttcgcgcgcgtcccggagtgcgcat

SEQ ID NO: 33862 - DNA, 122 bp, Homo sapiens
tcgaacacaaaccctgcggtctccagggggtcattcatcttgccccggtcgacatcctcgcggcctggcttccttctgcgcatgagcgaacagagccttttcccaaagacagttggcaaagg

SEQ ID NO: 33863 - DNA, 122 bp, Homo sapiens
gcttagggagaacccaggggtgctgggcttccatgtaaaagtgatgttcatggcgcttcgcgtgaggtgagctttgccctccctgtgatgcacaaaacaaggacacttggaaccttgccggg

SEQ ID NO: 33864 - DNA, 122 bp, Homo sapiens
cagtaatttcttcacaataatattgacccatttcagtctgtatgaaccctttaacttaaacgttgactgcaggtgtatgctttgtatcatgtgctcacaagcatattgtttctgttgaattt

SEQ ID NO: 33865 - DNA, 122 bp, Homo sapiens
agggctccaagtgctgccacccctgctacaaggcccctttcatgttatgcccccacctgacgacagtggaagacccaactctctgagtcttataccaaaggaacatggaggtacagagaacc

SEQ ID NO: 33866 - DNA, 122 bp, Homo sapiens
gcaggactgaggtgtacccggcctgctgtgagccccggcgtagtgcagaactcggggcctcgtttcccaagaacacacaccctggccatacctcagggcaggggatggaacactcgtcaaat

SEQ ID NO: 33867 - DNA, 122 bp, Homo sapiens
caggtgtttcttttaagacgttaaacgctttctagaacctcaaacagctaagatgctccccgcacccgaggttttgcaccagcgacgctctagggtgtgtttttctacttccctaggcccaa

SEQ ID NO: 33868 - DNA, 122 bp, Homo sapiens
gctgattgctatgaggtctgactgtttttccttgttcactctaagctgggaagacagtcacgaagtttgagcagagcaaagacgtgatccgacttaaaagaaccactcttactttagtgtta

SEQ ID NO: 33869 - DNA, 122 bp, Homo sapiens
gcaaggagaggcggggctgggctccacctctgcactgtggccctctgaagctgccaggcccgccggcacacactaagtgcgcccagaatgcggggtggccaggggcataaatgttgaatgaa

SEQ ID NO: 33870 - DNA, 122 bp, Homo sapiens
tcagatcattgccaccagcagcagaacatccacataggagccaggagtcgcaaaccagcacggccttggatgcacggcctccatgcctgtttcaggcacagcaccggagtcatggaatgtta

SEQ ID NO: 33871 - DNA, 122 bp, Homo sapiens
taggcagtttgggcaaagcagccccttttatgcctaccaaggggatataatggtttctaccggagctgctccatgcaatacagattggtttgttcaaatgaccatctttcccagtgcacttc

SEQ ID NO: 33872 - DNA, 122 bp, Homo sapiens
gcgagaggcggagaaatgtggggtcgtccaggagggtcgacaaggcaaagaacctgaagacgacccaaaagggtacctaggtggggccctttcagggacttggggcatagggtagggcgcat

SEQ ID NO: 33873 - DNA, 122 bp, Homo sapiens
gaggaaatggccttagaatgagcactgctcggtgctgacctccgccaggcctggaatccccgctgctgcgcttcccgccgcagacagctcccggccggccccgcctcccggcatggccccgc

SEQ ID NO: 33874 - DNA, 122 bp, Homo sapiens
gagcgtgcccgcttgtacttcctgctggcctggtttcatgcgatcatccaagaacgcttacgatacgcaccactggggtggtcaaagaagtatgaatttggagagtctgacctgcggtcagc

SEQ ID NO: 33875 - DNA, 122 bp, Homo sapiens
gggcgtccgtctctttccctagcccgctgatagaagtcagaactagagcaatgacgcacacggtgtcagagacggtgattcgagatgccctttcaatagcagcttttttctgtgtttcggga

SEQ ID NO: 33876 - DNA, 122 bp, Homo sapiens
gcccctcctacgcccccaaccacactaccgccccgccgagaagcccagagccgtcggcgacggagagaagaaagattctggggggatctcagaaataaatcaacttttgacctgtgtgtgtg

SEQ ID NO: 33877 - DNA, 122 bp, Homo sapiens
cctgcacgattacgtgagcaacacagagaaccgggccttgcgcgagctggtggccgagtgcgggggccgggtctgtgcctttgataaccgggccaccggccgggagcaggaagcccaggtgg

SEQ ID NO: 33878 - DNA, 122 bp, Homo sapiens
tctgaaaaatagatcacgtttcgttatctttagtgggaatctgcaacgtgacaccggatccgcgcggcccccgcctccctccctgcctcgctctgcctggctgaggggagcaggcgggcctc

SEQ ID NO: 33879 - DNA, 122 bp, Homo sapiens
atgtggcaggagggcaccagccgggctcaggcgggtatggagctgcctctaaacggaagccggggaaggctggaggggtcccctgtttgcattctggctgccctgctgggggtttggagaag

SEQ ID NO: 33880 - DNA, 122 bp, Homo sapiens
gctgatattttttcacgattagattgaggggatacccgtttggcaggagcatcacaggcccggctctgaggtccgcctcctgtcaagggcgtgcacgaccgacttctccagttgctgggaca

SEQ ID NO: 33881 - DNA, 122 bp, Homo sapiens
cacagctggtgaggaagcttggaaaaatcgcggttgtgtgcagacttttgctgaggtctgcgtggtctgagcagaggagagcaggctgggattcggggaacccacggccggatgtcagggct

SEQ ID NO: 33882 - DNA, 122 bp, Homo sapiens
aggtgaaatactcatctggaaaaaaggagctgtgcgccatctggtcatcggggatctcaccgctgaagcggtcacttagtgcctgccaaggagggaaggtgacatatgatggcactcagtag

SEQ ID NO: 33883 - DNA, 122 bp, Homo sapiens
caagtgtattttcctgtctgtgtgtctcgcttagattacagggatctgtgggtgatgacacgtctggtccaggctgcgtagtcacctcaagggcatgcttattgatgtgtttttcaattcac

SEQ ID NO: 33884 - DNA, 122 bp, Homo sapiens
ctcttcgtcaagcaggactggggtcaggggttggcatctctggggcctgagcttgggcagcgtattctgtgcaaagcatgtggggcaccaaactcaggtcaagtctgttagggaaagtcaag

SEQ ID NO: 33885 - DNA, 122 bp, Homo sapiens
caggggagaggatgcactgccggaagggctctccccacccaggacaaacaggaagttgcccgcggtgcacacgctgtgccccagcagtggtgtgggtagctgcgtaaggctgcgccagcggt

SEQ ID NO: 33886 - DNA, 122 bp, Homo sapiens
ggtgggcgccctcccatcctgcctgcaggcggtggcttgctggcatctgtgggaactgcccgtgtccatgtgctgagaggaatgacctgcaggaatgggtccctctgcacccgcttccagga

SEQ ID NO: 33887 - DNA, 122 bp, Homo sapiens
ctctttccttcctcgaggttctatttctgccagcaatctcatttttgccaccagtgctgacgataacgaaatctccttattgtcctgttgcttttggattccaacgcgcctttctgagggcc

SEQ ID NO: 33888 - DNA, 122 bp, Homo sapiens
gaatgctcagagcaatctgcacagagccatcgtgagctgagctgcacgtgtcacactgaacgggacctgcccggccctcctcggccgcccagccccagacgccactcctgcccaccttcaca

SEQ ID NO: 33889 - DNA, 122 bp, Homo sapiens
agaaagattctcttgtctgtagtagtaaagtctgtataaagtctgcatggacttttcttgcgtacacacattgccacatcacctccagtcaaggctggaagagaatcttgcattttacacat

SEQ ID NO: 33890 - DNA, 122 bp, Homo sapiens
ccggggcgtcgggagggcttcctggaggaggtgccagcgccgggcgcggcggggtcggagcgtgcgcgtggcgccccaccgggcacgcgcaccgccggcgggccttgtggtctcatcgcgcg

SEQ ID NO: 33891 - DNA, 122 bp, Homo sapiens
caccagttttaggtgtacagcagtggctggtggaggagcaggcagtgctgggtcactaggcgcatcctccttaggcataggcagggccggggtgggagcaggatcggggctgtcgcttcggg

SEQ ID NO: 33892 - DNA, 122 bp, Homo sapiens
acttgcagtccaaagtcagccaccagcagtgccttcgatgcaccctgggccactgaaatccgcccgtcggccacggagacaggcaaggctgtgagcacaccgttcacctgggggaaggaggg

SEQ ID NO: 33893 - DNA, 122 bp, Homo sapiens
gctgctgtgagtgggagtctctgagtgggtgagtgtgggtgagtatgggtgtgagctgggcgtgggtgagtgtgcaacggagcttcacagtggcagacccacctccatggaaggaatccaat

SEQ ID NO: 33894 - DNA, 122 bp, Homo sapiens
caggagtgcacttgaaggtgagggtgcagagtggccggtgggacttgtggctggtgttctcggccatgccctggccccagaagtcgttggtgaagatgccccagcagagcgaggcgctgggc

SEQ ID NO: 33895 - DNA, 122 bp, Homo sapiens
ggacttttagatcagtggcagatggcatagaaagtctttctgctgttctcttgtgctgggcgtggctcagggctgaggggagagaggagagatgagggcagaaagagaagagggggcaggcc

SEQ ID NO: 33896 - DNA, 122 bp, Homo sapiens
gtctagggccgggtgggctgagcacctcctgctgcccggcctacgctccccggccagccgcgccgctcacgccccaacttgggcccgcgccccccagcccccgcccaggcccgcgcccccca

SEQ ID NO: 33897 - DNA, 122 bp, Homo sapiens
gagggaggggaggtgcagccaggtaggccccgaacaccacgttgccaggactcggctcctcggctcaaggaaaagggacagcggttccgtggctgtgctctgacacacctagaaatttcccg

SEQ ID NO: 33898 - DNA, 122 bp, Homo sapiens
cagcgtcttctcctccgtggggtgcaggttctttagggagctcacggagctcaagaccttcgccaactattctacgtgcgaccgcagcaacctggcggactggctgggcagcctggacccgc

SEQ ID NO: 33899 - DNA, 122 bp, Homo sapiens
aatccaggctattggcctctgagtagctcctggctggagaatggctgcctacccagcaaacggggctcaaagaagcacagatggagagaggtatagaataataaatgtacaacttcactgaa

SEQ ID NO: 33900 - DNA, 122 bp, Homo sapiens
agaggcagtgcacggtttttcaacactgacattcggggaccgatgctgctttgtggtgagcgcctgtcctgagcgctgtaggatgtttagcagcgccctctccatgccagcagcaccacatt

SEQ ID NO: 33901 - DNA, 122 bp, Homo sapiens
ggcgggcagatcatctgaggtcaggagttcaagaccagcctggccaacatggtgaaaccccgtctctactagaaatacaagaattagccggacgtggtgctaagcgcctgtaatcccagcta

SEQ ID NO: 33902 - DNA, 122 bp, Homo sapiens
tggatttgaaacctggttagatctgtgcgctcagaaaggcatggaaaccagagatggagccggctggtttcctaaaaacaggcagatcgggtgcttctcctgaccattctttcagggtggct

SEQ ID NO: 33903 - DNA, 122 bp, Homo sapiens
ccacagcccggaaaggcgggttaactggtcagcatgcagagacccaccaagtggagaccccgctcccaggcacagacgcacagctgtggatgcacgtcctcggtgacaaggtagctgaggtc

SEQ ID NO: 33904 - DNA, 122 bp, Homo sapiens
aggaaaggccgggatgggtgttgacagcagagagctgattacaggggctggtggagctgccgggcagggttcccaggctggacttgggtggaaggagggcagagagagtctctgagaggccc

SEQ ID NO: 33905 - DNA, 122 bp, Homo sapiens
ctgttacaaaatcataacatcctatgatacaaacaacgagattgtataacgtccccacatcgttttttcagaactaacaaaaaaaaaaaaaaaaaggtggagaaactcagcaaaacaaagtg

SEQ ID NO: 33906 - DNA, 122 bp, Homo sapiens
gattagggtctgcagcgtgaaaatctggaccatactctgggtaatcaagggagaggttatcggctaatgacaaattaaaggcttactttttagctggcaactgaatcaccataacattttat

SEQ ID NO: 33907 - DNA, 122 bp, Homo sapiens
ccagaacctcagcaagcgccagcggcagagcctacgcaagatggtcatcgacatggtgggcggggctggggcgggacggagcgggaaaggaagcctaggagtcgagggctttggggaggagt

SEQ ID NO: 33908 - DNA, 122 bp, Homo sapiens
ctattagaagccgtgggtcacggaagagaacccacagaacccagtgactagtattgagctcgattaggacgcacccgggcgcttagccgtgcaggaacaatggcaagcctttagcccgatca

SEQ ID NO: 33909 - DNA, 122 bp, Homo sapiens
ctgggaatcatacatccaccttccccaagtggcctgtctgtccctttgcttaggcgccaccgttcccaggagggttgagactactttatccaaaactcgggaatttgcccccatgaaactcc

SEQ ID NO: 33910 - DNA, 122 bp, Homo sapiens
gtaagctgggttggaattttggcctcacattttgctagttgggtaaattggttattgagacggttttctcagctgtcaaattgggatgtaataatctagcttcatgaggttgttgaattaat

SEQ ID NO: 33911 - DNA, 122 bp, Homo sapiens
tgactccgggggccacgccctgctgcctgcgcgcacaccttgctatagacacagccaccacgctgcaccatgtaacgggctacctccaggtggttgttcaccacggcctccatcagtggcgt

SEQ ID NO: 33912 - DNA, 122 bp, Homo sapiens
gcgcgcctggccttaaagcggtcgtggaattatgcttcctcaggcaggcggtggacgcaccgcgggctttttctgtttgaagactacagcgtcacacagcaacgcgcgcgagagaagagagt

SEQ ID NO: 33913 - DNA, 122 bp, Homo sapiens
gtactgcatgaggtgtcagggtaattaccgctgatcagccctatttctccgcgcgctgcccgctcctcgggccccctgtttactgatgcaccaccacagcatcacggcgctttcattcaagc

SEQ ID NO: 33914 - DNA, 122 bp, Homo sapiens
tctgggcgagcgcaggcactgggggttaagaggcccccatgaggccctttctgaagtgaacgttcccttcctggaatgccttgccagagcctctggaacgttccagccccagcgcccggtct

SEQ ID NO: 33915 - DNA, 122 bp, Homo sapiens
gtcctcaagccgccgctgctcctacagacaaagtcgtccgcacctgactctgctgggcgccgccatcttaaccggaaatacgcacggtttcacccggaagtgccaggcgtacccacccaact

SEQ ID NO: 33916 - DNA, 122 bp, Homo sapiens
gatgacagccaatgaaaagcagtcatgggcgtggcgctgtcaaacttcgaggggcgggaccgaggacacagagccggggcggagcccaaggtgaaaccaatgagaagcctccgggtgggcgg

SEQ ID NO: 33917 - DNA, 122 bp, Homo sapiens
tcattccttccggtgggttcatggtttcgctggcctcaggagtgaagctgaagaccttcgcggtgggtgttacagttcataaagatggcacatccggagttgtttgttcctcccgtctggag

SEQ ID NO: 33918 - DNA, 122 bp, Homo sapiens
ccaaggcctttatccgggacctctcaaagagcctggctgagctgttgtcattatccagctcgtcgtctggggcgtcccagcgggcattgatcctgctgtaaggtggctggttgcccacattt

SEQ ID NO: 33919 - DNA, 122 bp, Homo sapiens
aattggagtaatagccctcccccgtctcccaagctctgcgtccagtccacacaaagcccacggcagctgcaggctgagcttgtcctgcttcagatcactcctacactgaggagtgagcgagg

SEQ ID NO: 33920 - DNA, 122 bp, Homo sapiens
ctctgaattttttaaacaattaggtgggaaagccaattgcagctgctctcctagttggcacgtccttattgaagcagctcacacagcctctgacacgtgatatgcagctattgttataacag

SEQ ID NO: 33921 - DNA, 122 bp, Homo sapiens
attcagaccgaatggctgcgcggtgatggatgcggatttacggcctccttggctgcggcgcgctgggcctgattatcactataaacaggcgtccgcggagggcgggggcggaggcccgcgtc

SEQ ID NO: 33922 - DNA, 122 bp, Homo sapiens
gcaatccttagcctgtggctaggatagtcctcctgagacctgccttactggggttgtcagcgaggtctttccactcaagctgtttgggtcacacagtgtcttccagcactgttttacctcca

SEQ ID NO: 33923 - DNA, 122 bp, Homo sapiens
gccatgcgttgctaacgtctctgtcttggtggaagaggcgggtcccgggtgggcggtgtccgggaagcccctccacgcccatggtgcctctccagcggggcagttgtgctgtggatgtggct

SEQ ID NO: 33924 - DNA, 122 bp, Homo sapiens
ggacaggtgggtgcatacccacacctgcagccgcccagacaggccctgctgctcccaccacgcgggatccaggctggcagacactcaccggcccgcaggctaggtctcccgccacttcttcc

SEQ ID NO: 33925 - DNA, 122 bp, Homo sapiens
aaaaactcagcctgcacaccgctcccttgcccactacgcaggtcacacctggggctccggcgaagctgaattcggctcgggagatttccctgtcgccaggtaagaaaaccttcgccttgtca

SEQ ID NO: 33926 - DNA, 122 bp, Homo sapiens
tctaacactcctcgcgccgtgcccagccggaaccttgacctcaagatggcgtcccgtagtcgtaagattcagtcggctccaatcaaacatggtgggtcataatttacagttcgggcctttct

SEQ ID NO: 33927 - DNA, 122 bp, Homo sapiens
agagatgccgagccacagacaagcccacccaaggcttcacgggctctgctgggccggacccgagtctctgactccctcgagggccctgctgtaaggtcctggtctccacacaaaacggagca

SEQ ID NO: 33928 - DNA, 122 bp, Homo sapiens
gggcactcctcaaaggagagccagtgggtacttgtgttggctgaactgtgtatttaccaccggcccaactattgcctctagtgtccaccatgatgttgagtcaacattaaattattggttaa

SEQ ID NO: 33929 - DNA, 122 bp, Homo sapiens
tcgcacagctcagaaagcccactgcaattccgggattctggttttgttttgaggttgccccgggcttctgaggaggggtcagtgggctcagcatggaaaggaaggaagccggaaggctggag

SEQ ID NO: 33930 - DNA, 122 bp, Homo sapiens
cttgtttttagcttctgacctgaagatgagcgggggagcgcggtggcgagggcacgtgggcgtggctcacggtctcctctctgtggcaggtacatgtcccagagcaagcacacggaggcccg

SEQ ID NO: 33931 - DNA, 122 bp, Homo sapiens
cagccctgcctctgggtcctgaatgctcggagcatcccctgccgcggtgacgaccaacaacgcccacatccccaagcccagggtgctgtggtttcctccgctgcacttaacataaaccaaag

SEQ ID NO: 33932 - DNA, 122 bp, Homo sapiens
acctctgtaggctacttaccctcactggggggctccaggattgcacccgaggctgctgtccgccctgggagctctgcagatcttttgagctacaattagccacagtgctgctctgagacctt

SEQ ID NO: 33933 - DNA, 122 bp, Homo sapiens
cacccagtgtgtaaacctcagccttatcccagtccctgccccagccgagagagagggtgccgacagctgccctggctggtgaaccctcaggagacaattccctggggtggctttgggtcttc

SEQ ID NO: 33934 - DNA, 122 bp, Homo sapiens
cactgccgtcctccggaagaccttttcccctgctctgtttccttcaccgagtctgtgcatcgccccggacctggccgggaggaggcttggccggcgggagatgctctacgggcggcgcggga

SEQ ID NO: 33935 - DNA, 122 bp, Homo sapiens
gtgagggggaattggtcggcgtgtaagagacacgttagaaatgctttcctagttttcattcgggatgacactggcgccctcgcgtggtacgtaagtcaatcctccgcgtgcatgggatgctg

SEQ ID NO: 33936 - DNA, 122 bp, Homo sapiens
gcctccgtagcctggcgggcaggtgcaggtgaaggaggccacgtggtcggtacaggtgcccgggccgcaggggttgctcaggcactcatccacatcgcgggcgcatcgtgggccggcgaaac

SEQ ID NO: 33937 - DNA, 122 bp, Homo sapiens
ctcacccctgcgggcgaggggcaccggagcggcgggaggtacctgggggctgtcctgcaacgcctcctctagcaggagcttgtccacggcgggcatggtgcggcgcggctcagccgagggct

SEQ ID NO: 33938 - DNA, 122 bp, Homo sapiens
cgctctcccgcggttgctgcttgcatagggtttcagatccggaaatttgaggatgcgaaacgtgagattttctcttcgacaacctcacgctagtacgggtgatgggtgtgcggcccaccgga

SEQ ID NO: 33939 - DNA, 122 bp, Homo sapiens
catgttgtgctagattctacgggtctatagcagtcacatgacttggttaaaggcgattaccgcatgtggcttcagcttcacacaattatacagatatggtttaaaacctacttgttcctaaa

SEQ ID NO: 33940 - DNA, 122 bp, Homo sapiens
acccacactcagtaaagtgactccatgctcccgggggttggcagagccccagctgctgtccgccgggcccagcctgagccggggttcagtcagcacaggaacctgggggagggcccgcgttt

SEQ ID NO: 33941 - DNA, 122 bp, Homo sapiens
caggaggggtgtggccgggccaggccctgaacagggcgctgagagtgagcggcgggagagcgccagtgctccgtatccctgaggatcggcttccacagcctagcaggtctacacctgctggg

SEQ ID NO: 33942 - DNA, 122 bp, Homo sapiens
gttctctgctttccttagggggaggggagcccgtggcagttgcagggctagtgtaccccccggccaccctgcaacaccttgggatcaggcctcggcccttccctagggcccagccccgccac

SEQ ID NO: 33943 - DNA, 122 bp, Homo sapiens
cgcagaaactgagggcgtcctccctgtacacactagaggcaggaatgggggagccactggcggcctggggactctaggatagaatttgtccctagtctaaaccaaaataaccaaaggtgtgg

SEQ ID NO: 33944 - DNA, 122 bp, Homo sapiens
gcctacagtgcctttaggcgagtagcaggagcaacacaaaacttaacagaggtttccctgcggagaaactccctttaagaaaaaaggagaaaccaaaaaggtgggccagcaccggaagcggg

SEQ ID NO: 33945 - DNA, 122 bp, Homo sapiens
aagctggttgttaaaagagcctagtccctcctcctcggtttcttgcttcctctcttgccacgtgatctccacacatgacagctccactttgccttccaccatgagtagaagaagcctgagac

SEQ ID NO: 33946 - DNA, 122 bp, Homo sapiens
caaatgtgagcctcctaatttgttgctgtaataaccctcagtaattcccagattactaggcggagagtcaaggctccattcttgaaggggaaaatggtgtttgcaaaagaaaaaaaatgcaa

SEQ ID NO: 33947 - DNA, 122 bp, Homo sapiens
tggtgagccaccatgcccaaccaacaaattaatttaatagtaaacagtttaactgatggacgcctaatgagtatatagatctttattccatcaacccatttatctgtataacttcaatctaa

SEQ ID NO: 33948 - DNA, 122 bp, Homo sapiens
ggccagctgctcagccatccgcagcagcacagccagcagctcctgcaggcgggaggacgccgggtagggcaggtccacatttgccaatttacaaaatcgggcaagggaacatgaaagccgat

SEQ ID NO: 33949 - DNA, 122 bp, Homo sapiens
gagcaggcgatggaggcccagaaaaccaaccccacgctgtctgacacagctctcgagacccggtcatctaaggcagctgtttgcaaggctctcctgggctgcacctgccaccacttctcaca

SEQ ID NO: 33950 - DNA, 122 bp, Homo sapiens
gatgtctcacttttcagtgtgacactgctaagaatctgaacacttctgcagggcagaaaccggtgcactaacaaactgtctccttgcccaacaaagtttgcctccagcagaggccttttcat

SEQ ID NO: 33951 - DNA, 122 bp, Homo sapiens
gtcagtgtgtggttgtggacaagtcccattcccctctcccaagcctgttgcaaatgaggacgggccggaagcgtgagtccagggtgcgctgccctgggcgccccgatcaggctcccagtcaa

SEQ ID NO: 33952 - DNA, 122 bp, Homo sapiens
cttgtgctgtcgtttctccggccgtgtgaagttaccacctcgtgagtggtcataagttagcgtgtctaaatgcactttgaaatcctaggatgaaaaagccaggccctgtcttttttccttgt

SEQ ID NO: 33953 - DNA, 122 bp, Homo sapiens
tgcggcacctctgccaccaaccttgagctgcaggactgtctgcatgtggggtccacaaggcggaagcttctgccagcaccttggggataagggtggtggggctgcacggggaaggggaaggc

SEQ ID NO: 33954 - DNA, 122 bp, Homo sapiens
gatcgtagccgctggggttgacgaggttcctcgcggcttttggttcagaccaagcaccggcgagaggaacttgtgcccacgcatgtggcctttagtatgactgcaaagttttcatgcaggag

SEQ ID NO: 33955 - DNA, 122 bp, Homo sapiens
cggcgtgcaacaggtgtggcttgggcaggccctgggtttcgcagatgtagcgcacctggtcgtactcgttgttgccggggtagagaggccagcccaggtgcagctcagccatgacgcagccc

SEQ ID NO: 33956 - DNA, 122 bp, Homo sapiens
gtcagtcctgcctttcagatcctttctactgggtgagccctggagtgctggttctcctcgcggtgctgcctgtgctcctcctgcagatcactgttggcctcatcttcctctgcctgcagtac

SEQ ID NO: 33957 - DNA, 122 bp, Homo sapiens
actaccaacctcttaaacagagctccaccgacgcaatgcccaggcataaaaaggccaggccggagagaccgccaccagtcacggaccctggacccagcgcacccgcaccatggccggcccca

SEQ ID NO: 33958 - DNA, 122 bp, Homo sapiens
ccttctttttcgatatgtacccgaattggggccggtatggcgggagcagccactatccgccgccaccggtcccaccgccgccgccagtggcgcttcctgaggcctcgccggggcccgggtac

SEQ ID NO: 33959 - DNA, 122 bp, Homo sapiens
gtgatggattgctgcctgtggctcatgcttcaggcctgatggcagcagctagtaaggctgcgggtggaggatgtcagggggccccaaagatgtggagatgcaagggctgttgagccccgggg

SEQ ID NO: 33960 - DNA, 122 bp, Homo sapiens
cagccccagcagtagctgggctacttccaccgctccttcccgcgccgccaggaatagcggcgtctgctcctgtacagaagagccagggccgatatcagggaaggccacgcccacaggactgg

SEQ ID NO: 33961 - DNA, 122 bp, Homo sapiens
gatcctcattgagactccagtaactgtagcatgtcattggttactgccaccaagaaatgtcggatgtccatctcagtgatcctgttggggactgaccctttggggatggtcagttgttttcg

SEQ ID NO: 33962 - DNA, 122 bp, Homo sapiens
cctagctcgggactcactcggctcgaccacgggaagggaaggagcgcgaacgctaaatcccgtgccgcggggagccaagccccctgggccggaaatgcctaatctgaacttccgccctgccc

SEQ ID NO: 33963 - DNA, 122 bp, Homo sapiens
ctacagtgaacggtgtctgaacaactttttgagggaataaggcagaatttctcccttatgcggataacaaaagagctagccatcctgaaaacttgccacatcgtaattttcagagatggtca

SEQ ID NO: 33964 - DNA, 122 bp, Homo sapiens
aatcttactcctcactcaagaacttcctgctggcatatatgatgacttagcttttttccccgacagatcgactatgttgatctaacttttctaagccagtttctgtctgatatgccagcttg

SEQ ID NO: 33965 - DNA, 122 bp, Homo sapiens
actccttcctctttctcagcagagctgtagctgactgtggcattactacgcctccccacacgcccagacccctcactccaaaatcctactggctgtagcagagaatacctttgaaccaagat

SEQ ID NO: 33966 - DNA, 122 bp, Homo sapiens
acagcacctcagaatacaagttcgcagaggtcaaagcagtggacacactccgaagagctccgtggagttttggaaactacattatccagagtgcagagcgcaaaacggcggcggagttgagc

SEQ ID NO: 33967 - DNA, 122 bp, Homo sapiens
tcttgtggccgccttggcgttcattttatgacaccttgccggtgttcccagacatcatcccgcaccgctccgttttaccgacctccaggtcttcccgcccctgatcagaccccaacagcaac

SEQ ID NO: 33968 - DNA, 122 bp, Homo sapiens
caaactctccggtatcctgatggagtctactaggtgtcagtcatttggccgtgcctcagccgaagagaggcggggaaaagcatcgtaatcagctgcgtcgccttttggtgacgccagagagt

SEQ ID NO: 33969 - DNA, 122 bp, Homo sapiens
tgcgcacgcgcccgcggaagtggcggctcccgtgtgcaggttgagcctaggtgggcggggcgggaggcggaagggccgcggtgcgcagccgcgtcaacggcccttcgcagcgggcgcgctgt

SEQ ID NO: 33970 - DNA, 122 bp, Homo sapiens
cgtcgccggggggcagcctggacttggtgtctgccctggaggactatgaggagcccttcccggtctaccagaagaaggtgattgatgagtgggcgccggaggaggacggggaggaggaggaa

SEQ ID NO: 33971 - DNA, 122 bp, Homo sapiens
gacgttttattcttctcacctgggattcagagaggcagcggccaaggacagggcccccgccgaggccaccgggcagcgtccaggtctcggcctttgggaggggagcagcgggggaggggcac

SEQ ID NO: 33972 - DNA, 122 bp, Homo sapiens
gttcgttgtcacaggtgaaaagccatacaagtgtacctgggaaggctgcgactggaggttcgcgcgatcggatgagctgacccgccactaccggaagcacacaggcgccaagcccttccagt

SEQ ID NO: 33973 - DNA, 122 bp, Homo sapiens
actgcacctacgctgtgtatttcacaacatggacacttccacaggctacctcaagcaacgcggcactcgtgcagtcaaacatgaaatccttaccatcaggcaatgaaaatgttcactgtact

SEQ ID NO: 33974 - DNA, 122 bp, Homo sapiens
ttgtttcctgctgcctgtgggagatgagtcaccaagaggcaaaggctctcaagtgcccctcgtgggatgggtctcattcagtctttttgttttgcttgagctctgaggttttgtatgtaagc

SEQ ID NO: 33975 - DNA, 122 bp, Homo sapiens
gagagacgcgcacgcacgtgggcactatttttgcagcgggccgcgcgcagccccgcaccccggcagcttatgaagctcctacgagccgctcctcggagccgccccccggccggatgcggagc

SEQ ID NO: 33976 - DNA, 122 bp, Homo sapiens
tcgtctgcagagtgtgacagtgacattccctgcctcattagacgttaggatacagtgaggcgccgtgctcagccccattctggcacgtagcatcgataaacaccagctcttaccggaccgtt

SEQ ID NO: 33977 - DNA, 122 bp, Homo sapiens
atccggtggacaccaccataaccaaatgaccaaacacagtattacttataacaggaaacacggccaaaaatagtacaagcccatttacattttcattaacattcacatcgtatctttgaccc

SEQ ID NO: 33978 - DNA, 122 bp, Homo sapiens
gtgcgtgggtggtgggctgggaaacttctgttgcttctgggcttcctcccccatggctgccgcgagtctcaacactcacttgcaccctggctcccgcctggcatcctcagcctgccctgctg

SEQ ID NO: 33979 - DNA, 122 bp, Homo sapiens
ggccttttcgacattttcagcaatatctgtataccacaaagcagagaataatcaaaaaaccgcagaaggccaggcacagtggctcatgcctgtaatcccaacactttgggaggacaaggaag

SEQ ID NO: 33980 - DNA, 122 bp, Homo sapiens
acaatatatacatcccaaaataccgaggtgatttttcctcctggtaccaaggagtacctacgagaaacccattcactatacatttatcaacctgtaggtttgcgatagtcttataattcttc

SEQ ID NO: 33981 - DNA, 122 bp, Homo sapiens
tgtctccttcaccttcaccggcgttgaggtagcaggaggttcgcttcatgaattcccccacgttctctggctgtgcgttccgccgtggcgggaacccttttagggtcacgtcttcccccacg

SEQ ID NO: 33982 - DNA, 122 bp, Homo sapiens
gccccgccccaaagggcggagggggagcttttcaccagatgtgcggggggcggggccggtcggccagggagacctctggcagctcgcgcctgcgatctgagcttaattaaacttctcccgag

SEQ ID NO: 33983 - DNA, 122 bp, Homo sapiens
aaaggacgggccgcctaccgggggtggaaatccttaattacacccttctgcctcggaatccgtcttcccggcagtgtcttgcactgccacctcctcgggtgactcagctgacctgaaatgcc

SEQ ID NO: 33984 - DNA, 122 bp, Homo sapiens
gcgcaacagcggcaccgccccttccgcgtcagcgcccgccccgcgccgcgccctcactgccgctgccgcggctacctgcggttcatctccgcacattccacacgcggcccaaacggtctctc

SEQ ID NO: 33985 - DNA, 122 bp, Homo sapiens
atacttatagtctagtgcttacagggtttaagataatgtcaaggtgaaccagacacagatcgttgttcaaggtctgagctacagaagaacaaaagaaggaaaaagggatcgttttctaatcc

SEQ ID NO: 33986 - DNA, 122 bp, Homo sapiens
tcccggtggagactgagggcggaaatgcaaaggcaggtgttgcagctgctggccaagggccggggacgtgcccatcagtaaccaatgccctgcgccggcgccggggtggccacccacaggta

SEQ ID NO: 33987 - DNA, 122 bp, Homo sapiens
ggacatttggggtcccccatacgtggacctatgcctgttgtaagatgtttggaagagcgtcgaaagatgagatcatgttgtgtccttggaagctgaatgaagaaccggcttgcaaaggagaa

SEQ ID NO: 33988 - DNA, 122 bp, Homo sapiens
ttctagccctcacactttcactgtaagtaacatatcacaataatggttgccttttttatgcgatgcataaatattttgttacagagtacaaaaatacttttcacgttttggttgattcaagg

SEQ ID NO: 33989 - DNA, 122 bp, Homo sapiens
ggtgagaatgggagcaagagagaaaggaaggagctgccagcctcttttaaacaatcagatcgcccatgaactaatagagcaagaactcgcttatcacaaaggggggatagtgctaagccatt

SEQ ID NO: 33990 - DNA, 122 bp, Homo sapiens
agaaccacctctccttcaggcgctgctcctcggcttccgtggacgggcatggctatttctcggaaccctctgaggttagagctgtcatggtctttcttctgaaagaggaaaccgaggcttgc

SEQ ID NO: 33991 - DNA, 122 bp, Homo sapiens
ggcacggtataatgcatattgaagcatttctttttcaggaagatgagtgtgcaggctgtacggatggaaccttcagaggcactcggtatttcacctgtgccctgaagaaggcgctgtttgtg

SEQ ID NO: 33992 - DNA, 122 bp, Homo sapiens
cacgttcagagcccgccccaccctcccgccgactgccagccaatcaggcgcgagcctggccggggcagcccaaacccctcgaggctgagccaatggcagaggaagacaggcgcccccggcga

SEQ ID NO: 33993 - DNA, 122 bp, Homo sapiens
agaggcccgtcctctgtggccgtgtgacctgcaagtattgggagagccacagctaaaccccgggacccctggaagcctagaaatggtgagtgccgggtccaacgtcccgagagaggggagag

SEQ ID NO: 33994 - DNA, 122 bp, Homo sapiens
catctttcccagtggctcgggtcctctgggcaggtcagccagggcctgtaggagcagcagcgctagcctctgaatcagggctttgactgtgtgtgtgtgtgtgtgtgtgtgtgtgtgtgtgt

SEQ ID NO: 33995 - DNA, 122 bp, Homo sapiens
gaaaaagacaacatgctcttgactctttcaccgccaaaatgtggccaaggctctgagggtcgtcttctcatgcaaatatccgtgttctataaagcctgagctaaatgaaaaccccaaactct

SEQ ID NO: 33996 - DNA, 122 bp, Homo sapiens
ccaggctatggagctggcagcaggctttggctagcatgaccagagcgtcagcagtcacaccgtggcagccggagagcttgaggaaagtgagccgaggacagcactcacctaccagctgcggg

SEQ ID NO: 33997 - DNA, 122 bp, Homo sapiens
atgattcattgtcagagagcattatgttttcttcttccctccccatattatttatctgatcggacatgtaggtttcaaaaccaatacacggattcaaagaaaagatttcaaactatttacaa

SEQ ID NO: 33998 - DNA, 122 bp, Homo sapiens
aagaccccgccatacagtggaaggctgccccttcctcctagtggacagttcccacacaagcgcctctgattggatagggctccgggcgcggtgcgcagggccctgattgacagaagctgtgt

SEQ ID NO: 33999 - DNA, 122 bp, Homo sapiens
ctgaagcctgaggcagaatcaagtgagcccaggagttcagggccagctttgataatggagcgagatgccatctctagttaaaaatatatattaacaataaagtaacaaatttaaaaagattg

SEQ ID NO: 34000 - DNA, 122 bp, Homo sapiens
cgacccccgccccaagcaactgaaaaaggaaacatgcgcacttcagagcttggagctgtccgagtgctgaaatttataggctgggtaagatcacgtctccgtctcattctatagccctcatt

SEQ ID NO: 34001 - DNA, 122 bp, Homo sapiens
ccacacagtccgactgcagcagacacgcgcccaggtcctccttcaggcccgcgcacgcgccgccctgcggcttgtcctcataatacttaggcatgacggcgcttcccctccgatgcggacgc

SEQ ID NO: 34002 - DNA, 122 bp, Homo sapiens
gagtcacggaaggggaggcgtggccgctgtgtgctctaccgggcggtctctggggccatccgcgtgtggggctgcgcgtgagtgcatgcgtgtgagcttgtgcttgtgcctctgctgggcac

SEQ ID NO: 34003 - DNA, 122 bp, Homo sapiens
gaaagagtccctccaggggcaatccaactaccacaggccaggggccaagctttggtgagccgagcctgggccctgcccctcccttctctatgggcctagggttgctgtgctgtgtgtggcat

SEQ ID NO: 34004 - DNA, 122 bp, Homo sapiens
atcaggatgtttaaagtatatttatggtgactgagctgtcacctgaacacgtgacgtacacgcgatgctctgaggaaggaaaccgtctaggaaccaagagtcacggagctgcctcccgcgac

SEQ ID NO: 34005 - DNA, 122 bp, Homo sapiens
gtggccctgccagcagcagcaccaggcccagacgcagcgggggcaccagcgagaaggtggcggcgtagccgtccagatcgccgtccttgcgcaccacgcggtagccccgctgcgcgtggaac

SEQ ID NO: 34006 - DNA, 122 bp, Homo sapiens
ttttgccctccagtcccttcaggaagggccaaatgaacagcaggcaacacgcaatcaaaccgtgcatagcagtagggtgtgggaacggcgaaggcagctctgtgcctgctgctccacccttc

SEQ ID NO: 34007 - DNA, 122 bp, Homo sapiens
actctcgcagagatttaattggaagagaaccagcatttcattgaaacatatttggaaacacgttgtgtatattgagacacacacacagacacggtctctgtactccaagtagttgaagtcaa

SEQ ID NO: 34008 - DNA, 122 bp, Homo sapiens
cacgcgcacctttccctcccaagggctgggctcgaagggaggagctgctgcaggcttgagcggtctccagactcgctgggaaccaccgcaaagagggtgtgcaagagttgaggccctcacgt

SEQ ID NO: 34009 - DNA, 122 bp, Homo sapiens
aggagagagccatgaggattctggttcctggctccatgggccatccagaccctacaggcccgtttgcttcaacaccattacaattactatcatcattaccatcccctgaagcaccaccacca

SEQ ID NO: 34010 - DNA, 122 bp, Homo sapiens
gcagcacccgaagtggtccccgctcccccggcggatgcagcccccggatggccgttgccacgcatttttgtttaggaacctggtttttattaaatgtaattgcttccctttctggccttaaa

SEQ ID NO: 34011 - DNA, 122 bp, Homo sapiens
taggggtctttttttctctgtcatagtcactagtgtgcatacatgagtctggagccatggcgagtttgtgctaggtgttgggcacctctcagggcagtcctgatgcctggtgtttcctgggc

SEQ ID NO: 34012 - DNA, 122 bp, Homo sapiens
attgcctgggctcaaggaatgttaagcaaatagaggacacctgtgggtccagccaggccccggagtactgaggacaccagaatagggaataattgtgccagagccaagttcatcccgcggag

SEQ ID NO: 34013 - DNA, 122 bp, Homo sapiens
acccccctgtgatctggttcataatatccagagagggaggcgtgacattactccccataccgtggggagtgtacaccccactgtgatctggtttgtaacatccacagaggaagaggttgaag

SEQ ID NO: 34014 - DNA, 122 bp, Homo sapiens
catcctccatccattggggcctgatggaaatatgagaacatagtttaatgattaaaaaaacgcttgaatggagaaaagacataaactgcatttttagccatccatggcttttagtacagttt

SEQ ID NO: 34015 - DNA, 122 bp, Homo sapiens
tggaggaaagctcggagctcccatgccctcccggggcaccgccttccaggaacctgcctgcgttccgcttctgggcacccggaaagtcgctcagtggctgattcagggtcgaggagctgtga

SEQ ID NO: 34016 - DNA, 122 bp, Homo sapiens
ttcatgagcggctttcctctgggtgtgtccagggcatcacagagctcttctgcccaaacccggaggcctaccagggcctgcccaccttgcctccttccacactctctgtagcagcagccgca

SEQ ID NO: 34017 - DNA, 122 bp, Homo sapiens
gcctgtttgggaaacagataaatttgtggctgaaatggtgtgtagggtgaagtggttagccgggagtctggagaggagagagaaagaatttggtaatccaagctcaggactgagtgaagttg

SEQ ID NO: 34018 - DNA, 122 bp, Homo sapiens
gaggccacagctggcccactctgcaccaggatccccaacgtgcctccacccacacccatccgcccgccaggcaagctccaggcccagctcccatgtcccagccccgtacgatttacaagcgc

SEQ ID NO: 34019 - DNA, 122 bp, Homo sapiens
cacacaggcactctcaccctcagccttcacatttccctcacctccaagtcccgcctttcgcgcatcgcctgctgctctcccactcagcgccacctcagtcccacaaaggccgggctgggatc

SEQ ID NO: 34020 - DNA, 122 bp, Homo sapiens
ctggacattttccgacagcagggatcgttgggtgaggttagcagcgccagcccgggttagcggaagcagccttcaggtctcctaggagagcaggtttatgagcatgcgcagcggattttccg

SEQ ID NO: 34021 - DNA, 122 bp, Homo sapiens
atgttgaatcagatgattttatgtctcacattctttaacctgggcatagtgacctgtgcccgctgaaccacaaggatgtaaaaactaaaactcatgttctggcagcaacaagtatctttaag

SEQ ID NO: 34022 - DNA, 122 bp, Homo sapiens
cccccaagcccccccattcccatctgtggctcccgcagagggaactgggcctttgggtgacgtcagaccctggatctggagcctgagctttgggccctccatcccccccgccagccccacct

SEQ ID NO: 34023 - DNA, 122 bp, Homo sapiens
caccactccaagggaggtgagtgaagggttgcccaaactccagtgtgttcctaggacacccgtaagctgcctcactaatgctcggtgtccactctgtccacaggatggtggttggcagccac

SEQ ID NO: 34024 - DNA, 122 bp, Homo sapiens
cgtccgctgcgttgggtgtgccctcctcgaacctgagtatccaagcggcggaggcccgggcgcctctcagcttggcatctgaaatccggacggtctcggccgctccgctcccaggaaggcga

SEQ ID NO: 34025 - DNA, 122 bp, Homo sapiens
atacaaggataattaatgttctgtttccaagaccacaaaagtgatattgtaggtgactgtcggaacccagaggaagggaaactgagtcagccccagaagtagaagtttgtacagtgaggtgg

SEQ ID NO: 34026 - DNA, 122 bp, Homo sapiens
acactgagtcagaaatagggagggtaattaattagactgtaagctccaggaaagcaggggcggcagcgcagcctatgctcaaagggcatttgatgattaggtaactgcttgaatcaacaact

SEQ ID NO: 34027 - DNA, 122 bp, Homo sapiens
gggctggggcatcccttgtgctggtttttagatgcggttcctggggtttgtgaaaacagccgtcctcccaggcccctgctcctctgcccccatactagcccctgcagcagcccagcctggag

SEQ ID NO: 34028 - DNA, 122 bp, Homo sapiens
agcactttgggaggcctaggtggatggatcaccaggtcagaagattgagaccactctggccgacacggtgaaaccctgtctctactaaaaatacagaaaaaaaaaattagcctggcttcgtg

SEQ ID NO: 34029 - DNA, 122 bp, Homo sapiens
cgcaggtgctggccgatgagtcaaaggctcctgaggctgaggcaggcagggtgctcagggcgacgcaccaggctcagctctgctcctcaccgagggtccctaggctacagtttcctttttct

SEQ ID NO: 34030 - DNA, 122 bp, Homo sapiens
tccaacagggaatggaaggagcctctgacccaaaaacatcccccaaactgtcgggtcctgcggcaagttgagggcctctcaggggtcctgtctgcggccctgtgggaagtgaggctgtggca

SEQ ID NO: 34031 - DNA, 122 bp, Homo sapiens
gtaatgatggagacggctcagggaaggccccacgagagctgggtcacgcgggggctccctcgtgaggacccaggccagcactcagagcccacccctgagggcccaccaaagtgaagagggcc

SEQ ID NO: 34032 - DNA, 122 bp, Homo sapiens
ctgcacagttcctgcacacagtacaaaagcacaaatgttaattcctccacgtgacccacacgtcccccagatacactcagagaggaggaacaggcaggggaggaagggccagacggatgcca

SEQ ID NO: 34033 - DNA, 122 bp, Homo sapiens
ggatgtgtccttggcagagccaaggggagacagaggtttctggatgccatgacaggctgtcggggtccaggtggcactcatgggccccctgccccatgtgaatgctgctggcacctggtggg

SEQ ID NO: 34034 - DNA, 122 bp, Homo sapiens
cctccgggcgcgaggcccgggtgggccagagaggcaggtcctcgtccctcgggcccgtggcgctgtcgtggatgaaccctctctttgggtctgtattgggacccctttccagtaccattttt

SEQ ID NO: 34035 - DNA, 122 bp, Homo sapiens
ttatgattttagtgacaagaatctacatttccaagtgcagtaagcatgctcctgtagacccgcctcttgggagcatcttgggcccaggagttcaagaccagcctagacaacatagtgagacc

SEQ ID NO: 34036 - DNA, 122 bp, Homo sapiens
gcacacgtgtagcgtgcacgtgcatgtggggagtgggtgcagtgctgcgggatggacgaacggaacagggatgctggagaggaagccagtgccgtcgggggcacctgccagaaccctggctg

SEQ ID NO: 34037 - DNA, 122 bp, Homo sapiens
aagaatcatgtctgtttgctttaaaggcccaggaaggactgagatactaatggaggagatcgatagaatgggtgatgaagtatcataaatctaatgtaacactatcttctgtcagtgaccta

SEQ ID NO: 34038 - DNA, 122 bp, Homo sapiens
aattgctgtgtgagtgcttttctaagcagtctgttaggcgctgctactatgcccttccagcgctgacccactttgcctccacttcccacctggccccatagctgggcactgcctcatcctaa

SEQ ID NO: 34039 - DNA, 122 bp, Homo sapiens
cacgttgttgaggtggttttgagaggtgacagcgtgctggcaggcctggcaggcctggctcgctctccgcgcctcctcggccttggcgcccattctggccgcgcttgagcatcccttcagcc

SEQ ID NO: 34040 - DNA, 122 bp, Homo sapiens
gcaaggacttgaacagatatctgcacacccgtgtccacagcagcatcattcaccaacacacgaaggtagaagcagcccaggtgctcacggatggatgaacctggtgtatccaggcctggcgc

SEQ ID NO: 34041 - DNA, 122 bp, Homo sapiens
aaatcactcagaaatgctcaaaacactcctcttggaacacaccattcatccagccccgaacgggatgcattgcttagtcctaggatttgggcttcccaaacaaatgtttcctggaaatgtga

SEQ ID NO: 34042 - DNA, 122 bp, Homo sapiens
cgaccctgcccgcaccgagccccggcccagctgccgcgccctagcccacgccggcgcctgcgcacctaccatgcggcccgcggcccgcgagaccccggcttccaccctccgagcgacggaca

SEQ ID NO: 34043 - DNA, 122 bp, Homo sapiens
tcaccctctcttaaaggatggccaataggctggatcacaaatctcctgcatggtttgacccgcaggactattactttctctgttctgaactggagttgcatcacactgttgactcatatgga

SEQ ID NO: 34044 - DNA, 122 bp, Homo sapiens
gtcctttctccttgcaaaggcaacactcgtctggctggtgaagccaagagcacagccacacggctgtttctcatcctggcacccccagccccagcacagcaccccacagagcatgctggatg

SEQ ID NO: 34045 - DNA, 122 bp, Homo sapiens
ctgcccgcaggtttcatccatgaggaccacctccgggagctgctcaccaccatgggtgaccgcttcacagatgaggaagtggacgagatgtaccgggaggcacccattgataagaaaggcaa

SEQ ID NO: 34046 - DNA, 122 bp, Homo sapiens
gctgaggccccgcgagaattcgagcgcattgcccctcactgccctgggccgctccgagtgcggggcccgccaagcccacgcccacccagaattcgcgctgacccctgagcgctatgcgcagc

SEQ ID NO: 34047 - DNA, 122 bp, Homo sapiens
gactgggggccagggagcagcaagccagctgggactgaggcggacgctgtctcagggagacgctgactcgcaaagacactcccttccttgtgcctgggtaaaaagtctcctcctggggtccc

SEQ ID NO: 34048 - DNA, 122 bp, Homo sapiens
agattatcaggagaagacagcgtattggcagagagcagaactcacagccactgcccagatcgcaggctgagcacttctatgcttgagctctggctgtaacccttaaggtctttgtgaggagg

SEQ ID NO: 34049 - DNA, 122 bp, Homo sapiens
tggtccctgtgcccagcagagtctgacggcaccctggcgccagggcctggggtggcagtgcgccgtgccagacccggcagggcctggacctagtggggtccgggaagggctgagcgtgaacc

SEQ ID NO: 34050 - DNA, 122 bp, Homo sapiens
gtggaggagtgccactgtttctgtttctggggctgggcagccctttgcaaccctccaaagcgactcttcctggtcgtgacggtctaaacactggaagaaaaccactggaaacatatttcctg

SEQ ID NO: 34051 - DNA, 122 bp, Homo sapiens
ctcaatagccgcctcagaagcagaagtttttctctgaccctctcttgtcctcttgtcactcggttccattctcccccaagaccagctataaaaaccagaacccctttgccccaaagccagcc

SEQ ID NO: 34052 - DNA, 122 bp, Homo sapiens
actccatgagtgaaaagaaggctgttggctgaagctctaggagccaaagaagcaaaggcacgatgcagaccgtgctgactttgagcttcctttcaaaccaatgggaagccatttgaaaggtt

SEQ ID NO: 34053 - DNA, 122 bp, Homo sapiens
gccactcaactgcataacctcagaactacatcttttatttctttgttccgttatgccaatcgcaaaagaaacaaacaaaacacaaaccgagcaagcaacagtgctgttgtcttcaccttacc

SEQ ID NO: 34054 - DNA, 122 bp, Homo sapiens
cgttgggtggcagggactcagagggacattgaggctcgcagacgggagaagcggcgagaccgcagggaatgctggaaacctcccaagctggcctcttccatcccggaagcccccagggctgt

SEQ ID NO: 34055 - DNA, 122 bp, Homo sapiens
gtagagtgagggatgctccgccaggtgcaggggaggcggcaggtggccgtggcttctctgcgccgccggccccacgccccagcgcccacctcgtccagcccacgggtggcgcccggggctct

SEQ ID NO: 34056 - DNA, 122 bp, Homo sapiens
cacagagctgcctcactcttttgattgatgcagagtatttcactgtgggaatgaagcatacgtaatgaacagtcccctatgagtggacctttaggttgtttcccatattttactattccaac

SEQ ID NO: 34057 - DNA, 122 bp, Homo sapiens
atcatggctctctgcagccttgacctcccaggctcaaacaatcctgccacctcagcctctcggagtagatgggactataggtgtgctctaccatgactaatattttaattttttatagagat

SEQ ID NO: 34058 - DNA, 122 bp, Homo sapiens
taccaggctttttttttaatattgtgtgatccatgtcgagggtcaaagccagacttacaccgcccagccattttcacaatcagcaggacaagaaggatagtatcaaatatccagactggaat

SEQ ID NO: 34059 - DNA, 122 bp, Homo sapiens
cctcccagctgagcacttgttagaactggactttaactgagggcctgaaccccctaacaacgggacaaacagtatgaaatcaaaaccgtttaccctcctcccaccagcggtttgcgtagggc

SEQ ID NO: 34060 - DNA, 122 bp, Homo sapiens
ctcataggagctgcatgcgaccgctgtccagcagggcccagcagtcactaccagaactgccggctcatggctgccaagggggaaactcctcagaacccagcaaccacttcctaggaaagaaa

SEQ ID NO: 34061 - DNA, 122 bp, Homo sapiens
gcggaacggggcaggccaggccgtagccctagtgcgcacagcccgggcggaggcagcctccgcagcctcactggctctggggctccgtgctggttgcttaatctttctggccccgggggatg

SEQ ID NO: 34062 - DNA, 122 bp, Homo sapiens
cagaagtttcaggagacagtttcttactctcattagaggtgatgcgttttgtgtggtcttcggtttcattgccccataaactcacttggcgatctgcctgtgggtccccagcagtctgtaag

SEQ ID NO: 34063 - DNA, 122 bp, Homo sapiens
aatttaatagagaagagggaatccccagtcctcatcttatttctttatttgggcaaaagtcgtggccttcacaaccaatgacagcggaaacctttatgaaaacagcacagccttttcaatct

SEQ ID NO: 34064 - DNA, 122 bp, Homo sapiens
accccggtcccttacagcttggccccgcggcgtccctggagcgcactatcactggggccacggaaggcaggttttctgggagcagaggcctcccaggggttgttccatgtatcggggtaagc

SEQ ID NO: 34065 - DNA, 122 bp, Homo sapiens
tccacaaaaaatacaaaaattagccgggcatgctggggcactccagtaatcccagctactcggggggctgaggccagataattgtttcagcctgggaggcagaggttgcagtgagccgagat

SEQ ID NO: 34066 - DNA, 122 bp, Homo sapiens
cgaaaggcctgggtgcgggtgttctatggcccagaagccagatgtccttcgttagaatcccggcactgacacctattagccgcccagccactttgagcggccactgccctccccgagcccac

SEQ ID NO: 34067 - DNA, 122 bp, Homo sapiens
ttccagataattaggctaagacaagttgtttcatttatctgttcccctgcttagcttggtcggaatctagtggtgtgtctgctgctaacatttatgatgattcacttcagactcaaggaggg

SEQ ID NO: 34068 - DNA, 122 bp, Homo sapiens
acaggagtgttttccacacccaggctcagagaagacccagaatgtgacagatgcccataccgagagcagaatggatgagctaagaacatggccaagcctggcacaggccaacttggcaccac

SEQ ID NO: 34069 - DNA, 122 bp, Homo sapiens
gacctaacacaccctgggttcccggcttctcagccactggagctgccagtctcaaattaccggaggggagggagggcaggcctggatctcaggatctcggtcctgcatgcaatgcaagcctg

SEQ ID NO: 34070 - DNA, 122 bp, Homo sapiens
ggccagcagcttcaggctgcgctcgtactccagcagctggcccaggaagttgaagttgggcgagatggacgggcgcctgtccttcacgaacctgcgggggaggaggctcagtcccaggcgcc

SEQ ID NO: 34071 - DNA, 122 bp, Homo sapiens
ggagggaggggcacagtagctaggaaaccggaccctcaggccaagcttcgcgatgacgcgcgcaggacgacggaaacccccagaccccaaaagagctctgcaccgagaaaacaattacaagg

SEQ ID NO: 34072 - DNA, 122 bp, Homo sapiens
tccttgcttctggggtctcttgctgggcctctgagtaggtctgcaagtagggctgggcatcggggctcattttgaccacaagtgtttgctggttttggagtcaggcagacatgtgtcactgc

SEQ ID NO: 34073 - DNA, 122 bp, Homo sapiens
ctttttagaatgttagcttcctgtggtacacattccatattcccagctcctagatcagcgcgtgaaacacagaaggaaagcaagaagtatttactggttaactgttgactcctgggtatgaa

SEQ ID NO: 34074 - DNA, 122 bp, Homo sapiens
agcaccactgtcgccgctgcgggaagtgcttctgcgacaggtgctgcagccagaaggtgccgctgcggcgcatgtgctttgtggaccccgtgcggcagtgcgcggagtgcgccctcgtgtcc

SEQ ID NO: 34075 - DNA, 122 bp, Homo sapiens
aacggctcaagcgccttgggcactccatcgggttctgcaccgagttctgcatcataaatacgactctcgtgtaggatttaagtgtgaacttctgcaggttctcggaccctgaagcacccggg

SEQ ID NO: 34076 - DNA, 122 bp, Homo sapiens
ccaaaaatagaagatcagtcctggatcgatgatgactactggtggcgtatgagtcttttgcgatgaatacgtgtctagaactctgaggtccgtcacaaacaaaatctagcctattctgtatg

SEQ ID NO: 34077 - DNA, 122 bp, Homo sapiens
gggaccctattgtgcagcccaagctgaaaacggtgtcttcctcgcactgactgaggacgtcggttctgatgtcttcctcgcactgactgaggatctcggttctcatatcttcctcacactga

SEQ ID NO: 34078 - DNA, 122 bp, Homo sapiens
ggctggactgagaggagctgggcttgtgacccatggggctcttgcccatcacagtgccagcgccagggggtggccagtggcgaaccacgtgccggtaggaggtggccaggtagtcgaagtag

SEQ ID NO: 34079 - DNA, 122 bp, Homo sapiens
tgcgcaagagggacactccgggcctcggtccgccctccgtgtggcaaatgaggtgctcggcggggcttcttaactcttcaacctggccttcccacgggtccctctggacaagggatggcggg

SEQ ID NO: 34080 - DNA, 122 bp, Homo sapiens
tttctgtcattgccttctctaatttgtaggtgctcacgttgttagaaatgatcatcttgacgatgcctgaattccaggtggtttccaaggttctcctgggatcaatgaaggcagctcaagtt

SEQ ID NO: 34081 - DNA, 122 bp, Homo sapiens
cagaacctgcaggagcagatcaatcccctcttggtaacacaccagagcctgcggataccgcgactccgaatctagttctactgcccgctttagcacagtggctgcagctgtgctctgcgggt

SEQ ID NO: 34082 - DNA, 122 bp, Homo sapiens
tggtaatgcacttgctagtactacacactttgtacaacaaaaaacagaggcaagaaacaacggaaagagaaaagccttcctttgttggcccttaaactgagtcaagatctgaaatgtagaga

SEQ ID NO: 34083 - DNA, 122 bp, Homo sapiens
aatgttagaaagttcaaggaagagcagagctgcagagtgcctaagcacaaaggcatgtaacgtttcccagttaatttgatgaaaggagttgctgtatcaatttaaccacagtgcttaaaata

SEQ ID NO: 34084 - DNA, 122 bp, Homo sapiens
ttcctgcctgctgcacaaataaagaccacagcattgcagtaaagaaagagttaatagacacgaagctaaccattccatgtgggagatggagttagtactcaaatcatctcctccaaagcttg

SEQ ID NO: 34085 - DNA, 122 bp, Homo sapiens
tctgcgggtctgagtcaccaggcagccgggctcagtcaaggagccgggctggggtccgggcggtaggggccaacctggccccaaagctcgctggttaggcctctgagcgggccggtgtcatc

SEQ ID NO: 34086 - DNA, 122 bp, Homo sapiens
gcctccaggtctctttcaagaggttggaaggagcaagcctcgggaggcagctggggctctcgaaggagccgattaccaagcgtgtttaggaaatgctgcctctgtaagggcacattacacgc

SEQ ID NO: 34087 - DNA, 122 bp, Homo sapiens
ccggcaggcaccagcggccagcagcagccggggccgggcctcacccgaggaccgaggtgccgatgaacgctcatgttcggaagacactggctccctggtttatgtatttacttaattttaag

SEQ ID NO: 34088 - DNA, 122 bp, Homo sapiens
aaatgtacatcagatcttgtcattctgctgctcttatgataaagccccaactttgtgtcacggtgttccacactctacgatctggtccctgcctctcctcttctgctaccgccgcaatggcc

SEQ ID NO: 34089 - DNA, 122 bp, Homo sapiens
atgtctacgtgccgggagagttcccatcttatgaccctcacaaccaagaccactctccagcgcaaaccaggcctaatcacgccggccgaggctcaggggcgataaagcctcgcacctggtgg

SEQ ID NO: 34090 - DNA, 122 bp, Homo sapiens
gcagggactctcagagctgtccttgccctgtcattcatggagacttacagggaggcggggcggccctactgcagtggggaccccttggggcgtaggatgcacagtgcaggcgcccaagcctc

SEQ ID NO: 34091 - DNA, 122 bp, Homo sapiens
ggccagtgcagggccacacagccctggctcccacagaccgcaggctggagaatgggggtccgcggtcagctcatagcccacccgccacccagcactgcagggtcacacagccctggctccca

SEQ ID NO: 34092 - DNA, 122 bp, Homo sapiens
tctacttgaacatgcacaggctaagccagccttcagaataaaaacacaatgcaggccaagcgcagtggatcacgcctgtaaacccagcactttgggaggctgaggcaggcagatcacgaggt

SEQ ID NO: 34093 - DNA, 122 bp, Homo sapiens
gcccccagacgctttgcctcttggcttctctcctgtcaggccccagtgagggcacctgctcggacccttagagtcccctctggaactgcgagtcctcccacctgcccagactccgctggaga

SEQ ID NO: 34094 - DNA, 122 bp, Homo sapiens
gacctggaatgatttcacagctcccaaggtttcgggtttctccagggtggcctcttccatcgcctccctcatcccctcccccagtcctgaacagttctctccttgtgtactgcgggggaggg

SEQ ID NO: 34095 - DNA, 122 bp, Homo sapiens
actttttttttttcttttggagtggagataactcctccttctccaccctatgaaccatagcgtgggatttttcaatactgtttcttatgtgtaaaaaacaaaagaaaggttttctttttgtt

SEQ ID NO: 34096 - DNA, 122 bp, Homo sapiens
aggccctagcgtccgcagccggctccgaagaggaggtagagccatgctcgcatagccacgcgttgtgctctgtcgccccctggtgtcctatttagaaaagagccgcaatgtggggctctgac

SEQ ID NO: 34097 - DNA, 122 bp, Homo sapiens
tctccctgtggaatgaatggccctgggaccgtattccctcgcacgcagctcctccccagccgagcatcctggctttggccatctcaagggtcttcgctgccccgtgactcagcatccctgcc

SEQ ID NO: 34098 - DNA, 122 bp, Homo sapiens
gctccgaggacgaggacactgagagctcgtcggtctccgaggatggagatagctcaggtgcgcgacccactgctgggaccctgagtccccgcgcccagcgcgcgacaggccgctctccgcac

SEQ ID NO: 34099 - DNA, 122 bp, Homo sapiens
gcgggcggggcggagcctgtcagggggcggggcctaatggggcggggctgaccgcggagccggcctctccagccacctggcggcccggcagcgtcagccaggtgcgcgcccggccccacatc

SEQ ID NO: 34100 - DNA, 122 bp, Homo sapiens
taaatctgtccaccccacactcctacgggcctcaccatccatcactatcagcagcattcacgttgacaccaaaatccagcaggaacttcacgatgtgatggtggccggcgcagacggcgttg

SEQ ID NO: 34101 - DNA, 122 bp, Homo sapiens
gagggctcggtgttcttttcccggtatcccttagttgtaacctgaaagccttcaggaaatcgccctcgccaggccattccgccactctgcccattccttcctcactccctccccctccgccc

SEQ ID NO: 34102 - DNA, 122 bp, Homo sapiens
ctcgaagcgatggaaccaccagggtgagtggtgcaggtagtacgccacaggattgggcatcggctgggtctgcagggacaggaggggccgtgaggtgcctggccgatctcggggggcggggc

SEQ ID NO: 34103 - DNA, 122 bp, Homo sapiens
ggggcgagaggatattactttcaatatcgtaggtggtgcacaccctcctgtgatattgttcgccatatccagtgggcgagaggatgatattactctcgatatcgcaggggctgcacacactc

SEQ ID NO: 34104 - DNA, 122 bp, Homo sapiens
aataccagtgtgcagatcttggcccgcatttacaagactatcttgccagaaaaaaagcgtcgcagcaggtcatcaaaaattttaaatggctagagacttatcgaaagcagcgagacaggcgc

SEQ ID NO: 34105 - DNA, 122 bp, Homo sapiens
gtgcgtgtggggagcgggtctggtgagggcgcacttgggcctgagccccttccggcccctcgtgtttgctggaggctgcgtgtgctgtgtccccaccccagatgcttgccctgaggggcagg

SEQ ID NO: 34106 - DNA, 122 bp, Homo sapiens
gggggcccatgctcacggggacctggtggacgatgctggctgggtaggcagtgtgctgcacggtgtggcgcgcagagccttgcgaggccaccaggtgggccacggtgccggtggagcccagg

SEQ ID NO: 34107 - DNA, 122 bp, Homo sapiens
agacgtgagccaccgcgcccggccctcatgaacttattctttagcgtttcattttgagagcgggattcacaagggaattgcggaaacagcagcgaggccccgcgacccctcggcccacgtgc

SEQ ID NO: 34108 - DNA, 122 bp, Homo sapiens
accgcagaatgaggcgatccgcgacgcccctccagctatacccatgccggaggcttgtcgcgccgccagggtgtcccgggccctgcaggctgaagcatttgctcaccttcccatgtgcattg

SEQ ID NO: 34109 - DNA, 122 bp, Homo sapiens
accctcagccacatcccagcactggagtatctgggatatacaggacagctatagggtgcacgcggtgcagtgaaacatgcaagaagccctgtaaagatccggtaaccgggaccacacccctc

SEQ ID NO: 34110 - DNA, 122 bp, Homo sapiens
ctttccagtcaacacgagcccagccaggccaaccttgagacttgcctcctagggagagaacgtgttcttcttggtgaccaacttccttgtgacgccagcccaagttcagggcagatgcccag

SEQ ID NO: 34111 - DNA, 122 bp, Homo sapiens
tgaaagctgccagctttatccacagctggcctttccccttcagatgccaaatgttccaaacgacaggtacaactctgagagggccgttaaggttcatgccagaaacattcacctaggaagcc

SEQ ID NO: 34112 - DNA, 122 bp, Homo sapiens
tcccactttcggttaaggggcagaaataccgccctatctgtaaattaggcccatggaagccgagccgcacctcattcctatatgcaaattagctgctccagtgccgaaagctccgccccatt

SEQ ID NO: 34113 - DNA, 122 bp, Homo sapiens
cagggtgacccgggcgggagtccggggacccgcgatcagccccggaggacggggtggggtcgccccaaacaggagcgccgggaccgctgggaccccgcactcggcgtccgccgccgccgggt

SEQ ID NO: 34114 - DNA, 122 bp, Homo sapiens
ggctctcccaggcacctgcgtgtaaccagcgccctctggggccacctgcgagctcagcgccgggctcagcttgtgcctgaggacacaaaacaccaaagagctgtggagcaccagccttcaaa

SEQ ID NO: 34115 - DNA, 122 bp, Homo sapiens
gctgccgttaccgccgctgctgccgccgcttgcgtcccccgctccggtctgtggtgcagccgggacccaggaccatgtctctgtctcgctcagaggagatgcaccggctcacggaaaatgtc

SEQ ID NO: 34116 - DNA, 122 bp, Homo sapiens
aatctaatgatcggtgcatgcagcccccagtcacgtaccccctgcttgctcaatcaatcacgaccctctcacatgcacccccttagagttgtgagccctgaaaagggacaggaattgctcac

SEQ ID NO: 34117 - DNA, 122 bp, Homo sapiens
cgttcaatagggggcgcctgagagcccaggtgggcgctgagctcctggcttccctccctccgggcccagccgacagggaggggttaggaatttaatcctccgcattccagccagggttcctg

SEQ ID NO: 34118 - DNA, 122 bp, Homo sapiens
tgaactgttttctccctctctgaaggtaattctgttaaataacacttttcactcaatttgcgtcacagcccttttatttttaatttttaatttttttattttttatgagacggagtctcgct

SEQ ID NO: 34119 - DNA, 122 bp, Homo sapiens
agggagagaaagtaactgggtggcctcctcagtctctccaccactcagattcagcaaatgcgctgcgcgccaggactgccgccctccaccaccccctccccgccccaggaccccacaggact

SEQ ID NO: 34120 - DNA, 122 bp, Homo sapiens
aaagggagtctgaaaacctcgggtttcgcccagagacagaatcccaccacaccctgacaccgggcttccgcctccccgcgcagagaccttcccagggcacgtgctgtcattcatgggaaggc

SEQ ID NO: 34121 - DNA, 122 bp, Homo sapiens
cctgtttgcggaccacagagcggcagcacatccctacacggggctgtcaggcaaggtcaacgcgctagagtgcaagagcctttgctttgcggattgccgcagcgccgggtgtgggcgcaggt

SEQ ID NO: 34122 - DNA, 122 bp, Homo sapiens
aaaggaccaattaacttcaaagaggcaatagtcaattgacagctgactttttacagacaacgatagaagtcagagccttgaaataattttttttttttttttggagggtcagggtctcactc

SEQ ID NO: 34123 - DNA, 122 bp, Homo sapiens
ctctagaatggtagtgttgagtctctggggttttgagcagctttgtggggggctgctgggcgggtgctgtactactgaataactatgaggttcttctaaaacatcctccgaacactctgagt

SEQ ID NO: 34124 - DNA, 122 bp, Homo sapiens
tgtgcttacacacgtgcatgagtgtgagtgcgacttctcggccgcagagtcccccattaacgctccggtatttgtttgttcagttccgctgtcccatcggccctgctgcctctctgcacccc

SEQ ID NO: 34125 - DNA, 122 bp, Homo sapiens
agtcactgggactgtgcattttgcccgctcagaccatggctatgctaaatacccatctttcgttagtgaaactctgggcactctcctgggaagcatcccggcgaccaagacgaatttcaaca

SEQ ID NO: 34126 - DNA, 122 bp, Homo sapiens
ttgggtggggacctctgttgctcccatttttacatacagagaaactgaggccctaggaggcgaaccccttggcctcaggcacaaggcgagtggatgctggaggtgggattcccagggattgc

SEQ ID NO: 34127 - DNA, 122 bp, Homo sapiens
cccctgtactcactgtctgggtcagcagcccattgcccccacagaggtgcatggcttaggcgggggagcagagtggtccctcagcagctgtgacttcccagtgccctctggaggcctaagga

SEQ ID NO: 34128 - DNA, 122 bp, Homo sapiens
aggcggtgcatcagcttggattttctaacaggttcttttccagaacttttgctgcgggcacggagactcttaccaaattcggctccataatacattccccaaaacattagaacccaggatag

SEQ ID NO: 34129 - DNA, 122 bp, Homo sapiens
gagtcctggccttggtgcgagatgcccagcaaccagtcttcagactcttccaggaccccccgttcactccccccacccgaccagtacacacacacacacacacacacacacacacacactca

SEQ ID NO: 34130 - DNA, 122 bp, Homo sapiens
tcaagtttttctaaagaccttggattaacaggttgattactaatgctgatgcaggtacagcgtacagttctagagagaggtactcctgtaggaaaagaggaacagcagagaaggttagcaca

SEQ ID NO: 34131 - DNA, 122 bp, Homo sapiens
gaagggaaacgtgagctaaagcaacaggttccacccacagcctgaacttggaaggggatgcggcggcggcaaggcggctggagctgcgcggtggagggagaggaagcggcgaggaggaaggt

SEQ ID NO: 34132 - DNA, 122 bp, Homo sapiens
gctgatcccaaaacagtgggctactgtatcatccctatatgcttggcagttatttgcaatcgccaccaggcatttgtcaaggcttctaatcagatcagcagactacaactgattgacacgta

SEQ ID NO: 34133 - DNA, 122 bp, Homo sapiens
gcgttacggaggcgtgtcctgaagtttccagaggcggggcttgatggctccaaggcgacacgccaccggagacgggaccggaatttgagtccgggtcgtagcacgccccctactgacctctt

SEQ ID NO: 34134 - DNA, 122 bp, Homo sapiens
acttcgaatcgtattaatatttcagacacttaacaggcaacctctcgtaggcattgactgcgtcccaggggctgtacctgtccgagctgattaagcgtgcgcggtcacccaggggtgaggaa

SEQ ID NO: 34135 - DNA, 122 bp, Homo sapiens
aggcaagctgtaccagcagctcctgggaacgtgctcggttgatggcacccaaagcccctgcgtttatcactttgtgagaatttaagcccccgcacctgggactgtttattttcctgtaactg

SEQ ID NO: 34136 - DNA, 122 bp, Homo sapiens
tgtcagatggtgctggagtttgcgtcaggcacataaagaggcagccccgaatctagcctacgtgagtgccggaccgctgagtggttgttagccaagatggcggtagcgatcgctgcagcgag

SEQ ID NO: 34137 - DNA, 122 bp, Homo sapiens
taggtctggaggcggagtcgcggtgacccgggagcccaataaatctgcaacccacaatcacgagctgctcccgtaagccccaaggcgacctccagctgtcagcgctgagcacagcgcccagg

SEQ ID NO: 34138 - DNA, 122 bp, Homo sapiens
tgctggtgacaaagcccaccccatattctgtctgtcagctgggaaccaactgcacgtagacgggctgctctcaaacccggctacctctcgcggcgcgcgtcatgtgagccgggctactctgc

SEQ ID NO: 34139 - DNA, 122 bp, Homo sapiens
agaagggggaagagaaggcaaaaggactcaggagagcaaagccagaagagggagggaggacggggtagtccctggcaccttggactgcgaactgaaagggacccttgaagacaccaatccga

SEQ ID NO: 34140 - DNA, 122 bp, Homo sapiens
ccagtggacgcggctccggggtggactttgtgccctctccaaactgttcgccaagaaaaacgtgtgttgagcttttcagtgacactatcctccctcgaaccccactttccccaaggggggct

SEQ ID NO: 34141 - DNA, 122 bp, Homo sapiens
gaccttctcctcgatctcgctggctgtgtgcttggtggtctccagattctccaccaaggccgtgtctcccagaaagttccccgacgcagccgacagacgggccaggagcgaatcttccagct

SEQ ID NO: 34142 - DNA, 122 bp, Homo sapiens
ctttgcgcttccccgctcagcgcactcagtttgcggctgggaatgaccctcgccgcccgccgttcttcttccggaagtcgttggccgttaccatagtgactgcaggcgtccggagcgctgag

SEQ ID NO: 34143 - DNA, 122 bp, Homo sapiens
ggcccgcccggcccggggagccgcgccgggaggagggtcgggcgggtctcagcctctcctcgcctccaggctcccactccttgaggtatttcagcaccgcagtgtcccagcccggccgcggg

SEQ ID NO: 34144 - DNA, 122 bp, Homo sapiens
aggggcgggactcaccacccatgtgacctgcactggcctggaggagctgcctgactgcagcggactctgccaagaatttcaagaggtgcagtggtccagtcataaagcaacatgaaaacgct

SEQ ID NO: 34145 - DNA, 122 bp, Homo sapiens
agcctattattatttttttaggcagtgtcttgccctgtcgctcagggtgtagtgcagtggcgtgatcacgactcactgcagccccgacttctcgggcttaagttatcttcccgccgcagcct

SEQ ID NO: 34146 - DNA, 122 bp, Homo sapiens
gcacagctccgccatgcccacatcacccagcttgttgctgcccagggccagctcccgcagcgaggccttggaggccacaatgccgcacaggtcccggcagttgtctgatgtcacaccgcagc

SEQ ID NO: 34147 - DNA, 122 bp, Homo sapiens
accagggggttctggtggaagggcccacccgggaagcggcgcgcggggaggactcgggggcgccgagaggaactgtccgggaaggggcgcgcgggccgcgggcggcgcggggtcggtaacgg

SEQ ID NO: 34148 - DNA, 122 bp, Homo sapiens
gggaaggaagaactcctgggaatagagtggcaaggctgggcggccggcagaaaagcatcccggcctctcgggctcccagctcgatacgcaccgcagagcgccaggaaccgaccagaggcagg

SEQ ID NO: 34149 - DNA, 122 bp, Homo sapiens
tgtgggtttttttcctcaacaccaaatgtcacttcgtcacgagcgggcgcgcgtgtcttccggccagcatgtccatttttctgtgcatggctgaggaccactcttattccgaatgagacaca

SEQ ID NO: 34150 - DNA, 122 bp, Homo sapiens
gctaagaaccaggagacacggctttggtgcctctcggcccgctgggtctcggcggcgcagcgtcccctgccggccactgtggcggcggctggaatcagcctcagcacttaaggggccgcgcg

SEQ ID NO: 34151 - DNA, 122 bp, Homo sapiens
agatgtttggcaccagggatgttagagatgagtaaacgtccttcctcacctgagattcagcgaagctgctcaggggtcaccatgaaagcaagagcctgcttttcttttctttttttgagatg

SEQ ID NO: 34152 - DNA, 122 bp, Homo sapiens
taacccccggctcgcgcagccattgcccggctccctgtcactcagcccgcgcggggcccccgattggcggcctagccccgttacgcactcgcctcgcgttcacatacccggggagggcagta

SEQ ID NO: 34153 - DNA, 122 bp, Homo sapiens
ggagaaatcaatccttgttctgtgaattccttggggacagggctgggttttactgtgggccgcaggggtctgaatcagtgtgtgtgagagtgcccccctcaactgatttcccctcccacctt

SEQ ID NO: 34154 - DNA, 122 bp, Homo sapiens
cacgtgggtgtggccggcgccgcctttgccaagaggcgaggctcgagcggggatgagaagcgtggcgagtgcgttcgcggctgctttgacctggtgggcgccgcctccggcactgcaccgag

SEQ ID NO: 34155 - DNA, 122 bp, Homo sapiens
catgtgcataatactgtggaaattagtaaacagtcacaaacaagtgattcatattcagggcgcagcctttttgacaggaaaacagtaatcaagagtttgggatttgaagatttttaaaagga

SEQ ID NO: 34156 - DNA, 122 bp, Homo sapiens
accttgcttcctaaagggtctttaggggttcccggactcctccgcctgggagcctctatccgcctgggagcctctatgcgccccgcaaagcccccggcagagccgaggggaggcttcattgg

SEQ ID NO: 34157 - DNA, 122 bp, Homo sapiens
aaagggcagcggggtgatgcgcatttcttgtagtgcctccaaaaaaccgtggtctctcgccgctaataaaacacccttgtggtgaggcctttggtctggtctcaactgcagagatgttttgt

SEQ ID NO: 34158 - DNA, 122 bp, Homo sapiens
ggcgagcgcgcgggctcgcacggattagccgtgctttcccatgagccacaaaagaatgcccgaatctgggacatctgtcatcaaggggcaggctgctcaggatgcaaggtaaccagagcttt

SEQ ID NO: 34159 - DNA, 122 bp, Homo sapiens
aaatggctccgcggccgctaaggcaaactctttaggcacgtctcccggctcccccagatgcggggactgagccagtcccactggcaaaacagcctggcgaccagcacacacagcccaaggag

SEQ ID NO: 34160 - DNA, 122 bp, Homo sapiens
cacattccagctgctatgatgtgcaggagggagataagtcctgaacggactgaagctgagcgggccagacaactctattattggcttcataattgcttaattaaacttttgtcactaatcat

SEQ ID NO: 34161 - DNA, 122 bp, Homo sapiens
tcccttgcccactccccaggctggctggagtccacagggcgccacgaccgtttcgatgttcgaatagccctgcagccagaaagacgaagctgcgagcctcaggatgaactggtggctgccac

SEQ ID NO: 34162 - DNA, 122 bp, Homo sapiens
caaagccttcctggatggcttcaacgaggtggccccgctggagtggctgcgctactttgacgagaaagagctggaggtgagtgtctgaggttgctgggaccctgagcccctgcctctggggc

SEQ ID NO: 34163 - DNA, 122 bp, Homo sapiens
caggtgccagccagctgaaggatggccacccctgtggtcaccaagacagcctggaagttgcgtgagtggttttcatttttctttatcaccccatttattctgttagcggcttgttgctggga

SEQ ID NO: 34164 - DNA, 122 bp, Homo sapiens
cacctccgggggcgtgggctgggggcgcggtgggcgcccggctcgccgaacttgggggcacgatcttgtctgtgcagtcatctgcgggattctggttcctagaggcgcccctgcgatggggg

SEQ ID NO: 34165 - DNA, 122 bp, Homo sapiens
gggtcatccattctcaaggagccgtcagctgtgccagcgagtagggatgggcagagcagtcgctcttggagatcacatttcagacacactacaataaaaggagattacatttcagacacact

SEQ ID NO: 34166 - DNA, 122 bp, Homo sapiens
ccattatttattcataaaccctttgaacatctaagagaggatgtgtagtgaagtggccaacgccttgaagaaagaaagtactggattcaaatctggacttcgatgttttgttttgttttttg

SEQ ID NO: 34167 - DNA, 122 bp, Homo sapiens
aagatggactttgtggccggcaatggggagggaggaggggctacgggctcacctccctcccgcagcccagccacacctgctctggaaagccctgtagctcctgggcggggtttgccagtcac

SEQ ID NO: 34168 - DNA, 122 bp, Homo sapiens
gacgacccccgattgggtccgatgcctaccctcggggtggagccggcaggtgtgtgagcgcgcgaggcctaggcgtggtgtgtgcgtccgcagatctcctcgcgggtggagtgtgaggagca

SEQ ID NO: 34169 - DNA, 122 bp, Homo sapiens
tcgctgccgctgctgctgctactgctgtacggtatgagggatagctgggctctccttccccgaccgacccacgccagcagccggttgggtggtgaggggggctctctggctctctgggtttg

SEQ ID NO: 34170 - DNA, 122 bp, Homo sapiens
gaaataagttgcccaaagatatcattaggaccaggagaccattataaagtatatccaggccgggcacggtggctcatgcctgtaatcccagcactttgggtggccgaagcagacggatcaca

SEQ ID NO: 34171 - DNA, 122 bp, Homo sapiens
caatccaattattattattatagaagtctgttttcaccagaaagtttgtgaactgacaaccgtaaaatctgtggtaaattcacaggcttcatcaatgacactatgaaatattgaccctcagc

SEQ ID NO: 34172 - DNA, 122 bp, Homo sapiens
ataaagctattttatccagaaaagctatctctggacaaatattttgaatagttcagtaaccgcaataggtttctgctagaaccattttgaagccaccctttaaccctaaccaccttatgtat

SEQ ID NO: 34173 - DNA, 122 bp, Homo sapiens
tcacccttgagttacattttatcctgctcacatttctccaccttatccaaaaaacggagacgcactgtcaaatggtttcccaaaattaagatattacattacctatagcatttccccaattg

SEQ ID NO: 34174 - DNA, 122 bp, Homo sapiens
tcccctggccctggccctggcctctgcgccctccctgcagagctggtccgggtgggctggcggcctccacccgccacaagcgcacagggctctgcccactccccgccccttttctgctgatc

SEQ ID NO: 34175 - DNA, 122 bp, Homo sapiens
aaggaattgcattcttaaaccctcttggtggcttccctgtaaatgcttccaagatatgagcgaatgctatagaaattgcaggaaagtccaaagggctgcgcgtctcctgtggctcagtctta

SEQ ID NO: 34176 - DNA, 122 bp, Homo sapiens
aattatcagggctttctacagattaatgctgtgtagcttcaggctcttgggtgcgcgcctcgcctgagtgtctcatccctgcttgggatgcgcccctccctgaggctcacttagagcttcca

SEQ ID NO: 34177 - DNA, 122 bp, Homo sapiens
atcgaacgcgcagccctggacggcaccgagcgcgaggtcctcttcaccaccggcctcatccgccctgtggccctggtggtggacaacacactgggcaagctgttctgggtggacgcggacct

SEQ ID NO: 34178 - DNA, 122 bp, Homo sapiens
agactttattagatgcataaatcctgtctccagagctcaagaagcatcattagttgcagacgctttgtcagagccaggccctggggagccttagacgaacccctaatccctcaacaggttgg

SEQ ID NO: 34179 - DNA, 122 bp, Homo sapiens
tgcagcaccgacagctcattcttttgggcatgattcaagattcagtaaaactgcacactccgtattttaaaaaataaaaagacacacagtcctctccttccctttcagactagtttcctctt

SEQ ID NO: 34180 - DNA, 122 bp, Homo sapiens
cggaactccccacgtgtgacatctcacttcggggaaaggtgggccctgcgctgcgcttggcgaaggtaaatgcacctgggtatcctcttgacctggaatggtggaaaataaagaaaacttca

SEQ ID NO: 34181 - DNA, 122 bp, Homo sapiens
tcccatcgccccaccagcgcccaggacgtggcaggaggaaggaggctggagggaggggcgcgggtggcacgagcacctgtcacctgaccggctcgggccctcacttctccagccccggccct

SEQ ID NO: 34182 - DNA, 122 bp, Homo sapiens
ggtggggaggctgcaggtgcccggcgcccaggtgcgaggtgcagggggcggcggggcaggcggctgcgggcggcaggccactcacctgtctcctccggccggggccgcgggggcggcggggc

SEQ ID NO: 34183 - DNA, 122 bp, Homo sapiens
gcagcagagcgaccctgggagctgtggaaacatggccgaccccttggagttaggaattcccgcgggaaacatttcatttcagtcccttaggcactaaacctagggacttagttctggtgcga

SEQ ID NO: 34184 - DNA, 122 bp, Homo sapiens
tgatttcccctggtaggtgttctgagtggctagggatccttccctcgcgtgcccctgggtcggggcggtagacagctccagaggatggacggccagcgtgaaagctagagctcgtgtattgt

SEQ ID NO: 34185 - DNA, 122 bp, Homo sapiens
cctcaggtcgccgcccccgagcctccggcccgcgcccgcccccgcgcccctcggactccgcgccgctagcttgtccccggcccagcgatgcctgcttgccgcccgacccccgcgttcgctgc

SEQ ID NO: 34186 - DNA, 122 bp, Homo sapiens
acttttgaacttgccaattagagatgaaatatcaccttctaatttagactggcttaattccgtcacgcaaaaatagcaacagccccggggctgcgagatgggatatcaggtctctcctggcg

SEQ ID NO: 34187 - DNA, 122 bp, Homo sapiens
tgtgtgcacgtgggtacccacgtgcgtgcgcatgcttgtgtgcacgtgggtacctgcgtgcgtgtgttggtgcaaccctctgtcccccggcctctgaacctgtaccgatatggaaaagaaaa

SEQ ID NO: 34188 - DNA, 122 bp, Homo sapiens
taatgtgtcagtttgcttctgtgccactattgtgttgctgatgttggaatgcagggaaggcgctagtttattgaataaggagccatgtaaattccagctgtcaacatgtgatcactccctcg

SEQ ID NO: 34189 - DNA, 122 bp, Homo sapiens
agggcgtttgtcctctgctcctgctgcagcgcctctcgctcagtggtcaagaccttctcccgctcctccagctccgccttgcgcttcagcatgtcaccgtgcctgttggagggaagcacctg

SEQ ID NO: 34190 - DNA, 122 bp, Homo sapiens
gagcttcccttgatccagatctccctaattgggaatgatgatttcacagactagagtctccgatgctggtcatgatgtcaaaactaagttctgactcatttagggaactggatacttgggtc

SEQ ID NO: 34191 - DNA, 122 bp, Homo sapiens
aagcaagaaccgaataaataaagtgcaaccgtgggggtgggggtaggagagggagggcaccgggtgcacccatgcccacagcccacattcagtgctgccaggtctggcccacctcccagcca

SEQ ID NO: 34192 - DNA, 122 bp, Homo sapiens
ccttgaactgagactaggggaggtgggggctgggctctctgcgggaaatgattgtcacaacggcggaccaataggcaacattagtatcactcttgaaggaccgttttccaattcagtttttt

SEQ ID NO: 34193 - DNA, 122 bp, Homo sapiens
attcagtgagtggcaattcagcctggggggtggagtgtcaggattcaaatctttttgctgcggggtaaccccaggtcccagtgatttccatagacaaaagagatgctggtaaatttgggatg

SEQ ID NO: 34194 - DNA, 122 bp, Homo sapiens
gcaacactgacgaggcagcgggtgggccggggcagtgcacagggagggcttgctaactctcgtgggcttgccctgagtctcgcgagtgccagcattgccccgcccttggatgggctcctgct

SEQ ID NO: 34195 - DNA, 122 bp, Homo sapiens
taatatttgagccaaactcctcttaaagttgccagataaacttaccattaactccctgtccggggaaaatctgaatgttgaattcttcaacttttttttttttatttgagaccgagtctagc

SEQ ID NO: 34196 - DNA, 122 bp, Homo sapiens
gcacttttttgtcccaatccaacctttcctctccctcccgccacccaccagtgccggtctcgctgagcacccgtctctcaatcccaggatttgtacggggattctgggcagcctttgaagag

SEQ ID NO: 34197 - DNA, 122 bp, Homo sapiens
tttaccctaaattgaattgaggtttatcattttcctgcacatgtaagcttatccacgtggcgttttggtaggtcagttggttttttcccctctggcacatgaaatggaatctatttgctatc

SEQ ID NO: 34198 - DNA, 122 bp, Homo sapiens
caggatctcactggtggtctcacatccatccttttgggaatgagatcaggactagggattcggcactggtgaccagcactcaggtggaccgctcagctgactgaggtggagaaggaaggagg

SEQ ID NO: 34199 - DNA, 122 bp, Homo sapiens
aggacagagctgctcagtactttacagaaaccaactgagtcgtttgtgcatgaattaagccggtctgcttccccgtcaccttcgtaacaaaacaacgtcccctctcccctcgcctcgagcag

SEQ ID NO: 34200 - DNA, 122 bp, Homo sapiens
gtgatccacccgccttggcctcccaaagtgctgggattacaggcagtgagccactgcgcccggacatgttttgtattttttgtagaaatgggtttttgccacgttggccaggatggttttga

SEQ ID NO: 34201 - DNA, 122 bp, Homo sapiens
gggggccgcggggagcgcctcgtcccctgggatgggggtcctaagagccagggggggaagcggggctggctcttactccccgcaccgctgagggcgcctcgcccccctgccatgaggatcgt

SEQ ID NO: 34202 - DNA, 122 bp, Homo sapiens
ccggaagctggggtcaacgagagaagtcatttccgattggcgaatctagcgggagcaatgcgctgtctgtcaggcgtgtgttgggtacagagtttactgcaccggaccacctgaattccctg

SEQ ID NO: 34203 - DNA, 122 bp, Homo sapiens
gaccgtcagggttctgcccaaggccacgtgaaggcaggaccatgaaggagcctggccatgcggtgtccagtgcccaggccacttccggtgccatccgcccccgccccagaggcaggaggact

SEQ ID NO: 34204 - DNA, 122 bp, Homo sapiens
tgagcctgggaggcagaggttgcagtgagccgagatggcgccactgcactccagcctgggcgacagagacagactcccgtctcaatgaataaagcagggcagtggatgggatggctggagct

SEQ ID NO: 34205 - DNA, 122 bp, Homo sapiens
gaagcggggggcggagttccgtcctctgatgattggctctgcgcggatgggctgcggctgcgcccggccaacccgcggcgtgttgctatgtgctgagccgaggggataggtgcgggggcgcg

SEQ ID NO: 34206 - DNA, 122 bp, Homo sapiens
cctcatctttaaagacacggtcgaccccagacagaatatatgctgactttacaaaatggacggtctaacctttgtagtctcccatggtgtgatgagggtccgtgagctcagtcatttccaag

SEQ ID NO: 34207 - DNA, 122 bp, Homo sapiens
aagtacgagattgacttggacacttcagaccatgcccacctggagcacatcacccggaagcggtccggggaagctgccgtctaaacctctctggagtgaggggaatagattacctgatcatg

SEQ ID NO: 34208 - DNA, 122 bp, Homo sapiens
atgggcttcttggaggcctgaaaccaccggaacggaggtggggcacttgtttcctgagtccgggctggaaatctcggagttaccgattctgcggccgagtagtggagaaagagtgcctggga

SEQ ID NO: 34209 - DNA, 122 bp, Homo sapiens
agctctgcaggggcgggacagagcctcgtcctccatcgtctgcccacccgtcttcagaagcgcctggcacactggcctctgggacgacctccagcagtttcagcctccttgtctacccccag

SEQ ID NO: 34210 - DNA, 122 bp, Homo sapiens
taggctttatcaagagaagagatcataagataaacagtggatagccctcaaccccctgcccgttcactaggcagagaagagccatcacaagttctccatgctcttctacagatgtgtcatga

SEQ ID NO: 34211 - DNA, 122 bp, Homo sapiens
ccttcccgtggagataggacaatgtctggagatagttttgattgtgccaaatgtagaaagcggggcagtgcttctggcatctactgggtagaggccaacgattcatcggatatctttcctca

SEQ ID NO: 34212 - DNA, 122 bp, Homo sapiens
aagagctggctcagtttcagcgctggctcttcgtgcatggcagagatggcgactgcgactcggctgctggggtggcgtgtggcgagctggaggctgcggccgccgcttgccggcttcgtttc

SEQ ID NO: 34213 - DNA, 122 bp, Homo sapiens
aaaagcacagggcctagcttccaaatgtgccaattctgatttattttatggcctaaaagacgggggaggggaaagcatgtaaaggtgacaactatgcatgagctaaaatgtgcatacacata

SEQ ID NO: 34214 - DNA, 122 bp, Homo sapiens
tttagctcctttccagaaagagcttcgagtgagttattgatgcagtcaatacactgacctcgagttcacagctggtccaggaggttaaaatgctgaagtaagtagaacacactgtgatgagt

SEQ ID NO: 34215 - DNA, 122 bp, Homo sapiens
gaatactcttccgcagcgcactattgtgaccagccacttgtgtcttcttccgccaatgtgcgcctctccacatccagccacttgtgtgtctgtctgctagggactttggtttttaaggccca

SEQ ID NO: 34216 - DNA, 122 bp, Homo sapiens
agagataagaggttggggtgcggaaataagcgaatgcgggcttcttgccccctaggaaagcgggacttgccgccaagggtgaaggagaaggggttgaggggtacttgcccctgccccaggaa

SEQ ID NO: 34217 - DNA, 122 bp, Homo sapiens
aggcggtgctctgatgaaggcgggccctacccacagccttctcgggctcccgtcccggtgcgtccctcccgacccaggggaaggacatttggtgtggatcatccttctcagtaatggggtta

SEQ ID NO: 34218 - DNA, 122 bp, Homo sapiens
gggaggcggggcccagcggtgtcccgcgaaactgccgctcgctcggttcccgggcctccccgtgcgcctcagtgcaaagcgtgccaggcactcttgactgcaacgagagccgcggcggtgag

SEQ ID NO: 34219 - DNA, 122 bp, Homo sapiens
gggtgacggacagcacctggaaaatccggtcactcccacccgaatactgcgcttttccgacgggcttaaaaaacggcgcaccacgagattataacccgcacctggctcagagggtcctacgc

SEQ ID NO: 34220 - DNA, 122 bp, Homo sapiens
ttgcctcaaaagatgattgcattctaacttttgtgacctaccaaatttaagatgtgtatacgttgttctttacgttgttctagaaaagagattttaatgctgtagtgactttgctcacttac

SEQ ID NO: 34221 - DNA, 122 bp, Homo sapiens
ctaatagcctttttctcatcgtcatcaccaacaaacacctccgctgcaggggccgagcgccggcatccctgctgggtggccagctccctctgcaagtcacctgcacatccacctgcccctcc

SEQ ID NO: 34222 - DNA, 122 bp, Homo sapiens
cttctgactgtgccttcctacaagacaaagctcaagggtcagcctcagagacacatttcccgcatccctgagcccctgggcctcgctgcttgcctcccctgaggtagaatgtcactcatctg

SEQ ID NO: 34223 - DNA, 122 bp, Homo sapiens
taacattatgatcatggcttacgattaaattccatatgacaaacacttatatatagcagccgtcattttggatgttggttatgacaatatttgcagtttgattacagaacacgcgttcatta

SEQ ID NO: 34224 - DNA, 122 bp, Homo sapiens
gtgaggtcagtgggtcacacccagggtagggctgaggtccatgccgcctgccatgccctccgacagtggctcttaatgcctgacttgctgatgcccagaacaaaggttcctaattcttttag

SEQ ID NO: 34225 - DNA, 122 bp, Homo sapiens
acagttagacagttcctcaaggagttaaacgtagaattgctgtatcctgcagcaatctcacgcctatgtatatatccagcggaattgaaagcagggattcaaacctgtacacctgtgttctt

SEQ ID NO: 34226 - DNA, 122 bp, Homo sapiens
tgccggactgacgggcggccgggcggtgcgcggcggcggtggcggcggggaagatggcggcgtcctccctggaacagaagctgtcccgcctggaagcaaagctgaagcaggagaaccgggag

SEQ ID NO: 34227 - DNA, 122 bp, Homo sapiens
acgctcctcttaccgataaacttgaagcgactcatgactgcgcatggaggacctccccagcggaagcggaagtggccgccggcaactccgcccttccggctggccccgctcagtcacccgca

SEQ ID NO: 34228 - DNA, 122 bp, Homo sapiens
agaaaagtgtgaaacagtcctgccgtcccttgcttcttttctgtgggctacggaacctgtcgggactcccaacctttctgctgcaacttttgcagctctccttcgtaactgtagcttccttc

SEQ ID NO: 34229 - DNA, 122 bp, Homo sapiens
attgtgctctcctacattcgcatcttctctacagtgctgagaatcccatcagctgagggccggaccaaggtcttctccacctgcctaccacacctatttgtagccaccttctttctttcagc

SEQ ID NO: 34230 - DNA, 122 bp, Homo sapiens
gtatctgaaatggtcgctgcggcttgccctgcaccagggcctaccttgttgccaggaagccgcactgctggaggctacctgggcgctgggttttattgctggtgaacttggttacccacctt

SEQ ID NO: 34231 - DNA, 122 bp, Homo sapiens
tgagaatttggggtggaaaaaagcaatcacccgttgcccggggagcataaaagctgaatgcgcacctcaaagagatgtggtgtttgcgcagggaggccccctttttctagagcgcatcaggg

SEQ ID NO: 34232 - DNA, 122 bp, Homo sapiens
ggtaatgacattaagtatcttccactaaaaggcactgcagcatcccacttggctctccctcgggaacatgctttagaacccaggctttattttgtgaggaagctcaagaaaaatggagacgc

SEQ ID NO: 34233 - DNA, 122 bp, Homo sapiens
tccccagtctcagaggccagggcccttgctggctggggtgggggctccagcccagggccccgctgaggggggcaggagcaggggcggagagaacagccgtgcgtctgccttttctgctccca

SEQ ID NO: 34234 - DNA, 122 bp, Homo sapiens
acctcgtggcgcaacggcagcgcgtctgactccagatcagaaggttgcgtgttcaaatcacgtcggggtcaaacatgtgatcatccctttctttagccaacaggagttatagcttgccggta

SEQ ID NO: 34235 - DNA, 122 bp, Homo sapiens
ggcgctggcctgtgggcagcacttcccggttccctgcttcatcctcgccgactctgcgcacgcacttggctgtcaggctttctccacgcttgctgagtgaatccatgaacaaatgcatgaga

SEQ ID NO: 34236 - DNA, 122 bp, Homo sapiens
cagctgaggatgaggcccagatttctggctgtgtggtggcggtgcgccttcactaagggccgggcgtggggagcaggttttggccattgaatttgtgtctgtgcagtgtcccaagaggcaaa

SEQ ID NO: 34237 - DNA, 122 bp, Homo sapiens
cccggaggccggcgcccctcacgccgcccgcccgcccgctccccgcccggcccctgcgcgcgtgcgtgtcctgctcgctccatgttgccgcctctcccggtacctgctgctgctcccggggc

SEQ ID NO: 34238 - DNA, 122 bp, Homo sapiens
tcagcaggcagatagtcccccaggccaggccgggacagcgcccacgcctggccagccggccgggacaggcctagacgagcagtttacacctggcggcgtctacctctagggccgacaccgcc

SEQ ID NO: 34239 - DNA, 122 bp, Homo sapiens
ttctgtaacaccccgtccgccccccaacccgaccctaagccaccttattcagcaataaggcgactgctaggaactgtttcaaatgtatgtcaaccttttgggggaagaaaaagaaaacaaaa

SEQ ID NO: 34240 - DNA, 122 bp, Homo sapiens
caggctcaaaaatgtcctttgtgttgttatgtttaagtcaaccaaacatgatttggtcaacgttaaaacagaaagctgggtaactgttgaagtcacaaatagttttctgcgaacttggacat

SEQ ID NO: 34241 - DNA, 122 bp, Homo sapiens
aaagccctcttcctcacgtggctgaggccaccgctgggactgctcctagatggatctcagcggcattaagctgtgcctgagcgagtttgtagtgactcactgcacagcacccccagactagc

SEQ ID NO: 34242 - DNA, 122 bp, Homo sapiens
ctttttcccctcccccactgcttgttgtctcgtgcttatcccagaactgatcatccctaccgtcctggccgtctgcagagacagactttgcaagaacccaagtttctgctgtcactggccag

SEQ ID NO: 34243 - DNA, 122 bp, Homo sapiens
cacatgtggtcgcgcatacagagaacgtctctagaaggatacacaggagactggaaagaacggttctctccagtgatgaagtacagtggtgattctcaactgtatactcgtttgtaatgttg

SEQ ID NO: 34244 - DNA, 122 bp, Homo sapiens
atgtacaagttccagaatcaaaggtaaaacaaaacccaccaagaatcagctcactgttagcgtcctagttgaaaaataaggcttatcaaagtatttcagattgcattaacacttttgatata

SEQ ID NO: 34245 - DNA, 122 bp, Homo sapiens
cctggatgagtgaagaatactgtttataatatatcgctttctaagtagaaatactttaaccgtcagaattagatttaccagagaagccacagacatttttttcaaatctaaggctgtatttt

SEQ ID NO: 34246 - DNA, 122 bp, Homo sapiens
cgggtccgcaggacctgggcgtggggacaccaccaggcaggagcagaggcaggactgggacgccaaaagctgagaatcctcgatgcccgcgcgagagccccgtgttatggcgaggtgggaca

SEQ ID NO: 34247 - DNA, 122 bp, Homo sapiens
ctttgtcagctcccgcacagtaacgtaagttttcttgtattcttagtgtagtttcgttaccggaaaggggtctcgatccagaccccaagagagggttcttggatcttgcacaggaaagaatt

SEQ ID NO: 34248 - DNA, 122 bp, Homo sapiens
gacttgagggacttctctactaccgagtcatcgcgaacagggcgcgaagagtgccagccacgcacaggaaggcactgaggtcccacagccacaaaacccacagaggtagaggtccatggcgc

SEQ ID NO: 34249 - DNA, 122 bp, Homo sapiens
atcagtaatgaaactggggtggtattctaacgtaactggggtggtattctaatttatatacgagtaggtaaaatgtatcaggcatttgagaactatgagggaaatagtaaccttaatgacag

SEQ ID NO: 34250 - DNA, 122 bp, Homo sapiens
ctggaagctggggagaggcgtggatgcggatggcgtgttgctcttgggctggcccccaggcggttcctgcagggcgctgggagcttggcccgggctggggctcgggttggggctcaggggtt

SEQ ID NO: 34251 - DNA, 122 bp, Homo sapiens
catgctgccgctatcctgccatgcaggaactgccagtgtctgcattaagacggagcttgccgcggtctgtggggcttatgcaggtggagtggtttcctaggggcaggtgcagggaatgagag

SEQ ID NO: 34252 - DNA, 122 bp, Homo sapiens
ttatgctgggattttgttcaattcttgccctatactttaaagaactggggcaagagaatgcgagtaggaggacgaggagtatgttcttcaggctgctactctgcaaggtggtttgggaccac

SEQ ID NO: 34253 - DNA, 122 bp, Homo sapiens
tctttcgttttaattccttttaaagcgcgttcgtttgcctgagatctagcttctagatggcgttcctatagcctcccggagccccagccatcctccgtagaagggtccctgccgcagtgcgg

SEQ ID NO: 34254 - DNA, 122 bp, Homo sapiens
tccccctgccgggctcctcctcccgccccccttcagccgcttcagggagtgagctggagacgaccgtctggtttctgataggaaaaggtcagggggaggggacatctcccataacacgcgcg

SEQ ID NO: 34255 - DNA, 122 bp, Homo sapiens
gctaaggcttcctgcatccaccatgggcttgaacgtgaggcttggaaaaagcggagacaacgttggaaagaatgaggcctgagaacgagtcagtgccgcctcatccgcgtcaccacatccct

SEQ ID NO: 34256 - DNA, 122 bp, Homo sapiens
ccctactaggggtaaattagtttctggagcatttcccacctgtgcctctcttcctggtttcgtcaggttttagctggaatagatctcctgcaggcaacaaatgtgggcctacaggtttcttt

SEQ ID NO: 34257 - DNA, 122 bp, Homo sapiens
gctccttggtcaagttggactgggaggccgtgagccctaggagctgactgtataggccctcggctcggcgctcggtggcctgcaggttggactctgtgctcacgtgcacgttgccatagacc

SEQ ID NO: 34258 - DNA, 122 bp, Homo sapiens
aggaggacggctcacgtttattaagccccaccattgaggaaccaaggtgagcgagaggcccgccgagcgtacgatgtccacccacgtggcaaatcagctctgcctgggcgtaggggcccgtt

SEQ ID NO: 34259 - DNA, 122 bp, Homo sapiens
ggggtcgcagggtggcaaacgtacgcgggcacgtgcacgtgcttttggggccgacagacgcgccagttgcctaggcgcatgcgtctggctatcccagaagcacctgcgccttccggctcgtg

SEQ ID NO: 34260 - DNA, 122 bp, Homo sapiens
cgccacctcgggagcagtgttggccaaggaccccgacgccctacgtaagtaaaggcagggcggggagcctgcgggggaggagggtcgggggcaatgtccggtccgcggaccgcggagtgggc

SEQ ID NO: 34261 - DNA, 122 bp, Homo sapiens
ccgtgccgtttcccttttttttcttgctggcagtggaatggacgttgcaggcggaactaacgtcgctgctgcgttttgcaatcgcgccccgcgcatgcttcttggccccgtgtcccgctcct

SEQ ID NO: 34262 - DNA, 122 bp, Homo sapiens
aagggttaaaagtctcctagtcattcaacatagtgtcacaagagtgtaagtttggaacatcgtggaattacgtgaaatgcaattaaaaaaatatgaccagacgtgagtgcctttattttccc

SEQ ID NO: 34263 - DNA, 122 bp, Homo sapiens
aggcccggagcgaagctggcgcgggctgtgggggcggaagagcaggcggcccggctgcctcgccctggccatgactcaggctctaccaccccgtggtctcctagacagcagctcccccaggc

SEQ ID NO: 34264 - DNA, 122 bp, Homo sapiens
ccattcgaggatgtgctcagaaaggccaacttgaaaaagctgaagcatggtgtttgccatcgttgaataacagacgtcacagagacttaattcagctcctggaatcagttgttctcttccac

SEQ ID NO: 34265 - DNA, 122 bp, Homo sapiens
cccctgcccacccgggggccatggtgtgcagggccccgctcctggaggaggctgcctctgcggggcaagacgcgtggagcccgaggaggcgcgcggggagcgcgggcggcctggggagcggg

SEQ ID NO: 34266 - DNA, 122 bp, Homo sapiens
aaataggacactagggcgccggcaggcggctgaggcagaacggttgggctgcggtgcctccgggggccttttggggcgccttttaccccagagctcagaaagctccgggcagcggggtggtg

SEQ ID NO: 34267 - DNA, 122 bp, Homo sapiens
tgcagctctgcactcacacgtgatttacctggaaaagaagtgagttttaaaaagtacaatcgtgctactgaaacaataggcaagggcctccaatgcatacccacgagaagctggcaagttat

SEQ ID NO: 34268 - DNA, 122 bp, Homo sapiens
aaaactagccagatctggtggtgtgtgcctgtagtcccagctactcgggaggctaagacacgaggatcacttgaacccaaggggcgatggctgcagtgaactgcgatcatgccactgcactc

SEQ ID NO: 34269 - DNA, 122 bp, Homo sapiens
agacacggaagtgctgggaggcgccgggagcccgttcggttgcgggtgtctctggccctgcggtcagccctgggaacgtcccggagagctagattcctagaggcccgattccgctagcccgg

SEQ ID NO: 34270 - DNA, 122 bp, Homo sapiens
gaggtgacgttcatttcggccgcgtgaagttttctttcaaactgggattggtggggaggccgggggaagggagcggggcggcgatcttggcgccctgcgcggagtccgggagccgcgtcccg

SEQ ID NO: 34271 - DNA, 122 bp, Homo sapiens
actctaaagaggcatttggggggtagggaaagaagaggaaggttggctccagatgggccccggggtagcttgagaattcacttatgcgaagaaccttctggactccaggtccctgagccccc

SEQ ID NO: 34272 - DNA, 122 bp, Homo sapiens
gaaggatctaggaggggcccatgggtttacaaacatatctttatatccttaaaaaaaatccgaagttgacttgttaagagattaagatttaacacacctgggtgatggttactggctcattc

SEQ ID NO: 34273 - DNA, 122 bp, Homo sapiens
acaccgtttatactacaagataacacgttttggtgtacattacacaacagcaatctctgacggtttctgcctccctgagaagaccagcacacaaacatttctctgcttgataccacgataat

SEQ ID NO: 34274 - DNA, 122 bp, Homo sapiens
gaggctacgaggtgtaactggcaaatcaatgacttaagagtagctttctcccagcctccccgctggctctggagtatagagggaagccagccttttcctcccccatcctgcccctcccctct

SEQ ID NO: 34275 - DNA, 122 bp, Homo sapiens
ccagcagctgagcctccccgagaccccagccctcggccctcatacctcccatgtcaaagccgatgacaggctggccaccctcctgctggtaggtggtggctgagtagcccaccacgccgccg

SEQ ID NO: 34276 - DNA, 122 bp, Homo sapiens
tgagctctggaaggctgagaatctgctcgaagggcacttgtgcccgaagtgacgactccacgctccgctgctcctggggaagcagctcacaaaaccgcctgtgggctctggtagagagaggg

SEQ ID NO: 34277 - DNA, 122 bp, Homo sapiens
cggcccggccgcccgagcaggccgcgcgcgggccgccgggcccgaggccagagccatgggcgagaccaagatcatctaccacttggatgggcaggagacgccgtaccttgtgaagctgcccc

SEQ ID NO: 34278 - DNA, 122 bp, Homo sapiens
ttgaccttcccccgcgcttaagcggctcagtggggtaggacggatggtcgctgtccctcccgccggtgctgaagtccgccgcaccccatggatggagggaggggccgcccctcggggcgggg

SEQ ID NO: 34279 - DNA, 122 bp, Homo sapiens
aagattctgctctagttgtcattctccctttttaattcttgaaacaatgcttagagtactcgttttcagcatactctaaaatcaagcaacaagtacagatctcttaccatttcctccaaacc

SEQ ID NO: 34280 - DNA, 122 bp, Homo sapiens
cgaggggaaaaggaagggaactctagttgggactttccggtgggcggcttctttcctggacgcgtttgctcctggcagtcttgtccgcccttgcctgtagcggtccgcaccctgtagtgtgt

SEQ ID NO: 34281 - DNA, 122 bp, Homo sapiens
taacgtcatagctcagggatgagcatgattttgttttgccaaaaatggcatggcaaatcacgatgagatttctgtaatacataatttgggtaattctttctatgtcagtaacggctgtctct

SEQ ID NO: 34282 - DNA, 122 bp, Homo sapiens
gaatgggttctgattgtgcacggggtgcacactgggcatttcttggaaggggcacactgacgcgcgcacacacgcccccgacgcgcacgcgccccgcgcgcactcacactcacccccgcgca

SEQ ID NO: 34283 - DNA, 122 bp, Homo sapiens
caacgaccaatccgcagtggccgaagtggaagtcggcgtaacggcactaaggggcggggccgaagcggcccagggggcgggcgtttgaaatcagtgccttagagtagaccctaaacctcatt

SEQ ID NO: 34284 - DNA, 122 bp, Homo sapiens
ggcccctgccccgcgcccagggatcctccagctcctttcgcccgcgccctccgttcgctccggacaccatggacaagttttggtggcacgcagcctggggactctgcctcgtgccgctgagc

SEQ ID NO: 34285 - DNA, 122 bp, Homo sapiens
tcgatctccctgccggcaaaatggggatccttgtcccagctccactcactctatagggttcgtttgaggctcatggtaaataggcttagaaatgggccctcgggcatgtccagcctggagta

SEQ ID NO: 34286 - DNA, 122 bp, Homo sapiens
ccagaccctcattgcacactctctctctccacggttttctccaggcaagctgagagctcccgctcagggaacagcctctgtgcttcccttctgcacgcctggtctcttatgattacagtttg

SEQ ID NO: 34287 - DNA, 122 bp, Homo sapiens
ccctgaacaagttcctgcctggctcccggttgcttgtgtaaaactcaaagtttggctcttcgtttcccggggaaagtttttatcttttacatgtttgggggtgattgtgaaactgcgtattt

SEQ ID NO: 34288 - DNA, 122 bp, Homo sapiens
gttggcgacgcagggcccccaggaggcagagcgcgcgcctggcccgggcgatgggcctcccgtccccccagggctgcctccccgccggtgcccacctgcgccccagcggagccagcccgtcc

SEQ ID NO: 34289 - DNA, 122 bp, Homo sapiens
tgttgaaggtgatgttgcttttgtgcctgaactccctgtgggggaagccagtgggtcagacgccccgccccgctgcatgggacgtttcccttctactcgcctgcaatgcctgcctgggaacc

SEQ ID NO: 34290 - DNA, 122 bp, Homo sapiens
gcgttctgactggagagaactgttgtgcccaaatccggaagcccagggtgtggccaagtccggctttgcgctctcctctgcaacttctactgccgactttgaatatgcggaagtagaagccg

SEQ ID NO: 34291 - DNA, 122 bp, Homo sapiens
agaactagtgtttactttcaaagaccataggtctgaaatcatcaaaactctactttcaaacgctcataatttagattgtgagatatagtcagtattttgcccatttctatataatgaggata

SEQ ID NO: 34292 - DNA, 122 bp, Homo sapiens
aaggagtatgccaaaggtgaagatcttcccagaaattcctaactataaagctttcacagccggattaacatgcttctctcagcatggatatctatccgtatatgggtatgtatctcaatatg

SEQ ID NO: 34293 - DNA, 122 bp, Homo sapiens
atgctttttgtcagttcatggcccccagtttgaccgtggttgtgagaccttaataaatagcgatccattaaatggttaatttaaaaaaatcctgctctgaataatattccattctttggata

SEQ ID NO: 34294 - DNA, 122 bp, Homo sapiens
agcaccctagtcactggctggagtgggcagactcctgtggctgtgtgacctaaccgtgttcggtccgctctgttaggcgactaaaaatgagtgatgcaaacaggaagccctgcgtccgcggg

SEQ ID NO: 34295 - DNA, 122 bp, Homo sapiens
gggggtcccccgcgtcctttcctccaggccggcagtgggctggggccgcaagtgtccccgcgtacactggccgtcccccagggacaaggacagttgccctgaaaagctgcggctcccgccag

SEQ ID NO: 34296 - DNA, 122 bp, Homo sapiens
gaggtctagtgccagaaggagaggttgaggcactttattatataaagagtaaaatacgtccggataatgcatgtagaaccagcaaaaatttgtgaagtattctcttggggaactagagtaag

SEQ ID NO: 34297 - DNA, 122 bp, Homo sapiens
ccgggtcggcctccgcagagagtggtggtcttgaaaacccagttttgggagaatacctgccgcgcctcccgcccaaatacccagaggtttcatagccgccatcgctgcggtggaggaggccg

SEQ ID NO: 34298 - DNA, 122 bp, Homo sapiens
ctaagacagtccctaaaacaccaacccagggaaattaggcatggagatatagcaagctaacgttgcagcaagccctaatgaagttaaattgcatttcctattaattatctactctatatcat

SEQ ID NO: 34299 - DNA, 122 bp, Homo sapiens
gggctgtaggaaattcacctcctccaacctccactgttctcccagccagagaattctccccgaagagaagccctggaacctccagatcttaaccacgcggtgatctcccttccaggcaccag

SEQ ID NO: 34300 - DNA, 122 bp, Homo sapiens
ctcagcctcatcctggcggctgcacaatgcccagctctgaggaccctgcactctgggcaccggctaagaaagaacagaccctagggtgggagggcaaagcactcagtgatcctctggacatc

SEQ ID NO: 34301 - DNA, 122 bp, Homo sapiens
aatgagaatacccctcattcacctaagatatatttaatacagatttcttaagaagaacagcgtttcttctaaccatttctttgatttgttactttgaagtaagacagtgaactagactttct

SEQ ID NO: 34302 - DNA, 122 bp, Homo sapiens
gaagaggcaaaccgcagccaacacccagctaccgcgagcagtgggactaaaatgcgcaaccgcagtggacatctaggcctcagctccgcttctggtggcttacgtcattactcagcgacagc

SEQ ID NO: 34303 - DNA, 122 bp, Homo sapiens
caagtgggcccacaggccttacgggggcagggccagcagcaggttcttttctggagaatgcggggaggatactcccagcaaacaagtgaggcctccggtaatgcaatctgacagtgttccca

SEQ ID NO: 34304 - DNA, 122 bp, Homo sapiens
acagacctgagtccgcggctgggcccagccacgactccgcgactaccccccagcctccctcgaggaatcacatgttgtggtttcttagtgggtagattcatgagttaccatatgggattaca

SEQ ID NO: 34305 - DNA, 122 bp, Homo sapiens
tttcctccgaagccagacgctggcgctgtagtcctgctgcttgacgctgctgtagaagttcgcgcccactcgggtcaggcttggggagggctccttggggcggcttttgagcctcatctgct

SEQ ID NO: 34306 - DNA, 122 bp, Homo sapiens
ggacctcccaccctctcgtctctctctccggctctgctcgagtctaggaggcggcgctggcgtgcgctactctcgccttagccaaggtcccctgcccgcccgcgcacccgcccgtcgcccgc

SEQ ID NO: 34307 - DNA, 122 bp, Homo sapiens
ccggctacgcgccgccccctcctctagcaggaaagcgggccgctgggacccctggctctccgaaaacagcctcgtcacctttcgctacccctggcttaatctaggtgagctgatgatagcat

SEQ ID NO: 34308 - DNA, 122 bp, Homo sapiens
ccgccccggggcaggccccgcctccacaaggacaccaagtcccgcacaagccacgccccccgcaggccccgccccactctgttcagatctaggcccaactcaggctccgcacctcaaggctc

SEQ ID NO: 34309 - DNA, 122 bp, Homo sapiens
cggggcccgggcccgcccccaccggccccaggcccggccgctccgccctccgcccgcctgcgcccgccctcagcccaagatttctagggcattggccgcgctgctgggtgatccctccgggc

SEQ ID NO: 34310 - DNA, 122 bp, Homo sapiens
ggctgaggatggggcagggccgggcagggtcttggaaaggctgtggcagcaaggggcagtcgtggctccgtgaggggactgaggtcatagcaaagccctcacagagcctgcgagagccgtag

SEQ ID NO: 34311 - DNA, 122 bp, Homo sapiens
ttttgccagctcaaggcacccattcctcaacttctacatgagtgctttgcagctgagaaccggcacttacaaccttcagaggactgcccttgggcatggccaccaccctgtacttcatatgt

SEQ ID NO: 34312 - DNA, 122 bp, Homo sapiens
gcactcctcagcccttgggcagtcgatgggaccgggcgccgcggagcagcgggtggtgctcgtcggggaggctcgggctgcgcagtagcctgcggtagaggggaggctcgggcatggcgggc

SEQ ID NO: 34313 - DNA, 122 bp, Homo sapiens
cactttcaccatgacaggccatgctgagacaaagcagctgacagaaatgctactcagcatcgatcataaaccagtgctgcagatggtctgactagttcaaagagactggctaacactgccca

SEQ ID NO: 34314 - DNA, 122 bp, Homo sapiens
tccttttcacagaggaagggtctgatgtgctctgtgccatggcaggaggggtaactagcacggagatgaattccagagaactcactacataagtctataaatttgtccctaaacttgaagat

SEQ ID NO: 34315 - DNA, 122 bp, Homo sapiens
gtaaggccaagtgagggtcggctgccggcagaggtaatttatgtgctcctgaaaattgggcgggtccttctaactcctcctcccgcagctggggagcggttggcagcagcgggctggaaatt

SEQ ID NO: 34316 - DNA, 122 bp, Homo sapiens
ctgagaggacgcaaacgcccagactctggtgctggagtcaccactacacggctgtcaaagcgcttttacactgattcccaggaaggcagggcaggcaccattagccccattcacggcgtggg

SEQ ID NO: 34317 - DNA, 122 bp, Homo sapiens
gcaaatagacagggatcatctccacttccatttttgctccttctcaggataatagcagaccggtgatcacaactttagttttgatgagataacctccttatctcctaaaaatggtctctatt

SEQ ID NO: 34318 - DNA, 122 bp, Homo sapiens
aaaaaaaaaaaaaatgacattacattctagactatgtttcttccaactgaattggcaattcgcactggaatactgaatagccaacagaccacaaggaagacatcactcttagctcctgtttg

SEQ ID NO: 34319 - DNA, 122 bp, Homo sapiens
ggctcgcctcctcccccggaacagctgtctaaaatccatgggcgtggaaacgccacgccacgccccgctcccgacttcttcagctcaggccccagaactgaccaccccaccagtcctctgcc

SEQ ID NO: 34320 - DNA, 122 bp, Homo sapiens
acacacctcagtacactccaaaggcgcccctcggagcctgcagttaaggtgacaggagagcgagcggctgcctggtcctgcgctgtcccgagctctctcggcggcttcgggccacggagccg

SEQ ID NO: 34321 - DNA, 122 bp, Homo sapiens
gcgcggctgcggcgggtaccaaaaggaacagcgttttccgtgcagccctgcaggtccgggcgatgatttttagtatagtgaagtgttgttaccaaaccatgcaaacagagagcgagaaccga

SEQ ID NO: 34322 - DNA, 122 bp, Homo sapiens
tctcaggatatgaccaatgggagagtagacctaagctccttcatttgcatgcagacttcacgacaaaataacgaatcagagttggagaaactaaatcttcatttacataacattgtctacaa

SEQ ID NO: 34323 - DNA, 122 bp, Homo sapiens
gggcgacagtaataagagtaacagcaagcgtacacacggccttccaagtgtgccagacaccgctctaacactgaatccgcacaacccgaaaggcaggcctttttttttttttttttttttgc

SEQ ID NO: 34324 - DNA, 122 bp, Homo sapiens
gaagtcaaggctgcagtgggccatgatcacaccagtgcactctagcctgggtgagtgaaacgctgttttaaaaaaaaaaaaaaagcacagaataataagaaagcatgaaactgtaagaaaca

SEQ ID NO: 34325 - DNA, 122 bp, Homo sapiens
gactttttaaaaaaatactcttacccgtaattcagcctgaatgaggctttttaaaaaaatcgagtttcctgtttttatttaggcttcctcatttgcacctcctcctttgaggtagagaagag

SEQ ID NO: 34326 - DNA, 122 bp, Homo sapiens
cgcctggggcggtgggcgcctggagtagccaggcagagggcggggcctggcttgggtccacgcctggggcggccgggggcggggcctggctggaattgacgcgtggagctccggtggagggg

SEQ ID NO: 34327 - DNA, 122 bp, Homo sapiens
atcaggattataaagtaacctccactgtgtcctgagcttgatagacctggaatagcctcccgtggctggacctttttaccgctccccaccccccccacacacacgcgtgcccttacatgcag

SEQ ID NO: 34328 - DNA, 122 bp, Homo sapiens
agcgcggaccagagctcgccccccaaacacggcggctccaacatgtcggtgaacgtccggcggtgatgaacatgatgcacaaccaaagcgatgggtcctggcccgggttttgcgggcagccc

SEQ ID NO: 34329 - DNA, 122 bp, Homo sapiens
agagaattggacctgaacagcctttccatgtattctcacaaaacctctcacaggaatccacggattcactagaggtatgtgaggaggaggaggatgttgatgaggatgaaaactgacatgca

SEQ ID NO: 34330 - DNA, 122 bp, Homo sapiens
ctctagcgcccaccaccttcttgctgttcagccagaaatctgccatcagtcggatgatcccggacgaccagcacagcccggatctcatcctgcccctgcatggactgaggaacgtcaaagcc

SEQ ID NO: 34331 - DNA, 122 bp, Homo sapiens
cctcctggggagggatgcaaggactcgggatggaagccaagtggacggggcctaggacctcgcccccgagctccttccagccacccctgcccctttggctagaatggccttcgccttgcagg

SEQ ID NO: 34332 - DNA, 122 bp, Homo sapiens
tgtgtgcgcgcgcgcgtcccagtgcgcaagtggctggcggtgtgtgtgtagggggcggcccgggactaggaggggctcggggccaggccggagccgtggtaggctggtgcagcggctgcgcg

SEQ ID NO: 34333 - DNA, 122 bp, Homo sapiens
aggacaatacagaggaagggttcattttcgggaaggaaaatcacaaggccgtgtgattaacgctggaggaaatgcactcctttggagggtcccttctcaggagggctttgtgtcggggaaag

SEQ ID NO: 34334 - DNA, 122 bp, Homo sapiens
taaagcatgcaggctgcctggcacccggggctaaacaaaggccactgctctccttcaccgcgcagcccccaggcctgcagctccatgcccctcaggttgggtgcaatgcccctggtgcagat

SEQ ID NO: 34335 - DNA, 122 bp, Homo sapiens
agacctgagcccctccccggttttggcacctgacttaaggttcttgtatcggttcgaacccggagagcgcgcgttcgaaccaacagacaacacgaggcggtgtggagcaacatgctgtttta

SEQ ID NO: 34336 - DNA, 122 bp, Homo sapiens
ggaggaagatgccatccaaggggaaaacatgtcaggttgtgcacattagatctggtcattcgcaagtgacctctctgggaaggcaaaggatagcagagattgaaaaggaggctataaaattg

SEQ ID NO: 34337 - DNA, 122 bp, Homo sapiens
gggacgaggagaagaaaaaccactactcgtacggctggtccttctacttcggcgggctgtcgttcatcctggccgaggtgataggcgtgctggccgtcaacatctacatcgagcgcagccgc

SEQ ID NO: 34338 - DNA, 122 bp, Homo sapiens
aggagataaagaacgccctgactagattagcggactccttcgcgggagtgcagtcaagcacggctccccagtgcgagcacgactcggctgtccgtaattcctgccttgtgaggctctgtcag

SEQ ID NO: 34339 - DNA, 122 bp, Homo sapiens
ctcacacacgtgtgatgagtccgaggcggtttccagcttcagtgggcaaattccggttcccgcagcaggctttccggagatcagatcaacagcacgacgtgttgcaaactttgtggtcaaat

SEQ ID NO: 34340 - DNA, 122 bp, Homo sapiens
ccaggggcgaggccagtggcttcctgcgcgtgcccgtccccactcacagcccctgacctccggggcccccacgcaccaggcgctccctgcccggccccatctcccggagccctggaggctca

SEQ ID NO: 34341 - DNA, 122 bp, Homo sapiens
aactttctcaaggtcttatagctggaaaattgaggactaggatttaaagcaaggtgttgtcgctccagagaccacactctcagctgttatgcaatgttgtgtactgaatggaatcccatgat

SEQ ID NO: 34342 - DNA, 122 bp, Homo sapiens
accatctttgctccagggaggtcagctgacccgggctggcactggccctggcgcagttcccgcccctcccgggagcgctggcaccgccccttggcaccaccccctccccgcgcccccgcctt

SEQ ID NO: 34343 - DNA, 122 bp, Homo sapiens
tctgcagcacctcatcctcagcggcaaccagctgggccgcatcgcgccgggagccttcgacgacttcctagagagcctggaggacctggacctgtcctacaacaacctccggcaggtgccct

SEQ ID NO: 34344 - DNA, 122 bp, Homo sapiens
tggggctgagtcggggggtccttgctggttgttgcggctgagggggcccctgggctcgggcggggcgcgcagccgccacctgccccagcaggaggagccggccacgcggcgcttggagcctc

SEQ ID NO: 34345 - DNA, 122 bp, Homo sapiens
cggtcttctctgaggtatctggatgtgacgccaaaagggtcagaaccacattttcaattccgcttgataatttctagaatataatagacggtgcgaacaaagagaaaataaataaagcagtg

SEQ ID NO: 34346 - DNA, 122 bp, Homo sapiens
ctgccccggacacagcgacctcgggccctccccgcaaacactcctttggactcccagattcgcagccttgtgctgcagcgccacacaagaaaactgaaacaaaacccaacgcggccgtcgaa

SEQ ID NO: 34347 - DNA, 122 bp, Homo sapiens
ccccatcccgcccccgtcccgtcccgccccgccccaccccaccctcttgatttctggggccggtgaccaggcccaacgcagccttcaagtcggcccaaacacggtttctgcctcaaggatta

SEQ ID NO: 34348 - DNA, 122 bp, Homo sapiens
gtgtgccaagccttggcggggcaaagttggggcccggaggacggtaagacacagcaactgcgagttcccagagacagatccgggttccagccccagctcaccatgcactgggcgtgccaccc

SEQ ID NO: 34349 - DNA, 122 bp, Homo sapiens
gaaaatgagcccaataaggggtccgaacctttataaagcacacgaccccccagagtggaccgggccctggccgactccatcagccgaagcttgagatcttggatggtctggatggtcttgac

SEQ ID NO: 34350 - DNA, 122 bp, Homo sapiens
ccctcactggttagagttgcacttagaacagtgcctgccacatagtgagtgctgagtaaacgttagcttccgtatcagatcgaatatttcatcgtttccctggcaccagaggaggctggagg

SEQ ID NO: 34351 - DNA, 122 bp, Homo sapiens
gcgcatttctactgaggatgggatgcagccccacctctgaccctccctcagagcagcccccgaggggtagaggctctgcctctgctgcttaccaggccacctcctgagttcagcttcctcct

SEQ ID NO: 34352 - DNA, 122 bp, Homo sapiens
gcttcccaggccggtcttctgcgcggctcaagtagcccaggtctccacgcaacaatgaagcgtgggcggccccagcagcttcatttgcatatcgccgcggcttggccaatgggctgcgcagg

SEQ ID NO: 34353 - DNA, 122 bp, Homo sapiens
ggccacggcccgagcccagctgtatttaccctccacctccccgcctcatgaagggttagacggcttcgcccaagaattgagtcgaagcttgtcagtcggattggaaaagaacttgaagaaaa

SEQ ID NO: 34354 - DNA, 122 bp, Homo sapiens
aaccccgctcccagctcgctggaaacacgttgcaaacagtccgaagcagcgctgatgcgccggcgaaactcttgccccacctaaccccagcgacttgcgagcctactgctgccgaggagaag

SEQ ID NO: 34355 - DNA, 122 bp, Homo sapiens
ccctactccccgcccatttagcgcctcctgactgctgaatggcgggctcgccttggtctccgtgctgattggctggcagctgtacagcctggcacttcgccctccaccacatctcacctcct

SEQ ID NO: 34356 - DNA, 122 bp, Homo sapiens
tccctttaagaccggcagttcatctgcctcctgcctcaggcccccagcaaaccgcccctccgtcctgtgccaggtcccccaaagctcctcaccgtggtcgctccccctgaggtagcagggcc

SEQ ID NO: 34357 - DNA, 122 bp, Homo sapiens
aggtggctggccggggaccctggggctaacccctatcctctcctccaccccactacccaccgtgcgcctgctctgctccaggtgctggctgctgtctacaaggctctgagtgaccaccacat

SEQ ID NO: 34358 - DNA, 122 bp, Homo sapiens
tgccaaaagatggcatctctcctccaaccatgcagctgtcctggcccccctaccccaccgcgtctcctaggtgagaaaaacacccataaccatcctcacgggcacccagcaaccctgaaaca

SEQ ID NO: 34359 - DNA, 122 bp, Homo sapiens
ctaagagcagttggtgagtgggtggccaccaagagactagaagtggcattgggctgacctcggtccagtccctacctatgcatgcaaagcttgagaggtctctgacgttggaacaggctgtc

SEQ ID NO: 34360 - DNA, 122 bp, Homo sapiens
gggtggtgaaggttgggtcatttggtcatgagtcactctttctatagcagagaaatgacacggacctcaagccaaaatctgggcttgagttggatttgttccttgtgagtgtgagaatctgg

SEQ ID NO: 34361 - DNA, 122 bp, Homo sapiens
cacaggcgacgtaggccagcaaggcgatgcccagcagcagcttcatcctcctgcggttgacggcagacacgaggcgcagcagcgccttgctcaccatccccgggagccgcgcgggtccaggg

SEQ ID NO: 34362 - DNA, 122 bp, Homo sapiens
aaaaagggcggtgctaggggtagtgaccggaagcggctgcggttctcgccggttctcagccggggtttgatagttgtcaggaggattcgacgttcagtgcccagggatgtggaggtgatggg

SEQ ID NO: 34363 - DNA, 122 bp, Homo sapiens
ccaccagctccccgccgcacagggtctcactggggcggtaagcagcaatgcagcacgaggcgaaggccaagaaggtgagaagcaccagcatcgacttccccattgggattcccattggtgtc

SEQ ID NO: 34364 - DNA, 122 bp, Homo sapiens
aatgccttgcagccttgctgggaacacatttgcatactcagtttcaggtttaaatgcctgcgcataaaacaggattaaatagcacaacctggcgggggcaggggggagcacaagggtctccc

SEQ ID NO: 34365 - DNA, 122 bp, Homo sapiens
attttcaggcctttcatagaagactcaaaagatatccctccattagccagcattaccctgcgtctcccagtcatgcggggacaatgattcagtgcattggaggtttttggctccgtctacaa

SEQ ID NO: 34366 - DNA, 122 bp, Homo sapiens
gcgtttcccggtgttacagggcgtggagtcagcctgatccctgcagcacaccaggatttccgccaggccacagtttgcgagggtttctcaaggttccaggctgggccaccacctctttctcg

SEQ ID NO: 34367 - DNA, 122 bp, Homo sapiens
ctgcgggttccgcctgtggtcattgcgtccccattccgggccgtccggtcccagtccaatcggctctgggagcagaagaacacgtgaaagctgaacatgggttttccctaaatattgcctga

SEQ ID NO: 34368 - DNA, 122 bp, Homo sapiens
gatcctgtcttaccactactccacaccacctccacagaaaaatgctcatgagacatgtgccgtaagagaaaaaaagtaagacacaaatacattctcagaatgtctacttttgttatctggat

SEQ ID NO: 34369 - DNA, 122 bp, Homo sapiens
gccgcacctgtcagccctctgagctccgaggtgcggtgcaggctgagccactgcctgagccgctgctccacgtcctgggccttagcttcccgctgcagacctgccggccgattcttcgctgc

SEQ ID NO: 34370 - DNA, 122 bp, Homo sapiens
ctctcagagcctttactaagctccgtcgctgcgggacctctcagagcctttactaagctccgtcgctgcaggacctctcggagcctttactaagctccatcgctgcgggacctctcggagcc

SEQ ID NO: 34371 - DNA, 122 bp, Homo sapiens
tccatgatgaattaactgctgtgtcactactctgtgctgggtaagaaaaaggaaaacaatcgctgaaccggtttcccagggtttgtaaaagaaaaccatcaaagccaccacctcatttcact

SEQ ID NO: 34372 - DNA, 122 bp, Homo sapiens
aaaactggtgaatcttgaataaagtctgtaattggattagcattgtgccagtgttactttcgtagttttgacaattgtgctatggtgatgtaagatgctaacattgtggggaaactggacga

SEQ ID NO: 34373 - DNA, 122 bp, Homo sapiens
gaaggggctgcaaagcttctaccagaggttggggaagcagggaaggcttcttgaaagaggcggccattgagctgactgagcttcataggatgagcaagagtggttcccttggctgggcgcag

SEQ ID NO: 34374 - DNA, 122 bp, Homo sapiens
tggcagctggcagtgcaggaaatggggtccccgaggccttggggggcacctcccgttgttcgcccccacccacatccgctcaggacacgcttcccacctccaccgccccctttccctgcagg

SEQ ID NO: 34375 - DNA, 122 bp, Homo sapiens
tgaacttttgggagcacacattcgaaccatagcccatcttaggtctctaattacacagtgcgatcagccatgactagagccctgctaactgatcacaggtttgatgaaataaagaaagagca

SEQ ID NO: 34376 - DNA, 122 bp, Homo sapiens
cgcgggtatctgggggcgtctgcgggggtgtgggggctcccgccggtatctgggggcgtccgcgggggtgtgggggctcccgccggtatctaggggcgtccgcgggggtgtgggggctcccg

SEQ ID NO: 34377 - DNA, 122 bp, Homo sapiens
cagccgcttctcacggggcctaaatattccacagtacagcagagggtcccagcctcgacgcgttctctgaccaggttacagagatggctctaacctgagtccatctagatttgtcccaaatt

SEQ ID NO: 34378 - DNA, 122 bp, Homo sapiens
tccttatttttaaaagtggattattgccggatcccggtggtggctcatgcctgtaatctccgcactttgggaggtcgaggaaggaggatcgcttgagaccagtttggacaatataatagcaa

SEQ ID NO: 34379 - DNA, 122 bp, Homo sapiens
cattggctctccccgcgaggcaggtctggaagatcaagaatgaagctcggagctctctcgcggagcaaggacaccttcgggcttcaggaccacccagggcgtccaaaactgctgccagggct

SEQ ID NO: 34380 - DNA, 122 bp, Homo sapiens
ccgcgccagctgagccaggtggagccctactttcctctcctgctttctgcctgtgactagcgccgtcccctaccgcccgtcgaccccacttccatgtctggcggacacagctccccggaacc

SEQ ID NO: 34381 - DNA, 122 bp, Homo sapiens
ggcggtggtgacgaacgtgtgaggcactgcagcaaactggggggatgacgtgactatggccggggctgcccccgacgcttccatgtcagtgctgccgaccgggatgagcaggggctgtgtgc

SEQ ID NO: 34382 - DNA, 122 bp, Homo sapiens
cctgtaacctctttgtctgaggtcagctagccattgctaggcatcctgatcctgagaattcgttaaatgtttctggaacttggcgggccatctaggtctcagatataagagaagtggcctga

SEQ ID NO: 34383 - DNA, 122 bp, Homo sapiens
gctcgggtcgtcgtagaagagcacctgagacccccagggacgcggggccttccctggtgccgcccggacccgatcccgccgcgcgcgcacctgtagaaggaccacttgaggaggaagagctt

SEQ ID NO: 34384 - DNA, 122 bp, Homo sapiens
ccacagtgccccttccatgggtgagctgtccccaccacacagggaaagtgacgaaggcctcggtggcagggtgtctatcaataatgtcgtaacgattacaccccacgccccgctcagaggag

SEQ ID NO: 34385 - DNA, 122 bp, Homo sapiens
tacaaaatggggcaggataattgaactgcctattgggggaacctcaggatgagtaaactgcgtgacaaatcagggcaaagtaaatagacaggtgattgtctcactcagcctgatggtaagag

SEQ ID NO: 34386 - DNA, 122 bp, Homo sapiens
tgagaatctaatgccaccgctgatctgacaggaggcggagcttaggcggtaacgctcactcgcctgccacccacctcctgctgtgtgacccacttctaacaggccatggacccgtcttgagg

SEQ ID NO: 34387 - DNA, 122 bp, Homo sapiens
aaaatcgtgcgagtttaaaaacatccaaagtgagccgagctgggccccaagcctcggcctcgcgcactcgccaggcccaggaggcggagcaggcgtcgggacggcggcgaccagagcctgct

SEQ ID NO: 34388 - DNA, 122 bp, Homo sapiens
ctattcgtggtaatgtgacagaacaagctcggcctgtcagtccagccaaagtcctcacaacgtggactgctttggtctctggacacgttttctaaccctggagcccagcttcttcgggcggg

SEQ ID NO: 34389 - DNA, 122 bp, Homo sapiens
agatcaggaaagagtaacacagagacatggtaggtcaatgcagaggaagctgctgacctgcgggaaaagggggccacagaaaggactggagaaaggagaactaggtaaagagtgtggttgga

SEQ ID NO: 34390 - DNA, 122 bp, Homo sapiens
ggcgacaagcaggaggatcaggatcttctccatggtgagtgggacagctggtgtgggtggcgggagacagagccagctgtggtgatggggctataaaaggggccctgacctcacgagatcca

SEQ ID NO: 34391 - DNA, 122 bp, Homo sapiens
cgcggaggggggcggggcggggcgagctccgaaggggcggggcctaggaggcccagacaccgcccaaagccgccccgacccccaccccgaagggtccccgccgccgtcttagggctcagagg

SEQ ID NO: 34392 - DNA, 122 bp, Homo sapiens
cctcccctgctccctgcccttcagccacagtggcccctttgcttttccccctgaacataccggatgcttgcccaccccagggcttttgtgcttgctcttggtgctgtctggaacactcccca

SEQ ID NO: 34393 - DNA, 122 bp, Homo sapiens
actggccatcaagaccacaatactttgaaaaatctgggataagggttatcctcaaaacaccgccgagcagagctcacagatatgtgggtgcagccccagaactgcccatccctttgtacaat

SEQ ID NO: 34394 - DNA, 122 bp, Homo sapiens
gaactgggtcttggaaagtcccatcagtggtaattcctgtccaactccatgagggcgtgccggcccagcccgcgtgaaggggccatgtatgtggggtgctccctacttcctacagcctctgg

SEQ ID NO: 34395 - DNA, 122 bp, Homo sapiens
aagtggcttgctcaagtcccctgaggttagccgaggcctgcctgatgggctggagaaccgcggcgctgcctgggtcttgggccagtgggtgggggccatgaggatgaggagtctgtggggtg

SEQ ID NO: 34396 - DNA, 122 bp, Homo sapiens
tcccagttagttctttctggggagccgcccctgcagatgtcccagcttgctcacaccagccgtggaagaagcctttatactgagagaagctacagacccctggaaagctggggacccacagg

SEQ ID NO: 34397 - DNA, 122 bp, Homo sapiens
cactcagaccggcagccccggaagccctcccagtctcccggccgccaccgccgccgctggcggcttgatgttgtcatcactgcgcgcccgtttctgtcataagctgtgggatccaaccagag

SEQ ID NO: 34398 - DNA, 122 bp, Homo sapiens
agggcacacttttttctccttaaggtttataagtttggcttcactgattctgggaccccacggtggccaaggacaaagggagacatggccatgctgggagaagagggggtaggggtgacaat

SEQ ID NO: 34399 - DNA, 122 bp, Homo sapiens
gatcagggtgtgctttgcttctctgcagagaggcagcctgcctgacctggccgactcccgcgccacctggctttattcctctgaaactgtctcatgcgcttaggggttccccctcgggaatt

SEQ ID NO: 34400 - DNA, 122 bp, Homo sapiens
cggaagagactctccgcggccacgccccgagccctcgaatgcgagccaatcgttgctcggcgcctgaaggggcagtacccaagcgagccatttaacatggcggaggatgtttcctcagcggc

SEQ ID NO: 34401 - DNA, 122 bp, Homo sapiens
aggtagcgcccacgcttacaccgaccgacctgctgagaccaaaaacagtttctcgctcctcgcctctgtccctcagtcagaagctcgcccgctcaactgccgcaatagggacctgctttcca

SEQ ID NO: 34402 - DNA, 122 bp, Homo sapiens
acgggggtattgaggttggcactaactcctgggatccctttgctctagctggtctcaaagcgggcagggtaggacttaggccgtttctggggtcgcagtcatgatctccaacgcttgggaaa

SEQ ID NO: 34403 - DNA, 122 bp, Homo sapiens
acatcccctctgcacccccagcctggcagcctgccctgtaggaatgttaattagcatccacgatttaattaattcagtagctaattaatgattggggactgggggctggggagctggggtgc

SEQ ID NO: 34404 - DNA, 122 bp, Homo sapiens
aggaaatcgcgcccctccctggccccggcgcggctccttcggggaatcccgcagggcagccgggagccccagaggcaatcccctggagggagaattgagacccccggcctatccgtaagtta

SEQ ID NO: 34405 - DNA, 122 bp, Homo sapiens
gctgcgcagccggggagggacgcaggcaggcggcgggcagcgggaggcggcagcccggtgcggtccccgcggctctcggcggagccccgcgcccgccgcgccatggcccgaagaccccggca

SEQ ID NO: 34406 - DNA, 122 bp, Homo sapiens
ggggcatcaagggcggggcaggggctcacagcacgcagtcatggtagctctcccgagctgcgatgtgcaggggggtgtccccatggtagttgacagcatggaggtcacagcgcgcattcaga

SEQ ID NO: 34407 - DNA, 122 bp, Homo sapiens
agcacagtgcagcatccggctcatacatttgggataagcactggccatcattatgaatgccgtctgatgcaatgctagcattttgggcatgtgcctcccagtgcagacatggtaatcaggct

SEQ ID NO: 34408 - DNA, 122 bp, Homo sapiens
agccagcggctgctaggaggctgtgtccgcaagccagcggggcgaggcgcctgggccctgcgcgtcaggtcccggcctggggcaccggggctgccagcgtcggaggaggtgcgggcgcgggg

SEQ ID NO: 34409 - DNA, 122 bp, Homo sapiens
tttgcttctattcaggagctacatctattcctttcaacttcatttctctgagcctgttaacgctggctttttgttttaaacaattgatatgctcctctctcttccagtagctgcgaactgat

SEQ ID NO: 34410 - DNA, 122 bp, Homo sapiens
agaggaaaggcactggtaccaactaccctacgaaatagaaagagataacactattatagtcgttgaggtggggcccattccttacaagtggagatagtaagtgcaatgggacttcttgggta

SEQ ID NO: 34411 - DNA, 122 bp, Homo sapiens
cttttgatcatgaggaagccaccaggtccctggtggagttcagcagatgtgccgggtgggcgactctggtgggtgtgaggatgtttcctttcctgctgggaagtcctccaagctcttgtgaa

SEQ ID NO: 34412 - DNA, 122 bp, Homo sapiens
ttcagtcgtttggtcactcaacaaacattcattaacactcaatttctgacaagcaagtatcgtggtagggattgaagtggttggtcatgcccttaagaaagtcctaacccaattggagagcc

SEQ ID NO: 34413 - DNA, 122 bp, Homo sapiens
actcctggtaaacgtccttcttctaagaaagaagcatttcataaagcccccaactcgccgcgcactttctgccccactgggctacagcggacctagtgtgacgctgcacgttttaaatcggg

SEQ ID NO: 34414 - DNA, 122 bp, Homo sapiens
acgtgactccaaactgcatctctacatttaggaacagagacccgccttaagagactggatcgcacacctttgcaacagatgtgttctgattctctgaacctacaaaatagttatacatagtg

SEQ ID NO: 34415 - DNA, 122 bp, Homo sapiens
cctcgccataacgagagctgaacagaggtaggctccgcagaccttggcgtccgccattagcggcctggcgcaaacacaaatgagtgttttcacaaaagcatgcaaaggttgtgaaattccaa

SEQ ID NO: 34416 - DNA, 122 bp, Homo sapiens
agggctctgtgagacagcctggtgcctggcgggggtgacacagccccactgtctgccccgcgtttacagccaggaaccacacctgagccatttccaagggtgacatgtgtcacagaactgtg

SEQ ID NO: 34417 - DNA, 122 bp, Homo sapiens
tccattttggtaggtttgtataaaaatactctctttaggaaaataaatagcagctgccctcgctgtggaggcttggattccctggagctgaaggcttctcaaagctgagatccgcagatcag

SEQ ID NO: 34418 - DNA, 122 bp, Homo sapiens
gtgagcgtgagcgcgctgggaggccggaaacaaaggtggatgcgcgtgaacagacgccctcgcaggccgccggaagcaaaggcgtgagcgcgcgtgcgtgcgtgtgcgggtgcgtgagcgtg

SEQ ID NO: 34419 - DNA, 122 bp, Homo sapiens
gaggggcttctgggggcgggcttctgtcgggccaattaggatcgccgcagggaaggcacgcgccgcggctgagcaacaggggcgcgcgtcaccttctctagttaacccgcgcggccccgggc

SEQ ID NO: 34420 - DNA, 122 bp, Homo sapiens
aaaaaggaagcacaggcgattctcgtcaaagcagactttattggggcgacagggccgccccgcacgcgccagccgctccccgcgcggcccccgggccgcccacccgcctcaaccccgctccc

SEQ ID NO: 34421 - DNA, 122 bp, Homo sapiens
ctcgccttccgctgttctcactgcaaagactcagggtcttgacaccaactttcagcctcccgtgtttgcgtgcgggcgctgggataccaaggtagtgagatagcacctgagtcccagtcaga

SEQ ID NO: 34422 - DNA, 122 bp, Homo sapiens
gatttccaaagtgcatgctgcttctattcacaggtcagagttcagagccccagagccacccgggatgtggcggcaaggatgtggccggtcaggaggtgagggactgaatgttcttgagcatc

SEQ ID NO: 34423 - DNA, 122 bp, Homo sapiens
tggctcctataggtggcgctgtgacaaggtgcggtggccgggagaggcggctgggggactcgaagactgcgggaaattttctgcgactccgacgctaacccgctgctcccagcctccgcttc

SEQ ID NO: 34424 - DNA, 122 bp, Homo sapiens
actgagagacgggggaggcacaggctccacgcgccgcttccctggactgctaggaggcggcgatggcgagtcaggaggaagcctatttttagaaacgcttaagtgcccacgatcttctgacc

SEQ ID NO: 34425 - DNA, 122 bp, Homo sapiens
ggcccacgcccagagaccgtgcgaggaaagccaacctcgtcctgcctgccctcccagccgcgggggagggggccaccgcagtacttcaggacagttacatgggcacagcctcctccgtcctg

SEQ ID NO: 34426 - DNA, 122 bp, Homo sapiens
taggatctttaccttatatagtaaatctctgcccctcgacctggcctgtcgtatctgggacgtgttctgtcgcgatggggaagagttcctgttccgcacggccctgggcatcctgaagctgt

SEQ ID NO: 34427 - DNA, 122 bp, Homo sapiens
agctgccgggacctccttgcagtctttgcacgaggcctgcctgtgtcatgccatttaaatcgcgtctgggccgggtcggtggctcacgcctgtaattccagcactttgggaggccagggcgg

SEQ ID NO: 34428 - DNA, 122 bp, Homo sapiens
tacatggcgtataatgaaagagtttcaggagaaacctgtctggttctgttggaaaaactccgtctcctggcgcaggacagccccaaacacctctccctgcaagtggctgtgcacgtggccca

SEQ ID NO: 34429 - DNA, 122 bp, Homo sapiens
atcagcagcaaacacaaagaccctggcacacatagccttgagcccaatgccagggcttcacgaagaagcccacgatatgcaagagaagcccatgatatgcaggagaagcccacgacacgcag

SEQ ID NO: 34430 - DNA, 122 bp, Homo sapiens
tctaaaaaatttaacatgtatatttgtcttaacaaaacataaagtctctcaatatcaatacggccatgagggaataagagggtccagaattactgtctcaccataaacagctagaaattggg

SEQ ID NO: 34431 - DNA, 122 bp, Homo sapiens
gcgacgctcgtcctcacacagcaaaacaaaactaaaagtaaccttgtattgtttacaaagcgcccagtaatatgtaaacagtgaacttgaatctgtcttgctaggcggacgaacgggcaaag

SEQ ID NO: 34432 - DNA, 122 bp, Homo sapiens
agggttcaaactggcttgtagtcgcggggaggatattggactcagcacccaggggtcctgcgcaggagaaaccgctgtgctgtgctctttaaggtgctgggccgtgtgcagtctgggaggaa

SEQ ID NO: 34433 - DNA, 122 bp, Homo sapiens
tggggagttgaggctgtttaccaaggagcacagcggattttgatattttaacagctgctacggcctggcttgagcaggccagcttgagtatgacccaggacagggtctcctggtggctggga

SEQ ID NO: 34434 - DNA, 122 bp, Homo sapiens
gcatttcccttcaccccactcagcgtgtgtcactcacagcagcccaagagatactaatgccggttagatgagaggataacctacttaatgtagccctcaaagccaccagtccaatgaggtgc

SEQ ID NO: 34435 - DNA, 122 bp, Homo sapiens
gggagggggcagctcatggggcctggctccaggggaggaggctcatgaggaacccctgcacggctggcatggccctgggcccagcttccagcagggacagggatcctggagtgtggcaggag

SEQ ID NO: 34436 - DNA, 122 bp, Homo sapiens
cccaggacacgcgggcgaaggcagcttttgcagtgcagcgtggggcccgggggcccggcccgcgactcgactcatctcgattcgaccggcgggcggcggcgagaggaggccaaggcctgggc

SEQ ID NO: 34437 - DNA, 122 bp, Homo sapiens
ggtggacacacgcgcacagtgggacccgggagagatggtcctgggtgttaacaaaacatccgatgagagggatgggggcgctggaaagaaaccggctgcgggagccaggggaagggttgggg

SEQ ID NO: 34438 - DNA, 122 bp, Homo sapiens
gcgcacaggccaccggccatagcttgcccctgtgggccaagtccccagtgtggtggccttcgccggcttgccctgaggcacggcccgacgggggcgccctggaggcgctgttggcccggtgg

SEQ ID NO: 34439 - DNA, 122 bp, Homo sapiens
gggggtgctctcggctgccatggcaacggaggggccgcccgcttccccgcggggcgaggccggctctcccaggactggccacattgcagtcacgcgctgtggccccagtcctgttagcatga

SEQ ID NO: 34440 - DNA, 122 bp, Homo sapiens
aatgagatggacagacctgggctgtgggctaggagggcagtcagctggcctagggtagcccgggctggtgtcagggtaaggagaggaagggagggatgagggctgattaatttttttcaccc

SEQ ID NO: 34441 - DNA, 122 bp, Homo sapiens
gcctggagcctgcagaagtgaggcaccaggactccagctttgcacacaaacctcaggcctcggggggccaggaggaggcccccaacccaccctcagcacaggcgcaccagcttgcagccgcc

SEQ ID NO: 34442 - DNA, 122 bp, Homo sapiens
caccctccaaactcaactgggagtttccttcagcaggaacaccctgacagtccccagagccggcaggagccccttcctaaaccctcccgggtatctgtgctgtgggagggggtctcggggaa

SEQ ID NO: 34443 - DNA, 122 bp, Homo sapiens
cggtgcttcgggcgaccttgggttgctgctggaaccctgacgtgcagcaggcccaggccacggttcgcggagagcgtcgggcgctggtcctcaagatctcccggctctgcccttgcagagct

SEQ ID NO: 34444 - DNA, 122 bp, Homo sapiens
ttagagaacatagaaaaatcctcaggtagaaaagaaatcatatttaaaagacactgtaaacgcatagtgttttgttttgttttgtgacggagtctcactctattgcccaggctggagtgcag

SEQ ID NO: 34445 - DNA, 122 bp, Homo sapiens
tcctgctagggcgtctgggagaacctagaccctgggggccagcagggactcagctgcaggcggtggtggcctgtcccaaccttgggctatgtggagggcagtcctgggtctgcagaccaccc

SEQ ID NO: 34446 - DNA, 122 bp, Homo sapiens
catctctgtgtttatacatcccttgtctttgtgtttatacatccctttgtgtttatacatcgtcttgtctttgtgtttatacatacctgggaaggtatccatgttcatcaggaggcatgtat

SEQ ID NO: 34447 - DNA, 122 bp, Homo sapiens
gcgcgctcccggaagtgtgccggcgtcgcgcgaaggttcagcagggagccgtgggccgggcgcgccggttcccggcacgtgtctcggcacgtggcagcgcgcctggccctgggcttggaggc

SEQ ID NO: 34448 - DNA, 122 bp, Homo sapiens
ggactgtcccttatggcttagcaatgagcagcagggcagttcacaatggcgagacgcagacgcctttggggcggtgcagccagagcggagtgcgcctgggactgagtgtcctcctcggggac

SEQ ID NO: 34449 - DNA, 122 bp, Homo sapiens
tgtgtagttttctggggtgattttaaaggttttgccagcctccccgattgggactggtggcggggaggaggaagatcgagcgtgagccgtcagttgctctggcctggtgcagcgtctttgtt

SEQ ID NO: 34450 - DNA, 122 bp, Homo sapiens
gacaaggtcaggtcagaggtgaaagaggcaggggactgcaggtggaatgaaagcaggaaccgttcagaccctttcacctatgaggatactgggtctctgaaaggtgaacggagaggcttgca

SEQ ID NO: 34451 - DNA, 122 bp, Homo sapiens
taacaaaatccaaactaaaagcaaccacagcaataaggaagatgtcttgactcagaagtgcggaggcggcttcagataaagtgagtgtggatcacacagctgaggatcacacgggctccatc

SEQ ID NO: 34452 - DNA, 122 bp, Homo sapiens
cagatttgaagacctccccgaagatctgaatgatgtacatctggagtactttgaagaagccgtggactttatgctgcagcatccaaaggtgcgttctggtgatcacctgagtgcagaagaga

SEQ ID NO: 34453 - DNA, 122 bp, Homo sapiens
gcttatccatcccccgagccgggatcaatcgatcttcactctccccagctcaaatgtcagcgatccactctccaacgtgggctttgtaaacatttgttggatggctgaataaacagaatgaa

SEQ ID NO: 34454 - DNA, 122 bp, Homo sapiens
gccgcacaccgaccgggctggctctgcctctccctccctgacccggcaccacgtgcctggcgtccttgaacgcttcagatttttatcagtgttgccttttcgtttgctcttccgtatcgcca

SEQ ID NO: 34455 - DNA, 122 bp, Homo sapiens
gccgggaccatttggagcaggatgtggtaaccaccaaatggaaaccacggccttttggctcgacctagagcatgaatgtagcaaagcgaagccctgtacactttataaaaaccagcagaaag

SEQ ID NO: 34456 - DNA, 122 bp, Homo sapiens
gtgcctgcacagcggaacccctcacctggcatctgaagcttccccttgtggccgccacctcgttttccctggctgcctgcactgccggaaagaactaactcggggcccctcagctggacagt

SEQ ID NO: 34457 - DNA, 122 bp, Homo sapiens
cgaactcccgacctcaggtgatccgcctgccttggcctcccaaagtgctgggattataggcgtgagccaccgagcccggcccaaattagaaatatttctaatcagatatttccatggttata

SEQ ID NO: 34458 - DNA, 122 bp, Homo sapiens
tggcatttctggagaaacggaggctaaacagcctgaagcttcgatagtagaagacaggggcgcacacccttcagtcctggacattccctgggtcctcaactgtgagaagccgcaaagggctg

SEQ ID NO: 34459 - DNA, 122 bp, Homo sapiens
ttgttaatattttcagcaccttctggctaaaataatcccataacccactgaaccgtgcaccgcccccataagtggtggtacaaggaaaggtcagggccaccaaacctatcgcacaaccgctg

SEQ ID NO: 34460 - DNA, 122 bp, Homo sapiens
cagcagagccgcgacaccagcagagccgggacaccagcagagccgggacaccaccagagccgtgacaccagcagagccgggacaccaccagggccgggacaccagcagagccgggacaccac

SEQ ID NO: 34461 - DNA, 122 bp, Homo sapiens
tttccacgcgacgggagcccaaggagcaaggcagcgccaatcgatgacagagcgtgcgaacgccggctgctggatgcccaggggctggagcgcggggtgtgtggaggagcacggtcgctgtc

SEQ ID NO: 34462 - DNA, 122 bp, Homo sapiens
gcatacaatacagtattattagctgtagtccatgtgatgcatttgaacttactcattctacgtaactgaaactttgcaccctttgacaagcatctccccatttcctctacctcctgcccttg

SEQ ID NO: 34463 - DNA, 122 bp, Homo sapiens
attggctggtggtagcagctgctggcatcacgcaattggcttggctgcagagtgagcccacggaagagggctctccgcaccgactctgtgactcaggcttctactaccaggctcatccgagg

SEQ ID NO: 34464 - DNA, 122 bp, Homo sapiens
ccgatgccaagtgtgtggttccagttgcgacggccccccgtgaagtggcttccggatgtgcgaatgaaccaggcagagtttcactggccaaatagaccccagcaaagctgaagttaactccc

SEQ ID NO: 34465 - DNA, 122 bp, Homo sapiens
ggcccgggagcgcaggagcagcctccacctgggcaaaggctcggcggaccggcgggcaagcggccctggaacaaactcagcccgcctgcggttcccaggagcagcggctcccgggcggtctc

SEQ ID NO: 34466 - DNA, 122 bp, Homo sapiens
cgtggagggccggcgagcccggctcgggcagggcagaggcgggcggccgggggctggcggcgaacacttagtggctaattcatgactcatgactcatgcgcaggctcctcttcagtgacagc

SEQ ID NO: 34467 - DNA, 122 bp, Homo sapiens
ctgaggcctctaaagagcttagtttgcccctctgggaagtgaatccttggcttatggtgccggggggaccctggaggccccctcacacgaaggctgcttcttgcagagtcgctcaaaagtag

SEQ ID NO: 34468 - DNA, 122 bp, Homo sapiens
gacgctggccgccgtgcctcgtgacaggatgatgcccacgagggtggtctgtgcaatgtccgagggtggcgaggcaaagccatagtctggggccggagtgaggttacatcagcttggcacag

SEQ ID NO: 34469 - DNA, 122 bp, Homo sapiens
ggatgaggttggagctgcgaccaaaggtcttcccacactcgtggcaggcgtagggcttgtcgcctgtgtgcacgccctggtgctgaatgagggctgagctgtggctgaaggccttcccacag

SEQ ID NO: 34470 - DNA, 122 bp, Homo sapiens
gaagacgaggtgcagcaggtgcccctcccaagctgggaacagctgggggagtccggtctgcggggagatgacgcagagctccagcccagggcctggggcggccgtactgggacattgattct

SEQ ID NO: 34471 - DNA, 122 bp, Homo sapiens
tggacagatggtttcagacagagtcccctcaaactcttcctgcttatgtgactccatagacggggagatggacagcagcagcgcctaaaacgatggctctgggggtggagggccaagccttg

SEQ ID NO: 34472 - DNA, 122 bp, Homo sapiens
cctgcctctgcctcccatagtgctgggattataggcgtgagccaccacacccggccacagcgtactttttagaaatgctttgtgaactgctttaacctacattgtctaatcagggcctcctt

SEQ ID NO: 34473 - DNA, 122 bp, Homo sapiens
gctgccggagccaggttccccagaagcaccctgggccgaagcaacttaccatgtcggtgccgtagacgggagaggtcatcttgatctcccagaagtgctggccctcccccagctccttggtg

SEQ ID NO: 34474 - DNA, 122 bp, Homo sapiens
accctccggaaacttccatgtgtccagccacctggaagcccatccacacccagtccttttcggtttttttatagaggcttcactataaaggcgcgattgattaaatcattggccacctgtaa

SEQ ID NO: 34475 - DNA, 122 bp, Homo sapiens
aacttgacttgccataggcctagtctatgatagggttcataataacatccttcaacatagcgttgcaagagctggcgctgtttctttgggtatggccacaattgcctctgcaccttgtgtgt

SEQ ID NO: 34476 - DNA, 122 bp, Homo sapiens
cagcaatgaaaaccttgtgccaccgggtggagggggcaaatcgtcttgaaagcctcccaccgcctggcaccaggtgctggggcagagccaaggggagctgtgtacttagctccttttttggc

SEQ ID NO: 34477 - DNA, 122 bp, Homo sapiens
caccttcgtttggaggttttacagctgacccgccaccctgagaactggaccctgcaagcccggtggcggcttgtggggctgcccgtccacttgctctttttgcggttctacaagcgtgacaa

SEQ ID NO: 34478 - DNA, 122 bp, Homo sapiens
cgccaggcgggcgtcgggctagtgggcaggcgtggcttccggctagagggtcgtggaaggcgcccggttttgctgcgcgttcacctccggtcccgccccctcacggggcgggttttcggccc

SEQ ID NO: 34479 - DNA, 122 bp, Homo sapiens
ccgcggaggtactgatgagccatcaaaagagggacagcctgggtctgctgcagggaggcccggatgctgatggacaccgtctctctgcagaacgaaacaacgaccttactgttcacaaggtc

SEQ ID NO: 34480 - DNA, 122 bp, Homo sapiens
cccttggcaccaccccctccccgcgcccccgccttccaggaaggggcggggtctccgagacgggtggggccggagctccaagctggtttgaacaagccctgggcatgtttggcgggaagttg

SEQ ID NO: 34481 - DNA, 122 bp, Homo sapiens
catcccagtgcaggtcccggttgatccagggccccaggggggttccattttgagacaccccgcaccccagcccgccgctccggccgtctccgcacttacagacccgggggaaggccgccgtc

SEQ ID NO: 34482 - DNA, 122 bp, Homo sapiens
taagaaaaaaatcaatgcaaaagccttaaagtccatcgtgacagtagcagcctgtgctagcggggagggagatgggttaatagcgccagaagggtgcactgattgaaggagtgggcgcaggc

SEQ ID NO: 34483 - DNA, 122 bp, Homo sapiens
ccgtccatggctttcagctgccagcagtggcttggggactccatgctgaaccagatccatcgctgcccctgccgcctcggggagcgtgggagctgggcactggggttgtacatgacctctcg

SEQ ID NO: 34484 - DNA, 122 bp, Homo sapiens
gcccctcctcaccccaagtcctggggccctgggggtccagccctcagctgccctgacacccggcctcttcaacaggtgcagcccctggtcctgctccgccaccaccagcactttgaggagtg

SEQ ID NO: 34485 - DNA, 122 bp, Homo sapiens
gatgaagggtccgctctcaagcattttagctagcgaagttacagtcacatccggcaaactcgcacactgcagatctaggactaccccgcgcggccccgcccactttcccagcagcgggacgc

SEQ ID NO: 34486 - DNA, 122 bp, Homo sapiens
ccgacgccgtcgcccacgcccccctgcgcccacttccccgcctccgctctcccgcgggggcggcttctgctggagtcccggcacctgggacccctcggagatcccgtgctccgcttcccctc

SEQ ID NO: 34487 - DNA, 122 bp, Homo sapiens
tgcgcctctccgcgcggcccgccctccccggcgccgggctcctctccgcgcccctgtcggcgcggaaccctggcctcgtccgcggcccagctccctggagcctcgcatcagcgggggcgccc

SEQ ID NO: 34488 - DNA, 122 bp, Homo sapiens
ccgaaggctggcatttcccaagtttccgctgcagctttcctgggcgccgtcgctcttactcgttgccttcattggtccttaaaatcaggtcgtttcctggacctgctgacgtcctctggcag

SEQ ID NO: 34489 - DNA, 122 bp, Homo sapiens
gccgccggtcccacaccccttcctgtggcccaggtaggcttggggtcagagcccgaggctcggatcccgctgtgtcccctccgtagttcggggtggggagggatcctttgcaagtccctgcg

SEQ ID NO: 34490 - DNA, 122 bp, Homo sapiens
ccctgcgctcggcggcagaggcgcccggctggtgaccaggggaagcctcctgggctgacccgtgcacagccacagggaccagcccagacgttctctacagcgggggctgcaagagctagggc

SEQ ID NO: 34491 - DNA, 122 bp, Homo sapiens
ttggtcatgattattaaacaagaaagggttacagagacagttttcattgggagaagcttgcgtatgaggatgaaatataaatctactgttattattgacttgactctgagttaccattaatt

SEQ ID NO: 34492 - DNA, 122 bp, Homo sapiens
ccctggggagggagcctcgaccaatgctgctgcgcagggacggacggagcgtgaagggcccgaacaacccaccctgcgcaggctccagtttgcagggtagacaagacaccgagtcccctcct

SEQ ID NO: 34493 - DNA, 122 bp, Homo sapiens
cggggcgtgcaggtagccggccggccgggggtcgcgggtatggccgaggccaggaagcggcgggagctacttcccctgatctaccaccatctgctgcgggctggctatgtgcgtgcggcgcg

SEQ ID NO: 34494 - DNA, 122 bp, Homo sapiens
cagagccatggcctcccacctgcgcccgccgtccccgctcctcgtgcgggtgtacaagtccggcccccgagtacgaaggaagctggagagctacttccagagctctaagtcctcgggcggcg

SEQ ID NO: 34495 - DNA, 122 bp, Homo sapiens
cccgccccctccctttcttgggtgctttgatgggtttgaggtgtttataggcttgattcacgaccgagttaccagggttttccacggaaataacttattaaaggggccgtgcacacagcgac

SEQ ID NO: 34496 - DNA, 122 bp, Homo sapiens
gtggcagcaaagatcatgcggtcttttgaaggggccctgcgctccttcgaggaggtcctgcgctctttagaggagcccctgcggtctatagaagaggccctgcattctcctgatggagtcat

SEQ ID NO: 34497 - DNA, 122 bp, Homo sapiens
tggcggagcctttgacgtgggttccagcgttgccgagggaaccgcgtgtttacgcaggagcgcggggcgggacggcagcccagtacccgctgcaaagccgacccgcgacaccgccactccgg

SEQ ID NO: 34498 - DNA, 122 bp, Homo sapiens
cctataattttacctccccaaaccagctgccggagctgtccaaccgggctagaaggaagccggcaggtgcccatgtcctgagcactgaaagcacaagtgaaagtcactgtgtgagtgacacc

SEQ ID NO: 34499 - DNA, 122 bp, Homo sapiens
cattttcgtgttccacttaaaagctaaattttgctcatgtcatcatctagaaaatgcacccgctggccacaataaatcatttttgagatccgaggacaggatacaatttgcttccatgtgga

SEQ ID NO: 34500 - DNA, 122 bp, Homo sapiens
taatccaggcaaaaggccttgaacttgagcattttcaccttttggtctccagctggaccacggtaacgtctccgcggagacacggagaggggctagtgggaggtggagaaccggctgcttcg

SEQ ID NO: 34501 - DNA, 122 bp, Homo sapiens
ggtctagcggtaacgccagcatctaggaagacgcccgttgccgagcggaaggtggtctagcggtagcgaaaagtgtcaaggaaaaacacccgcgacttagcagaccagggaagggaggctcc

SEQ ID NO: 34502 - DNA, 122 bp, Homo sapiens
gaagagtggcttgtaaggcccagttcaaatgccacctgctcagaatttctatacaggaggcgtatggcctgccagtgatttggaagggagtgcaggtcatgtttaaaaaaaatcatttgttc

SEQ ID NO: 34503 - DNA, 122 bp, Homo sapiens
tcggaccccaggtatagccgtgggtggcattaccggaaaaacaaatttaataaagagcggcgccaatttgaaaggatgagctcatttgaaactcaagctgcagggctggcgcggccccgctg

SEQ ID NO: 34504 - DNA, 122 bp, Homo sapiens
aaggagagaatatccactgagtccagtaaatgcaagtcaggaacattaatcttcttcactcgctcttgttttatccagagtagataactctgttttccccctatataccccacagtttatag

SEQ ID NO: 34505 - DNA, 122 bp, Homo sapiens
acgattgttggtaatgacggcaaaatccctgccccttccagtggccagggctgcctttcccgtctgataagtgacacagcagataaggaggtcgcgctgggggggggggtccctctgccccc

SEQ ID NO: 34506 - DNA, 122 bp, Homo sapiens
gggcccggccagggagggcgcgcgtgcgagggcgggtcaggctgcactcagggtctcggtcgccgccactcgccaccctgggatcaaccgcctgagtaaatatgattttatacggattatgc

SEQ ID NO: 34507 - DNA, 122 bp, Homo sapiens
aacaccttgcacactgcgaggttttcattctgaaagcgattcttgcaatcttgcccgcagcgccatttcatgcggctctctctcctctgtgcctcagtttccctgtgtgtaaaatgtgggag

SEQ ID NO: 34508 - DNA, 122 bp, Homo sapiens
ctagatgttgattccacggtccagcctaaggcccctcagtctctctgtgcctctggaagccgaatgaggggcagtcaaggttgaacattggtcagtcagttctccgaccatttattgcaccg

SEQ ID NO: 34509 - DNA, 122 bp, Homo sapiens
cgggccccggatgaccactcgatcttcttgatttctgtagctaggaccttgggggtcttgcggggtctctcacacacggggctatcgagcagtggacgccaggaccaggcgggccccagctt

SEQ ID NO: 34510 - DNA, 122 bp, Homo sapiens
taactgaagattgaggcactggaataactaatgttgggtaagatagggtaagaactttttcgcaataaggtttgcagctcttgggattctcacttgataatgctgtttggataaaccatcat

SEQ ID NO: 34511 - DNA, 122 bp, Homo sapiens
caggtcccgagcactgccccgcgggaaggcagctaagccccggcgagaaatggagctcagcgccggtgggctggcactgctgggggactcagtacaccctccgcagccgctggtccgggtgc

SEQ ID NO: 34512 - DNA, 122 bp, Homo sapiens
gcctccagcccttataacccggagccctccgagagggcggggaagggggcggggaaggggcggggcttcccccgcccgcctgctcccattggcccccggttgtcgtgacaacgacgggaccc

SEQ ID NO: 34513 - DNA, 122 bp, Homo sapiens
aaaaaattacagtgacgattccaggaaacacaccaagaaggaaggggttggcttgcagaacgtggtgcttttaattcttgctaggcaggtctccggggctgtgatctaacacaaattctgag

SEQ ID NO: 34514 - DNA, 122 bp, Homo sapiens
gtcgtgtatgtggattacccgggccccgcctccctcacacagatctacggcaccttcaaccgcgccatgctgaggctcattccatccctgcggacgtatgcagagccgctcactgctgccat

SEQ ID NO: 34515 - DNA, 122 bp, Homo sapiens
tcccctgccttgcctgactcataaggcttttaattctcacagccttctccctcttcaacccgttttaacaccacagatactggctggctctcagccccatatgcaggctcaggccatcctta

SEQ ID NO: 34516 - DNA, 122 bp, Homo sapiens
ctcaaggatcagcgggtctctcattatcttgggtgggggatttgtggcctcacactgtgtcgagcagattgtgacctcctccaggccttcagagactcctgtggttccggcaggtccaagaa

SEQ ID NO: 34517 - DNA, 122 bp, Homo sapiens
tcaacagctcaaggaactggggtgctccggaaatggggccaaggctgctgggcagcaggacgctcagggccttggcctcaggagaggtaattccccactcggagatcggtcttgttgctgca

SEQ ID NO: 34518 - DNA, 122 bp, Homo sapiens
aacggcatcaggagagacagagatgtgaaggagggaaggagcaggagagcaggaaggaaacgcaggaggagggagcagcatctcctgtgaacacagaggagcacctgtttgctgttaaaatc

SEQ ID NO: 34519 - DNA, 122 bp, Homo sapiens
ttggtgtggggggggattagcacagccgctctgacctacccctctaatcccccacttagacgggtggacttcccgctggatcgaatccaaacacaagtcagattttggcaaattcgttctca

SEQ ID NO: 34520 - DNA, 122 bp, Homo sapiens
gcagccgcagcttctccaggctgttggtgtagtagtcacaggcgttgcacttgaggtgcacggggttgccgatggccacacacttgagcctccactcgttggccttgccgccctccttgatg

SEQ ID NO: 34521 - DNA, 122 bp, Homo sapiens
gcgctgtcctgccagctaacttttgcccacggtttccactgcccgggtgacctttctgagcggaacctatcctgaaaggctgggaggttccctgatggtcccaggaagggcgtgatgcagag

SEQ ID NO: 34522 - DNA, 122 bp, Homo sapiens
cactatcaggaggtaaagagtacagggatgtgctgaacatcctacaatgctcatgacaaccgcttcacaacaactattatccagccaaaaatgtcaatagtaccaaggtgggaaaaccctgg

SEQ ID NO: 34523 - DNA, 122 bp, Homo sapiens
agacccgctccttcccgtcccgagttccccagggagctccaaagagcgctctgtccgcaccgggtgaagtttgaaacagctctgacttgaagggggaaagcccatttcccaacgaacctggg

SEQ ID NO: 34524 - DNA, 122 bp, Homo sapiens
gcactcattggggtcagtggccttcttgtcaatgttttctaccagttgctgaagcttggacgtctctgatgcctgagctgagtccaggagtcccccaaaaggaaacttggccttgaactgct

SEQ ID NO: 34525 - DNA, 122 bp, Homo sapiens
caccccaaatttcttaagttgggtccaaatgacagatcgggatcctctgtcctcactccccgcagactcgcccaagccctaggctgaattcgtgacgcgcgcgcccagcacccgggcgagtt

SEQ ID NO: 34526 - DNA, 122 bp, Homo sapiens
ggaagtccgatcctggctgcttcacccagtagaaagttcctgtcttcttgggcccaacttcgacctttccagctgaccccatccgtgtccctgcatttgtcagccttcagggctccccagat

SEQ ID NO: 34527 - DNA, 122 bp, Homo sapiens
gtgaacctgccgccctcagcaatgctcccaaatccccttcccgctgagagccatgctcagcgatgaccaatcacttcaggtccgacttgtgctgcagtggacggtccagacgccacaggccc

SEQ ID NO: 34528 - DNA, 122 bp, Homo sapiens
aaacgtcagagacaatgatttggagaacattctacacaaaaaccaagtatgaaacaatgacgatttcatgatggctcattgttctttggtattgtgccttacgtgagctggggactaactct

SEQ ID NO: 34529 - DNA, 122 bp, Homo sapiens
ttcagaacgcagagaaaccagtgcccagccctgctcttcagcaaacggtgtatttcagcccgagtttccttccgggggtttggctgtgagtgtgtgtgacctcccagatggcggcacggttc

SEQ ID NO: 34530 - DNA, 122 bp, Homo sapiens
gacccctgccctgggtggggcacgagggccgcgggggtcccgggcgcagtcatacctacccggcacggccccagaggccaggaccagcgcggcccccagaaacagcagcagtggcggcggcc

SEQ ID NO: 34531 - DNA, 122 bp, Homo sapiens
tcccagaaagagcagagcagctggcagactagagctcagctgctcctgaccactgacaaccgggagatgtctcggcagacaccacttatcccagaaaagaccagaggctccaaatgggaacc

SEQ ID NO: 34532 - DNA, 122 bp, Homo sapiens
gcagaatgcacacagccagggttcctggtttgaaataaattaggaaaacagtccatctcccgaccccaccccaggacagttctccgcagaggccgggagcccagcagggctgtgtctctccc

SEQ ID NO: 34533 - DNA, 122 bp, Homo sapiens
ctcccttgcctttcctcctcatctgcttatttcttgcaataggagttttttctttatgagcgtttgccatacaactacccccccgccaacccctctgaaagactccctccccggcccttccc

SEQ ID NO: 34534 - DNA, 122 bp, Homo sapiens
cgaaatcctggcctcaagtgatccacctgccttggcctctcacaatgctgggattacaggcgtgagccacctcgcctggccactagttcttaaatctccacaataccatgatcagcatggca

SEQ ID NO: 34535 - DNA, 122 bp, Homo sapiens
ctgagcaggagatggagctaccacgcccgagtcctccctgagcaggacatggagctaccacgcccgagtcctccctgagcaggggatggaactaccacgcccgagtcctccctgagcaggac

SEQ ID NO: 34536 - DNA, 122 bp, Homo sapiens
agtagttttggggaccaggccctcaatctgtgggctctgacactatctccaggtagatagcgtctgaattgaattacagaacacctagctggtgtccactgcagaactgatagcttgtgtgt

SEQ ID NO: 34537 - DNA, 122 bp, Homo sapiens
gtctatacatggtcacctgtaagcctctcataggctgacagatggccacctaaccaaagacggcagcacagaggaatccacaggaggctcttgtcagggctgggttaaagtgaatgttcaag

SEQ ID NO: 34538 - DNA, 122 bp, Homo sapiens
agcgtggccgtgggatgctgacgatacgggaagccagagaataaaggctttggtggaggtcgggaggaggcgccggcctggacagttttcctagaaaatattctctgcgtgtacccgcgacc

SEQ ID NO: 34539 - DNA, 122 bp, Homo sapiens
tgccccacgtgcctttgcactgcaagcagggtcgcaactgctgctcattcccgggtcttccgtggcccctctgagtccccactctctctaagtggccttaccgcagaatgaataaagctgcc

SEQ ID NO: 34540 - DNA, 122 bp, Homo sapiens
tcactttcttaaaggaggagctttctcctctcacctcaaggactgttatttatttgtctgcgctactctttcgacgtttccattctcttggtcctcaagatgtgaatcacccattttttccg

SEQ ID NO: 34541 - DNA, 122 bp, Homo sapiens
tcaagagtggggccggctggtccgggaatatgctggggagtggagcacgtttatattcgacgtaggaaaaacaatggagaggaagagaaggtggaagggagggcaagggagagaaacatcac

SEQ ID NO: 34542 - DNA, 122 bp, Homo sapiens
cctgaatagcttttttcacatggtccctggtccaaagggacagcctcactgtggctctggcgatggcatggcagcctgaaattctttgacctgcctcaggaagccatttctgtttcctgaac

SEQ ID NO: 34543 - DNA, 122 bp, Homo sapiens
accagaggttacccagggcacttcctggcgttgccccggcacaacttagatgaacaaagacgaaactaaaacctgaagacccagacacaggaggagagggcaggtctggtcagtcccctagg

SEQ ID NO: 34544 - DNA, 122 bp, Homo sapiens
cccagctgtcggacaccctgggcactgtagagagtcaggaggggagcttggagaccagggcgggtccggacaacagtcagcagagagaaatctttgggaaatcctcctagtaaccgagagag

SEQ ID NO: 34545 - DNA, 122 bp, Homo sapiens
gcccctgcctcgctggcagtgggaggagtttgggggcggctcccggacaggtggcccgcacgccgcgactcccagattggggagttcaccgggacggggttttccgaagccacgtggggtaa

SEQ ID NO: 34546 - DNA, 122 bp, Homo sapiens
gtcgccggggcccccgggggccggagagaggcgctcagacttgatgctgactgggggggtcggcggggaggcgccgcgggttgggggaccctcctcgcccaggcttcggcccccactgcagg

SEQ ID NO: 34547 - DNA, 122 bp, Homo sapiens
gctcggccggtcacctcccccagggctgtggtctccccttccctgccccgccgacgcgggcgcccctctgttgcccagtagccgtcagtaatcagcagcctgaccttgggcgagtcatttca

SEQ ID NO: 34548 - DNA, 122 bp, Homo sapiens
gaaaacttcttactatgatttgagcctcctctcttgcctctctcccctggctcactttagcgttcttggcttcctttcagttctatgggcaagccaggctctttcccgctgccaggacgttg

SEQ ID NO: 34549 - DNA, 122 bp, Homo sapiens
agcccagtcaggcgacctgtcaccagtaaccacagctgaggcccgcccgcgccccgcccccggctccggaaagccagctccagccctctcaggcccagaagcctgcagtctccgcccatgcc

SEQ ID NO: 34550 - DNA, 122 bp, Homo sapiens
ggactaactctgtccccacagagctcaactcactggcatctccccagtgttgcagtcctccgtgagaacctcggctgccacagctgtcttctccatgacagccccagctcctgggcacgggt

SEQ ID NO: 34551 - DNA, 122 bp, Homo sapiens
gaggacacccagagacatgagacctaccaccagcaggggcagtgccaggtgctggtgcagcgctcgccctggctgatgatgcggatgggcatcctcggccgtgggctgcaggagtaccagct

SEQ ID NO: 34552 - DNA, 122 bp, Homo sapiens
agagcgctgaggatcggcgttgccagggacaacgcgttctgggcggagctgctgctggggcggacctgagtctgaagaggtgggggcggagcctggggggctgagccagaagcggagttgtg

SEQ ID NO: 34553 - DNA, 122 bp, Homo sapiens
actggcactgctaagtgcgttgccaaggcctctgttggtcccaggtgactcccagggcaccgcccacaggggccggccagaccggtggttgctgaggagggaggatagctcttcctctctcc

SEQ ID NO: 34554 - DNA, 122 bp, Homo sapiens
ctttcaaaggcccggcaaaaacaaggaccgcctaggagaaggacgagggtgagggaaaggcggagcctcctcaggggttggcagttgagagtcgatggaatcgacctcccccggtggggcct

SEQ ID NO: 34555 - DNA, 122 bp, Homo sapiens
catgcctcgcccgacggaaaccagaatcgttttgggtctggtcgccaagatggcgtcctccgcctccgcccggactccggcagggaagcgagtgataaatcaggaagaattgcggcggttaa

SEQ ID NO: 34556 - DNA, 122 bp, Homo sapiens
aagtgatccaccagcctcggcctcccaaagtgctgggattacaggtgggagccaccacaccggccctcaaagcccctttattcagtgtcttcagctctggggtgagcccacatgtatcatgt

SEQ ID NO: 34557 - DNA, 122 bp, Homo sapiens
tgtcccacatgcgaagctctttctcgtgacacatctgtgtctctgtgtagccaaccagagcgcgcctggggaaggagcctgctgactgcgatgaggacgagctgggcgaaatcctggtaaga

SEQ ID NO: 34558 - DNA, 122 bp, Homo sapiens
ctgtgtacccaggatgtgctaacctctttagatacacacagggattggcatggcaggcctcgagaacaggcttagagcaggaacctgacacttcaggccaaggatgggagtgaaagtccttc

SEQ ID NO: 34559 - DNA, 122 bp, Homo sapiens
ccacttaaggaaccagtgcataccaaaacacacttctggcagtgttgcttcagggaattccgagtgtagggttaatgttccattttctctacctcttctaaaattcctccttcttcaaatgg

SEQ ID NO: 34560 - DNA, 122 bp, Homo sapiens
gctcaagcaatcctctcacctaggcctcccaaagtgctgggatttatcggtgtgagccatcgtggctggcctgaaacatgtaagtgaaatctcagattatgagtctttagataatgatatcc

SEQ ID NO: 34561 - DNA, 122 bp, Homo sapiens
gggggagtcacgacacagcagtgtaagagctgccacgtgggtcccacacagggggagtcacgacacagcagtgtaagagccgccacgagggtcccacacagggggagtcacgacacagcagt

SEQ ID NO: 34562 - DNA, 122 bp, Homo sapiens
ggtccgggggcgacaagggctctgggttccccgatggggaggggtctagccgtcggcccacgctcaccactttctttggcagacggaagtctcgccagggctccctggcgatggaggagctg

SEQ ID NO: 34563 - DNA, 122 bp, Homo sapiens
tactcttgtgtcttggggccattatgaagtcaaatgatagttccgtgaacacaagcatggcgatgcctccacagtcaatctgatgacccggtcggctactaagtgactaaccgcagggagtg

SEQ ID NO: 34564 - DNA, 122 bp, Homo sapiens
ggtcaccaggcggcgcgggtagattcgggggaagcgcgcagggctgcgctagggacccgccgggtcaccctggtacatgggtggcttttgtttacagtttgttctaaacatcagaaatgttt

SEQ ID NO: 34565 - DNA, 122 bp, Homo sapiens
gcccccaaccagctgcggcggcatgatctgggcggctggtccagggcatgggttgcggatcgtgtagggaagaggggaacagcagtcgagaccctactccaagtacgcatcaaagacgtcga

SEQ ID NO: 34566 - DNA, 122 bp, Homo sapiens
tgctaaggaaggagggcaaagtgggggggggtgcctctatgtaccctcaaactgccgatgcgcatcccacttaataaagctacctcgccttttgaaccaggggcctgatggaaacttccagg

SEQ ID NO: 34567 - DNA, 122 bp, Homo sapiens
gtgagtggggacacaggtagagaggccccctcagccacaggcatctctacatttaggagccgctgcatgtcctcagccagagggctgggtcagtctccagcagcgccggtccttgccagctc

SEQ ID NO: 34568 - DNA, 122 bp, Homo sapiens
gatccagttcccagctgggcctggtttgcccaaccccagagcagagaggtcactgaccctcgaggggtcttggtttccgcccattaaaactgtagggcagggccccatgtttgcagattacg

SEQ ID NO: 34569 - DNA, 122 bp, Homo sapiens
gaaagactagaatacagaaaggcgcaggcagtcacgtaggactaggccgggtttaacacccgaacagtggtgctagaaggtcagagtcttctacgtacatgttggaaacatccttgattgtc

SEQ ID NO: 34570 - DNA, 122 bp, Homo sapiens
tttggggcagaggcagaaaagctggcccggcggcaccaggccataggtgagaaggaggcacgagctgcccaggccgaggagcggaagttccagcagcacatccttgggcagcagaagaagga

SEQ ID NO: 34571 - DNA, 122 bp, Homo sapiens
gcctgccctgcaggaccctcctccctcccaagtccgcgtgcctgcccagccccatctaaacgcggggtacggagctcgcaggtctctcttaatctgaaacctgttcctatgaagtgtaagat

SEQ ID NO: 34572 - DNA, 122 bp, Homo sapiens
cggaagttgctttgccgggcagcagccgttcgccagtcccctccttggccccaagccccccggtgactgtcatatggcctcacacttatctcatgagctacattgttacagattttaataat

SEQ ID NO: 34573 - DNA, 122 bp, Homo sapiens
ttgggataagggaagggtctttaggtgagcttcctcttgctgctccgggtggagctggggcggggttcttcattaactcacagacatttccctggagcccctgagctctagtgccaacctcg

SEQ ID NO: 34574 - DNA, 122 bp, Homo sapiens
tctccaccctgcgagtgccatcaggaggaggacttcagagtcacctgcaaggatattcaacgcatccccagcttaccgcccagtacgcagactctgtgagtacccgggagagatcagggtag

SEQ ID NO: 34575 - DNA, 122 bp, Homo sapiens
ctgggcaccttcatggggctgcttctccaaggggtgaggtctgtgggcaaaggcggccagcggtcaggtgcctccacggcgggggcactggcttgtcccttggaagagccggtctccaaggg

SEQ ID NO: 34576 - DNA, 122 bp, Homo sapiens
gggatggacagggacagtgtaggcagagcgctgacaacctgctaagctccacggggccggcgggaggtggcaggttgggagggagggggaacggtgttcgcggcatctggagtcatcgatct

SEQ ID NO: 34577 - DNA, 122 bp, Homo sapiens
ggccaccccctcctcttgctcccctcccctccccgggtccagcccctcccctgcctggcccggctgccgcccagcgccagccagagcccaccccgcctccctgcaggaagccggctggcggc

SEQ ID NO: 34578 - DNA, 122 bp, Homo sapiens
gggactgcacaaggcggggctacgcggggcagggcccgtctgctgggggagtgcgctgggcggcggcgggagggcagggtccctgggctccgacagcccctccggcggaggtcaatcacaat

SEQ ID NO: 34579 - DNA, 122 bp, Homo sapiens
tgacctcgtgatctgctcgccttggcctctcaaagtgctgggattacaggcgtgagccaccgcgcctggcctaatttctaatcttaagggacaaaggtgtccgttaaaattctccactggtt

SEQ ID NO: 34580 - DNA, 122 bp, Homo sapiens
ggcaggagaagcgcgagaaggaggagcagacgcacagcgacccagcccggcctccgccaacgcttaaacagccccgcgcccacctccctcagcctaggattgggctcccagaataagcaaca

SEQ ID NO: 34581 - DNA, 122 bp, Homo sapiens
gaggatggagccccagcgcactgggccccaggtcccgccttccactcaaacattttatctcgtttcagtgtgcgatccccaacctctgatgttacacggaaccagctacccaacgagttgtt

SEQ ID NO: 34582 - DNA, 122 bp, Homo sapiens
gcacttggtcagcgtggcctggaaaggggaggaaggtcctggaggcagggctctgtcaggcggaggacgtgatgctcagagcagccagggacccccgtctgggcccagtccccctgcgctgc

SEQ ID NO: 34583 - DNA, 122 bp, Homo sapiens
gcaggggaaggtgacggaaacggctagttacccagaattctctgggggaaccagaaaaatcggttatctagaattctcccacggcagcggtgaggagggggatagggcaagggtcagatgtg

SEQ ID NO: 34584 - DNA, 122 bp, Homo sapiens
gctgcacgcttttcgtgcttggtcctgccatgctgctcacctgtaccatggcactgttggcgcagcaaggggctggtaaccatcatgccttgccctagacacctgggctcaagcaatctacc

SEQ ID NO: 34585 - DNA, 122 bp, Homo sapiens
tttacgatcgactcacaagttggattggccacaagaagtcatgtggattccatccatgaacgtgaactttttattgtggtttgtccgttccgagcgctccgcagaacagtcctccctgtaag

SEQ ID NO: 34586 - DNA, 122 bp, Homo sapiens
cagtcaccatttgctgtcatcattgacacatctaaggacagtgtagggatatggtgacaccgaaaatattttctttccctaatttgtgaaacaactaaacttatgtccttttagtttatttc

SEQ ID NO: 34587 - DNA, 122 bp, Homo sapiens
cacccacccgtccctcaatccacacccaccaacaggcgacgcccgcgcccctcaaggccacgcccccaggcaggccccccagggtcacccttatcacctgcaagaccagccccaggtggctc

SEQ ID NO: 34588 - DNA, 122 bp, Homo sapiens
aaccaactgcaatgcatgattctgggtcggatcctggaggagaaaaggtaagcaaatacccgcaacagacaactaggggtaaccggggcagccagaaagtggacattgcacaggcgatgttt

SEQ ID NO: 34589 - DNA, 122 bp, Homo sapiens
tttacagatgaggtaatagagaggtagcatcacctcctcacatttacttggtagacagagcgactggggctgttgggtcccatgtttatgttgattcatttgcattccccatgaactgtgca

SEQ ID NO: 34590 - DNA, 122 bp, Homo sapiens
ctggcctggcgggagcagaggggcgctcacatccgcagccccgggatcttagagacagagcgctccgctccggcagcggcgccgcgcccattggctgggctcctcctcgccccgcccagcga

SEQ ID NO: 34591 - DNA, 122 bp, Homo sapiens
gggcttcgtcttgctgtgtccccgtggctgggttcagggcaaatgttttggctgcgtaggcgacattgcgtagcttcccattgcatcacagatcaggacacacagaagtgtccatttgtccc

SEQ ID NO: 34592 - DNA, 122 bp, Homo sapiens
acctagctcgagaggagcagtccctgaagccgtcaggaagtcacgtggggtgcgggggggcgggcggcgaggactgggcgggcctcgcgaggtactcccgggagcctgcgggcaccgcagtc

SEQ ID NO: 34593 - DNA, 122 bp, Homo sapiens
gtggtgctatggtttgaatatttgtcccctgcaaaactcatgttgaactttaatccccaacgtggtagtattgagaagtggggcctttaaggggtgagtgaattcattcatgggttaaggga

SEQ ID NO: 34594 - DNA, 122 bp, Homo sapiens
attttgaaggcgtccacttgggggaaaaaaatgaaaggaaaaatatttcaacccggctgtcggtctaaaagaggagagaatgctttctttaaaaaagggtctgtgaattagttttcctgatc

SEQ ID NO: 34595 - DNA, 122 bp, Homo sapiens
catagtcattcgccagcgtccactgatgagaggtgccaccacggacacccggccttgctccgtcgaagctttggtccattaggaccaaagtcaggccccagcgggcctccctgccattcctg

SEQ ID NO: 34596 - DNA, 122 bp, Homo sapiens
agcctaaatgtgaccataaaattagggctgctgcttttatcgagaacacctgcttcctctcgttgccttgtgtgaaagtcgcgttgtattttcctgcgcttggcgctgcgcccgcggagctc

SEQ ID NO: 34597 - DNA, 122 bp, Homo sapiens
ccgggccgccgcggaacccacctgtgctgggcctcaggccttgcgccgccctcgggctgccgtcgccaaccccccccaaacagctcgccgccacgctccctcgccggggcaccgcccccggc

SEQ ID NO: 34598 - DNA, 122 bp, Homo sapiens
tgagtttgaggctgcagtgagctgtgattgagcctctgcactccagcctaggcaacagagcgagaccttgtctttcaaaataataaaatgataaggtaatgcgcagaagcattcagcacagt

SEQ ID NO: 34599 - DNA, 122 bp, Homo sapiens
cccattctacagccaacagagacgaagctgtgcgcacagcaggacgatgcacagggcaggcgagtggggccacctgtgcccgttcccattctacagccaacagagacgaagctgtgcgcaca

SEQ ID NO: 34600 - DNA, 122 bp, Homo sapiens
gctatgagaaccccacctacaaatacctggagcagatgcagatttaggtggcagggagcgcggcagccctggcggagggatgcaggtgggccggaagatcccacgattccgatcgactgcca

SEQ ID NO: 34601 - DNA, 122 bp, Homo sapiens
attctcagaacaatgagttttgttctaccctgttacataaacaagttctatgtgacctcacggcttttagatatgatttatgacaccatgtcagaatgcaatcttatttgttacccaaaact

SEQ ID NO: 34602 - DNA, 122 bp, Homo sapiens
aagaaatgggttaccaagtcacagaaagacatggaggatgcttaaatgcattttgctaagcgaaagaagccagtctggaaaggctatataccatatgattcatacatactatatgacattct

SEQ ID NO: 34603 - DNA, 122 bp, Homo sapiens
gtctgcacacgtccaagtgtaaatccttcaaggggttcctggagtggctgaactacaacccggctgggacaaaaaggacccaaactagccttggaggagggtgtgagacgagggaggcgcgt

SEQ ID NO: 34604 - DNA, 122 bp, Homo sapiens
ctcagggtcctgggggaaccagggcccaggtctggactccattcgggaccttcccagctccggggaatcacaacacagaagtaccccaggggctgaagccactaggcccccgtggagccctg

SEQ ID NO: 34605 - DNA, 122 bp, Homo sapiens
cgcgccgtgtgcttccgcaggttgcgggggtcgctggggccttgtggcggggcagctccgcggggcttcgcccgctctctcacctcgccgtgctctctcgcggcggccggcggggcccgcgc

SEQ ID NO: 34606 - DNA, 122 bp, Homo sapiens
gaaggaggaagaaggcccagatcacacaagtgccaggcagaacgcgccacctgtggacagcgtcactcgctagcacctgagtggaccggggcgccttcggggatccgcaaaccaactgagac

SEQ ID NO: 34607 - DNA, 122 bp, Homo sapiens
acctcacacagatcccctaagacaggcaatgtctttgtcatttaagacaaatgggctgggcgcagtggctcacacctgtaatcccagcactttgggaggctgaggcaggtggatcacttgag

SEQ ID NO: 34608 - DNA, 122 bp, Homo sapiens
gcccacgaggcggaccgacctgcggggtgaggcaccgggagcgcatggcagccccggcctcggcctcctggcgccctcccagccacgcggtgaatgcctgagaggacagaggttcgcggccc

SEQ ID NO: 34609 - DNA, 122 bp, Homo sapiens
gttttgcagacgaggagtaaccgttgccctggaccacaaagccacttagcggcagagcctcgcacccgcgaagattattactagggagatgtttttacccctgaggacacctgagcccttaa

SEQ ID NO: 34610 - DNA, 122 bp, Homo sapiens
ccccatggtttttggtctttgattttggaggaaacggactttggagtggtgcttagaaatcgtgtagtctagtgattcccgaactttcctagtaacagccacccagggcactttgaaagcag

SEQ ID NO: 34611 - DNA, 122 bp, Homo sapiens
caccctatcccgggcttcctctagggctatgggaccccaagggtttggacaccacagagccggatctggctgggctttgaactgccttcgcccacctctctgatggccctcatgctgctctg

SEQ ID NO: 34612 - DNA, 122 bp, Homo sapiens
caaagcaacagtgttgggaggcaaggcctaacaagaggtaattggtcatgaaggcagagccgtcgtgaatgaattaatgtcattaccacaggagagcgttagttatctagaaagtgggttgt

SEQ ID NO: 34613 - DNA, 122 bp, Homo sapiens
ttcattgcagtgctgtagctggtctgttttctgtttggttagtcaacatgccccagggatcgttagctgtttttaccgttctcctggatccctgtggatttctaatgggcaaactttttaaa

SEQ ID NO: 34614 - DNA, 122 bp, Homo sapiens
atgttaattgaatgagatttatcattcgcagaaactgttcaacataagagatgatttatacgtgttttcataaatgtgaatgcatagggtaattgtcatggaaacttccaaattcaatgtta

SEQ ID NO: 34615 - DNA, 122 bp, Homo sapiens
aaagacatccaggtagaaccaataacaggtagatggcatcagaattaagagccttgttcccgtgcacaccacatagcacatggcgatactacctaggttattatctgggtgcctgtgtactt

SEQ ID NO: 34616 - DNA, 122 bp, Homo sapiens
gcaagggttagtggagatgtgggacttgaactcagcttctccgttgagtctggctgtcaccgggacgcaggcacgtgcttgcacacctccacggtggcgatcccacccccttagtagcgtcc

SEQ ID NO: 34617 - DNA, 122 bp, Homo sapiens
cgtgctggaacaggccatcccgccgtgccgctctatctgtgagcgcgcgcgccagggctgcgaagccctcatgaacaagttcggttttcagtggcccgagcgcctgcgctgcgagcacttcc

SEQ ID NO: 34618 - DNA, 122 bp, Homo sapiens
cctcatgatccgctcacctcggcctcccaaagtgctgggattacaggcatgagccactgacgcctggccagcctatgcatttttaagaaattattctgtattaggtgctgtgctaaacattg

SEQ ID NO: 34619 - DNA, 122 bp, Homo sapiens
aggggagaggtggcctagccgtgggcccgggtgatgtgtatgggagtggggtcctcgccacgttcgccgccagcaccctcccaacttccctccgggctccagctcagtcccgagtcaatatg

SEQ ID NO: 34620 - DNA, 122 bp, Homo sapiens
ggcctccccgtggccctcactggcccccgcgcgtcgcggcctcggggatgaggggcttcgcgactaccccggcggcccccggcccccgctcccgcccgagcccccaccttctggaccccggc

SEQ ID NO: 34621 - DNA, 122 bp, Homo sapiens
gcgagctccggagaaacccaggttgggcgtgagcgctgggcaaatcagcaaagcgctgggcgggtcccttgccccgctagggagactgagaggaccgcgaagaggtggggtcgtagcgcgga

SEQ ID NO: 34622 - DNA, 122 bp, Homo sapiens
cttcctctagtggctcacctgccagggccgtgggtggagctgcccaccagttctgcgctgcgcgaccactgttgtcagcccttgggcggtcgatgggaccgggcgctgcggagcaggggacg

SEQ ID NO: 34623 - DNA, 122 bp, Homo sapiens
gtatgaagagattcttgagattaaagaacagatttgacgtttgctctatactcaccactccgatgtttctatcttccattctgatttggatcccggatgagctcccaaaatgaaacagctcc

SEQ ID NO: 34624 - DNA, 122 bp, Homo sapiens
atagcctttggagggtgacgggcaaggacgtacgtaccgcgaacggaatggggcgggggccgaggacgccgagggaggggcgggcccaagtgtgaagggagtctgggcgataccattttggg

SEQ ID NO: 34625 - DNA, 122 bp, Homo sapiens
aacctgcgtaccgacgcagtggttaggactgagcctgacagtagccaaagatccagctcacgggaaaacaccgtacccttactgacccctcccctccgccttctccccattctcccaccttg

SEQ ID NO: 34626 - DNA, 122 bp, Homo sapiens
agttgagttgggagaagttgggagcggcgggggcgcgccccggggtgggcacggggcagtcgtcgggagcgcgcgagtgcgccggaggacggggagagaccccgagacccccggggcacgaa

SEQ ID NO: 34627 - DNA, 122 bp, Homo sapiens
ttctggacggaggaggtcagatgagatgcaggaacgcctgctgatggagagcagggcagccggctccgaaagtaccgggtccaatttccttcaccgacttaaacttctaaaattttattgat

SEQ ID NO: 34628 - DNA, 122 bp, Homo sapiens
tgtcattgacatccatgactgttatgttgacctcggtgctgctgcaggctggggcgctgccgagctgcgcctgcaccgtgagcacaaccacgggctgcgtctcgtgatccaggggcttccgg

SEQ ID NO: 34629 - DNA, 122 bp, Homo sapiens
cagtcagttcttttatttcaggattctaatgctttttattctcagcagtaccaagtacttcgtcaactgaataaaataaaggagatattacaccttattggactgatcattaaaagctatgt

SEQ ID NO: 34630 - DNA, 122 bp, Homo sapiens
agtcctgataccgacaggagacagggaaatactggtttcctggtaaatcacccccatcaacgctccgctcaagcctcaggcctgaagacctgtggccctaaataaggacaggcattccggtt

SEQ ID NO: 34631 - DNA, 122 bp, Homo sapiens
ttgagctcgcgtccccaggccggcggggggggaggggaagagaggggaccctgggacccccgccccccccacccggccgcccctgccccccgggacccggagaagatgtcttcgcggacggt

SEQ ID NO: 34632 - DNA, 122 bp, Homo sapiens
acaaaaacaaaaaacaaaaaactgaacaacaaatcagtccactgtaatcagaaggctcatcgaaaaacactctggaaaaattaactgacaacaaaaaatgtcttcccggaaaagatgaggct

SEQ ID NO: 34633 - DNA, 122 bp, Homo sapiens
ccaatcttgactgtaagctgtatttgagagatcttttggctgagtttacttatgacctaacggttagtcaccaactgaggcagggcacaggatgaccaaaaaaaaagtgtcagtttttacac

SEQ ID NO: 34634 - DNA, 122 bp, Homo sapiens
ttcatgatttaaaatctgtggctgtgctttgacaaaggagctctgtagggaatggtaatgcgattaggatggtaactggctggaggagcaggaacatgccaaccaaacaactctctttgcag

SEQ ID NO: 34635 - DNA, 122 bp, Homo sapiens
cggggacctccgggacatgatcagcatgtatctccccggcgccgaggtgccggaacccgccgcccccagcagacttcacatgtcccagcactaccagagcggcccggtgcccggcacggcca

SEQ ID NO: 34636 - DNA, 122 bp, Homo sapiens
tgctgggtgtgtgcacatctgcagaggggtcggtgtacaccgctgtgtgaacacctccggcggtgcccagtccgtgtgaacacatgcaggtgagcacagacacatgcgtgcatgccctctgt

SEQ ID NO: 34637 - DNA, 122 bp, Homo sapiens
gcggctgctcttcagaacgggctgcaggagaggtggtatgagatggcttctaggcacggccgtgggcgggtctcacgtcagttgcgtgtcgtctgaggaaagttcttctgcagctacggctt

SEQ ID NO: 34638 - DNA, 122 bp, Homo sapiens
agcggaatgtggtaggtgaacactccagactacagattttctactaaaaccagtacttcacgcagtggccaggaggggaccagtctaaatgacaagaataggcatttggatatcaatcagaa

SEQ ID NO: 34639 - DNA, 122 bp, Homo sapiens
ccaaaattgtgagaaataagaaatcattcagctgggcacggtggttcgtgcctgggaggccgaggcgggcggatcacctgaggtcgggagttcaagaccagcctgaccaacatggtgaaacc

SEQ ID NO: 34640 - DNA, 122 bp, Homo sapiens
gttggggaggtagaggatatgaataagcttagagtcagaaagccaaacctcagagattcacgtcagtcccaaagcctccagagaaagaaaataagccaggcctggggctggggatcttgagc

SEQ ID NO: 34641 - DNA, 122 bp, Homo sapiens
gtgaggatggcccccgccccgcctccgggagccccggccgctctggcttctaagggatgacgcggtccgtttcgacttgcctcgctacaccggctcctagccccgctctgacttctaggggc

SEQ ID NO: 34642 - DNA, 122 bp, Homo sapiens
gggcgggggttgggggggcgtgtgttgcaggagcaaagtcgcacggcgccggcctgggggcggggggtggggggcgccgttgcacgcgcagaaactcacgtcacggtggcgcggcgcagaga

SEQ ID NO: 34643 - DNA, 122 bp, Homo sapiens
ggaagctctcatttatgagagggaccatgatggaccacgcgccatttatgagctgctcaccgcggacagaccgtgtgtccaaatcggggcctccagggcccagcgagctgctctgacctccg

SEQ ID NO: 34644 - DNA, 122 bp, Homo sapiens
gcccagcctgccggagaacaagaaatccgctaagtccgcgatctactgtggctaggagagcgcagagcgttcgccggcgcacagcccgcggcctcgttccctttgtgcttcggggcggcggg

SEQ ID NO: 34645 - DNA, 122 bp, Homo sapiens
tcaggcaacaagggctacctgtcccatatgctctgaagttcaggttcaagagatgccttccgggccactcagccagggcaactgggcccaagctctgcagtatctcctcttcccctccagcc

SEQ ID NO: 34646 - DNA, 122 bp, Homo sapiens
ccccttactgttttcatccctcattctgtggaagcattgctaaacttgaaccacactcaacgttattcaatgagtagactaacttcatagaaagtttcacttcttttagcttctcatgtcac

SEQ ID NO: 34647 - DNA, 122 bp, Homo sapiens
ctaagagccgcggcggttgtcggctggggcggggcactccacgactttcccggccagacacggtcgccttcctaggtgtcttggcctgcgaggcactcgtagcccgcccctctcctaggtga

SEQ ID NO: 34648 - DNA, 122 bp, Homo sapiens
ggaccttggtgaaaatggactgagatttgtttcctgaggtgctctgtctgtgccagacaccgtgttggacccagacagataaagatgagtagactgtggtcttgccttgaggggatacacag

SEQ ID NO: 34649 - DNA, 122 bp, Homo sapiens
agaaaagctcagtttacggttccccttgcaatggtacagaaccagagcgggccaggttttcgaggcccatccggctccctcgggtgtagcttcttcccaaggagcctcggaagagttctgcc

SEQ ID NO: 34650 - DNA, 122 bp, Homo sapiens
acagagcccaggtcagagaagccttttccaggtgcctgcacaggagatgggcagtatccccgcatctctacataggacggagcttttcccctccttttcctcaatagaacatctgtccttta

SEQ ID NO: 34651 - DNA, 122 bp, Homo sapiens
taatccgactttgacagcaggtttttcccacgagatcctttccttggtgcctctgatttacgaaagggagatctttttcttaatcccaatgcaccctagtcaataagatttttttcctagtc

SEQ ID NO: 34652 - DNA, 122 bp, Homo sapiens
tgcccgtcttggcttcccaaagtgctgggattacagacatgagccaccgcgcccggctgtcgtcatcctttatatagacagatgaggggtccctgggtgctggaaaaggggtctcatgccca

SEQ ID NO: 34653 - DNA, 122 bp, Homo sapiens
gtgtcttactaccaggcaatatcgtatgtgccgagagtctcagcttctctcctgtccccacggtgacactcgcgtcctcctcgtccgacgtgtctgacaggatacgatgggacgctttcttt

SEQ ID NO: 34654 - DNA, 122 bp, Homo sapiens
tgaagaatcactaaaaagcgaccactagtcctcaacttgagggccattaaggggcaaagccgtctagccagtgaagagccaagaaatgaagagacggtttgagaagacgtaggcggtggggg

SEQ ID NO: 34655 - DNA, 122 bp, Homo sapiens
tcatgcacccatgtacttcctgctggcccacctgtcctttgctgacctctgcttcgcctccgtcactgtgcccaagatgttggccaacttgttggcccatgaccactccatctcgctggctg

SEQ ID NO: 34656 - DNA, 122 bp, Homo sapiens
attattttgggaaacagaagacaaagaagatgactggaagttacccttttaggccaggcacgttggctcatggctataatcccagcaatttggaaggccgaggcaggcagatcacttgaagt

SEQ ID NO: 34657 - DNA, 122 bp, Homo sapiens
cctgaggttgagttgactggtgcgtagcacagagcctggagcctcccttgctccctttagcgcgtgccttgccctgtcttttctgctcaggttgcccaggtcgcccaggtcttttttctcta

SEQ ID NO: 34658 - DNA, 122 bp, Homo sapiens
ccctctcccttgcttcgccaaggctagcgagaaactcagtcttagccacacaggaggaatcggaccccttctgggggtttatgtggagtctgggaaaccaagggtggggtgaggcctggtac

SEQ ID NO: 34659 - DNA, 122 bp, Homo sapiens
cctctgcgccgcctccggctggggaagggccctgggcaccgggcgcagtcagcctgagagcgctgaggcgccagcaccgcgggccccgccgtccccccaggaacccgcccccgcgcagcccc

SEQ ID NO: 34660 - DNA, 122 bp, Homo sapiens
gaagggccgttcacgagatctctcgggaggaatcggtaggagctgcccaactgaaagggacgggggaataacccggggcgagggacctgcccaggccctgccctctggggggaagccaggcc

SEQ ID NO: 34661 - DNA, 122 bp, Homo sapiens
cctggcctagcaagatttcggccacatttcttacgtttccgccaaagctgtgaacacaggcgaatgcagtgctggtccccggcctggcgcaggaaggagcgcaaggccggctttgcaaggaa

SEQ ID NO: 34662 - DNA, 122 bp, Homo sapiens
acaagggtcataggaatctgttgagaaatttactgtggcttgtaacacctcctcggtacccgttttcgtgttggctatgttggctaagcaaaaaggagttcgtgaaaagaaaactggaccac

SEQ ID NO: 34663 - DNA, 122 bp, Homo sapiens
gggttttcccctcaggcaggtgcaggtcctaagggggcgggccccgttgggtgctcatgacgcaaaggtccctaggatttgctcctcacagcgggagcgccctcgagaggaaccgcgtctgc

SEQ ID NO: 34664 - DNA, 122 bp, Homo sapiens
ccctccctgccccgggatccttctggtttgtattctcccagctggctgtgagctgtgagccggcgccagtgtgccaggccgaccgcaggcccggaattaggttaactccgctgcagccctgg

SEQ ID NO: 34665 - DNA, 122 bp, Homo sapiens
cagacttgcttgtcatcactgctagcgcctagtgctctttcactgtcctctggctcactccgctagtgcataaggagttgtcaaaaagaactggcagccctgaatctcgccttccccttccc

SEQ ID NO: 34666 - DNA, 122 bp, Homo sapiens
cgtcaggtgcacaagcgttgcagagacagatgtcattcatacgcagtgaccagacatggccgttaactgccaggaacacccacctccactcccccaagagcatggcgggtacactgctgagc

SEQ ID NO: 34667 - DNA, 122 bp, Homo sapiens
ccacttaccgactgtccctttttgtgcttccttctgtagaggacagtccagtttatctgccgaggattcctcttggaaaggaaagccgactcgcatttcgcattaagaaactggaaaaccta

SEQ ID NO: 34668 - DNA, 122 bp, Homo sapiens
cataaagtaatggcatagctaacactaatcaatcgtgtcttaggtttgatgaaatacggacgtatctacctcaaaacaatggttgaggctcagaacagaacctgacacagaatacgccctca

SEQ ID NO: 34669 - DNA, 122 bp, Homo sapiens
acactaacgtttagttggcgactgagccgtcctggttcacagatttcgatttcgaccctccggagcatcaacggctcgggaggaaactgaggccccgggcgggtcagaagagcccagcccaa

SEQ ID NO: 34670 - DNA, 122 bp, Homo sapiens
tttgctggtcaacccctgctttgtcactgttaataagttattattagttctcataactaccggggggctggcgccgatcgcgggtggcgcggggcgggatccgctcctgggacggtggaggg

SEQ ID NO: 34671 - DNA, 122 bp, Homo sapiens
cgaatccggattaatggagggacactgccagggccaggggagacaacacgcgcagggtcacggacacggggtccaaggccaggcacctgcgagtgaggccagggctgcttctccaggttact

SEQ ID NO: 34672 - DNA, 122 bp, Homo sapiens
agcctcgtagctgatgtgcatgaggttctcgtccatgttccacgggttcttgggagtgaccgggataggaatcccgtgctgctttgcgtattccatcaggtcattacggcccttgaaccggt

SEQ ID NO: 34673 - DNA, 122 bp, Homo sapiens
ggagcacgtgggacccagggcagaaagacagcaggttagagaggccgccgggaagcacagcgaggagaggtgcacctgagacagccggggaagaagcagacctgccctgctaaaccaccggg

SEQ ID NO: 34674 - DNA, 122 bp, Homo sapiens
gtccaggaagtaatcggtttccggcttttggacaatggtccctcgcttaacgaatgctaacgaatgctcccttagctgggagctgcagggaccggtcccggcaggtctaaccaaccgtccgc

SEQ ID NO: 34675 - DNA, 122 bp, Homo sapiens
gcgcgtgctcgcggccgcgagccgaggaggggacgtacagcgcccgcgcgcccgcgagcccgctccggctctcccatgcttgcccctcggggtgctccttctgcgctctccgcctggactgc

SEQ ID NO: 34676 - DNA, 122 bp, Homo sapiens
agcgctggaataccaggagaaaatagtctttcaaaaggtagggcaccatcaacaccttcgcgacaggattaagagtttctagattcccaaaggtccaggctgataggtgagaggagcaactt

SEQ ID NO: 34677 - DNA, 122 bp, Homo sapiens
cagggatccacaatcttctatttgtaaaatgattcccggttgtcatggagaccagggcaccgcagtggagctggaatgttaggtggggtccaaggttcagtcctgggggtagggagtggggc

SEQ ID NO: 34678 - DNA, 122 bp, Homo sapiens
ccagcagctgttcctctttgaagaggtcgatgctgaaaggaggccgctgtggtggtgactcggaattagaaccctgactaccttccggagccctggctttgcctccaaaagcccagcaacag

SEQ ID NO: 34679 - DNA, 122 bp, Homo sapiens
aactcctggggtcaagcagtccacccacctcagcctccttcatagctgtaactacaggagcgtgccaccatacctagcaattttttaaattttttgtagagacaggatcttgccatgttgcc

SEQ ID NO: 34680 - DNA, 122 bp, Homo sapiens
ttgtcctccgactcgccctcggccttccgcgccagccgcagccacagccgcaacgccacccgcagccacagccacagccacagccccaggcatagccttcggcacagccccggctccggctc

SEQ ID NO: 34681 - DNA, 122 bp, Homo sapiens
cggggacgagagcagcttgttgctgaacgcggccagcacggtcgcgcgtccggtgttcaccgagtatcaggccagtgcgtttgggaatgtcaagctggtggtccacgactgtcccgtctggg

SEQ ID NO: 34682 - DNA, 122 bp, Homo sapiens
atgtggcggtgagaaaacgatggggcagggaaacgttcgccattcggtgccaataaaggccgcctttatcccgaccgtaaatggtttctgtgtggagtgagactgtgcctgtcccgggccta

SEQ ID NO: 34683 - DNA, 122 bp, Homo sapiens
agacagtgctcgtccttgaaaaagcagttctaggtcactcggcctgctttgccagcattccgggccccagctcaccttccgccatccatgttgacaacaccagttctacgacgaagcgggcg

SEQ ID NO: 34684 - DNA, 122 bp, Homo sapiens
gagttgggggaaaataggagcttctgctgccctctaattctgaaatatatttgctttctccggtagggggcatgaggagcgctgaggacagttgggacaatgtcctgcaaggcaggcgagag

SEQ ID NO: 34685 - DNA, 122 bp, Homo sapiens
cccacgctgcctgatgtccatgtccctggtgaccctgctgcaccttgttctgtgtcttgccgctcaagcctggctacattttaggaggttatttaggctccccaggactccagggttgggaa

SEQ ID NO: 34686 - DNA, 122 bp, Homo sapiens
ttccttttagggtgagcctttggttctcctgtcccaaaccgaggggggccacgtgggagccggcagcacacactggccaccactgaccgctcctgctgtcctggcacttccgccccctccca

SEQ ID NO: 34687 - DNA, 122 bp, Homo sapiens
gggaagacaggctgggccatctcccacaaagaggaaggtgacgatgcagtccagggtgaacggaagagaggttaaagcctatatcttccagcagcctttgctggccttcccctccccccaga

SEQ ID NO: 34688 - DNA, 122 bp, Homo sapiens
ttggagacgtcgctgcggccaggactgggaggccacttgcttggcgggtgaggcggctcacgcggtatttattgactggctcgggaaacgtgttcttttacttacttgtcattaaagttcta

SEQ ID NO: 34689 - DNA, 122 bp, Homo sapiens
aaatatgctggctttgagacccggagggcacgaaaacagggagctggggttctggaaggacgccagctcggcctgcgaggggctgaaaaatacctgctgttgcctctgtctcgttgagagtt

SEQ ID NO: 34690 - DNA, 122 bp, Homo sapiens
acgcgggaggctaaagctaaagggtcggtggaggcgaagcaatgggaaggctgggagccgcgctttagaggccagaaggctagcggcgatttccaatctccctcaggggcttcaggctccgg

SEQ ID NO: 34691 - DNA, 122 bp, Homo sapiens
aatatagtacgaggggaatccttaggaaagctgagtgcaaggcttgagttcaacgtggtccgcatccacctcggaacctgtcaccctgctgtcccaacccttttaacatgtcctcctggaac

SEQ ID NO: 34692 - DNA, 122 bp, Homo sapiens
aagctgccgagaggatgaatatcgggaagccaaacgccaaggacattgcggacgtcactgcggtggctgaagccatcctgccgaagggcagtgctcgggtcacaacctcggtgaggcgctaa

SEQ ID NO: 34693 - DNA, 122 bp, Homo sapiens
ggcagggaccacccgggcggggcttgtggtgccccgggatgaggccagtgtttgggggagcgctcggggatccgcggacgcatcccggttcctcggacggcgccgggcggggcggggcaggg

SEQ ID NO: 34694 - DNA, 122 bp, Homo sapiens
aggtttagcggctagaaagattcagaagctgagttcagtcctgccgccacaatcaatcttcgctcctatggcttcacagaagcgtctcccatgactaccaaatttaactccttccagatcac

SEQ ID NO: 34695 - DNA, 122 bp, Homo sapiens
caaaatataaaaatgctttctactttaaaaagctttataaaaacagaggagtcatccctacgatatcagaataaaaatctcaatgtattgaatggtctttgggattttatataacctaaggt

SEQ ID NO: 34696 - DNA, 122 bp, Homo sapiens
accgacgcggccacagccgcctcagacgtggcgcagtcgcggggaaagagcttccggccccgcccccagctagcgatggccccgcctccgcaccgaccacgcccctagatagcccagcccct

SEQ ID NO: 34697 - DNA, 122 bp, Homo sapiens
agggcgaggtttggaccgccccctcccaccgttaccatggtcaccgacacacttagcgaacgtgttcagtgctgctgttggctgaacaaggacggtcttgtattatggtgttgttggggatc

SEQ ID NO: 34698 - DNA, 122 bp, Homo sapiens
agtacaacggcagtgggaacgtgcagctaagggtgggcctgtggtgccccctgctggtgccgcatagcatcgcgccctcctgagcagggccctgcagcctggctggctggcgactgaatccc

SEQ ID NO: 34699 - DNA, 122 bp, Homo sapiens
cctaacctcggggctgacccgccgcgctccctcgtctcctccgcaggtcctcaggcagtgcgtccagtcaagcccgctcggcagttcccgccgcagcccccgagatacagccagggccggcg

SEQ ID NO: 34700 - DNA, 122 bp, Homo sapiens
cagcacatacatctttttgcagtctctgaagcagctttgtgaaaactgccttttctctctcgtgaagcttctttccttcctctcctcctctcagttaaacacacacctggtctcctaaaagc

SEQ ID NO: 34701 - DNA, 122 bp, Homo sapiens
tttgtgaactgctggcctcacgccaggcagtggcgctctctctgtgaggagagacgcacacgctgcggctggcgccttccacactgacctgggcccctgcggcgaggcttgcggagtcaaag

SEQ ID NO: 34702 - DNA, 122 bp, Homo sapiens
tccccagggtccaggagagccagatgggcagcaggagctccaggagcccggagcacatggcgctgttcctccggcctaacctgctgggatccgctctcccccctactctccgagcagccaaa

SEQ ID NO: 34703 - DNA, 122 bp, Homo sapiens
gaggagggacgcagcaaggggaagagaaagtccagcctagaaagccaaggaacgccccctcgctccacctaagcgtggatctgcccactctgctgggccccgggcgcgctccacccgcgggg

SEQ ID NO: 34704 - DNA, 122 bp, Homo sapiens
aagtgaggagcgtctctgcccggccgccatcccatctaggaagtgaggagcacctcttcccggccgccatcccatctaggaagtgaggggagtctctgcccggccgcccatcgtctgagatg

SEQ ID NO: 34705 - DNA, 122 bp, Homo sapiens
tgcacacgtgagtgtgtgcatgtgtgtatgtacacctgtacacgtgggaaatcgcgacggcgtgctctgtacaagtgcagatctgctcgtggacagtttctcacccctgcagggccagggcc

SEQ ID NO: 34706 - DNA, 122 bp, Homo sapiens
gttccgcggctgcttcccccacggagaggggatcaagcttgggggagaaaggaatgaaagcgagggggaggcaccgcagacgcccaccctgccacccccgatccctgcctcttctcccgcta

SEQ ID NO: 34707 - DNA, 122 bp, Homo sapiens
tcagcaatattagcggccagaggaggtgaggagacatgatggtgagagggctccttcctgcgtcaaccatgcgcattatgaagagtcacatcatgaagattcagtattggactaagtgctgc

SEQ ID NO: 34708 - DNA, 122 bp, Homo sapiens
caggactgggcgcagcgctgggcccgggaccggcgcggcgcttccctccctccgcagcggcgcccagctgctcgcgtcgaggacacctgggctaggcactgctcccgcccggcctggaggcg

SEQ ID NO: 34709 - DNA, 122 bp, Homo sapiens
actacctcctgcaaatgtttaccagctatctgaattgagatctgcattctgcgaagaagccgtggtactttctaccagcatgtcattttacatatgagcagagcatttgcaccaacacatcc

SEQ ID NO: 34710 - DNA, 122 bp, Homo sapiens
agatcctccagaaagaagaatcaaatatggtccaagcagggaaacaaagcacatgacatccgcagacccagattccccttccgcatgattctttctgaggaccaaagagaatgccatgaata

SEQ ID NO: 34711 - DNA, 122 bp, Homo sapiens
cagagaccctctccgaaagtggccctgccctagcggaccgagctcctatcttgccacccacgggctgcgccaagaacgaccacctctcttagcctcggttttcgcttctgtgaaatgggaac

SEQ ID NO: 34712 - DNA, 122 bp, Homo sapiens
atggaatcttagtcctgggtgtttggggctgagaaaatgaacgttccatgatgctataaacgaaggaagataagaaactaactagtccagctagtttttgcagaatgctgtgagagttacag

SEQ ID NO: 34713 - DNA, 122 bp, Homo sapiens
agatattcttgtagggtagtcataggagttttctgatggacctagatctacttctagtagcgaatactgactacatcagccagcgtcgcataggagtacagaaactactccaaacatttcag

SEQ ID NO: 34714 - DNA, 122 bp, Homo sapiens
aacttcctaaaacagaggcatgggattcattacctatttcttttgacttcattaatttaacgcaaatttccttcagaataatgaaactaaggagaaagttgaacaagccctgattcagactg

SEQ ID NO: 34715 - DNA, 122 bp, Homo sapiens
atttaatcctctatcattcattttcaaaatccgcttcactggtggctgaggagtgggggtcggagtgtcacaaatgcacaatctgtggtatttccagttctttcatatcctgatcacttctc

SEQ ID NO: 34716 - DNA, 122 bp, Homo sapiens
gtcgatgggactgggcgttagtggagcagggagcggagctcgttgaggaggctcggaccgcgcagaagctcacggcgggggcgggggctcaggcatggcgggctgcaggtcccgagccctgc

SEQ ID NO: 34717 - DNA, 122 bp, Homo sapiens
atgaatggaatgagttccttctttcctagtagttccagtaaaagttgcagaattgggtctcgggccttacgggggttatgtgccctttcctgaaccaccactattgagaccagagagtggaa

SEQ ID NO: 34718 - DNA, 122 bp, Homo sapiens
cagggataaggggttcaatgtgcaaagtcttttatttaaaattttagaagttaagacttacgaccacctcagtatatgccattcctaatagaaggaggtatgacggtttcaaactcgtgcag

SEQ ID NO: 34719 - DNA, 122 bp, Homo sapiens
atccacccacctcggcctcccaaagtgctaggattacaggcatgagccactgcgctcggccgtgataaatgctatcaagaaacttaacataagtgtatagtaggatgctatattaggtagta

SEQ ID NO: 34720 - DNA, 122 bp, Homo sapiens
gccggcgggggcggagtggggtggggcggcgaagcatcttcaccaccctgggacctcggccgggaaggggcgggggcccagtgtggggggatgagagggcgggagggagaggggttgcagag

SEQ ID NO: 34721 - DNA, 122 bp, Homo sapiens
gctgccggagctgactccatgttttttcccaatgtagagatcgctggagatggcgagctccgagactccctctatcttctgttttcagagcaactctatggtaccaaaaaaaaaaaaaaaaa

SEQ ID NO: 34722 - DNA, 122 bp, Homo sapiens
ctcacctgtaccagggcaccccaggaggctgcacccagtgacgtgggctgaggatggggccggcccctctctctgcataggaagctggcctctcagtgtgaggagtcgtcttgcaggggaag

SEQ ID NO: 34723 - DNA, 122 bp, Homo sapiens
aaccgaggaagggcattttaatataaattcctgctccctgcaagcctccaaagctcacatcgttttctttcacatcagagcgaaaaaactgcaagtgaaaaatcccagggtagcaactctaa

SEQ ID NO: 34724 - DNA, 122 bp, Homo sapiens
agaggaatatgggaggggcagttgagctgtatgcagtcctggaacctcttttttcagccccgcagtccacaacggcccgagcaccccttgatgtgcgcagacccccggcgtggctctcagcc

SEQ ID NO: 34725 - DNA, 122 bp, Homo sapiens
ggagaaatccttgaaggagatccaagtcgctccaggtctgcctgccgaataatatcatcccgaagggatcttgaaccgtttgcaatcaaccgctcacccagtcttcccacggagcgcgctcc

SEQ ID NO: 34726 - DNA, 122 bp, Homo sapiens
tgtcagacacacaggctgccagaggttggagactcggggctagaggacaggacacttccccgggctccggatctgctttgtcactaagggcagaggctatttggtgatttatggacatgggt

SEQ ID NO: 34727 - DNA, 122 bp, Homo sapiens
gccgacgggcctgccccctccgctcaggacttggacaggcagagtggggacggtgtccatcggacccccctccacccgcggagacttaggtgcccgccaactgaggggcatgcggtggcacg

SEQ ID NO: 34728 - DNA, 122 bp, Homo sapiens
tcaagtgagcggtagctaggcggcttctcctcgggccagtgtggggagtgcgagccgcggcggtgggcccgccagctctggggctgcctctccttgtcctcttcagagctccaggaactgag

SEQ ID NO: 34729 - DNA, 122 bp, Homo sapiens
actatcaaatgatggctggctggggaactaaaggagaactaaaataataagtagaagcatcgtcagaacaattgtcaaccagtagaggaggaaaagacctatgctgattagatatcatgatc

SEQ ID NO: 34730 - DNA, 122 bp, Homo sapiens
gggcataggggtagtcttgtgcagccacccaggccagctgctaccccctctcttttggcccgagactggcacccttcctgggcctgtcatttatcatgggtgcctgggtaaaggatggctca

SEQ ID NO: 34731 - DNA, 122 bp, Homo sapiens
agtgccggggtcagaggtcaccagaggctgctgaaatcagggttggagggctggcatgttcgtatttgggggaaggaggcaggatcccaggggacccgtcctgcgtgctgacactttaccac

SEQ ID NO: 34732 - DNA, 122 bp, Homo sapiens
tcaccgcccgcttcccccagcgaacgactcggggaagctccaggaggccatctgtgctgacggttcacaccagacaggaccacttgcaaggacaaaaataagaaatttaggaaacgaaaaaa

SEQ ID NO: 34733 - DNA, 122 bp, Homo sapiens
tgctccatcaccaaagagaccttgcctcctcccccacttctttgctgggcccactcataccggttttcctaggaaaactctggagaaaattgaggcaggagccactcattcgtgccccttcc

SEQ ID NO: 34734 - DNA, 122 bp, Homo sapiens
ttttggaaggtgcacaggacagcgcatctggccccttcctcttccaagctgagggagggacgtttctctgccctcaaaaggggaagcaggcccagcagtgtcttaggggaatgaggcagcct

SEQ ID NO: 34735 - DNA, 122 bp, Homo sapiens
cccgggtggcccctacccctggcgacccctcacgcacacagcctctcccccacccccacccgcgcacgcacacatgcagataacagccccgacccccggccagagccgcagagtccctgggc

SEQ ID NO: 34736 - DNA, 122 bp, Homo sapiens
ctcgcatagtttgggcctttaaagtcggccatcccagattgagggggcctgacccctgggcgaggccgccgcctctcagttttggggcggtggcgaccccagtccgggagtggccccggtag

SEQ ID NO: 34737 - DNA, 122 bp, Homo sapiens
ctcgatttctcgccaggccttagctgccttcccgcggggcagggctcagaacctgcagcccgccatgcctgagcctcccacccactccgtgtgttcctgtgcagcccgagcctccccgatga

SEQ ID NO: 34738 - DNA, 122 bp, Homo sapiens
ttttccccgtgtgtgattttattaccagttttctctttccttccttctttggaatgtacccggtattatctatttcaactctggtagttcacagaggcccagagaactggaatagccaaggt

SEQ ID NO: 34739 - DNA, 122 bp, Homo sapiens
tctctttctcttgcgagaggcctgcacaactgcccttatttgtttctccaagctccttctcggaactcgaatcgtcgttgtcggtgctcccttcttgccccgattccttcacttcttggcaa

SEQ ID NO: 34740 - DNA, 122 bp, Homo sapiens
ccacgcagctccctagggcgcccagcaaatggcaccctgggtgggaactggcttctggtgcgcactagacctccaactgcctgtctggttccccactgcgtccccagatcctcccgcagagc

SEQ ID NO: 34741 - DNA, 122 bp, Homo sapiens
ggccaaccagggccaccgggagctgggcgggagctgagtccaaagaggttgttgggaggccggagtcgggcctggagacgcagccgggaggaagagctgagcccagagaggatgccgggagt

SEQ ID NO: 34742 - DNA, 122 bp, Homo sapiens
tttgaacccggtgctgaaccgtgaagtgcggcgaacaggggggagagtgctgatcactctcggggaccaggacatagacctgtcgccatcgtttgtcatcttcctgtccacccgggatccaa

SEQ ID NO: 34743 - DNA, 122 bp, Homo sapiens
ctctcactccccacttgtggccgaggcctgccctgtgttcatcccagacagtcaggcagacgctgagctgtccgcgtcggcgtgggcgcctgtggccagcgtattgtgagatttctaaatgt

SEQ ID NO: 34744 - DNA, 122 bp, Homo sapiens
aggaggctttaacggatttaacctccaaatctctgacccttgagacccccgctgggcctccggtatagatggaggactatatgagcacagaacttttatgtatccggtagctaagatccgca

SEQ ID NO: 34745 - DNA, 122 bp, Homo sapiens
cgaggagagcggtgccttgcagggatgctgcgggcgggagcaccaaccggggacttaccccgggcgggagaagtccacaccggggtaatgggtctgggcttgagggttggcagaggggtgga

SEQ ID NO: 34746 - DNA, 122 bp, Homo sapiens
acatctttttgcatgacaaagtcagcaggtcatttattccagcgttcccgttggacgatgcgtggagaggactgtggaagtcggtatttgttccgcagccctcccaccatccgcccgaacat

SEQ ID NO: 34747 - DNA, 122 bp, Homo sapiens
tcgataatatctagatgtagacaaaagaaaacagcaataaagagccatagtatctcacgacggtgagatcattgtgacaacacactgattcttcagggaatgtgcctgtgtctaagacactt

SEQ ID NO: 34748 - DNA, 122 bp, Homo sapiens
aaagaaaacatcttggggccaccagttcccgtttggagctgaagtggtgcgtcctattggcgtctagctaccaaaaataaaatggaccacctcgcgcgccagtcgtgttactcactaatatg

SEQ ID NO: 34749 - DNA, 122 bp, Homo sapiens
tagctgttaaaggctataccgtgtatgggaaatactacagtagatccactttcacaacttcgtggtgcttcttgttggcaacaccttgttggcaacactgaccctgtcctagaacagtatat

SEQ ID NO: 34750 - DNA, 122 bp, Homo sapiens
tcttcacttgtatttattggtttaatggttatgggaaacacatgtaggattcgccagctccgtggtatggtggaccctctgattaacctgaaaggaaactagaaagaatgcagaagaattca

SEQ ID NO: 34751 - DNA, 122 bp, Homo sapiens
ccttggagaggcgcacccatcaggaatgtggaagtcggagagctcgggaggagtgaaatgcgggtgccgggagccagtctcaaggaacgcggctaacaaaaggctcacattgcctgtcgcgg

SEQ ID NO: 34752 - DNA, 122 bp, Homo sapiens
cagggccggcgccgctttccccagctctccggtctccggcgcccggcggtaacccgcccgcgggctctgccctccgcacctctcagcccggccccggcggccgctgacccaggaaccgcggc

SEQ ID NO: 34753 - DNA, 122 bp, Homo sapiens
caccccttcgttccccaaatcgtaattcgccgaggaaggatccaggaactggcagaggagcgggagagctggggtgggccggggtggggagggtgcgagttaactgtggcccggtctcgccc

SEQ ID NO: 34754 - DNA, 122 bp, Homo sapiens
ttccctttgtttcattgacttttgtgaatggaaccccagggctgggcacgcccgccaatccggagagtcgtccggcctggccggggggcggagtttcccagccgcgggggccaatcagaatg

SEQ ID NO: 34755 - DNA, 122 bp, Homo sapiens
gactcacttcctttgggctttgtccttcttggccttggtccttttctttcgggcctggagcgcaagcactgcaggagagagggatggatgaagggcgaatgtggaggaaaggaggcgaccaa

SEQ ID NO: 34756 - DNA, 122 bp, Homo sapiens
cccggctgccacttgtctccattgtcttcccacaaccccaaacaagtcagcccacacctccgtgactgcacccgctgtcattttcaggaaaagagattttctgagcccatcttggcatttct

SEQ ID NO: 34757 - DNA, 122 bp, Homo sapiens
tgtaagagggcagccaaacccgtcttcttttgcccgcggaaaggacggggcgcgggcccgcgtgactctcatacagagtcgggacacaaatgctcgtaaggcaggagcagagtgccaggaag

SEQ ID NO: 34758 - DNA, 122 bp, Homo sapiens
ctacatctctcttccaaatcataaatgcaaaagatggccaaaggtgcatgctctgtgacacgtttcatagtcagacaaaaccagctgactgcttttacttttttttttttttcatttagaag

SEQ ID NO: 34759 - DNA, 122 bp, Homo sapiens
ctattatatatcttgcaaacatcttgtaatcagtcacttgtctctttattttatttggagcggctttcaacctagagcagtggtccccaaacccggggctgcagactattccctgtctgtgg

SEQ ID NO: 34760 - DNA, 122 bp, Homo sapiens
atatacctggtcactttgatgggaaatctgctcatcatcttggctatccactctgatcctcgacttcaaaaccctatgtattttttcctaagcatcttgtcctttgctgatatttgctacac

SEQ ID NO: 34761 - DNA, 122 bp, Homo sapiens
tctggattgctaacaatatctgcctccgtggcctgtttgctttggttaaatcaaattaggcgatctgtgaggggatggtaaactgcacagatgacaggaattgtttccctgagccaggccct

SEQ ID NO: 34762 - DNA, 122 bp, Homo sapiens
tcaacctgtgtattgtttttcttatttcgaatttccccctttaggaaaatttttggaaagcgacagttctggggtaaagggcataaggctttttaaataactttaagattttaaagatatat

SEQ ID NO: 34763 - DNA, 122 bp, Homo sapiens
tagaagaatggcttataccagtgtcatcattatcttaatataataggttaggctgggcaacgtgcattagatttctgacaggcatgtgagaaatgtaggtatttttgtttgtttgttttttg

SEQ ID NO: 34764 - DNA, 122 bp, Homo sapiens
atcctcagagccctgctccgcaactgtccgtgcccggcgagggccgtgggtcccgagtcgcggcacccactctcgagacgtccgtccgcaccccagaactcgggcccaaggatgcccgtggc

SEQ ID NO: 34765 - DNA, 122 bp, Homo sapiens
aagatatattttatatatatcatcagggagatcttgagaatttgccattcagagtatgaccgggagaaacaagactattttgaatccacaggttcaaatacagcatagaagatgcaggaagt

SEQ ID NO: 34766 - DNA, 122 bp, Homo sapiens
ctcacgggagaggtagtccacagccctaagcctttccccagctggagaataaataaactacgtttcccagaaggctgtgggattgcgtcacaatgactgcgggattatagaagcccggggca

SEQ ID NO: 34767 - DNA, 122 bp, Homo sapiens
ttcttgctgataaatttttttttctggggcgttcctgagtttatttggggcacacccgggcgagggccctgcacctagaagaaggtgttgggcctcttggtggtgaagcgtggcttgtgctg

SEQ ID NO: 34768 - DNA, 122 bp, Homo sapiens
ttcaggattcatctgtgtgacttcagtaagtgtccttccctctctgagccttatttttggcgattccgtttctggtcttccaggaatctaggcgtcctccagctctgagattcccaggggcc

SEQ ID NO: 34769 - DNA, 122 bp, Homo sapiens
ggatcacacagttagtaagtggcaggagctggaattcaaacccatgtctgcttgtctcagcgcctgcctgttttctatcaccccaagctggggtctccctcagctttgacttctagaggagg

SEQ ID NO: 34770 - DNA, 122 bp, Homo sapiens
gcgggagggttgggctgcctggagttgcgtgtggccaccaacgcgcttcgcgcctcgtggcgtccgcttatggattgttgggaagttcttgtccagaacttcctgtggcataggtgacccca

SEQ ID NO: 34771 - DNA, 122 bp, Homo sapiens
tctgcttcccctgccctgccctgggggtctgactggtgaaacatgggatggcagagtggtcgggtgtttcagattccacggtgggccggggtcttttcctaccctcgggagccgtctgaatt

SEQ ID NO: 34772 - DNA, 122 bp, Homo sapiens
accactacccctggtgaaaacatacacaccagaacccaggaacaaacatgcccgagataccgcacacccatcaacccaccagctcctgcacacacactcgcccagtgcaatgagataccgca

SEQ ID NO: 34773 - DNA, 122 bp, Homo sapiens
tgatggtcacggtgggtgggtgggggctgaccccagcttccaggggactgtcactgtggacgccaaaatggcataactgagataaggtgaataagtgacaaataaagccagttttttacaag

SEQ ID NO: 34774 - DNA, 122 bp, Homo sapiens
agagggtgccaagtccccaggctgagacccacactcaggccctgccgccgtcggccctgccgcgtcccacccgtgggtcattcaggtacacgggaacattctccctcaagttttgcagcatc

SEQ ID NO: 34775 - DNA, 122 bp, Homo sapiens
cctgtccacaggggcttgagatcagccagaaaagtcaggcaacttttcagggactgggagcgaggtctcccggccgggcctgggtccagtctctgtgggcagtgcagtgccgagccccaccc

SEQ ID NO: 34776 - DNA, 122 bp, Homo sapiens
gtgaatacatgtattttttctgtgaccaccatgttgatgtgctaatatgtttttgtaagacggctaagtagggttaaaggtacagcttgtggttgtggaacaatgctgagttaaccggccct

SEQ ID NO: 34777 - DNA, 122 bp, Homo sapiens
cacacgcacacgcacacatgcccgcactcacagatggagattctgtattggcaacttatccggaatctcaaccataaaaatctggagtgaagctactttaatctcagcatgtatacaggctc

SEQ ID NO: 34778 - DNA, 122 bp, Homo sapiens
aagacttctgggagggcggtgcggctcaggctctgccccgcctccggggctatttgcatacgaccatttccagtaattcccagcagccaccgtagctatatttggtagaacaacgagcactt

SEQ ID NO: 34779 - DNA, 122 bp, Homo sapiens
ccgaccagccttggggacagcggtgcgtgcgctagtgcccgcacccggtgtgtagaagggcgcgagcgttggcgtgagagccggtgtggcctggaagctctgcaggaacgtgtgggggtagg

SEQ ID NO: 34780 - DNA, 122 bp, Homo sapiens
cctgtacaacggaacgtccctcagcaataaaaagcaacagagctcggatgcatgctagagcgtaccgggaagcaggatcagggcctgggaccaggcggctgtaaaaagcaacagagctcgga

SEQ ID NO: 34781 - DNA, 122 bp, Homo sapiens
ccacctcctgggtttaagcaattctcatgcctcagccttccaagtagctgggattacaggcgcccacgaccatgcccagctaatttttgtatttttggtagagttgcagctttgccacgttg

SEQ ID NO: 34782 - DNA, 122 bp, Homo sapiens
aggaaaggagaggacaccatgtggttcctgattggctgagtgtggcccggctctgtgtgtcggagttgtgcagggtatggattgggacccaccagtgaaagcacatggccctggaggtccgc

SEQ ID NO: 34783 - DNA, 122 bp, Homo sapiens
aaagttgtggggagagagaaacttgttaaaagaactttgaatccgtatgaataactagttcgcaaatttgcttgaaaatgggtgcattcagaatgaatgccctaacagtgctctgctagcct

SEQ ID NO: 34784 - DNA, 122 bp, Homo sapiens
tgctagtaagtgctcctgagaaagacaaggccaggaaagaggtcgtacataagagcataccgttttacataaggtgttcaaaatggtcaagaaatgcatctctaagaaggtaacgtttgagc

SEQ ID NO: 34785 - DNA, 122 bp, Homo sapiens
tggacagggctgagggccctgaagccgggcagtctcagggtaaccaggggctgggaatcgcggagggagcgggaggcccaccgcccgttcgcgcctcggccctcccaccactccgccgccct

SEQ ID NO: 34786 - DNA, 122 bp, Homo sapiens
agatattcctacgagcagggaggacagcaacacaggcaggagaaagaggtggcggtgaaacgctgtccgaatgagagggcggccacatgcttaaggtgccagtgaaaaaaccgacagccaga

SEQ ID NO: 34787 - DNA, 122 bp, Homo sapiens
cctacaggctcccagtccagcatcctctctggccccacttcccactgtagactccctgaacgagacagaagctccagccatgcatcagagagccagtgccctcagacaatcaccttcactag

SEQ ID NO: 34788 - DNA, 122 bp, Homo sapiens
tctgtgagacagtctctctcagatctcacaaggagcaagtgcagctaaggccctggaaggcgcagcctagcgcggtggccaggaccacgcccacccctcgcagggctctgcgcacctccctg

SEQ ID NO: 34789 - DNA, 122 bp, Homo sapiens
ctgccctggaggtggatttcagtctctgcgtgccggccggctcccagagttgcgagaggccggctccgcggtctcccagctacctcccggctgacttttcaccttccgctcccctttcctcc

SEQ ID NO: 34790 - DNA, 122 bp, Homo sapiens
tttcagtgtctggcaccatccacatggctgtcagtagctgttactatcattatcagtgtccgtaagtggtgttagatttagtgccaatgctgttactgttggggaggaaaagaaattcttct

SEQ ID NO: 34791 - DNA, 122 bp, Homo sapiens
ggtatatgtttgttccatgtcttttcacgttgtaaccatggtgcagtttcaagtgctatccgtcatatttagtgactgcattatatctcatcaagtgaacctaccactgtttaaccattccc

SEQ ID NO: 34792 - DNA, 122 bp, Homo sapiens
cggcctcctcctcctgagctgcagcatctgcttgttctggcgagtgggcctgggatagggcgggcgcctgcacccccagggggagggtccggcggagggcgggggctgagccgtccgctccc

SEQ ID NO: 34793 - DNA, 122 bp, Homo sapiens
aaacctacgaatggatgagcagcactattccaggcactggtaatatagtgataagtaaggcgaaatccttgtcctcaaggaacatactagcagggagacagcacataaggcttataagagag

SEQ ID NO: 34794 - DNA, 122 bp, Homo sapiens
tctaaagaaattagccttctccccaaatgataaacactctgattcttctacaagttatatcgtactaataactagactgcatgtttctttgaggtcatctagcacaatgcctcacatacaga

SEQ ID NO: 34795 - DNA, 122 bp, Homo sapiens
acgagtgcattagtgggtgcgcacatgcctgagcgccctctgcatatgagtgtgcacacacgcatgggtgtgtttacacgtctgtttgcgtaatttaccgggtttgcatgtgcatcaagaca

SEQ ID NO: 34796 - DNA, 122 bp, Homo sapiens
ttaaatatttatctgttctggggttgaactttaggatttaatttaatgtaatatgtagtacgtaagattccagcaattttagaaaaccttagaagaaatttggcaagttaaattcttcttgt

SEQ ID NO: 34797 - DNA, 122 bp, Homo sapiens
gatctcctccattagcaggcttccggggtggcgttgttgcctctctgccgatccttccttcgggtggggctgtcgactggcaccacggcctgtcagaccgtgggcggggggcgttgcaggca

SEQ ID NO: 34798 - DNA, 122 bp, Homo sapiens
ttttttttccagccactctgggtctgaaaactaccatggcagtccctaggtcctacacagcgaagaccaaattcagccgctctttaaaattcgccaccaagagttgcagtctgaagcggtgc

SEQ ID NO: 34799 - DNA, 122 bp, Homo sapiens
aggtttctccccagtatgaactcgcttatgtccaatcagagctgagccctgacggaaggacgtgccacactcactgcaggtgtatggcttctcaccagtgtggattcttttgtgctgcctca

SEQ ID NO: 34800 - DNA, 122 bp, Homo sapiens
ccggccccgcgtgtcaccgcgagtgggttcacagcctcatcccgaccccgcgtgtcaccgcgagtggactcacaccctcatcccgaccccatgtgtcaccgcgagtggactcacacgctcat

SEQ ID NO: 34801 - DNA, 122 bp, Homo sapiens
ttggaggggacaaaacatccaaaccatatcaagccctcacctcaggctgggttgcccactcggagtggcaccccagggtcactggccaccacttcctagggtcagtgatgtggtcaccttgg

SEQ ID NO: 34802 - DNA, 122 bp, Homo sapiens
aaaagtaaagggaaagtaaaaccagcctccagtcccctagattttcattaaagaaggcttcgggacacttccaggattcccccttggcacctgggtggtaagggagcccctgctccccggct

SEQ ID NO: 34803 - DNA, 122 bp, Homo sapiens
tcgaaaaacaaaaccagcaccgtgttggctcataacttgcagcataaatctccacaagtccgtaccgatataaggaaatgactgagtaaataaataagtggggaggagagatgaatcacaaa

SEQ ID NO: 34804 - DNA, 122 bp, Homo sapiens
ggaggctgaggcaggagaactgtttgaacccaggaggcggacgttgcagtgagctgagatcgcgccactgcactccagtctgggcaacaagcaaaactctgtcccaaaaaaaaaaagcgggg

SEQ ID NO: 34805 - DNA, 122 bp, Homo sapiens
agctcctgctcctgggggcagcccaggggaggttcctgccgcctccggtcacaacagctccgtccgccaatcaatacccggccctgctttatgtgtggccctattcacagacaccgcactga

SEQ ID NO: 34806 - DNA, 122 bp, Homo sapiens
gcggcagcctgcggggggcgggaatggggcgccgcggcgggggctcggctgatgacatcacggccaggctgcggcagcgcgggcgcgcggacatggctgcggcggtttcggcggcgtccgcg

SEQ ID NO: 34807 - DNA, 122 bp, Homo sapiens
acgcgccccgcccgctgcggtcctctaacagcccctcgcgccgccccacgtggggccgcacgggctggcggccccctcacccgattggccgccgcacagccaatcagagagcggaggcgata

SEQ ID NO: 34808 - DNA, 122 bp, Homo sapiens
tattcctcctccccctcctccatattctcacggttttctcaggaccttctgtccagccttcgccttcttggccttggtgtccgctgcttgggcattgctccgtcagtggcagacaccttgct

SEQ ID NO: 34809 - DNA, 122 bp, Homo sapiens
ggggtttccacagcgaggagcctccaccgcttgcccacccgcacccgcgtcccagagccgcgccctagtacctgaagccagacagaccggtcagcccaaggtccgtgaggccagggtgggaa

SEQ ID NO: 34810 - DNA, 122 bp, Homo sapiens
ggtgtgtacacaaaggagggattgttctcacgtcgccctgcgacgagatggggatggacccgcggttagaggtcaccctccctggggcgtcaggggagcatttgtccttgaaacacgctggc

SEQ ID NO: 34811 - DNA, 122 bp, Homo sapiens
ccacttttgatacatcatgaaggtcagcaagatgttactgctgtgcaaaacagctacattcgtgtaatattattttccatatgtctgttttcttagttactagattattgttcccatgcgtt

SEQ ID NO: 34812 - DNA, 122 bp, Homo sapiens
agcacagcacctgcatcagaggcacctaggcatatgcttgttaaacatacagactccaggcgccgcatctgtcctgccaagcgagcatcgctggggcagggccatgaaaatgacctttcgaa

SEQ ID NO: 34813 - DNA, 122 bp, Homo sapiens
ggcagtatccgcggcaggcccagagaggccaggacaggtcagaaaggcctacccctctttcgcttggtaccctttcctctttgcgagggatgcaaaggttatttatacttcgggtctgcagg

SEQ ID NO: 34814 - DNA, 122 bp, Homo sapiens
acacacacacacacacacacacacacacactctctctctctcacacaccctctcccccgacgcctgggttcaggcttggccccactgaagaaggaggtggccagagttcctctcacctgatc

SEQ ID NO: 34815 - DNA, 122 bp, Homo sapiens
ataaacccccccagcttccttattcgttgggcaggatactcttaggtatcctctaaaccacgtcccagagtttcccaactagatcgagctctgactgcccacagtgatgatctccgctggcc

SEQ ID NO: 34816 - DNA, 122 bp, Homo sapiens
actctcccccagcccccatacaaggcagctaatgacccagtgtcattttgtaaccttgtgcgatgtttctccaaagtctctgactcataagcaaaaaggaaagcaaaaatagtgacttaaac

SEQ ID NO: 34817 - DNA, 122 bp, Homo sapiens
acgagggaagggagcgccgccggcagctgccgggacaccaggataccacgcggccagcaccgaaacgctaggctcgcgctcacaaccgcaatctacactgagtagccgcgcgccgaacggcg

SEQ ID NO: 34818 - DNA, 122 bp, Homo sapiens
ctccctcccgggcaggggaatggtctgcacatccacattccctttttataatatggacaccggtcagattggatcagggcccacccaatgtccctgtttaaccttagtcacctctttaaagg

SEQ ID NO: 34819 - DNA, 122 bp, Homo sapiens
cgcccggaggccggcccagtcccccgaaccccgagctgcgcctggaggcgcccggcgcatcggagccgctgcaccaccacccctacaaatatccggccgccgcctacgaccactatctcggg

SEQ ID NO: 34820 - DNA, 122 bp, Homo sapiens
ctggcctggcgccggcacccccacccactctccgctggcacctgcctctggcgcagctgacggccaactcccgatccgaagccggcgctgcccttgcaccttgtcacccacccactgcctgc

SEQ ID NO: 34821 - DNA, 122 bp, Homo sapiens
gtcctcagagttttccggtgggagggaggcggaagacggggtaaatctcgcacaggctttcgggcaaggtagttctggcaccacaggaatgctgggaattgtagttttcgctctgtcacaag

SEQ ID NO: 34822 - DNA, 122 bp, Homo sapiens
gtggctgttgtgtgttttgcttctcccctttcaacatgagagttttcattgcagttttcccgctcctttttatatcactatataatgagtatgttgggggcagtatcttgcctttaagcttt

SEQ ID NO: 34823 - DNA, 122 bp, Homo sapiens
gacttctataaaatgcccatacatggtagaaatgacgacttccctagaatctcacccaagcgagattgaccccgttgatcggcatctgttacatgcgcccccaagatgacccccaatgtcct

SEQ ID NO: 34824 - DNA, 122 bp, Homo sapiens
aaacgtgcgtaaggcatgggagtacagtatgggacaggaaagggagtggaggtcacagcacgtcctgaggctgtgttttaagatgagaggtaacatacatgcagtttgtctcaaaattatat

SEQ ID NO: 34825 - DNA, 122 bp, Homo sapiens
taatttctttctagaagctgtcaagtcagattgcgtaggcactctcctgagtaggtgaagcgtgcggctggagaaagaaaaggaagaacaaggctctgacaatcacaattactttcttaggt

SEQ ID NO: 34826 - DNA, 122 bp, Homo sapiens
tagtgagagccctgcccctcagggaagtcaccactcacagggtcagtgtggaccagggcccgtggagccccggccggctgggcctgggctcaggggttcctgcggatgttgcagggatcgag

SEQ ID NO: 34827 - DNA, 122 bp, Homo sapiens
ccaggatgcgagagtattgcaggacagcggcaatctgctgcgacctgggacataacaatgcgccccttctgcagcgctgggcccgccggcgagaggtctcgctggtctgaggggctggggcc

SEQ ID NO: 34828 - DNA, 122 bp, Homo sapiens
gtagggatttaaaaaacatagggcaaatagaacccctgtgtgcatatacatgtatctagacgaaaatgctggttacctctggggaactgattagtgggggaaggacactgcagggtagggga

SEQ ID NO: 34829 - DNA, 122 bp, Homo sapiens
ggtgttgagcccgcccacacttccggaagaattgcactggactgtgggtatcctggtctccgcgtgtgtgagtaccgcggcgcgaggttagtggtagctgggtgcagacgccgtggcgctgg

SEQ ID NO: 34830 - DNA, 122 bp, Homo sapiens
agagcgcggccgccgcgctgagctgccggggcatggtgggcgctgggcgaggttctgcagcgtgcggcgaagtccgggcaggccccgaatcggtgccagagaaacctacctgtgccggagaa

SEQ ID NO: 34831 - DNA, 122 bp, Homo sapiens
ggtctataccctgcaatcggcttctcaggtcttcaccccccggcctcccgtgaccacccccgcccttcatctccagcgtctctgactcacgcaccgggcaccggccttgcgctttgtctttt

SEQ ID NO: 34832 - DNA, 122 bp, Homo sapiens
ccaagaaggtgaggctgctgggatgggtgactccgccgtcactgcaaacacgggacgtcccgtctactcccttacgcctgcttggtctgagcccgagtctacctcttctctaagtcgccagc

SEQ ID NO: 34833 - DNA, 122 bp, Homo sapiens
ctgtccacgcaatgactggaacgggattctctagaagcaagcacatgctctgggcagaggcggggtgcttccggggaggtcaggtgggggtggcattctggggccatgcgttttcttcccca

SEQ ID NO: 34834 - DNA, 122 bp, Homo sapiens
tcagaccgaggccccgggaggaaacagacttcgggaacaaggctagcaccagaggctgcgcgccccgggcatggcccctgtcggtgggacccgagacgccttgttgtgacgaggtgggaacc

SEQ ID NO: 34835 - DNA, 122 bp, Homo sapiens
taaaagctttgccctcccaaactcagctcttcagggtcactctgggtaagtgttatgttacggtggatatgagcaaaacagagaggtaaggagcagaccacgccaggctccaggcagcctcc

SEQ ID NO: 34836 - DNA, 122 bp, Homo sapiens
ctggtccctcccccggcttcctcctccaggaagaggtgtgcacacccacaggcgtgtacacgtgggcaaggctggcccagcccaggctgcaatcatgacaaagacaaggctccacttaatgt

SEQ ID NO: 34837 - DNA, 122 bp, Homo sapiens
tgctgcagcgtggggggatgtgacacttgcctccccaccccccaggcctgatggtgaaaccggagtttcctgacaactgagaaggctcgcggtgaaaagcagcccggtgcagacaggagtgg

SEQ ID NO: 34838 - DNA, 122 bp, Homo sapiens
aaactgaaattctgtcattagctctgactagcaccagctgctgtataaattctgtgttgacgtagacctccattggtgttccaaatattgcagatgaatctctctctgcctccaaaatcctc

SEQ ID NO: 34839 - DNA, 122 bp, Homo sapiens
tgtggcctctatcacgttctgcatgtggcctctatcacgtgctgcgtgcggcctctatcacgttctgcgtgtggcctcgatcacactctgcatgtggcctctatcacatgctgcgtgtggcc

SEQ ID NO: 34840 - DNA, 122 bp, Homo sapiens
cctgcattgcccagcatgtcaatccttcggcaggcctgacaaattttaataactgaccagcgaattgggaagcagtgtggcatcgtgcaaagaacactgagtcaggagctaggattttcatt

SEQ ID NO: 34841 - DNA, 122 bp, Homo sapiens
aaagtaggtagagtgattttcctatttatttagtcctccagctcttttattgagcatccacgtgctggacgatacttatttacaattcctaagtatttttggtacctctgatgtagcagcac

SEQ ID NO: 34842 - DNA, 122 bp, Homo sapiens
agccggggtaccgagctggggggcgggagctgtcccggggacaggcctgggtgaggctgccgggacgcagggcccggctggggctacggccgaggccacacctggggctgtctcgggctgtc

SEQ ID NO: 34843 - DNA, 122 bp, Homo sapiens
tgccctggaaattttccttttctcacctgcatgaaaatgcttttgaggccccccagcctccgcccggagtttagccccttcagactctgcacccctgggggtggccctgacccacccacccc

SEQ ID NO: 34844 - DNA, 122 bp, Homo sapiens
gtgagcccaggcgccgcgtcctccggaggccgtgctcctctgcttctggtcactctgaggcgctgtctgtttctgtctatgcgtccatgccagctgtccctctgtgcacaggccctcgtgtc

SEQ ID NO: 34845 - DNA, 122 bp, Homo sapiens
gattggcccgtgcgagcccggctgctcgcgcgccgaccaatcagcggcgagtcgggcgcacgcattacctctcagccaatggacgggatcggacgatgggttgctgacgtaggtccgcccca

SEQ ID NO: 34846 - DNA, 122 bp, Homo sapiens
gcattttaagaggctgaggtgcgccttccgctgcccgcctgcgtcccgccacggagagctcgcctttatctagccctctgggcgagagaagaaggctaatcccagcctgggacaaggctggc

SEQ ID NO: 34847 - DNA, 122 bp, Homo sapiens
ctggtggtgggaaggggagagggctgtgcatgcatgtaccaagcgacattccatgtgggtcgtggagcaatgactatgagcctcttttgggagttgtagggtgcccatgctccatttcatga

SEQ ID NO: 34848 - DNA, 122 bp, Homo sapiens
accagcgccgcaggctcacaggccgggggtgggggctctggaccgaggggcggcgcggggcggcgcggggcggcgcgcgcggtcctggagcgctagtacttgcttctcgactccccggccgc

SEQ ID NO: 34849 - DNA, 122 bp, Homo sapiens
gcgtgggtgtgtgcaccaaggcagcacagggcaggacaaagcccggcttgctctcatctgcgtctcattggatttgcattatctaggtcttcagagggagatccctcagcctctgagtctgc

SEQ ID NO: 34850 - DNA, 122 bp, Homo sapiens
cagaagggccgggcattgagctataagcaccagctccaactgttaaaattgaagacactacgaggaatcccctaaccctcacctccctataatctctcaactaaagtgttaatacttggtgc

SEQ ID NO: 34851 - DNA, 122 bp, Homo sapiens
ttgatcttgttcgtgtatcttaagtggggcttttcaaaagcgcttttgttgctttttgttcgctgggggaaggcagggtaggtgagaaaacggaaccatctggagtcccagggctggggact

SEQ ID NO: 34852 - DNA, 122 bp, Homo sapiens
cccggccatccatccccggcccccgctgggtcccggagccgcgtggcgcgccctgtcgtccggcctgcattccgcgagatggaattctcggctggggctgataataagcaggtattgattgc

SEQ ID NO: 34853 - DNA, 122 bp, Homo sapiens
cgtggggtctctcctcatgttctgcctttggttctaggcgctttccaggcctagggaaaccgcactcggggacgcggggaactggggaacatgccgggttggggcggcgcgctccggggaac

SEQ ID NO: 34854 - DNA, 122 bp, Homo sapiens
cttacaggagacgggggtggggacgcgctgagtgaccctcaggagacgggggtggtgatgcgctgagtgaccctcaggagacgggggtggggacgcgctgagtgaccctcaggagacggggg

SEQ ID NO: 34855 - DNA, 122 bp, Homo sapiens
ccgggcccctgtctgtgtgtccacggtgcgtgcccaccctgacggcacctgctggcggctcgcacctcagagcctgcgtgggccgcggctgcacccgagtcctctgcttcatcgaaagagac

SEQ ID NO: 34856 - DNA, 122 bp, Homo sapiens
cgaggccggagcgccgacggtggcgctaactactcctggcagcacgggaggaggcactgacgtcaagccccggactgggacccgagcctcagctgtcatttaaagagataggctgcagccgc

SEQ ID NO: 34857 - DNA, 122 bp, Homo sapiens
tcctgggcccattttagccgcccatccacaggcaaaggaaaccacagggggtggctgaggcggctgctgtccctctttagcctgaacctgaggaaggagaagcagccccagctatatatacc

SEQ ID NO: 34858 - DNA, 122 bp, Homo sapiens
cccttcttctacaaggacgtcttcagagatctggaggaggaaagggccttgccctgagttcgctgagccagaacaataggacttcttctgtagttgtgaaacttgtcagttgttgaagtcag

SEQ ID NO: 34859 - DNA, 122 bp, Homo sapiens
agaagagttggctggctggaatcctagcagtgaactacttcccccctgacttacgagatccgcacaccccacagaacagaccttacggtggcaggaaaaggtgcttctgaaggtgtctgaga

SEQ ID NO: 34860 - DNA, 122 bp, Homo sapiens
gtgagttgaactgcatttgccgaaaagatacgttcaagcctgagccccaggaactgtgaacgtcacttgattccgaaatgaggcttttgcagacgtaattgaggatgtcaagatgagatcat

SEQ ID NO: 34861 - DNA, 122 bp, Homo sapiens
gacgcagcctgcctgactgccaggagccaagcgcgagtcggcccagccaaagcgcatgcgcgagccgcgcgccgctttttgcttcacagtgcttcccacggttgtcttaggaaccagtcccc

SEQ ID NO: 34862 - DNA, 122 bp, Homo sapiens
tccttggcttccttccccaaagcagctcagagctggtatgaggtgagggtggggggcagccggccagcctggctgttgacggcaactccagggcttgtttcgcgcagccttgccagcattac

SEQ ID NO: 34863 - DNA, 122 bp, Homo sapiens
cccatatcggggccaagccggggacccgcaggcccagctgtttcccgcaggcttcctgagcgcccggtgcagggctgcttcttgtgtcaggcaccagcctggatgctgcggaaacagcttcc

SEQ ID NO: 34864 - DNA, 122 bp, Homo sapiens
gctccagtcacctggggcatgaagctccagtcttggggcactggggtccctgtgcagtgtcggggttgtccccagcctctgctgaatcctgcgggaacctggacctggccttctttggaaca

SEQ ID NO: 34865 - DNA, 122 bp, Homo sapiens
cagacagaaatcgggtggaaagctagcaggaggcgttgctcaagttcaaaacaatctgtgcgtgtccaggcacgcgcggagccagaccccagccgcgcggctcagacctcgcgagagccatc

SEQ ID NO: 34866 - DNA, 122 bp, Homo sapiens
cctcagatgcacaccaccacatccagctaacttttaaatttttctgtagaatcaggggttcgctatgttgcccaatctggtctcaaactcctggcctcgagcaatcctccaacctcagcttc

SEQ ID NO: 34867 - DNA, 122 bp, Homo sapiens
gactgctccccgcgctccggacgtcccgggctctgagctgcgggtgctgctcaccgggcgcgatctcctagtaggttttgcgctctgcctcttggcaagcaccgactcaccttgctacccct

SEQ ID NO: 34868 - DNA, 122 bp, Homo sapiens
tagggcttagccaggtgtggtggcatgcgccttaagtcccagctacgtgggaggctgaggcgggaggatcctgtgaacccaggggttcgaggctgcagggaactatgatcgtaccactgcgc

SEQ ID NO: 34869 - DNA, 122 bp, Homo sapiens
tcacagctacctgctgcttcctacaatgagattggacacagttttcaacatgatggagagcgcctccagagccagcgccctttgttctttctgtctgtggggtggaaagcgcccaggccaac

SEQ ID NO: 34870 - DNA, 122 bp, Homo sapiens
ggcccgtccagcagaggctcccaaggcagcctcagccgggctctgggggactccctgggacggcggggtgcggcccagaggacagctctacgccgaggtgatggaggtgatggtagtgctgg

SEQ ID NO: 34871 - DNA, 122 bp, Homo sapiens
ttcaaaggagaatattcaacacaaaatgttttcagcaactacttgttgaaatgaatgaatcgtatgactggtcactgtgaatcccactgcaaatgattgaacgctcatggaaaaactgctga

SEQ ID NO: 34872 - DNA, 122 bp, Homo sapiens
ggagctgagatccttttagtcaacatatgacttgtgactttaacactcagcaagaatgtacgcttaatgaaaactttgctctctggcactggcacttttttgagcaataatcctgccatagc

SEQ ID NO: 34873 - DNA, 122 bp, Homo sapiens
tggctgctctgagtgcggggcctgcagagcatgtgcccacctggaactcacgctggctcacgagcaccgcatgcagccctggttcctgcccgtgcctctccctccacacctccccgcaagca

SEQ ID NO: 34874 - DNA, 122 bp, Homo sapiens
ttgctcagctgctcctgggtggcctggcatgctgtccaaatggcagtggtttcaggcgggcggtcgctggcagctgtggcaggtggagaggaagtgggggaatcgctgggacttgggaatcc

SEQ ID NO: 34875 - DNA, 122 bp, Homo sapiens
ctggctccatggcggaaccggccggcacggattattcccctctcgggagaggtctgcagccgggcctcagtgcttcagttcgtggcctggcattttgtgtcagtgttttttaacctttggac

SEQ ID NO: 34876 - DNA, 122 bp, Homo sapiens
aagaaaatagctgtatggcataaagtctacttgagggaaaagaacaacccggcacggttacgttcaatcagacactaaacagagtgcacgcccacccaggggacactgaggtcgctgggcca

SEQ ID NO: 34877 - DNA, 122 bp, Homo sapiens
cggccggcagcttgaagggcggcgcgaggcagcgctcgagcagcagggggcgccaggacccgcggcgtcccgcacctccctggccaccagggctgcgatctcgccacctgcctcaactccaa

SEQ ID NO: 34878 - DNA, 122 bp, Homo sapiens
tcttttgtttcttggccttaggctgataaatcaaagtatctcaggtgatacaggaattcccggcaatgtcatattcaaaatattgggcatgttgctcaagcagtatttccattattggaatt

SEQ ID NO: 34879 - DNA, 122 bp, Homo sapiens
cttccgccgggagcccggaaccgagcccaggagccggggacggtgcgccagtgccccctccgcgagccccaaccagtagacggttccctgtctcccgcgccccaatttcgattttcaaacgc

SEQ ID NO: 34880 - DNA, 122 bp, Homo sapiens
gagggcaagagacaaggttggtgtgagggtgaagtgtggcagcagtggagcagaggggtacggccctgggagcagccctgactcctcactcaccgggtgtcctggagggccctgcacaccct

SEQ ID NO: 34881 - DNA, 122 bp, Homo sapiens
acctcgtggtccgcccgcctcggtctcccaaagtgctgggaatacaggcgtgagccaccgcgcctggccaaatctgatcttctcttaaagagagtttgtggaaggcatcctctgtcttctgt

SEQ ID NO: 34882 - DNA, 122 bp, Homo sapiens
tgaggctgcaggatcatttgttgcggagcccttcttctgcattgatatttcattagattccggcaacggatgcttcacatctctgagctcagaggtcctctctcctgaaatatcgtcaggat

SEQ ID NO: 34883 - DNA, 122 bp, Homo sapiens
gaacgtgaacatttggagtttcctcttttgtgctgattcctgaggactaggaaggtgccccgaaaagaattcagagtgagtacagtgaaacagaaacctgctcagcttctaagtgcaggaag

SEQ ID NO: 34884 - DNA, 122 bp, Homo sapiens
ctctccccagtgagcactgacaggccgtgcgagctgccttgagctgcaaacggggccctgcgcggctgccttggagcctcccaccccggggacgctgttgcgggcgggagaggaccgccggg

SEQ ID NO: 34885 - DNA, 122 bp, Homo sapiens
ccgactgcgacacacgaatggacagtcaactgtcgctcccgcctcaccatgcagagcacgcgcccatccaacactaggcagagccaccgccttttgtagaacaattgtgcaggctccaaagc

SEQ ID NO: 34886 - DNA, 122 bp, Homo sapiens
gtgagggtcaggatggtcttcaggccacaggtggcgcctaggaggatgtctgtgtccaggcggtctcccaccatgacggtgcgctcggggttgatgccgtattcctgggacacgcagtcgaa

SEQ ID NO: 34887 - DNA, 122 bp, Homo sapiens
tccccgcttagtgtgtgatgggggagggcactgagggtgtcagatcatcagtggtttgggcggtggtttagtacttgcctctgtcacagattctacaactcccacccatggaaccttcaaca

SEQ ID NO: 34888 - DNA, 122 bp, Homo sapiens
aggaggagtacccagttcaattccactgggtcactatgtaacaaggaaggaaatgcagaccgatgaattctgctgccctggactccttacaagtctagagggggaacagatggaggttctag

SEQ ID NO: 34889 - DNA, 122 bp, Homo sapiens
caggcaggcctcccaggggcttggactgcaggagctgcgttggggagcaccgctgcaggccgaggctgagggggtggctgcggctgcagagactggatggtgaaggtggaacagaggcccga

SEQ ID NO: 34890 - DNA, 122 bp, Homo sapiens
ggccgggtcgtccttctcgcgagctcaggaggagcagccttaggagcagagcggaagtctcgcgagagtgactgctgcaggcagtggcggcgcgggcgcgcgcagagacggcctcgggcgcg

SEQ ID NO: 34891 - DNA, 122 bp, Homo sapiens
aagcaatcaggtcagtgatctgctgccatctgggaacctgcagacacagcctggggccagcgtcccgaaggtgcctgcagaaggctgttcctgttggctgaggatgcagaggcagagggtaa

SEQ ID NO: 34892 - DNA, 122 bp, Homo sapiens
cccagatgccggcctgcctctcagcttgacttccctccccggactttggagtgtcttctgcgttaggatttggatcccagtggccctggagcggcagaagggccgcggcgataggaaagcag

SEQ ID NO: 34893 - DNA, 122 bp, Homo sapiens
ctgaggtgcagctgggcctgtggcctagaaggcagtcttgtgggtgcctcctcccccagccgcaactcaggtctgcagctgggtcctgcctccttccgagtgggccatggccggtacatggc

SEQ ID NO: 34894 - DNA, 122 bp, Homo sapiens
agggctggaaacacagtcaaggggaaattatgaccaagacaacctttgctaaaatgccagcggtgactgccattgatgttcctataaaaggtcagctctgtcaggaagttccagtgcatcat

SEQ ID NO: 34895 - DNA, 122 bp, Homo sapiens
gccttggctggagaacttgggatgtcactctgctgcttacggtcacagagctcgagcaggcgctgtcacttgggccatgtgagccagtgactcattttaggatctggtcctgggcatctaag

SEQ ID NO: 34896 - DNA, 122 bp, Homo sapiens
ctctcgctgctgggtaccagcttcatgtcttctcagaaggctgctgcttacctttctctgcggaaaatttggttgtctgaagctcctacactttcaatctcacagctttagccttctgagag

SEQ ID NO: 34897 - DNA, 122 bp, Homo sapiens
tggattcaaagttggcctctcatactagcaagtataccttggtatcctggtcacttctcccggccacagcatcacattgctataaaaggcagatacaagtattaaccagctcacaggttatc

SEQ ID NO: 34898 - DNA, 122 bp, Homo sapiens
taaaggacaggccacaccacagcagagaccaccacattgagatcactactcagtgcatagcgaagaccagtatggcaaaattagtcttggaaaaaaaccacagccactaagataaattcatg

SEQ ID NO: 34899 - DNA, 122 bp, Homo sapiens
gttgagggtgtctcagaaacctccgtctcccggatccatggctgctctacagagaggggccggaccgtgttctctccggctgtgggcaagccgtcctgtcgtttcttccaccttatgttgtt

SEQ ID NO: 34900 - DNA, 122 bp, Homo sapiens
caactgtcgacgtcacacgacctgggcctccctgaatgggagatatttactaggcaatcccgcctactgttctgaggtttcccctccaggtgcagcttcagagccaggcgagccaggaagga

SEQ ID NO: 34901 - DNA, 122 bp, Homo sapiens
ttcctaagttttaaattgcacgctgttctgagtggcctgataaaatctcactctctctgccgggcgcggtggctcacgcctataatcccagcactttgggaggccgaggtgggcggatcatg

SEQ ID NO: 34902 - DNA, 122 bp, Homo sapiens
ggctgcaggtcattacgataatgagagctaggggtaaccatgtccatcagagggctgggacgtaagcatttgtgtgaaaaggctagctgttgttgatcttttacatttccgcaaggtatgac

SEQ ID NO: 34903 - DNA, 122 bp, Homo sapiens
gcccgggggccgcgggcgtaacaggtgggcgaaggtgcgcggccctggcgagggctgcggcggggtccatggacaccggaggaggaaacgccaaggtttttccaaaggacaagcggccccgc

SEQ ID NO: 34904 - DNA, 122 bp, Homo sapiens
acccactacactcccacccaggaataacttgtatgatctttcatttcagaataccaggagcgatatggttctcgccccgtctgggctgactaccgccgcaaccacaagggtggtgtaccccc

SEQ ID NO: 34905 - DNA, 122 bp, Homo sapiens
cagagagaaaaaagaggggggggagtagaggtagtctaccctccgcctctccaaccactgcgacttctcaacaatgtctcatgaagaagaaatccaacatctcacacagggttgagggggtg

SEQ ID NO: 34906 - DNA, 122 bp, Homo sapiens
tgagctcctgacctcaggcaatccacccgcctcagcctcccaaagtactgggattacaggcgtgagccaccatgcccagccaaaagagagattttcaatggtcttgcaagattaggtgtctg

SEQ ID NO: 34907 - DNA, 122 bp, Homo sapiens
agagtgacggtacagtgcctggagctgggctgttttgtcttcagagtggtgcctggtaaccgcgacttccccgccatgttctgtgtgttgctggctggagaagggtggttgacaaactctga

SEQ ID NO: 34908 - DNA, 122 bp, Homo sapiens
attacctgtaaggagtagtgtcatttcgtttcacagaactaacagattccaatttgcctgcgctgctttcagataatccttctatgtttttgctcaattgcacttggatacttcctgcctct

SEQ ID NO: 34909 - DNA, 122 bp, Homo sapiens
gggtcgggtccctgtcctgggtcccagagtgccctggacgttggggctgcagggacaccccggggccagcgacggcaggtgatgtccagggccccgcgccaactgggagctttgctgccgct

SEQ ID NO: 34910 - DNA, 122 bp, Homo sapiens
gtccatttttacagaatgctgactggtgcatttacaatcctctagctagacacagagcaccgattggtgcatttacaatcctctagctagacagaaaagttctccaagtccccactgaccca

SEQ ID NO: 34911 - DNA, 122 bp, Homo sapiens
aaaaaaaatccatcatccatctggacttaaatttaggtaggcattctgtattttctctagcgaagtaacttctccttcaaaggagaaacttagagtaaaataaactgacagagaatgtaact

SEQ ID NO: 34912 - DNA, 122 bp, Homo sapiens
gttgggagggaagtggaagggccctgaaaagtccccagtgttccccgtggtggctgcgcacgttgtggtctccgtccgtgggctgttttttcccatttactgcagttcctgggtcccaggtg

SEQ ID NO: 34913 - DNA, 122 bp, Homo sapiens
cccctcctccgcccctccaccggcgcttctcggagtccctgcctgcccacagtggggagccgtgagcccccggacccggccactgtccccctagttttgtccaagccaaacccccacccttt

SEQ ID NO: 34914 - DNA, 122 bp, Homo sapiens
cttgaagcactgatttctccctactttgtgtctccataagatcatgaactccctaagggccggaactgtgttttatcagtcttattctcagcacttcatacagtcaacatggtatatatctg

SEQ ID NO: 34915 - DNA, 122 bp, Homo sapiens
aagtccaagatcaaggtgctggctgaatccggatcaggtgaaggtggcactttcctgctgcgtcctcccgtggttgaaggagcagggcagctctctggaacctcttttggagggatgcaaat

SEQ ID NO: 34916 - DNA, 122 bp, Homo sapiens
ctccctccctccctcggacgcccgccagccgctctctccctctcaccctcacaccgggagcgacgcacaccccacccgcccctcagcttcgcaggcccggccccttaaagagacacacacgg

SEQ ID NO: 34917 - DNA, 122 bp, Homo sapiens
atgaagagacgttgacttaaaacgaagccattccaaggacagacggctgtatggaaaggccgagctttgtttcctgtgtttgtgtggactccaccatcatgttgaattttgtcaacactctg

SEQ ID NO: 34918 - DNA, 122 bp, Homo sapiens
ttgctgggtaccaccccacagagtgtctatagaatgatgccctaagaatttgcactttgacgaaaactggtcatgtatttaagctggtcacagataaccagaaggtgctgaactgttcttaa

SEQ ID NO: 34919 - DNA, 122 bp, Homo sapiens
ggggaggaggtcagacacagacactcagtggagaagcccacttgaggatggaggcagagacgggggatgcagccacaagccaagaatgtctggccaccaccagaagctggaagacgcagaaa

SEQ ID NO: 34920 - DNA, 122 bp, Homo sapiens
ctacagaactcacacacctaactgctatgccacctctcagccatgctgatgtcaggtagacgttaggtagcatgacaactatcatcaaaacactcccaggggatcttgatttctggaattcc

SEQ ID NO: 34921 - DNA, 122 bp, Homo sapiens
cacaacacattttccaggcttattttgtactttccttgtcccaggagtcagccatttctccgaagagccctagtgaacaattaagtttagaagccgagatctgggtgctagatgtgcttgtt

SEQ ID NO: 34922 - DNA, 122 bp, Homo sapiens
tgctggaagatctaagagaagcttgacactcctggccccaaacactgcctggctacaacacgatatccagggacagataccttccatgtacagcaagctgtggagtggcaagaaagcaaagc

SEQ ID NO: 34923 - DNA, 122 bp, Homo sapiens
ggctcggagaatgggcaggtgagtcggatgcagcgccgcgtcctcgctcccgcggcggcccggaccaggcctgggccgtgatgactagttctggggtctgctcctggccttcccctccccag

SEQ ID NO: 34924 - DNA, 122 bp, Homo sapiens
ccgcacacagcctgctcctgttttctgggctgcgtccccggcgtggttaagagtcctgggcggctcatgcaactgcacggagtggctgtgactccacgtaataaacgaggaggctctgtaaa

SEQ ID NO: 34925 - DNA, 122 bp, Homo sapiens
atcatctgtgtgccgtcaaaaaccctgccattgctctcctcgcctgtatgcttttgttcacgtggacctttggctctctgcttgcctgagtcctgccctgttgctccagacctaccctgatt

SEQ ID NO: 34926 - DNA, 122 bp, Homo sapiens
ctgtgagatggtgtctgctccatcgacctgggtcacagaatgaggaaggcacagagcacccggggaccagcctgctgccagcactcagcaggagtgagaaatgagcctctggtcctttaagg

SEQ ID NO: 34927 - DNA, 122 bp, Homo sapiens
ggaagaaaatacccagagagaatgtacagtaagaagaaggaatctaaagacaaaccttggcgcatctctctataaccagcagtcagaaaggagggaaatcaaaagaaagtgtcagagaatga

SEQ ID NO: 34928 - DNA, 122 bp, Homo sapiens
tcaattggtagactgagtatagtacattgtcttccccaatgtgggtgggcctcagccaatcgaccgaagacagaatagaacaaaaaggctgacctcccaggagtaagagggagctcctacag

SEQ ID NO: 34929 - DNA, 122 bp, Homo sapiens
ggaagaagagcgacggtcgcacagctctcaggccgggggccggagccccggcagcccggccgcgcccatccacgcccagccacgcccagccacgttggccgcccgcccagcctgctgggaaa

SEQ ID NO: 34930 - DNA, 122 bp, Homo sapiens
gccgtcgggaggcagaatccgggtttctggggtcgggagtgcgtatgcaaatgacgtgggcgtggttggcagatctcccaggaggcctcaggggtcctcaccacaggtctgggccctccgac

SEQ ID NO: 34931 - DNA, 122 bp, Homo sapiens
ctgcttctgattcccaaagatttctaacatggtttgatttcccaaactttagcatgaatacgaatcacctggagaccatgttaagccagattgctggctccagatccaaaacttctgatgta

SEQ ID NO: 34932 - DNA, 122 bp, Homo sapiens
cacacggcagccaacttcggcctctactgctttgtcagcaagactttccgggccactgtccgacaggtcatccacgatgcctacctgccctgcactttggcatcacagccagagggcatggc

SEQ ID NO: 34933 - DNA, 122 bp, Homo sapiens
ccccgacacccagtgcaaaaacttttgacctattatgtactcagttcaattgggtgagaccgaagatcttgatttcattcatctgtgtgtcttaaaaacacttgtgtctttaagtctattat

SEQ ID NO: 34934 - DNA, 122 bp, Homo sapiens
aggcaatatgtgttgtcagcacttccctggaagattcctcagttgaacaaagaatgtttccgactctgacagcaaagggcagtcaagggggctggggaaaacctgagagcggtgtattctag

SEQ ID NO: 34935 - DNA, 122 bp, Homo sapiens
agacttaaatagacatttttccaaagaagagaaataaatggtcaatatgtacataaaagacgtccaacatccttagtcatgttaaataaggcattgttttgggctaagctactgcactaggc

SEQ ID NO: 34936 - DNA, 122 bp, Homo sapiens
tacaggtgcgagtcaccgtgcccagccgacagagtactttcgaatcatttctattcctgacgtagccttcctagaatagcatccctcaagagatgatctgaggaccctctgtgtctggaact

SEQ ID NO: 34937 - DNA, 122 bp, Homo sapiens
cgattcgccggggggctgggggtttgctgcccaggaccgtgctgcaccagggccctgagccgtagggggatggggggaggggtggggagatcccggcaccaaacccttctgcgccgctcgct

SEQ ID NO: 34938 - DNA, 122 bp, Homo sapiens
atctcggctcactgcaacctctgtctcttgggttcaagggattctcgtgcctcagcctcccgaatagctgtgatcccagctattcaagggaagagtggaggatggggcaacctctgggaggc

SEQ ID NO: 34939 - DNA, 122 bp, Homo sapiens
gccgcgctgcagaactctgtgggcagggtgggcccagatgcccttccaggtgggtccccacgtcggcaccgctggggcggcagcgcagcactcgagcactctccccgagacgctcccagctg

SEQ ID NO: 34940 - DNA, 122 bp, Homo sapiens
atcaaaaaattagccgggcatggtggcaacccgtgtctgtattcccagctacttggaaggcgaagaggagagaatcacctgaagccgggaagtcttggcaacaatgagccatgatcacgcca

SEQ ID NO: 34941 - DNA, 122 bp, Homo sapiens
ctgaaagccaggatttgccagatgaaggaagagggacacatgagagtgatagagaagtaccgaaaattccaaccaaaaagtgagttcgccaaggaggggctaaagttgatgcagagcagtgt

SEQ ID NO: 34942 - DNA, 122 bp, Homo sapiens
tccttaagtctcacctcctccaggaagccctcagactaaccctggtcaccttgaatgcctcgtccacacctccagacttcctcagggcctgtgatgaggtctgcacctctgtgtgtacttgt

SEQ ID NO: 34943 - DNA, 122 bp, Homo sapiens
agaagtagggcttagaggcataacagaaaactagcatactgtggtatcacagaatatcagcgtgattgctcaactgtcattcactgaggtacatctgaggagtgaaatggcccaaagccaat

SEQ ID NO: 34944 - DNA, 122 bp, Homo sapiens
ggcgcgtccgcgtcgcacggaagtctcgcgatgtttgcgtttgaacctcttggcgggtgccggccatggcggcttcgctcccgggacctgggagccggcttttccgcacatatggggctgcg

SEQ ID NO: 34945 - DNA, 122 bp, Homo sapiens
gcaggggctcacgcctcttgaaagggtgccagaggcatgagttgggcctcaacaggccaccgtgacggaggagctgggccgcacacaggctgctgggaggcaggcagggacttggtcccggg

SEQ ID NO: 34946 - DNA, 122 bp, Homo sapiens
ccccttccccgcgggcctcggttcaaacgacccggtgggtctacagcggaagggagggagcgaaggtaggaggcagggcttgcctcactggccaccctcccaaccccaagagcccagcccca

SEQ ID NO: 34947 - DNA, 122 bp, Homo sapiens
accgcctgcagggtggagattcctctcccggatgctggccagggactgaagttaaaaggccgcggcaagggagagaccccccgccacccgggcctacgctttccttcctgagggccaggaca

SEQ ID NO: 34948 - DNA, 122 bp, Homo sapiens
ggtggaacaggttgacgatgatttgttgtagctgaggcgaacggggcgaggctgtgaggacgggttttggagcgccgctcggccgtcctcaaaactttggacacaccctccgtttctgtcag

SEQ ID NO: 34949 - DNA, 122 bp, Homo sapiens
ttgacctcactcctcctgggtctgactgactaatctgttagggtgggtaccataaatgaccgttttatctgcctgcccggggcgtggcaacagggcctccccgccccccagccctgcctgtc

SEQ ID NO: 34950 - DNA, 122 bp, Homo sapiens
aagttcactgccagctcaaggctcacagcctgtgtgtgtcatgcccagcacaaaccctcccgggctgaagccagttcccagaggcaaagtctggatgtggaaaatgcaccaggctgcaatcc

SEQ ID NO: 34951 - DNA, 122 bp, Homo sapiens
cagatatcacaaatttgcctttgaaggtagatctcacatgtaacttttagtgtcttgtgacgtccttactaatttagtgttgggtgaagtccttagtattttaaaaagaaaattaaccagta

SEQ ID NO: 34952 - DNA, 122 bp, Homo sapiens
tacagttgcaagtagtttggatctgaatgcccataagggaaggaaggcatagaagctaatcgcagaagccttcaggggggagaacagcagaaataccaccactcacactttcatcgctcctc

SEQ ID NO: 34953 - DNA, 122 bp, Homo sapiens
ttaaaaaatgacaattaaatgtgcagattccccacgcacccgatgacctattttttcagccgtgggaggaatggagtctttggtacattcctcaccgaggttagcagctcagtttgtggtta

SEQ ID NO: 34954 - DNA, 122 bp, Homo sapiens
ctgcatttacagaagcaacgcacacagggaacgtcctagcgccatctggtctcgcacacacgcttgggactcacaggaggggcctgggcctcggccagccctagttattggtgcacagtatg

SEQ ID NO: 34955 - DNA, 122 bp, Homo sapiens
ctttggcacttctaaataacacaattttgagacattaatcacttggattctactttaattcgatgaatgatttcaaggttaacctgatgtctcaaaattaaagctacagctcctgttctaca

SEQ ID NO: 34956 - DNA, 122 bp, Homo sapiens
cccattgacatttgctggatatgtttgcaacatagtcctatgtagtgattttaatgatatcgcatactttacacatggattttgtgcaaactgaattaaaggaaaccttgccattttatttt

SEQ ID NO: 34957 - DNA, 122 bp, Homo sapiens
gaaactggtagactgtggcttcaaatgtagtttttcctaccttctcagatggagtatgagcgccaagtggcttcattaaaagcagccaatgcagctgaaaatgacttctccgtgtcccaggc

SEQ ID NO: 34958 - DNA, 122 bp, Homo sapiens
gcacccctccttccccgccgccgcggcccggggcattgtggaacttgtagtccggcgccgcgctgtccccgccctccgccctgcggacccacgtgtggggctccacccgcggttctctgcgc

SEQ ID NO: 34959 - DNA, 122 bp, Homo sapiens
ggagaacctggaggactcctgcgtgctgactgggccagatgattccctgtgggacaagcacgcgtgcccagcctacgtgggacctgagatactcagctcacgggcctcatactcgggcaagg

SEQ ID NO: 34960 - DNA, 122 bp, Homo sapiens
ctcttcagcgggggctcaacccccagacctccagaaatgacgtcagaatcatttgcatcccgctgcctctacctgcctggtccagctgggaccctgcctcgccggccgcatggccagagggt

SEQ ID NO: 34961 - DNA, 122 bp, Homo sapiens
ggagaagatgaaataattctgcttcttagttgcaaataaaataaatcgaggtacagggagcgggagtcatatcttggctcaaagaatagaaaccaataaatctaggttgcttgccttttatc

SEQ ID NO: 34962 - DNA, 122 bp, Homo sapiens
ccctaacgacctgagcgaggggcgggaatctgcagcctcggttctggcagtgagtagcaccgctcgcctccaccctcgagaccgaccttgcccgtatgctgccaggtgcagacgccttccgg

SEQ ID NO: 34963 - DNA, 122 bp, Homo sapiens
aggagaggggggcctgcgtgtgaccgagcgtgcgtgggaggacgcgcgtgtgtgtctgtgcgccctgatcacggtggtctgtgggtggggcggatcgtgcgcgcgcgcccgatctgtgcgcc

SEQ ID NO: 34964 - DNA, 122 bp, Homo sapiens
cagatcagagggatgagggggaagaaaggagggaggaagaagagaagggagggaggactccgcaagtgtggaagcgttgtctttggatgttccattgtaaatcagatgatatttctatatgt

SEQ ID NO: 34965 - DNA, 122 bp, Homo sapiens
gcctcccccatcccaatgtcaaatccagaaagtaacccaaaagagaagaacatacgtgagcgctggagacccgggagggtgcatttcaacagcacgccaggaacttcaagggagttttgcaa

SEQ ID NO: 34966 - DNA, 122 bp, Homo sapiens
aaaggccaaaactacaaaactagatatttggcttttaaatgtatcttcagcatacatattcgtcactgttacccagggcacatttgaaaaactccaaaaaccttgtataacctactctttaa

SEQ ID NO: 34967 - DNA, 122 bp, Homo sapiens
tgcaacgtgccttcctgtttgtgagttcacctgaccgacaccaggaggggctggactcctcgcctgccgccggcaaggcccgccctgggccagtggggtgcacacagcaggccctgtgtcgt

SEQ ID NO: 34968 - DNA, 122 bp, Homo sapiens
gacccgccgttcaactgcagctcgggcgacttcatcttctgctgcgggacttgtggcttccggttctgctgcacgtttaagaagcggcgactgaaccaaagcacctgcaccaactacgacac

SEQ ID NO: 34969 - DNA, 122 bp, Homo sapiens
aatatgcaaatgcaggtatccttgatgtcctgcattcttagagccatctggaggtggtcacgacacctgacacacgttgggacaaggagaagagggcgggaatcgctacgttggatggacct

SEQ ID NO: 34970 - DNA, 122 bp, Homo sapiens
ggcgtccgcaggcccgagcgggagctcccgggacagcccgatgaccaggatgcgcatcagcgtgtcctccaaaatgggcacctcggagcacagacgcaggaagaagctgcggggtgggggag

SEQ ID NO: 34971 - DNA, 122 bp, Homo sapiens
aaagccttgctgggaagaccgagggtcctgcggaaaggattctgcaggctgaaggctaggcgcctcgccactctaggactacaattcccgagaggccttgcgacggaagccatctttgttcc

SEQ ID NO: 34972 - DNA, 122 bp, Homo sapiens
atggacacgccctctttctccacccacctcagcttggccccgcctctccctaccgagccccggactccacctaagaaggcacgtggcccatccatggccccgcccttttccccacccacagc

SEQ ID NO: 34973 - DNA, 122 bp, Homo sapiens
ctcctcagtggcaggaaggtgcctgctgtttgcaagcttgtttagtacggtgtctccccacgccactggcggggtcctggctccctaccgacaactttgagggcctgtcccttgtttgccgt

SEQ ID NO: 34974 - DNA, 122 bp, Homo sapiens
gtgaattgtgacttacgggctgccaatgtgtgttgcaggtcctacatgtgtaagcctctgcgtgtcacctgggtgtgacacatgtgctccttcccagtgatctatgtactactgtgttccca

SEQ ID NO: 34975 - DNA, 122 bp, Homo sapiens
ataaggacctcctaatggattgttttcacacttgcctgtgcctggtcctgtggatttcatcggctcccagtgatgttttatgtaagtgcatcttcttaaggtttatactacacacacagctc

SEQ ID NO: 34976 - DNA, 122 bp, Homo sapiens
cgggcgcgcaatgcacctcggggatggtagtgttctggtggcccaacggttttaacagcccgggaatcaaccaccggaagtgccggccctgagaggtggagtcggggtggcagcggcggcgg

SEQ ID NO: 34977 - DNA, 122 bp, Homo sapiens
cagggtttgctggaacgccagccggtgcgatcgcgcccctgggattccgcttagcccgcgcgtccatttccctgcatggtggactcagtaaagccggatctgtccaacgcctgcagcgtgga

SEQ ID NO: 34978 - DNA, 122 bp, Homo sapiens
cccgggtaaggagtcccgggcgaggacgggggtcccggccgcgggcggaggcggcagcggcgactgctcccggcaccagggaagcggcaatgcagacctgccaccccccttccaccactcca

SEQ ID NO: 34979 - DNA, 122 bp, Homo sapiens
caggtgcaccaaaagagcccaaatctgggacacctcaggccagagtgcagagctgctcagcggggccccttcccctcccttgcagtaagctttaagacctcatgaggatgtttaagatttct

SEQ ID NO: 34980 - DNA, 122 bp, Homo sapiens
agtcgtgttccattgtatgaatataccattgatttgttcacgcaacctcctgttggtgagcgtttggggcgttactgggtttgatgactttgtggaagtctctctgtggatatgtgcagccc

SEQ ID NO: 34981 - DNA, 122 bp, Homo sapiens
ttggtgatgccagacttccttctggcattatccgcaaccgacaatggactttacttgttacgacaatatcaccagctttcattgcatgcggcagatggcctggaatgcagtttgtcactatc

SEQ ID NO: 34982 - DNA, 122 bp, Homo sapiens
atcaaagggctctggaaacacacgctcattaggaaggccagcgagccggcaggccgggggcgtagatggggctctgctgttcattcaccaccaccggggtcagaaaacccagccccccaacc

SEQ ID NO: 34983 - DNA, 122 bp, Homo sapiens
ccatggagaccggagtcaggcctgcagggaagtcggtgcgcctttcccaagtcctctgcccgctggttcctctcgggcctcccgggctctgcgtgccgcggatctggacccggactgcagac

SEQ ID NO: 34984 - DNA, 122 bp, Homo sapiens
caagagacgctgtcctcgtacggctgacctgccggggccgcgtccgagaccccggaccagcggctatggatgggactaaggcagtgtgggccgactgcctgtcacttgtggcagcggggggt

SEQ ID NO: 34985 - DNA, 122 bp, Homo sapiens
ggcctgcgggggtggggggcttggggttaggctgtcggaggccacgcagcccctcttctccgggcagtggcgcccagccctgcgctcaggaagtcagtgaggacttcggagagagaaagggt

SEQ ID NO: 34986 - DNA, 122 bp, Homo sapiens
tccttcggggttggatggtgaggtgggtcaggcaaggggggccgagctcgggtgacgcggcgctcacgtgacccgccgggcgcctacgtgggcaccagcccccgcgcccgcccgcccgccct

SEQ ID NO: 34987 - DNA, 122 bp, Homo sapiens
cccagtggcctaagagcaagttctgctctgcagctgaacttcaagaacccagctgcatctcgaagttctcgctgaagaatttggagacctgaaatatcctgttttgcatgaataagcatttc

SEQ ID NO: 34988 - DNA, 122 bp, Homo sapiens
atccattattggctctgtttacccaagggaaaattaagtgcagggccttagaacagtaagcgctttaatacgcggatgcatatgctgatctctgacagatgttggtctttgggaacaacaga

SEQ ID NO: 34989 - DNA, 122 bp, Homo sapiens
cgccggtacactcggtgttgtatcctctttatctgccagattgcagtgggtcagaccgcccgtctttgcctgaagggaattcaggaggtttaaaggagaaggaagaacaggagccaaccagg

SEQ ID NO: 34990 - DNA, 122 bp, Homo sapiens
ttcaaaactccgttcagatatcacctctgccaggaagccttctcagactgctctttcttccgtctgatttaatgcccttctgtaagctcctatagctcccatgtagcaaacctctcacagcc

SEQ ID NO: 34991 - DNA, 122 bp, Homo sapiens
aacacttcatgttcttgtccctcttccccgttggcaacagttttatggtgagaaaattcacgaagagtaacaggaacaactcttatgaaaatacgcagaactcctgacccaaggctactggc

SEQ ID NO: 34992 - DNA, 122 bp, Homo sapiens
gtgtggatgacacgctcctcctcacactccagctctgttctcttgatggattggccacagcgctttattctacggtggtgtcacacggtgggggatgagccatctctcagggcagagctact

SEQ ID NO: 34993 - DNA, 122 bp, Homo sapiens
acagaggccgccacggcgcgcaacagcggcaccgccccttccgcgtcagcgcccgccccgcgccgcgccctcactgccgctgccgcggctacctgcggttcatctccgcacattccacacgc

SEQ ID NO: 34994 - DNA, 122 bp, Homo sapiens
aggaggtgtgctcaggaacatagtttaatgtcatccacgtacaggataaacggcttcccacgtcatgtcccagaaatcgattagtcgatgggatttgggtgagtactttcttctctctgttt

SEQ ID NO: 34995 - DNA, 122 bp, Homo sapiens
cagcgcaggatctaggctgaagccctgaggcttcagtgacaaaatctgtttttcataatgcgatctgtcttaattgtcctcaagaattagtatttgagtgctctctagattcttctttgtca

SEQ ID NO: 34996 - DNA, 122 bp, Homo sapiens
attttatgcatatcaaggaaagtctacatagaggactgtttctggggtacccagatgcagcgtcaaatgccatggaatactacagtgaggacattatcctttcaagctttcaaatcagagca

SEQ ID NO: 34997 - DNA, 122 bp, Homo sapiens
cgggtcggctcggggcgggcaggggtaggatccataccgccgaactgcggccccgctgctcgcagccgctcttccgggagcgcccgcttaggactcactcccgcccattccttacctcgatg

SEQ ID NO: 34998 - DNA, 122 bp, Homo sapiens
tgcttagctatgccagggctctgggtacgtcgggcccggcgccgtcggttttctaagcgtcgcacccatcctagggctctccccaattctgagaaccctggagctgggatgcgcagcggcca

SEQ ID NO: 34999 - DNA, 122 bp, Homo sapiens
acagagatgtgtctcaagtccagaatggaagggccaaggtgccagggatgacaaatcctccgggaatccagctcgaagctccccccggagacacccctccccaaaataggcaaagagggtca

SEQ ID NO: 35000 - DNA, 122 bp, Homo sapiens
gggctagggagtcctcagaagttcccggagatactccctcactggacagagtggggttcccgatgacgttacttgaggcctgggagacggcctctgcccctcactgctcctccccctcctaa

SEQ ID NO: 35001 - DNA, 122 bp, Homo sapiens
atgggaactgtgtggccacacagatgaggatgccactgtttccatcacagggctcctgcacgggtgatgattcaattctctcaccctcttctgtatttaaatgactcagaagctttcatccg

SEQ ID NO: 35002 - DNA, 122 bp, Homo sapiens
ttttaacagtaataaaacatgaggtggtgaaggcacagcggcgtcggacgtgactcgcagcgcatccaagacaaggggcctgctcttggtggctcagaagacgagggcggcagcaagaccct

SEQ ID NO: 35003 - DNA, 122 bp, Homo sapiens
taattctaaaaaaaaaaatggcacagacaggccaataaacgcaccagacccaaagggagccggggacccacactgcccgtgccaccctcccgctctgctcggaatgccagaactttccaggc

SEQ ID NO: 35004 - DNA, 122 bp, Homo sapiens
gaacgtggtgatggtgctggtgccactgctgctgctgctctgcgtcctgggcctcacctacgcgctggtgcagatgcagcgcaagggtgcgccacgtgtcctgctttactgcaagcgctcgc

SEQ ID NO: 35005 - DNA, 122 bp, Homo sapiens
gagccaggatgtcacttcaaactcatcctgctgagagacctgagtctctagagcagggtccgggactctccaatgctgtgttccagcctgacagtgcccggtgcacggaagggagtcggcaa

SEQ ID NO: 35006 - DNA, 122 bp, Homo sapiens
gaattgtgatagagaaagagtacttcacgcagaaccagctgtgtgggagatcagtctccccgagcacgggggagcagagttttaaaagataacttcgtgggtggggggaagccagtgagcca

SEQ ID NO: 35007 - DNA, 122 bp, Homo sapiens
agggaggggttggacagcttccccctcccgtttctgagctgccctgagagccccaacccacgtcactggcgtccaggagcctgtctggactctggtcctgatgtgcccagcgtctccctctg

SEQ ID NO: 35008 - DNA, 122 bp, Homo sapiens
ctgtaaaagcgttggccactggtgcatttttttgtacaaccccaggggtaccatccacagcgattctcggagtcatgctctagaatgtcgcactggagttgtgtagcatgtgctcttgagat

SEQ ID NO: 35009 - DNA, 122 bp, Homo sapiens
agcggccgctcccagtggtggtcaccgccagtgccaatcccttgcgccgccgtgcagtcccgccctctgtcgctgcagccgccgcgcccgctccagtgcccccaattcgcgctcgggagtga

SEQ ID NO: 35010 - DNA, 122 bp, Homo sapiens
cctgcggccggtcgggggtgggtattggggagacccctttacctggcgtcgagaggaccccggcgcccctgctgccatccaggtgcgaggacagctctgtcgcgcccgcgggaaggaccggc

SEQ ID NO: 35011 - DNA, 122 bp, Homo sapiens
gtactcagcctggtcgggtggcagctcgcggcgcagctcgtccatggtaatgtagttctgcgaggagagagtggtcaggaaggccgcaaagtccagcagccgtaaagcggcgcggcccgaca

SEQ ID NO: 35012 - DNA, 122 bp, Homo sapiens
cgaagagaggggcgtggggaggctggaaagcatggttgccccgcctggcccggcgacgcccgctcagcagcctgctgaggagtggggacgaagagcagcctaaacttagggctcgggatatt

SEQ ID NO: 35013 - DNA, 122 bp, Homo sapiens
gctgggtctgttggtggtttgaactgagccgcatacaatagagcaccctcggcagccagccggacgggcaggccgggggcggggcagggcaacagccttgtaccctgctgccatctgctttg

SEQ ID NO: 35014 - DNA, 122 bp, Homo sapiens
cgatggtgaccattttttctcaaatattttctggcatcttgtatgtgtttctttgagaaacgtctgcttatttgggttaattgtctgttataaaataagattatttatatttttgtggttga

SEQ ID NO: 35015 - DNA, 122 bp, Homo sapiens
gtgctcacccttaattacactccattttcctcaggacaggctggaacagatttgggatggcgagcccccaaaccagcactctacagatttcgggacccctcttaactcatttcccccatcct

SEQ ID NO: 35016 - DNA, 122 bp, Homo sapiens
gccctttctcttgagggttggaagcgctgttctgtatttggccacgcgggggagctgctccgcacagctcaggactaagccacctcacgggaaacgccagcgcgggctgcaagctgtgccgc

SEQ ID NO: 35017 - DNA, 122 bp, Homo sapiens
gcctggacaccctctcctttctcgttccccatacctttccccacaggtgggctcttactccgggctcagcatgccttgaggatggtcactgcagcagtgttgctgaccttgtactaagtgtg

SEQ ID NO: 35018 - DNA, 122 bp, Homo sapiens
agcagatcacatatgtggcaaaattgcatagaactgaatatacactcacaaatgagagcacgtgaaactcatgaaatttgaataagacatttggactacactaatgtccatttactgattgt

SEQ ID NO: 35019 - DNA, 122 bp, Homo sapiens
tacagtagttcttgaagatactaaaccagccactacttccactaaatgaaggcacttctgcgggacttccatctttttttcttaatgtctccatacattgtgaaggtattttctttaactct

SEQ ID NO: 35020 - DNA, 122 bp, Homo sapiens
ggcctcctggacagctctctccctccccaggtggaatgcgttcgaggtgctcgccctggacggagtcagctctgggatcctccggttttacacagcccaggatggcaccgactggctgcggg

SEQ ID NO: 35021 - DNA, 122 bp, Homo sapiens
cccggcgggcgcttccggaaagaggccccgcccctccggaatcccccttcccgggctctgcgtaggcttggagtctgtggttcccgggccttgactcactccttcgttgattcattcactca

SEQ ID NO: 35022 - DNA, 122 bp, Homo sapiens
acggtcaactcgggacctcccagcgaccactgcagcctgcggacgaggccgggacttggccgagcggatcctaataaggggaaaatggtaaatgcaaacgtcccgttacaattttaccgcca

SEQ ID NO: 35023 - DNA, 122 bp, Homo sapiens
ggttctgaatgggttttggttccagtgtgtgccttcagaacggcctgcccccggtgccaccgctcagggcggcctcggcgtgtgcacattcacatagccaagggtatgatcagacgcattag

SEQ ID NO: 35024 - DNA, 122 bp, Homo sapiens
tctctgacactttggccatcattctctgcaaaacattttctccttagactctagcaagcacgcatctttctctgtgtccactgattagtcacagtatttgtctttgtataaccatttaagaa

SEQ ID NO: 35025 - DNA, 122 bp, Homo sapiens
agtcacagtgcctagaatagtgactggcacataataggtgttcaataaatgtcaacccaccgccaaaaagcggcgggaggatggagtggggtggaggctggggctagccagctgccctctgg

SEQ ID NO: 35026 - DNA, 122 bp, Homo sapiens
ggggtggggaggctcacagcccccgtctctggggaatttgggtcttagggacgtaggaaccgagtcctaatatctctccccactcccacgataacctccaccaccccctccctcctcgcagc

SEQ ID NO: 35027 - DNA, 122 bp, Homo sapiens
ttctgcggccgttgagtagttttcgatttcggctgatttttgtccctctgcgcttgcccccgctcccctccctccggctacgcccccggccccggcacgcgctctactcctgtaacggaaag

SEQ ID NO: 35028 - DNA, 122 bp, Homo sapiens
tcataaagcaacattcagatgcaagtgagatggatggcttctccaggctcaagtatcccacgaattcccatgtctctgtgtagtttatccttagtgttgaaaatacatgtgtgtcatactgt

SEQ ID NO: 35029 - DNA, 122 bp, Homo sapiens
ctacccggaagaaggcgcccacccccgcaaagggaaagccgcaagggcaagacctcggggcgcctggggcccccctctggcgctatacctccgtgccaactcggggtaggagagcggggcgg

SEQ ID NO: 35030 - DNA, 122 bp, Homo sapiens
cgccccgcagtccgtgccgaggctcccgcccgagtgcgcgcgggccggcggtggcgtgtgcgcacgtcatatgggccgccggcctcccattggttgcggccgcctcaccagaccgcgtgcgg

SEQ ID NO: 35031 - DNA, 122 bp, Homo sapiens
cctggcagaagtcagccagctgtgaccacagctggggctccaggaagagctggcacatgacgttgaggccaacgaggcgcggggcctggcgctgcaggtgccacagcagctggctctgcacc

SEQ ID NO: 35032 - DNA, 122 bp, Homo sapiens
ccccagcggtcgctctcactttgctgtgtgaaaaacccaaaggaatgattgcgagtcccccgcaaggggggttggtcttccttgctgacaagagtagaaagataaggtgcagaaggcagtga

SEQ ID NO: 35033 - DNA, 122 bp, Homo sapiens
tgaccctgaacccctcctgcccgcatcagcatcctgaagatgttctcagcagacaagaagcgggtggagactgcgctggaatcctgtggcctcaaattcaaccgggtgtgtggggtggggac

SEQ ID NO: 35034 - DNA, 122 bp, Homo sapiens
ctccaggccagcccgccccacctggtactgctgctaccactggaagcgctgcgcctctttcgggttttgtcccggccgcgatccttctcactcgactccttggtggcccctttatcttttga

SEQ ID NO: 35035 - DNA, 122 bp, Homo sapiens
tgatgagcgtggagtccttgtaggagtcctcgttgagggtgtcaagctcggcgatggcgtcgtcgaacgcggtcttggccaagtggcacgcttgctctggggcgttctggatctcatagtag

SEQ ID NO: 35036 - DNA, 122 bp, Homo sapiens
ttggggtacattctgcacctttgtatcgcctgcacctcaccccttgccgggcacgcagggcgtccgctaggcgctggatgcatttactacacctctgggagggttcctgaggggcacctgga

SEQ ID NO: 35037 - DNA, 122 bp, Homo sapiens
gtgctggggccctgcaattggaatgttggccagatttctgcaataaacacttgtggtttgcggccatctccttggttatgaatggctgtttcgctgagcgccaggcattctggcatcatcac

SEQ ID NO: 35038 - DNA, 122 bp, Homo sapiens
gcctggtgcacagtgggccgatgggcaggcctgcgtgatgctgttccagagaagcagtctcgccagcttctggggccgagggcacagcagaggggctggggaaacaggggacatcctggagg

SEQ ID NO: 35039 - DNA, 122 bp, Homo sapiens
caaaataaaaggtaaatattgcctcaaaaattgtggatacctgtataaagcatctgccctcgatccttatcagctaacacctgctttataaattaataccttatcagagatttgtagagtta

SEQ ID NO: 35040 - DNA, 122 bp, Homo sapiens
tcaccacaagccaggtgcccggtgtctccatcacctcgaaggccccacaagccaggtgcccggcatctccatcaccccgaagggcccccgccggcgtgtttccaccccttcccacaccccgt

SEQ ID NO: 35041 - DNA, 122 bp, Homo sapiens
gctagattgagaggctggtgggttttgaggcacatatagtacctggcacagggcctggcacgaaacaagtgccttatcagcaagtcgtttggtatttctttaaatctcacatgtactctgaa

SEQ ID NO: 35042 - DNA, 122 bp, Homo sapiens
tcacaggccgctccccagagcgctggtagatgagggggttggcattctccaggaggccgccgccgaccccgccgccgcctaccatcgcggaaccaccaccgctgatcctagcaggcgtgcgc

SEQ ID NO: 35043 - DNA, 122 bp, Homo sapiens
caggtgcctgtgactccgccgcaaatgccagagagatacaaacagcatctcactcctcgacgtgcctcacgaagcaggcaggactggggaggccctggttctggtttcagcccagcctttaa

SEQ ID NO: 35044 - DNA, 122 bp, Homo sapiens
aggaaagagaagaaacgcccacgacgtcgggggtgtttttcaggggtcaagacagattggcgacacagcaggaggcgcccaaggacatgacgttgagcctctcagggtcccccttggccggg

SEQ ID NO: 35045 - DNA, 122 bp, Homo sapiens
cgcgttgtgagcctcaaagagcccacttacgtgaccgacagcaccaggccgacgggcactcgctgaactgctggcccggagcagcacagctcttaagtgggcagtggcatcttttatacaaa

SEQ ID NO: 35046 - DNA, 122 bp, Homo sapiens
tcattcggtgctgcccatcagacaactgaaaaatctgatcagaggcagtggctaagtccccgcctgggaacacaaaggaagcctaaggttctggttatcaccctcaggggaccgtgaccttg

SEQ ID NO: 35047 - DNA, 122 bp, Homo sapiens
gatgatgaattttcctcctatgctccgtagtcttgtaataaaaagcatgtacagtgtagacgtttgctggcatggctcttcctttgaccagttcatgaactggagtcagggtgggggtgaag

SEQ ID NO: 35048 - DNA, 122 bp, Homo sapiens
gcagcagagacgcggcctccacaaggtcagaactaagatgtcctcagagatccccagttacgaagcaaagcgcgggcctacttcgggacctacgcgtccgggcgctgtgcgcggggaccgct

SEQ ID NO: 35049 - DNA, 122 bp, Homo sapiens
ctgatgcgggtgaccaatgggatttgggatcatgagtggaccgggaggagtgggcgtggtcggagtctgagtccaaggtttctcgtgcggcaactgccagagctgcttggagagctaagctg

SEQ ID NO: 35050 - DNA, 122 bp, Homo sapiens
ccgtgggtgtgtgatgtaggaatctggggcacgggaagttattcttgcttcatttcctgacgctgaccggctgggcggggtccctggggcacccgggcacatttggacgtgtttggcaggga

SEQ ID NO: 35051 - DNA, 122 bp, Homo sapiens
gttaaaccagccacttttgcttcttgaggtggacctgtggaatttctgtgccccaaactgcgaacgttctttaggtctaaccctgaaaaccttcgttaccctggtccagcccctcttcactg

SEQ ID NO: 35052 - DNA, 122 bp, Homo sapiens
ggataccctttgtatgttcacttgattaatggcgaatatacagggggagactcttatttgcgtatcaaactctgtcgaggaagacgctcagaccctgctgtctccaggacaaagcctcggat

SEQ ID NO: 35053 - DNA, 122 bp, Homo sapiens
ctgctcctacattttgctgccttactctgccccgaatgcactggagtggggatggtccatcggcaactataaactgattctcatcaggaaactgcacattatctccccatcacttcaaaggt

SEQ ID NO: 35054 - DNA, 122 bp, Homo sapiens
gagaatgtgtccaacgtctcgaccatgttctccagcgcagcctctgagtctctggcccggcgggcgcaggccactgcacaagaccctgtctttcagaagctgaaaggccagttcacgacggg

SEQ ID NO: 35055 - DNA, 122 bp, Homo sapiens
ctgcccctcggcgtgtgtgtgagaaactgccccgcggagtgtgtgtgagaaactgccccgcggcgtgtgagaaactgcccctcggcgtgtgagaaactgcccctcggcgtgtgagaaactgc

SEQ ID NO: 35056 - DNA, 122 bp, Homo sapiens
aatatgccatctccctgcctacctctacccaaccctacctacacacacctatctttaccacgcagagacaattaaacagccatagactctggatgcatttctgtgtccttgttcccactggg

SEQ ID NO: 35057 - DNA, 122 bp, Homo sapiens
tcgtcttcatggcccacctgttttctgccgtgacctttggtcccattgaggactaaggatcgggaccctttctttaccccctacccgttgtggctcccaccctgcctcggactggtttacgt

SEQ ID NO: 35058 - DNA, 122 bp, Homo sapiens
tgcctactgagaaaaatggaagtcgggaaggctttagatctagtcgcgcttggtcacttccgtctccgggcctcagcttcccaggttgtagaaagcatcagggttggaggctctgaaattct

SEQ ID NO: 35059 - DNA, 122 bp, Homo sapiens
tgatttatcaggggaaggtcagttgtttgatgcggacgctctaagctgaggtgcaggatgcgctatccattgctgcggtaggccctgttaggcttctccaacatctgcttcctctacccttt

SEQ ID NO: 35060 - DNA, 122 bp, Homo sapiens
aggtcgatgtcacagctctggggtcagggccgctgccctgggatgggtctgagctgtgcacggcattgcctggtgccctcccagctcaaggccttgcctgactacagatgctgtccctgcct

SEQ ID NO: 35061 - DNA, 122 bp, Homo sapiens
gtattgtgtgcaaacggtgatatgagggtagcctgagtcatatgaactccctgggaaaaacgaccagctttgtgtatgtagcaagtggacttggtactcctattacctaaaaagagcctctg

SEQ ID NO: 35062 - DNA, 122 bp, Homo sapiens
gaaggggaagggaaagggtgggggatagagagtgagttcttaaaggatacaaagttacagcgaggtgggaggaataagttccagtgttttatgccactgtaggatgactgaaacataagttc

SEQ ID NO: 35063 - DNA, 122 bp, Homo sapiens
ccagacagtcgccctgaagttggatgctcagacctgcagggaccctctggtgacaccttacggatttcctgtggccacagagcctaacgttctcactgtggcctttggctgagcacccgtct

SEQ ID NO: 35064 - DNA, 122 bp, Homo sapiens
gggcatttgccgaggtcggccgttagaaagatgccggaccatctactcatgtctgcttgacgccaatgcctgcgtcttcacgtgctgttggtgcgtcctcctgaattacttttgtgtccttt

SEQ ID NO: 35065 - DNA, 122 bp, Homo sapiens
ggaagggtctgttgccacaaatccatggatgtcctctgcctgccaagcctggctgggggtcgggacacgggaaccatagcaatcctaagtccaaccagctctgtccctggcccacaggttct

SEQ ID NO: 35066 - DNA, 122 bp, Homo sapiens
tgtcttgtgttcctttagagttgccaggtgtctcactttcaactgtgatctcctgaaggccggtagggtccccttctcactttgtggactctcttcttgccattttaggcctctgcttccaa

SEQ ID NO: 35067 - DNA, 122 bp, Homo sapiens
ccttgttctttctccgcaggacactggtcctcccacgcctgacaccgacgtcgccaggaccgcggggttgggggaacttggctgtcccacgtctttcaaataaagctgttttgtctaactca

SEQ ID NO: 35068 - DNA, 122 bp, Homo sapiens
gtctcgtggcacccggtggaaccgaggagaacgtggagcgccgggagcggcgaatatggacgactacagcctggatgagttccgtcggcgctggcaggaggagctggcgcaggcccaggcgc

SEQ ID NO: 35069 - DNA, 122 bp, Homo sapiens
cctcattggagccggcagagcctgagctatcccagatgacctcagtgtggtttttggccccgggacagtggctggcagcagttcaggtccttctcccacctctcctctgcagcaagatgggc

SEQ ID NO: 35070 - DNA, 122 bp, Homo sapiens
ggaccaggaactagtctgaatatgagccccaccttcactctggaagcctgacagcaaagacgggggtccaggccacgcggcctctgccttcccatactgtcttttctagtgggaggtaaact

SEQ ID NO: 35071 - DNA, 122 bp, Homo sapiens
tgcggctgccacaggaagggggcatccccctactttgggtgttgggtcagatcctgcccccgtgcccgccagggctcaggttcctctgagctggtcctgggccaggacgcatctgcatggcg

SEQ ID NO: 35072 - DNA, 122 bp, Homo sapiens
aaacccggctttgggcagaaacatgcgccccagcttctttccttagctgtctccaggaaccggatgttgcagattctctgagcagttctctccggtaagtcttcttggattgcaaagaaaag

SEQ ID NO: 35073 - DNA, 122 bp, Homo sapiens
cctgaaatgctacataagcaactgggagaatgactgctaacagaatcagtacagctcttgcggtagcagaaggtgttaggtgattttctgggagagagcagcccatacccgaagagaaccag

SEQ ID NO: 35074 - DNA, 122 bp, Homo sapiens
cagcagatagcagctaagatttcaggggtccatgggcagatgccaggaaacactgagtcacggtgagggttttcccttctgttatctttctatcctttggtggtgcccaggagaaatcccca

SEQ ID NO: 35075 - DNA, 122 bp, Homo sapiens
atgaggcgggagaggcgtaacaggcgtaagaggctgaggatcttcgtgaagcggacaatgcgcagggcccgggcagtcttgtagacctccgagtcgatgcgtgtctccacaatgaggaagat

SEQ ID NO: 35076 - DNA, 122 bp, Homo sapiens
agactcgggtgtccagtctccgcccagagcctcccaagactcgggtgtccagtctccacccggaacctccagagactcgcgcatctcatctccgcgtggatcctcccgagactggagtgtcc

SEQ ID NO: 35077 - DNA, 122 bp, Homo sapiens
cccgccgagacacacacagcacacacgtgaggttctacccggtgagacgcacagcacacacgtgaggttctaccaggcaagacacacatgtcacacatgaggccctacagcaagacgtgcat

SEQ ID NO: 35078 - DNA, 122 bp, Homo sapiens
gtgctgagaagtcagcacagaggctcaagaattttctttcctcctctcctgaagttacaacgaaaaatagcgacagtcagatcagccgggggctctctggtgtctcggcttcaatctcttcc

SEQ ID NO: 35079 - DNA, 122 bp, Homo sapiens
ctatcacatttaagacccatctaataaaagaatcaccatagacacaggcgtacacagatacgcatacacaggaaaaagccaaaggattgatcaaagttaagtgtttaaaaatattcatgtaa

SEQ ID NO: 35080 - DNA, 122 bp, Homo sapiens
aagtgcgaggtcgggatgtacccgtgctccgccctctagagtccaggatggcatcacccacgggtcaactggggcgcagcctgcaccctccccagcagggccagggccagagtcgtgctgcc

SEQ ID NO: 35081 - DNA, 122 bp, Homo sapiens
ggcataaagggctgtgtttcatctttactgctgattccttgtaaaagcggcagccattctcgtggattggaattccctgcttctgatcttatgtggacaattgttgattgtgtctgtctacc

SEQ ID NO: 35082 - DNA, 122 bp, Homo sapiens
ttttcattcagcggtttggaaacactgtttttggagaatctgcaaagggatatttgggagcgcattgagtcctatggtgaaaaagaaaatatgttaacataaaaagtggaaagaagctttct

SEQ ID NO: 35083 - DNA, 122 bp, Homo sapiens
acctgtgctccgtcccgcacgtggcttgggagcctgggacccttaaggctgggccgcaggcgcagccgttcaccccgggctcctcaggcggggggcttctgccgagcgggtggggagcaggt

SEQ ID NO: 35084 - DNA, 122 bp, Homo sapiens
gcgcgctgtccgcttcttctgggcggacgctctggaggcaaaacatttccctgctgggggcggcgaccaccgtgagcgtcccggaaggggcggcaaagacgcctccgtcgcgcacgaggtgg

SEQ ID NO: 35085 - DNA, 122 bp, Homo sapiens
catggattccttggctcttgtaggaaacttcttgcaagtaaaattgacaataataattcccgtgccgagctcatcgcaggaagaggttaggcgggacagcccgaggcatgctggttgttgta

SEQ ID NO: 35086 - DNA, 122 bp, Homo sapiens
agctcccccctcactagtgatgcttttcttggcatagaggagcagcgtgacccttccgcccggccttggtgcagtcatttattttggaagcggaaatagcaacactgtttctctcaccgccc

SEQ ID NO: 35087 - DNA, 122 bp, Homo sapiens
aacaacgtaagttgggccttctactttctctttcttcccactggtactctttctgactggcgtctttgtcctaggagatgggctgtattattaggaccggcaccgctgggtctactcaagct

SEQ ID NO: 35088 - DNA, 122 bp, Homo sapiens
gagcgaggaaagaactctgaagtgatttgggaacgatctgaaagcgcgcaagttggaagtcgggttgaagccagcatagcggagcaggggtcaggcctctgcgtggccggagtgggagagcg

SEQ ID NO: 35089 - DNA, 122 bp, Homo sapiens
gtggatttccaaccaagctgtgtggactggcaggtgttgggggagtggagcgggaggcctcgtttgcatcgaaggcttcttgattccaggctgcaccaacagatgtgggcctcctgtcccaa

SEQ ID NO: 35090 - DNA, 122 bp, Homo sapiens
aaactatcccaagaaataagtcgtttagggtagagactcccatatgctgggccttcagtacgtttgtctttatattgggagtcctctgtggcctccgctgagggcgctggggcgggggttgg

SEQ ID NO: 35091 - DNA, 122 bp, Homo sapiens
gtgcatcgccatgttgggctgaggcgggcggcggcggcgcgaggttgggggcggtccctgcgccgccagggggcgcccccccgctctgcgcctgcgcgcgcggcttccggagacgcgtgcag

SEQ ID NO: 35092 - DNA, 122 bp, Homo sapiens
gacggggctgtgctcgtgtaagcccggggtggctggacccaagtgtgggcagtgtccagacggccgtgccctgggccccgcgggctgtgaagctggtgagtgagggccagcgctaccctggg

SEQ ID NO: 35093 - DNA, 122 bp, Homo sapiens
agtaacgccccaccccacccctagctcccaccagctgtttcagaaatgcctaatgctggtcgtctagggaactagtgagagggtctggacaggacatggcaacctcatcctgagtacccaca

SEQ ID NO: 35094 - DNA, 122 bp, Homo sapiens
gtgagcgcgcgctctgggcgctgggctcgcggcctcgcgctgggccttcactctctgcggcgcagtccagatgtcgtcagcaccagcgcctgggctggaggacagagaagccttttccgttg

SEQ ID NO: 35095 - DNA, 122 bp, Homo sapiens
ggaggaggggaaaagcagcatactgtctcaggctgggtaccttgtagttagttgtacgttcgaaacctgtcgccgtcacttgcgcgtttggcattatccattgtcaccgcggaggaacgagc

SEQ ID NO: 35096 - DNA, 122 bp, Homo sapiens
gcaaaaggccagcaggaggacgtagagcaagaacttcacacatttcattcctccttccaccgccatggctgccgggcctggggcagaggggagggcggggggattaaaactggccgaagggg

SEQ ID NO: 35097 - DNA, 122 bp, Homo sapiens
ggaggtgcagggccgggcgtgaagagcaaaccccctcctgctcagagctgctgccgcctgcgcccagggctgcactccgcgcaggcctcatagccaggccatggcccccacagagccctgga

SEQ ID NO: 35098 - DNA, 122 bp, Homo sapiens
actctcaggcttccgggtagaaaaaaacctctcccttgttccctcgccccacaaacaccccggcagatggacacctcctggcccgccggcctctgtacccctccgaaatgggagtaccgcag

SEQ ID NO: 35099 - DNA, 122 bp, Homo sapiens
gcttccaagggttctgagctgcgcagcactcgcatcacccagaagtgtctgtggagaaaacgacctcaggtgtaagcccaaggctgctgcctgcaaaggcaatgccgtggagactgggttcc

SEQ ID NO: 35100 - DNA, 122 bp, Homo sapiens
aggggtcagggagttccctttccgagtcaaagaaaggggtgacggacgcacctggaaaatcgggtcactcccacccgaatattgcgcttttcggaccgccttaaaaaacggcgcaccacgag

SEQ ID NO: 35101 - DNA, 122 bp, Homo sapiens
gaacccagtagacgggaggtggcagtgagccgcgatcttgcctctgcattccagcctgggcgacagagggagaatctctctcaaagaaaaaaaaaaaaaaaaaaagaggaagaagaagaaat

SEQ ID NO: 35102 - DNA, 122 bp, Homo sapiens
ccccagcctctcgccgtttctacccagcttgggaagcgcaggaacaggacatacggtggtcgcgccccttccgcgaggccggggtgaaacccgcttggccctcccgccagggggcggagctt

SEQ ID NO: 35103 - DNA, 122 bp, Homo sapiens
cgggcctgcgcactctaatttttcactgcagtttaaacactccgtgaggctctcaggaagcggcgggggtggggggcggccggagagaaggggcccgcgtctccgccgcttccatcaccgcc

SEQ ID NO: 35104 - DNA, 122 bp, Homo sapiens
ggggcgtttctgggatcctgtggtttcggggacgctcccctactccctggccttgggggccgatgaccaggtggagcgggcccggtctgtgagggagtcacaacgccaggtcactccaagct

SEQ ID NO: 35105 - DNA, 122 bp, Homo sapiens
ctgatccaggaacaaggagctagtggaaaggactgtcctccaacctaattcctatgaactcggttctaagttattataaagatttcttctgtacatattccaagcacaattatgcatgagag

SEQ ID NO: 35106 - DNA, 122 bp, Homo sapiens
ggtgaacagcggctggggcaggcacggggacacggggccacgaagatgagcgtggaggagcggctgggggtggtgcaccaccttggccagaacccccaggggatgggaatggacaggcggac

SEQ ID NO: 35107 - DNA, 122 bp, Homo sapiens
ctgtaatgctctcttgcccactgctcacctcctgctgttcagccagttcctaagaagccacggaccagtactggtccacagcccggggtaacaaaattatggctaaataagaggaaaaagtt

SEQ ID NO: 35108 - DNA, 122 bp, Homo sapiens
tcagggggcgaggaggtagtaacagagacagacatcagagcaaaaagatctgggttcaaacgcttcacaaccccagctccactggctgtcccccagtgtcagccaggcctgagtctgactat

SEQ ID NO: 35109 - DNA, 122 bp, Homo sapiens
gatgagagctacttccacttaataaaaccttgcacttattctccatgcccacgtgtgatccgattcttctcgtaaaccaaggcaagatccctgggatacagaaagtcctctgtctttgtgat

SEQ ID NO: 35110 - DNA, 122 bp, Homo sapiens
gaacacaaagtgtgccttagacattctcaagtcatcagcgtcacccttccagaatgttcacgtccacacccattcttggctaatgtaatgaataaggcttctctcatttgtttttgatacct

SEQ ID NO: 35111 - DNA, 122 bp, Homo sapiens
aactctagcaccctctgccggagccactgggcccagacaaggagaaagtgctatgaggggcgggccactgaaagcttcaggaaacagatgagagggacaccctctgctgagtcccctgcact

SEQ ID NO: 35112 - DNA, 122 bp, Homo sapiens
ggatgcattctggaacttgtagtctcctggatcataggcctgaattggttccacattttgcgtaaccaatcggcttgtgccatccccaccccgcctcttcagccggacggaaataaacagtt

SEQ ID NO: 35113 - DNA, 122 bp, Homo sapiens
acagggcgcgcttgttgctcagatccctggccccactggttggaccttgccctacacacacgtgtaccttctcggagcccaagggccagattggatgcgaacgcggagatcacaaaggcccg

SEQ ID NO: 35114 - DNA, 122 bp, Homo sapiens
ttagctgcggagatgcccagcggcctggagccacggccgaagccccgcaccacttgggcccggcagaggcagggcagatgcctcacgttatagtccagtccgctcaggacacgggctgcggc

SEQ ID NO: 35115 - DNA, 122 bp, Homo sapiens
tgtcaactccagaggcccttgtgcttgcagcagggaggtcaaggccagggcgtctgaccccggccgctcctccacactgagcctcctgcacgtgctcacaggtagagaagcggcgggtcaat

SEQ ID NO: 35116 - DNA, 122 bp, Homo sapiens
tggacaaatgaggtctgggtccatcattggggatgggggccactgtcaggatgggagtctcgcctaaagctttggggtgaaggtgctgatgaccaagaggaaactgcggggtggggacatgt

SEQ ID NO: 35117 - DNA, 122 bp, Homo sapiens
cctttgccctggatcagtagtccctagggctctactcaactctctctctctctctcgtgtcgcacagaagcttatggatacatttatcctgagattgcagtgagcctaatcatctagagggg

SEQ ID NO: 35118 - DNA, 122 bp, Homo sapiens
agaaagagaagatagcagcaattgtatcagggcttactatcctaggaggggttcagccaccgagatttacatattcagtgctgtggtttttgtttcattttgcaagaggaacgagcccctca

SEQ ID NO: 35119 - DNA, 122 bp, Homo sapiens
aggacgtaccttggatgaagagcctggcagggagagactgccgcagttccggctcggctccgcgcggagagagggccgcacgccgccgggctcgcgcctcaggcccacggtgtatcctgccc

SEQ ID NO: 35120 - DNA, 122 bp, Homo sapiens
acagccagtgaccagaggctgcttgttctacaagaaagagcactgtcctagccttggggacgcaactagcagagtgaccagagcaaaccatccataaaattatgaccaggccaggcgcagtg

SEQ ID NO: 35121 - DNA, 122 bp, Homo sapiens
aaatatacagaatggaataaaaaaatgatctccctttattaccctcccaaaggttaccagcgtttgaatttaataatgtatattctttcatgcttttttctgtgcacttacctaagtgtgaa

SEQ ID NO: 35122 - DNA, 122 bp, Homo sapiens
tagattccttgaggtcggaaatcgccatgccctggagagacagtgagagccccgccccagcgtgcctttgcggtgacccacatctgggcaagtagacactgtggagactccagacacctcct

SEQ ID NO: 35123 - DNA, 122 bp, Homo sapiens
acagacacgcaggtcgactggaacagttcttggcagcctcttctggagggcgtctgaggtcgtcagcagcggcctacgacttcaaggcaggcttctgacccctggggatcacgcccatcgga

SEQ ID NO: 35124 - DNA, 122 bp, Homo sapiens
agggagggcctggctgggtggggccatgtgtgctgtgctccattggccagagctcagtcacgtggcccctgcacgtgtgcaacgaaggaggccggggtcccagcggagggtgagtcccagag

SEQ ID NO: 35125 - DNA, 122 bp, Homo sapiens
gcaggatgtcctctagagaggcctactccagaactcaaaatagcatgaaatttaattttccgcttatttgacaaggctgggtccgggccccagtccacagcagagataagggtcccggggcc

SEQ ID NO: 35126 - DNA, 122 bp, Homo sapiens
ttgttgcactgtggtgaggcaaacccaagggaaccagtgacagctttttgggaaggtgagcgaagacctgtttgtctgcagtggaaggagaggccaactgcatgctgggcaagggtcacaga

SEQ ID NO: 35127 - DNA, 122 bp, Homo sapiens
ggcgccccctaaacccagctggcagcactccagtctagccccgggcagcagggcgtcccacgtgcttagacatgagcctccctctgtggcctccccacagccaggggcccgacaatcccgcc

SEQ ID NO: 35128 - DNA, 122 bp, Homo sapiens
aaagaagcggacgctgagaggaaggctgcgaacgttctgatggcccgtgtgagcagtcctcgcaggagacaccaccagctgtggcagcttggggcggggtgggtagtggtcactgcggtctg

SEQ ID NO: 35129 - DNA, 122 bp, Homo sapiens
actagttttgtgggcaaatcacttaacctcactgaccctcagtttcctcatttgtaaaaacgagtgataatacaagattatagtaacaattataatatgtctatacataataggcctttaat

SEQ ID NO: 35130 - DNA, 122 bp, Homo sapiens
agccgaagggctggaatctgggtttctcgggttttattttagaccattcggcaccaagcccgagctcccccgccgcaccgcttccagtcccctttctttccatagagcgacccgaagccggc

SEQ ID NO: 35131 - DNA, 122 bp, Homo sapiens
caatagttctgcataccgtttccttgacacctcccattgtatccgaagttgttctttaatcggcacacaagcacttgatacttactaaataacggcagacacaacggactgtaaactttggc

SEQ ID NO: 35132 - DNA, 122 bp, Homo sapiens
ggaatgctctcctggtgattaggaaccttaaatcacattataagtaggtgaacgccaatgcgtggtgcactgcgggaaaactcgcagggcctggctcaagggaggcctggcattttctcctc

SEQ ID NO: 35133 - DNA, 122 bp, Homo sapiens
cccagactggagtgcagtggcacaatcttggcatctctgcaagctccacctctgggttcacgccattctcctgcctcagcctcctgagtagctgagaccacaggcaccctccaccacgccag

SEQ ID NO: 35134 - DNA, 122 bp, Homo sapiens
tcttgggtgctgggtgtgccaagtggtcacctcgtgtgcccctgtcttccctgcagtggccgacatccccggcatcatacgaggcgcccaccagaacaggggtctggggtccgccttcctca

SEQ ID NO: 35135 - DNA, 122 bp, Homo sapiens
gtccctgtgtagttgtgtacacgtgtcaataaatgcttgtatacgtggacacgtgtccatcgaggccatggatactaatgtttagaagcaagtcctgaacacagcctggaaaatgcgccagg

SEQ ID NO: 35136 - DNA, 122 bp, Homo sapiens
attgtctcccccatcttgttcccagagactttttagattttttttcctaattgaacccaccgtgaaaatttaataacacagatataatatctatctatttgtgtactatatgtatatctcta

SEQ ID NO: 35137 - DNA, 122 bp, Homo sapiens
aacaagtaattacaacagtggtaagctttacaaagtgatgcctgtgtaggaacattatggcgaggggatttatcctagtccagggccagggaaggcattcaggtggaaagttatgctgaaca

SEQ ID NO: 35138 - DNA, 122 bp, Homo sapiens
gattccaggcgtgagcccccgctcgcggccaccgctatggttttattctggtgtaaatcacgtaacagaaacctcaccgttttaactgccgtaaagcgtgcagtgtggtggcgtctggcaca

SEQ ID NO: 35139 - DNA, 122 bp, Homo sapiens
aataaggcaagggcctcattgagctgattaacacatgctgctatggacagctcaactgaacgaacaccctgtaacacacacccactggggcttcggctgtaaacattcgcccttagacattg

SEQ ID NO: 35140 - DNA, 122 bp, Homo sapiens
cgccctcgccctcatcgccgctgccggagtcactggcgccatccacgtccagggtgggcgcgttgagaacgaccacgtctgcctccgtcccgatgtcctcgccaaaccagacagccttgtac

SEQ ID NO: 35141 - DNA, 122 bp, Homo sapiens
caccagcccgtctgagggtgggcggagggcgctgccgcaggtccccacatacccagcgcacgctcaccccacactggaggcacctgccgggttctgacacccctcgaggtgccttcccaggg

SEQ ID NO: 35142 - DNA, 122 bp, Homo sapiens
caagggctgaattaggaaacaagttcaagtcccccttgggggcaggaagggcaggaaaaccgtgaacatctgcatatcaaaggtttccgaggccagaactctcaccaatatttgactaacag

SEQ ID NO: 35143 - DNA, 122 bp, Homo sapiens
aacacgtatataaaacttatcatgcaccaggtatatatattagcttatttaattctcacacgaaccctaaggggataggtactgcttttattacctttctataggtgaggaaactgagacac

SEQ ID NO: 35144 - DNA, 122 bp, Homo sapiens
cggactgcacatggggctcagaggccgtgggtgtgcctgcccgcctgtgtcagctccagccgtgggggcgggggtaatccgaggctgcgtcccgaggctgtgggagctctgccttcatcctt

SEQ ID NO: 35145 - DNA, 122 bp, Homo sapiens
gccaatcgcagagctggagcggaggactttcagggaggcctggtgacgtgacagcccctccgtgctaaactgcagctgtgggacttaataagtgcgacaaccccctgatggattaaagaaaa

SEQ ID NO: 35146 - DNA, 122 bp, Homo sapiens
gggttgtgggggcggggggccatcgtagggtgtgagacaggatcctcccgtgtgctgaaccgcttctgggtggggctgcaggagtagttggcaggtccaggtggagccatcatcagtcagtg

SEQ ID NO: 35147 - DNA, 122 bp, Homo sapiens
aaacagtgctactacaccagcagacgaccacacacatcgtggaacactagcagcacacagcgctccttaaacagcgctacaccagcagacgaccacacacacggtggaagatcagacgccac

SEQ ID NO: 35148 - DNA, 122 bp, Homo sapiens
ccgcctccgtagacgcccgcccccagtgcgctcggtcacctccctcctgctggctgccctcgggggcagcacctccctcagagccaaagacatcaagaggatcctggacagcgtaggcatcg

SEQ ID NO: 35149 - DNA, 122 bp, Homo sapiens
atcaaaggtggtgtcacctttcttcaaagcaatgcggctgaaactctcgaccaagttctccgcagcttcttcatcttgcggatcttctcgcccggctgcagctcaaagaggtggcacctctg

SEQ ID NO: 35150 - DNA, 122 bp, Homo sapiens
cggccacgtatggtaaagtcaggccgtgccaaaaaggcaatgacaaagaaaacctttctccgccgggcacccccagcgcccaccaacctcgggctcgcagtctgagctcctggcccagccgc

SEQ ID NO: 35151 - DNA, 122 bp, Homo sapiens
gcgcccattctgcaggatgtatttatgggtttgacacgctgggaaactgagctccatgctcgccaaggctttgttcccaagctggaagagcagggaagtgctggcggacaaggcgggtgcgg

SEQ ID NO: 35152 - DNA, 122 bp, Homo sapiens
tccctctctacccactcaagccaccaggacagctagaattagaaagacctgtcccagttacgcctgcaggctgagggtcctcaatgaatgctccttttcagtaatgactcccctgcccctgc

SEQ ID NO: 35153 - DNA, 122 bp, Homo sapiens
gatgggccttcagatggggatgggtgggaatacctttgaagaagatatagttgaccaggacgaggatggctgggctatccagccctgaaaacaagtcgacaattttcccctgtgtcttattc

SEQ ID NO: 35154 - DNA, 122 bp, Homo sapiens
agactccgtctcaaaaatagacacaacagaagtcccagttctgcccctggttgtgcggtccgcacttaactaagaggctggcatctctgggaacagcctccgggacccgcgcgctggtgcgt

SEQ ID NO: 35155 - DNA, 122 bp, Homo sapiens
caatcctggtgtctgtaatttcgccggaatttagggggacaaagtttggggtctccatagcggtgtccacccttggcgcattagtcatctcagccctccgctggaggaatgagatggctgga

SEQ ID NO: 35156 - DNA, 122 bp, Homo sapiens
ccgcccgcccctggggtctgggtaggtaacgggcccggcgggaaggaggggctcccaggccgtccctcccagcgctcacctcagctcctcgtcgacattcccgcggggctgttcggccgacg

SEQ ID NO: 35157 - DNA, 122 bp, Homo sapiens
ctaagacttaggcctttcacaacacgtacttgaaactgagacttctcagtaagagaacttcgtttacttggttcaagtcttaagccacggagcccactaaatgacaaatgagaaaaaaaatc

SEQ ID NO: 35158 - DNA, 122 bp, Homo sapiens
ctgaggtcattgactttttcctgggggtctctctcaaggacaaggttttgaagattatgccggagcagaagcagatccgcgccagccagtgcactaggttcaaggcgtttgttgccatcagg

SEQ ID NO: 35159 - DNA, 122 bp, Homo sapiens
cgaagacacaagggagagactgaaacgcactctggaggaaggggtcttgagtgagacttacggttctgtagagtttgagtcactggcagaaagcaggataagaagtagcacaagacataaat

SEQ ID NO: 35160 - DNA, 122 bp, Homo sapiens
gggcacagaaaacacaaatttttgaaaccaacaggcaatgagtcactctttttgttctggcgtgtcatgtggtactttaggtagcttcacattttatgttctagttaagtaaaattcttaga

SEQ ID NO: 35161 - DNA, 122 bp, Homo sapiens
ccgccaagggtttcctctcagtcatttgtttaccagaaacatgaaaactgcctgtctggccgggccgcacttgtggcccccgggaccccacctctggccccacctccctcaagtctgcgccc

SEQ ID NO: 35162 - DNA, 122 bp, Homo sapiens
gggctaaacttacacaaagagagaatcaactgggtgggaggcagggtgggagggcacagccgggctgatggctgccttggacccttgaaaaccaaccagaaagtctgtctccagggaatgct

SEQ ID NO: 35163 - DNA, 122 bp, Homo sapiens
ttcagttttctgaagttttggttgcataaccaacctgtggaaggcatgaacacccatgtgcgccctaaccaaaggtttttctgaatcatccttcacatgagaattcctaatgggaccaagta

SEQ ID NO: 35164 - DNA, 122 bp, Homo sapiens
gtcccccacctgcagcagcccacacctgaacccagggggcccggcagagagaagaggctccgtgacaggtccattgggagacaagaacgccatgcagggcaggactgaacctgggtcacacc

SEQ ID NO: 35165 - DNA, 122 bp, Homo sapiens
ccacattgtgtgtgtgtgtgtgtgtgtgtgtgtgtgtgtgtgtgtgtgtacgcgcgcatgcgtgcacatctgtgcttcctgggagcataggaagtaggaaccaggatttgtttccattcttt

SEQ ID NO: 35166 - DNA, 122 bp, Homo sapiens
gggtttgaagagtgcgtttcatctcgataagctcattccgggctgaggtggtggcgccagcgtcgtcagagatctgctgctgcagcgaggcgctctggaacggcaggggccgcgttagggcg

SEQ ID NO: 35167 - DNA, 122 bp, Homo sapiens
taaattaacaaaaaccaagattttaccatatttttggaaccttataaactcagcagactccggtccatatatgcgtacatacaacataacacatcccaacaaaaacagagcccccccccccc

SEQ ID NO: 35168 - DNA, 122 bp, Homo sapiens
aggccatgcctcagctcctacgccaggcggaagcgggagaggaaggccgacccccaagagcgccccttcagggggtccatccggccttgatctcagatgggggggtgtttgcggagggcggg

SEQ ID NO: 35169 - DNA, 122 bp, Homo sapiens
gcctgtccacgctgctggagcaccggcacacacacatcagcgagaagcccttccagtgtgcgcagtgcgacaagcgtttcacgcgtctggccaacctgaccgtgcaccagagagtgcacttg

SEQ ID NO: 35170 - DNA, 122 bp, Homo sapiens
gaggtcctcaggtgactgctaatttcacacacactgttcctctcacggctaatgaatgcccgcagaacccacaccttgtctttcctgctgaacggtgacctgcagttaatgagctcaggaag

SEQ ID NO: 35171 - DNA, 122 bp, Homo sapiens
ccccccttagccaacacaaagaagccctggggctgtgaacagccttgcctgcttggagaccgaccctcttaccaaggaaacaggagctcagcatggtgtacctccagctcctgggacttgtt

SEQ ID NO: 35172 - DNA, 122 bp, Homo sapiens
atcccgtttgcggagggcccagcttagaggaagctttataggattgggctgccggtcgggcgcgggaggcctgaagggctccaatcagctgggcgcgggcgcgtcgccgttccggaccccgc

SEQ ID NO: 35173 - DNA, 122 bp, Homo sapiens
cataagcagaggatacagatgtaaagaaaaattcttgattgcattcaagaaatgcaaggtcgaactaactttttactgaaatggaattgtatcgctgctcagagggatgtggggagtaaagt

SEQ ID NO: 35174 - DNA, 122 bp, Homo sapiens
caagctccctttgtctttgaggacatgggaagaccccgagagggagctgtcgtgggccgccgacaaaagcccactttacactcaccagcttggcgggagctctgcgtgtggtccaaagccgt

SEQ ID NO: 35175 - DNA, 122 bp, Homo sapiens
tcaggacgagccgtaccaagagggacgttcctctgccagatcaaacgtggggtggttgttcggcccaaggctgcccgtgctgttccctgcaccccagtaagccaggttatggggtgagctct

SEQ ID NO: 35176 - DNA, 122 bp, Homo sapiens
ccgcagcatggtagcgggagcgcagctgcgcgggcaaccgccgggtttgtggccggttggcgggctcagtgccgcctcagtgggctctagcagtagaaaagtaaagcgactaccctaagata

SEQ ID NO: 35177 - DNA, 122 bp, Homo sapiens
ctcccaactctgccgtggcaaagcccccctccaccaggcacttcgggcccgcctcctccccgttgccctagggaccccgcgatcttgggggccatacactccctccggggctacgcgtcctg

SEQ ID NO: 35178 - DNA, 122 bp, Homo sapiens
ggtgatgatgagcctgcatggtctgggagctgtgggctcagttaagctgttctccctcagcgtgtctctcaggtgcagtcaggcggagcggcctggggccaactccaaggcactcacacgca

SEQ ID NO: 35179 - DNA, 122 bp, Homo sapiens
caactttacatcactgaacaagcttatggtctataacatttacacagagttatatacaatcggttcttattatctgaagtagttataaagtcaacacaaacaatgaatcagcatatactgaa

SEQ ID NO: 35180 - DNA, 122 bp, Homo sapiens
ctgggcattcctgggcacctcctctttggcgtcttcccgcagcccgggcgctaggcttttcggggatcctgggtgtctctcacctgcattgaacttgcagttatttctgtttcttctccacc

SEQ ID NO: 35181 - DNA, 122 bp, Homo sapiens
tccttatctacataggatcttcatcttccatgctagtcatcagccccaaggacttgggtgcgtgggtgcgttcattcgccccagggcacctccctccctccatcaccatcatcactgaagcc

SEQ ID NO: 35182 - DNA, 122 bp, Homo sapiens
tgggtgcacacgctttgtatgtgtggacgtacacgtgtctgtgtgtggggtgagtatgcacgtgtgtttacacatatggggtttgggtgtgtgcgtgttcatgcatatgatgtgcgcatgtg

SEQ ID NO: 35183 - DNA, 122 bp, Homo sapiens
ccgcgggtcgggagaggccgggcatcgaactcaggccctcgtggggggggtctttctcttcgagtgaatgtggaaacagctcttacaagataaagtagggcttcgctgagtctcctggggga

SEQ ID NO: 35184 - DNA, 122 bp, Homo sapiens
ccccggtcagtttaaactcctggattcaccatggagccctagaatgaagggggggaagcacgaaggctggctccctatcaatggtgtgacttccttcagaacatctagggaactaagagttc

SEQ ID NO: 35185 - DNA, 122 bp, Homo sapiens
ccatgtgtcaaagaccatgaaatcgatgattttcaacttggagggagctaggaaatcatgcgggtctctggttccaaatgagaatcacctggggggttcgttataatacgtgttcctgagtt

SEQ ID NO: 35186 - DNA, 122 bp, Homo sapiens
cgatggagtaggggatgagcccagccaggaagcttaggactctcagtgcagcttggctggcgctcctctgctcagcctgccctcactctgggcagagaggtccccaaagctgcggcctgctg

SEQ ID NO: 35187 - DNA, 122 bp, Homo sapiens
acttgggaaaagaggaaagcgccctgaactggggattggaggcctgactcctgaggtccgcggagcccccggcctcctccttgagggacttggacactagagcaccgccactgtcccttcca

SEQ ID NO: 35188 - DNA, 122 bp, Homo sapiens
taaccagatatagctttgcagaaaccaaagccaacaacaacaagaagtatgagctgttgacgtcagccctgaaagtgttgaaaataacagtaggcagagaaacacctgctcatgtgattgcc

SEQ ID NO: 35189 - DNA, 122 bp, Homo sapiens
ggctcaaatgtcttcagactcaagtccaaagtacatagcttgcaagccttttcctgattccgctcctctctccagcctcaccattgtcatacctaacccccaccacgctccgttcactccag

SEQ ID NO: 35190 - DNA, 122 bp, Homo sapiens
gcggggagggcgccttccgcccgctcggtttctttcttccccgctggctcccggagaccgcgttatagagaactgccccctcgctgccccaataccagcgccggggccgcgagcccgccgct

SEQ ID NO: 35191 - DNA, 122 bp, Homo sapiens
cccggtgactccgtgggacaggggatacccccggggtcccttataagcctgctgactcaccgcctgttctccatcttctgtcttccacattagaagcaagggcggggacattgcctttcccg

SEQ ID NO: 35192 - DNA, 122 bp, Homo sapiens
atttccaacatctcctggactgtattgtttgccttcatgtccatataccctgttagactgcgagacctcaaggccaggacctgttatcttttacttcagtatcccaagtacctgtcacaata

SEQ ID NO: 35193 - DNA, 122 bp, Homo sapiens
accggcccctggaaagggttccaagtcctttagtacccgacgctgtctgggaattccgggcgtttcggctccttggtcgcagaggcaggaggcgtgcgtggcaggagggttcgggttatata

SEQ ID NO: 35194 - DNA, 122 bp, Homo sapiens
gaggacgtgcgggaaggcacagcgcaggcagcccctggcgccgtagtacacagcgaagcgcgtgggcagggacagccctaccagtagatcggtcaccaccaggttgatggtgtagatgactg

SEQ ID NO: 35195 - DNA, 122 bp, Homo sapiens
actcacagacagtgggccagagagtggaccctccctctgcattttccagaacaatgcgaacgatgcctgcacaccagaccccgcgagcgccgtgcttaactacaggggtccgtggcctcctg

SEQ ID NO: 35196 - DNA, 122 bp, Homo sapiens
taagatttatgcttgcactacaaggcacggtctactattaatataacactttacaaaacacgctcagaacgcctttctaaagcaattagaaaacaaaacaaaaacccaatagcctttggcaa

SEQ ID NO: 35197 - DNA, 122 bp, Homo sapiens
gaccgttccgacaccgaggtgcctcctctggacctgggctggacggacactggtttctaccgcggcgtgagccgggtcacgctcttcacccacccgcccaaggacgagaaggcgccgcacct

SEQ ID NO: 35198 - DNA, 122 bp, Homo sapiens
agggattcactttcagatgtgacactccagatgtggggttggtggcacattttttttgtccggttacatccaagtaaaaaggaggacaaattcttactgaacctatgcagtaaactccattg

SEQ ID NO: 35199 - DNA, 122 bp, Homo sapiens
atcctgactggcagagctaaaatgtaactcttcgaccttctgaacttgaacacttcttttcgaagctgtgaaatgtaaatccacagtagctgctgaccttagacatttttgcttttccctgg

SEQ ID NO: 35200 - DNA, 122 bp, Homo sapiens
cgtgcgcattgacttacccgtgccgcgcggacgcactactgtcatttgccgccaaaaccccgcactcaggagtcctggcgggtgcagcctcccagacggcttccaaagcggcgctggcaggg

SEQ ID NO: 35201 - DNA, 122 bp, Homo sapiens
aaggttttggtgacagctcgcctgagccccagggggtgccgagattgcggcgaggagagccgcagcacaaggcaaatccacgcggttggtccccgctacgcccccgtagtcacccgcagccc

SEQ ID NO: 35202 - DNA, 122 bp, Homo sapiens
gctaccatgcctggctaatttttttcatgttttgtcgagatgagtctctttagattgccccgcgtggcttgctggatatttgagccaaggaaacttgagtggatctcataacctcaagggac

SEQ ID NO: 35203 - DNA, 122 bp, Homo sapiens
cctgcagaagctctacttccagctccgcctcaaccagccgtactgcgggtatgccgttggcggttcaggtgtctctgccacaccagctcagcgtgaccacctggtgcagatgctctcccgga

SEQ ID NO: 35204 - DNA, 122 bp, Homo sapiens
ttcaatttaagttctgcatttaaaaaatcctttaaaaggaagaagtgggatatatggaatcggcagccatccctctgcattttggatgctacttcttgaggcagtcctatgtagtactgtgt

SEQ ID NO: 35205 - DNA, 122 bp, Homo sapiens
ggatattagggacaataacacaggggaggtctacacgttctggattattgggattaataccgtcctctccgcgcccggatattagctacaagatcacagaagggatgcccacccggtgcgtt

SEQ ID NO: 35206 - DNA, 122 bp, Homo sapiens
aactttgaagaactggacacctttctgagatctccttacagacattttaaaaataatatacgcttctttattgcctactatgagaagagtggtctcaaactttcaaattccacagtccctcc

SEQ ID NO: 35207 - DNA, 122 bp, Homo sapiens
tcccagtccatctcacccgtggtgaggaagcctgtgagaggctcactctcctcaaagcctcggaccgagaccacggtcacctcatagcgagcgcctgggatcagcccctggagtttctgggt

SEQ ID NO: 35208 - DNA, 122 bp, Homo sapiens
ttaatggaagaagatgaaacaataggtagtccccacccccaatcatttgaaattctcatgcgcagacaagcacactctcatggtggtcttgctcaactcctgctggcagccaagaaggtgag

SEQ ID NO: 35209 - DNA, 122 bp, Homo sapiens
aggtttccgtctggcgccgatccggctgcgtcacgccggccgaacgacaccccgctgagtcgccgccgcagggaaggtaccttcggccccaacgggaaaagccaatttccagtaattcgcgc

SEQ ID NO: 35210 - DNA, 122 bp, Homo sapiens
ataatcctgtcctcctcggaatttgtggaggtgcagcaaagatctatgcctttaagccagcgggtcaggtggccaaccaagctaggctggtgccccggccagggtggggctggcattgcctc

SEQ ID NO: 35211 - DNA, 122 bp, Homo sapiens
cagccgtgggacaagggggcgctctcgcgagcctaggaagatgtctgttgccttggttcccgggacctgccgctgcggaacagcccaaatctgaggaaaccttggacacagttctgggtact

SEQ ID NO: 35212 - DNA, 122 bp, Homo sapiens
agcccagcaaacgcgcttccctgccactgggttagggaaggcttgccggaaggacgatttcggaggacagcaggtgttagccaggcagcggagcgagcgccaacaggcgcactggggcggag

SEQ ID NO: 35213 - DNA, 122 bp, Homo sapiens
ggtttctttgtaggtagaacgggcgtggcagacctccctgcaggcttgttgctgggcgaacgagaaggatgccatgctgacacactgacgtgctctgtctccttgcagacggaggcccggga

SEQ ID NO: 35214 - DNA, 122 bp, Homo sapiens
gagagcttgagcgctatgtcctttcctgcctacgtaagaaaccccggaagccctacagtacgtatgaaatgaggttcatctcatggttctgaggacagttgaggaaagatggtggggtctgt

SEQ ID NO: 35215 - DNA, 122 bp, Homo sapiens
ctctgaaatgagtctcgggtaatttgatttacgctgtagtggagaaatcagagatttcagcgcagagtggactgtggtgtcctccagcaggaaatggggcctgtctctggctctgcgttgga

SEQ ID NO: 35216 - DNA, 122 bp, Homo sapiens
caggaggcagcggggctgtttccacaaccaggccctacaggtccagactccagctgtctccgagggttgcagggacccccaaatgtgtctgcaacctgaaaaataaaattcactggctccaa

SEQ ID NO: 35217 - DNA, 122 bp, Homo sapiens
tctcgaggcgttcatgcctggctttaagacgccaagataactctcttgttttggcattgtcgcaatgtccaaatcggtcaaaggagtgggataaggtgaaaggaccaggtcagaaactttag

SEQ ID NO: 35218 - DNA, 122 bp, Homo sapiens
cgggacctgcagcccgccatgcctgcgcctcccacccattccgtgggttcctgtgcagcccgagcatccccgacgagcgcagccccctgctccacggtgcccagtcccatcgaccactcaag

SEQ ID NO: 35219 - DNA, 122 bp, Homo sapiens
agggccgcaggtgccgctcggacactggctcaactaactggcagacagttttattcaccacgatgggaaacggcagctactagagaatgccagccagctgaatttcggacatgtggtgattt

SEQ ID NO: 35220 - DNA, 122 bp, Homo sapiens
atgctgttctggtagtagtaagggagctctcaagacacctgatggtttaaaaatgtggcacgtcctccccggttctctctctttttccaccatgtaagatgtgccttgctttcccttcacct

SEQ ID NO: 35221 - DNA, 122 bp, Homo sapiens
agtcgccgcggctctgggcagggcgccgtgctctgattggccagcgccgcccgtccatcccgcattcgccatggcgaccacgttgggtcccccgggagagtcccaaattccgtccccgcccg

SEQ ID NO: 35222 - DNA, 122 bp, Homo sapiens
ggccgggctacgccgaggccgggcctccctccctccctccctcccgcagcctccagggcgcgccacctcccgcctggtccccagccagctggcgaggctgctgtggcagctcccgctgcaga

SEQ ID NO: 35223 - DNA, 122 bp, Homo sapiens
agcgcgcctctagctcctgttggcccttccggttcaccttttcccgccctagggcacttccggcttgaaggtcattagcctaagatacgtgggtaatcttgagcatctggggcaaaatatga

SEQ ID NO: 35224 - DNA, 122 bp, Homo sapiens
gtacccagcaatgactcaatgcatattattattgggtcctttttgagatattatttatctcgctctgtttaacttctgctctatggccagctttaaagaagcaaggcatatttttcaaggca

SEQ ID NO: 35225 - DNA, 122 bp, Homo sapiens
caccctttccatcttgacaccagacaaggaccgaggcatttggactcctgttctcaggcccgtttgccccatggatgggcattaagacacagcagccccacatgggcattcaggccaggctg

SEQ ID NO: 35226 - DNA, 122 bp, Homo sapiens
gctctctctgggtgattagctctccagcatcaaagcgagtcatcgctgacttgaggatgccggtcgtgatggacagcagcacacgctcatcatagtcctctccgatgctggtgaagatgcga

SEQ ID NO: 35227 - DNA, 122 bp, Homo sapiens
gtggcgactcgtagagagttcggggctcgctaccagcccctctcctgattggccttgtgccgcgcgctcgagcgtgcttggcgcctgcgctggacgactcggccggtagtggagatgtccgg

SEQ ID NO: 35228 - DNA, 122 bp, Homo sapiens
aaggagagccaacgcatgagtgacgagggccgcatggtgcaggacgaggcagacggcattcgcaggcgctgccgcgtggtgggtttcgccctgcaggccgagatgaaccacttccaccagcg

SEQ ID NO: 35229 - DNA, 122 bp, Homo sapiens
aggcggctgccacgatttcacttccggttttccagtcagcaaacgcctacgagaaggcttcgtccaccaatcagaaaactggaactcggccctcccaccaacttccggttcctgctgggtgc

SEQ ID NO: 35230 - DNA, 122 bp, Homo sapiens
agcgcgatctggcttgcctggggagctaacgagataaggaattgagtcagtatttcctaacgttcacacttgaagcccataaagcaggcaggtggttttaattttgccccgctgggtgggtt

SEQ ID NO: 35231 - DNA, 122 bp, Homo sapiens
acagaccttctatttgaggaatgtgctcccccaatcccagaccgctcctggtggggcgggcgcgagcgcaggaccgcggagcctgctgcgttgctcggctgcaggggaggagctgggccccg

SEQ ID NO: 35232 - DNA, 122 bp, Homo sapiens
cccagttgagaaggtcggccgaggtgaagggctggtacataaaaacatgcttctccaccacgtgaccatcctcctctatcacagtataccgctgctctctcaggggcatttggatccccgtt

SEQ ID NO: 35233 - DNA, 122 bp, Homo sapiens
ctctggactcccagtccagtgctcttgcccagtgctatgctgcttgcctctacccatctccgtgggtcatcagcgcatcatagggcaagccccaatccctgcctcattttggtttatgggcg

SEQ ID NO: 35234 - DNA, 122 bp, Homo sapiens
aaaccaccaggaagaataactgctcttcatgtcagaagagggagagagagcacttctcagcgggtggtcaaggtaggattcctggaagaaggccggttctgaaaactgagagagctgtttat

SEQ ID NO: 35235 - DNA, 122 bp, Homo sapiens
ctgggtttcagtgatcataaaaagaattccttatggaagttctgctatgcatgtgaatatcggctgtactggtctcaaggcacaaaatagttgaaaagtgctgctctacagagttgttagca

SEQ ID NO: 35236 - DNA, 122 bp, Homo sapiens
ccttgtcttggcatctgtaaactgttgtggcactggtgagggtatctcatagcatgctaacgtattaaaattagcatataatgagcagtcatgataaccagaggttattctggtcgccatct

SEQ ID NO: 35237 - DNA, 122 bp, Homo sapiens
gagggcgggggaaacctggcgggggtgacgaggcgggagtgactgggccgtacagttccccgagaactggaggcgaagccgggcggtgggaagggacttcggacgcttcgcgggccctgggt

SEQ ID NO: 35238 - DNA, 122 bp, Homo sapiens
gcggaggctggagagtggttgcctgtccacagactccccattcatgtcacatgtggtattcgtcatccatgcaagtatttgttcctttattcatttcttcagtttgtttattcttctaagcc

SEQ ID NO: 35239 - DNA, 122 bp, Homo sapiens
aggaagaggaggaaggttctggccgccgtcggggctctgctgctgtggagactgcattgtcggctgccacctggttgtgtgctaccatcctacagaaggggccagccggaggggtgggccat

SEQ ID NO: 35240 - DNA, 122 bp, Homo sapiens
ccctcctctctcccctgcccgccccgcgctctcccaccgctcccgccgcccccgccgccgcggctgccactccgccccccgcgccgcacggagcttcagtaataaccccggcgcggcggcgg

SEQ ID NO: 35241 - DNA, 122 bp, Homo sapiens
gtgcatcactgagtaataacaccattagaaaaggcaacttcacagaagttattggctaagcgaattcatttgaatgctctgttttgaggcagcaaactgtcactgttgcagattggggaggg

SEQ ID NO: 35242 - DNA, 122 bp, Homo sapiens
attctgtttgaagattcggatgcattcgcacagcctcttttatttgtttttccttagggccgagctttgattgttttccttacacaaccgggaatattggagtaacactgtatttttctctt

SEQ ID NO: 35243 - DNA, 122 bp, Homo sapiens
tcatgaacactgtccacccaactgcagtttcccgtcagagtatctgaggagcctgtgaggcgttctggagctttaaggtcaggcgccttccgggagccgtagccccggccccgcccttctgc

SEQ ID NO: 35244 - DNA, 122 bp, Homo sapiens
acaagcaggagagaggggccagaaggaagaaataaagacccagcctcagtgggccagtggcgacgtgagatcccagcaagggcgacatcagggagagaccccagcaagggctacgtcagggt

SEQ ID NO: 35245 - DNA, 122 bp, Homo sapiens
ggtggcggccgagacggcggcggccattttggtgaggcctcgggagcggcagcggcggttcgctgggagtagcgtctgccctttttcccacccaccgtccgcatctgtgtgctgcgcgaaga

SEQ ID NO: 35246 - DNA, 122 bp, Homo sapiens
tgcggcgcgccggtacggctgagcgaaagtatggggagcgggccggggaacagatggcaccgcggcttgcctatttttgctttttggcagaggtgacggacgcctagaattactgactgata

SEQ ID NO: 35247 - DNA, 122 bp, Homo sapiens
ccaatgtccgggggacgcagtagcaactgttgcttctgactagctcaggctctggagacccgcgcgctctcttatgcggctgcgcatcccagcagctcccgcgagaagggtcaggccctgat

SEQ ID NO: 35248 - DNA, 122 bp, Homo sapiens
tcctcctagcgggtggcaggaccaaaacctggctggttgggaacaagcttgtcactgtgacgacaagcgtgggaaccgggacccggtcgttactaggcctggactcgggggagctgcagtcc

SEQ ID NO: 35249 - DNA, 122 bp, Homo sapiens
gaagttagagcctctgcgtgcgctccggggcccggcgagaggatgcgcaaggtggagagccgcggggaagggggcagagaggtaaaggctgaaggtgccccggggaaccccggcgggcggcc

SEQ ID NO: 35250 - DNA, 122 bp, Homo sapiens
tcccagcggagtctgtccccgtgtctctgcagcgcggcctcctcctcgcttgcatgtgggcggcagaactcacagaacccacagcccagacccacccaccgcaggtgtgcaacacctggaag

SEQ ID NO: 35251 - DNA, 122 bp, Homo sapiens
ctttcttctgacagaaaacgtgcggagtttgctcaacatcagtcaatgctccaaccccaacgcggtgtccagcaactcactaacgacaccacccagagtcagcgaagaccccacaagctcag

SEQ ID NO: 35252 - DNA, 122 bp, Homo sapiens
ctccctgtcatcaatcagggtagtaacttgacttaagaataccactttttagaaaaattacgatagagatgggatctcactaggttgcccaggctggtgtcgaattcctggtctcaagcagt

SEQ ID NO: 35253 - DNA, 122 bp, Homo sapiens
cctcccgcctcggcctcccaaagcgcgggatcacaggcgagagccaccgcgccggccggccgccatatggattttgtccagtctttcgatcttccagcgaccagcaaatgtaaacagagcag

SEQ ID NO: 35254 - DNA, 122 bp, Homo sapiens
tcccgccggggcgggctcaccgcgcgcctctgggtgccgagcctccacaggccacatagccgccacctgctgctgcatccccactgcggggacaggggcactcagtgcctccctccgtcccc

SEQ ID NO: 35255 - DNA, 122 bp, Homo sapiens
gtacctggtggtgctgcagatcatccctgggacttttgggctttgggccaagggacagcccgcatcccgcttggggtcagcctatctccatggtcaagtgtcatgaagggtggccccctgag

SEQ ID NO: 35256 - DNA, 122 bp, Homo sapiens
tttcccccattagactgtaagttctttgaaagctagaacttcataatgtaacccttgttacgtagtaggcaagcattaataaatactggttgaattaacgaataattgggtgagtgaatgaa

SEQ ID NO: 35257 - DNA, 122 bp, Homo sapiens
gaggagggcggtgggctggagagcgtgggcctggggtgacggaatgctctgtgcggggatcgcaggcccccgagctgcagggggcagcaaagcgcgcccacctgcccgcctgcccgaggaga

SEQ ID NO: 35258 - DNA, 122 bp, Homo sapiens
atctccttgcacaagcttgagagcaacacaatctatcaggaaagaaagaaagaaaaaaaccgaacctgacaaaaaagaagaaaaagaagaagaaaaaaaatcatgaaaaccatccagccaaa

SEQ ID NO: 35259 - DNA, 122 bp, Homo sapiens
ccaatgtctaattggagaatcacaacatagattccatgtgaatgttcagaggcaaggcaacgccactcacagcaaggaaatctcaacattaaaaagtgtctcctgtagagtactgggccttg

SEQ ID NO: 35260 - DNA, 122 bp, Homo sapiens
acatgcacgggatgaaggtggcttcgttcctgatggacggccaggaactgatctgcctgccgcaagtctttgatctttttctcaagcacctggtgggaggcttgcacactgtgtacaccaag

SEQ ID NO: 35261 - DNA, 122 bp, Homo sapiens
agagcaggtgccaccaaagtgcctcctcggaggtgcccgggctcatctgggccgtggccacgcacacatgggtgtcagggacaccatgccccaagtgtttggcccagttgccccagacaaag

SEQ ID NO: 35262 - DNA, 122 bp, Homo sapiens
acacacgtgccggtgctaccctccagtgactggactagatccttgcgcaacttcaacccgcgctagctccgcctacggccggccacgccccgtcttctcaccggcgcgcctccctcttgttc

SEQ ID NO: 35263 - DNA, 122 bp, Homo sapiens
ggccacgcagccaggacaccgggcagggccgcccgggcccagaggagctgggagccgggccgcagacttgaccccgacgccacagcccagccacggacgctggctccccaaagggtgtgccc

SEQ ID NO: 35264 - DNA, 122 bp, Homo sapiens
cactaggtaatgtaaccttcattaaaagcagcagaatgaactcactgacactaagacccacgtctatcagacagagcttcataaaaagaagtgaaagcttgcccaggaaatcaaatatgaaa

SEQ ID NO: 35265 - DNA, 122 bp, Homo sapiens
ctggaggggttgcttttcttcccaggtgtcttttgaagaggcagtcaagtcagcagctcgcggtgaacttctggtaacatcgtatgggctgggttacagcacatgccgactgctaagccggt

SEQ ID NO: 35266 - DNA, 122 bp, Homo sapiens
tgcccaagagcagtagaggctggatatatttttcaaaagccaaactgcaaacaactctggcgatgccaaaattcccctccaagtgacacggctttgcgaaggaggtttcctcaggctgggct

SEQ ID NO: 35267 - DNA, 122 bp, Homo sapiens
tctcggagctacagggcttggtgcggagacgcagggcgggcgcgctgggctctgggtgtccgcaacccaaagtgcagctggtgtcttgacgctaccgtctatgcacaagccggcggcggcgg

SEQ ID NO: 35268 - DNA, 122 bp, Homo sapiens
gaaccttcctcctgcggaccgccatgcagccccggagctcgtgtgccgcacccaggccaacgaccctggaccactgctagtggggctgtccacaccatcgactcttccaggcagaaaatcaa

SEQ ID NO: 35269 - DNA, 122 bp, Homo sapiens
ctgaagagacgcgggtcagccccgccgccccctccagtcacccgacacacacccactcgccgtgggtcctcgggccgcctccccgcccgccaaagtcccaactcgcacacccacacgcacat

SEQ ID NO: 35270 - DNA, 122 bp, Homo sapiens
tgggcgttgccgtctgacctgtgcacagatgtggccaggtgaggacacaagctgttgtctcgtttgctgtgtgctgttcgcagacacgtctcactaggcggtttgctcagaactccagagga

SEQ ID NO: 35271 - DNA, 122 bp, Homo sapiens
gaatgggatcccgaggtgcttgccaggaccgtagcaggcggaagctgctggcagcgcgaacgggcggctcccgccggcgtgggtgggggaagggcggcagccacacccggaagtcggtccgg

SEQ ID NO: 35272 - DNA, 122 bp, Homo sapiens
cacctctgtcaagttgaccgagacaccacctaaatctccatgaaggacctggcagctttccggctctgcagcattttcccgacaagtttgctgcgcacacgcggatgctgacagcacagtct

SEQ ID NO: 35273 - DNA, 122 bp, Homo sapiens
gtggtgacccccccctccacacacacacacacacaccccgccccgcccctcgatcggaaccggcagctgcagcccggagccaaacttgaggcttggcttttcgcaccgagccaaagtttctc

SEQ ID NO: 35274 - DNA, 122 bp, Homo sapiens
acgtcaatttagaatgagacatgtgttgaaaatgggacggctactccccatccactactacgactctggcgggcgggttctccagctccaggtctcctaccccgcgggcgcgcgttccggtt

SEQ ID NO: 35275 - DNA, 122 bp, Homo sapiens
cagccaatcacaggcagggaccagggtacccctagccaattggtgatgagacgggggtttcggcgcttctaggcatgtcaatgttttttctctacttcctgggtttttctggtcccttcacc

SEQ ID NO: 35276 - DNA, 122 bp, Homo sapiens
ccgcctccctgcagcatccggcgcccccatccccctgcccgccagattctgcggagtctgcgaaacaaaaccgccattgtttccagccgggctgctcaggaaaaacaacaggtttttccact

SEQ ID NO: 35277 - DNA, 122 bp, Homo sapiens
atattattttgagcgtctattgtgtgctggacattaagctgagtgcaagggacaaagcagcgaatgggaccgaagcggtccccgtttctccgcctctcgggccagtcccctagttctaggcc

SEQ ID NO: 35278 - DNA, 122 bp, Homo sapiens
gtacacgaaggctggggaggtcccagcggggtgccgggaggctgcaggtgaccagatccgcgtgcgcagccggcagacagcttggagtcggtgggctgaatcttcaccactgtcctgccggg

SEQ ID NO: 35279 - DNA, 122 bp, Homo sapiens
ttaagtgacttcagtaaaaccacacgttctcccatgtggaaacttctgacaagaacaggccgccagcagcaaagtccacgccaccacgactgtgacgtggtccatccagacctcgcctccca

SEQ ID NO: 35280 - DNA, 122 bp, Homo sapiens
ggaagctgcttcgcgcctgcgcactccctggccctgccggcgctctcctctcccacctctcgctggggtctatcctgtgttcgtgggtccctccgaacatcaaccccagggggggtcgtgtc

SEQ ID NO: 35281 - DNA, 122 bp, Homo sapiens
ggaaacagctgctaatgtacgccaattgagcgggaagcccatgtaggaaggcctggaggccgggaagccagggaggacgcagcagccagggtccagatgtgaaggatcaggcctgagctgga

SEQ ID NO: 35282 - DNA, 122 bp, Homo sapiens
gagccttctggtctatcccagttggtagagtccctgtgcttacctctgtggctcagtcctcgtgggtggtcagtgctctagggaaggtgagctgaccacttcactttcccttcccagccata

SEQ ID NO: 35283 - DNA, 122 bp, Homo sapiens
gacaattgggttagatgcatcaatatgagcactgttaattcaatatatgaactggggaatcgctgagtttgagtactaattggttacagaggaattttctttaaaaactcttaaaaggcttt

SEQ ID NO: 35284 - DNA, 122 bp, Homo sapiens
ttatgcaaaggaaactctgggaagaaatgatgtggtttgggactacacttgtgggtagcacgtgcttagatgtattattatagccagtgctataaggagatgactaagttatttcaccacat

SEQ ID NO: 35285 - DNA, 122 bp, Homo sapiens
gggcaggagacagcccagggtcggggaggcggaggctgtcctgagcaggggcgcagagtccgggctcctgggggccatgccactggctgggctgtctgaacagcagagtggacgcagactgg

SEQ ID NO: 35286 - DNA, 122 bp, Homo sapiens
tgtttaaaagacatacactttttccaattatatagatcaagtaatacctcatcaactgcccgtccactttattacagggaacattgtcattagccaccgccacagattcctgcaggtcaaaa

SEQ ID NO: 35287 - DNA, 122 bp, Homo sapiens
ccttttgcaccactcacaaaggggttgagcccagagctttcctgctctgaaggtttaaaacggagttgaagtcaatcctgttctactctgtgtacaacattaagaaaggggtgggcctttag

SEQ ID NO: 35288 - DNA, 122 bp, Homo sapiens
acattattattaatgcctttctgcagatggagtaaccatggcttggacagatgaaggaggcgctctcagatgtcctcccaggcaggaatcactagacacccccatgctcctaaccactgggt

SEQ ID NO: 35289 - DNA, 122 bp, Homo sapiens
tcaggtggctcgtcctctctggtcattagtatcctttcagaaagagaatcctgccatcaccgccttgtccgcccctccgcttgccagcaattaacttaatgctatgcaaatgagaggctctt

SEQ ID NO: 35290 - DNA, 122 bp, Homo sapiens
ccccccgccggtgcactaattgaaatggagcctaacgcctttcacgaagagctgtcagaacgtatagggaacgccagtcggccaaagagaaagagcagccgcgttgaccttcagaaagctac

SEQ ID NO: 35291 - DNA, 122 bp, Homo sapiens
attaatacttaacataaggctacattagtcaagacagtgttattggcggggacagaaacacgtatcagacgaacagaatagagaacccagaaatctacatacacaaatattgtccagtggcc

SEQ ID NO: 35292 - DNA, 122 bp, Homo sapiens
ggctcctttaagcctgactttatcccagtcatgcagaaaagcaaggataagcatgcatttcggtttggtggtccaatactcaacctactctagcacatgccccagtgggttgaggtcaagtg

SEQ ID NO: 35293 - DNA, 122 bp, Homo sapiens
ggaaagtattgtagcgacagccaccgcaagctgggtcgccgaggctggctgttggggtcacgggggctgtctttccccttaccacttgggggtggtattagtagagtccagaggaagaagga

SEQ ID NO: 35294 - DNA, 122 bp, Homo sapiens
cccgctaagtccccggaccgcgtactccccggcccgcccccgccccgccgggtccccgcgcgcgcccacctcctgcagcttgcagtcccgcaggctcagcgtggccaggacgccgctgccgc

SEQ ID NO: 35295 - DNA, 122 bp, Homo sapiens
catcactactaatgtcagaacatttcactacccctaaaagaaaccccataccacagattccgatgccgccgggagccctgccatgccatgtcacatatattatagtatatctatgcccagcc

SEQ ID NO: 35296 - DNA, 122 bp, Homo sapiens
ggtgctccctgggccatcctctccgcccggtggtctcccctgccctatatgctccctccacgctgcccacctcccagcccagtgacacactggtgtctggaaccggttcagtactatgcatc

SEQ ID NO: 35297 - DNA, 122 bp, Homo sapiens
cagattctggcagaccagccacgggccccactgctacagggagctgaggaccagtcagggcgtgcctgtcccatcgctgccatgccgggccccactgccgacgtcctccttcccctgggcag

SEQ ID NO: 35298 - DNA, 122 bp, Homo sapiens
ctgccgcccggcaggggtaggaccaattcccgggcttggagttccaggatccccagctcccgagggcccccgtgtgcctgctgtcacctgaacggggctccccggccccgccgaccgcagcc

SEQ ID NO: 35299 - DNA, 122 bp, Homo sapiens
agatcacacaggtttttggtgagaatgtctccccagccattgggcacttcaggatggggacggtgcctcaaaaatcacatcataagtcatatcacttttagtgcagacctagacacatacaa

SEQ ID NO: 35300 - DNA, 122 bp, Homo sapiens
cttttatgcagtgacatctccccgtttctagcaagctctactggtaacagaaacaaaccacgtaatattccactactgtgatataataggcctcttagcttttctcagcttgcttcaatatt

SEQ ID NO: 35301 - DNA, 122 bp, Homo sapiens
gctcactccatcttgatgagagttggtgtttgtgggttatttgtgaagccggaaagaagccgtgtcctggagaatgtagctgaaggcctggccactttcgacaagaacgggaaagagacgac

SEQ ID NO: 35302 - DNA, 122 bp, Homo sapiens
agatctctcgcacctgaaaatttcctctgtagccattcgcaggaggtttctcagatgccccgggctcgggggccagtcagtctcatgaggacggggtgggtctgacttgtggcatcgcggcc

SEQ ID NO: 35303 - DNA, 122 bp, Homo sapiens
cctcctgctgggttggaaagggtttctcatccttaatagtttctggagattgaagtctaccgtttaactggtaaaggtccagcctcttctgatgactctggaggcagagatgggcccccatg

SEQ ID NO: 35304 - DNA, 122 bp, Homo sapiens
aaatcattcctgtctctagcatgactgatagattaattacctcaattctcttttatcttccgtatcttcctacgagtcaacttggtcttaagttcccttttactcaagctcctgtctcctct

SEQ ID NO: 35305 - DNA, 122 bp, Homo sapiens
agctatcagttggggggggggtccccggggaattagaagctgtctcctcccgggcatctccgaggggcacccctgcctctgccccctgccctcatttcccgccgcgcccctccccggccccg

SEQ ID NO: 35306 - DNA, 122 bp, Homo sapiens
ggtgacactgatgcaggaattggagactgtaaagctttatttaaaaggaaatgatgttcacgaagtagaatccacctctatgtaaggattgtaaagcagacgcaatgttattattcttctat

SEQ ID NO: 35307 - DNA, 122 bp, Homo sapiens
aggcaccggcggagagcgcccggcagaacttcctcccggactggggctgggctgcggttgcgagagacaatccccggcgtcctggcttcctgtcgcctctgggccaggcccgcgcctgaaga

SEQ ID NO: 35308 - DNA, 122 bp, Homo sapiens
taggaaatcatgcgggtctctggttccaaatgagaatcacctggggggttcgttataatacgtgttcctgagtttcctctttacttaatgggttagattagcctttccaaggcagggccagg

SEQ ID NO: 35309 - DNA, 122 bp, Homo sapiens
acattcatgtgcactctggcttccagttggccatttgagtaagtgatcgcaattaactgacgagcggcagggaaacacttcctggaattctcatctacagacaagaacaaactggggcgggg

SEQ ID NO: 35310 - DNA, 122 bp, Homo sapiens
attttaaatcagctttatgatatagcgaaaacttagagttagctttgcccatcatcccatcgtcctaaagcaacacctgtttcccttcttcccttttctggtgatggtttggggtgtgcatt

SEQ ID NO: 35311 - DNA, 122 bp, Homo sapiens
cttgcagtcccagctgggaaaaagagtcccattatctcccagctgcatagacattccatacggcttggttctgcctggacgcacagcatgcctggctgagagcttgaaacagagttctgcag

SEQ ID NO: 35312 - DNA, 122 bp, Homo sapiens
gtctatttcgaatttgcccttggcggggagttctcccagagcgctgtgcaggggggcagacggcaggcgcgggcttaggcgagccgggtgctgcgaattttccagggcctcgagcacagcat

SEQ ID NO: 35313 - DNA, 122 bp, Homo sapiens
ccaccacgtgctcctccctgctgcagccctgccctcccgccgggcctgcatgtccaggaccgcccacgagatgctcgctgccctcccgcaaggctgggagtcgacacagtgggcacggaggg

SEQ ID NO: 35314 - DNA, 122 bp, Homo sapiens
ctcttctaatatattacagagtttgactctttttgtccacaataatttggtgcctgaacacgtgaggcctcagataagactcaggaccccaaaggagttgtctcaacctggagctaaggtac

SEQ ID NO: 35315 - DNA, 122 bp, Homo sapiens
cgggatcccctggtccccttcctcaaatgagatgtctctggcataggttccatctactcccgttcaaaggcaataattcactagtggagccatttggacacatggctactttacaatcactt

SEQ ID NO: 35316 - DNA, 122 bp, Homo sapiens
gcacgcgagaaaaatgggggtcgttgggaggacggcgccggcgcctggggcggaggagcccgaaagggcgggtgggcgcggggacttccggacagagcgcggtccccgcgaactttcccggg

SEQ ID NO: 35317 - DNA, 122 bp, Homo sapiens
aggcctgcagggatcaagcctcatcttccctagggctcgactctattaatggcaagcttccgtgtttcccctgagaccttccactgctcctgacctcctgtatttcagctggagagaaggtg

SEQ ID NO: 35318 - DNA, 122 bp, Homo sapiens
ggtgatccacacgcctctgcctcctaaagtgctgggattacaggcgtgagccaccgcgcacggctaaagcttcagttcttaaccatcaggcgacagtgcgtagtctggtagcaactggaaaa

SEQ ID NO: 35319 - DNA, 122 bp, Homo sapiens
ttggagaattttaggagaggatgtaacttggaaattatggtatcttaggcttgaaacttgcgcttcatacttagaaagcaatcagattaagatggttcagtttgagtgtgtgtggtctggcg

SEQ ID NO: 35320 - DNA, 122 bp, Homo sapiens
gcacccctcccacctcccatccgtggtgctggcagaagaatgaccgcagctccatgctggcgggttgacactttgatggatactctagattcagagccaggaaggagagagcacgtgcgcgt

SEQ ID NO: 35321 - DNA, 122 bp, Homo sapiens
gtgagaggtttcgggattctggatgacaatgtctcggtgccctcaaggccactgattcctcgccacacagtctcagtaactccgcagcctctagacacggctttccggaagcggcctgcaag

SEQ ID NO: 35322 - DNA, 122 bp, Homo sapiens
gtcctccagggcccagggcgggctgatccgatcataggccggcatggaacagatgctctccggccgcactcctggcgggtagtactgataatcatcggggtactgggaggagtaggggccat

SEQ ID NO: 35323 - DNA, 122 bp, Homo sapiens
gtagccgcggccgccccgagacctcggtgtggcccttgaggcatttcaatgggcgagggccggcgactgtggatctggagctggacgcgctggaggggaaggagttgatgcaggacggcgcg

SEQ ID NO: 35324 - DNA, 122 bp, Homo sapiens
ctgtgtaccgtgagtatgtctgcaagtctgcatttaccatcaggtagattgagggcattacggatggggagtgagggtcttggtaagttgtatgttctgtgggatctgtgggggaggcagag

SEQ ID NO: 35325 - DNA, 122 bp, Homo sapiens
tctcgcggatccggcgaccgcggaggggagaggagcgccggacgctctcgcacgcccgcccgcccgcccgcgcacctccaacccacctgccgccggccagacaggaatggactgtgtgactg

SEQ ID NO: 35326 - DNA, 122 bp, Homo sapiens
gctgcagctgccacctgcacatggcgcgcggcagcacagatggcaatccaataccctgcccgcaccaccagccctggaccccagggagagacattgccacttcaactaattcaggtggtccg

SEQ ID NO: 35327 - DNA, 122 bp, Homo sapiens
atctgccccaattctttacttcaaaaatgttcacaccctcaaaaaggctgaagacaccctcgcagggccctcccacctgtgtgctgtgctctggcaccaagaccctgcccacatggcccgct

SEQ ID NO: 35328 - DNA, 122 bp, Homo sapiens
tttcctcctacatctcattggccagaaccatgtcatgtgatcacccctgcgatgacctcgcgaaagtgggcatcttagcttggcacattgcctccctgtacaaaatctgggttctcttagaa

SEQ ID NO: 35329 - DNA, 122 bp, Homo sapiens
ttaactttattacaaaaagcaaaatgttagtttctcattgtgagtgattcaagaaaacaacggtaacagccctggcaggagctgggaccaggataccagtatgcaggctgaggggtcaaagg

SEQ ID NO: 35330 - DNA, 122 bp, Homo sapiens
tggcgccgggcgggacgcccaggatgtcgtacagcttcgtgtcagccacgttagccatggcggccggccgggcagtgctcggggagaaggtggcgaagcagacagagcggagtcgggcccac

SEQ ID NO: 35331 - DNA, 122 bp, Homo sapiens
tgggtctggaaccgggatcctgctcgcagtcacaatcatctaccagtactttgagatcttcgttaaggagcaaagcgaggttggcagcatgggggccctgctcttctgagcccgtctcccgg

SEQ ID NO: 35332 - DNA, 122 bp, Homo sapiens
ttcctgacggcccgcccaccccagaaactgcaggccaggtaggagaggttcccgacagcccgccaaccccagaacctgcaggccaggtaggagaagttccccgacagtccgccaaccccaga

SEQ ID NO: 35333 - DNA, 122 bp, Homo sapiens
ccgaaccaccggtggccgggggtgggaggcggtgctccggcgagggccgggcgctgggtgcgagggggtcgccgggggccaccgttcggcactgggccgcagaccgttctgcagggcggagc

SEQ ID NO: 35334 - DNA, 122 bp, Homo sapiens
cacccccactgttaagagtgatgagggtttggagcacctaatctggatctagaaattggccgctgtgcaggcagctgggtggttcaagatctagcacccaaagagtgtagcaagttcaggcc

SEQ ID NO: 35335 - DNA, 122 bp, Homo sapiens
gctctgttttagagattcaggttcagtgaatgtggggtgggtgggaagcgtgtatttaaccggcagcccaggtgaccctaatgtgttcaagtttcagaatttccgtagttaatgttaacccc

SEQ ID NO: 35336 - DNA, 122 bp, Homo sapiens
gtgtaggttccacctgacgccctggctgcaatcatagtcaccggctggcctttaagggggcggcctcccagaactgctctccccacctgcactctgcgaccactcaggcagatccggaacct

SEQ ID NO: 35337 - DNA, 122 bp, Homo sapiens
agcatggggagtcctcaggggacctggtttttctttcatagaagcttcaggggccaaggccggagactgcactctccctcctccacccggcccagctgcgtccctgccagtggctcctccca

SEQ ID NO: 35338 - DNA, 122 bp, Homo sapiens
cactagggcaataagacatgtataagaatgaatctcgtatcagagagaatgtggcttcttcgtaagagatgcagagtagtatagaattcaagtgggaatccagttgtccttttgcttgaagg

SEQ ID NO: 35339 - DNA, 122 bp, Homo sapiens
actgcggcctgcgtgacagagtgagaccctgtctcaaaaaaaagtcagagtcgggagtaacgttcagagaaaatgcttggggttttggatgggaaaagttttgcccctgactagaaatgatg

SEQ ID NO: 35340 - DNA, 122 bp, Homo sapiens
tgaaaaaaggaggaattatggatggttccatgacgatggcattggagctggatctcacagcgtaggtagatttttaacagatttctgactggatcataaactgtgaaaaatgaaaccttaag

SEQ ID NO: 35341 - DNA, 122 bp, Homo sapiens
cgccccctcccccgcacgcgcacacccccttccggcacccctccccctgcattgtgcgagcgggccccaggccgcaccggcccgggcactcagcaggccctatccgccctcccgctggcgat

SEQ ID NO: 35342 - DNA, 122 bp, Homo sapiens
ttcatgtgctttcatgtatagaccaacagcaaagcctttactgccaagacttcctgtgtgcggcgccgctaccgtgagttcgtgtggctgagaaagcagctacagagaaatgctggtttggt

SEQ ID NO: 35343 - DNA, 122 bp, Homo sapiens
ttcgagttaatttcgcattggtctctaggatgcaagcttgtccaacgcgtggcccaagggcggcatgtgactgaggaaggttttgaatgcggcccaaattcataaagctttcttagaacact

SEQ ID NO: 35344 - DNA, 122 bp, Homo sapiens
gttgcaggagggcacctctttgaaaattactcaccttcccgccctccactgggagtaaagcgagctgtgcccagcttctccccgcgctcacggaagcaggtggcggccccaccccacctgac

SEQ ID NO: 35345 - DNA, 122 bp, Homo sapiens
tcgaattaaaggggccggcgggggccggggccggggccggggcgacaagctgccctccgccgccaccgagctcgtcacctcgttgggcccccgggcctcagcccccgccccgcgaggaaaac

SEQ ID NO: 35346 - DNA, 122 bp, Homo sapiens
ttgaacttctggggaaaccatcgatggcagccagggtgatttatcacgcaaccatgtgtgcgtgtgcctctgtgcattttctcaggagagattctggggctttcagccgattctcaaaagag

SEQ ID NO: 35347 - DNA, 122 bp, Homo sapiens
gtattctcccaaaatacttcaatcaatctcctgatttgggggtattgccaaatgagtagtcgtaaaaccaagaaaaacttttaaatgataatttacgataagcatgtcctgcttggaaagca

SEQ ID NO: 35348 - DNA, 122 bp, Homo sapiens
tggggtaggtgggggtggtgggtcacttgctaccaaggcgtccaccgcagggcccctgatcgccgcctccccgcctccatccgccgggacctggccccttggcctcgtgtctgtgcagcctc

SEQ ID NO: 35349 - DNA, 122 bp, Homo sapiens
cttgggctgagtgacacagtggctgggccagggatggtttgacaccgcaggacatgtcagcgtatttttccaacatactctccgcctgactcattcagtgggagacactcacatgagctccc

SEQ ID NO: 35350 - DNA, 122 bp, Homo sapiens
gaagactgcagggcactgcaagaactcgatgggtacctgaggccagaaactggcagagctcgcggaggaagccaccagcccctggcccggcctccctcttggctgttcctcccccgggccct

SEQ ID NO: 35351 - DNA, 122 bp, Homo sapiens
gcggccgccttggagagctctggccgcgggcgcctcacccgtcgggggccgcccgcgaagcgcagattacagggcgccccacaatcagcaaggggaggctgctccgaagctgagagcacagc

SEQ ID NO: 35352 - DNA, 122 bp, Homo sapiens
tccaagacatgctcatcttcctcatcgcacttactctacagtccagtccttccacccttccgttaacaggactgaaaactctatcctaagccagcacatagcttcccaggtctctaaggcac

SEQ ID NO: 35353 - DNA, 122 bp, Homo sapiens
ttcccaaaagatgacagatggattttcacaatttggaaataaaaacatgagtgaagggttcggaaggcaagtctctggtccattacacacttccagaaaaacttagtacccagagactcaca

SEQ ID NO: 35354 - DNA, 122 bp, Homo sapiens
cttcgtaatggcgccttcccggggtagagccagcgcttgggcaaggaatgtttgtgtgctcgggaagtgtggaagttgcccacttcgcgcatttccaggccacttgtgcctgctcggcctgc

SEQ ID NO: 35355 - DNA, 122 bp, Homo sapiens
cacctgctgggctcggggtggcagagacagctgtgcggtcccagctgttcctgagcgcaccgctgagggacgcactcccttctacaacggctgcaccccaagtcctcctcccattcctatat

SEQ ID NO: 35356 - DNA, 122 bp, Homo sapiens
aacatgctggcagcccttgctcgctctaagcacctcctcggccttggtgcccactctggccgccgttgagcccttcagcccgctgctacactgtgggagcccctctctgggccggcacaggc

SEQ ID NO: 35357 - DNA, 122 bp, Homo sapiens
gatgtcacgcgtgtgtgctgatgtcacgcgtgtggatgtcacgtgtgtgtgctgatgtcacgcgtgtggatgtcgcgtgtgtgctgatgccatacgtgtggatgtcacacgtgtgtgctgat

SEQ ID NO: 35358 - DNA, 122 bp, Homo sapiens
ctgcggcggcgcgcgctgctgtccgtggtgttggaaccacgctctccgcccgctcccgggcgtctggtgcggctgaagaatcaattattcagatctctgctaccgcttcctcctcccccagt

SEQ ID NO: 35359 - DNA, 122 bp, Homo sapiens
gtcctcagctgaccatccactcacatcaaaactatgttgttgcctgataactctctaggtcgctctctagctgaactggttcataccagcccaagaacacaggacagttttggctgctttct

SEQ ID NO: 35360 - DNA, 122 bp, Homo sapiens
atacactagggaaaagacattctcttcaataaatggcactgggaaaactggatatctatccgcagaacaatgaaactagactcctaactcttgtcacatataaaaatcaaacgaaaatgggt

SEQ ID NO: 35361 - DNA, 122 bp, Homo sapiens
agctgtctctcgcccaggtgcaggtcttggtaaatcactgcagaactgttctggggttcccgctggcggctgggcgcgggtgcagcctaggaggagaggcgcgtgaccgtgcgccagctccc

SEQ ID NO: 35362 - DNA, 122 bp, Homo sapiens
agtttataaattgatgtggggagcaaattgcttctttactaacctgtaattggaatttagcgtctcccacaattctgaatataggcaatgaactccaatagaattagcagtacctgtgactt

SEQ ID NO: 35363 - DNA, 122 bp, Homo sapiens
gaggtccttgtggagaagaagtgggtacctgtcttgggcggggcccctagcccagccggacgccaggcctgccttgttgggccccaccgctgggccccaggggacccagtgcccacctcatg

SEQ ID NO: 35364 - DNA, 122 bp, Homo sapiens
gtgcggttcgacagcgacgacgcgagtccgagagaggagccgcgggcgccgtggatggagcgggaggggccagagtattgggaccggaacacacagatctgcaaggcccaggcacagactga

SEQ ID NO: 35365 - DNA, 122 bp, Homo sapiens
acaggcgtgagccaccgcgcctgggaagtgcgggaggcctttttaaaaaatgtaaactcgcgtgctcaagaagccctatcggagggaaacacccagaagaggccaccctccaaacacagggt

SEQ ID NO: 35366 - DNA, 122 bp, Homo sapiens
tcagaaagctacatttgattcctagatttcaggttcaaatttggagccaagaaaccaactcgtttaatccagtcaacattaattaagcgcagtccgttaagctctggcagaagagagagatg

SEQ ID NO: 35367 - DNA, 122 bp, Homo sapiens
ttttgctccctatctggagtggttataggtcgactttctttggtttgagtttttgtgttacgttgttgtttcacaaattgaaaaccattacctgtacttacagtgatgcataaagaaatgat

SEQ ID NO: 35368 - DNA, 122 bp, Homo sapiens
caaggcccgcgttcgcaagggcttctcgctgcgcaacatgagcctgtgcgtggtggacggcgtgcgcgacatgtggcaccggcgcgcctcgcccgagcccgacgcggcagctgccccgcgca

SEQ ID NO: 35369 - DNA, 122 bp, Homo sapiens
caggatgcaggctgagataatgtcgaccttgtacttagagattgtcctagataagttgaacggtcagatttgcaggtcgggtttttcaatcactggggctgtatctgtaaagggaaagagac

SEQ ID NO: 35370 - DNA, 122 bp, Homo sapiens
ggccgagcggccccgatcttcagcgccctccccgcgccggaaggggcgcgcgacctcccgcgtcacctccgcagccgcgtcacctcctcgcgggctctgcctgggccctccaatcctaggcc

SEQ ID NO: 35371 - DNA, 122 bp, Homo sapiens
gcataaatacatactaatgttgatctaaggactgtcgtttgtgcctgttcttcagggccgcgcgcccatgcccgcagtccctggtcgggcaggtgcggcccaggtgcggccccgcggtcggc

SEQ ID NO: 35372 - DNA, 122 bp, Homo sapiens
agtgatttgtgtgaaagtgactcaaacaaaaatggaaatgaacattaaaggggtgggggccgctctccccggcccctcgctccgctgccctgtgtgcccccgccatgaggtgacagcctgtg

SEQ ID NO: 35373 - DNA, 122 bp, Homo sapiens
aaagtgggattcctcccgccggcctcctaggacctggggatgacgaaatgagttcacgcacgtaaagcgctcggcccaggccctggcgtacagcagatgcttaataaatgccgggtacaaga

SEQ ID NO: 35374 - DNA, 122 bp, Homo sapiens
cctaagaccatcattgttgattctggcaaggcttcaaatagcagcaaccagcaaatatttcgcccttcccgtggtttctggcagtgttgcagctgttgcctcatctagtgaacatgccgggc

SEQ ID NO: 35375 - DNA, 122 bp, Homo sapiens
ccattacctatactgtagataatacactacaaaaacaatttatgaccactaataatcttacgaaagctttttccctctaggaaacttataaataacatgttgtatgaaatatcatgagttta

SEQ ID NO: 35376 - DNA, 122 bp, Homo sapiens
gcttaggactgagataataaatatatccccacttccaaaacgccccagaccctgtaactccggggcaaccagaggcccgaggctgaatgtcctgcatctggtcttaagaaagagaaaagcaa

SEQ ID NO: 35377 - DNA, 122 bp, Homo sapiens
attagacgacattcgtaaacatacttgtgttttctgggttggtccagttgtcttgaccttcgttttgtaagtatcttgaagattcctttctcatccaaatctgttagaatcaccgcagtttc

SEQ ID NO: 35378 - DNA, 122 bp, Homo sapiens
cgagggggtccttgaaaggcaaggagcgccgccagctgcaggccagggaggtatgcggggcgggagtcagcagggggaagtcagctcccgcgaggcagccggtctcggggctccgcgggagg

SEQ ID NO: 35379 - DNA, 122 bp, Homo sapiens
tcagaagaccccagacagcctttccagttctcccgagtctttggtgcgcacagctgccggcgggaagtctcactggcggcagagccactaagtccctcctgacgggatccacaggaatcttc

SEQ ID NO: 35380 - DNA, 122 bp, Homo sapiens
atggggcatatttccaggggtccgggcaggttgtgtggcttggaggcctccgagggccgtcgacgtcagccatggtccgggcagagccccgcaaggtgccacagtatcggggccagcgcccc

SEQ ID NO: 35381 - DNA, 122 bp, Homo sapiens
gttgtcacgcgccgtggcgggtactggactggcggagcccggggagtgaagtagtgaaatcggacctacgcctctccaacgctcgcgtgatcacgtggttggcacccaggcggaagtctgcg

SEQ ID NO: 35382 - DNA, 122 bp, Homo sapiens
tgcggtccagaatctcgaagtagagcagcagcttctctaggctggtgcagcagggcaccacgccgtaggagggagtgaacagcgtctgcttgagctcccgcacgcggctcagggtggccttg

SEQ ID NO: 35383 - DNA, 122 bp, Homo sapiens
gcggcccctgtttccttctgacaaatttacacctctattctcaagccctgccctggtaaacgccagacctcaaagcagggaaggatttctggggcctgaagcatacacagttgtgtggggag

SEQ ID NO: 35384 - DNA, 122 bp, Homo sapiens
gataattttttttaaaaatctcccaaggaaagttgaaggaagagtacaaaattttcatctcgcgagacttgtgagcggccatcttggtcctgccctgacagattctcctatcggggtcacag

SEQ ID NO: 35385 - DNA, 122 bp, Homo sapiens
gtacagagcaaagaagtttcttggagagaattcatgaaacagcactacttaagtccaagtcgagaattcagagagtacaaatgtgatgtcctcatgagagaaaatgaagctctgaaagacaa

SEQ ID NO: 35386 - DNA, 122 bp, Homo sapiens
gtgaaggactgggccaggactcagagcgatgcatgccagaaagttctcagtacggaagcccgcctttcatccagtactcacttgaaccctgcagcagggaaactttgtcgggatttttgctt

SEQ ID NO: 35387 - DNA, 122 bp, Homo sapiens
ggcgcgcgcgtacgctcgggggtagagcccggggggcggggcccgcgttgaccacgcccccggccctgcctgcccctccgttgtcgagcgttttccgctgacggagccctcacctcagacac

SEQ ID NO: 35388 - DNA, 122 bp, Homo sapiens
ggaagcacaggaatgaatgactgagacaaggctttttaaaaagaggaggaggagtagggacgttcaaacatgatcctctaaggtggatataagaaaaaggaaacagcagtttctttttctag

SEQ ID NO: 35389 - DNA, 122 bp, Homo sapiens
ttaatcaaattagaatgcttctgtttttcagggcctgcttacatactttgtagaaactcgcgtggcttgtagctcatgctgaaaaactcaggttctggtacctaagccatcccagagatgaa

SEQ ID NO: 35390 - DNA, 122 bp, Homo sapiens
gactggctcagttctcaggcatgaagagctgcactccggcagaaagggtcgcacagactccgaagaagtttagcagctcagaaagcatcacgctgtgtactaaggcagtcttcagtgaggac

SEQ ID NO: 35391 - DNA, 122 bp, Homo sapiens
gacatagtagatatcaaagtcagggatgatggtgaaggtgtccgaagggatcttaatcatcgaggccacgaactcatcatggaagacgtacgcgaacatgccatccgcctcagagttcttgg

SEQ ID NO: 35392 - DNA, 122 bp, Homo sapiens
tgtgtcaccatgtgcctggctttttctcagccacatgcatttgaggtctgcctgggttgtcgtgtgactcgagagtccattcctctttgtcgctgagaatatttcgttgtgtggatctacca

SEQ ID NO: 35393 - DNA, 122 bp, Homo sapiens
ctccaccgccgccttggggcgcgcagatcgctggctgcagttggcgggcgcatgtgggggcgcacggcgcggcggcgctgcccgcgggaactgcggcgcggccgggaggcgctgttggtgct

SEQ ID NO: 35394 - DNA, 122 bp, Homo sapiens
gtcattgggggcctcctgggagccacattcaactgtctgaacaagaggcttgcaaagtaccgtatgcgaaacgtgcacccgaaacctaagctcgtcaggtatctgcacagtcgcctcccccc

SEQ ID NO: 35395 - DNA, 122 bp, Homo sapiens
tgctgctcacgcacctctcttgcggcctgttttcggcagtgacagctcagatgtccaagtcgttgccacttggtccccgcgtctcttcagaccagtcccgccggcggccgcgcagcagcgac

SEQ ID NO: 35396 - DNA, 122 bp, Homo sapiens
aaaagttcctgaaggcaaaattctcatacacttcctaaaatatttatgcgaagagtaaaacgatcagcaaacacattatttggaagttccagtagttaatgcctgtcagttttttgcaggtg

SEQ ID NO: 35397 - DNA, 122 bp, Homo sapiens
catcaccatcaccaaccgtcgccatcaggatccttgtgaacctgcccaaggccccgactccggggagactcttgggagcccagtcttcgtcggctaaagtacaaagggttggcaacttccac

SEQ ID NO: 35398 - DNA, 122 bp, Homo sapiens
ccgctctcagcttctgttcctcaaccacggccgccgcgtggatgccgctgcattcggagtcgttttgccacttggtcccagcgccaggcttctcggtcgggagttgacctcagcctttctgt

SEQ ID NO: 35399 - DNA, 122 bp, Homo sapiens
ctggcggagcagcccccaccgcggccggcgcgccccctcgccacccctgcgcgccagcgccggcccgcccctcccgctggcctctggcggcttaaccctcgcctgcccgaccccgcggggcc

SEQ ID NO: 35400 - DNA, 122 bp, Homo sapiens
ggccgtgtcttacaggtggttgggcattgcctccttcggggttccagagaagctgggctgcgccaatttgccgctgaacagccgccagaaggagctgtgcaagaggaaaccgtacctgctgc

SEQ ID NO: 35401 - DNA, 122 bp, Homo sapiens
acttgggctagagcagaaggcataggccagggtggttattgctatatgtgttacagacctcggttctcattaaagtatttattggcagaatcactttggctttgtcttcatttactattttc

SEQ ID NO: 35402 - DNA, 122 bp, Homo sapiens
tcaccctggcatgatctatagcaagtatggttcacattagacattccctgaagaatgtaccgatcctttatttagtcctctgatttaagaatatagtttggcctctacatagcaaaacttga

SEQ ID NO: 35403 - DNA, 122 bp, Homo sapiens
acccactgcatttatggagaaactgaaaaatgaaaaagtagctcctagaactcgtgccagcgagaacttggtaaatgttagttgattaaatattagtcaaggatgacaaggtggaccccagg

SEQ ID NO: 35404 - DNA, 122 bp, Homo sapiens
gtctcaggctcccaacggccgtggcgtgcgtcacccttgcgtcgcccttgcgtcgctgcacgtggggcgtgggccctcccagttctaaaaagcaaaagcaagtgaaagaaaagcttctgcta

SEQ ID NO: 35405 - DNA, 122 bp, Homo sapiens
tctctgggactcagtttccccaacggtgaatgaaggggtgaatctggaaggctgacattccgtactcagcaatgctgtcaccccctcagaaatccccagcctagcctgggggtggggtgggg

SEQ ID NO: 35406 - DNA, 122 bp, Homo sapiens
cggggcttggacaaaggcccaaagttccagggcaggcctgcctcacccacaggaagcacccgccccaccaggggctcagccgcctcccgctgcctcagttcctcgggggacccctgctcctc

SEQ ID NO: 35407 - DNA, 122 bp, Homo sapiens
tctcagctcaggggttacttcctcagggaagccaactgtgattccctcctggcttgccagcgttcccccagtctctgattctgcagcaccccaacattgcctttgtaacctgcattgtcctg

SEQ ID NO: 35408 - DNA, 122 bp, Homo sapiens
cgccggggagcgagcccggtggatccagcgcgctggagggagagggcagaggaaaggagccgaggcaaggaaaggccctttcagctaaccttttgggatctttcatacaagctgggctgtgc

SEQ ID NO: 35409 - DNA, 122 bp, Homo sapiens
gagtctagtggtgcagtcagcaccagtaaatttccattcagtaattcagtgactgttaatcgacacctaatatgtatccatcactgtctgaggccctgtgctagggacagaaacaaacaccg

SEQ ID NO: 35410 - DNA, 122 bp, Homo sapiens
tttctactgggtccaaacactctatttgaccctgccatgaatattttttatatcatcagccgactatagaaacttgttcttggttttcagtgttaagaattaacctatagacattttatgga

SEQ ID NO: 35411 - DNA, 122 bp, Homo sapiens
gagctctagccatgaggaactatcaactaattcgcttcctgaatgtgttgtgcccttctgcgtgggtgttcaattccacttgctttttccgctttttgcaatgctatttcttctttgctttt

SEQ ID NO: 35412 - DNA, 122 bp, Homo sapiens
accttttcctaactcggcccaacttgcctggattgattccatcctgagtgaaatagactccgatcccggaccccgtcgccccgaggaaccaagcccttctcgcaggcaacgctgaccctcgc

SEQ ID NO: 35413 - DNA, 122 bp, Homo sapiens
tgggaaaacgcagtctgtcaacagttgcctcaaaaactcagaagctcagagagttggattcggtcaccagagaggcccctcaaagaggccccaaccattcagatcctctgctctgtccccca

SEQ ID NO: 35414 - DNA, 122 bp, Homo sapiens
aggcttctgcccgggcacccgctctaagatattaacctgttgatgtcacaccctggcccccggttcaaggctgagccctcggcaagctgccccccgacaggtccccttcctctggcggtgat

SEQ ID NO: 35415 - DNA, 122 bp, Homo sapiens
aaaaagggggtcattataatggagtctttgtcttttgtgatctttaagcggaaaatagaccgtgtctgtcctggatatttaaaatgtggggaggtaagtggcacaactgatctcaagttcct

SEQ ID NO: 35416 - DNA, 122 bp, Homo sapiens
gctggcatgaagcttcatgtcatggtgacaagtagctcttagctccttcatgccaccattcgtcttctttgtcctcatctctaaacctgatttcttcttcttcttccttttttttttttttt

SEQ ID NO: 35417 - DNA, 122 bp, Homo sapiens
ccctttctcttcccctcccgtcctcttccctcctcctctgccggggccacactcacattgcgcctggacagcctttggagtgagggcttctccagagatatttcccccacactctgggtcca

SEQ ID NO: 35418 - DNA, 122 bp, Homo sapiens
caccaacccctatactgttctacttttttccctagccattatcactttgagcaaagtatacgtatttttttttactgtctttctccaatggaatgtaagctctacaaaggcagggacttttg

SEQ ID NO: 35419 - DNA, 122 bp, Homo sapiens
gggcctcgacgctcctccatcttttattggagctcaccgctgccagtcgcgctgcctgcccgtcccacccttttcgtgcaggcattcagctaaatgacgggcggagcccggcggcggcttcc

SEQ ID NO: 35420 - DNA, 122 bp, Homo sapiens
cgggctgagccgcagcgccgagacgcgggctgtttgatctgggctggtggccctgggcgtcggtcctgttccccgatggtaacccgaagtttgtttttttttgttttgtctccccgttttag

SEQ ID NO: 35421 - DNA, 122 bp, Homo sapiens
agcagaggagcaggggccagcactgtcctcagatcccggccttcctgtctccatgcccagcggtgtcctcagatcccggccttcctgtctccgtgcccagcactgtcctcagatcccggccc

SEQ ID NO: 35422 - DNA, 122 bp, Homo sapiens
gctggtagtggtcccatggtatgaggggtggaccagtagcttcctcgcaaccaccaaggccggagtgtcagccctccgactttaacatggtagagcctgggatccacagacttgggagggga

SEQ ID NO: 35423 - DNA, 122 bp, Homo sapiens
gttcacacccagcacttcagagtttcagcaagtaaggcaactgcaagaccctcattctgccgggaagcttctgattagggccctaaaccaccatccttttcacatctgcaaggacactagag

SEQ ID NO: 35424 - DNA, 122 bp, Homo sapiens
tgtgcgggtctccaaaggcggcagtaggtgcgggggctactcggctaccgttgctgcgcccgtgcaccgcgcattcaacggatcctggcacgtggcgctctggcccgcgagaagctagcgct

SEQ ID NO: 35425 - DNA, 122 bp, Homo sapiens
ggttaggggtgcttaggattttatttttagtttacagtctctaaatcaggagacacagaccggctggcctatttgtagatatgccaattagcatccagtgaaggctggccccgggtttatgt

SEQ ID NO: 35426 - DNA, 122 bp, Homo sapiens
accacagaggctgacctagcaagactgaatagcctcgtccaaaaagagagtcctcttcgccgacaatgccagcctcttgaaagaagattggttgtagctgtaagtgtctgatgttcaactgg

SEQ ID NO: 35427 - DNA, 122 bp, Homo sapiens
cgcccaggagctgggccgcatccgccgctccacgtcgcgggaggagctggtgcgctcgcacgagtccctgcgcgccacgctgcagcgtgccccatcccctcgagagcccggcgagcccccgc

SEQ ID NO: 35428 - DNA, 122 bp, Homo sapiens
atgtgagtggattcaaaaataatgatgctaagtgaaagaagtcagacaaagagtacctaccgtggaactatatttatgtgcaattctagaaaacgcaaacaaatctctagtgatagcagatc

SEQ ID NO: 35429 - DNA, 122 bp, Homo sapiens
ccgccactccatgaccaacctccctgcataccccgccccccagcaccccccccacaggaccgcttctgtgtttgggacccaccaggcctttgcaccatacaacaaaccctcactctccgggg

SEQ ID NO: 35430 - DNA, 122 bp, Homo sapiens
cacagaggcaaaagggatccacagcctgggaaatcagggaaggcttcctggaggagatgccgctggagctgggtcttgaaggacgagtaggagttcgccaggtgaagaagggggggaagggc

SEQ ID NO: 35431 - DNA, 122 bp, Homo sapiens
ctaatgtgcttacctatgtgtttcacaccatccatgattgaccgaaagaacttgcggacccggtcagccacctctttggtcttccgggcaatagctttaatcttgttcagggcacctgatgg

SEQ ID NO: 35432 - DNA, 122 bp, Homo sapiens
cgttaaaatacacacagacccctccttgcttcgctctggtgctgtgtgccctgtggggaccggcttccctctcgtctcccctctcgtctcccctcttttctgatctcctccttgggctttca

SEQ ID NO: 35433 - DNA, 122 bp, Homo sapiens
aacatctgaaaagaggacaaataattttgtgacctaattgcattaatactttcttctgcgcgttctctagactgtcagaacccaggcacagatctaaggctttatttattcacatatttgct

SEQ ID NO: 35434 - DNA, 122 bp, Homo sapiens
cgtcacgggccacatgccgaggcgtgggcacagcaacgtggcactcagaggtcatccccacgctcacacacagagctaggcactccctgtgcccaggctgggctccagcctcgcagctgccc

SEQ ID NO: 35435 - DNA, 122 bp, Homo sapiens
acgccctccgtagttttgcaacttgtggaagcactctggagagaggccgagaggattcctcgacaggaaatttgggaattctctgggtgatgcatcagtgattgcaattttgtttttacccg

SEQ ID NO: 35436 - DNA, 122 bp, Homo sapiens
agagcccccgccgagtgacatgggcacagtggggggccaggctagccacccccagacactcggcgctcgagctttggggtcccctcggaaacgtccagagcagcaggatgtcagctcaccag

SEQ ID NO: 35437 - DNA, 122 bp, Homo sapiens
agccaccccctaggcaagctccagttgaggctgcctcccatggttaagagaacatgcaaacggtgttcctgactgaggctggtgtccgggcagtgctaagtaactggtgcctttgaccacat

SEQ ID NO: 35438 - DNA, 122 bp, Homo sapiens
gcttgctgagtcactcagttacctgaatgcttttttcacaaagggatgactgtgctgctccgtcttccttcttttttgtttgcaaggccacagggaaatctggatcctctggtgaaaaagca

SEQ ID NO: 35439 - DNA, 122 bp, Homo sapiens
ggataggggctttccctagtagtctggtacctggctctggggtgatgagggccggagaatcgtggccctgagtgtgagagcccagtagaggaggtggcatggggtgtgagctcttgattggt

SEQ ID NO: 35440 - DNA, 122 bp, Homo sapiens
gtagagacacaaggcaccccagggctggggacctcaaggtcctataaagaaaccacaggccgggcgcggtggctcacgcctgtaatcccagcactttgggaggccgaggcgggcggatcacg

SEQ ID NO: 35441 - DNA, 122 bp, Homo sapiens
gctcaggaattctgggcacagccctggcaggagaagtggcaagcttgaatgcctgggtctcgttgtctccccacagaacgtgcagagattgctcgagacggagatgtgggctgaactctgcc

SEQ ID NO: 35442 - DNA, 122 bp, Homo sapiens
cacgagggggtgggaggatgaggaataaaaccatcgacgtttgccaaagaacagatgcagcgttttctgccttctgatctgtacgcctctggaaattgggggtctgtgggggtccctccgtg

SEQ ID NO: 35443 - DNA, 122 bp, Homo sapiens
gggccggacgaaggatgctttcttcctagaggctccgagctgagctgcgaactcgccccccgcccttgggacaagaagacccagtcacatcactgcacccgtcctgtgtcctcaccattgct

SEQ ID NO: 35444 - DNA, 122 bp, Homo sapiens
gtcttgctgagctgcttttattctaacgtttatctcacctactacatcattatttcacaacgtacctctcttacagcactgatcacaattcaattttacattcttttatgagataatatcta

SEQ ID NO: 35445 - DNA, 122 bp, Homo sapiens
catttgacatgaatgtaagatgcttcccaaaggcaggaatgtaaaaatgtgaaaaaatggcgtatgatatttcagctggggctgaagaatggtccagcaggctggcaaggacagtgagcatg

SEQ ID NO: 35446 - DNA, 122 bp, Homo sapiens
cctaacaaaatggcagcccttgggaagtctccaggcagtgccattgaccaacaaggttatcgccaacccagttttcctgtagagcatgctgaccttgcctttccaaactcctggaaagcaag

SEQ ID NO: 35447 - DNA, 122 bp, Homo sapiens
ggctttgagtatatcaacccattattgctgtccaccgaggagtcggtgtgaggccgcgtgcgtctctgtcgtggacacgcgtgattgaccctttaactgtatccttaaccaccgcatatgca

SEQ ID NO: 35448 - DNA, 122 bp, Homo sapiens
tctcatggtaacctgggtgttgatctcgtgctttagttagtagcttctccaaggagaaggcgtgttgaggtttagttggaaaaatgggcttctttgatgggtctcacagttttggtgagccg

SEQ ID NO: 35449 - DNA, 122 bp, Homo sapiens
tgccttgggggtgtttgagcctctgccgcagggacactgataaggacatgagttgtggtacgccccgttttgtgtagcagctgtcagtttgtttctggaatgagactgagcttctagaagtc

SEQ ID NO: 35450 - DNA, 122 bp, Homo sapiens
cgccagggtcctccgggtgtcctgggcgtgtcgccgtgggcgggcgggggccgtgtccgccgctgtgtccctgtgtctgggtgtgagagccccgagcccgcgtctcccctctgtgtgggtct

SEQ ID NO: 35451 - DNA, 122 bp, Homo sapiens
tcatcatgtcgtctgagacgcagccacagggagagactgatatcctagtgccagggatgccggcttccaggtctgcatctgccacctccatgaggcatcggccccagcagtcacgtctttct

SEQ ID NO: 35452 - DNA, 122 bp, Homo sapiens
ctcgagctcctgacctcgtcatccacctgccttggtctcccaaagtgctgggattacaggcgtgagccaccatgctttcttttgtacattttagggggacatgagacatcaatcaatatgtg

SEQ ID NO: 35453 - DNA, 122 bp, Homo sapiens
tgtgttgcccagggtggagtgcagtggcgtgaagtcggctcactgcaactcccctccttccgggttcaagcgatcctgtcacctcagcctcccaggtagctgggactacaggtgcccaccac

SEQ ID NO: 35454 - DNA, 122 bp, Homo sapiens
ttagtttcctcgtctttaaggtgagaatgaatagtattgtgtccagaagctgcagaccttcgcagtgagtgtcagagctcttaaaggtgacatgtccagagttgttcattcctcccagtggc

SEQ ID NO: 35455 - DNA, 122 bp, Homo sapiens
tctgcaaagggagcggggagctgggggagccttgcacaccagtcttcctggagctgcagacgaggagccccgcgccttcgggagcctctcggcggcttcccctctaacgcgcgactgtgcag

SEQ ID NO: 35456 - DNA, 122 bp, Homo sapiens
aaaaaagggtgatttgtacaattttttatggtgctgtgtcctaaaggggatcctgaggggcgttgcctcgggtagttaaagtcttatgtgtgcataagttgcttattctttgtctacttcct

SEQ ID NO: 35457 - DNA, 122 bp, Homo sapiens
gccccactctgcttctccttctccaccgagtagcgggtttccatctcggggtccatgaaccgcatggacaagaggaaggtgtttctcttctttactctgcagtgggaacaagccccatgaat

SEQ ID NO: 35458 - DNA, 122 bp, Homo sapiens
gccgctcggcagcaccttccttctttgccaggcagacgcccgttgtagccgttggggaaccgttgagaatccggtaaccgatgcggacggtaaagccgtttgggttagagcggcgcgggtgt

SEQ ID NO: 35459 - DNA, 122 bp, Homo sapiens
aatggatctagaactcaagcatccggactccctgccttgggtgcccctgcacctgcacatcggctcccagagaggccttgtgccttgtgcccacggagtccttgtgcctgggacgtgccctc

SEQ ID NO: 35460 - DNA, 122 bp, Homo sapiens
gagagcagagtgaggctccctcagaggagcactgtggccgggccccactctgcaagctgacggcaagcacctctgggtctcttggcttacccgaagaactttccccaccccctcccttgggt

SEQ ID NO: 35461 - DNA, 122 bp, Homo sapiens
tactgctcaacttttgattgggacttccgcttccggcggcaaaccatacttccggtttgtcgttgctataggaaccgctacggcgtttgaaagtgtccgggttgcttaggatccctacaggt

SEQ ID NO: 35462 - DNA, 122 bp, Homo sapiens
gcggccgccgtgactctccagcacagcctcaggccgttggcgcggggcggaaacccccatcggggctcatagcacaactgggggtccccaaagccggctccccctgcctcctccgcgcggga

SEQ ID NO: 35463 - DNA, 122 bp, Homo sapiens
atgggacagccaatgtgaacaaggagatagatggtgggtgcgtataagatagatgctatgcgcttatgaaaaagagcagtatgtctgcatgtgaacatccacaaagtagagcgagcaagcgt

SEQ ID NO: 35464 - DNA, 122 bp, Homo sapiens
cagtgtttatgcagagaaaagaatgcagggtcctcttccagctgttccatgttggagctgcgagcctgcaaagctcagcagaggtctgggctgccatttgatgacaaggtccagtccagggc

SEQ ID NO: 35465 - DNA, 122 bp, Homo sapiens
ctgtaagtaactccactgcctgacagacaagagccttcctatgaagctggagccacagcacgtgacttgctgtcacaggaaaggccacacctggcactgcagccagggacaggctgcattct

SEQ ID NO: 35466 - DNA, 122 bp, Homo sapiens
ccactgacttcctgggtctatcaccgagatgccgagcctcctgcagtcctagagagcatacggcgcagggccagggccacttccggcccagaggactccctgtcaatttgctgcaatggctc

SEQ ID NO: 35467 - DNA, 122 bp, Homo sapiens
accaacgagggtgttctgtccattgtgaaggtgagcggcccccggctggcacacagatgccggcagacgcagatgccgacacacacagatgcccacacacagatgccggcacacacagatgc

SEQ ID NO: 35468 - DNA, 122 bp, Homo sapiens
agagccttgctgaggcagctttcccatgcagaagggctgataaggcaagaactccggtttcgtatgctcttggttgacaggcttgctccctggaagaggaaagaagacagaactgagttaaa

SEQ ID NO: 35469 - DNA, 122 bp, Homo sapiens
cagccaggggccaggggtggcctggcttgttgggcctgggaggctcctacaagctgtgcacggctgtgtcctggagggcccaggggggctcctgatggaggcacagactggggcctggaggg

SEQ ID NO: 35470 - DNA, 122 bp, Homo sapiens
agtgccagacagtgggcgcaggtcagtgggtgcatgcaccatgggtgagccgaagcagggcgaggcattgcctcactcgggaagcgcaaggggtcagggagttccctttcctagtcaaagaa

SEQ ID NO: 35471 - DNA, 122 bp, Homo sapiens
gtcctccttcagactagctcagaccaccccaacctgcgagggccctggagacccctgtggcgcaacagatcccttactgggtcccttccaagtggcgtcacatagcaagcgtccagaaggag

SEQ ID NO: 35472 - DNA, 122 bp, Homo sapiens
gtcttcattactaagggatcaaagttactagaaaatagacctggaaatctcaaaagagaacgtacgtttagaaatagaaaggtacgtaacatgaaggaaaataagacaatggctaacaggtt

SEQ ID NO: 35473 - DNA, 122 bp, Homo sapiens
ggactctaagagaaggtctttggtcgattacattgtccagagagggagtggccgcttgggcggattttgggagggatcagccttccaattggttgttattagaaagggggttggtacggcct

SEQ ID NO: 35474 - DNA, 122 bp, Homo sapiens
ctgccgggcttcggagtgactcggcagagacagaggcacaggggctgccctgctgctcaccggtccacccatctgcctggtcttctggagctgaggactcgggaaaccatgcaattgaggca

SEQ ID NO: 35475 - DNA, 122 bp, Homo sapiens
agccgggaagctgccgtggaagccttggaattgctgggagctacgtatgtggataagaaacgagatctgcttggggcccttaaacactggaggcgggccatggagctgcgtcaccagggggg

SEQ ID NO: 35476 - DNA, 122 bp, Homo sapiens
ctcttcttttcctgttctccttctctttcttctgctctttcggaattacgtggaggggggcggagggcggggggcgagttgtctgagggaggaagagagcgcgagaatgaggggaggggggc

SEQ ID NO: 35477 - DNA, 122 bp, Homo sapiens
ttgggaaaagaagaaccaaagtggactgtacttgcatttcagtgaatgatttgagttgtgcgactaaaggctttttggaagagggttgtccagttaggaaaggtggatgggagttggggagg

SEQ ID NO: 35478 - DNA, 122 bp, Homo sapiens
tggagatgtggggtccgcggggtccttgctttgtgtggtgtggggggtgcgcgaggtcaccggatggacgtctggggagctgcagggtgggggcgccctgcgccgcggctgagggtcttctg

SEQ ID NO: 35479 - DNA, 122 bp, Homo sapiens
gttggccgcccggaccgatatccccagcggggaggaagaggagcccttggagtccgtggccgggttcgagtcgcacaccaccagacacttgccctccagcacgatgggctccgtgtcgttct

SEQ ID NO: 35480 - DNA, 122 bp, Homo sapiens
ccagcacctgccctgggacccccagcagcaccaggaccgccgccgccctgagcttttccacgcctttgcccgggactcagctcctccgcccagcatgtaagaccttttgtgatccgacctcc

SEQ ID NO: 35481 - DNA, 122 bp, Homo sapiens
ggaagtggaggtgcccaagccgttctgctggtatagagccgagctggctggagaaggttccgtctcgattcaggctgtggtctggattcctgccagccacagagacctggcctgagcttggc

SEQ ID NO: 35482 - DNA, 122 bp, Homo sapiens
cacgctcaccgtggctgtggccgacagcatccccgaagtcctggcggacctcggcagcctcgagtctctggctaactctgaaacctcagacctctcgctgtacttggtggtggcggtggccg

SEQ ID NO: 35483 - DNA, 122 bp, Homo sapiens
cgtgggctcctcaacatggagctacaggaggccttgagaagcagcagcaggaacgaggctcgccagccaaccacaacaccaaaagcaaagcccgaaagaagctccccctgaccatggctgac

SEQ ID NO: 35484 - DNA, 122 bp, Homo sapiens
cactcctgtggagaattagagaagagaaggaaatggactgcccgggaaaagattctaacacgaaaataacggtagggggcattccaggccctattcagagtaagtttagtgaagagtgagag

SEQ ID NO: 35485 - DNA, 122 bp, Homo sapiens
accctccaccaggcttcatggaggggagtctgtgttaatagcaggcacagtgaaggcgcacggggcctttctttgtacctggttaattcagcagtgtaggattatgcttgctttaaagcaaa

SEQ ID NO: 35486 - DNA, 122 bp, Homo sapiens
tgctgtggagaaggctgggcagctttcactgccctcatttgctgatgacaagctgctcaacgatgttaactcacttgcctaaggggtgaagctgagtctggaacccaatactctttcatcta

SEQ ID NO: 35487 - DNA, 122 bp, Homo sapiens
gcgagggggacagctctgtcactcgggaagagtttgccaagatgaagcaggagctggaagcgtgagtgccccctcctttccctgccatccccagagtccagatgtcttccccagctatctcc

SEQ ID NO: 35488 - DNA, 122 bp, Homo sapiens
ctgcctctctatggtaacgccccgcgcaggcgctggcctggccgtgttaggcttcgctggcgtaaagtccccgggagctttgcccctcacggagaacgttagttgaccctgatggggacccg

SEQ ID NO: 35489 - DNA, 122 bp, Homo sapiens
actattttcacagacctaaactaataggccagccaatctggatggggcagattcatttgacgtgggtctaccttggggttttcaaaaaggacattcctaggctttccctttgtcataaggtc

SEQ ID NO: 35490 - DNA, 122 bp, Homo sapiens
aaacaggctcacttataccgaatccaaacccaggcgagaactacggactcttgaaatggtcggtgaaaggggcgaaagcaccaggaaatcgtgcttcaacagtccatgactgaaaggagggc

SEQ ID NO: 35491 - DNA, 122 bp, Homo sapiens
gtcaaggaggaccgtgataatgtcctgggcttgctctcttctacagacaggaaaatggaacgggaaaagggtagacacaggaaggtgaaattctcatttcagtgttgagagggaaacagacc

SEQ ID NO: 35492 - DNA, 122 bp, Homo sapiens
tgaaagtcaatatgtaactttttcccatgcgaattcgacttacagaccccttagggcgcacggaccacaggttaaggcccccttgaaggggcacgagtttaggagaaactctggtgtgggtt

SEQ ID NO: 35493 - DNA, 122 bp, Homo sapiens
gtgatctctgccactccctgcagaccctcctggaggcagtcatgggcttccaggagccaccgtctcagttttccttccatgcccatccaatatactattatttaggcaattttattttttga

SEQ ID NO: 35494 - DNA, 122 bp, Homo sapiens
ggccgcggggactcccactcccggcatgctcagcgccgcccgggggcccacgggagctcgcgccccacagcccctgcgcgtccagccctctgcgagggccttggctcgcccctgcggggtcc

SEQ ID NO: 35495 - DNA, 122 bp, Homo sapiens
gtgaaggtggggcaggtgctccccaccacgggactgggggactcgctcactccatgggtgcgccccaagtgcagggccaccctggaacaagagcgtgtaaaaaaccaaggggcttgtttcct

SEQ ID NO: 35496 - DNA, 122 bp, Homo sapiens
agggaaccgatgaccctaggttggctgacatcagtcgctagacccgcagcccgcaggccccgttagtccctgaactggctttcatggcccaaggtgtctgtcagtactgctgggaaagctgc

SEQ ID NO: 35497 - DNA, 122 bp, Homo sapiens
tcctgagacagccccccttggatggactgagctgacactaggtgccctggagggctgagtcgtcctccaaaggggcctgtgccaccagctcctagggcaggaacactgggtgcctccttcct

SEQ ID NO: 35498 - DNA, 122 bp, Homo sapiens
tgagacccacttattccaaaatgcaaccagaagcttgataaaaatcaagagtgctgttgtcgaaatggggatgccaatttttttttaacttcgaaaaagacagaaaaccttgcgcgggtgat

SEQ ID NO: 35499 - DNA, 122 bp, Homo sapiens
ggcctgtggaacgcccagcccgcctgcgccccctttatacgcgcgggccccacccccgtgcgcgcgggcccggccgcgattagcataatgtagtattttcagtttcaacaacaccacggcga

SEQ ID NO: 35500 - DNA, 122 bp, Homo sapiens
gacctcaatcccgcccgcacggtcctggctgttccgcccacgggcccagtccacagggctcgaactctcaggtcctacgagcccgcccactaggccccgcccacaggagccgctccgctcgt

SEQ ID NO: 35501 - DNA, 122 bp, Homo sapiens
catcctgaaaacaaacacggtgaaagtgcccaagcccatcaaggttctggatgccccaggcggcgggagcgtgctggtgatggagcacatggacatgaggcatctgagcaggtgcatcttca

SEQ ID NO: 35502 - DNA, 122 bp, Homo sapiens
ttacaaggccagctgaactaggtaaaatcaataatgtcagcgctgggcaggccgcctgggcgcagaggcccccctctccgtttcctaccatcgattccctccctcactgtctgctttggtgc

SEQ ID NO: 35503 - DNA, 122 bp, Homo sapiens
acagtggctctcatgcactttgggaggcttaagtgggaggatcgcttgggcccaggagttcgagaacagcctgcagaacatagcgagatcgtctctacaaaaaattacaaaaagccaggcat

SEQ ID NO: 35504 - DNA, 122 bp, Homo sapiens
cctgggacaggaataccttcactttctcaaattcaacaggccgaacgctgcgagagctgtcgacaacaaacaccaggtctgtgggccgcgtccggcagagatggcctgggagtggggcagga

SEQ ID NO: 35505 - DNA, 122 bp, Homo sapiens
cacccaggcagggtcacgtggaatcatctaagtggtgagcagcatttctgccccctttatcgtgcatcctgtccgctagagcagggccccttcaccttttagccctgcatgagcccaaaccc

SEQ ID NO: 35506 - DNA, 122 bp, Homo sapiens
ccggacagagcgcaaatcccacggagggcgagccctgagcctgacagagcgcgagtcacacggagggtgagcaccacgcgtgactccaacacacccacctgtgctcaccagacgtgagccag

SEQ ID NO: 35507 - DNA, 122 bp, Homo sapiens
gcccgactcgcggggcgctgttcgttcaagactcgccccaaagagcgcaggaacgcgagccgcagcagtttcagggttcagcttaggtgacacaaacgtagctaatgggaggccgccgccga

SEQ ID NO: 35508 - DNA, 122 bp, Homo sapiens
ctgtcccaggcactgtggtgggggcatccggtgtccaggtgcagaggcaaaagctgctcccgggtttcccagaaatggttccgaggcctgggtcccagagagccagtgcaggttggggggtg

SEQ ID NO: 35509 - DNA, 122 bp, Homo sapiens
acctactacacacgtaatagaaaatattagacacaacaacagtagtatgacatctacaaccgccaggacccaagccaagaacctgttgggctgtttatgatgaacaccaccccctgaaggag

SEQ ID NO: 35510 - DNA, 122 bp, Homo sapiens
aaaataaaagggacagagactaagaaaacggacttcctgaaatcccaagttgggatttcacgtccagtgacccacaagagaagcaagaagtctgaacagggccaagaatcaagtgagtgggg

SEQ ID NO: 35511 - DNA, 122 bp, Homo sapiens
aggctgaggcaggagaatcacttgaatccgggaggcggaagtcgtagtgagcctagatcacgccactgcactccagcctgggcaacaggagcaaaactccatctcaaaacaaacaaacaaaa

SEQ ID NO: 35512 - DNA, 122 bp, Homo sapiens
ggggtggagcaggagtcccagccgccttcctctggggcccatcccaggctcccggctgggcgccagcagggctccagaaatgagggggcctcacaccgttgcctctggacgtgccgtgcccg

SEQ ID NO: 35513 - DNA, 122 bp, Homo sapiens
gaatatttgagtgtcaaccattgtctgacagcaagtgtgtgagacactctgagtgaataccgcctaagtgagctcaggcaacttcccaaacttgtgggagttaataataaaatgattggtgg

SEQ ID NO: 35514 - DNA, 122 bp, Homo sapiens
tgtcaggatgctcattcaagactgcgcccaaggtgagtcagagccacacctgggcagaggcgacacagcccgcattcctgccctgggctcctgcctgctcctgacttctgggctctctggtg

SEQ ID NO: 35515 - DNA, 122 bp, Homo sapiens
agaaagtaaacgcttctcccaccaggagagcacatgaagattgatcacagaattaggctgcgtgccccgaatgccccggcggtcctcgtggctgatgtgggagctccaccgaagccatctgg

SEQ ID NO: 35516 - DNA, 122 bp, Homo sapiens
cgttcacccggacgccggtgcccaccgtgtctctcgcgtcccgcgagctgcctgtctcgtcgtggcaggtcaccgagccgtcaagcaagaatctgtgggagcagatctgcaagggtaggaaa

SEQ ID NO: 35517 - DNA, 122 bp, Homo sapiens
gggtcggaggggagagttgcgtcagccaggccgctgtcagatgacgagcccggggcgtgacggggtggagcatccccaaaaaagtgcatgcctaggatcccgcccagtgtatccctgcgcgc

SEQ ID NO: 35518 - DNA, 122 bp, Homo sapiens
tggagacttttaaggggtgtcatcctaggagcttaggcaagagccagggtatcttctctccgctccccaagcactgttcaagtgggtttgaaaagcaggcaagtgagggaaggaagaagcta

SEQ ID NO: 35519 - DNA, 122 bp, Homo sapiens
ctgctcgcagatgtggctgcaggcagttgctctcgggtttccttccaggagctgggaagccggaggaaagctgcggttcctgttccgccgagcttctgaccttcctctgcaggacgtgtgct

SEQ ID NO: 35520 - DNA, 122 bp, Homo sapiens
ccgctcctccctcccgtggctcactttgcaaaggcacttcgagtgcgcgggtgaactccacgcttcccggggaaccccggcttcctggcaagccgagaccctcgctcgggtcctcccgtgca

SEQ ID NO: 35521 - DNA, 122 bp, Homo sapiens
ggcttttgtttgtttgtttgtttgtttttaaataatccgaaattcctagcaactatctgccgccgttcgcttctggtcctgggaagacgatgagcaaagatctactgggaccccatcctgca

SEQ ID NO: 35522 - DNA, 122 bp, Homo sapiens
tacatttaaaaataggttttcttcttcaacgtagtggaaaggcccggagcccagtcacagcggtgcctgcctagcacaagtgtaggacagctttattgatctctgggtttgtccagtcattc

SEQ ID NO: 35523 - DNA, 122 bp, Homo sapiens
gatatgaaaggaacaagttgttccaaagtatcttaactgcatcccagaacaaagctcagccgtgttcataggaatgcagacgtatccagtatccaacacggcaaaattcacaacatctgcaa

SEQ ID NO: 35524 - DNA, 122 bp, Homo sapiens
ttccggtttctcctgcgtaaccttccgcctaccttcctgagagtggttggtgacagcagccggggctagaaacctcgagcctactgtgcttgagtcctctcttgctctttacatcccaaatc

SEQ ID NO: 35525 - DNA, 122 bp, Homo sapiens
ccagcggggagtccctggcataacgcagccaggaggcagtagagtggcaggcgccccaggcggtgcaggtgcggccgcggctgagcgagcgggtgtccggtgtccgcacgggtggcagcgca

SEQ ID NO: 35526 - DNA, 122 bp, Homo sapiens
cggcctctgagtactggtggtagttctggcgcacctgcgaggtggacgcggtcgtcattgcggcgactaaggagaggcggcggcggcggcagtggctgcgccgcgctggagcagcggcggga

SEQ ID NO: 35527 - DNA, 122 bp, Homo sapiens
gagaactgcgctagctgcagtgccgcaccgcccttataggcggggggggggcggggcccgcgttccccgctcgcccactagaggctgggcggcccgcaggccacgcctcccgggagggtaag

SEQ ID NO: 35528 - DNA, 122 bp, Homo sapiens
ggccatgtgtacatcttttataattcacctgtcactgggggctctctcaatgatgactcccgccagggcattcggatcaggactaaaggacaaatatgggcagagtcagacacaatgcgtaa

SEQ ID NO: 35529 - DNA, 122 bp, Homo sapiens
gccgaatatcattttaatgatacaagtattagcagccattatttttgggtggacggattacgggtgaattattttatgttattcagaacactgggctttggaatcaatcagaacagatccca

SEQ ID NO: 35530 - DNA, 122 bp, Homo sapiens
ggcctacagcaatgaataaaaccatttgtgatgctcaaagagaagatggtcggtgtaacgcgcttgtgatgctcaaagagaagatggtcggtgtcatgcgcttctgatgctcaaagagatcg

SEQ ID NO: 35531 - DNA, 122 bp, Homo sapiens
ttttcctgaaagaaagtgtgaaataaataaaataggggtctcatcaaatccagtgggctccgcctcagagccgcctcaaaagagccgtcaccacacccccaatgggtgaggctcagccgatg

SEQ ID NO: 35532 - DNA, 122 bp, Homo sapiens
aacccagatgccctggggtgttgctaaatcaacctcagcaaccggatagtttgttggaggcgggaaggtacgccgtgggttccgccgcagccagcgctggggctaggcacacgcccgttgcc

SEQ ID NO: 35533 - DNA, 122 bp, Homo sapiens
gggtcagacgtggctcttcggctccggacacgggaatgtggtggaaatgagatcctccagcgattctaaggagtgttttgttcttctggcttaagagaagggcagaggacagaaccaagggg

SEQ ID NO: 35534 - DNA, 122 bp, Homo sapiens
aggcatgcaatcgtagaagcagggtgctggggggctacaaaccaccgagctgatttaagacgtggatttcaggtttttcccttgtcaaagcagtaaaggaagagcgggccttggcgactgta

SEQ ID NO: 35535 - DNA, 122 bp, Homo sapiens
tccagagtaaatactctactccaaaaacaaacccaggcgttaccaaacagtccttccctgcgccccttctcgccaaagttatctggcgaatttcacgtttatatattctgagaggcacaaat

SEQ ID NO: 35536 - DNA, 122 bp, Homo sapiens
acacccctcctcacctgaaaccagcaggccgcggccgggctcgcgagcccgccgaagactcggtagttacctcggccgcactccgaatgcacctacgccaactgccacttccggagccgctc

SEQ ID NO: 35537 - DNA, 122 bp, Homo sapiens
tcttagggccgagcgcgccacctcgtggccaagagggagaccgcgtgcctttcctgcagccgaccctccctagggccagccacaccgagaagccctgtccctgcctgtggggggagttccgg

SEQ ID NO: 35538 - DNA, 122 bp, Homo sapiens
agtaaaccatctgaatataccatagttgtctataactcaatggttcttaattgtcattctcgttacacctaaacccccactcttagttttagtctctccataacttagattcaaattctctt

SEQ ID NO: 35539 - DNA, 122 bp, Homo sapiens
tgagcctctaacccccagataaggaaaggggtggactcagttgaagtccagtgtccactccggtccaatcagctctacctggggtgaggggaaactcctctggctgggctgctccctctgca

SEQ ID NO: 35540 - DNA, 122 bp, Homo sapiens
cgcccccgggcatgtggtctctccgctgccagggcgccccctgcctagaggtgaactgcacgtagcccggagtgccccgcgggaaaggcctctgccctcccgctccgggccggtgcggggcg

SEQ ID NO: 35541 - DNA, 122 bp, Homo sapiens
cctgctcacacgtgccgacgtggagtgcccgcctgctcacacgtgcccatgtggagtgcccgcctgctcacacgtgccaacgtggagtgcccgcctgatcacacgtgcccatgtggagtgct

SEQ ID NO: 35542 - DNA, 122 bp, Homo sapiens
cgctaatcagtgattcattcctgtaaactccactctaagctccttgagggcaaaaccaggcgctctcacacactgggtgctcaacgaatactgaacgagggaatctcagcatagctggtgct

SEQ ID NO: 35543 - DNA, 122 bp, Homo sapiens
tctttgggcttaggctgcaatttgaaacaccactttcctgagccagcatcccccttgcagcgctgtcacagggaggcttaggcagccacgtggaagccacctaccccgacctttggcagaat

SEQ ID NO: 35544 - DNA, 122 bp, Homo sapiens
ctacttccaaagtctgcaggagcttcgggacgtcttcccgggagtctcccccagtctcctcgacctccaatccaggcttctgctgctctgggtcgggtttggccaactgggtgccggccggt

SEQ ID NO: 35545 - DNA, 122 bp, Homo sapiens
aggcggggcaccgaggtagcgcgcccaattggggcgcgggagaggccgggggtgtggcagcgttggcggcgagcaggggcctgggcgcgctgggggcggggccagggtgctcggctcgcggg

SEQ ID NO: 35546 - DNA, 122 bp, Homo sapiens
cccccagctgattcattggctgctattcgtttctaacgttcaccaatggtagataacatccgccccatccgctggtcccattggttcagcagctgtctatctctcctgcgacttctgacccc

SEQ ID NO: 35547 - DNA, 122 bp, Homo sapiens
tgaagcagagccagaggcggcgcggcggggtgctcggcggcgcggcacgcggcccagaagcgttggaatcctgaattgagacggctgcgcctaaagacagcaggagtggcggggccgccgcc

SEQ ID NO: 35548 - DNA, 122 bp, Homo sapiens
gaagaatggctggtttctggaaagtcaaaccaaaccagcattaagtgatggcacatgcggcgtgcatgcccaggccacttctgagtggcaggaaaggatagagaggaagtgtaaaccacagc

SEQ ID NO: 35549 - DNA, 122 bp, Homo sapiens
gaacactgcttgagaaagtcatacacagggcctccagcctctcccgggatcacagcatcccgtaataaccctcacccatatcccaccacagctattccaaacagttaccagtcttaccaaat

SEQ ID NO: 35550 - DNA, 122 bp, Homo sapiens
cagagagtccccaaagcatcattggccccaaggacccagggagcatgggtgggggcttctcgaaggcagggggcctggcctcccctgcctaccaccttccttcctggcatcctccaaacagc

SEQ ID NO: 35551 - DNA, 122 bp, Homo sapiens
gaaaatttggactaacagatggcctcaagaaagcgagagctatatggttgcgtgatttttcgaggaatcaaagaggaagtactagaatcctgaagaattcataaggcagaaatgagatttaa

SEQ ID NO: 35552 - DNA, 122 bp, Homo sapiens
tccgcccccatcccgaggcggggccccataggtggagagaagtgggagaggtcgcagccccgccttctctacacaggaaagctcagtggcccccaagccaggatgtcccaagcttgggtccc

SEQ ID NO: 35553 - DNA, 122 bp, Homo sapiens
cccgcgtccacgtgacacacgcacacccgcctccaaacagcacacgcaggtccctgcgcacgtggacacccccccagccaccagccctgcgcctcccgggccccgaagccgcagcgcccgcc

SEQ ID NO: 35554 - DNA, 122 bp, Homo sapiens
ggcggctggcggcaggctgggcccagggagctgcgcgcgcaaccactcgggctgtggctccggtgaccgctctccctggcaacggtttgttcctagcaaccagcctgaggtctggaggtggt

SEQ ID NO: 35555 - DNA, 122 bp, Homo sapiens
ctcgccgccgcacctgcagttcaataagttcgtgctgaccgggtaccggcccgccagcagcggctcgggctgcctgcgcagcctcttctacctgcacaacgaactgggcaacatctacacgc

SEQ ID NO: 35556 - DNA, 122 bp, Homo sapiens
tgttcctttggaaaacacctcccttcccccagaaacacacacacccacacgagatgggcacggagtagtcttgaaagacatgacaaatcaccagacctgggaagaagctaaagagccagagg

SEQ ID NO: 35557 - DNA, 122 bp, Homo sapiens
tttttcattgactgtatcaaactttttcccacctcagggactttgcattaagtcctttgacggctcttcctcagatttttgcatagagctggctctttgatattatttcatctcagtttgct

SEQ ID NO: 35558 - DNA, 122 bp, Homo sapiens
tgagccaccacgcccggcccttttaaacaacttgtttttagagctgcggtctcactctgtcgcccaggttgaagtgcttggtgctatgacggctcactgcagttccaactcctgggctcaag

SEQ ID NO: 35559 - DNA, 122 bp, Homo sapiens
atggcaaattgcatagaaaagacagaaggtccacaccaaggcttgggaaagcccacctctcgaagctacactgtgaggtgatatgtctctaggtatgggccagaaaaacttccccattcgct

SEQ ID NO: 35560 - DNA, 122 bp, Homo sapiens
ccagggggtgccttgccagctggaggctgcagaatcttagcttgggtgttttgccttctccgtggaactgacagatgacaggaatgacgtggagtattctcatcaagcgtctcagcatagtc

SEQ ID NO: 35561 - DNA, 122 bp, Homo sapiens
gctcctttcattgttattctagtcagacgtttggatttctttcagagctttagctgcctgcgatgcgtttctgtatggctggtgccacccttagggtgaagagctcagaaaaagtgttaaaa

SEQ ID NO: 35562 - DNA, 122 bp, Homo sapiens
aatccttttcatcttcctgcccaaactttgctgcctctccctgccatttggttatttgaacggatccgtatttggtgttcctactcccttccctcggttcacggagcctctggagggagtcg

SEQ ID NO: 35563 - DNA, 122 bp, Homo sapiens
tggttcctttctggagttaatccccctccctttgtgatgacatgaagatgtgtaagtaaacgttcttgcccatttgtgcattcttggtaacggtgggtttagattttgtgccttactggttt

SEQ ID NO: 35564 - DNA, 122 bp, Homo sapiens
tttctccctctgtttcgtcgcaaagcggttccttatttggggagcatctgactatgatcacggctccatttgcatgagaagtcttgggagggaaaaagaacttgtcacatttctcccacaag

SEQ ID NO: 35565 - DNA, 122 bp, Homo sapiens
taacatatcagcctcttgcattccattcctccaggcatcctgggactgtggtaacagcaacggctgcaacaagggagaccctcaggagcccaaaactttgatgaaggagagaatcttaccct

SEQ ID NO: 35566 - DNA, 122 bp, Homo sapiens
cgctgacttccatctctccagagccggcagggtgtccgctgtgctcctgatccagcgaggcgcccattgccactcccgatggatcaggctaaggtcttgccattgtttctgcatggctaagt

SEQ ID NO: 35567 - DNA, 122 bp, Homo sapiens
cacttccgggcagaggaacgcctcacttccgaagttttacttccggtaagccctgagcgccgccatggcagcctggactaggaagagccagggcaacagaacaggctggccccggcagggac

SEQ ID NO: 35568 - DNA, 122 bp, Homo sapiens
gcctgaaaaacagtcaccagctgggactctaccactgcctcgagaggggctatggacggtcgtatggaccttggactttggagatgggggattatgccacattcatctatgtttaaatcttg

SEQ ID NO: 35569 - DNA, 122 bp, Homo sapiens
taaaaagctacagaacattctaggctggcctgctgcagcgccatcacccatacactggagcgtgtgcatttttcccctctgttgctgttgtggttgtcgttactatgagtcccaaaagcagc

SEQ ID NO: 35570 - DNA, 122 bp, Homo sapiens
tggcccggctcccctcccatgcaccaggcggcgccgagtggttctggctcctgcgggtcccggtgacaaagcccgagccccagagccccaggactgcctctgcctccaccggaatggacggc

SEQ ID NO: 35571 - DNA, 122 bp, Homo sapiens
ttttgcctcccttcctgctgctgcctgcacggtgagaacagagatgagatggcccctgcccgggagcagtcagcggcaccacaaccctcccaggccaacccagctcctgacagagagggagg

SEQ ID NO: 35572 - DNA, 122 bp, Homo sapiens
cctaagtgtggcggacagggatactattccccgccttccataccgccccttcctccttgtcgcggactccttgtccttgccggttcacctccctgtggaggacctcctctctctgtcattgg

SEQ ID NO: 35573 - DNA, 122 bp, Homo sapiens
gcctccagcgccagccgctgctcctcgctgtagaagaactcaggcttggactcgctggagcgccagttcacatggttgtcgtccagacactgcacctgagagaaggccatggcgccgcctgc

SEQ ID NO: 35574 - DNA, 122 bp, Homo sapiens
tcggctccgggcgggggtgcgggggaagacgcggcgcgggggcgttgggccagggctcgccgtgggatgcctaaagctgggggacgagggcgcggggttcgagtcccgggtatagtgctcag

SEQ ID NO: 35575 - DNA, 122 bp, Homo sapiens
gccccggcagagagagagagcgctgtggcccgcagcgacctctccgctcgagacctctcccggtgtgggcatgtcttcccgcttggtgttgggttaacttgcttctggtcctctgttcggtg

SEQ ID NO: 35576 - DNA, 122 bp, Homo sapiens
ccaaaccacgtgaagcggaagagcaggtgagagctgcgtagctctggtcagtgtggcagacgtcaaaaggaccacgtcgctcctgcttttaaagtgcacatcgtgtttttgtgaactcagag

SEQ ID NO: 35577 - DNA, 122 bp, Homo sapiens
agcactactggcgggcacacaagagtctgcgacccgaaggggaaccccaggctgggaagtcgctgggagccacgcccatgccgcgaagaggctggccgcggcctttcctgaggctacaaaag

SEQ ID NO: 35578 - DNA, 122 bp, Homo sapiens
tagatgttatctgtgaggaggccagggcagagggaggctcagctgtagctggtagaggagcgggggtcattgttactaacttggagatgatatgtcttagattttgtgggtggcacagttac

SEQ ID NO: 35579 - DNA, 122 bp, Homo sapiens
atagttaccaatgccattctagtgactaacacagagcataggactttaatgattctctaacgttaggaggcatcggaatcacttggaggaactgttaaagcacagattgctaggccccatcc

SEQ ID NO: 35580 - DNA, 122 bp, Homo sapiens
aggatattggaaaacacctagttcacaaacaaatacataaaactaacattaaatttccaacgcagcatctgaggaaagtgcaaatatgtactgtattgggcacagaagaatctagctccctg

SEQ ID NO: 35581 - DNA, 122 bp, Homo sapiens
tgttttaaaggcgtggggggcaaattggaagaagggagtgggaaaaacgcaaaccaatcacgctaacctcgctccggaatcgaagtctgactctgtaccacgcatggatttaattgggagag

SEQ ID NO: 35582 - DNA, 122 bp, Homo sapiens
ctggggggaagagtctgtggttgggtgttcagaagcagagagtgctctcccaaagctaaacgatgccgccaactactgtgaaacttaacttcccctctcccggaattctcatggaagacaag

SEQ ID NO: 35583 - DNA, 122 bp, Homo sapiens
tcacggtccccaggctgctggccggcctgctccacccgggccaggccatatccttccaggcgtgctttgccgagatgtacttcttcgtggctctgggcatcaccgagagctacctcctggcg

SEQ ID NO: 35584 - DNA, 122 bp, Homo sapiens
gattgagggaagggaacccgcgccgccggaaggagccgctcgcttcacggcgctgggacccgggctggaaggcagggcatcagctatggaacaacctgggcaggatcccacctcagacgacg

SEQ ID NO: 35585 - DNA, 122 bp, Homo sapiens
cagatgaatccgtgtcccttctccacagggtcagggcctcaagagacttcaccacggggccgacgtgtcccttctccacagggacggggctcaaggggcttcatgacgtggctgacgtgtcc

SEQ ID NO: 35586 - DNA, 122 bp, Homo sapiens
ttgaagggcacagtatgattatttaaataaaattaaaatcctcaagttttccaggacacacgtttatccctctgaattcaaaaaagtttaaagaagtcttcccatatgcataccttactcac

SEQ ID NO: 35587 - DNA, 122 bp, Homo sapiens
ctgccacctagagggcgagtgtgagaatggagcctccccttctgtgtttatgaatccccacgcagaaatgcagaagtaaccaacctttctgtgttttaatctcctccttatttatatttttc

SEQ ID NO: 35588 - DNA, 122 bp, Homo sapiens
gtgagcccagctgattcacaggctgggcgaggcctgtgtgtctaacggctcctgcgaccccgcgctgtggcacggtgaggccaccgtgtcctcttcctgcctttcacggtgatgcctgagat

SEQ ID NO: 35589 - DNA, 122 bp, Homo sapiens
ggctcattgtgtccgccattttggggcgacaggcagaagctgagggcgaggagcctcagccgcggcgcacgccgggaaagggggcggggcgggaacggcggagcaaggcggggaggcggggt

SEQ ID NO: 35590 - DNA, 122 bp, Homo sapiens
taaagcgcggcggggagtccggggggctcccgcctggagggctgtgtgagcggcgggccgcggggcggcgcggggggcgctctccactctgcggaagctgccccctctgccctccggtccgc

SEQ ID NO: 35591 - DNA, 122 bp, Homo sapiens
atagcatttatcttaattattcagacttggacatctggtctctggaaggtcagctcgcggcgccccccacccccggcgttgttctggctccctatgggcatctgcatttccacttaagaata

SEQ ID NO: 35592 - DNA, 122 bp, Homo sapiens
cagaggcctctgcaataagcagacacatctcgcccagtgagcttagaacatctggaactccgaggtccaagctgaatgaccggtatttaggctctttcggctttttatagccattggggccc

SEQ ID NO: 35593 - DNA, 122 bp, Homo sapiens
cttggaggggtgcgcggtccgcgcaaaagtgcgcgccggggctgcacgcctctcagcttgcggggctggtgagttaacacctggtaactctttggcgagttgcgcctgtccgcttccgccag

SEQ ID NO: 35594 - DNA, 122 bp, Homo sapiens
tcagcctggctggctctccagccatctcggaaagcttctctttcctaaaccctccatactcgcaggttcagctacagaggtaactgcaggctcaggttctccagggtggccagcccaccagc

SEQ ID NO: 35595 - DNA, 122 bp, Homo sapiens
tgtgtaagggtaaatggcagtccatcccagcaaaagtgatcggatctctcgataaactgccggtcccatctaaccaacagatcctactctcaagtttccgaactcttacttttccccaatgc

SEQ ID NO: 35596 - DNA, 122 bp, Homo sapiens
cacgagggtgacccacgcaaggccctgtcctcctcttcaaaagtgcccaccccggggccgcgcactgtgacgcccagtccggggacagtcagagatctgtcctcactagagcctggggcgct

SEQ ID NO: 35597 - DNA, 122 bp, Homo sapiens
gtgaaacggggacaccacggtatttagaggacgtgcgcgggtgactatttgggggtgcagcggcttccctcctccctcccccatctttcccttctcacttccaaggcttggaaatttggaga

SEQ ID NO: 35598 - DNA, 122 bp, Homo sapiens
tatggtcattgcaatggtagagatatgcacagtatattatggaaacccagagaagacaaacgtaacacagctttgggaagatatggaatttttctcccaggaggagaggatgatcaagctga

SEQ ID NO: 35599 - DNA, 122 bp, Homo sapiens
cctcccagcacgcgagcagccccctcccacccagtcccgcggccgcctccagtccccctgcgcccgggaagcctccacctcgcccgccctgacaccgaggtcccagtatccaaagcgccccc

SEQ ID NO: 35600 - DNA, 122 bp, Homo sapiens
cacatactcgtccagaaccggcctcagcctctccgcgcagaagtttcccggagccatggccgagtactcctacgtgaagtctaccaagctcgtgctcaagggaaccaagacgaagaggtggg

SEQ ID NO: 35601 - DNA, 122 bp, Homo sapiens
catgttagaagacccaggaacatgatagaggacctagcaacagtgcccactgacctggctcgacctagggaagacatagggatgtgcacagcagcagaggaatatcatggaggtacatacaa

SEQ ID NO: 35602 - DNA, 122 bp, Homo sapiens
aaccatggatgtaagagacatccccaaggaggatgcaaaccatgcagcccttttgccgggcgcggtggctcacacctataatctcagtattttgggaggctgcggcgggcagattacttgag

SEQ ID NO: 35603 - DNA, 122 bp, Homo sapiens
caagcaaagtttctgcgcaggatgcctttggctgtgtggtgggaaggaggtgtcttgcagcgtggttcactgcccaggaggacccccaggacccactgttggtgacatcccggccgccttgg

SEQ ID NO: 35604 - DNA, 122 bp, Homo sapiens
acaaaatctcaaaattttcaaaaccttagggggaatcaatcagacatattgactgaagtacgcaggctttaattttaccaaatatatgtacatataaatacaatttcctcaaaactcaactt

SEQ ID NO: 35605 - DNA, 122 bp, Homo sapiens
caaggagcccgaagggcgggaagcagttctggagggggcgggaccagagggcccaaggagcgttacttctgtaaacccggagctgtggaagactgtgattggctgtcggctggaggagggcg

SEQ ID NO: 35606 - DNA, 122 bp, Homo sapiens
agctgccatcctgtaagtaggaatggaggcgagggaggagcaaccgaccgtgatcttgttcgagtcaggcccaggagggcacttaatcacctcaaaataggaatgacagcaataacaacaaa

SEQ ID NO: 35607 - DNA, 122 bp, Homo sapiens
ggtgcaggcagggtgtttggggtcaggccagctgtggaaaggccacaggtgaaccaggtgcggagacaaagagctggaggcatccggtggtctggctgggcctcatccgtgtcctgccgctg

SEQ ID NO: 35608 - DNA, 122 bp, Homo sapiens
ctttggaaactacaaatgattacagcccatgtgacaggaagcacgcggccttcggctctccggatcgtgtgcaaatgtgcagggggagcccccgcgggtgacgtcagtgtggatgaagtcac

SEQ ID NO: 35609 - DNA, 122 bp, Homo sapiens
aggttatctttttgaagataggcaacaattctcgtctgcctattaaccccattcgataggcgaagcaactgagattgagtgacttgccaagctcataagtctgggatgtagagaaaccaaaa

SEQ ID NO: 35610 - DNA, 122 bp, Homo sapiens
actcagatcgagcataagttaaggaagtttccaccacccacgtcacctgcaaaaccaccacgtaggaagcacactgtgaacccctgagagggagcgtggctggtacataaatccttgctttc

SEQ ID NO: 35611 - DNA, 122 bp, Homo sapiens
cagaagaggaataaaggccaaccaacttccgcccacccactacaaacgtcgagagaaattcgtagatgaggccttgtcaaaattcagaggcgtcctacgtctgctttcccaatgagacagtt

SEQ ID NO: 35612 - DNA, 122 bp, Homo sapiens
ctgggccgtgaccctcaccctagccccaaggcttctgccaggttcttcagtccagccagtcggacaaaaatgagggtgaagaagccccagctgagaagcctagcaatctcctcaggcccctt

SEQ ID NO: 35613 - DNA, 122 bp, Homo sapiens
tcgtctgactttctgttttggttcacgcgatgcaacagttgggaagtattttcttccgggcgtgcactgcatctgaagtccatttgtgggagaggccgaccagaaagccttggacaagaagc

SEQ ID NO: 35614 - DNA, 122 bp, Homo sapiens
tccagccagtccatgctactctgcctcagtttcctctctaggaagtttggaagtggtccacgacccttaggaaacctaaaagaaatctccccaaggcagatgggtggtcatcatcagattgc

SEQ ID NO: 35615 - DNA, 122 bp, Homo sapiens
attagcatacctggggcagaaggcagctgcagggccggcagtcctggcaaacctagaaggcgggaataaccctggtgacgggcggggccgggctccggcgctaactgcatccactaggtttg

SEQ ID NO: 35616 - DNA, 122 bp, Homo sapiens
ctctccctcatctcattcccacccccaggatttcccagctgttaagcaaggtctgcccaccgttccatcatttgatcatatctgcagatgaagcctgaataagcatcattccttactaggat

SEQ ID NO: 35617 - DNA, 122 bp, Homo sapiens
cgctcctgtatcgcccaggtcctcccggacactgctgtcaatgggtatttggttctttcccgtcccttccccggaggcctggcctgcagctccccgcaaggccactgcgtggcgccctgtac

SEQ ID NO: 35618 - DNA, 122 bp, Homo sapiens
gagccagttccctattgtgccctctggtcccatgtgtcaccatctttgatcagcttcatccgttgagtaaagcatacagctgtagctaacttcttcccactttgagagagaatttttcgatg

SEQ ID NO: 35619 - DNA, 122 bp, Homo sapiens
ccctcggtttttaacctttcggggtaatgggaaggaagagcaaggaggaaggggtcgccccggggcaaaatcctgctggggccaggatgtgcaaccacccacccacccgctcatcactgcct

SEQ ID NO: 35620 - DNA, 122 bp, Homo sapiens
ggggagaggacattgcaggcgcagaagagtgttaggaagggctgtgaaatggaaaggtgtcgtcttggaggaatcgggcagagccagtttacccacagggaactgggcatgtaggggagagt

SEQ ID NO: 35621 - DNA, 122 bp, Homo sapiens
ggggtcccgcctcctggccgcgccgccctaggtgtcgccgcctggcggttacgaggaggccgcctcctgcttgccggcctggcggtcctactcaacaccgcaagatttcaaaagggaaattc

SEQ ID NO: 35622 - DNA, 122 bp, Homo sapiens
tcgcaggagtcagcttaagtagagctccgcgtgttggttgcagaagtcgcctgtcttccccgcaggaggctgtttgctcgctttgacactgaatgctcccccaacaaacacgtttagcttgc

SEQ ID NO: 35623 - DNA, 122 bp, Homo sapiens
cttcacaacaaagggacgctggcgggcggggcctaagaggtgcgcggtggaggggccgggcgcgaggccgcggagacagctcggagctcggcactggggagtggcacagcgctggcggatcc

SEQ ID NO: 35624 - DNA, 122 bp, Homo sapiens
ttgctgaaaagatgtccatgtccctcatggatgtggtgagggtgatgctgcaccctccaccgtgtgccagacaagggtctgcagacagagggaacgtgcatggggaacccacgtgtggcgcc

SEQ ID NO: 35625 - DNA, 122 bp, Homo sapiens
ccaattgcccctctagcccctgtccgtaccgagaagccccaagaggagcaggaccccaagcggagcccttgccatcctgctgcgtggttctcagggttattctgagctctggcaggcttgga

SEQ ID NO: 35626 - DNA, 122 bp, Homo sapiens
ccaagtggctccaaagtatctcccacctccccccaaaaaatgaaattcagaaaggcagggcggcgggcggacagccgccgagcctcggctcgcgctcagcacctcccggcgctggggcaaag

SEQ ID NO: 35627 - DNA, 122 bp, Homo sapiens
atgggaaggagccagtgaatggggcccaggcaggcgccaccagaacgggcgagggggacgcggcctcccagcagctgggcacacccaggggacagagagtctgctcccacccatctcctctt

SEQ ID NO: 35628 - DNA, 122 bp, Homo sapiens
tttccataccccccaaaagctggcaggtggtagtcgcactagattcagaccaagactctccgcattgtcatcctaggtccttctaatgaagaagacaatactctagtttatttaacaaataa

SEQ ID NO: 35629 - DNA, 122 bp, Homo sapiens
cattgtcggttaagtatcacaatctcataatggagatgagcactgattcttaggccttggcgtagttcagggcctatcctttagcagctaaaaagagcactttggctgtaactcattggagt

SEQ ID NO: 35630 - DNA, 122 bp, Homo sapiens
ttctgaaaccaaacgagggggagtccaggacgtggatgtcagcctgatgtcctccacagacgacatctaaaaccaccacggcacggctgctcttccctcacagtgaaaatgatggcagccac

SEQ ID NO: 35631 - DNA, 122 bp, Homo sapiens
tcgacccgctccgccccttccggcggcgcctcgcaccgcgtcggggtgagcgggtgcaagcgacgccccggcatagcggcaccattggacacttcctgcgctgcttcaatcgccgggattgc

SEQ ID NO: 35632 - DNA, 122 bp, Homo sapiens
ctgaggaaggagaatcacttggagcccagaagctgaaggcttcagtgagctgagatctcgcgactgcactccagcctgggcaacaaagcaagacccttgtctctctctctttttttttcctt

SEQ ID NO: 35633 - DNA, 122 bp, Homo sapiens
aaagggcccaacatagttagtgacaaaggtgagatccaggccccctggggtaagtgtcttcggaatcctgggaggaaatgaaaacactggcattgagtgataaagggaccaccttgagggag

SEQ ID NO: 35634 - DNA, 122 bp, Homo sapiens
acctgcaccgggtctcccagttctaccgagagtggaggtcttcctggaggaggtggggtccggaactcaggcacaccctttggccccgcccttccgggctttgcttccggggcggtaagggc

SEQ ID NO: 35635 - DNA, 122 bp, Homo sapiens
ctgcgcgcccgcagggcaggtttgcgcaccgagtgtcacagaagtgatcttcctcggtaccggcctcttagctggccgtggcggagacagcgcacttgaaactaccaggcgttgaccttaat

SEQ ID NO: 35636 - DNA, 122 bp, Homo sapiens
aaatgagtgcatgatgcaggtgcctgacaacacctactgatcagtaaacacagtcaggcccggtatggatttgcactgagtcagaccctgttctagatgctgaaaatacagcagtaagaaag

SEQ ID NO: 35637 - DNA, 122 bp, Homo sapiens
aggtcctgcttccccaccgcaggtctcgcttccccaccgcaggtctctgagaggcggctgcgcccgttgccaccaaagcaaaggtccctgcatgagaagatcctggaggagatcaagcagga

SEQ ID NO: 35638 - DNA, 122 bp, Homo sapiens
gcatgggcggggcccacagatgggtgacactcatgggaaggtggtcagcaccagggcagccgggccaggaagccagaaatcccaggacaggggtctgcgagagcagggtaatagctggacca

SEQ ID NO: 35639 - DNA, 122 bp, Homo sapiens
acaggttttccctcagaagtcacaactgctctgcttccaggccaaggtagtttgctaaggcgctctatgcagagggattaaaaaggaaggttgggggtagcgaggtgggacaccagtccagg

SEQ ID NO: 35640 - DNA, 122 bp, Homo sapiens
aaattggcttatttttttctcctcggcagcatcttaatttaaaatatgacacttgacctacggccctgcacggagcggttaagagggtgagaggcccgtcaaactctttttggtgtttaggc

SEQ ID NO: 35641 - DNA, 122 bp, Homo sapiens
cccggggagcacagggccgccctctcgagcccagcttcactcaggggtgagaggtggcagcggcggctccctcacgtctctcccgggtgtcctgtcagccagcagtttcccccgggtccgca

SEQ ID NO: 35642 - DNA, 122 bp, Homo sapiens
tatgatatttgaagctgtggaagccaaactgtgaccatgaaggaaaaaccaaaggaacttcggagaagttgacccaaagccttgacatgactgaactgctaattaaatcaaccctggaatca

SEQ ID NO: 35643 - DNA, 122 bp, Homo sapiens
cccccgcctcaaacccacccggcggggcgcacagtgagcaggtggcgctgcgacgaagcccggggcggccctggccggcctctgaaccaattagaacgcaataaaagcctcccaccggcacg

SEQ ID NO: 35644 - DNA, 122 bp, Homo sapiens
ctacagttctccgcatggagttgacagtaagcaagcctccaggtcgccggaatcaaagaccgaaacccttcatcctgagggctgcaggatcatgtagttgagatggagaacagttcagcaca

SEQ ID NO: 35645 - DNA, 122 bp, Homo sapiens
cagttcaatcatcattgactttcagaggccatttcctgacccccaacagcaaatagacctcgctttgctttcatggtgtctcttattctctgtgacagcattttgagtcatttgtaatttct

SEQ ID NO: 35646 - DNA, 122 bp, Homo sapiens
gcgccgcgctcgccagctccgtttcaattaacattccagtgccgccgcccgccgcgggagcggagtccccaccagcccctggaaaaataaactctaggcctagcggctgtgcgtgcgtgtgt

SEQ ID NO: 35647 - DNA, 122 bp, Homo sapiens
gtttgttcagccagggtctattgggcaggtgtggtggtgtgtccacacccagacagaaaacgaatggcatcttcaaatcccccatcccgaccgctctcccctactctaccagcccacccctc

SEQ ID NO: 35648 - DNA, 122 bp, Homo sapiens
cggtgcagcgtttcacctccacgcacgggggccagatcaggaagttggcggacgtggggtcgacctgactccgaggaatctcgtaaatgaccgtcctggtcttgcagacagcggggacagct

SEQ ID NO: 35649 - DNA, 122 bp, Homo sapiens
gccacccactggccccagccctgccaccccggctcgccgcaggctgggcctgcgcagatccgacagaactgacatgcagaggatagaagatgtgttgggcagcagtgaggactctaggcgga

SEQ ID NO: 35650 - DNA, 122 bp, Homo sapiens
gaaagcgccactttcattcctgcttcttgggattgttgacggccacgtagtgatagagaacgacaagcaagaagagcgacacgcccagcatgttggcgaagatggcgagctgcacgtccgtg

SEQ ID NO: 35651 - DNA, 122 bp, Homo sapiens
gatgcaaggccgggcccaaggtgttggacactgctttgggggacaggctaggtctctgcacgtggcttctgggctctggaaagcggtccattctcctgacccggatctccggagtggtagga

SEQ ID NO: 35652 - DNA, 122 bp, Homo sapiens
ccaattaaaactatcacttgagcatcttcacaagtgtgatcagattttaggccaattgtacggcaactccaagcaaaaaaagacctagatttctagtggtcccctggtctcaaggtaggctt

SEQ ID NO: 35653 - DNA, 122 bp, Homo sapiens
tgacaggctcatgaggcagtgcaagggcgacctcatccagcccaacctggccaaggtgtgcgcactgctacggggctacctgctgcctggcgcgcccgccgacctccgcgaggagctgggca

SEQ ID NO: 35654 - DNA, 122 bp, Homo sapiens
atgacccctaggccgccgcagcctttggcggttctgcgtcccttggcctgtcccggtcatcgctagccacggccaggtccctgcagcagaaggagagtggccctcccttgccttcaccgcat

SEQ ID NO: 35655 - DNA, 122 bp, Homo sapiens
atgggacactagtaaacgtcccatagtatattttgtaagagtaatgaagtctcaggaacccggccctccccgcggcctctgctaataaatttccttgggcgaggggtgagctgccaggcgct

SEQ ID NO: 35656 - DNA, 122 bp, Homo sapiens
gtggggcatgatattactcccagaatcgcggggggtgcctcacccccctgctatggggatcgtcatgtccagggtgggagtggaaggtgatattactccccgaatcgcggggcccccgcccc

SEQ ID NO: 35657 - DNA, 122 bp, Homo sapiens
ggtagatttttcttagtgtacacttttagtgtcttgaatctcgtgccactagcttgtagacggcatccccatgatggctcccagaggaaattcttgttaaatggaaggtggaatttcttaac

SEQ ID NO: 35658 - DNA, 122 bp, Homo sapiens
cacaggactccatgcctgagagggaaatgagggcaggacttagcttccacagcacagccccgaggggtaaccctcatgtcaggcagagccgggagacagtctccactcacccaggaaggaag

SEQ ID NO: 35659 - DNA, 122 bp, Homo sapiens
tcacctaacatgcagttctactgcagactccatgcctctgctcacgctgttttcttctgccgggcaaacccttatcgatctctttaaggctcacctcctccactgtgaaaaacagaaaagca

SEQ ID NO: 35660 - DNA, 122 bp, Homo sapiens
gttctcgccggcaactagaggaacctgttggcgtggcccagaaggcttagcgggattgcacgaggttagttgctaagcaaggtggtctttggtcaactgccgcctggaccaaggcaacagga

SEQ ID NO: 35661 - DNA, 122 bp, Homo sapiens
cgtgagacccctggctcgctccacacacaacctaagtgccagatggatgagacgcctacgcgtgagtaaatgccaggaacatgagactcgaacgtggcaggatatccttctgcccacgaatc

SEQ ID NO: 35662 - DNA, 122 bp, Homo sapiens
gcacaaggtggagtatgaaatccgcctctgccttccaggcttttccagtgccaagacctgcggggccaccaattgtgagtcccctcccgcactgactactccctcaacaggacaggagggaa

SEQ ID NO: 35663 - DNA, 122 bp, Homo sapiens
tttacgtggcccctgtctggtagggggcactcatagcctcatctgggtagttttccagaccgtataggagtagaacagtctagaacggtctgtctcccttgcctggagctccactcagcctc

SEQ ID NO: 35664 - DNA, 122 bp, Homo sapiens
ggacgcccgcacaggtcgccggacccagagagtcggcccttaatagccccctcctggaagcgctaggtcccgaaactggccttcccccggggcccatctcccggctaatgtttaacccggcc

SEQ ID NO: 35665 - DNA, 122 bp, Homo sapiens
gttcagagtcattttgcaggaaagagtaactgctggtgctactggcagggccactgtttgcgttttctcattccctccctcatccttcctgctgcaaacaggagatgttggcggatgctgtc

SEQ ID NO: 35666 - DNA, 122 bp, Homo sapiens
gcaaaagaaaagtaagcagtcaggcggaaacggcccctttcctgcctccttcccgcccggcgctgggccttgcgcagggcccggacgcccccaagcggccacctctctgcagctgacgcttc

SEQ ID NO: 35667 - DNA, 122 bp, Homo sapiens
tgtataaattcctgcagtgctacctgtttgttgaaatactagatacacagacagtaagtacgacactttaagaggaaatgcatttaaatcctcttctccccgcatcccctccctcaaaatta

SEQ ID NO: 35668 - DNA, 122 bp, Homo sapiens
cagggccatgcgtccctcgctcggcctcgcgggccgcctgtgaatctccgagcccagacccggaagagccgcagagccagctagggacacctcagcccaactcagctgccgccgcggcgctc

SEQ ID NO: 35669 - DNA, 122 bp, Homo sapiens
gggaggcggctgagattttaaggcgggccgggtgtgctgcagccagcactgccggagaatcgctgggaaacggctccagcaggagaatggagggtggacggccggccgcaaaggcggtggag

SEQ ID NO: 35670 - DNA, 122 bp, Homo sapiens
gcggcccgccgtgcctggcacacggtcagagtcccgtaagtgttggttatcttccccaagcgcaccgggtgaacctgcgctgtcgtggcgaagcatactcattcagcacgcgcgcgaggggc

SEQ ID NO: 35671 - DNA, 122 bp, Homo sapiens
cagagccaacacctgtgccaacacctggagccaggtgtccatcaagaagggaccagggttcgggaggtggcagcatacgagctaagcccttggccacgtcagaaataggaactattgtttac

SEQ ID NO: 35672 - DNA, 122 bp, Homo sapiens
cagctggatggtggggcaaacccagagacttaagtgcaaccagcctaggccccgggccctcgggaccaagccctcagagctgccggccaggagggtggggtcccgctcagccttgaaacaat

SEQ ID NO: 35673 - DNA, 122 bp, Homo sapiens
ctgcagtgctgcaggtcccccttcagccacacagtccaggtctgtcagggattaaagggccgagcaggaaaaggggtggtaaggagctcaagggcacgcactgggaatggcctcacaaggca

SEQ ID NO: 35674 - DNA, 122 bp, Homo sapiens
agggccgcagccgccgccgcatgaccctctaccactgcatcgtcctgctggagaacgccgcgctcaccggcttctggtactccagccgcaacttctcaaccgacttctactcgctcatcatg

SEQ ID NO: 35675 - DNA, 122 bp, Homo sapiens
ccaggacgccaatgttgggactggacgaggtggacccgttgcccgtgcccaatagccccgcgatgatgcagcaaatgccttcggtgaagatgcccctgtaaggaaagggagagtcggggctt

SEQ ID NO: 35676 - DNA, 122 bp, Homo sapiens
ggtaaccacttatagggtaataaaggtgaactttaattgacttcctagacacctcttcaccgagggaaagacacagagaagaggaaagacaactgtgagtgctgacgaacaatttctgagat

SEQ ID NO: 35677 - DNA, 122 bp, Homo sapiens
taccaaggatgtgatttgaagctgtgattgtgtctcatcatgtcacactgattaggggtgcggaggggttgtgggctggatggtgcctgtccttatccgtggagacacttggggatggagcc

SEQ ID NO: 35678 - DNA, 122 bp, Homo sapiens
gagaagagtcagtgtgaactaggctggtggctctgtccggtagggagatggaaagggtgccgcccatcatagaagtaccagaacttgagctggactttgctgatttagcttatggaagagga

SEQ ID NO: 35679 - DNA, 122 bp, Homo sapiens
tgggattcgaacccacgcccccgaagagactggagccttaatccagcgccttagaccgctcggccacgctaccacccacagggtgcgtcgccgctttcagtttcacccaagtgactgtcgcc

SEQ ID NO: 35680 - DNA, 122 bp, Homo sapiens
gcgctttcctcgctcccatatacgcacacacaccccatcttccagccagttcctaactcgcgccactccccaaatcggactcaaatccggagccccgcccactgccccgccccctcccggcc

SEQ ID NO: 35681 - DNA, 122 bp, Homo sapiens
accccgggcctcgccatggtgagtgaggctggggggtcgccgaggctgcgggctctgaggcgggcttaacggggcaggacccctgagggggcgacagagcccagagtggggggcgtccgggc

SEQ ID NO: 35682 - DNA, 122 bp, Homo sapiens
ccgcagccgccgccgccaccgccgcgcctcggcctcggtgcaggcagcggccgccgccgccgagacagctgcgcgggcgagcatccccacgcagtaagcccgctttctttccgcttgtgcgc

SEQ ID NO: 35683 - DNA, 122 bp, Homo sapiens
ctgcagctgcgggctgggccgcgggtcaagctgcagctctgggacaccgcgggccacgagcgcttcagctgcatcaccgggtccttttaccggaatgtggtgggtgtcctgctggtctttga

SEQ ID NO: 35684 - DNA, 122 bp, Homo sapiens
gtggagtcacattgataataataggtttccctgaaagatacattgtaatccattcacatccgggaactgcgggcttataaagagaaggagctgcggccgcggctgctcctccagacaatgac

SEQ ID NO: 35685 - DNA, 122 bp, Homo sapiens
ggggtcactgagcagcaggggattgggggttgggcgccaggcgcgtgcgcgtctctgaaacggggacttgggagcgcgcgctgcccctcacttggctgcaactggacccagaactagggaag

SEQ ID NO: 35686 - DNA, 122 bp, Homo sapiens
gacgctatgcacgggagtgacccacacccgagaaaccccaggccatcacctcttctcccccgagacattcccattcacgcgcatggctgatcacgtgcacccgggtgctctcgggtgagcca

SEQ ID NO: 35687 - DNA, 122 bp, Homo sapiens
gatgtaaaatgttaatttatagtacagatcaatgtggcagagattattaaatattacctacgtttactacttggttaaatctagctggtagtgaaatgtaaagagctggatttactacttat

SEQ ID NO: 35688 - DNA, 122 bp, Homo sapiens
aatgaattttctttcatgattttaatcatttctttgccagtgttgtatacaacacattcacgtaaaactctcaaaggcggccatctgagcactctgccaacctggcccacccacagagcttt

SEQ ID NO: 35689 - DNA, 122 bp, Homo sapiens
attccggggctgttgggggccagggcctgggcgagcattgatcctgggctgacttggagccgcaggttttctggtcgttgaggaccctcgaggagcgtcctggtggagccgagggagtaatg

SEQ ID NO: 35690 - DNA, 122 bp, Homo sapiens
gacagcagctgcggggatgtatgcttcatggacaaaggcttgcagaggtaaagggcgctccgcagccaggagcgacccgcgcactccccagagccggggccacgagtggctggcggcgacac

SEQ ID NO: 35691 - DNA, 122 bp, Homo sapiens
aatcccagccagcatgaacaggaggcggcgcgcagtcctgaaggcgaagtccggttgtgccggccttgctgtgcatgctgggagctgtatgtagtctcttcaccgctcccgccctttcaaga

SEQ ID NO: 35692 - DNA, 122 bp, Homo sapiens
gtcgcgggccaatttcgttgtccgtgtgttgggctttccggaggtctgtgcgcccaacagcgccgctcccgcggctccacccgacccagaccctagctggaaagcgccggaggcggaggaag

SEQ ID NO: 35693 - DNA, 122 bp, Homo sapiens
ataggaccttgtaggtcattataataaggctgtgactgaaatgaggtgccagtggaagaccgtgagcagacgagtgatataatatgtcatgctgctgctgtgttgagagaagattatagagg

SEQ ID NO: 35694 - DNA, 122 bp, Homo sapiens
ttctggaatttggcccaagacatcaccaggaatgaatcaccagtcaccattacctgtcaccgatgattttgcaaattgcagttttgctcaagaaagggaatgtcctgaatatggttttcttt

SEQ ID NO: 35695 - DNA, 122 bp, Homo sapiens
taacttaccgcgcaggaggccggtccccagaagcagcagcagcggcggcagcagccgcggcgctccggggccccctagctccatggcgcacgcacctcgcgggctctagatgcgggcggctc

SEQ ID NO: 35696 - DNA, 122 bp, Homo sapiens
gaagttggaatcagcactatagagttcaaaggtgagacagacctgtctgaccccaaatctcgtgatctcccatcacatacttcagcttcctaaactagtaattaagaagctaactgacctgt

SEQ ID NO: 35697 - DNA, 122 bp, Homo sapiens
caggagcagccaccggtagggcgtggcccagagccgagcgacaaaggtccgtcccgtctgcgaaggtctaggaaaaagtggagttaaggccctagtgggcggagtccagagacgtggggggc

SEQ ID NO: 35698 - DNA, 122 bp, Homo sapiens
ccggcctcatttatcatcatctttggtcaagtggagtgtgcaaggaacagctgcttcactcggctgacttcgagggcggctacgggagaatcagggagatgaatgatgggggctggtggcag

SEQ ID NO: 35699 - DNA, 122 bp, Homo sapiens
tcactaagcgtattggaagcgtgtcggggctcagggaacttttccacaaagcctgacgtccgaatcccgggactctggcagctacgggggtccctgaggccggtccctccccgactcctaag

SEQ ID NO: 35700 - DNA, 122 bp, Homo sapiens
cattcctggccacctgttgtgttccaggagcatcagagagaaaactcccaggagacatgtcgagaggcaggaatgataggggcacacaaatgttcaacagtggctagaatttgttttaattg

SEQ ID NO: 35701 - DNA, 122 bp, Homo sapiens
ctttcttcatttatccttcaaaatggcggactttagacgttccacgatcagtaccacgtgcgcctgcgcctcccgcagccatttcgcccagcagcctaagctcggcgaggcgcctgcgcacg

SEQ ID NO: 35702 - DNA, 122 bp, Homo sapiens
cgcccccgcagcgctcagtcggctccctgcaaagcccagctgcttccggctttttctccgcgccagtcagccatctttactgagggcagccgtgctccctggcttcaggttaaaggcgtggt

SEQ ID NO: 35703 - DNA, 122 bp, Homo sapiens
aggccggcgggagcgagtctcgtggccgcagaacatgcgcgagtctcttttgttctggaacgggccgagccccaggaagtggagctgcggagctgaggcctcaccgtgtcttggcccaccct

SEQ ID NO: 35704 - DNA, 122 bp, Homo sapiens
gcccgacgctaggcagtgctgttagaaagtgatttggaagagcgcttccgagccacggcgcgccctccgggggagcgcaccggagcaggtgcgggcgagccccgcgcccggggaggtcagga

SEQ ID NO: 35705 - DNA, 122 bp, Homo sapiens
tcacccatttctgcagggagaaaagctcataagccacggccctacgcccacctttgtgcccgcagaataaggaaacccgccaactacacaccacagttagaaagcccaagaccctgaaaaga

SEQ ID NO: 35706 - DNA, 122 bp, Homo sapiens
acaggaggaagggggaggctggagccagccaagcgagccagccgtccccccaccaaggcacgcaaggaggccattcatcttcactgcctctgccgaaaatatacgtctacgggagagccagg

SEQ ID NO: 35707 - DNA, 122 bp, Homo sapiens
caccctctaatacgagcctcctgaagggagggacataagtcgggtggtttgggattcctacgaaccccagcatggggcctgtacacaactgatgtgaatgaaatgtaaggaaagctacaagt

SEQ ID NO: 35708 - DNA, 122 bp, Homo sapiens
gcgcggcagggctgggacagcaggtccaggtacagctccaggcccatagtggggaccgaccgacctgaccggaaaccagagggagtcagcaaactccagtgccaggactcgggtctcggacc

SEQ ID NO: 35709 - DNA, 122 bp, Homo sapiens
cagctctatggaacaatagtttgaacaaatgcaaacatagttactaaaatgtttgccaatcgcaagctctaatcagagtttgctttattctgagaagcaaatgagaactctggaaagggtgt

SEQ ID NO: 35710 - DNA, 122 bp, Homo sapiens
aagagcactgttgtgaagaaaagcagagaggcggcggcggcagctggtggtgggcatgggcgaggggttccacggcaaagaatgaaattgaatgcccatcaccccacgcccacaggccgcca

SEQ ID NO: 35711 - DNA, 122 bp, Homo sapiens
ctgcgccttcttcatcatttttggcattttgggtgtgcaggtgtgtggcccccacgtgcccgggggtctgccccgtcgcagacagggtctgccttcccagcgtggctcccagcagcgccgct

SEQ ID NO: 35712 - DNA, 122 bp, Homo sapiens
gaaagcaagtgagtggctattctccaggtgtatggaaaatgcccagccctccctgccttgcggtagaatcatggatttgaatattttcccaactgtgtagagtgaaatttcagtattccaag

SEQ ID NO: 35713 - DNA, 122 bp, Homo sapiens
agaaggcaggtgggccaggcgcgcgcttcccgggggccgctgggcgcgtccggtcagtaacgtggcttttctgtcgccaggttcgtgggtcgcatcaacgtttacagtgacctgaatgaccc

SEQ ID NO: 35714 - DNA, 122 bp, Homo sapiens
acaggtgcacgtagggcatggcccaacggcccctcggatgggcggggaaacaggcccgggcggagcaattcgatcaccccattatgcccctgcggatgcccagaaaagccacgaggcccggg

SEQ ID NO: 35715 - DNA, 122 bp, Homo sapiens
gcgcgatgctgtgcttcctgaggggaatggctttcgtccccttcctcttggtgacctggtcgtcagccgccttcattatctcctacgtggtcgccgtgctctccgggcacgtcaaccccttc

SEQ ID NO: 35716 - DNA, 122 bp, Homo sapiens
gccattggtgcctctggccggggttcctcacaggggcccgcaaggggacagcgaatggagcgtggagggtggagggctccttctccagaccggagcgatgggttcgggagccattctgtgcc

SEQ ID NO: 35717 - DNA, 122 bp, Homo sapiens
atcccagcctctgggccggtagttcattctcccgagctcatcccagccgggcggaaggagcgccgcccgcgctctctgggtctgaactgccggccgacagctccctcttgtggagaaaacgg

SEQ ID NO: 35718 - DNA, 122 bp, Homo sapiens
gaaagtcatggattttgacgagggctgaagtcgattaaacaaaggcagtaaacgtaatgccggcacataataaacactcaatccctcagtcttttttaagtctagcagcattttctttattc

SEQ ID NO: 35719 - DNA, 122 bp, Homo sapiens
ctagcctctttttaacaacctgctcttgagggaactaataaagtgagacctcatttgccccgctctaccagggagggcattaacctgttcatgagggatctactcccatgacccaaacacct

SEQ ID NO: 35720 - DNA, 122 bp, Homo sapiens
acggctgcccagttccctggccgactatcttgcctccaccacatcaccatcagtaccgggcggctgcagggcagagctgtccagggacctcctcacagcctccagagtcaagaaatgcctcc

SEQ ID NO: 35721 - DNA, 122 bp, Homo sapiens
cgggttccctgtatctctgattaagacacgagattagtggagtgggcgggtgggggcgcgcgcaggagttggtagcaactctcagtgaaatacagtagagccatggaaagcgggggctgcat

SEQ ID NO: 35722 - DNA, 122 bp, Homo sapiens
gaagtatatttctctgcagtctctacatgaagaaagagttgtttttggagctttgattttcggaagcttgaggcatacaataggcatgagaaagacagtggaaagtgtggatgtgtgatgtg

SEQ ID NO: 35723 - DNA, 122 bp, Homo sapiens
tcccccctaggagccaggttgagcacgttttcaacctgagtttctggctctatactgggccgcggcctaatgactctaggagtcagatctttcccaactctcataattccacatccgagaag

SEQ ID NO: 35724 - DNA, 122 bp, Homo sapiens
tgcgcctttcagtctttccagcaagtgttgccagatgcttcctgaacacaagtctgatctcgccgccctcttcgccaaccctccacatctcctgcagcacggagatgcaccacaccctctcc

SEQ ID NO: 35725 - DNA, 122 bp, Homo sapiens
gcgcccctccccccgcgcgccctggccccgggtcccgccggccggcctgcaacggccgggcgcagacacttgcagagtcaccctcgggccgggtctggagcctgatgcctcgggggtttagc

SEQ ID NO: 35726 - DNA, 122 bp, Homo sapiens
ttaatttctccgaggccagccagagcaggtttgttggcagcagtacccctccagcagtcacgcgaccagccaatctcccggcggcgctcggggaggcggcgcgctcgggaacgaggggaggt

SEQ ID NO: 35727 - DNA, 122 bp, Homo sapiens
ctggcagcggtgctggaatatctgacggccgagatcttagagctagctggcaacgcggctcgcgacaataagaagacccgcatcatcccgcgccacctgcagctagccatccgcaacgacga

SEQ ID NO: 35728 - DNA, 122 bp, Homo sapiens
gtacgaggaggcaaacacataaggcacgaggcgagaaacgtgcagagcggaggacgaggccgacggacggggaggctgggggggacactaggcagcctggccaactctgcttgtccccctgc

SEQ ID NO: 35729 - DNA, 122 bp, Homo sapiens
gggtcaacaggaccaggagaggttccacgtgcggaccaaccagcggcagccccgctgcggcgcaggcgcctgtgccagatcgcagggctggcgccgcctaccagctcacagcgccacctgcc

SEQ ID NO: 35730 - DNA, 122 bp, Homo sapiens
gggcctcttacctatcatatttctgctgcttctgtggtttacggaaattgtaaccctttccgtgtgtgtatgggtgtgtgtgcgcgcgtgtctgaaagaaggaaggaaacatttgcggtcgc

SEQ ID NO: 35731 - DNA, 122 bp, Homo sapiens
cgccaccaagctgggtgcagagaacagggcaggcgcacggacggttcttacggccccaggcgccagacccagggcacagaggccaggatctcacgcgcgaccgcacgaggccgggaccctcc

SEQ ID NO: 35732 - DNA, 122 bp, Homo sapiens
gtggccatagagtagaggaatactagagcgtctcaagcggccccgcccctagttctgttccggtttgccggccgcaattttttccggaagctgtttttctcctggggcgggacttccggaag

SEQ ID NO: 35733 - DNA, 122 bp, Homo sapiens
cggcccagcacgccccggccccgccccagccctcctgatccctcgcagcccggctccggccgcccgcctctgccgccgcaatgatgatgatggcgctgagcaagaccttcgggcagaagccc

SEQ ID NO: 35734 - DNA, 122 bp, Homo sapiens
catccctgacagatattttaaacttcccaccttcagtgactgtcatctccatagcaaagccgtttgtcattaggaactgaggtatgtttagaaaaggtacctaggcaacagtgttaaccaga

SEQ ID NO: 35735 - DNA, 122 bp, Homo sapiens
ggagtcctctctccccacgcaggaggactgcctgggcgggcgtgggagggctgggaaccccggtaccatcccggctgtccgcccagtgtctcccagaaaaggggagtcggaatctctctcac

SEQ ID NO: 35736 - DNA, 122 bp, Homo sapiens
ggattcgccgcggggcaactacctgggaaaaccgcagactgggcaatgaaagactacatccggcaaccggatgctgggttctgtgactccaggaaaaggggctcctgggcccagggaggtgc

SEQ ID NO: 35737 - DNA, 122 bp, Homo sapiens
ctttcccgaccagtttagcaccggcgaaccccccgccctggacgaggtgcccgaggtgcgcgccctcatcgagtggatccgcaggaacaagtgagtgttgcctgccccctccccgtccgtgt

SEQ ID NO: 35738 - DNA, 122 bp, Homo sapiens
ctggggctgtgggctgggaggggccacaagtgaggctggggtcaccccctgtcttcatctcggtggtagccatgtagatgtgttcactttggaaaattcatcaaattgtacgcttaagattt

SEQ ID NO: 35739 - DNA, 122 bp, Homo sapiens
ttaggctggattgggccacaaaaatgcccaagagtacggaactcggcagagatgtacacccgccatcccgtctcccttcagcaccccgcctccgctgcctccggcttcgtctggcgtgctcc

SEQ ID NO: 35740 - DNA, 122 bp, Homo sapiens
catctaccgagtggatcattaggcctgtctcccagagacagcaaaaaatgtgcagaactacgtacacatccgtgggccggaaagcactttccctatagattctggtgccctgcggctctcgg

SEQ ID NO: 35741 - DNA, 122 bp, Homo sapiens
ggttaccgggccctgggctgggtcaggacgcccaggtaaagtaggcgatctcatccaggtcgaccgggtaatcggtgagcagcaccggcgtcttgtcgaaaagctcacccttgtagctgcgc

SEQ ID NO: 35742 - DNA, 122 bp, Homo sapiens
atccacccaccttggcctcccaaagtgctgggattacaggcgtgagccaccgcacccggccggtacagggtgtttttaactgtgactgtttaaaatggctgtctggtgtgtctcttggacat

SEQ ID NO: 35743 - DNA, 122 bp, Homo sapiens
cctctcccagcatggccctaggtcccgagtcagcaaggacaagctggaggggtcctgagccggtggggaatagagaaaggccctgcaaggtgcccgggcccacaaacaaaagaaatggcttc

SEQ ID NO: 35744 - DNA, 122 bp, Homo sapiens
ccccagtccccgtggggcggaagctggggactggagtccaccagagcagtaggcggcacccgcggggagacaggtgtcggcgcagcccgggaggatcaggtgctacctctcccgggtggggt

SEQ ID NO: 35745 - DNA, 122 bp, Homo sapiens
ccacccctcttctaacgtgtgccccgcccccaggtctgaccccgcccaccctacgattcccgcccctgctctaggcctttcagactctcccagttgggccccggcccctttacaggcccctc

SEQ ID NO: 35746 - DNA, 122 bp, Homo sapiens
gcatacagaatgctccctggtgacacaataaaaagtggccaggctaacagaggagcgcagcggggtctggccggttcaaagtccaaactccacaccccctcacctcagtctggtttgaaagg

SEQ ID NO: 35747 - DNA, 122 bp, Homo sapiens
gcgatctcactgccccatcgaggcttccgggcggaggagaaaagttttccggcaggaacccgggaaggaagccctgggaccctggctgaaactccgggtttccccagtgccgagtcccttcc

SEQ ID NO: 35748 - DNA, 122 bp, Homo sapiens
atttatagataagcatctctgaggacacacacttaagttgaaccccatcccgcctttaggcgttataaggaaatgataatgtgtgtgtctaagtcagagctagtcctaccaaagcacagaag

SEQ ID NO: 35749 - DNA, 122 bp, Homo sapiens
ttagagacaaatgtgaacagtgcagccagcctacttgacttagggatttacaaatgcattcgactccgacatgtgaaacacgacgtggcttctcccacacgccgctccgctgaaacatggcg

SEQ ID NO: 35750 - DNA, 122 bp, Homo sapiens
gataccgcctggtatttcttgctaccaaacaccacgcaatctgactttttccagcaagaccggtcccttcctcagcacaccggtgacacaaacttggaagcaccgtccctcaaaaatcccct

SEQ ID NO: 35751 - DNA, 122 bp, Homo sapiens
tgctggaggtcgtgactgctaactccgcagagtgggcagaattccaagcaaggagagtctcgggaggcagcctttcacccgccttttgccttttcacccccaaaactgtcggccccacgctc

SEQ ID NO: 35752 - DNA, 122 bp, Homo sapiens
tgttttttactgccaacatttattcactatactccaaacaaattcactaggatctatcatcgttctcaatgattatacattctgtcttcactaatggtatatttccagttttcgtgttcctg

SEQ ID NO: 35753 - DNA, 122 bp, Homo sapiens
gacagaggcccattgaggcattgcagcaggcacagagcgcccccttgtcccccaacaatccgcctttgtcctccagtcctggctgctgcagcttggtcctgggggtgctgcctgggctgggc

SEQ ID NO: 35754 - DNA, 122 bp, Homo sapiens
taacgcctggcttggctcctttccagttgatttatgtctcatgtcagatccctccttcttcgtgaagctttccctaacaatgccagcttacagtgaactctcctttttctgccttttccttt

SEQ ID NO: 35755 - DNA, 122 bp, Homo sapiens
taatgtatacggtataccccaactaacaagaactcattctttgctcattctgcataagagcgggtttacaataatcactatctgtaagtaaaggttattatttatgggatacatacaaaagt

SEQ ID NO: 35756 - DNA, 122 bp, Homo sapiens
ctgctgcacagagctctggctgaccctagcccaagccttttagaaccgccccttgacctgcgattccttttctggaattcattttagggcccagtcaggggtgttcccagagcagtctgcaa

SEQ ID NO: 35757 - DNA, 122 bp, Homo sapiens
aaacaaaaaaatacatgtttccagaaagctcctaaaaaattagtatcaagaatttacgatcgggcaagaagcaggaagcaagtggcaagtgggactctcagtacctttataatatagtaggt

SEQ ID NO: 35758 - DNA, 122 bp, Homo sapiens
tccacctccgcagccccgaccctgggggctgtgagggtggacggagccctgtcttcccagcgtgtggtgaaggagctgaaccgtctgggggtcctcatcgacttggctcacgtgtctgtggc

SEQ ID NO: 35759 - DNA, 122 bp, Homo sapiens
aacgttcctttctggcacgaccagtatctgaacatctctcacaatacccacgccacagtacgagacactgtagcctaagagtaaagcctaacagtcagctcctagcattagctttggagtta

SEQ ID NO: 35760 - DNA, 122 bp, Homo sapiens
gtccggcctgcacctggccctcctcccctgtgccgccgccagcgcccttagggtggaggacgggacagagacccctggtgccaggcacagctgtgtccccctgccaaccccagcagccgcat

SEQ ID NO: 35761 - DNA, 122 bp, Homo sapiens
cttttcactcccccactgtccccggagctggcaaataaacaaatccacaaacaaattatccgtgtgctccggagaggcggcggcgtgggcggcggcggagagaaggcgccgggcaaggcgag

SEQ ID NO: 35762 - DNA, 122 bp, Homo sapiens
gtgcacacccagcaaaagtgtagggcccactgcagactggctctaattatgtgggaaagtcgtttaatcttagagccacaacgctttgagattaagtgatttgctcaaaggctaaatggaaa

SEQ ID NO: 35763 - DNA, 122 bp, Homo sapiens
ttggtaatttgggtacaccaagtctccagttaatgatagataatcagcctttgggtcattcggtcattctcttattacaaacccctcctgctctctctgatctcctttcaaactaaatttca

SEQ ID NO: 35764 - DNA, 122 bp, Homo sapiens
gggcccgttttttcctcactgctgctttggggacacagtcccacgacagccgcgtgacatcgtccaagatgagaatttgctgttagcgaaggtcttccagaagagaccagaaatactgaaaa

SEQ ID NO: 35765 - DNA, 122 bp, Homo sapiens
attttcttccacttttaatactaaaaagccatctttatttagattcaggaacaggaaaggcgaaacaaaagagggaaattattctgttattcatacacaaattgcagagacgtaggacctaa

SEQ ID NO: 35766 - DNA, 122 bp, Homo sapiens
tcttgctgtcagccttgttttatttcgaagtgcaggtccagcaccctctaaacacatttccgtcacatttccagcagacgtggaatttcacacagggtgggtctgacatatttcaagggtca

SEQ ID NO: 35767 - DNA, 122 bp, Homo sapiens
agatgatctcgcacctcctgctggcgtcaccaagcccgcggagaggaagcggctgtcactcggaagatgagaaattggagtctgagggaggctggcttctctagccctataagagggcaggc

SEQ ID NO: 35768 - DNA, 122 bp, Homo sapiens
gccgggaggaaggcaggaggctgccttgcggctggcagaaggcctgagcggggacggaggcggccggggccctgcaggctgcagcgagagcccaagctctgagcgcgagcagctgcgaggaa

SEQ ID NO: 35769 - DNA, 122 bp, Homo sapiens
agagtttacaaaagttttcaaatgagcaaagtatgtggagggaagagatgctagaaagtccgaggattaaggatatagcccaaatttcaacaccactgaatttgatattttgattagaaaat

SEQ ID NO: 35770 - DNA, 122 bp, Homo sapiens
ctcaccacccacgtgtgtctcccccctgtgatgccagtgtgggccagaacacaggtggcccggtcaaaacgttgggggttgtctggtgagttctgccatttgtaggagaactgagctcgctg

SEQ ID NO: 35771 - DNA, 122 bp, Homo sapiens
tgagccctccccgtcactgtggagtggggttccccacccagctctgcaaactcaggatgtcggagaggcggccacagctgtgcgtgtcgccaaccccaaaccctcctcacaggatgcagagc

SEQ ID NO: 35772 - DNA, 122 bp, Homo sapiens
cacttggtcttggagatttgacaagctgccatgcaggaagtccaactactttgagactgccgtgctaaagaggcaacaactttgtggaaaatgaaattaaaatgtaaacttttaaaaacaga

SEQ ID NO: 35773 - DNA, 122 bp, Homo sapiens
agataagggctgctcctctggacctcaacaatgccaccatcgttttccgtgttactgcagcgttctcaatgtgtctgtctgcccgctggcatacggacccttctcttccccttcgtttcccc

SEQ ID NO: 35774 - DNA, 122 bp, Homo sapiens
gacgtggctgctgaacagccgcaaaccatcttcacctgggggcattgagtggcgcagagccgggtttcatctggaattaactggatggaagggaaaataaagctatctagcggtggtttttt

SEQ ID NO: 35775 - DNA, 122 bp, Homo sapiens
gcctctggggacccgtactgtgggggccacaagcccaccccctccatgtcttagatagtgcgggaggtcctcaaagagaggcccacgaggactgagtggaaacagaagctgggcctgtgtcc

SEQ ID NO: 35776 - DNA, 122 bp, Homo sapiens
tgcttgaaaatttagtaaccctgctcctaatcccgtgcactgctatatcctagtgtgcggcgggacacttgagagttttgaaagaaccctcaaacaagttcacgttccgtaaactacttttc

SEQ ID NO: 35777 - DNA, 122 bp, Homo sapiens
gtcccaagtcccccactctcggacgtccacctagagctttgttccccgagtgtctctgcgcggagtggcccagtgcgcccagcatctctgccagggttccccacgccctgcacccgaaccta

SEQ ID NO: 35778 - DNA, 122 bp, Homo sapiens
ggaggggagggagggcaagtctgggccagccttgccttcctgccttgccaggggaggggccgccacggcgtacgggggagcctgggtgatggtgccagcggcgccctcatcgccatggtaac

SEQ ID NO: 35779 - DNA, 122 bp, Homo sapiens
atgtagccagatccaagaaccaaaacctttctcctggtgcccattgaaagtgactgagcacgttccctatttaaaaaaaaaaaaaaaaaaaaaaaagggaaggggctaattaaaaatttttt

SEQ ID NO: 35780 - DNA, 122 bp, Homo sapiens
gccattgttttgcattcaacaggcaggaaaatgtgagttgagtgggcgagtgaattcgggcgttagctggtgagcatccatggtcaggcagagggaaagctggtttcatttctgtaaacagg

SEQ ID NO: 35781 - DNA, 122 bp, Homo sapiens
gaagcagcctccaccaggcagggctctgctgcttcattcatgggagaggcccaaaggcttcggacggcgtctggcacgcagtgggcaccctcttaccgcgtggggaggacgggtgaacgaga

SEQ ID NO: 35782 - DNA, 122 bp, Homo sapiens
cccgcgcccaggttaactcgcctcggctgaggctgcttctcttccactgacggttgcacacgcgggaccgagagactgggctctgttggggccccctttgttcctcgagcttccttcctgtt

SEQ ID NO: 35783 - DNA, 122 bp, Homo sapiens
aatgactctgaaatctcagtgttcgtgatgtgtgcccagtgctggttggggctggctgggcgaggggtcttctcatgatagtcgtcttcattctgtgtattagtcaggattagtcaggtagg

SEQ ID NO: 35784 - DNA, 122 bp, Homo sapiens
gacccttcaaccagaggctctgtgacttgtcccgtcttcagtgcggtgtgtaaaccctgccgccggtccaagttcacgaggtgtgctcccttctccagtgcaagggcccggtttatccccac

SEQ ID NO: 35785 - DNA, 122 bp, Homo sapiens
gacaggaggggccacaaggtacgtgtgagaaggcagctggggtggcagagctggggcgcccgtgcggcacaatccccacagagaacgtgaagtgtggggtgggcattctcgtttcttcaaaa

SEQ ID NO: 35786 - DNA, 122 bp, Homo sapiens
ctggggcctgggctgggccgctaacggagcccggccaccagccagcccgtcccggggccacgccctctctggcctcagtttccccgtctgtaaagtgacccggcgcttctgggctcgctctg

SEQ ID NO: 35787 - DNA, 122 bp, Homo sapiens
tcttttgaagggatcggaaggttaatgtataaaggaattattatacataatgtagactttcggaagcccattggttcatttgttggtatgtgtgttggaggaagggtcctattttgtgaaga

SEQ ID NO: 35788 - DNA, 122 bp, Homo sapiens
gaccccaaagaaagccagcagcaggctcttccagcagcagcctggaagcgtgtggcccctcgaggtcctgccctggaggacagagagccaggcctcagtttacccatctgtgccatggtctc

SEQ ID NO: 35789 - DNA, 122 bp, Homo sapiens
ccggcctcatcgacccagtgcagggtgttggggtgagccctggggagcggggctggtgagcgccccgagccgcgtccccctccccgcgcgccccccgcccgcgcgcgcactcacggatccgg

SEQ ID NO: 35790 - DNA, 122 bp, Homo sapiens
ggggtcctcttcccaggctgcacctgccagcccctctttcttgcaagttctgaggctttccgggatgcacggtggggtcctcgaggccgcaggtactgaagtggatcagagagaggcccgga

SEQ ID NO: 35791 - DNA, 122 bp, Homo sapiens
agaagaagagaaggcaggaattcagcctgcagaagcagagggcactgagctgagaggcaccgtaaaggagccacccaggagagcaggagtcggggagtgagcatcttcttaataaaagccac

SEQ ID NO: 35792 - DNA, 122 bp, Homo sapiens
ctttgtaatgctgacctcaatctgtaattattatttttgtttctttctcagtttatctcacggctctccctccttagagtgttgccttcgggaggacggggtgggaccgcgcctgcctcaag

SEQ ID NO: 35793 - DNA, 122 bp, Homo sapiens
gaaaaattgtgggatgccagagcgagggaatgactggtcaaaatgacccatacatccttccgatcccgagatgtcattcatcaaaaagtagcgcccgctcgtcattaaggtacgaatgacgc

SEQ ID NO: 35794 - DNA, 122 bp, Homo sapiens
taggcacaggttacaggctggagcagcagcagcaggagcagcagactcagcagaggccaccgaccaaacgtgccgggaccctcgaggccggagggctgcatgttgtgcagggccgggcaggc

SEQ ID NO: 35795 - DNA, 122 bp, Homo sapiens
gcggggcaggaagctaatcgcggcccctgcgccgctttgacaggccgagtgaagagaaaacgggctcactgcagctaacagcctcaccccttgggctaggaagccacggaagcaaaacctcc

SEQ ID NO: 35796 - DNA, 122 bp, Homo sapiens
tccaaatcagaacctttctgagagtcgacgtgggtactgctgataattagtctggatacccgaaagaatggaaagcagggacccagacagatccttgcacaaccgtgttcgtagcagggcga

SEQ ID NO: 35797 - DNA, 122 bp, Homo sapiens
ccaccgcgtgctcaggccccgctgagcggtcccggctccgctcgcgccctgtggggtccacggcgcgctcttccagagcctttgggacccgtgcccgctcgcgtcctcaagtgcacgcgccg

SEQ ID NO: 35798 - DNA, 122 bp, Homo sapiens
ggcggtttcggctcttggccaggagccacttgtgcggctgcccagagaaccagaggtcctcgatcccgtgtcgtcttcctcttcgcccccaggaggagcgagagggagccgcggttgatgtg

SEQ ID NO: 35799 - DNA, 122 bp, Homo sapiens
gactgtcaggccctgggactcagctgcttcagctcctaaactgggcacctctttctgactcgcttgttgggagaaaggctccgcccctctccagaccccgcccccagggaggaggggcaaga

SEQ ID NO: 35800 - DNA, 122 bp, Homo sapiens
acagcgcccactgggaggacgccaggtccagcggagggacatcccccatcagagctcgagcgggctccgaaggcaggggctgccagccggtttgctcaaggggtctggcccagctcctccga

SEQ ID NO: 35801 - DNA, 122 bp, Homo sapiens
cacctggcaagaagtgtatttggccaatggtaaggttaccatctctgtgtaattaggctccgtaaagctttgtttttaaatttattaatgggaatgatttgacattcctacacactgacatt

SEQ ID NO: 35802 - DNA, 122 bp, Homo sapiens
tctcctggaaggtacattaaatcattaaatgccagcctgcctgtttcacgtaggaggactcgtatatgtgttcctggtagggaatgtgtgtccaaaacaccagcatcttcttctcagcccac

SEQ ID NO: 35803 - DNA, 122 bp, Homo sapiens
tctgaaaagagatagcatcaatacagccctgcaactaaaaataccacaaatcagaaacaacgttcttctcttcttgatccactgaagagaggctgtgttctgtgtgctgtctgtttccttaa

SEQ ID NO: 35804 - DNA, 122 bp, Homo sapiens
cctctcctaggggaggggtctggtgtcctcagctggctcctctccaccttcgcttctacccgggggctccagtgcatctggctttatctctggggtgagccatgcggccctggtcatctgga

SEQ ID NO: 35805 - DNA, 122 bp, Homo sapiens
tggggggggcccgtcggggcatgagggcgagagcacggcggggggggcggccagacagagcgagcgaggaggaggaggaggaggacgcggaggaggaggaaggaggaggcaaagaaaagaag

SEQ ID NO: 35806 - DNA, 122 bp, Homo sapiens
tttcctccagacaaagaagggattgagggttgaaggaaaggagaaaaaaaaccaactttccggctgatgaagctgttgtctggaggcaatgatcccaaatctgaaggctttattccggctcc

SEQ ID NO: 35807 - DNA, 122 bp, Homo sapiens
aatagtgcagggtgcttcccgccagccctcctgctgggtacaggggtcaggaagagaagacggaaaataggatttgctgagttcttgcagtgacttccaaggactctggttgctggggacca

SEQ ID NO: 35808 - DNA, 122 bp, Homo sapiens
ctctccctggggtactgtgcgagccctcaaggaggtggctgttctgtagctggagagctccgtgggtggcaggactgaacttgaacaccagaaacaacccccaagccttgtgacctgggagg

SEQ ID NO: 35809 - DNA, 122 bp, Homo sapiens
atctttttaaaaatataattttaggaatgccaagcctcttaggtgcagcaaattatacttcgctgtatactgtttactactatccactcgactctgtgtgtcatatgcagacattactgtaa

SEQ ID NO: 35810 - DNA, 122 bp, Homo sapiens
ttgttgctcgcctttcctgcttctcgcgctgtccccgcgtgcagactggtgggtgctgggcgagtgattagctgcagggccccatcctagtttggaaggaaggggtttagaagttggaggat

SEQ ID NO: 35811 - DNA, 122 bp, Homo sapiens
agagtttagtctcagaaaatgactggttggctctatttaaatcagaacccaatttctacgcgtgttgaataaggtaacagcctttgatgaatttccttcacaacatggttttagtgaagcaa

SEQ ID NO: 35812 - DNA, 122 bp, Homo sapiens
tcaccgccagctccggccgctaagcaaacattccctccaggagtccgagaagccggtgtgcgaggggaggaaccagcctgaggtttatcgctccagcaactccgggtgattcatagagttta

SEQ ID NO: 35813 - DNA, 122 bp, Homo sapiens
cagttcacatgatcataataaattatccaagaaacaaactatttaaggctcttgaaggtccggttcatattatttaaaacatctattcataccaaacaaataaatagccaggagaggaggaa

SEQ ID NO: 35814 - DNA, 122 bp, Homo sapiens
cctccagtcgttcccatttctgtccttacatcatgtatttctatggaattggcatctgcacgtacgaggtgtaggcaagactttgggtggccacgcgaggatggaagggaagggcttcgcag

SEQ ID NO: 35815 - DNA, 122 bp, Homo sapiens
ttttttcttttagctgctctgcctttgttggtgtacccctcatttcttttttcagcaggccgtgaccccttcttggcaaccctggaagtaggtgcaaagatccggaggtcaaagtgggctta

SEQ ID NO: 35816 - DNA, 122 bp, Homo sapiens
gcgcgcacacacatgtacacacgcacacgcatgcatgcatgcacggtggggcacccaagccgatgcccgctcctcgaggctgggggctatgcatgcctgaccctctggtgtattcaattata

SEQ ID NO: 35817 - DNA, 122 bp, Homo sapiens
gaagcagccacatgttgtcccccccacccccccacacacaattatctgacccccccctcccggcaaaaggagggaggctggacatctgcttcccaaacaaacctcgccaagcagccagcagt

SEQ ID NO: 35818 - DNA, 122 bp, Homo sapiens
atttgcagaaatgatggctggaaattttccaggattgaaaaatgacattgagtttgaaggcgaaagtgtactctgaaacctgagctgtatgaattttaaaacccactctggtggatgcatgg

SEQ ID NO: 35819 - DNA, 122 bp, Homo sapiens
gctggcacatagtaggtccagcctgcccggactcgcccaccacgggcccccttccagagccgggaggcaggccaagggaggccccttattgccaagagcaaacaggccgcccagggaagttt

SEQ ID NO: 35820 - DNA, 122 bp, Homo sapiens
gtgcggtggcacgatcacagctcactgcagcctcgacctcctgggctcaagcgattctcccgcctcagcctcagacagcaggtgggataccaagttcccacttcatctgccgcagggctggg

SEQ ID NO: 35821 - DNA, 122 bp, Homo sapiens
cgctgccctctcaggacgcaggttagcccttggctcttgggcatccatcaagtttctgggcgccctgtatgtcttgaatctcctgctcacgcagggaacccctcaggcccgggtgtgggaag

SEQ ID NO: 35822 - DNA, 122 bp, Homo sapiens
tttttccattaagaagaaagaaatgccaaatattctgcatatcaaagtgtcagaagagctcgttgggacatgagtgttttgcatctgtaactatttatgttttaatgattaaatcctgagtt

SEQ ID NO: 35823 - DNA, 122 bp, Homo sapiens
accagatcttctgtgtctggggttgatttgggattctaaacctccacttgcttgggattacgattgaactgcgaggcggtaaggagatggggaggagagaccgaaaagtaactatccccctg

SEQ ID NO: 35824 - DNA, 122 bp, Homo sapiens
tttatgagccagtgattcaaaatcaccatttaattaaaatcagtaatgatcatttgctgccgccttttttatgaataagatggtctgcattttacacacatacaaacacagagagagagaga

SEQ ID NO: 35825 - DNA, 122 bp, Homo sapiens
gatggatctaaacagctggggtcagaggccctttcaggggtaccctttgttatgtatattcgttctcataatgacctaagtcacagaggaggttctgagcccaggattcagcaagcagctct

SEQ ID NO: 35826 - DNA, 122 bp, Homo sapiens
tctcccaggttactgcagagtcagacaagagagcttgcaaagttcccagccagtgccccacgcacagccacgtacagccaaccttgcattctgcctccgtcactcctcccccatcccatttt

SEQ ID NO: 35827 - DNA, 122 bp, Homo sapiens
tcccgcacgctgttgaggtagtcgtgggttcccctggcctcgggctcggcgcggggtcagcgctcctgcaggtggcgcttgcggtacgggctggtgaaagtggagacggacggcaggatgga

SEQ ID NO: 35828 - DNA, 122 bp, Homo sapiens
gctgtgtgtctcgcagccacgccccttccccggaggtttgctgagcactttggggccaggcgcatatcaggtgctggatagacagggatgggcctgccctggacgtgtatggtggagggaca

SEQ ID NO: 35829 - DNA, 122 bp, Homo sapiens
ctcctacccttttttggaacggatcattttaaaagttctcgttagaaaccaattcggcgccggcaccctttgggtgaaacctaatcagcccgcgacgctgcctttctcactggtcacgggca

SEQ ID NO: 35830 - DNA, 122 bp, Homo sapiens
tgtggttatcagtgagtctgggccaggattcccaggaaaccctaggcacagaggggagcccgagaacaggatggcaacagaagtgtgggggcagaaaaggcccaccatgcagccccacgccc

SEQ ID NO: 35831 - DNA, 122 bp, Homo sapiens
ccaccggcaccctgtccatcgagatcctggaggtgaacgaccatgcacctgtgctggccccgccgccgccgggcagcctgtgcagcgagccacaccaaggcccaggcctcctcctgggcgcc

SEQ ID NO: 35832 - DNA, 122 bp, Homo sapiens
gcccaggcggcggaagtggcggccacagtgccaggtgccggcgtcgggaacgtggggctgcggccgcccatggtgccccgtcaggcgtccttcttcccgccgccggtgccgaaccccttcgt

SEQ ID NO: 35833 - DNA, 122 bp, Homo sapiens
gggtccctgtttgtgtcagccggaaagatagcagaggctagcgtgtttccccttctgctacgggcttcagctgctccatgcatacacggttgtttccttaccagaaatcccagatgaatcta

SEQ ID NO: 35834 - DNA, 122 bp, Homo sapiens
caggaccatggctgggctcaggcttggtttcccgggctgccagaggtggcccctggggctcggctaccaggcctcagcgcagcggagtcggtggaacgccggcgcggggagctcttgcggga

SEQ ID NO: 35835 - DNA, 122 bp, Homo sapiens
tcatgtaaacagtaagcacgtacctgccaggcgatgccatttcctctacattgtggagcccgagtgctgggtattagcattattgctactataaagcttccgataaaaatggatcgtctctt

SEQ ID NO: 35836 - DNA, 122 bp, Homo sapiens
ctttccatccctcatcctatttcttgtgcctttctgagtagaaaaccttggaaccttcaccgaactagaaaactggtgtcaccataataggggaagtgggggacagaggtattctttgcttt

SEQ ID NO: 35837 - DNA, 122 bp, Homo sapiens
accgtcaccccacagatcatcaactccaagtgggggaaggtgcagcagctggtgccaaaacgggaccacgccctcctggaggagcagagcaaccagcagtccaacaagcacctgcgctgcca

SEQ ID NO: 35838 - DNA, 122 bp, Homo sapiens
gcaggtcggaaggaggctgcagccaagcaaatgcctcagcccggagccttggctggagagcggggcggtgcgagcgccggaagtgaacccgacgaggtcagtgacgtcacgccggcgcagtt

SEQ ID NO: 35839 - DNA, 122 bp, Homo sapiens
tgaaaaaataatggcaaactcgacggggaaggcgcctccggacgagcggagaaagggactcgctttcctggacgagctgcggcagttccaccacagcagagggtgagagcagaaccgggggg

SEQ ID NO: 35840 - DNA, 122 bp, Homo sapiens
tcacgtgctcggggcggttgtgcaggagcggactgtcctctgggaacatagaagcgcccccgactagagtaggggcggggagggagcgccggaggaggcaggttctgggccaaggggatggg

SEQ ID NO: 35841 - DNA, 122 bp, Homo sapiens
tcaggcaaagaaaagaaccacctcagtatagagcttggtatactttaagtaacagaaaagcggccggtgtggctgcagcaaagtgacagaagaggaaaagataggcagaaagcacagttggg

SEQ ID NO: 35842 - DNA, 122 bp, Homo sapiens
ttgtttaaccataaagtggttactgactccccttctgactaagagtatacagcaaagtgacgggttgtctctcctgtctgagtcagttagggctgctataagaaagtgccacagacagggtg

SEQ ID NO: 35843 - DNA, 122 bp, Homo sapiens
gatgagaggagcgggccaggaggacgaaggctgggcgagggagggagagcgctttgcactcgagagctgattgggaagcttattaaaagcagaatactccaggggcagtctctccctgcgga

SEQ ID NO: 35844 - DNA, 122 bp, Homo sapiens
gcttgtaagctctcaaggccgcgagtgagctgtaggcagtccgtctgtgtctttgtgaggcgcccgtgagattagccactgagcagaggtttaatttatgatggcgcctagtattctcgtcc

SEQ ID NO: 35845 - DNA, 122 bp, Homo sapiens
agttccaagccttctctcattcttttctttaacttggccttcccatttctttctgttacacgacatccttgtttaccttcggcctctactgacaggaaatatgtctgtttctcagatcctct

SEQ ID NO: 35846 - DNA, 122 bp, Homo sapiens
aaaaaagccaggcacagtggcatgtgcctataatctctgctactcaggaggcttgagccccggagtttgaggctgcagtgagctatgactgtgacactgcattccagcctgggggactgagt

SEQ ID NO: 35847 - DNA, 122 bp, Homo sapiens
aatgggcatggctagaagcacaaacctagacagcacagattccgccccagaacacagaggcgtcactggctctaactaactggtttggagagaagatctttcaaaaactgtatgtggacatt

SEQ ID NO: 35848 - DNA, 122 bp, Homo sapiens
gatccttggggagtctgagtgctgggggctgttcaggcatgaaggtggggtccctgtctgcggagagcctcctcctgcactctgagaaagccttcctgcagtcagaggcgaccccgttcaca

SEQ ID NO: 35849 - DNA, 122 bp, Homo sapiens
catccctgctctgctctgaggtgccagccagagccgctcagggtcctccgtccggtttcccgtgggcctaacagcagggccctggggccactacccgcacctccctgcctccatctcagaaa

SEQ ID NO: 35850 - DNA, 122 bp, Homo sapiens
tttccccctgcattttgtggccttacttgtggaataaatgcttggtcttgtaccatcatgcgcacgggttgtgggaaaacatttaagaagcaacacaatgtaaagcagcctttagaatggtg

SEQ ID NO: 35851 - DNA, 122 bp, Homo sapiens
agggctagtggaagacttaagatggcggcgtttgcacggagtgcaatcactgcgtccttacgggggttgcaaggcgtccgaagtatgagtccactaacaaaagtccagaaactcgccagtta

SEQ ID NO: 35852 - DNA, 122 bp, Homo sapiens
gcaaataataggttatttctatactgaaaagactgccagactatactttccagtggctaacgtaattacaaacaatttagatcttttaactcccctctttgtctctaatattttatccttct

SEQ ID NO: 35853 - DNA, 122 bp, Homo sapiens
cccactacgtaacaacgcagcaaaccccgtgaacagaacctacggcatccaggcggtccccgtgcgggttttactatacaattcttaggagaaaaacaaaggttaaaaggtttgaaatgtaa

SEQ ID NO: 35854 - DNA, 122 bp, Homo sapiens
ggagagtgtttccgaccgcaagtatgaaccctcctcactaacagctatgctgaagcacagcggggagccagtgcagcacaagctcagcacgaccgcggttgtaagaacccacgtggaagcca

SEQ ID NO: 35855 - DNA, 122 bp, Homo sapiens
cccagagccattgtcacacatgaccgaatggaggcttggggcaggaaataggtcctaggccggttgagtctgaattggcctgctcctgggtggggaatgtctttctctttcaagcaatgaca

SEQ ID NO: 35856 - DNA, 122 bp, Homo sapiens
aatggttttaaaaccaaagtggattcatggcgaccccttaataatctcctggactgctttcggacatgctttctggaacaggaggggtgtggagagccagcgtgtggggacttcggtgaccc

SEQ ID NO: 35857 - DNA, 122 bp, Homo sapiens
ctcccctgtggggtgactggagaagctggttgtaaaatcaggagcaggtttctgccccaacgcctgccctgagttagttcctgagctcaccgagccggagaaggcccgtgaccagccagaag

SEQ ID NO: 35858 - DNA, 122 bp, Homo sapiens
ggggtggtttctgtacttaagtcactgcttccaataaatccctagtcaggttaactgtaacgggttaacctgttggaaggaaggaaatggaagaggcaaaggaaaaccctttccttccacgc

SEQ ID NO: 35859 - DNA, 122 bp, Homo sapiens
cactttgttgctgtttcattgagccttcctagtaccctgtgaggttggtgttgtcatccccgcttgagaatcaaggaatcagaaagtgaggctgttttctctaggtcatccacctggaagtc

SEQ ID NO: 35860 - DNA, 122 bp, Homo sapiens
aggtccgtgacagcaatagacgggcacataagatacaaggagaactgaagaatcttaagtcgaaagtgtttggtctggagaatgaacttagactctgttaatgtctacttttggaaatggcc

SEQ ID NO: 35861 - DNA, 122 bp, Homo sapiens
tagcaacttgcaatgtcaccagcaaaattatgaccgtagctttttcttcatattctctttcgcactgagatttctgggctgtatttattttagggtgattttatttggggagaacacttgta

SEQ ID NO: 35862 - DNA, 122 bp, Homo sapiens
cggaggccgggtggctggtaaggggcaggctcaggcacagcggaggggcagtagagaccacgcgccctctggcggcctggagcagagaggcggccacgccgcgcagtgatgctgtggagtcc

SEQ ID NO: 35863 - DNA, 122 bp, Homo sapiens
gtgatcggagacgagaactacggcgagggctcgagccgggagcatgcagctctggagcctcgccaccttgggggccgggccatcatcaccaagagctttgccaggatccacggtgagctgga

SEQ ID NO: 35864 - DNA, 122 bp, Homo sapiens
gcgcgtgagcgtttgagaccagctggctgagggacgccgaaaatcccgcgcggaggaaggcgggagagcgctaccgctgctaccaaggcggcggcgcgggcgctcggccgggacccttccct

SEQ ID NO: 35865 - DNA, 122 bp, Homo sapiens
gttatagcggaacaataaaatgatcctatggttctgacgatcatggagctaccatgctaccgctaagctgcctatgtctgaacttctttatcttgaaagagaaacaaacttctatcttcctt

SEQ ID NO: 35866 - DNA, 122 bp, Homo sapiens
atgccagcactgttgaggggaccccttgaacacccgccgcggagccaaagctggagcccacgctgggcactgccctgggggctgagcagctgtctccattggtcattcaggcttcagttcag

SEQ ID NO: 35867 - DNA, 122 bp, Homo sapiens
gtgctgaaaagcctttcaccctcacgtggtttcttttttaaccagtcatcaagcgaggctcgcgcgcaggccccgcgttggaaaatggcggggaagctgaaacctctgaatgtggaggcgcc

SEQ ID NO: 35868 - DNA, 122 bp, Homo sapiens
acaataaaatcaaatatgtatgttaattctatactaatgaccttggatttctcaaggtcccgtgctttttatttatttatttttttttttgagatgaggtctcattctgtcgcccagcctgg

SEQ ID NO: 35869 - DNA, 122 bp, Homo sapiens
tcatttccacgcttgttcagtgcccacggggtgtgccaggcgctctcacggatctcgtcacggatcctcttattccgactgcaggcctgaggagaatgaggttcagagacgtggagtaagtt

SEQ ID NO: 35870 - DNA, 122 bp, Homo sapiens
atgtccaccctgagcatgctgggggccaggcacgcagcttctgcaagacaagcgtggtcccgagcccacctggaaatctgggagctggcaagtgttccctgaattcctgcctccctgcttct

SEQ ID NO: 35871 - DNA, 122 bp, Homo sapiens
ctgcgtacacctggcaggggaaggcataacgcagggccacggaggcgaacagcatctccacgcagatgatgaagttctggtagccggcggccagcgtgccagcccccagcttgttcccgccg

SEQ ID NO: 35872 - DNA, 122 bp, Homo sapiens
tgagccatcaagcagcgaggcagcgtgcgtgtgagtctgcaggccacaggcgtgttcgtgcgtgtgtccatgggcgtatgcgtgtgggaagtcgcagtagctgctctgaggtgacatggagg

SEQ ID NO: 35873 - DNA, 122 bp, Homo sapiens
gaatcaagggaaacttcactctatataaagatgccacaggtccaggaaatagcttcccaccgcctggctaagggctgaataactggctgcccagccaataacaatacagactcacacagcac

SEQ ID NO: 35874 - DNA, 122 bp, Homo sapiens
gtgattttttcctactcgaggctgttgcttacttggctgccgtgagatttgcgtggatctcgcatggtggttgtgcttgccaggctcttctgtggacgatctgggggcttcttcattgagcc

SEQ ID NO: 35875 - DNA, 122 bp, Homo sapiens
gagatggacatcgagtcccagcctgagtgtgcctacgaccacctagaggtgttcgacgggcgagacgccaaggcccccgtcctcggccgcttctgtgggagcaagaagcccgagcccgtcct

SEQ ID NO: 35876 - DNA, 122 bp, Homo sapiens
tctgatgatattctgatggcaaggaaaagtataagctccaatcaggcccctgtcgtaagccgcctgacaagtgagagaaatgaggttcacagttggctggtcacagcacagggaaaggaaat

SEQ ID NO: 35877 - DNA, 122 bp, Homo sapiens
acagaccctcagcactcaactcttgaatacactgtcctagggctggaagcagtcttgacacgtcctcctagtctgtacccactcaccatcactgttcccctctcccccaggatgtaaggcct

SEQ ID NO: 35878 - DNA, 122 bp, Homo sapiens
catcatgaggaacatgcgcaccagctgcgggtcccgcaccttcccggagtcatctgactccgaagggtcaaagacaggtggctgagctgggtccgcagctaccatgcctcatcctcaccccg

SEQ ID NO: 35879 - DNA, 122 bp, Homo sapiens
caatctgcagttaggaggcaggtcctcggtccgggttgacacgtaggccacagtcttgggcgccctgatctggctggatgggaagtttagtctccacccagaagaggagctctgaactcctc

SEQ ID NO: 35880 - DNA, 122 bp, Homo sapiens
caatttgcaatgactgccagtccctcaggaaaagttagttctatctggatttttgcacatcggatttccttcaagcaggctagacccttaaatattccagttagaacagtctaatgatagga

SEQ ID NO: 35881 - DNA, 122 bp, Homo sapiens
attcttttataatgaaaactgacaagtaacaccacgagcgggaggccccacggcgtgatgcgtgctcccgacaaatcttaatcccactggtttcagcacctcccagctctggaggaggccct

SEQ ID NO: 35882 - DNA, 122 bp, Homo sapiens
caccatggctgctggagccgggcagtcagtgcgggggcaaaggcagcaggcagggtaccacgagaaggcccggggcgctgcgagaagctcccgcgctacagggtgtgacagcgggcagcggc

SEQ ID NO: 35883 - DNA, 122 bp, Homo sapiens
gtgacttgtctctttactaagtgtattatgtgatgcctgttccatggctcttaagtggctcggaaaggtagggtagggcccgggattgggctatgtaaacaccagacgttcagccggcgtgt

SEQ ID NO: 35884 - DNA, 122 bp, Homo sapiens
aggatgcagggcagagatggcattttacagggcaatattttcagcggccacaggagggcgcgtctataaaagaaaacaggactgtgcgcgagtgacccactccactcccacccgaggcacgc

SEQ ID NO: 35885 - DNA, 122 bp, Homo sapiens
ttccatgattttatggactgtacattgttatcacaatattaatgctatggcattggttttcgcaaaagtcatttggtgagaaatgcacaaaaagtgcatgtgtactatcaaatgtaaggata

SEQ ID NO: 35886 - DNA, 122 bp, Homo sapiens
aagaagaagaagaagaagaagaagaagaaggcggccaaatagaagcaaatggaaccaagacgtagggagagagaacctacctgatgacatagtgtgaacccttatcttcatccatgtccaag

SEQ ID NO: 35887 - DNA, 122 bp, Homo sapiens
ctcctgaccaccctgggccctggcacgctcggcagaaagagccacagcacaaagaccacccgggatgcactaccgccactgagaacctcaaaaagacccggacgggtctgacgcctgcacac

SEQ ID NO: 35888 - DNA, 122 bp, Homo sapiens
ccaagcatcctcgtcccagttgcctccccagcctcagttacctgtgaaaggtgtggagagcggacacctggctcccgcaggcaaccctggccttggccaaggaggggttaaagccaggagaa

SEQ ID NO: 35889 - DNA, 122 bp, Homo sapiens
ctgggcgccccccggagtgttggggtgcgcgggtcgcgaagttgccgagagaacttaagccggaggcatggtattgccccagtctgggctgaaagtctattgctttgcttccaagaacactg

SEQ ID NO: 35890 - DNA, 122 bp, Homo sapiens
ctggggactcgggtgggctaactccccaggaggtccaaagggtgtgtcccgtggccaccccgcctggcaggagccgggccttgtcccggaggatgcgagcagaacccgggacaaagcgcgat

SEQ ID NO: 35891 - DNA, 122 bp, Homo sapiens
tcagctaagcttggttgtttttatggggacggttggctccgttcagcttccccatggactcgcctcacacttttgatccacctgcttcctggcttcccaggagacatagacatgaactgtcc

SEQ ID NO: 35892 - DNA, 122 bp, Homo sapiens
cgtgcctcccgcgccgcgctcctcaccagggtcgccgctcgccgcgctcacccgcggctccggctagctggcaggcaggcccgcagccagctccctcgcgctccctctcgcgcgcgccggcc

SEQ ID NO: 35893 - DNA, 122 bp, Homo sapiens
agcgacgtcagccctttgcaggaaaaatgaggtaaggcagctttaaagaggtaaagcccacggtctctagccacgaagtggcagggccataacacgctttccggccctttagagtacagatt

SEQ ID NO: 35894 - DNA, 122 bp, Homo sapiens
tgagcagattctaggtctcccgctttctgaggccatttccccagggaatggctccaagcccgatcacttctcctgaatgtattctgggtctcccgctttccgaggccagctccccagggaac

SEQ ID NO: 35895 - DNA, 122 bp, Homo sapiens
cacctacaattttaattttttttttttttacattctgctttgggtggattaagtatgttacggaaaagtagctagtcctggggaaggtgtttgaataacaattagccaacttaataatggcc

SEQ ID NO: 35896 - DNA, 122 bp, Homo sapiens
ggagagtaggggtggagcagcctcccctctgcgtgggaacccggcctgtgtaagcagtagcgggacagggtggccggagtgatgccttggggcctgcggggaggagtggaagaagtggatgg

SEQ ID NO: 35897 - DNA, 122 bp, Homo sapiens
gatgctgtctctgtaattggcagagagggacatcttgataatggaagtgtgaaggtgtaacgtgtgttaattgatacttcttaatcacttttaggtattaagtcatgatgcaggaatctgcg

SEQ ID NO: 35898 - DNA, 122 bp, Homo sapiens
tgtgataaacgatcgtgtctcttgacccacaggagtttgtaacattcttttagtgtataccgagtcattactattgcactgaaccaaagtaaatgaatgtctactgccattgtcatagaaaa

SEQ ID NO: 35899 - DNA, 122 bp, Homo sapiens
gaagaggacggtggcggacgggggacaggctgatggggcattgaggggccgctgtgggggcgggcggggtgagggggtctggagctccgggtggacactgcgctcagaagcgtcactggctc

SEQ ID NO: 35900 - DNA, 122 bp, Homo sapiens
cgcgcctggtggaggggctggcccaggtgccgcagggccactgcgaggagcacctggacccgctgagcatctactgcgagcaggaccgcgcgctggtgtgcggagtgtgcgcctcactcggc

SEQ ID NO: 35901 - DNA, 122 bp, Homo sapiens
gacccctgtcctggcacctcttcggtccctggttcggtctgcccctttcccaccgcggcccgtcttaggccaggatgtgctccctgccctgcggactctggagcagggcccggccactcccc

SEQ ID NO: 35902 - DNA, 122 bp, Homo sapiens
acgctggggaagagggcgcaccccgggaaggtcatgactttccgacgctgggggagggggcgccagcctgattttggagtgggggccggcccacgccgaaggcacctaatgcggtgggggag

SEQ ID NO: 35903 - DNA, 122 bp, Homo sapiens
tgcctccactgctttcgctgtgaatggagcagacctcaggctcgctcaggtctgtgaggacgctctcactgctggtcgtgttcctcatccccgtgcctcccggtgacccatttctgtctcct

SEQ ID NO: 35904 - DNA, 122 bp, Homo sapiens
cagcgccgctctcccgggagacctgcaggagccagcgtagaagcacagcatctgggggcacgcggaagcggaagagcctggcactgccgtaccagctgtagaaggacagcctctgcggggcc

SEQ ID NO: 35905 - DNA, 122 bp, Homo sapiens
aatgttttatttgtaagattctataaataaagctatattctgtaattgttgagaatcccacgggtgatcatttgcaataaatgtggatgtaatgaaggctgttgaacacaaggtggcgatgg

SEQ ID NO: 35906 - DNA, 122 bp, Homo sapiens
gttcaaaggggcccaaatgtcttttcagaccaaagatatctctctcattttgaagataaacgtgacacatgtaaataaagaaactcctgggtccccaaagttgattaggaagaggtcttgca

SEQ ID NO: 35907 - DNA, 122 bp, Homo sapiens
catgatgacatcatagtgcagagggtgacatatagcagtatagcggtcaaaggacatcaccgtgaggaggagcagctctgcagatgctgaagaaagcaacaaaaagacctgggaaacacagc

SEQ ID NO: 35908 - DNA, 122 bp, Homo sapiens
cactctgagtgcgggcgacgcttccctgggttccttctcgccttctgagaaggcttctgtcgacctgtggcttcagtgggacctgagctcatccccgagaccgccttttttcacttcgttac

SEQ ID NO: 35909 - DNA, 122 bp, Homo sapiens
caaactaggcatgggaaaaaccattccaagctgggggaagcaaaccttaggcataaggcacggagactgccatggttcctgaggaattgtgtgggaacagggattctggaaattgagctcag

SEQ ID NO: 35910 - DNA, 122 bp, Homo sapiens
agcattctggtgaccactcggccctctgccattggccgtatccccagcaagtacgtgggccgctatggtgagatctgcggtttctctgataccaacctgcagaagctctacttccagctccg

SEQ ID NO: 35911 - DNA, 122 bp, Homo sapiens
tgggggacagaacgagactctgtctcaggaaaaaaaaaaaagttccaccaagaaaacctgcggaacagtctttgcagtgtggtttattttggatctcaggttttaagataggcccctagtcg

SEQ ID NO: 35912 - DNA, 122 bp, Homo sapiens
acggggtatgtccgaaggccacacagaggctggtcagcatgaggagagagggttagagggcgaggacctgttctgctgcttgtactgggtcttggatatgggtagaagcctagatggagagg

SEQ ID NO: 35913 - DNA, 122 bp, Homo sapiens
cgtcacgtgatggaggactcccagtacggcaaagggaaggcgccaaaagttgtcagatggcgaaggaaaccgcgaaattcgccattgtcacatgatggagcaacctatcgaaagcggaggga

SEQ ID NO: 35914 - DNA, 122 bp, Homo sapiens
ctccgcggccccaggtctccagccggcgggcactcacatcatctctgccatcaccgccgccgccgatgcccttcacgaccaccgccgccgccaccgccagctctcggcccctctgctgcagc

SEQ ID NO: 35915 - DNA, 122 bp, Homo sapiens
tccaattaatttacttacggaaaacaaaatccactgttgggagcttttgctttcaaaggccgattccctgctgccttacaactgcttctaacagcaacgagtccagagaaagtcattaggag

SEQ ID NO: 35916 - DNA, 122 bp, Homo sapiens
cgtgcgtatgctcgtctcttggcagtggttttgcgcatgcgtgagggcaggcccttacggcgggctgctgtgcgctttagcggttcttggcgtcgcgttggtgtaggcctagtgcgcctgcg

SEQ ID NO: 35917 - DNA, 122 bp, Homo sapiens
ccagggtcgggcttctggatggcccgtggcccctgccattaagaaagtaagcgcgacgtccgcaaaagcataaaaaagtttattggagcatcacagccggtggggcgggtattgctgagtcg

SEQ ID NO: 35918 - DNA, 122 bp, Homo sapiens
aactgttcacagagacccctgcttcccacctcgcaagggctgctctgttcaaggagcctgcgacctgacctgagaaaccatgttagtggcaaaaatctgactcttagaattctttacatcag

SEQ ID NO: 35919 - DNA, 122 bp, Homo sapiens
gtccaaggctatctactctgcccgacaacccctagcaccactaggcgctgctctagtgtgcgcctggcgccctccccagaccagtcgacgcagaacgcccagagacccagccaagggcaaga

SEQ ID NO: 35920 - DNA, 122 bp, Homo sapiens
gctacgcccgggcgcaagcgccaagagcggctgcgtctatggtcatgacgtctgacagagcgtccacccgtcttcgacaggactctatggttcttacgcgcgcagacagaccgcctatataa

SEQ ID NO: 35921 - DNA, 122 bp, Homo sapiens
aactactacaaccctctgagtgtggctgcctggatatgggaatctggcgcggcagcccctcggggcgcgtccacgcagagtcctgggctatctgaagctccggtccctggcctgacccagtc

SEQ ID NO: 35922 - DNA, 122 bp, Homo sapiens
ggcggcggcggtgcctgggcggcagcagcagcagtagcggcagccctgaggacggtgagacggccgcggcggcggcgacagcgcggaagtcgcgcgggacccagagcttcccccctgtcgct

SEQ ID NO: 35923 - DNA, 122 bp, Homo sapiens
tcatcccttaagcaagcagggtggggttaggtgcgcgtgcgcggttttaatactcctccccgaactgccaactcttcacgcacgcgaagtaggccccaccctggctgggtttacgcgtgcgc

SEQ ID NO: 35924 - DNA, 122 bp, Homo sapiens
ctccggggacccgcgaatggcaaagccgtaaagcgggaatgctgccaccgggtggcagtccgaagccacggcccagaggcctcagaactggggcgatggtcagaggcgaaaacatattagtc

SEQ ID NO: 35925 - DNA, 122 bp, Homo sapiens
atagaggaaggccactgtctcctgcctgcccctgggaactgaatgtctcgatttaaaacccgattgtgcatttgttcaattccgagatgagagaaaaaccgccctgtggtgagaggcgagac

SEQ ID NO: 35926 - DNA, 122 bp, Homo sapiens
ctaataaaaatacaaaaattagcaaggcatggtggtgcaggcttgtaatcccagctactacggaaggataaggcaggagaatcacttgaactcaggaggcggaggtcacagtgaaccaagat

SEQ ID NO: 35927 - DNA, 122 bp, Homo sapiens
ggaaaacatctccagtctcacacacagagaccagttcctgccctgtgaaagctgcagcaacgctgatcataaaaagccccctcttggccagaatgggttggctccagaggctccaagagaaa

SEQ ID NO: 35928 - DNA, 122 bp, Homo sapiens
gaggcgccgggcacgtcaatgtcacggcttaatatttatccctatatcattgtgttgcgccgctaccctccccgcctcctgaggcccggacgtgcagggagacggggtccaggggtgccgga

SEQ ID NO: 35929 - DNA, 122 bp, Homo sapiens
cgagtagttctcaaacttaaatgcacatcagaatcacctggaggacttggggtgggggttcggggtgggggaatgaaacaaaacgaaaacaaaaaaccagggccccagtattagagtttcta

SEQ ID NO: 35930 - DNA, 122 bp, Homo sapiens
ccagggatacacgagtactaattaagtcaaagaagtgttctcgtttaatccctacaccaacgtgggaggtcaggagagttaagcattattatcccattttgcagatgaggagactaaggctc

SEQ ID NO: 35931 - DNA, 122 bp, Homo sapiens
ccagccgcgatcagagggggcgggggacgcaggaaccccggcgtccgggcggtgtgcagccgcagacctattccaagtttccacgtagttgcgagagcccaaaaactgtcacgtgcacgtcg

SEQ ID NO: 35932 - DNA, 122 bp, Homo sapiens
gccccaggtgtttccaactttttggccaggacccaacatgtccgcctccgaggaggtatacgatctagctctgcatgtctatggtagcacagcgcccgccccacgaggcgcgtgcgccggcc

SEQ ID NO: 35933 - DNA, 122 bp, Homo sapiens
cacaactgagaatcttgggttggggcttggcaacccctgagactgcacagaggtgaaggacgggcgccgtgtaccaagactgtagagaggctgagggggggcgccatgtaccgagactgtag

SEQ ID NO: 35934 - DNA, 122 bp, Homo sapiens
ggcagaggaggatcgcgagcgcccactgctgcccggcccgctcgggtgccgcccagagtccggcccgctaggtgcctggtgctccgctctgcgctcagctgctccgcacagccccgcctggc

SEQ ID NO: 35935 - DNA, 122 bp, Homo sapiens
gtttgtctttggtgtgactctcataactgccgtctgttcgttctctgcccatctcttgcccgtggagctctgtcgaggccaacccagccaaggggccgggttacccactcatctgctccaac

SEQ ID NO: 35936 - DNA, 122 bp, Homo sapiens
aaaatggcgccaggcctcatccaaagcatcaggcctttgcagagggccctggggtacactcgggggcatttcctgtctgagcctgcggcccccaaccgctggcagcatgggcttccggcggg

SEQ ID NO: 35937 - DNA, 122 bp, Homo sapiens
gccaccccggctgctgtcgcctggcagccatcattacacacctctggcagtctctcgaaacgcccacccctcctgtccaactggcgtcctccatactcaccctcagctgacagccttgcttc

SEQ ID NO: 35938 - DNA, 122 bp, Homo sapiens
ctggaagatgactgaaaccacagttaaaacactaattaacttcattcagggaacattcaacgtatagattcacttcccaggggaggccaatatagcagctttcctggttaacttgctagggt

SEQ ID NO: 35939 - DNA, 122 bp, Homo sapiens
ggcgctgggcagtcacgcagggtttgaaccggaagcgggagtaggtagctgcgtggctaacggagaaaagaagccgtggccgcgggaggaggcgagaggagtcgggatctgcgctgcagcca

SEQ ID NO: 35940 - DNA, 122 bp, Homo sapiens
gatggtgagaccagaaaggcacagaggctgaaccctcgtgatggcgctaggtcccaggttcgctagcatccgagagaggggattgggtcgctccagaggccattgcgaaggctgctgccagt

SEQ ID NO: 35941 - DNA, 122 bp, Homo sapiens
ttccctataaggaaaagacaaaccagagctctttctctctctctgtctgccatgggaggacgcagcaagaaggcatggcaggaagaaatccctcagcaggaactgagctagccagccacctt

SEQ ID NO: 35942 - DNA, 122 bp, Homo sapiens
tggggggctcctgggggggcacggctctaggctgggactgtcccggggcctctcggagcccgcccgcccacgtgaccgccccaaaatatccgacacattttctcccaaaccgcacactgact

SEQ ID NO: 35943 - DNA, 122 bp, Homo sapiens
ataatctgaaaccaaaaaatttctatataaatctaaataagtgttcaagatacaaactgccgcaacaaaaaaaaaaccgtggtggggagggggtgtcagaatcttccataatatacaagtga

SEQ ID NO: 35944 - DNA, 122 bp, Homo sapiens
tggcatcagtgcggaaggtggggggacgctcagttgcctcagtccctcgttggcacggagcgcgcgggcccccggtgcctttgagttaaaggagcatcagcgggggaaagggggggtgacga

SEQ ID NO: 35945 - DNA, 122 bp, Homo sapiens
cgaggctgcagtgaactatgatcccaccactgcacttcaacctgggtgacagagtgagaccgtctcttaaagaaagaaaaaaaaggaaaagaactggctttgctcttaggagtcttggatgg

SEQ ID NO: 35946 - DNA, 122 bp, Homo sapiens
gcgctgtcggtggcacgtttgaccgcctgcacaacgcccacaaggtgttgctcagtgtcgcgtgcatcctggcccaggagcagcttgtggtgggagtagcagacaaagatctgttgaagagt

SEQ ID NO: 35947 - DNA, 122 bp, Homo sapiens
acagggaaatctcctccccctcgtgcgatttgagaaattaacccttggcgagggagtgtgcgaaagagcgcgacctctctccgcccgggggggacagttttgtttacagcgaaggtggttgg

SEQ ID NO: 35948 - DNA, 122 bp, Homo sapiens
cgaagggagtctgtctgtcccaagccgctttcgttccagaaaacgtgccagagggcaggccgtcttaatacagtgaaagaattgaggagactggaatgaatggtataggtggtggggtggtt

SEQ ID NO: 35949 - DNA, 122 bp, Homo sapiens
tccccaagctctacaggcgtggtctgttggggtcagatgcatgaggcatgtggctgatagcgcggggtgcatgtggctgttttgctggtgtctggaggcgctgggtttggccgggacacggt

SEQ ID NO: 35950 - DNA, 122 bp, Homo sapiens
cctggattcgtctgagcaggctgacctgcgccagctgcagggggacctgaaggagctcatcgagctcaccgaggccagcctggtgtctgtcaggaagagcagcttgttggccgcgctggacg

SEQ ID NO: 35951 - DNA, 122 bp, Homo sapiens
ggaataatttagagttcaggattgctttgtcaataatgctttttgctgttgcaggacagacggtactaaaatatactggtgatactaagcctgcacaagttagtagtccttttgactccgtg

SEQ ID NO: 35952 - DNA, 122 bp, Homo sapiens
ggaagtgctttgttgatctggagggggtcggtttccttgctcctctctcggggctggccccggtgctggacggctgcagccgtggactccgggagctccaggcatgtggccagtactcatgg

SEQ ID NO: 35953 - DNA, 122 bp, Homo sapiens
ttccttccagacgcagatgaggaacgggcggatgacctccttcaggacgcagatgaggaacgggcggatgacctccttccggacgcagatgagggacgggcggatgacttccttcggacgca

SEQ ID NO: 35954 - DNA, 122 bp, Homo sapiens
cgtggcaggagcaggctgagtgcctggaggctggaccaccgccgaccttccagctgggaccgcagtcaggctcccctcgagtgggcaaagtgcactggtgctcggatccagggaggaagaca

SEQ ID NO: 35955 - DNA, 122 bp, Homo sapiens
cgcggaataaatggtgttccttatctctgccttccagattatcggagccctttcagagagcgcacaacaaatgcgcccgccatcgaatgcatcatttaccaccgcagatccgagcgctgatg

SEQ ID NO: 35956 - DNA, 122 bp, Homo sapiens
ttaggaggaggagcaggtttggacatgctgatcactagagctgccacatccgggcggtaacgaacacctggatctgcagctccagagaagggcctgggtcagatgtcactgaagccctatgg

SEQ ID NO: 35957 - DNA, 122 bp, Homo sapiens
gggagttcgcgcgcggagctggcggcgtcgccgactctcccggcggcagcggaggagcagcgccgccgcgtccccacctaccgcggcctcaaccaccgccctgagagcgcgccggccggggg

SEQ ID NO: 35958 - DNA, 122 bp, Homo sapiens
aagttcatcctagtttcctctgaagttactttccaatttggtgacataggataatagagccgtaagcagagagcagtgttcttacttactaggctgagaaaataaatttcacaattcaggaa

SEQ ID NO: 35959 - DNA, 122 bp, Homo sapiens
gatgctcaccttgttgctctagcagagagagactaaacattgtcgttagtttaccagatccgtgatgccacttacctgtgtgtttggtaacaacaaaccaacatcatggaggtccctggatt

SEQ ID NO: 35960 - DNA, 122 bp, Homo sapiens
catgcccacacaaatactccccctttacccgaattgtggggcctggactgtgaaggccttcgctgcaagagcgggcactggcgaacttcagtgcacgccgcggccgagaacggatgcagggc

SEQ ID NO: 35961 - DNA, 122 bp, Homo sapiens
ctcggtcactcccactaccctcccacccgcactccaggcatattttggaggcggcagcagcggtggcaggatgtgaggcgagcctggagctcatttccaggcgcccttccctcttcggaact

SEQ ID NO: 35962 - DNA, 122 bp, Homo sapiens
gtccactccggaggccgagggtcctccgggcttccgaaggaagccgacctcaacgctggacgcttcttggagaatgattgcgttgagtggagatgtggtctgtctataaaaggccgggaggg

SEQ ID NO: 35963 - DNA, 122 bp, Homo sapiens
gaggcggcggcggctcggcgctgtttgctccgcgccgcgcggcttgcgctctccccggaacgcccacactctcaatcgctacattgttgacattcggcgctgacgtcacccgctccccattc

SEQ ID NO: 35964 - DNA, 122 bp, Homo sapiens
ctgcccaccagaagctcattcttgggcagggcagacagtaagacgggcgacccatgtgggcgaggtgacagcacggactcaggtaaccggaaaaaagaagacggtggcgtgcgctgtgagcc

SEQ ID NO: 35965 - DNA, 122 bp, Homo sapiens
gtatctgcggctttaggtaccagattcaaacacagaatggtggcagaacagggactaggacggagagaaaacctgaagatggatcaaccaggaagcaatgcattctcacagaggcacaaaaa

SEQ ID NO: 35966 - DNA, 122 bp, Homo sapiens
gtcaaactccgatttccctaggttggccgatttgatcaactcgtaggccttcttcaaggacgcagcatctgtcccaaacgggtggttgaggaaggtttggtcactgggctgggagaagtgag

SEQ ID NO: 35967 - DNA, 122 bp, Homo sapiens
acccaccagaaggaagaaactcccaacacatccgaacatcagaaggaacaaaactccagacgcgccaccttaagagctgtaacactcaccgagagggtccgcggcttcattcttgaagttag

SEQ ID NO: 35968 - DNA, 122 bp, Homo sapiens
aggtcacctccctccacgcccctctctcttggcccgggcagccggcaggcagggaagtgtcgtaaagccaggcccaggaaactttacccggcctaacagctgaggcgctttacggcgacggc

SEQ ID NO: 35969 - DNA, 122 bp, Homo sapiens
tatgacagagagcatgcagagcgactgagtgacgaccacggcgctgccccaataacccagcgacccgcaaccaagggcctggagtttgttttaaaaagggtcttaccatgttttataaaatg

SEQ ID NO: 35970 - DNA, 122 bp, Homo sapiens
gtcatgttaaatttttgcctgtgccattcccacagacatcattgtgacatatcactgtctcgtatgtcatacaaccacttaggtgatgtaactctcctcatgacaatgggccctgcacacag

SEQ ID NO: 35971 - DNA, 122 bp, Homo sapiens
ggcctgggagctgccaacagtgtgctcccatgaggagcttttcagtctaaagtcccagcacgacgcagcatccatgactagcctggtgtgggaagcatggtagagggccctggtccacacgg

SEQ ID NO: 35972 - DNA, 122 bp, Homo sapiens
tcaggcagggccttgcaggttgtggttagttgtttggattttattgtgagggaaataacacgacatgtcattccttctgcaacagccttaagaactaggcgttcttatcccaatttcacaga

SEQ ID NO: 35973 - DNA, 122 bp, Homo sapiens
gcctgttccatgcaggtcatggtgctgggcagcggcaacaccctggagggccggcaagcacgtgtttatcacacaacatagttgttgctttgtttttcttttttttttgagacagtctcact

SEQ ID NO: 35974 - DNA, 122 bp, Homo sapiens
cagtggttattatgtagaaatgttcagtaggtaaacttgaaagaaaatgtatttggtaatcgtaaggttgtgttgccacccccaaaataatgaagaaaataccaacagaaagaaaaaggatt

SEQ ID NO: 35975 - DNA, 122 bp, Homo sapiens
aacctgaatcaacatggtttctggggacccttgaattccctcaagccctgccccaggacacgtggttctcggcgacgaccttgccatccctgtagcgggtccaggccgctctcccccggggc

SEQ ID NO: 35976 - DNA, 122 bp, Homo sapiens
gtttttcaacagcttgtattggttggtgatggtggtactggaaaaacgaccttcgtgaaacgtcatttgactggtgaatttgagaagaagtatgtaggtatgtgctggaaaaccttgcttgt

SEQ ID NO: 35977 - DNA, 122 bp, Homo sapiens
aatctgtgggtgggaggtggggagcctgaaacccaaatacaacagccactctgggctgggcgtggttccctgggagctgggtctcagatccttttaaagctgatttctccccggatctccgg

SEQ ID NO: 35978 - DNA, 122 bp, Homo sapiens
caggtcgcctgggccctgaccaaatggttcgttgtccgccaagccagacagcagggcaggcgcgctctgtgcaaaaccgagtcgtgtgcgggcccagggtggcgctcggggcgcttccagcg

SEQ ID NO: 35979 - DNA, 122 bp, Homo sapiens
gctttgcaaaaggattgcgtggggcctgagactgcgtcccatcctcactagcaagcctggcgtgccggggagcgagaaaagggggagggcagtcttttcccatttgtctcgctggtcgtcag

SEQ ID NO: 35980 - DNA, 122 bp, Homo sapiens
ccgctggacgaagcttcccggctcggcgcgtgcagtttccgggattcacagttcgatccccggaagtgacgataagcgagcccaagtagttcaggctcaaacttgagaggggaaagcagaat

SEQ ID NO: 35981 - DNA, 122 bp, Homo sapiens
ttttaaaacttagttccagctgggtgtggtggcacgtgcctgtgctctcagctactcaggcggctgaggcagggggatcacttgaaccaggagttggaggctgcagtgagctgtgatggcgc

SEQ ID NO: 35982 - DNA, 122 bp, Homo sapiens
ccagcggcagtagctgtagcagcttcagcgaagccggagatgggcagagagcgcgcgcggcgcagcagctccagattcactgctctcccctgcagctccccgcgcccccgccgctgtcgctg

SEQ ID NO: 35983 - DNA, 122 bp, Homo sapiens
caatcaataggagtcccagaaagaagagagacaaatggagggtagggctaaaataatgagcgattttttttgtataccagatatatgatattgtactgactcctgggaggaatacaaatgtg

SEQ ID NO: 35984 - DNA, 122 bp, Homo sapiens
cacgatcaggcagcagcggcatcagctgggaacttggtggaaatgtagaatctctggccccgccctagaccaactaagccagaatctgcatttaactagatccccaggtgatgagtaggcac

SEQ ID NO: 35985 - DNA, 122 bp, Homo sapiens
cccccgcagacacccatggttgagtgccctccaggcccctgcctgccccagcatcccctgcgcgaagctgggtgccccggagagtctgaccaccatgccacctcctcgcctcctcttcttcc

SEQ ID NO: 35986 - DNA, 122 bp, Homo sapiens
ggaaggcacacgggatgctttactatggcttctcggaaggggaggcggcgggacgccccgcggggcccgaacccctggacacgactgatctgaacggggtgcacttcgacccggaagtttac

SEQ ID NO: 35987 - DNA, 122 bp, Homo sapiens
cagtaaggtaagtaaccgatgtggggtaaaatgtctgtaagtgaaacaggctccgcctaccgcactgccgggccaggccccgccccaagagtcggattggatatcttggcgctggtaggacc

SEQ ID NO: 35988 - DNA, 122 bp, Homo sapiens
ggaggggcggcggggacaggctgggctcagcccccagtccagacacctggccaggaatgccgccaggtgcgcgtcccgggcaccggaagggctaacacgggacagccccacccgggactgcg

SEQ ID NO: 35989 - DNA, 122 bp, Homo sapiens
gcgtggggactcggaccctggtcctgagtgctgccccgaggcccgtgatgggaagcctgacgtctgcatcgtcctgcgctgcgtggccggtcggtcccggcgctctcagcacttggagtctc

SEQ ID NO: 35990 - DNA, 122 bp, Homo sapiens
aggcagcctggtgattagcatgagactgggcggctgtcctgcttcctgcccttcaatagccgttccgcgcgctcgcgccggagcagcgctgccgccgcgcgggggtcgatcgcaggctcggc

SEQ ID NO: 35991 - DNA, 122 bp, Homo sapiens
ctgtagaagcctatataccctcctcatagtgcggaagggaaggggtttcaggcaacttgccggagagtcatgactttgggggaaagatgaattgccccttaggagaatagatgacgaggtct

SEQ ID NO: 35992 - DNA, 122 bp, Homo sapiens
tctgtttgaatccctgtcttccccttttttgggtgcgcatccagggcgggatcgctggaccgcgtgcggaccctcgctgcgcatccagggcgggatcgctggaccgcgtgcggaccctcgct

SEQ ID NO: 35993 - DNA, 122 bp, Homo sapiens
ggggaataggtgcaaggtttgtggagggcggcaaactgcactccatgtggcgcgaggctgcgcttgcggagatccgggttctggtgcctggcgccggcagccagtaggggcgcgcgtcctgc

SEQ ID NO: 35994 - DNA, 122 bp, Homo sapiens
cccgacagcccgggaaacggacagccgtgtcagaagggcaggtgccagtgggcaggaggccggagagaaagccgcagcttccttccacctcgcgccgggcccgcggccgcgcacggggaccg

SEQ ID NO: 35995 - DNA, 122 bp, Homo sapiens
tttatttagatcttcacagactggatgttaagcaagtggaaaggcagaacagcctccactcgcggtgcacggggaagagtgggcggcggacgtggttttgggcctgggacccaggtgttcct

SEQ ID NO: 35996 - DNA, 122 bp, Homo sapiens
gcccacggccatgggggctgctcccctcatgccaactgtaccaaggtggcacctgggcagcggacatgcacctgccaggatggctacatgggcgacggggagctgtgccagggtgagactag

SEQ ID NO: 35997 - DNA, 122 bp, Homo sapiens
agcccccgctcccctaagctggttctcaggagtccgaggggtcctcccgcagctgctcctcgctcagttctcccattgccccgccctgctcttcgcggggctgcttccaaagccccgacctc

SEQ ID NO: 35998 - DNA, 122 bp, Homo sapiens
tactgaacaaattgtttttcttatgtccagtctaatgctgggcaaccatggaatgaaccacgaagataagtatctcatgggctttttcttctgggagctcaggccagctggggccattacaa

SEQ ID NO: 35999 - DNA, 122 bp, Homo sapiens
gaatactgatatatgtcctaaatatgtggatttatttctataaggatactgaacaacaatcgtaatggtccagtttggtgagtatgtagatatgcacgcgaccacctcagtctcagttcaca

SEQ ID NO: 36000 - DNA, 122 bp, Homo sapiens
ttgtgtccacaccagcacccacctccccagaccagggaaaccccttctgggaagggggagcgccagaaaatactttggaggaccttgggaccctgtgtgagatgtattgaatcctgattcat

SEQ ID NO: 36001 - DNA, 122 bp, Homo sapiens
aaacactaacattgccttgcttgtggatagaaacattccccagagctcacacccagagtgcgtttctgaaaacagcatgtgtcacagaaggtagcaaatgtggtgtcactgtttcagcaaaa

SEQ ID NO: 36002 - DNA, 122 bp, Homo sapiens
ccccgccagagccgggaaagagccccgagcagaggaggaagggagcggggacctgcccttcgcctgccggcttctggaagaagcgtctcctgatccggccccggaataagaaacccggacct

SEQ ID NO: 36003 - DNA, 122 bp, Homo sapiens
gctgaaaaccgacgatttgcatcgttaattatccgtagcccttcgctggctgaaaaccgacgagtttctgcagaactgccataaaaaactactggggaaaatacgtggccagtacggggatc

SEQ ID NO: 36004 - DNA, 122 bp, Homo sapiens
ttcaaaggtcgtttattccccctcccggcaagacacccattttacagggtaggtcagtctcgccaagcccttcttctttgcccttcttcctgagaacctaaggtgttcaggccctgcagggg

SEQ ID NO: 36005 - DNA, 122 bp, Homo sapiens
agtcagcgcatccggacagagttaattaaagcagcgagggctggcggggcagctggagtccggagtggctgagctgctatggcgggagacagctcccatcaggaatggggcccagtgcatgc

SEQ ID NO: 36006 - DNA, 122 bp, Homo sapiens
gatcgcgtttcttggcctgggccgggtggaggagctcccagttggcacggcctggaatgacgcgaccccgcagccgaaggggacttgaaaatttttcctaaccaccgttccgctccgagtta

SEQ ID NO: 36007 - DNA, 122 bp, Homo sapiens
ccagtaaaccaacaattacactggtaacctggcaatgatgccaatgaccaccacagggaccgcccaccagccaggacactggcacccagctcttccaaagcagcagacatggtccctgcagc

SEQ ID NO: 36008 - DNA, 122 bp, Homo sapiens
agttcatctaaaccatgagacagtgtccggttggcagtttctacctcggatgcgaaacgccgactacagttggggaagggtggggcgtctgctgccctaacccgcgaagcgctttctcaggc

SEQ ID NO: 36009 - DNA, 122 bp, Homo sapiens
cccccagcctcgcccgcccggctcgctcacgcgctcccgccgctcatcgccggccgccgccgcccccccatcgcctccgcgccccgcccccgcgacttccgtgcagccctagccacttccgg

SEQ ID NO: 36010 - DNA, 122 bp, Homo sapiens
gtccaccctccgccaaatgggcggggcaagttcaacatcccgcctccccgaccttaagtgcgcagggcgcctggtgctcgcttgccgaaaacgttaaacatttttctttgatcccgctcttt

SEQ ID NO: 36011 - DNA, 122 bp, Homo sapiens
cttccagataattgggacccagcaaagaaggaggggtggagcggtagggagagttatttgcggtcatcaactgaaataggcaaaaccaataacgcacctcgcttttcgccctgtttactcca

SEQ ID NO: 36012 - DNA, 122 bp, Homo sapiens
ggaagccagaggcatagtatgaggagacaatccctattctgggcttggcccagaatcaaacgcctttttgctagaacagctgagctggctgagggagccgcctgtctcagaggagcagctgg

SEQ ID NO: 36013 - DNA, 122 bp, Homo sapiens
cgcagctccaggcagttgggggccacaggcggcagcgcgcagttgggggcgatggtgttgcgccggcgctccccgcagccccggtcgttgggggcacatgggcacagtagcaggccctgcgc

SEQ ID NO: 36014 - DNA, 122 bp, Homo sapiens
ttgcggctttatgcctccgccgcctcgactttttgcccccgcctccgttgctttctgccccggccaccacagctttctgcccccggcctcccggaatttagcccctgctgccgcggcttttt

SEQ ID NO: 36015 - DNA, 122 bp, Homo sapiens
cacatcttggctcctcaaacactcccctcttattctgagtttgcatctttttttttgagacggagtctggctctgtcgcccaggctggagtgcagtggcgcaatctcggctcactgtaagct

SEQ ID NO: 36016 - DNA, 122 bp, Homo sapiens
tcgtcccaggggttcagctgacactggtagtcgcctgagctgtactctttggggcccaggcgccttggcgggagctcaccctccctgtctccccagctgaccctgccgcgcccccttcatct

SEQ ID NO: 36017 - DNA, 122 bp, Homo sapiens
aatagtaacattatctacaggagcaattggggacattagtgatcttgtggcctctggctacgtgactcctgagccataatttcttttattcttttcttttctttttttttttgagatggagt

SEQ ID NO: 36018 - DNA, 122 bp, Homo sapiens
ggcgggagggctccgcacagcgtcccggccctcaccaccacctctgcccacaggaagatccgcaagctgctctcatcctcggaaaccaagcgtgctgcccgccggccctacaagcccatcgc

SEQ ID NO: 36019 - DNA, 122 bp, Homo sapiens
atccatgagtgcagccacatgggctataccctacaaagccacaggagtggaaatgctcaacgacttgagaacccaccccttccaccagtatgccctggatataggacatggagtcaaatgtt

SEQ ID NO: 36020 - DNA, 122 bp, Homo sapiens
acggcgccgaggagcgcagagcggcgcgcagcccgcccgccccagacggccgtctggcctcgcgcctgcctgttccctccagcccggacccccctgaaatatgttcaggggcgcttggatgt

SEQ ID NO: 36021 - DNA, 122 bp, Homo sapiens
agggtctaggagcccgccgtgtctgctctcaagtgccccgcgttcccttggcctgatccccgatcccgtgcaccctgcacccagtaggccctccggggccggggctgaatcagcttcggagg

SEQ ID NO: 36022 - DNA, 122 bp, Homo sapiens
ctagcgcaatctcatgtcagcttaagagccagttgaagaaaagttcaactcctatcagggcggtgtggtttctaatccttctactgctgcccatcatggtgctgtgagtgatttggtgcagg

SEQ ID NO: 36023 - DNA, 122 bp, Homo sapiens
tgactccaacagtgacatcacattctgaccgccagggaacactggtagttctttaggtggcgtttgttgctgtgaaaggcagagaatgcagcaagtgcccttctaaagcacttcagactggg

SEQ ID NO: 36024 - DNA, 122 bp, Homo sapiens
tctctgacttcagctctttgtgttctcttactgtgaaggttaatgtggtaacagtttccacggggctcaccagggcaggcatagtacatagcacaggtgtgaatgcaatggggatccgaagc

SEQ ID NO: 36025 - DNA, 122 bp, Homo sapiens
tgtattcagtaaatttggcgttcctgacaattctctcaaactagattcattattgaatgacgccttgggcattccctttaatgtgagaatcacatattaaaagacaacgtgcatttatttag

SEQ ID NO: 36026 - DNA, 122 bp, Homo sapiens
tagactggatctggataagggatgagtaagccttctttgatggtatttcctatatgtacacgagtatgggccaatgacttgaaatgacaccgtatgttttataagcatgttatacattttga

SEQ ID NO: 36027 - DNA, 122 bp, Homo sapiens
ggcccaggtggcaacagagacggcccaggtggcaacagagacggcccaggttccgtgtgccggggttgggattgcgggcaacagagacggggcaggtgctgtgtgccggggacaaggcacat

SEQ ID NO: 36028 - DNA, 122 bp, Homo sapiens
aataataccaattatcagactgcacggtggggaaaagcaggtcaggtgggaaagtaagcacgtagaaaggaaacacgccactactagggaacttagaatcaagtgtgagccacgattctaat

SEQ ID NO: 36029 - DNA, 122 bp, Homo sapiens
tctgcttaatgggacccaaggtctcagagcacaggcatattattttctgggtttgatactcgttattcatacaaataatgagccctacacagggaacaaggcaggaagttagctgttaactc

SEQ ID NO: 36030 - DNA, 122 bp, Homo sapiens
cagtgtcatttgctgcttcccttccactgtgacactgacaagtttgtgctcattgcctaacggggagacataactggtgactaaatgtatgaatgataggaaccctggcttaattttggggg

SEQ ID NO: 36031 - DNA, 122 bp, Homo sapiens
tccgctgtgctgggcgccgcccgcgctctggcgcccgcctgccgaacccgggcgctgcttcgtcttcctcaccgccaatctgtgcctgctccccgacgggcaagcgcgcttcggcaacctac

SEQ ID NO: 36032 - DNA, 122 bp, Homo sapiens
tacggcgcgagggtggtgcggacactgacggtgcagtaccgcatgcaccaggctatcatgcgctgggcctcagacaccatgtaccttgggcagctcacagcccactcttccgtggcaaggca

SEQ ID NO: 36033 - DNA, 122 bp, Homo sapiens
ccataaacgcgaatttctttccagcccagagactttttgggcagctctgtgtcgcaatcccgagtctcctccagattgtgcggggacgtcataagacgagaatcctcattcagggtctggag

SEQ ID NO: 36034 - DNA, 122 bp, Homo sapiens
attttcacgattgtcctaattctttgacagtaggggtcattgtcttaagttgttgacaagcgcctcataacgggtattcaaaaatttctttcaagtaaaatatttataaagttcactttatg

SEQ ID NO: 36035 - DNA, 122 bp, Homo sapiens
gcccaacatgccagcaaaagggtaaagttgtttaccattcggacttttggcccccttctccgtgtacaaattggtaaaaagcctcaggatttttgagctgtccttatccctccccttgtttc

SEQ ID NO: 36036 - DNA, 122 bp, Homo sapiens
tcgtttgctcagtcatctgtggatctcaatcctcccagctgtcactaaggagttaacccccgcagagcagttttttcatcacatctctgaggggaacaattgcttaagtatgtgggttcccc

SEQ ID NO: 36037 - DNA, 122 bp, Homo sapiens
tcaggggaggccagcccagccgcgcaggtgaagctgcaattagtgcagggcaattagggacgctccccgttcgggtggggcctggcccacggcggcgcttcgggagggaaaggcagagaggg

SEQ ID NO: 36038 - DNA, 122 bp, Homo sapiens
caggaatgagtctgtcgatagcaatttccattggcctttgttatgcgcaagacaaagaggcgacatctaagcctgagtccttcaaggacaatcataaaccagcagagctttcccaagcttct

SEQ ID NO: 36039 - DNA, 122 bp, Homo sapiens
tactccaagttcaagatgccatttgtttatttatttatgcacagggtcttgctctgttgccgaggctggagtgcaggcagtagcaggatcgtagctcactgcccttgacctcctgggctcaa

SEQ ID NO: 36040 - DNA, 122 bp, Homo sapiens
gaatataagtgtgagttcatgacccgccatcctcaggggaagcctgcatcatgtcacccccgccaggtgacgcacgtgcacatgcctctgatctatctaccctgccagctacagaaatcaag

SEQ ID NO: 36041 - DNA, 122 bp, Homo sapiens
tgcgggaaggagctaaagcaatagcccaaaagcgccagggaatgcacttgaagtttcagacgtttttcttttctttgaaactaagtttccagcccaccaggaaaaactgcctcgcgacctag

SEQ ID NO: 36042 - DNA, 122 bp, Homo sapiens
aatcttaagcagggaggggaagccagacggttaacacagacaaagtgctgccgtgacactcggccctccagtgttgcggagaggcaagagcagcgaccgcggcacctgtccgcccggagctg

SEQ ID NO: 36043 - DNA, 122 bp, Homo sapiens
aggtggaaggaggcggagaggtggggggtggtttttccatggagaggaggccccaccccacgctgcctctgctgtcagccctggtcagccttggcagggttcgcggatgtgctttcccgact

SEQ ID NO: 36044 - DNA, 122 bp, Homo sapiens
gctgggtggggtacgaagggtctggctgggagataggatgcctggttctaggtcagcctccgtctcccacctgttgtgtgaccctgggttgtgcccagcccccagctgctccccatgtgtaa

SEQ ID NO: 36045 - DNA, 122 bp, Homo sapiens
ggaaaccagcaggcaggtttgggcaggagggagctggctcaccacaaaggcaagggaaggcgaaggctaggtgtcttctgccagcatcgggggcccaatgggggctctttctgggggggtca

SEQ ID NO: 36046 - DNA, 122 bp, Homo sapiens
gccatggctacggtgactggctgtacacaagcttgccttgtctttggggttaaaattcctcgactgttgacacagtgcatgatgctttgggcggagtaggtgtcctgtgaatgctggcagca

SEQ ID NO: 36047 - DNA, 122 bp, Homo sapiens
agttgtctcattttcctttcatgaaaacatacccagaaagctttacagccaccataaaggcggggggcagggggaagtatatcagatgtcttccagttaagaaaaatgcaagaacagttcca

SEQ ID NO: 36048 - DNA, 122 bp, Homo sapiens
caaatcactgctttgcatgggcctggggccaggcgcggggctcctgccagggggcgtggccggcggcccccgccccgcgccgcgtgctcacctggggagtgtggcaatcctggcggcgccga

SEQ ID NO: 36049 - DNA, 122 bp, Homo sapiens
tgtgtgccacgtggcagctgctgcttggcttctggcccccttatctgcccccgccccacgcgccctggcagcaccatgagccgccagcttctgcctgtactgctgctgctgctgctcagggc

SEQ ID NO: 36050 - DNA, 122 bp, Homo sapiens
ggggccagccacaagaagtctggtcacacccaagatgagcaagtgttgctgaggccacgtcggcctgagcagcagtcagaccaagggtgtgtcccctatagccaggcacaccaggctgcaac

SEQ ID NO: 36051 - DNA, 122 bp, Homo sapiens
aggtggctttggaagcattttgcaagaccacgcccaggccgccaagcttcggtttcattgcgtgtgtatgtttacataatgtgcctgtatatcgtcagtttatctttacaacacaggtggga

SEQ ID NO: 36052 - DNA, 122 bp, Homo sapiens
ttggtgtggcaagttggctgctagaagactttgactggtagagaaataaatgcttaaatccgacctgcaacaagattgttctggctttgtcagcaggcttcttgacctgttgcttctagaac

SEQ ID NO: 36053 - DNA, 122 bp, Homo sapiens
tagggtgagtcacggaattgatagtgataggaagcaagttgtgtttgctggagtctcaagcggatgctttcagattgatttgtagatcagcagtccccagtctttttggcaccagggaccga

SEQ ID NO: 36054 - DNA, 122 bp, Homo sapiens
gatgaagccgacaagtcccaaaaatgtgtgaaaagggggctaagaggtaggcaggcgccgcgttgaggcagcgctcctgccagccccgctccgagttatcggtgctgcagccgcggcgcaag

SEQ ID NO: 36055 - DNA, 122 bp, Homo sapiens
ccttcctgtgcattgaccgacacagctcggcccggatcccgaaatgaacgtttctaccttcggaacgctgcgtctcggatccttctgaacccgcacgttgactttcctggagtctggagaaa

SEQ ID NO: 36056 - DNA, 122 bp, Homo sapiens
ccctgcgggcaccggtaccaccaccgctaccacccctgccgccgtcgcgggcaccgtcgccgcggggaccgctgtagcccccgctgccgcctccacctcgctcatcccgccgggtccagtac

SEQ ID NO: 36057 - DNA, 122 bp, Homo sapiens
gagagttgcacttggtcataaatcacacgtgactgcagccacacgcaggtgagtcgcacacgcattccagcacatgtcaaatggtcaggaacagctccctgtcaccccatacaccgatcccc

SEQ ID NO: 36058 - DNA, 122 bp, Homo sapiens
actccagcggcactaatgacccgctcctttgacattggtgccccactccatcagcactaacgccctgctccatcggcactggtgtcccactccattgtcactaacgtccggctccatcggca

SEQ ID NO: 36059 - DNA, 122 bp, Homo sapiens
taggaagctgaaggggtttggggaagctgtgaacgttagtcaaggtcttttggaggctatcggcagtcttccctgtgaaagcaaaatgtgctgtaattagttctttgtcaagagagaagtct

SEQ ID NO: 36060 - DNA, 122 bp, Homo sapiens
ccgccaccatccttcaatcccggggctcctggagggtcccagcactgtgcgtcaccaaagcgaggctgctctccacccagagcagagcttccactaagctggcagctcagcacgtcgtctgt

SEQ ID NO: 36061 - DNA, 122 bp, Homo sapiens
aaccacataaagaaaatgtgggggctcggtcctccagtcacgcggcgagcaagtgcagcgcgggacgcccgagcgccgggtctaggcgggctgcaggtgccggcaagtgctggggccgggcc

SEQ ID NO: 36062 - DNA, 122 bp, Homo sapiens
ccccgggtcacctcttagcggccatgtctctgaatccggctaggcagaaaagtactaactcgcaagatatccaggaactcttgttgtcttgtgcagaagggggaaattgaggcatggtgtgg

SEQ ID NO: 36063 - DNA, 122 bp, Homo sapiens
tcaccccaaatctcactactcctgtaactatgtctgacagccagctgttgggtcttccatcgtttttaaccttcaggtgagcacacagatccttattttttcttttcttttctttttttttt

SEQ ID NO: 36064 - DNA, 122 bp, Homo sapiens
gggtgtggccggcgccgcctttgccaagaggcgaggctcgagcggggatgagaagcgtggcgagtgcgttcgcggctgctttgacctggtgggcgccgcctccggcactgcaccgaggcggg

SEQ ID NO: 36065 - DNA, 122 bp, Homo sapiens
cccccgctcgcgcggcctcgagtccagaagacccgcctccacacaccggggccgccgccgcggagcctcatgggggttggagtccccaaggtttcctttgtgcgcagtattggcggggcctt

SEQ ID NO: 36066 - DNA, 122 bp, Homo sapiens
cgccgaacatgcccggctgaaggcactcagttcccctccgcggctcctttcctccgggtccgcttcctgcggctgctgcttgccccataggccaggaggcttctgggtggaccagcgcgatc

SEQ ID NO: 36067 - DNA, 122 bp, Homo sapiens
tcggctcgtcctttcaccacggcgtgcctggtttctggcctgttttagagactgagaaaccgaggcttggatggagcggccctgggcgtcaggacggaaacctcaaaagatgccggagggaa

SEQ ID NO: 36068 - DNA, 122 bp, Homo sapiens
accattaggaacgtttgaccaaacacgtacacggcactgacagaggaggcgccggccttccggtggaccagggcatgtaaaaaagacaccgacacaatggaaaagaaatcctcgaaggtaga

SEQ ID NO: 36069 - DNA, 122 bp, Homo sapiens
actcgctgctttctggctgtctggagtgcaaggtgactgtggttcttctctggccaagtccgagggagaacgtaaagatatgggcctttttccccctctcaccttgtctcaccaaagtccct

SEQ ID NO: 36070 - DNA, 122 bp, Homo sapiens
ccttggccacgatcccaggaaagaagagcaaggggctttccacctgcccctagcctaacccggggctggggacctctcgggttccatcggctcttgccccgcctcctaagccggccgcctcc

SEQ ID NO: 36071 - DNA, 122 bp, Homo sapiens
ggcactgtcctaaggaactgggcatacaacattgagtgagacagacaagctctctgtccccggtcaaactcaacaagcacttaaaatatcgatatgagggaggcagtgtcatggagatatac

SEQ ID NO: 36072 - DNA, 122 bp, Homo sapiens
acctcttttgcagcattgtagagatttggaatctgcacattaggaagagaccccacgaggcggtggcgttctttctcgttcggagctcacacccctcctggggagccctctcccaacccggg

SEQ ID NO: 36073 - DNA, 122 bp, Homo sapiens
gtcgtcgtccccttaacaggagtgtttccggaccaaactgagggtggggctgcttattctcgcggcccaataacgagatgcagatgaacggggaaaggaaggagttgatttctgtaaccggg

SEQ ID NO: 36074 - DNA, 122 bp, Homo sapiens
ccgtcgggcgcccggggttcactctgcggatggtgctgttgctaagctacctttagaattcgacaaggacggatgctccgagcggctccctggggtggggggaaccaggaagcagtgaatta

SEQ ID NO: 36075 - DNA, 122 bp, Homo sapiens
atactggacaagcttggtctgtaagaacacgtgggcaggtgtgtgggtgtctcagaccctcgagctcatcccagaccctgtcccatgtcagttagcaagccaccaaagtccataagggatcc

SEQ ID NO: 36076 - DNA, 122 bp, Homo sapiens
tcttctaactgcatgtttatctatcctccccgcctagactgtagggcccgcgaggggagccgctagctgtgcttgtcagtgtgaccagcgctcagcaggtgtccggcgggagggcgggcaaa

SEQ ID NO: 36077 - DNA, 122 bp, Homo sapiens
ctggaatgccagctgctgctgctgctgcagctcctccaccttcctggcctctctggctagcgcctgcctcagcttagctgcctctatcttgagctcgctcacctctgcccgcctggcctctt

SEQ ID NO: 36078 - DNA, 122 bp, Homo sapiens
gggtgtttggatgaatgaggaatggtctctggccttgaggtgctcacagacaccagaaaacgacaaaccaggggagccagaaagaggcagagaaaggtgctggccagcaggactgtgaaccc

SEQ ID NO: 36079 - DNA, 122 bp, Homo sapiens
aaaatggcagagacgaatggctgattatataagtctgtattatgtttctaggtcctgtcacgcctgtcagtgggcttgataactaccagaattagggctcgaaagctgcctgatgtatgaaa

SEQ ID NO: 36080 - DNA, 122 bp, Homo sapiens
ggcgcgccccgacaacgtcacccgcagaccggccaatcccgccaggccgcggcccagtggcgccggcgcacaccgaagacgacaccagccatccggccaatcccgccccgccgcgccccgca

SEQ ID NO: 36081 - DNA, 122 bp, Homo sapiens
ctcaggtgatctgcctgccttggcctcccaaagtgctgggattataggtgtgagccaccgcgcccggccaagatgctgttcttctataatagtttcctttgagtaggctctagcctggaaag

SEQ ID NO: 36082 - DNA, 122 bp, Homo sapiens
ctcgagtatgcaaataatggaagactgacatggaagtagtctatgttgtaaccatccttgcgacagagcccacctgacttgctgtgtccctggatccgcaatacattctaaatgctggagac

SEQ ID NO: 36083 - DNA, 122 bp, Homo sapiens
gagacgccccgcagagggctacgtgccctgctggacagaggtctcctgcctcctcggcggcgccagcccacctcccacaacccctgcgggagaagcccccaaggggaggagacgggcctggc

SEQ ID NO: 36084 - DNA, 122 bp, Homo sapiens
acaaggccactgcggctgcagccgctgcctccctgttggccaatgggcatgacctggcggcggccatggcggtggacaaaagcaaccctacctcaaagcacaaaagtggtgctgtggccagc

SEQ ID NO: 36085 - DNA, 122 bp, Homo sapiens
ttgccttccccgtccctcatggcgctgctccgacgcccgacggtgagtgtgcccggggaccgctctcagaggcgagtccgtcggccccacagctcccctgtcgcttctctcatctgctccga

SEQ ID NO: 36086 - DNA, 122 bp, Homo sapiens
ccgcccgcctgcggtccctgctgcggctccacactgagaggcttgggctgctgaaagagccgcaggggcactcgggtgaggacggggcacaggacgccctcggtcctgggctggatggtaac

SEQ ID NO: 36087 - DNA, 122 bp, Homo sapiens
ggctaaggaagagacagggagacctggctccagaaccctgctcccagaaataggcaggtccgccaggccgcacagcctggctccacacgctgtctggagggagggagaaggggccgcgacct

SEQ ID NO: 36088 - DNA, 122 bp, Homo sapiens
ttaagcaccatttccgggtgtgtctgtgaaagtatgtttgtgtgcgaatccggggactgacgggggaagatcggctctcattgtgggtgggcatcatccaatcagcagggtgcctagatagg

SEQ ID NO: 36089 - DNA, 122 bp, Homo sapiens
cggacccggtgctggcaaatgagcggagttttcggcctggtctcacaagctgagcctttccggccagctctgagccctgcagatgatgcaaccgagcttcactgcttgcatcaggcaggggt

SEQ ID NO: 36090 - DNA, 122 bp, Homo sapiens
aattctccaagatgtaatttctttccccttatagtatttgaattattttggacaagagaacggaagggttttccggcagatataacattgcgtgcttctaaaggatcttgactgttgctgaa

SEQ ID NO: 36091 - DNA, 122 bp, Homo sapiens
ggggtgcaacctgggcattgagacgtttttaaaagttcccaggtgattcttgtgagcggccgaatttgagctccacggggctagaccactaacaccgcttcagtgggaaaacatgatcggga

SEQ ID NO: 36092 - DNA, 122 bp, Homo sapiens
ttggcggctgcgtcgagtgacaaggtaggcatctcagcgcggacatttgcaatggccggacggcgcaaatgacacggaaagtccccttgttttgagtatgaggtgtttgtcgctgtcccttt

SEQ ID NO: 36093 - DNA, 122 bp, Homo sapiens
cctggccggcccccccaaagggcagggtgtggaatgacccagggcaatgctgggctcctccgatgacgaagccggaagctcaaagggtctctctgaggactgggggccttaccccaagtttc

SEQ ID NO: 36094 - DNA, 122 bp, Homo sapiens
ctctggataaagttaagagttcccacggctgacagcggatgagcccagagaaaggcaccccgccctccgtccctggtggctgccgggctcggggtccgcacagaccgcgctggaaagggata

SEQ ID NO: 36095 - DNA, 122 bp, Homo sapiens
ttgggcaagtcattgcgccatgtggatccagtgtccttatctgtaaaatggggacaataacgaccacctcaccaggttgatatgaagattaaatgagagcaggcatcatatgcattatccaa

SEQ ID NO: 36096 - DNA, 122 bp, Homo sapiens
aggcctgcgtgaggttgatgccgcagacatgttttacggtgtggcaggactgggtgtgggcgttcccgcggctgtgcctgaaccctgcctccgctccctggggcctcgaggcctctcggtgc

SEQ ID NO: 36097 - DNA, 122 bp, Homo sapiens
ggtccgctcccttccccgccctggatggcggcctatgggaaagcagtctccactggatcccgcgcgcgtcgcgccgaggtcgtgggaaaccgagggcgggagggcgggagggcggaggcgcc

SEQ ID NO: 36098 - DNA, 122 bp, Homo sapiens
cttgggcttcaggctgccgctgggcctccagcaccaaagggcaataggggtctgagagtccgggcctcaggcatcttcaggccgcaggtgggtggagaatagcgcccgcgcgtggcagcggc

SEQ ID NO: 36099 - DNA, 122 bp, Homo sapiens
gacatgggtctcgctcctgaacccaagatctgaatattttaattgcctatttcatctccacgtgatgtccaatgggcacttccaactcaatacgtcttaaacagaactcttgatcttcccca

SEQ ID NO: 36100 - DNA, 122 bp, Homo sapiens
ctgcactttcacgttctgccggatgggatttcgggggcagaagactcctcgaatgcagaccggctgtctgtggctggacccccagtgctgcaaaggaatctgatatacctggaggaaccaac

SEQ ID NO: 36101 - DNA, 122 bp, Homo sapiens
agaaaaaaaaaaaagaaagaaagaaaagaaagaaaaaacccttgtgagccgcctaaaaaccgtcctgtgagcatctcatccccacactggcgctgccacccgcacggaccttccaacttcgc

SEQ ID NO: 36102 - DNA, 122 bp, Homo sapiens
tgacctcgtgatccgcccgcctcggcctcccatagtgcttggattacaggcgtgagccaccgcgcccggcctgatcctagctttttgtaggtgactgacctaggtggtacaagatgtcctgt

SEQ ID NO: 36103 - DNA, 122 bp, Homo sapiens
gaaccgaccaaatgcagccactgccacctttgcccaccaagcgttgtctcaggtctgccccgtctgtcccggctccctctggagtcacttggtgcctccacggccacctgctggtttggagc

SEQ ID NO: 36104 - DNA, 122 bp, Homo sapiens
tagatacatagtggaaaccaccgccgggtgtggtggcccacgactgtaaacccagcacttcgggagacccaggtgggcagatagcctgagtgtaggagtttgagaacaacctggcaacatag

SEQ ID NO: 36105 - DNA, 122 bp, Homo sapiens
ctgcctgcgccaatcccgcttaatgaagaaagggaacctgacggcaggcgctgggcagaacggagcctggcctcggcatttttctgaagacagatgggcacggggagccccaagaaagctct

SEQ ID NO: 36106 - DNA, 122 bp, Homo sapiens
gacatctagttgctgggcctggggtcacagccccctttcttgtctgaactggccactgcccggaggagctgcgctgtgcgccttagtgtgccaccacctaaccgccatcgcggctgagccca

SEQ ID NO: 36107 - DNA, 122 bp, Homo sapiens
tagtgtgtggaaaataagcaagtaggagtgaaagcattgattctggcaaattccccaagccgaaatccaagtataggcccatttaaaagtagactggagttgccaaggcagaatttccttct

SEQ ID NO: 36108 - DNA, 122 bp, Homo sapiens
tcccctgctgacaagctgtgtcagttaactgcaacccaccaagagtcagccaacagcccccgcgctgctagagcgcccaaagcagaggccggccgcgaggagggccagagtgcaccgcgggg

SEQ ID NO: 36109 - DNA, 122 bp, Homo sapiens
gaggctggtggtcacagccagagcttgcgcaggccggggagctgccaggagtgccgcagccgtgcccccacctgctgggctcccgggaaaaggagcgcgcgcccctctgagccccttcctgg

SEQ ID NO: 36110 - DNA, 122 bp, Homo sapiens
ccctgtggtccctgcttctgctctggggcctggcgactccatgccaggagctgctagagacggtgggcacgctcgctcggattgacaaggatgaactcggcaaaggtgagccccaggtgggc

SEQ ID NO: 36111 - DNA, 122 bp, Homo sapiens
ccgaactcgccgggacctttttgttatgtgtcttcagcttgtgagcccgaaaaccctgtgcgtctttgctccagcacctaccgatgagctcatattaattaggcatctttccttcccagtat

SEQ ID NO: 36112 - DNA, 122 bp, Homo sapiens
aattggcagtattggccgctgcagcttcttaggggacgggaccatgtgaaaaggtgggatcgtgcgagcggaggaaggacagaaaagcgaggaaagtctatgccgccagcgaccggcaggag

SEQ ID NO: 36113 - DNA, 122 bp, Homo sapiens
tttgagggccccgagtgaggggctgcggcagcgcggggacgcgggatggctgcacatttacggggaacgacggcgggggtgggcacaggcaggtccagagctgccgctgggaggaggggtgt

SEQ ID NO: 36114 - DNA, 122 bp, Homo sapiens
ccaactttttttcttctgataacatctttcactgatcatacaccgtcacacccacagacacggagcttcctccgtgatgtctgcaatgcactaggcccagtcggggagcagtggctgcgcca

SEQ ID NO: 36115 - DNA, 122 bp, Homo sapiens
gtttcgcttctggatttgggtagagaagaagcactttgaagaaaccgccaccataaatcccgtctgcttgcttgggaagaacagttggctggggtccttttaagccatgagcctgagaagct

SEQ ID NO: 36116 - DNA, 122 bp, Homo sapiens
gagagtttgtacctctgttaactaaaaggcagactgtcttccagcccaatggcagtgtggcggatcggccatggtggacacggtcaaggacatctgggtaccagcctgggctcccaacctct

SEQ ID NO: 36117 - DNA, 122 bp, Homo sapiens
agagagccccttttgggaggacggggcgaggcccagcaatccgcgttgggagtggtcccgcgcgccgttctgatctgggcagccctgggctagcggagaccacggcgccttgcctcggccac

SEQ ID NO: 36118 - DNA, 122 bp, Homo sapiens
atttcggaagaaggagactttcgtctccggtaccggatagggcgaaaattcgttgggtcgcgggtggagaatccggggtccgcccgcgcggtgccgccctgtgctcagcgaaaggtgcgctc

SEQ ID NO: 36119 - DNA, 122 bp, Homo sapiens
tcagtgggacgagggtgtcactgcctccagccctgtcagtgaagagagctgcgtaatgtgcgtgcagataataccctatgtgtgaacacatacttcagattatctctggatctgtccatcct

SEQ ID NO: 36120 - DNA, 122 bp, Homo sapiens
aaaagcacttgtactacggcggcttttcatccacccaacacctcctgcccctgggtttaacggatgctccgcaggtgagcccctagtaggtggtaggaactgctaggctctagtgatttaaa

SEQ ID NO: 36121 - DNA, 122 bp, Homo sapiens
aggggcacccagctccagaggctaggtgggcgtcgctggtgggtggactcctgggcgctgcgcggagccgcgccggctgggttagcgcgggcggggcgcttagtcccacccccagaggaggc

SEQ ID NO: 36122 - DNA, 122 bp, Homo sapiens
tgcaaagaggctggctgtgctcagggcagccagtacctgggcactctgcttggtgcagagcgggcctttggatgagtgattaccacaccatctggatgtcttccgggagggactatcacatc

SEQ ID NO: 36123 - DNA, 122 bp, Homo sapiens
ggaaaggaccatgaggagacactccctcaccccgagctgagcccacgccctcagcttctgcgggaaaatcattttcgagttctgcatgtgtccaggtggccacagctcagggctcggagagg

SEQ ID NO: 36124 - DNA, 122 bp, Homo sapiens
tcttagccgcaggctttgatgctgtcattttctccaaatgcttcttgagcacctactaagcgcttgcgccgggcggtgccgcgggagacagcgccgtgggcacctcacttgcggcagataac

SEQ ID NO: 36125 - DNA, 122 bp, Homo sapiens
attcgcgcacctgatgtctgcttaagctacctgctagactgagactttctgcgaagccggcgtgtctgcgagcagcactcgctaaggctctgcgtttaacagacactacctttgggaaggcg

SEQ ID NO: 36126 - DNA, 122 bp, Homo sapiens
accggggcgtggccaggtgggggcgtggccagtgggagcggcaggtggggcggggctcgtcggtcggggcggagccaggtgaaggcggggccagttaggggcgtggctagtgtgcgcggcca

SEQ ID NO: 36127 - DNA, 122 bp, Homo sapiens
gagatgctctcagactttttctctggtctgaaccccctcagaaagacagggtgcgttcaacgacaaggataactctgaccctcagagtttaagtggttactgggaatcactgatctgttgca

SEQ ID NO: 36128 - DNA, 122 bp, Homo sapiens
ggtccccccatccctggctgtggtccccagcccgcatcactgctaaggacaagggtctctcggtccctggctgtgggccctggcctgcatcactgctgagaacacaggcaaccctggcctcc

SEQ ID NO: 36129 - DNA, 122 bp, Homo sapiens
acattttttacacacgtagcctaggcacagggagccacgcttgcgttagggaatgggccacgcttctgcaatcgtgtccccagatgccgccaagggctggccttccaggcaggcctttccaa

SEQ ID NO: 36130 - DNA, 122 bp, Homo sapiens
aaaaaaaaaaaaaagtcaagttccgtaaagcacttacaacagtgtccggcactcagtaagcgcttcagaagtactgtcataaatatcaaaggactggaatgaaaattataaaaattatggta

SEQ ID NO: 36131 - DNA, 122 bp, Homo sapiens
aagcagtaatgctaagtttgcggcaggaaaaggaatagtcttgaagaggggaggggcttccgaggctactcaccacagcggctgggtgtgtccatatctgtccaggagccgttggccaggca

SEQ ID NO: 36132 - DNA, 122 bp, Homo sapiens
aaggcaggtttctaaggtgtcttcctacagacaccgctgctgctaccttgctaccttcagcgctgggcacagccaggggcagcgcgagagggaggcaacgagagggttcccgggccgggcag

SEQ ID NO: 36133 - DNA, 122 bp, Homo sapiens
gttaccaagtcactgcacaacaaccacaaatggagagtggaggagcatcactttccaccccgggatcatgacgagggctctgtaacttcaacaaatgcgcagaagacgcctggcctcgagct

SEQ ID NO: 36134 - DNA, 122 bp, Homo sapiens
aggccagacatggcggcctcggcacacccggggcagcagagacacagcggcaggggctatcgggaaggccgaagggatgcctcccccaagaacagaccccaccattctcctcccgtcctcca

SEQ ID NO: 36135 - DNA, 122 bp, Homo sapiens
aaaagagaaagagaagaaagtttgttgggcaggctgccggcgcgcagttttgggcgaggtcgctagagctgcagcacatggcagaaagtaaccgttctcccggatgcgcacagtcgttgtct

SEQ ID NO: 36136 - DNA, 122 bp, Homo sapiens
gttctataaacttcaatcatctgacctttcccttgtctcatgttttgtggaactcctttgcggctaccggtaattaaagtggtttttctcctgttaatctgtcttctgtcagttcatgtctt

SEQ ID NO: 36137 - DNA, 122 bp, Homo sapiens
agaggatgagctggctagagagacgcgagtcgggcccgcctgcgagacagtcgcatagagcgtcagcgactctggaggacctgagggaagggtggttgccgtgaagcctctctcacccaggg

SEQ ID NO: 36138 - DNA, 122 bp, Homo sapiens
gggcacactcactctcggaagaggcgtgttgactgtgccaaagctggtggggcggggagccgcttcttccaggagagagagaggggtgattttctgatgactcacttttttcccactcttgg

SEQ ID NO: 36139 - DNA, 122 bp, Homo sapiens
gaagccgtggtagtgaattcaacccacagatgaggctgattaaaaggcctgctgagcagccgccatggtccaggcaagtgagagagtagctagagtgagcatggaggatcttatccttatgg

SEQ ID NO: 36140 - DNA, 122 bp, Homo sapiens
tagtttcggcgtcaggcgttttgaaaggctttgcaggtcctgttttctgcgtaatttttccgtgattactgactggtttaaacacgaccccttgaacaatattgataaaacctccgagaccc

SEQ ID NO: 36141 - DNA, 122 bp, Homo sapiens
ttgtaagaaagtctactttgtacattcatgagaagctgaaatagattattgtgtaataaccgaatggaacatctgtttaaccagatgttttagttgagagaagtgtaaacatgattctaaat

SEQ ID NO: 36142 - DNA, 122 bp, Homo sapiens
tttgatttgcgtttccctaaagattagtgatgttgaacatcttcccaagtgcttattggccgcttgtttattttctttggagaaatgcctattcaagtcctttgcccatttttgaatcagga

SEQ ID NO: 36143 - DNA, 122 bp, Homo sapiens
aatggcgtccgggctggtaagattgctgcagcagggacatcgctgcctcctggctccagtcgcccccaagctggtccctccggttcggggagtgaagaagggattccgcgccgccttccgct

SEQ ID NO: 36144 - DNA, 122 bp, Homo sapiens
aggaacaaggaaatgatgtcttctggttatgaattaagttgacataacagtgctacacctcgtccaatccagtgttccttgggttggtcagagggaagagtcatggcaatcacaaaattcgt

SEQ ID NO: 36145 - DNA, 122 bp, Homo sapiens
gctctttacctagctggggcaagtgatggcttggaggtggggccgccagtgactcaccctcgagaccaacgcagaggcccaagatgacagcaggacatgccgaaccctaacggaagtgatcc

SEQ ID NO: 36146 - DNA, 122 bp, Homo sapiens
ccctgactgccccttcctctggctctcacctgtatttgctgtgaagattaaccacaaacacgatcaggtcaattcggggccgattcacactggagggcaaagggagggactttgccaagtgg

SEQ ID NO: 36147 - DNA, 122 bp, Homo sapiens
agatttcatagcagagtatgttgattaatttcactttggagaatgcattcatggagcccacgctcaaaataacacctccaactatgtgcagagattttgaagtttagcatttccctaaacat

SEQ ID NO: 36148 - DNA, 122 bp, Homo sapiens
tcctgccatggtgctggctccagccatgtgacctcagttcacttctttttgacttgacagcgctctcatatatatatttacataatatataaagtgtgtttatatatgtatatattttaaat

SEQ ID NO: 36149 - DNA, 122 bp, Homo sapiens
cctgggcccgggctacgggctggggaggagggaggatgaggcgtgcagacactgaaagggcggctgcagagacttttttgtccagaagtaacccagagcgagcaagtccctgtgggtgagga

SEQ ID NO: 36150 - DNA, 122 bp, Homo sapiens
aactcagcagtcttgacaagcgcgttatcaagtgcaggggagcggaggctgcccggggagcgcgggcgggggagggcggcgggggcgccgcggcgcgggagggaggcgggaggcgggaggcg

SEQ ID NO: 36151 - DNA, 122 bp, Homo sapiens
gggctgattgagcggggccactttttcgcccgcgtaaagtgtcctccagcagcacatgctcggcctcctggaaaggaaagggaagcggcctggcttccatctgctcctgggcacccaggtga

SEQ ID NO: 36152 - DNA, 122 bp, Homo sapiens
ttcacagactcttgggatttctgagtttgaaaaagaaaactgagaactggaacagggacacgcagaaaggagcaggtgggagggagatggcactgaatttccctttatgtcttttacatgtt

SEQ ID NO: 36153 - DNA, 122 bp, Homo sapiens
tgcccacagctcataatccactttagatgctccccattgcctgccatctcccttcatgggcgtctgcagtgaagattgattctcactatggtggccagttttttgccttgctcctggccaga

SEQ ID NO: 36154 - DNA, 122 bp, Homo sapiens
aatatttgccttactctcagaaccagtgagaataaacattctaaataagacaagcttccacgcctctagctggctgttgcacagtggactgaatctcttaataattgtatttccctctttgc

SEQ ID NO: 36155 - DNA, 122 bp, Homo sapiens
ctcaggggcagcagccctcagcctcattccccacctgggccagatcctggtgggtgggagcgtgatgaggtgggggccttgccttgggcagttcgggggttgctggggagaatgtgaacgtg

SEQ ID NO: 36156 - DNA, 122 bp, Homo sapiens
tatggcacaaaaataacaggaatgaggcagcagccatggactctgctcacaactcacaaccgtcacccttagctctccacacgcaacaggtttcttcctagtaagggtggagcaaaagattc

SEQ ID NO: 36157 - DNA, 122 bp, Homo sapiens
gtttctgtctcaggcatgaattgcttttaataaagtgtccgtggggggccgtgtgccccccgggatctctgtgtcttccagcagccgactgaggcacatcatggccgagatgatcgccacag

SEQ ID NO: 36158 - DNA, 122 bp, Homo sapiens
ccaccaagatttgctcacaaccccgccccctcccttccagctttagtcgcttggcgatgacgtaagacacggagtctggtttagatcgggctttgaggccccaccctctctatgtgaatgac

SEQ ID NO: 36159 - DNA, 122 bp, Homo sapiens
ggcctcaagtgatcctcccactagcattacaggctagcattacagactagcattacaggccgagccactgcacccagtcagcaaagtgttgttgtacttaaaggtggtgggggatatctggt

SEQ ID NO: 36160 - DNA, 122 bp, Homo sapiens
ggagcacctcatgccccgcaggtgattcatgtaatagcattttcaaaagcctataatttgcgccagcgtttgcgcttcatggtgaagctcagcctcatccgtgccgcaggcaaaggcaatgc

SEQ ID NO: 36161 - DNA, 122 bp, Homo sapiens
tatattgctcaatgtttcttccacataagcagctccatgttccataaacagtggggaagccgtctccaaagggctttagttagtcttttgattttcagagggccagtgttttagtggtttaa

SEQ ID NO: 36162 - DNA, 122 bp, Homo sapiens
gtttgcctcaggacgcttcatcttctcatccctcgtcctcaacattaaaaacagctcacgcgttccagccactgcggggcacgttagcatgagaagcaggtgagcccctcgcgtgcccgtct

SEQ ID NO: 36163 - DNA, 122 bp, Homo sapiens
agggcaggtctgtgtgggtcacggtgcacgtgaacctctccccggaattccagtcatcctcgcagatgctggcctcacccacggcgctgaaagtggcattggggtggctctcggagatgttg

SEQ ID NO: 36164 - DNA, 122 bp, Homo sapiens
cattcaaggtggatatctgctttaactcttcagtgtccatctgcacagctgctttgaatgcggacatttccccaaatttgtagtatttatttaaaatcagaattacatgttcaaatgtataa

SEQ ID NO: 36165 - DNA, 122 bp, Homo sapiens
gcgggggatcggctgtccccagcggggcctcggaggcgtccgggccgaggcggctggtcacgccctgcttgagcttcttccagcccaggtggtagatctccagcatgttgagcagcagggac

SEQ ID NO: 36166 - DNA, 122 bp, Homo sapiens
cccccaagaggctgccggtccccggttccctgggcttctccagctttatcatgaacctggcgcaaggttggctttaggaaaaattctggagccagagggagagtcaaggcaattctttggtt

SEQ ID NO: 36167 - DNA, 122 bp, Homo sapiens
atatgtactgaaacagtgatagccaaggaaaaatgaatgatgcatgcctttggcctcttgcgagtgatagtgtagacagtataaactatagataatgtttaaggtatgggtcagtggcaagt

SEQ ID NO: 36168 - DNA, 122 bp, Homo sapiens
aggtgaggggagaccaaggggtcccccctgtgggagcttcgtgtgccaggctgcgggcaacgggctggggagggctgtggtggggaccgcaccagctgtagccggttccaggctcccccctc

SEQ ID NO: 36169 - DNA, 122 bp, Homo sapiens
ctgctgtaacaaataggcccttttggggcacgtccttcagatgccagtgcccacggggcccgtgtcatgtcagtgctgttcacgtgcagaccatgacctgttcatgggttgggaggtcagca

SEQ ID NO: 36170 - DNA, 122 bp, Homo sapiens
attttatatggtgttagagttgttggttgaaggacttaaagcatgaaaaatagtgtgacgcggaaatccattagcctgaagcctgtgaaataatggaagctctaaagttcaacaccgtttgt

SEQ ID NO: 36171 - DNA, 122 bp, Homo sapiens
atataacataaaactaaccattttaaagaatgaaatccagtggcgtttagttatttaccacgttgtccaaccatcacctctgtggagttctgaaacattgtcacccccaaaggggcttgtgg

SEQ ID NO: 36172 - DNA, 122 bp, Homo sapiens
cggggacaccggaagccagtgcagaaacgtttaatagaaataaaaaggtctgcatagagccgaggctcggagccacccctctgccgcacatccagtacagagaggattctataaagttcaca

SEQ ID NO: 36173 - DNA, 122 bp, Homo sapiens
ctatgggaattctgaagtctgggcacataaggttcagctgcagttgcagttttcaacagtcgtccttatttttataaacattgttatgattattcagacacggaacttgtgattacactatt

SEQ ID NO: 36174 - DNA, 122 bp, Homo sapiens
gatcatgagtggaccgggaggagtgggcgtggtcggagtctgagtccaaggtttctcgtgcggcaactgccagagctgcttggagagctaagctggaagggtgcttatccctgcgtagaaac

SEQ ID NO: 36175 - DNA, 122 bp, Homo sapiens
actcaagctggctttactttacttactaacctggattcctgctgtatagactcagaaacccgggagagtttaggagaccgccgaggcgagcactttctctaacaatcgcgtgctgcagtcag

SEQ ID NO: 36176 - DNA, 122 bp, Homo sapiens
gatctaactatagcaggctgaacagtttcatagtctgcatggaggcaatttgtaaaccaccgagcactcgcccctgttagcttcaggagggccagcagagggcgcccaaggcaagcttcctc

SEQ ID NO: 36177 - DNA, 122 bp, Homo sapiens
agtgagctcaagcggccagcacagccctgcagggccaggctacccccggccctccactggcgactcagggctgctggcccttccgtggcaggacccactcggcagcagttcacagtgagcag

SEQ ID NO: 36178 - DNA, 122 bp, Homo sapiens
tggaattcctcagtagaatgcagacggctggaggtcacagaggcctctgtgatatcaccacgagggggagtgagaccacttggagtgaagattctttgaggagaaggaagagactgagcaaa

SEQ ID NO: 36179 - DNA, 122 bp, Homo sapiens
tccagggcagccgtcacccgccttctgggtgtgttgcacggcccacccctcagcccgtctcggtccttcccagtgccgtgcctttagccacctttgtgctttctgcttgcacccacacgggg

SEQ ID NO: 36180 - DNA, 122 bp, Homo sapiens
ttacgtgagaggtggaaaatggagttgagtttctgaggtggggcgaggctgtcggagctgcgagtgagtggcagaggctgctggtcacactgctgctgtcctctgcaggtacgtgctctact

SEQ ID NO: 36181 - DNA, 122 bp, Homo sapiens
agcgtgtctataaaatccagtgaacaccacagcggttttctctttccagcacccctctctcgcgcgagagagagagctgttctcctttccgtttcttttgcctattaaccttccactcctaa

SEQ ID NO: 36182 - DNA, 122 bp, Homo sapiens
aatatacccccacttgtttgtccattaagtattcttgaaaactaacattttagccatgtgcgtcagtgctcagtttagccccttgatcttttaagtgtttgtctttattaggtttgtcttct

SEQ ID NO: 36183 - DNA, 122 bp, Homo sapiens
atttgaagatggtttgaccaagtctcccaaagctgaagagaggtccctgcccatgtcccccgggtggcaatccacagacgcacctgtgtccatcagacggtatcgttgatagggagtctgaa

SEQ ID NO: 36184 - DNA, 122 bp, Homo sapiens
ggggctgctactggtgggtagggccaggggcgtgtacatgggcagcagtggggccagggccgagcttgggcgcctcatttcacagagggaaacaaggggaggtgagagacgctgccgcagag

SEQ ID NO: 36185 - DNA, 122 bp, Homo sapiens
cttgtcctccgtagcaggtctcagaggctgacgatggggaaatcgcactggtgaagctgccgtggggtcaggaggaacctgcgataagacgcccaacagttagggcaggtgctttgaggttt

SEQ ID NO: 36186 - DNA, 122 bp, Homo sapiens
acacaaaatcccagagcaccttcacccaggagtggtgctgcggcaggtggtcgtagtactcgggcgcgatcttccgcacctgtagagaggagggcggggctcaggggctggttctcctcggg

SEQ ID NO: 36187 - DNA, 122 bp, Homo sapiens
gttgtgggcttccaggtggcctggcctcagccttcggtcccctcctattagtggttcacacggaggaagaagtgagcccgagagaacagggtctgtttttcagtaagaaccactgcttacat

SEQ ID NO: 36188 - DNA, 122 bp, Homo sapiens
actggcagcaaattgtcatcttctgtatctccctctcaaagcaactcagccttctgaagacgtgtagaagttaggtctcgcaggcttgtatttattaagcccccccccgccacccatcagtc

SEQ ID NO: 36189 - DNA, 122 bp, Homo sapiens
tactccctgtcactctggatcttggccacgtgcatggaccacatcatcttggggtcatcacgtatagctcgggcaccaatgtggtggccgagctgcttacgatagccttctttgtacttgaa

SEQ ID NO: 36190 - DNA, 122 bp, Homo sapiens
ccacaacccacgtgggttcccctggcccgggctaggcggctctgacagtgctacccccaccgggctggcccccccgtcagccgtcaccacaggaagtgagagatgaagacgggaggggaggg

SEQ ID NO: 36191 - DNA, 122 bp, Homo sapiens
gatgaggggcttcctgggtcctgttccctaccccatttgtggtcacagccatgaagtcaccgggatgaacctatccttccagtggctcgctccctgtagctctgcctccctctccatatctc

SEQ ID NO: 36192 - DNA, 122 bp, Homo sapiens
gggtgtatagttttctcataagccagggcagggccccatgcctgccctggagagtagggtcggtcccaccataataacagagactgtaaggagaagagaggatcgtttctcaagggaaaatc

SEQ ID NO: 36193 - DNA, 122 bp, Homo sapiens
aaacatgaagggggactatcttaagctcacaaagttgaaacatgaggcatcatttttcaccgactaaatagccaaagaaaaatttaaacagtgagacaataccagcaagcttccactgaaga

SEQ ID NO: 36194 - DNA, 122 bp, Homo sapiens
catctcccgcacagacttaccttgacctgcgactcggtcatgcccagtgagtatgccagccgtgccctctcggggccagccaagtacttggtctgctcaaaggttttctccagggcaaagat

SEQ ID NO: 36195 - DNA, 122 bp, Homo sapiens
ctcgaacaggtcgcaaatgccggagtctcccgggagcgggcacgggttcaggggatgcagcggctgcttcctccggaggcgcggacgcctgctcttcttcaccggggcgcgaaggttctggt

SEQ ID NO: 36196 - DNA, 122 bp, Homo sapiens
tttgcttcgttcgtctttggctctttttttttccttcccaatttcggatttatttcaaggcgaatctggctttgggggaagaggaagaaaagtcggattacaagatcaaccaccaccaacaa

SEQ ID NO: 36197 - DNA, 122 bp, Homo sapiens
aaccgcagcgacgtctctctgccttggggctcacagcagcgggccgcgacctcccactaacgcctgccgcaacccaaggaggagacaaaagtcatcttccgggctgcaacattaaccgtcat

SEQ ID NO: 36198 - DNA, 122 bp, Homo sapiens
atgattccccgatttgctctggggtcccagggtggggtgggcaactcaagtggggcaatgcgagaggaggctctacgcgtggggaagtttcctggcagcctgaagtgtacacctgacgcctg

SEQ ID NO: 36199 - DNA, 122 bp, Homo sapiens
tgctctggctctgctcgctcctgggatgcgagggctttatgaaggagtgggctagactggcgatgcccgggtgcccctggcaacaccccctggcatagcctgagggggtggggttgggccgc

SEQ ID NO: 36200 - DNA, 122 bp, Homo sapiens
aatatgctgaccatagggccacagctctgacaagttgctcatgaaattactacagaatagcgtaatccgtattgaagacagcatagaagagggatagtaaaatataatgataggaatgaggt

SEQ ID NO: 36201 - DNA, 122 bp, Homo sapiens
cctggacggctgcggcgtagggtggcaggcacaatctccaggggcagatgaaggtaatcacggagatactggatatcctcattggtaaggtaccagtagacatgtctccaggcaaactgttc

SEQ ID NO: 36202 - DNA, 122 bp, Homo sapiens
ctcagtgcccggggtgtgccgcctccccgtcctgcgccccatcctctcccagcaggtgggcgtgcactgctgcagcaggaggggaaggaagactcctgagtccctggcccggctgtcctctc

SEQ ID NO: 36203 - DNA, 122 bp, Homo sapiens
cagtggatacgcctgcagccaagaagataaaccaggggcacaggcccccagcgcagccaccgccacttactgcagccagggaggctccccaggagaagagcaggatgtgaaggacagagaag

SEQ ID NO: 36204 - DNA, 122 bp, Homo sapiens
ttcacgagtaacctgacgcaggcggaaccgacgaagactagccggcaagaatcctacagtcgcagccatctgcgcagcgtccgccggggacgctccgcgcggaagaccgcctgtgactcgac

SEQ ID NO: 36205 - DNA, 122 bp, Homo sapiens
tttgctcttgcccagtctgcttttgctttgactgaaccacatccacctcttagtagccatcgctttgattgtgcattgtctttagaattgtactggtaaagccatgtttcctcttctgttac

SEQ ID NO: 36206 - DNA, 122 bp, Homo sapiens
cgctgctagatttatcacttgaggaggtgggaggagaagggggttactgcaaatagaaaacgcacctctggaagcccttatttatgagctgctcaggaaccgaccccaagacatagccacgc

SEQ ID NO: 36207 - DNA, 122 bp, Homo sapiens
tcaggaggtggctggtggaaggagaactctggaagatggagacatatactgagattagctcgagggagcttgcttgacagggtcactgaggtaccctctggagccctgaggttccccaagca

SEQ ID NO: 36208 - DNA, 122 bp, Homo sapiens
agtccgaaactcgcacagcaacctcgggaggataaactccagcaaccagaatcgggttggcgtcgcctagcaaccaggagccaaatgcgcggacgccaggcattggcctgcacgtgtcacgt

SEQ ID NO: 36209 - DNA, 122 bp, Homo sapiens
ccatgaagatgttgaaaacagacaatgttggtgaaatccctgttgagagcagggacagaccgtttcctaaatgctacactcccctccccagaaatgttccgagacggggccacagcagggaa

SEQ ID NO: 36210 - DNA, 122 bp, Homo sapiens
ctctcgttgccaaaatactctgtggtgtattggagagccagccaccgccgacccgcccctcgcccttgggcatatgctactacttaatattgccttgcgtttctgaaaggatctgaaatgta

SEQ ID NO: 36211 - DNA, 122 bp, Homo sapiens
agcatctgcacagaaccatggcctcggctgaaatgctgcagacacatgcaaaagcggggacgtgggacaaatgccagggtcctgcgcccagactaacacctgctgcgtttcccatggagtgc

SEQ ID NO: 36212 - DNA, 122 bp, Homo sapiens
tgtgctcttgaagagctcacagcaggttgagaaatggacccataagtcactgcagtctgacgtggtgactgttacaatggaagtgtgtgaaaagtcctctgggcccccagagaaggagtggg

SEQ ID NO: 36213 - DNA, 122 bp, Homo sapiens
gaccttcgaggtgactgttacagctattaaggtggcgcgtctggagttattcgctcctcccggtcggttcgtggtttcgctggcttcaggagggaagctgcagaccttcgcggtgagcgtta

SEQ ID NO: 36214 - DNA, 122 bp, Homo sapiens
aattccatcagtgacacagattattcttgagattttaaccttcattagctgtgagtttagcggctcacattggtgctaactacactgtcaggaaacttccttgtttgtgccatgggtttcat

SEQ ID NO: 36215 - DNA, 122 bp, Homo sapiens
tgtgccacagtcacagtcctttgagcggtcggtgcagctcctcgaccagatcccatcatacgacacccacaagatcgccgtcctgtatgttggagaaggccaggtgaggctgcggggccggc

SEQ ID NO: 36216 - DNA, 122 bp, Homo sapiens
acggccagtggccatagggtgggactaaatccgtgtgagaaagatgggtcctgggctagtcgtctgagacagcccccgagtcaccaggagggcatatcctagggcagcgggcctgaagggag

SEQ ID NO: 36217 - DNA, 122 bp, Homo sapiens
aggctgcacttgtgttatcgggtattgtgttggcacaggtgggactccagtaggtaatgccggcaagactccaggtgctaatgaaacagctggtggcactatgcttggtactccgtagggag

SEQ ID NO: 36218 - DNA, 122 bp, Homo sapiens
aggaaacatacaacttctcaagatgcagcaaaatttacaaaatcatttttcaaagtatctcgatataaacaactctcagttccaatttcaactggcttgtctttaaaatatgatacttgatg

SEQ ID NO: 36219 - DNA, 122 bp, Homo sapiens
ctagctagtttgatattgagtccctcattgtagtgaagcttccttttcatttgaaattgtcgccttttttctcgttcttcaggtgagaggtcactagcctcctctccactgctttcttgttc

SEQ ID NO: 36220 - DNA, 122 bp, Homo sapiens
gcccagcagctctctcctgccctgggagaatttaatctgaagcagttccaagcaactaaacgaaaggttggctcctccccttcccctccagtgcaggtctcgggtcactcaggtgccagaaa

SEQ ID NO: 36221 - DNA, 122 bp, Homo sapiens
ctatcattactgaaagctagaatcttcaactgctgttgttgaattgtctatttctcccttcgattctgttggttattacttcatatgttttgggactgtgtttttaggtgaacatatgtttt

SEQ ID NO: 36222 - DNA, 122 bp, Homo sapiens
ccatcaccgcttctggaagtgagtgaaggacacctttcgtgccccgcaccctttgccccccgcttaacatttgctctagtcacttccggcccgttcccacgctccggaaaccattattccgc

SEQ ID NO: 36223 - DNA, 122 bp, Homo sapiens
cctccttcaggctccacccagtgccgggcatttgattctgctgcttcgtgcacaccagaccggcactgggcaccgggccgtcatctgcttctgttaataaagttttattgacactctgcccc

SEQ ID NO: 36224 - DNA, 122 bp, Homo sapiens
ggcagcagccaacctcctctaagtgggctgaagcaggtgaagaaagtggcagaagccacgcggtggcaaaaaggagtcacacactccacctggagacgccttgaagtaactgcacgaaattt

SEQ ID NO: 36225 - DNA, 122 bp, Homo sapiens
gggatcccggggcgagccaagcgagcctgtgcttcccagcagccatcgcgccgttaagggcgctggcagccacgcttccagggctaccgccttcctgaaactgggggctgtctctctgcagc

SEQ ID NO: 36226 - DNA, 122 bp, Homo sapiens
tacaggaatgacagtaaatactccaagggtctcataagccaagcttggtttagccttagccgcttgcgtgttgaaacctcttccctctatgttcgccggaccaggatcattttagggcctcc

SEQ ID NO: 36227 - DNA, 122 bp, Homo sapiens
gccgccatgaagatcctctgccgcggctgcagccggtctgcaaacacacgcccacccgcacgcttagcctcgctcgccacagagggaggggtggaaaaggcactgagcatgctcggtgggga

SEQ ID NO: 36228 - DNA, 122 bp, Homo sapiens
tgaaattaacttatttttcaatcagcccagggctgcccctgggggtgactcttcttttgccgcctcctgaatagagctggagcaatttttcattaaaagctgatacctctgccgcgggggag

SEQ ID NO: 36229 - DNA, 122 bp, Homo sapiens
ctccctcctggtcactccttatagccttgctcggtccagggcagggtgggttcggtctctcggtgagaacaagaggaacacatttagctctgcattatgtatttaggttgagagaaacaatt

SEQ ID NO: 36230 - DNA, 122 bp, Homo sapiens
aagtggagatagtgtgatctgaggcaatccgcctgaaaactggttctttcctctaaatctcgcagaggttccagaggacagggtggggcagagagctggtcaggagggggaactgaggtcaa

SEQ ID NO: 36231 - DNA, 122 bp, Homo sapiens
ccatataaagccgcattcacaggttccagggatgaggacagggacatcttttcagggggccgtgatccagcccaccccagcccctgtgtgactgtattgaccatgtgtccgtgaagccatcg

SEQ ID NO: 36232 - DNA, 122 bp, Homo sapiens
atccacccgcctcggcctcccaaagtgctgggattacaggcgtgagccacggcgcccagccggtatccacattttaaataagctccctggtgatgctgcccatgcacagaccacagataatc

SEQ ID NO: 36233 - DNA, 122 bp, Homo sapiens
tgcggcctgtaaattctggccgcggcttttcgtggcgtcctgctccgcggtgagcacagacgacaagttctcagcaaaatggctgctggaaagagtcgccaagcagggggagtgctggggcc

SEQ ID NO: 36234 - DNA, 122 bp, Homo sapiens
tgagccctattgtcttttcgaaagtcactagaaatgtcgaggagaatctagagttcccaccgcctctcaagctgaaatttatctactgaaagaggttagaaaagaagaatgcagtatgcaca

SEQ ID NO: 36235 - DNA, 122 bp, Homo sapiens
agggccgagggcctcggcggcctggagcgcttctgcagcccgggcaaaggccgggggctgcgggctctgcagcccttccaggtgggggacttgctgttctcctgcccggcctatgcctacgt

SEQ ID NO: 36236 - DNA, 122 bp, Homo sapiens
ccttggaactggatagaaaagaaaattcttgggccccatctgagacctgctgaatctctgcgggggcaagctaggcctcttcatttaacaagccttccaggtgatttttatgcaggctgaaa

SEQ ID NO: 36237 - DNA, 122 bp, Homo sapiens
gtagatgacatcaggattcaggactctgaacacaaacacagtgacactgatcagggttgccgaggtgctgtgtttcggtccagaaagtcactgctgcaggggaggggagtatggtcacagcc

SEQ ID NO: 36238 - DNA, 122 bp, Homo sapiens
ctcttcagctttgggacttggccctggcgaaaacaagcgaactatccctcgggagattagcgcgttactccggcgagttgccaggcaacttccggccagggttctcaggggggttgcgcaga

SEQ ID NO: 36239 - DNA, 122 bp, Homo sapiens
agaggctggtcaggccgccaggcctagcggatcatgcccaggcagggggttggacgtcaccgccacccggaggtcatccatccgcgtcagtgggtgcagaaaaagtggccctgtttaagtca

SEQ ID NO: 36240 - DNA, 122 bp, Homo sapiens
acttgccagggtgctggcacacagtaagcgctcaataagtgctggctactgtgagaataacgtgaagggaactggatggggtgctgggccttgctttccccagttgcccatactctggccct

SEQ ID NO: 36241 - DNA, 122 bp, Homo sapiens
atgcggttctcatgttacacgtgttcttcaccttcaggctttcctgtccttgtcaatttccgtttaggtgttttatcattagggcctgactccgcgtttcagcaatgaaagatgagcagaca

SEQ ID NO: 36242 - DNA, 122 bp, Homo sapiens
ccttgaaggagggctgactggcctataaagcccatcacatgtatctcctggagcactggacgtgtctcaacctccccaagcacttaacacttaacaaattactcctgatcaccaatacctag

SEQ ID NO: 36243 - DNA, 122 bp, Homo sapiens
ctacagacaagctcctctccaaacatgccctcttcctcctgcacgccactctgagagatgcgtggttactgtctgagccttccaagtcttctactaatagtgatggcatcatccaccattta

SEQ ID NO: 36244 - DNA, 122 bp, Homo sapiens
aatgtttaccttaaatataaataatttgctgcatataacaacttttcagagtgtctgtcacgaagtatgggctcaataaacacgactgtcatcatcgtattccactttcaagaatccataat

SEQ ID NO: 36245 - DNA, 122 bp, Homo sapiens
cgattcttttctgcagacttctgtggtgccctgtcaggcagagcagtggggagttgggagcggggcccttacaggagatgggccatttcacacagacaggcaggtcagcctctgccgctgca

SEQ ID NO: 36246 - DNA, 122 bp, Homo sapiens
ttttcctctaccagacctgttgtttctccttttaggtggctcactgaactttgtatccctcgtgttatttaatcataatcggtttatttaaacatagcatgtgtgtacttaaccttatcatt

SEQ ID NO: 36247 - DNA, 122 bp, Homo sapiens
gcttgtccctgccgggagatccttttttgagtggagtgcagatctccgaactggtaaacccgggtttttctgaataatccagagaggtgtgttggggccagagacttatttttggagttaac

SEQ ID NO: 36248 - DNA, 122 bp, Homo sapiens
ccaggctctcccactcacatgtaaggggcttggcggctaagaaatccagctggaagcgagcgagcatgatttgattcacccgctcttcagagtccaatcccttttgtcattcactccactgg

SEQ ID NO: 36249 - DNA, 122 bp, Homo sapiens
ctagagtcagagccttcctgggcagagtgggttacaaaagtggccaagtgggcatgttttcgacatgccctcttagtgggtgtgagttccagtttcaaggcaacctctggaggtgagagttc

SEQ ID NO: 36250 - DNA, 122 bp, Homo sapiens
ccctgccccagggcttggagtccctcttggatgtgtgctcctccagtgtgagaagcaccacgtctgggtctgagctcaggccagttgatggggagcctcaagcatctccatgaggaaggtgt

SEQ ID NO: 36251 - DNA, 122 bp, Homo sapiens
ccacatttagaaacaaagtaccgctcccttactttaagattcgaaagcgctacatggtttcggggcccaagcaagtagtctttaacacacagacgttgcaaataaatgcgcccgccccgagc

SEQ ID NO: 36252 - DNA, 122 bp, Homo sapiens
aagcccagaagtgcagacccaggtggacaggccctgggccaccaccctgggagtacgggccggtcagcaggaaggaacatgtttatggtctctgcgctgttggtgccagtcacgccatggtg

SEQ ID NO: 36253 - DNA, 122 bp, Homo sapiens
cccggccctgggactcggcctggagagcctattgacaccgtgccatgggtgcgggcagggcgccctccctggagggcggcacgtggtgccagttggtgaccatgagctgcctcactcctgag

SEQ ID NO: 36254 - DNA, 122 bp, Homo sapiens
atgtcagctgactgcacgttcatagaatcgtagagttaatggaagcttgagcttagaaatcgtgcagagcttgctaaacagtgtgtgatctgcagaccagcagcattggcaccccccaggag

SEQ ID NO: 36255 - DNA, 122 bp, Homo sapiens
cctaaggggccccacccccaggaacgctaagataggcggccaggggtgagcgggcagggccggccagcaggccctgaaagcagccgggccaccagcgcgtcccgagtccccctcgcaccgcc

SEQ ID NO: 36256 - DNA, 122 bp, Homo sapiens
cagcaactagcccgagccccgcgcccagttccgggaatggagccagcacagcagccagcccgacccagcccatccagctgagcgacctccagagcatcctggccacgatgaacgtaccagcc

SEQ ID NO: 36257 - DNA, 122 bp, Homo sapiens
ggggcaggggcaggggcaggggccggaggtgtgcggatggagaaggagagggacctgcggcgggggcagaggagatggaaaaggtctgaccatactaccctgagactaggggcaggccgaag

SEQ ID NO: 36258 - DNA, 122 bp, Homo sapiens
taacttttgaagagaccaaggttagtttttacaaagcaacaataagagtccaagaactaacggtcccaaatcaaatgagctgcctgatattagtgcagatccctaggccccagtcccaaggt

SEQ ID NO: 36259 - DNA, 122 bp, Homo sapiens
tagcgctccttttttaccttccttccccgtcagcggctccagagggtcagcacctccgagcgtgacagcggacctgcttcccgccccccacgcgagggcccgcccaccagcccgcgtcagcc

SEQ ID NO: 36260 - DNA, 122 bp, Homo sapiens
agggcggtggtgagaaatgaatgggcttccgaatgccgagaaacagatgtgaggctgtgccgaggaaggggaggacagggaaccagctgattaggggatccggggcagggccaagtgccgcc

SEQ ID NO: 36261 - DNA, 122 bp, Homo sapiens
tttatgccaccagggtgtggcgctctctccccactgtcagacagttctcttctccaagggcggggcctacaacagctcccgctccaggttcaagatgcaggaggaacaagaaaagcctcttt

SEQ ID NO: 36262 - DNA, 122 bp, Homo sapiens
gcttctcgcccctgattctagatgcagctgacttgttgcatgcagaagagcagctgggttcggcgttccaagcctctcctctttgctttgcctgccaccagatctgagcgccaggctggcca

SEQ ID NO: 36263 - DNA, 122 bp, Homo sapiens
ggtgcctcactacaagcctggatgaggcgcggcgcagcaggccagaggaaatactagaaccgatggtgccaaaaaggcatctccgagttgcccccggagagaaactcaatagaacaccggca

SEQ ID NO: 36264 - DNA, 122 bp, Homo sapiens
gctttgctgtgcaccgtgcagggcggcggccagcacagcttggtgcccaggaactgctgacggaccgaaggaggagcgcctgagacagtgccagcgaataggcccctgcagcaaacattacg

SEQ ID NO: 36265 - DNA, 122 bp, Homo sapiens
aggactctccataggttatggccagtcttagctgtgcctgcatccgggcctgcctgtgggcgtgggtcacacgggataatgttacctgcgtgctgtgtggttgcaggaagcgggttctggag

SEQ ID NO: 36266 - DNA, 122 bp, Homo sapiens
atggtgccggccgcgctccgccccgtcctccgcctaggccgagtccctgcgtcggggccgcggaggctccgccctgggcctggccctggtctttgtcctcacaaacctatttccccagatac

SEQ ID NO: 36267 - DNA, 122 bp, Homo sapiens
ctctgggctctgtgctgcccaacctccatcaatagaccacgcagacaaagcagaattatccgcatcattcacggaaatcacagccttcctttaagaagttcaccaggccagaggcggtggct

SEQ ID NO: 36268 - DNA, 122 bp, Homo sapiens
ttgctggacatagaatttgaacatataaaatgttcccaagtataagtttttctaaactagcggttctaagtcttctggggtcttgtaactctctgagaacctcatgaaacaagatttcctct

SEQ ID NO: 36269 - DNA, 122 bp, Homo sapiens
tggctctgtacgtattttacctcatttagcagttgctgcagatgtgcattgtagccgtatcggaaacccagcgctgctgtggcaaaaaatcaccacaccccaaaccagcagagattcacccc

SEQ ID NO: 36270 - DNA, 122 bp, Homo sapiens
ctggacttggagtgaatgtctgcacccttgggtgtcagacgccccagtggctctcagtatcgactggaggctctacagagaagtgcagttgtgtctgctctgtggtactcgctggtgacgat

SEQ ID NO: 36271 - DNA, 122 bp, Homo sapiens
accagcctggccaacatagcaaaaccccatctctattaaaaattttacaaaaattagctgcgtgtggtggcaggcccctgtaatcccagctaattgggaggctgaagcaggagaattgctca

SEQ ID NO: 36272 - DNA, 122 bp, Homo sapiens
caggaccagccaggctccctaggtacaaatagccctgggctccacggctccacaggctcccggggctgagtctaaatcactcatcattggttaaagccgagctcacagcagaataagccacc

SEQ ID NO: 36273 - DNA, 122 bp, Homo sapiens
gagtagtgcctgagcccacgtgaccgagccagggagcccgacggtctcaggaacgcccgacgccgcgcgtgacctctaagtgggagcaccctcgaaccgactcctggtccacccacaaggat

SEQ ID NO: 36274 - DNA, 122 bp, Homo sapiens
caagccagactaggccagtgacgagggggcctgggagctaggtccctgggcatggcctaacgaccagccacccggctgcagcctgatgaatctgcgatcaagcaaaggtatggggctgctgc

SEQ ID NO: 36275 - DNA, 122 bp, Homo sapiens
cagattgaatctctcccctcataacagtcccattaaatgaggtaaagtcaactatacttgcgagtcttactccatgaactcatgcaagaaacataattttactcaagggatgatttttaaat

SEQ ID NO: 36276 - DNA, 122 bp, Homo sapiens
acccggaggcagcaaaagtgctgcccaaacggggatggagccacccggggcgggagaggccgggggcatctaaggccgtgtagctcccatgtttagaggctcccagttatttacaaatgaat

SEQ ID NO: 36277 - DNA, 122 bp, Homo sapiens
caactatgctctcttcctggatgacctaatatttaagcttcataacaagtccatgaattacgtaatatttgaaccactattctacagaaaatttatagtgacaggtagagataatgaggcac

SEQ ID NO: 36278 - DNA, 122 bp, Homo sapiens
cgcgctgcgcgccccaccccagccggcggccccgggcttgcaccgggcggggcaggggagcgctgcctggagccctgtgacctatttcgttcctgtggtttccctggggagctccaagtctc

SEQ ID NO: 36279 - DNA, 122 bp, Homo sapiens
ctctcgcactggccgcggaagtgaggtcactaggggcaggctcctcttggccaccaccatcgtgtgcttgcgtttctatcctctgcttttttcgtggttccctcctggccgtacacaaacgt

SEQ ID NO: 36280 - DNA, 122 bp, Homo sapiens
actggtgatcgcatacatcatgaccgtcactgactttggctgggaggatgccctgcacaccgtgcgtgctgggagatcctgtgccaaccccaacgtgggcttccagagacagctccaggagt

SEQ ID NO: 36281 - DNA, 122 bp, Homo sapiens
tcttcctgaccggtgcgctcgaggtgatctgcgaagcctggctgcgcgatctgcttttcgcgcgcggcgcgcccgcctggctgcggcgccgctacctgaggctgcgctatgaggacctggtg

SEQ ID NO: 36282 - DNA, 122 bp, Homo sapiens
cgggctgagccagcatcgccgcacgcacagcggcgagaagccgtaccgctgccccgactgcgggaagtccttcagccacggtgccaccctggctcagcaccgtggcatccacactggggcgc

SEQ ID NO: 36283 - DNA, 122 bp, Homo sapiens
gggctgacgtgggctgaatggggctggggtgagctggagagagcaggccctgcagtggggcggcttctattcggctccttccagtggttcccatgtgctaacctggggaatccatctcagga

SEQ ID NO: 36284 - DNA, 122 bp, Homo sapiens
tctcaaaaagaatgctatatagtattctctttgcattctcaagcttatttcttcttgtggcgcttttacctagtacctcctaggatttcccaaaataccctttgggtaataatgcaaagaga

SEQ ID NO: 36285 - DNA, 122 bp, Homo sapiens
ctctcccaggcgcactctcatgaagctgtgcgggcgagtggttttcccgccagtggagtgcgggccagtggttacccgcaagtagaggacagaaagatcaaagagtgggcaacccgaggtct

SEQ ID NO: 36286 - DNA, 122 bp, Homo sapiens
cagtcgtcacgtcgctcttcctgcgggttcttggcgagacacagcttgagaacagaagggcgtcgggggaacctgccgcaaggagcagagacagcacagccccccgggcccagccgcctccc

SEQ ID NO: 36287 - DNA, 122 bp, Homo sapiens
agctctctccatggaaggaggcggcggccgcgatgagccttcagcctgccgggcaggggacgtgaacatggatgaccctaagaaggaaggcaagtccttgctgctgcggcgctgttgttgtt

SEQ ID NO: 36288 - DNA, 122 bp, Homo sapiens
tgtacctggctcagaaccaggcgccaagcggcacgggactctccttctgcactcgcagcgcgtgagtgcaattggagatcctggactcaagatgttttcatgaggaacgattccagcccgcg

SEQ ID NO: 36289 - DNA, 122 bp, Homo sapiens
tccgaaggagatggcctggaaggtgaacatgtaccgcggatacctggccatctgccaccccgaggagcagcagctcagcttcatcgagcgcctggtggagatggccagcagcctggccatcc

SEQ ID NO: 36290 - DNA, 122 bp, Homo sapiens
gatggaattggtttacacttcttaggcacttagagcctgtggcaggtgtatacatcagaccgaggcgccgaaggatttagttggggtcgcaggcgcctgccccttccccgttcgtcagggtg

SEQ ID NO: 36291 - DNA, 122 bp, Homo sapiens
ttccgctcctccccaccctccagtccctccagccagctgtacagctcccaaattccgggccgagattcccgggaacaaagcaagaaaaatcagagcaatttgggaagtaaacagaaactgga

SEQ ID NO: 36292 - DNA, 122 bp, Homo sapiens
catgcccacttcgcccggtactgtcagctgcccacgggcaccactcagtcccacaggcctcggccagggacacaccggccacgtccgcttcttggctgcagtccagctgccagatggcttca

SEQ ID NO: 36293 - DNA, 122 bp, Homo sapiens
ccccagcccacgggagtctctgcgtccacgcacctggacgtcctcctgcggcaggcgccccggaggcccctccagtgttcccacctcagctcccgggaagacctcagggtctccccccacca

SEQ ID NO: 36294 - DNA, 122 bp, Homo sapiens
caagatgtgcttttattttaaatctccttgatctgaccaatcgggtgagctggaacctcacggctgagccccgagtccaacttcttccccgccaggactactcactgtggccaggcccaagc

SEQ ID NO: 36295 - DNA, 122 bp, Homo sapiens
gaccctccactagggtttatgctcttcatgaagggtttgtaagggagcagatgccttctgcggtgcaggcacaaaccatctcataggattctggatggtaaacttagatatcacagttacaa

SEQ ID NO: 36296 - DNA, 122 bp, Homo sapiens
gaatctcgtgatctggaaatccacagagaagcaccttcaccacgccagcttcccgggccgcgcttcattgtcatttctggagagtgttattaatatccgccccgtgggtgcggcgctgtgta

SEQ ID NO: 36297 - DNA, 122 bp, Homo sapiens
ctagttccgaatgcggtccggaaaccagaactagagaactctatgacccacctgagcttccgctcccgccccgctgaaacagaagagggcccttgtgggctggttttggctagtttggttta

SEQ ID NO: 36298 - DNA, 122 bp, Homo sapiens
aaatttatccagatcctatcaaatttaatccaattccagcaaaaagaattggctgggaaccgttcgcctctaaaaccactcattccagacaagtatgattgattttagctgattgtatagct

SEQ ID NO: 36299 - DNA, 122 bp, Homo sapiens
atacacatatttatatataatctatgaatcagaagacaaaacaagagctgttcttcaccacgcaaaagccaagcggagatttacctcagcagtgcatgcagtaaaataatcccatcaccctt

SEQ ID NO: 36300 - DNA, 122 bp, Homo sapiens
agaagtacgagtataatagtttattacctaacttacaggtacaaagtgcaaatgacttgacgcctctctttccccaatcccttgaactctctggatctcaaactttctttaggaaagcaaag

SEQ ID NO: 36301 - DNA, 122 bp, Homo sapiens
cccatgtgtcatgagagggaccctgtgggaggtaactgaattatgggggcaggtctttcccgtgctgttctggagatagtgaataagacatgagttctgttggttttaaaaaggggatttcc

SEQ ID NO: 36302 - DNA, 122 bp, Homo sapiens
agcggcgaaccggactaatccctgagcactattccaggagaggcgagggcttgggccgcgcgcaggcgcagaccggatggaagccggggccactggcagcctgtaactggttcccctgggaa

SEQ ID NO: 36303 - DNA, 122 bp, Homo sapiens
ccgcgctccccgctcccgactccccgccgcggcttccaagagagacctgaccactgaccccgccctccccacgctggcctcattgttctgcttttaagagagatgggaaaagtgggttaaca

SEQ ID NO: 36304 - DNA, 122 bp, Homo sapiens
aactggacatctgggacctgcgagagaactggcccaggatagggaacaaaaggtgaaggccggtgggggaggaggaagttcctggaaatgttaagcaactccacagttccccttctccaatt

SEQ ID NO: 36305 - DNA, 122 bp, Homo sapiens
actgatgtagaaggcaggatttagcccttctaggcaaaagaaaagctcagttgggtttcacgagtgttcctgtgcttatattcagtctgtgcctacatgttctcatgcatgtctaacctgat

SEQ ID NO: 36306 - DNA, 122 bp, Homo sapiens
gcaggtcagtgggtgcgtgcaccatgagcgagccgaagcagggtgaggcattgcctcactcgggaagtgcaaggggtcagggagttccctttcctagtcaaagaacggggtgacagacggca

SEQ ID NO: 36307 - DNA, 122 bp, Homo sapiens
acagcccccagcccaggccctggacacgcgtccggcccctgcctccgtgcccggcccccacgccgcctcccgtccctcagatctccggccggcgtccccacgaccggccccgactaggcccc

SEQ ID NO: 36308 - DNA, 122 bp, Homo sapiens
tcgccggtatcatgatgtccgggtgagaagcttccttggcaggttgccagggccagcctgcgagcactggcgccggggacccgcgcgcccgggaaggggcggggaggtgggcggagcctggc

SEQ ID NO: 36309 - DNA, 122 bp, Homo sapiens
cagagtagggagcggcggcactaggggatgttgcgcatgcgccatacgcctgcgcagaatcgagtgagtgggagactagtcaaaaaggctgacgtcatcgcacatgttctggtcatgtctgt

SEQ ID NO: 36310 - DNA, 122 bp, Homo sapiens
cctgctcctgccccagcccgggccagttatgaccaggccagtcccacagggcactcctcccgccctctgccagtggctggctaggtgctcagagatgacagtcctaacggagaggcaggaag

SEQ ID NO: 36311 - DNA, 122 bp, Homo sapiens
ctctgtcactcaggctgcagtgacagtacagcaagggtttaagatagggtctaactctgtcgcccaggctggagtgcagtacagcaagggtttaagacagcgtctgactctgtcgcccaggc

SEQ ID NO: 36312 - DNA, 122 bp, Homo sapiens
tttgactttatatacaagttagtatcttttttatactactacatgctctgaatctatgatcgcgcctcagggagaggtgtttgtgaggcaaaaggaagacgcccagagtttatgtgccacga

SEQ ID NO: 36313 - DNA, 122 bp, Homo sapiens
acactcacaagggaggatgcctgggttctgcctctgatggatctagcacctcagtcaaatcgcattacttcactgagcctcagtttccaaacctaggaaaatgaagggagcagactagagga

SEQ ID NO: 36314 - DNA, 122 bp, Homo sapiens
ccgcacgggggctccaccagggcagggatagtggtgagggtggctcgtgggtccccctcgcggggagcagggtctggcactcaccagggcgcaggactaggacttgtcgaatgaatccatcc

SEQ ID NO: 36315 - DNA, 122 bp, Homo sapiens
tggctctcctgcgcctgggggctgccggccacacctgcccgccctgcacccccgtgctcacgtgaagatgcgcgccgtcttgtgcagaaggtcctgctcctgtttggagctgctgctgcgca

SEQ ID NO: 36316 - DNA, 122 bp, Homo sapiens
agcacttccagaacttcacctccatatcagaagtgccaataatcgtcataggcttctgcacgttggatcaactaatgttgtttacaatatagatgacattttaaaaatgtaaatgaatttag

SEQ ID NO: 36317 - DNA, 122 bp, Homo sapiens
cttccaacgctccaacagccaaatatccctgcttaaaggtcttggcatgagcagttccctcgccgtcctggaaagctagatcctgtctgtttgcatggcgggctctggtctcagcttaaatg

SEQ ID NO: 36318 - DNA, 122 bp, Homo sapiens
ctttccatccatcttgttcccaccccccgtcatccccccaacccaatgataaatccaggccgttaatccgtaatgacgtagatcgatccatagtccacattaacggctcctcactttcgagt

SEQ ID NO: 36319 - DNA, 122 bp, Homo sapiens
ccaaaaccaaaacacaaacataccatcccagtaacaaatgcgtcacttttctgaagaagacgttaagcccttccaattttaacagatcctttgttcaacagaggagagagactgggtaggca

SEQ ID NO: 36320 - DNA, 122 bp, Homo sapiens
acgggagaaccacagccgaatctctaagcttcctttcctgggccccagcatgggtgggggcggaagaggggatgagtcacaagatgagacccccccccacacccatatcccacccgaaattg

SEQ ID NO: 36321 - DNA, 122 bp, Homo sapiens
tatgttgccccagaatgtgggaacattgaagatgatcaaacatctagcagggtcttgcaccgctcctttatttttgccttcctttcctcactcagaggtagaggcgccctccagtggcccat

SEQ ID NO: 36322 - DNA, 122 bp, Homo sapiens
gaaggaatttagatctcatgtgtccatgttgctgagggcgtcctgggcacagagcctgctcgcatcaggccagattgtttggagtattgccaactggccttttttctggagaagaaagtact

SEQ ID NO: 36323 - DNA, 122 bp, Homo sapiens
gggtgccgcgcctctgcccgccggactgcgggccgccgcctcccgacggtgcctgcagaacgccgggaagcccccgcctcacctgcggggctcagagcctcgggtccccagggtccaggaga

SEQ ID NO: 36324 - DNA, 122 bp, Homo sapiens
aaggatgcatttgtgaaaattgcctgtcaatgtgagctactattattatagatggagagacggagaccatgaaagggcttgggagctgtccagcatcaaacagcaagaaatgggcagcgcca

SEQ ID NO: 36325 - DNA, 122 bp, Homo sapiens
aggattccgagcaccgtctggtgctggagctggagagcctgagacggcagctgcagcaggcggcccaggagcaggcggcgctgagggaggagtgcacccgtctgtggagtcggggggaggcc

SEQ ID NO: 36326 - DNA, 122 bp, Homo sapiens
cccgtgcttttttgacttgatgtcaagattgggaagtaaaagcaaatttagtttccctgccgcattagaaattgaaaaccctgttcagatgtatggatcacacacacacacacacacacacg

SEQ ID NO: 36327 - DNA, 122 bp, Homo sapiens
ccccggccccgggcccggcccccggccacctacctggtggcgcgcgagttccacggcgagcgcctcgggccggctctgcagctccatcccggcaacttgggcagcactttgcgctcactttg

SEQ ID NO: 36328 - DNA, 122 bp, Homo sapiens
tgtccggggttcaccctgagcatgggcacacacggctttgtcgtcggcagctggcctgtccggggttcaccctgagcacacacatgacatagtgttcaatggctcagccctgtattttggcg

SEQ ID NO: 36329 - DNA, 122 bp, Homo sapiens
tcttgaaggcaatttgctgtcattaaacattggcacacagatattctttgacagcagtttcgttgccaggaatttattctacagatttacaagtatgcaaacatttgttaacaagagcattc

SEQ ID NO: 36330 - DNA, 122 bp, Homo sapiens
cttcacctaactaatgacctcgagtttagggacagagagagaaagaaaacaaggtcagtgcgctctgttaaaagccactctgccatctaatttggagtgatgtcccagaaagctagacctga

SEQ ID NO: 36331 - DNA, 122 bp, Homo sapiens
gtagctgctcctggtgggcctcagggagccagtaagctaccgcccagaggtccttcaaggcgcacgggcgtgttaggtgctccaacgggcacgggtgtgttgccaacagcccaccgcaggcc

SEQ ID NO: 36332 - DNA, 122 bp, Homo sapiens
tccggaagggggacccaggtatctcgtcctccctgcgaagcctggggctggaaggctgtgcgctccacgggagagaggggcttccggcccctggcggtagagggcgctgctcggtaggggta

SEQ ID NO: 36333 - DNA, 122 bp, Homo sapiens
cgcccagcgccagggggacagcgccacaccctggcgggggcgggcctgcaactccgcggacgctgcgaggtggcctgcctgttgacagtcttaacccattgcggggtaaaaaggatgtggcg

SEQ ID NO: 36334 - DNA, 122 bp, Homo sapiens
aaagaaattatgtgtgtcctttgaggtgctggctgcatagacaggaggggactggatcatcgggaagtgttccgcctccacacgccatcaaccactgaactgcatcgaatcagctgtaaaga

SEQ ID NO: 36335 - DNA, 122 bp, Homo sapiens
cagtccagaggaggaagcttgggggccggagatgagagggtggggagtaagggtggaccccgacgtgccttccctgcagaatcaggagcaagcctcagctggaggccactgccacagcctgc

SEQ ID NO: 36336 - DNA, 122 bp, Homo sapiens
actcaatttcattattcaccacagacgccaagatcattctttagtctgattttagcctcacgtggtctcacccgaacatttgtttttggaatttggacctaactggttaccaaacctgtctg

SEQ ID NO: 36337 - DNA, 122 bp, Homo sapiens
gagctatcctgattgaagcccaaggcccatggtctttcgcctcccctgaggaactgaggacgaaggacaaaaaccatccacctaggacacttggcccctggactggagaacagcaaaacaaa

SEQ ID NO: 36338 - DNA, 122 bp, Homo sapiens
gccaggcgggccagcacatgcggctgcagctcagccatcccccccgggtcccggcaggctcggcatgggtaggggacagccagccctggccaccccctctgggcctggcacccaccggtgtt

SEQ ID NO: 36339 - DNA, 122 bp, Homo sapiens
cgcactccgccggcctcggctgggggaggggagcccggcccctgctcccggggtggagggcggtcggctgcgctgttttccggtgaggcctggtcttgcccgctcctttagggaaagggaga

SEQ ID NO: 36340 - DNA, 122 bp, Homo sapiens
ctccccactcctgcgtcttcccgccccggccgggttctgggaagcctcgcgcggctcttccgcagctgctgcccgcccggatctcctggtccctcgtaggggaccccacttctctgacaccg

SEQ ID NO: 36341 - DNA, 122 bp, Homo sapiens
cctggtcctggagatcttcaccctgctggcctccatctgctgggtgtcggccaatatcttcggtaagttctgaggccatggagccaggcggtggggagggagctccagtgtcagccaggctc

SEQ ID NO: 36342 - DNA, 122 bp, Homo sapiens
tggtatagagctcaggaaaaatacctgtggaaaaaaaacttaaaaagtggtgaaagaatccgaggaaatgaaagaaagcatgtgcaggtaaactgaggcagggcaaggactaagactgctac

SEQ ID NO: 36343 - DNA, 122 bp, Homo sapiens
ccggcttctaggcgccagccgtcagtaacaggcctgggctgccacgccgaaatcacgcctcgagtttctgagccagggactactgggggtctggaattgttagtctagtctgtggaggatgc

SEQ ID NO: 36344 - DNA, 122 bp, Homo sapiens
attttttgtaagctctagctagactgaatggcaacaacaaactgaggctaaattcagtgtcgtggcttgagggggaagaaggagctgactaccatcataaaccataatttctctactgacct

SEQ ID NO: 36345 - DNA, 122 bp, Homo sapiens
ggtgcgggacataatctcgtggtgcgccgctttttaagccggtccgaaaagcgcagtattcgggtgggagtgacccgattttccaagtgcgtccgtcacccctttcttttactcagaaaggg

SEQ ID NO: 36346 - DNA, 122 bp, Homo sapiens
aaaagagaaaagaatgactccgccaggggatcagcagccgcatgaggtttattcgcacaccgtgaaaacagacacatcttgccatgatctctgactggaggaagcgaggaggcggccggccg

SEQ ID NO: 36347 - DNA, 122 bp, Homo sapiens
gcccccgccggagcctttggcgtgtgccacctagtggtgaaacctggctactacaggctgcgtctaggcgagaactcggagcgtggttgatttcattcaattttgttcacggcagggctgag

SEQ ID NO: 36348 - DNA, 122 bp, Homo sapiens
ttcctcccctaggtggaatgactctacaggatactcggagggatatcaggtttaggagaccgaggggtgtggagtcggagccaggctgcattccagcccgggtgtccgggtgtgctcagagc

SEQ ID NO: 36349 - DNA, 122 bp, Homo sapiens
tctgccttaccctctttgaaatttggctttgcagccgcatggatctccagcagataggggcgctcgccgtgaaccccctgggagaccgaattatagaaagcttcttccccgatgggtgaggc

SEQ ID NO: 36350 - DNA, 122 bp, Homo sapiens
gtcgttctttctgttgcatcctcatggttttctgtggccacgtgctttcgctcatctcttcgaggacgttcctgatagtttgtgcctcttcttttcaaggcttcttctccttgcacaagacg

SEQ ID NO: 36351 - DNA, 122 bp, Homo sapiens
caggcaccgtctaactgatacacaggatctgggggagacgcaggcactgcctgattgatacgcgggcgctgggggagacgcaggcccatctaactgatatgtgggctctgggggagacacag

SEQ ID NO: 36352 - DNA, 122 bp, Homo sapiens
cttaagattgattgtaatcctaaccctgccactacatagcttacttgtctattctgagcccgttttcatatctgtgaagtgcaaataataaagttagtaggattaaattttttaaaaaaaca

SEQ ID NO: 36353 - DNA, 122 bp, Homo sapiens
gcggcggcgggggcaaatagccacggcggcaaaaagccgcggcggcggggggcaaaaagccgtggcgggcataaacccgcggaggcggggagacaaaaagctgcggctgcaggggggcaaat

SEQ ID NO: 36354 - DNA, 122 bp, Homo sapiens
cctgaggactcaagccgccgaaactccaggggacgctgctgccggaatcgggaggtctcccgccgccactcgtcatcaaacgctgcggcctcacctggaaaggacagagcggacatgaggcc

SEQ ID NO: 36355 - DNA, 122 bp, Homo sapiens
gcgtgtgatcagtggggaaacctgtagcacccccgcgagcaacatgtgtacatggactcacgccgcactgtgctgggattttcatgcacgtgacaaaatcacatcccacacagaaaatttcc

SEQ ID NO: 36356 - DNA, 122 bp, Homo sapiens
ggcccacctcctggccatgcacatccagcagctggagacaggcggcttcaccatgaccaacggggcccacaggtggagcaagctcaggtgaggaggggctcaggcggccgcgcgcccaggag

SEQ ID NO: 36357 - DNA, 122 bp, Homo sapiens
ttttttctttttctagacttgttccatttattcatttcataagtttggagaccttctaagcgtgaagctctctgagaggtactgaggcactagagaacactgattaaagagcctgatgccca

SEQ ID NO: 36358 - DNA, 122 bp, Homo sapiens
gcacacggagtgtcggacgacggagaagccacaggtacagcttgtccagacctgggctgccggctccactccggggctaacatcatgcccgatgggtctgccagcgccctgggcctcagggg

SEQ ID NO: 36359 - DNA, 122 bp, Homo sapiens
atgagaaaaggaggtagagataggttaattaactggcccaaggtcatacagctaagaagccgctgtgttagggtttaaatcaggacagggttatgttaccagtcctggtccgttagaaagta

SEQ ID NO: 36360 - DNA, 122 bp, Homo sapiens
ttaagggctaaagaaagcaccccgtgtaggtaaagaaacagaacactgccagggccctcacgtttacttttgaaattaagtgttttccagtactcttggagtagctagtaaaatgagagtcc

SEQ ID NO: 36361 - DNA, 122 bp, Homo sapiens
cgggccgaggccgagggacaggctgcgagggtcatggctgcaggcggcgagcccacaagccggcgccggccgcgtccgttcggcgtctccgcgaggccagccagcagccagcgctgcgcagc

SEQ ID NO: 36362 - DNA, 122 bp, Homo sapiens
caacctcactcgcagcgggagttatttcctccgttctggctgcgccagattcatgtaacacgcctaccctgggcttcaatggaagtcgttctccattaacaatcactccagctttccgagat

SEQ ID NO: 36363 - DNA, 122 bp, Homo sapiens
gagtgtaaaatattcagtatcacttaacaaatctatgttggaaatggattgtaaccttcccgatgtcaattcatcaaacaaataagaatcatggatagaagatacatactaaaacgttccat

SEQ ID NO: 36364 - DNA, 122 bp, Homo sapiens
cctacactttggggactcccctgttggcaactgctcgcaccgagcagtggaatctcagtccgggagtcgacgacttttcgcttctggctagctgctcaagttgagacagtccggctctcagt

SEQ ID NO: 36365 - DNA, 122 bp, Homo sapiens
tcctccagcacctttgtaatgcatatgagctcgggagaccagtacttaaagttggaggcccgggagcccaggagctggcggagggcgttcgtcctgggactgcacttgctcccgtcgggtcg

SEQ ID NO: 36366 - DNA, 122 bp, Homo sapiens
ccgcctctctcgtccatttgtagtccgcggccgacctgaggcggggcctggagaggctgacggggcgcagggcaccctgggagtcgtagtcgccgcgggcgcgccggcgcagagcaccctgg

SEQ ID NO: 36367 - DNA, 122 bp, Homo sapiens
aagcccccagggagagtccaccagttcccagagcccaggccaactgagagcgggcccatccggtcaccaagacttgggtctccctggctccagggtagaggtaggcagagggtgtcccaaag

SEQ ID NO: 36368 - DNA, 122 bp, Homo sapiens
cccatggtcatcactggtctgtctgctctgttgtctgttctttccctgactccctcccaccgaaggcctgatggctactcacccctctgggatggctatgggagaggaggagtgatggggac

SEQ ID NO: 36369 - DNA, 122 bp, Homo sapiens
cctcacggtagtttgaagccgagccgcaaagtgcggtctgcgcgctgattggcggacgcacgtcacgggaccgcgggtccccacccacaattcttctggatacctgggcgccttcaggccac

SEQ ID NO: 36370 - DNA, 122 bp, Homo sapiens
aataaaggcggcgcgctcagggccggacaccccgggtcgccggccaacgtaggcggctggcgtcttccagatgcccgctgcctttccagtcccccggccagtggcccgggaaccaaacggcc

SEQ ID NO: 36371 - DNA, 122 bp, Homo sapiens
ttgggattttgtcaggagtggcctggcgggcccaggcgctgtcctgcgttggataccgcacgggtccttcagcaacacctgagctcgcgggagtctcaagtaaactctgcatgtcgcaatga

SEQ ID NO: 36372 - DNA, 122 bp, Homo sapiens
ccttcccacccccaaaagcccccaggctctggagggaattcaaccaagcagggctcagaccgacctccaccagcgaggcttctccttgctgtccccttctgctcaggcgcaacgtggcaggg

SEQ ID NO: 36373 - DNA, 122 bp, Homo sapiens
aggagatatgaactaattgctcaacgtgggtgtagcacggattaggccttttacagcaagcgctgccagcagggaactggtggatgtactcttgaccacgctcggctggactctggggagcc

SEQ ID NO: 36374 - DNA, 122 bp, Homo sapiens
ggagtaccgcagcgctggccgggccgttaagcagcgtctgcggtagcaggttggggggcacggtgagctgggggcctccgccaccccccgggttgggcagccccgtaaccagcccaccgtgc

SEQ ID NO: 36375 - DNA, 122 bp, Homo sapiens
ggagggaggatcacttgtggccaggagtttgagaccagcgtggccaaagtagtgaaaacccgtttgtaacagaatttgtgactttcaactgggcacatgtccaatcagaataaagatgacat

SEQ ID NO: 36376 - DNA, 122 bp, Homo sapiens
gcagcccctctagcagcggccgacggttgggaggctgagatttgtctctgatattcaggccggcgtgtttcaaggttacttttcagtcacaaccgaggtgcccacagcatttcgtaactaaa

SEQ ID NO: 36377 - DNA, 122 bp, Homo sapiens
tgcagagcctgaggtctgcgaggtctacgggcctcttctctgagggactgctgtggcccccgtcctgtaccagctgccctgccactgggcttgcctccttaactcattggtcgcagccaccc

SEQ ID NO: 36378 - DNA, 122 bp, Homo sapiens
ccactcacgtgcgcgcgccacgtgggcccgcgggctcgccgaggacccttggctgcctaccggggcaccccactagctgctctggcctatcgagcaccccttggagctctgtgtcccgactg

SEQ ID NO: 36379 - DNA, 122 bp, Homo sapiens
cggctacaaccacaactaaccccttcctctcccgccccgtcctctcctgccggcgggaggcgaaggagaagcgccgccgtcggtcccggcaattagtcaagtagctataataactaaacatt

SEQ ID NO: 36380 - DNA, 122 bp, Homo sapiens
gggattcaatattataggaggtcgaccaaatcaggtaaaacaccttgttaatgcattactcgttacttataaaataagcattaataagcattactcattgcttataaaataatagaggactt

SEQ ID NO: 36381 - DNA, 122 bp, Homo sapiens
cccaggattgggtgttcccagcagccctgcctgcctgtctcgctggctgtgtggtgcctgcgcaccttccttccccacacctgcccggtgcgaccgcactgcagcctcgggcaccatgaggc

SEQ ID NO: 36382 - DNA, 122 bp, Homo sapiens
cgtcctcagcggtccggccggaagtcaccggaagaggccggtgtcccaggctaaagtgttcggtcgcggccggaagcgaggaagaggtcggtccggccatggcgcgggttggacccgggagg

SEQ ID NO: 36383 - DNA, 122 bp, Homo sapiens
catagtcatttgtcatgtgtttgtgccatgacgacaccatcagttgaattcttgggaatgcgagtaggacatgcagctttatgacatgcagacacagttataaattatgcaagatgattata

SEQ ID NO: 36384 - DNA, 122 bp, Homo sapiens
aagctcctccttcctgaggattgtgttctcagcattcatctctcaccctcaccatggaaccgtactctgatgagcatctaagaaacacagaaactcagaaatgaaaccatgtggctctggca

SEQ ID NO: 36385 - DNA, 122 bp, Homo sapiens
gtcagggctgcaggcggctgtgacactccggaggcctcgacagaggggtcccaggcgcagcgtacccgggctcctcttgcctcagcggagcgtcccacggcagtcccggacccgcgcctctc

SEQ ID NO: 36386 - DNA, 122 bp, Homo sapiens
atggatgccatcgagtgtaaccgcccaacggtttcaccttgcccgctgcctagacagagccgattcatccagacaggggaattgcaagagaaagagtaattcgcgcagagtcggctgtacag

SEQ ID NO: 36387 - DNA, 122 bp, Homo sapiens
tcaccccacggctcttgcgactcacccacttgtttggcttctacagcagctgtgtactctcggctaaagctcagctctgtgatggccacatcatccaggatgaggctgaagtccttggccct

SEQ ID NO: 36388 - DNA, 122 bp, Homo sapiens
ctaggttgtgctggtgaggtggaatgagccctaccagaaactggccacgtgcgatgcggacggaggcatattcgtgtggattcagtacgagggcaggtggtctgtggagctggtcaacgacc

SEQ ID NO: 36389 - DNA, 122 bp, Homo sapiens
gtgtccacactctcggcgcccggctacggcccaggtaagcccagatcccggcccgggcggcgcacccacctgacgaggggctccttctcaggcagggcgcgctcctccaagcactcgcaccc

SEQ ID NO: 36390 - DNA, 122 bp, Homo sapiens
aattgtcttgagcccgctttggtgtgcgttcgcaaacatctgagggggcgccttgggaggcgagtggagtggcacgtcgccggtgtcgccctctgcacctggcacggagcgggaacccgcgc

SEQ ID NO: 36391 - DNA, 122 bp, Homo sapiens
gctcactggagatgaccaggcagggctgccctcccctaagagacatgcctgcccccgtaccggggctgtttgcaggggtgctgggaggtcctgatgtcagccccaccccagaggtgtcccag

SEQ ID NO: 36392 - DNA, 122 bp, Homo sapiens
acataaatgattacaaacagaaacttactaacggtataattttcatcagtttattccctccgtgtgtgtgtgtgtgtgtgtgtgtgtgtgtgttctgtttgttcgagacagggtcgctctct

SEQ ID NO: 36393 - DNA, 122 bp, Homo sapiens
cgaacctgcacatgtaccctctgaatctaagataaaagttgaaattattttttaaaaaaccggggaaaaaagaaatgaagtgcagtgcacagggccctctgtgtcatacacatacacataca

SEQ ID NO: 36394 - DNA, 122 bp, Homo sapiens
caaaaagagagaaagaaaacagcaggaaccacaacaaaacgccagcagggcgggcgggcgcgcagcagcagcggggcggccgaggcagtagcggcggcagcggcggcggcggcggaggcagc

SEQ ID NO: 36395 - DNA, 122 bp, Homo sapiens
agggctgtcctttaatgttaggcattttctgtgaccttgctattgttactgctgatgaagcgatgaaggaattaaacagaagatgcttggaggcatttaggaagacagctatattaactcct

SEQ ID NO: 36396 - DNA, 122 bp, Homo sapiens
aaaataatccccaagcaaaaaaacctcagtgcaagaatactgcatacactttgcagtacacgaaatatcacaaacaatgcttttatcaatgtgctaacagtggatgttgttgatcctttcag

SEQ ID NO: 36397 - DNA, 122 bp, Homo sapiens
tctctgcaggctggtgctgttcctgttcggagcaggtgtgcgacccacatggcaggggcacggacttgcttcgaccgtccacactgagaagattctgtaagcatcacgaggtgctgatgggt

SEQ ID NO: 36398 - DNA, 122 bp, Homo sapiens
cttatctggcaggcaatgtgcaatgtgcttggcataaatatctcatatcctcacaataatcgtgtaaggaagaaactcggactcaacctcaagataagcaccaaagctcattttaaacctca

SEQ ID NO: 36399 - DNA, 122 bp, Homo sapiens
gcagaagggcagctcggtcaaacagctggagctgggagccggtcagttgccaggccctgccgctgctacgtcacggagggcggggcggtgggcgattggcggtgcactgcagctcgggctgc

SEQ ID NO: 36400 - DNA, 122 bp, Homo sapiens
cccacgtcatccttggagctgaccaggtcttccatttcggctttgagcattttgttggtccgctcgagttcctctttggcttccaaggcctcttcaagggcccgagccagggacagggcctt

SEQ ID NO: 36401 - DNA, 122 bp, Homo sapiens
ggaaatttgagaaaaccgtctggtcacagcctggtcgtcagattctaacctttttgtttccgcctcagatgacaaaaccttgaagatacgggacgtgagctcgggaaagtgtctgaaaaccc

SEQ ID NO: 36402 - DNA, 122 bp, Homo sapiens
tcagggaccaggatggcccatccattggggtcagtgaatgtgctgctccaagagctggcccgagacagtttgccagctcctaggactctcctctccctgagactcacaggaggcaggtgagg

SEQ ID NO: 36403 - DNA, 122 bp, Homo sapiens
gcaccagcacaatgggcttctgggggcccggccaatgcctccaggcaggtgagggggcaccgcacaaagactcacagagtgaggagggggtcccgatgccaaatggactcgagattcggcag

SEQ ID NO: 36404 - DNA, 122 bp, Homo sapiens
ctcccccaatgacatgcactggttgacacataccacagtgtgacacgccataggatgccacgaggtacaaagggcaacagaatgacgcatacacacatatttaatcttcccatgcacatgct

SEQ ID NO: 36405 - DNA, 122 bp, Homo sapiens
attcagcatgctcacaccagcagcagcatacaaaatcattgaccatgaagccacctgttccgaacaccattgtcaaaaccaaggacccaaagaagtatagcacacaggcttgcccctgggta

SEQ ID NO: 36406 - DNA, 122 bp, Homo sapiens
gtaattagcatcaagcagttctgtactctgaaatattaaaactgtatgaaaagctttgaccgtagcagtgaatcccatggtcattcaaggctactatcaatcaccaagtagccttgtctgtc

SEQ ID NO: 36407 - DNA, 122 bp, Homo sapiens
cgctcagggaaggggcggggcgaacggaagccgggaaggcgattcatagctcgcggggtacgggcgcgcgtgcgcactccgcagcccgttcaggaccccggcgcgggcagggcgcccacgag

SEQ ID NO: 36408 - DNA, 122 bp, Homo sapiens
agccaggggacctacgtgcagaagcttcctgtcccaaactgcaaacagaaagctctgaaccgcatgatctctaagaccacttcctgttgtaaaaatgctaaatttggagagcctgccccaga

SEQ ID NO: 36409 - DNA, 122 bp, Homo sapiens
catttgggcaagactcgcacaaaaaatgagggatggcttcaggagtaagaacctttgagacggcctgggttgtggacttaatagtctggagagatatcaacaggtatcaatttaatttaatg

SEQ ID NO: 36410 - DNA, 122 bp, Homo sapiens
tcgagaccattctggccaacagtgaaaccccgtctctactaaacacaaaaattaggcgggcgtgctggcgcgtgcctgtagtcccagctactcgggaggctgaggcaagagaatcgcttgaa

SEQ ID NO: 36411 - DNA, 122 bp, Homo sapiens
ctatgtcatccctcaggatactaccagaaccacagcagtttctttaaacattttgcttcccgccccttaaaagatttttgaaaaactatatacccttttcccatattttatattgacatata

SEQ ID NO: 36412 - DNA, 122 bp, Homo sapiens
cgaccatgaggaccaccccggcaggacaaggtgtgcagagaactagcatggtccctggcacgtagcccctgcccagtgactggcagatgagaagctccattgtcgccccaggcgagtatggg

SEQ ID NO: 36413 - DNA, 122 bp, Homo sapiens
aacctcaaggtgggcagggccccagggagcttttatagtctgtgcagtgcacaaagtccccggggtggcagctggcatctgattgcttatcagggcacaagctgtatccagtgggaggaagg

SEQ ID NO: 36414 - DNA, 122 bp, Homo sapiens
atgaaaaacctgagttgtagtattttctgctttctatggtgtaaatgctcttaccctgaccgatttcaagctccccctgtgaaataactgaatgctgagttgggagtaaatgcacagtaagt

SEQ ID NO: 36415 - DNA, 122 bp, Homo sapiens
tttcatcgaggtggattcgacgacaaactaagcgaaggcaaaaacgatcgcgggagtcgacgtggagacagataaggcccagagctctgaccagacactaagtacttcatcactagtccctg

SEQ ID NO: 36416 - DNA, 122 bp, Homo sapiens
cccaggagcaggtggtgggtacagcacaactccggcctcaagtagcttcaggggccagagcgtggcgcagggtgtgtgacctggggcccatgaggggccggcacctttgagctaggggactc

SEQ ID NO: 36417 - DNA, 122 bp, Homo sapiens
atcaactacgttttcttcctcaggactcgccttagacctctgaactccggggcacagaggcgactttctcctcacagactttaggcgccactgctgggtccggaaaagaaagagaaaggacc

SEQ ID NO: 36418 - DNA, 122 bp, Homo sapiens
cccccgcgcggaggactgtgggagcggcttccttggattccgcgcttggcaacggctcggcgtcgcgctttggccaaccgctgcgtcgtccctgggcccgaataactgtcgcccgcttccct

SEQ ID NO: 36419 - DNA, 122 bp, Homo sapiens
actactgggacctaatggtggaacacaagcaggggccagagcatcccctgggagtggcctcgagccatttgggcatggaattcctgggttccaagtaccagctcctgttgcgggaggcacag

SEQ ID NO: 36420 - DNA, 122 bp, Homo sapiens
acagactgtcctcatctggattaactggaaatttggcacacgttcgggggtcaacagctacggctggaaacgaagccagggttcatacgagggctcactcacgtcagtcaaagagacctttt

SEQ ID NO: 36421 - DNA, 122 bp, Homo sapiens
actcacctcgaatgccccctttatatcggtttttaatggcagccaagctgatggactcctcgccttcctcctcctcatcgtatcgatcaggttccaggtaactggcgctcagcccccgctgg

SEQ ID NO: 36422 - DNA, 122 bp, Homo sapiens
gccaggtgcccaggttggagaacccggattctccatgtgtgcgggtcctccaggtgcccacgtcctccaggtgcccgggccgtccgggtgcacaggtttgtgagatgctcccactgtgtgct

SEQ ID NO: 36423 - DNA, 122 bp, Homo sapiens
ccttgacaatccagggtgccctgacctcgaaatccttgacaatccagggttccttcacctcgaaatccttgacaatccagggcgccctcacctcgaaatccttgacaatccagggcgccctc

SEQ ID NO: 36424 - DNA, 122 bp, Homo sapiens
atgtgaaagccatgagcaagggcttggtgcattccacagaggaggcacagtgttagttgacggaaagaaagaggggagggtgggtctcatctgagctgagcaactgaatacaaccagacgtg

SEQ ID NO: 36425 - DNA, 122 bp, Homo sapiens
ggagacaaactggccaaagtgaggagcagctcccggctacccctgtgagttttcagtggacgtgctataccccaggaacagcaaatcaccggcattcaggccaccacatcccatcggagcca

SEQ ID NO: 36426 - DNA, 122 bp, Homo sapiens
tccacaggccccttaggaggcttggatgagtttggtcccctggaaagtttgcgtttctggcgccctaactctcaagcctccgttgcagtaattgccacggcagcaacgatattaggcacggc

SEQ ID NO: 36427 - DNA, 122 bp, Homo sapiens
tccgtaggggacaccgagccaaggcctgcagcgagtgacctgcccggggaggcgcgggaccgaggctcacctacccgggcccgcgagtctcgcccagccccagcctcccaacccactctgcc

SEQ ID NO: 36428 - DNA, 122 bp, Homo sapiens
ccatctcctcctctggacccctctccaataaattggaggtcccggcggccaggaaagccacgtctcctccgggctgggtcagggaggcaggggccagagcctcagggtcccgtggcaccaac

SEQ ID NO: 36429 - DNA, 122 bp, Homo sapiens
ctacttcctgtgaatcaatgagccagcaatatcaaaattcatggtgatttttattctctacgcatggtacaaaatgactttgtccatctacctttggtaatgcatgtaattaagtgtgagac

SEQ ID NO: 36430 - DNA, 122 bp, Homo sapiens
tttgcacccaataattccactttgagatccatcctaaataaactctccagtatgaaaacccggatgacgaccgcactaagggcaactgcagaaacgtcatgaccggacagagcaggatacat

SEQ ID NO: 36431 - DNA, 122 bp, Homo sapiens
tgggtgcttctgtgtttgtttctggccgcgtttctgtgttggacaggggtgactttgtgccggatggcttctgtgtgagagcgcgcgcgagtgtgcatgtcggtgagctgggagggtgtgtc

SEQ ID NO: 36432 - DNA, 122 bp, Homo sapiens
caaatgcctatagatgctgggcaggcagctgagacaaatggagtgggtagggctgcagctcgccaccttgagagggctctgaagagaatcaccctgaattgcagccacagtcagcagcctgg

SEQ ID NO: 36433 - DNA, 122 bp, Homo sapiens
ccgtggccacagagcagcctctgttccttggtaatcgtcaacatctggcaggcacctccacgcccctccgcccccaccatacgctgctggctggaggctcccgtgcaatgccaggtgtgttg

SEQ ID NO: 36434 - DNA, 122 bp, Homo sapiens
caaagtgcacacagttgctgcgcatggagtgataggatggtgggtccgcgtccgtcgcttcgctcactctgcgcagcacgcgccagcaggagcgcagcagcgggcgctgcccctgtttggat

SEQ ID NO: 36435 - DNA, 122 bp, Homo sapiens
gagcggctcggaggccagcgactctgtgtccagctgtgggcaggcgggcagtcagagcatcgggagcaacgtcacgctcatcaccctgaactcggaaggtgcgtccagggcggctttcctcg

SEQ ID NO: 36436 - DNA, 122 bp, Homo sapiens
atcaccggtaactcttcaaaaacttcacggaggttgtattagtatttcctgacttgctcccgctgacacatgcctccaaggtcagctggaccagtgctactcatcaccgcagtgcagctaac

SEQ ID NO: 36437 - DNA, 122 bp, Homo sapiens
gtgagcccgggcgcccggccgggagtgtgttaagtatacggcaaacacctggactgcggccggctctccaggaatgccatgatattggggaattccctttgcacctggccaagtggcctcgg

SEQ ID NO: 36438 - DNA, 122 bp, Homo sapiens
cttgataggtgaatgtagccaggtggtagagtcaggaaaagcctgtcacactgctgagcccgatggtaacagttccatcctgttgagcccctggagggtgaacacttaggtggacacatgga

SEQ ID NO: 36439 - DNA, 122 bp, Homo sapiens
tgagaatgtttgcatgcttggttcgtccttatggaaaatagacaataagcaggttcccggcgcccctccgctgtctgggtggcgcatctccaaccccaccccgttccggcgctctggccagg

SEQ ID NO: 36440 - DNA, 122 bp, Homo sapiens
tgccaggcccctctgggtgagtcgaagatctccaccagaggctcatttcaaaggggaaggcggcacctttattttcaaaagaggcaccgctcctggcttcctgtgagctccacttctaccgt

SEQ ID NO: 36441 - DNA, 122 bp, Homo sapiens
gcagcggccccccgcgcccctcccgcggccctgctgcggcccaaggctcggctgctgccccggctgagcctaaaatcatcaaagtcacggtgaagactcccaaagagaaagaggagttcgcg

SEQ ID NO: 36442 - DNA, 122 bp, Homo sapiens
aaatgaaatcgggagtagcccctttccactgaaaaatgaaatccaaactccttccgccggcggcttcaggctcccgggacctggctcggaaaagtgaccggcggcggtggcgcgctgcgccc

SEQ ID NO: 36443 - DNA, 122 bp, Homo sapiens
cgcagcttggctgcctctccaaggggccgaggtgatctctggcaggacccacgggggacccgcgccactcctcccgctccgcccccggctcctcccctcctgacggaaggcctgggacctgc

SEQ ID NO: 36444 - DNA, 122 bp, Homo sapiens
gtgtgggcaccagcgggaggggcactctccgagcgctgcggcccggagtgactggggccgcggctgccaccgccacaccccctgcgggccccccgcctgccccgccgcctcccgcaccgccc

SEQ ID NO: 36445 - DNA, 122 bp, Homo sapiens
gcgagcggaccgccacacgggtccggtgcccgctgcgcttccgccccagcgctcctgaggcggccgtacaatcctcggcagtgtcctgagactgtatggtcagctcagcccggcctccgact

SEQ ID NO: 36446 - DNA, 122 bp, Homo sapiens
cctagatttccctgtagtatcattagctaccatttattgagtgcttaccaccaggagctgcgaaaaacactctccaattattatttctattaatcctcttattaatcttaagagatgagcaa

SEQ ID NO: 36447 - DNA, 122 bp, Homo sapiens
ccgcaaccctgctcctttcgcagtccgcggcggagtgagcaacttgctgggtgcgctccacggtttttgttgccggcggctctcgaagacttacacaggctttgcctggccgtaaatatcaa

SEQ ID NO: 36448 - DNA, 122 bp, Homo sapiens
tcagcgtccagcacatggcgtggaagagggggtggcgtcagtgagttcagtgactagggacggagaaagacttcgtggaggcagtcgctttgcagccaaggcttgaaggatgagggtgattg

SEQ ID NO: 36449 - DNA, 122 bp, Homo sapiens
tgcgccagttccccccaccccgccccgccccaaccccgacccggcagacgacgcgccgtgcgcctgcgcacggcttgcccatgtgtgctgcagccgtcagccggcccagctgagcagcagca

SEQ ID NO: 36450 - DNA, 122 bp, Homo sapiens
atcgtgaccgtctgacccgcattcttcagggcaatggcagcctgctcatggctggcatttcggaggtccacaccgttgacctagagagaggacgacaggctgtgtcaccagagacaggaggc

SEQ ID NO: 36451 - DNA, 122 bp, Homo sapiens
tgcttaagtttgaatgatggcaggcacttcaggattccagcacgtagtagggtttaagaacgtcttagttcttacctccagtctcgactcaccgttcctacaaggaacactcacttctacga

SEQ ID NO: 36452 - DNA, 122 bp, Homo sapiens
attttttagcagagacagggtttcacctcccaaagtgctgggattacaggcattagccaccgcgcccagccaagttttttaatgtttaatctaatgtgcatggaggcatcatagaaagaact

SEQ ID NO: 36453 - DNA, 122 bp, Homo sapiens
ggattcaagttccagctgcagagcttgctgagcgtgtctaaccttgggtacgtcactccacgttgctgctctggccctcagacagctcatctgtaaaatggggatgaccaggcctacttcac

SEQ ID NO: 36454 - DNA, 122 bp, Homo sapiens
agggaggtgctttactgctgaaggcgactcctgcatgcaaacacggcagcattatctccacgtagagggaacacaggacgctcagagggaaattctcggaaagtggggtgtctccagctcct

SEQ ID NO: 36455 - DNA, 122 bp, Homo sapiens
gccacactcggaggcagggagggaccctggctcagcacacaagccacactcgaaggaggacgtcggagaaaagggcacaggccagaccgcggccgcatgtttcactggctgcagtggcagcc

SEQ ID NO: 36456 - DNA, 122 bp, Homo sapiens
gcttctcaccacccagctgaatggggacagctgggattggaacccaaagctgttgatgcccgagcccaccagtggatcagaggtggatcctgggagatgttggcagagatgcaaggagaaat

SEQ ID NO: 36457 - DNA, 122 bp, Homo sapiens
aggcccaggttggaaagagatgtacaaaaacacgaattcagaggatcggaagaattaaaacgcccccaagaataacatgaaagtatttgatgttgcttcaggggcaagggcgagtatgtata

SEQ ID NO: 36458 - DNA, 122 bp, Homo sapiens
cactctttgttccttcaactccttctaacatttgcatactcaatgccaacatcaattcctcgggaagcctaaattgtaatttggtaagatgcttttcacatgtgcttctacagcctgctcta

SEQ ID NO: 36459 - DNA, 122 bp, Homo sapiens
ccccgttggcagcggcctccttcagcctctgatcattcccggaggaggcagaggcagccacggtctgtgctttggacagagggtactcctcctgctcggactccaggtcggagtccgaggag

SEQ ID NO: 36460 - DNA, 122 bp, Homo sapiens
gaccacacaatctttagcagcatgttttattctttattttcttttcctcgtctctatgtacggtgattgtgaagtaatgagattagtgttgatgatattagaagtgtgtatttcatttaaaa

SEQ ID NO: 36461 - DNA, 122 bp, Homo sapiens
ccaccataaaagatccaaagcatgagaggaacttctagtcagatgaccttgcagaaccaccgcattccaccctgccctttggggagcctactcagcattctacctggggaaatggaaaacag

SEQ ID NO: 36462 - DNA, 122 bp, Homo sapiens
ggaacacccgccctgcgcccaagataggcacacagttaggggtgcgggctcccactccgccgttaggagcctttcccacaactctgagaaccggggtgcgaagaaagaaagggcgaaagggc

SEQ ID NO: 36463 - DNA, 122 bp, Homo sapiens
caggccgcggaaaaagaaggccctggccctgcatacggggcacacacgaacgaccaccagcgcaaatgaacacatgaagctggctgggtactttgtccccaccagcagatagatccacatct

SEQ ID NO: 36464 - DNA, 122 bp, Homo sapiens
ttgggacgagaggagagtggtttgggcaggatgtggaccctctggccaatttccaggccacggtgaggccaagagggggtgggctatgtaagggctgtgccagttccccctgggacagtttg

SEQ ID NO: 36465 - DNA, 122 bp, Homo sapiens
gcacgtaggccgggtgcggcttcaggatgccgatctgctggacgttgcggaaggaatacacgtggtagaccacagggacaagccgagaggagcgatgcggcttgtccaggctgcatggcatc

SEQ ID NO: 36466 - DNA, 122 bp, Homo sapiens
acaagaaagagatgtgtttctaagctccagtgggacagacaaagcctggcgggtgtacaccgcatgtggtccttggtggcgagtgcaggcatcgacccgcactgcctcctgctggtcctggc

SEQ ID NO: 36467 - DNA, 122 bp, Homo sapiens
aaacgaactgttgtacgtgctggggacggggagagggcgacgctgcggctcttttccgttcgggaggtccttctagattcccaaaagtcaatttagtcaagttttgagctgtaacctgtgtt

SEQ ID NO: 36468 - DNA, 122 bp, Homo sapiens
atggccgcccaggccgggtcctataagcacctccagtgaccaggcatctctgagagctgccggtgcctgcaggggccctgggtgctgagcctgcccgcctcctccacggtgtccagcgcggg

SEQ ID NO: 36469 - DNA, 122 bp, Homo sapiens
ctgaggcgtgcggccaatccgactgttccgtttcgctgcctcgtgctacccctacagcctcgaacactgacatttaaaagggtaacagctgggaggcagggaaggggcagccgcacactttc

SEQ ID NO: 36470 - DNA, 122 bp, Homo sapiens
caggagggcagagggctggagaggcagggccggaggttcagaccctccgctctgacgttgcgcctggtgaggccgggaggggtgccgcttgcctcttcagccctcacgctcttgtggaagtc

SEQ ID NO: 36471 - DNA, 122 bp, Homo sapiens
agctcgtcagcccgccagccagcgcttcgcgggccctgtcggtcccggtaagcgggcctgcgcttaccggaaagaggagcgtaagatgaaagagtgtgagagaccattgggggtctgtaggg

SEQ ID NO: 36472 - DNA, 122 bp, Homo sapiens
tggcctttgcagcgtctataaccctccccaccttctgctcctgcacccctggccaggcctcgtcacaggcaaggacacaacagctcagcaggtgaagccctgggcctggtgggactcaggtt

SEQ ID NO: 36473 - DNA, 122 bp, Homo sapiens
gtggaggacataggagtgtgggggtcgtgggcagacccaggcgggacgctgtgccagtgccgccccgaaggcccagtgcgcagggtcccccgcgccccagagcctgccccgcccctacgccg

SEQ ID NO: 36474 - DNA, 122 bp, Homo sapiens
ctgactgctatggtacagtgtcataagtgagttttggcttctggtctacctgaaggctgccgtctttagtgaagtgtgggcttaacagagtgcaaataccactctactttgtgttttcagaa

SEQ ID NO: 36475 - DNA, 122 bp, Homo sapiens
ctcaagggtaacggtgggggaggagcagaggaaaatgaattggagcccgttgaataatcgcgtattgttcggccggttgcggtgacctatgaactgatgctccgagaagtgttttcaggcct

SEQ ID NO: 36476 - DNA, 122 bp, Homo sapiens
caccacatctggttctcgttaacttttctaaggcagcggccgctggagcagcggggctggcggggtaaaagctcctggccagggctgcctggagctgccccttccactccgcccccagggag

SEQ ID NO: 36477 - DNA, 122 bp, Homo sapiens
gcaaagacaggagtcatgtagtcaaagacatagaagcatggaaaggaagtagagtgggggcgtgggagctgcagctagttaaagattatagaagggtaagatgaagcttgagaaattggcag

SEQ ID NO: 36478 - DNA, 122 bp, Homo sapiens
aggtgctgccgcttcccagcttaaagcgacgggcgggcggcagggctgccgaggcccctccgctctgcttatggctcggggacagggcagctcaacgttatctgcacgtcatcctgagtctt

SEQ ID NO: 36479 - DNA, 122 bp, Homo sapiens
accgcgcagctgccagctccacgcccgaacctacccatattaagagaacagctcgctaggcgtggctccagggccaggttccgcccttaaaagaatatggaagaggctggccaatcacgtac

SEQ ID NO: 36480 - DNA, 122 bp, Homo sapiens
tcccgttataaacaggcaggagtcttccttccagcctccctctggggcgggcaggcagcacggcgatcacctgcccccactccctcatctatcaccctgaactgtgttcacggtaaaattac

SEQ ID NO: 36481 - DNA, 122 bp, Homo sapiens
cttagcaagtcctgcaacctagtactgttgccttcatctggggcctccttcacctgggcccgcccggctcacctggccccgcccctgccccgcccccttcccactcgctctgccgggtgctg

SEQ ID NO: 36482 - DNA, 122 bp, Homo sapiens
ctgcaaaatgaaactaaatactacgtgagaattaaaatgagccacagtatcaggactgggcgcagtggctcatatctgtaatcccagcactttaggaagccaaggtgggaggcctgcttaag

SEQ ID NO: 36483 - DNA, 122 bp, Homo sapiens
gtcctccttaattggcttgagtggaggctcgggggctgcctcgcgtttgttttagcccggcgccaggttttaggcagccaccagaggcggggcgtaagcgctaaagcaacaagacaatagaa

SEQ ID NO: 36484 - DNA, 122 bp, Homo sapiens
ccccggcccaggagaaggcccggcgggtcgggaggccgggagaattgagaatctgcccggcgggtcgtgctttagctgtcgctgtagggcgactcttggcgtgtaatcacagcatgtggcgc

SEQ ID NO: 36485 - DNA, 122 bp, Homo sapiens
aacagtacttccggggcaagtgagcgcccacaaggccaagtgcctgcgcgttctttcccgcggaagtagttgacatttacaaggagcagcgcccccaaaggtctttagctgttttttaaggg

SEQ ID NO: 36486 - DNA, 122 bp, Homo sapiens
cgcccagccctgcgcgtagcctccgtctctcgcccggggccgccgagcccccgacacgggcgagatgctgaacggcgcaggcctggacaaagctcttaagatgtccctgccgcggaggtcga

SEQ ID NO: 36487 - DNA, 122 bp, Homo sapiens
aagttgagtggcagcaagttaagagagcaagatttgagctctgactcttccatgacaaaccgcataaccctgagctaatcccaccacctctctgggcctcagtcactatcatagtaaaatta

SEQ ID NO: 36488 - DNA, 122 bp, Homo sapiens
cttggaagctgccttctcttgtttgcatatgttttacagtgtcctaaccgctttggagagcgataacttgagttaaagcacctgtctgtgcctggcctccagcagatcttggtccagtgtga

SEQ ID NO: 36489 - DNA, 122 bp, Homo sapiens
ggggcaggggcggagccacaccggggtgggtggtggttacggctaaccaaagctttttcccgttatattttctgcaacagctactaggttttagagggtgagatccgaatcctggaattgga

SEQ ID NO: 36490 - DNA, 122 bp, Homo sapiens
tccctggcgccctgcccagggacggcctctcacctgcatgagctctgcagctggctgctgcgccttgccctccagttcggagatgaccagggccagccgggcaagctccccgacgccccggc

SEQ ID NO: 36491 - DNA, 122 bp, Homo sapiens
gtgtggccaggagaagggggagttggaaggcggcatctgcttcccaggggtgatgccccccgcagctggctcctttcagccttgtaggaattccctgggcccagtgccccagggggcgtcac

SEQ ID NO: 36492 - DNA, 122 bp, Homo sapiens
tcttggaacacactcggaattggtttcagttcagcatcaggcagatcaaaaaagcatcagcgaagagtcagcaagcctgttagcatgtgtcacagtaggatgggcctggatgcagaaaaccc

SEQ ID NO: 36493 - DNA, 122 bp, Homo sapiens
aatgaggttaatgcagccctcctcccttcactccccagaaaactcctgacctctggacaccgggattttcccatcaagttttggccctatttgctggatcatccactcgcagaactctttgt

SEQ ID NO: 36494 - DNA, 122 bp, Homo sapiens
agttatttattgagaccagactactaagtcacttcgatgaaaacttgagagcttaagactcgccagcatgggctaagaatagatcacattgcagaaaccagaacagtttcttggaaggaatg

SEQ ID NO: 36495 - DNA, 122 bp, Homo sapiens
gtcagggccggaagtgtccctgtctttgccctcgttggctactgcggggcaggctgggaccgaggctgtgtgcagaggcctttggtggctgcgcacgttggggaggggacgtagaactcaga

SEQ ID NO: 36496 - DNA, 122 bp, Homo sapiens
tgaagtcatttctcacgtgagccgtgtccagctgccagggccgggtggtcctgtgcaggccgtgggtgcggtgtgcgctgtggctgatggctgagtggcagcgctgctcttacataatcagt

SEQ ID NO: 36497 - DNA, 122 bp, Homo sapiens
aggaaaagaggtgagaagggaaaggtggtcccgtcggcgccacgctgagctctgaagcctcggtcagaagggctcctcttttggtagaacacaaacgccttccaccagggagggtcctcgaa

SEQ ID NO: 36498 - DNA, 122 bp, Homo sapiens
ccacgacccacttaggaaatgtgtgcttctcgtccctgcaactttaagctctgggtttagcgggggaaaacacatccactggggaagcagcaggagctcctccgtctgtgactcctatgact

SEQ ID NO: 36499 - DNA, 122 bp, Homo sapiens
tcccggatcgactacgacctgaaggcagccatgcaggaggcccgggtgagtggtgtgccgcgtctgctgccgcccagcgaccgctcctcccttccttccttgaatcagagcacggtagaaag

SEQ ID NO: 36500 - DNA, 122 bp, Homo sapiens
caaaccaccatggcacacatttacctatgcaacaaaactgcatatcctgcatgtgtatcccggaacttaaaattaaattaatttttttttttttgagacggagtctcactctgtcgccaggc

SEQ ID NO: 36501 - DNA, 122 bp, Homo sapiens
accaatgagctgccaactcgcgcgtctccggcgtgactgccgagattgacgtggaggacacgtcaaattgattcccgcacgctgcagcctcccggtcagacgaatttctcccaatcggatga

SEQ ID NO: 36502 - DNA, 122 bp, Homo sapiens
ggctgcaggtcctgagccctcccctgggggtaggcggctgaggcctgttgagaattaaagcgcggcgcgggcgggctggcagtgctgggggacccggcgcaccctccacagctgctggcccc

SEQ ID NO: 36503 - DNA, 122 bp, Homo sapiens
cagctcctgcctcctgcccatgcagcccagaagggccagtttcatgccatgtttgattgccgctccggtcccaggagggatggaatctgctgtctcaccaagacttgggcatgaggctggcc

SEQ ID NO: 36504 - DNA, 122 bp, Homo sapiens
ttagaaatactgcaagaaaatgatgtgtacccaaacgtgagcataggaggcttctgttgacgtactccaacagaagaactgtgtttcaagttcaatcctacctgttttgtggtcagctgtag

SEQ ID NO: 36505 - DNA, 122 bp, Homo sapiens
gatggtaaatttccactcgaactgttggggagctagttactggtagaaaggccccaaggccgggcttcggtggctgcagtagactggatctggatctctaaatggcaatctattgacatggc

SEQ ID NO: 36506 - DNA, 122 bp, Homo sapiens
acgggaagtactgagaggtgaggagtgggatttgggacgtgcgtagttgaactcataggacgtccaggtggagaaggaatcacttcctgtctctggatccgtctcgatctctgcctggcgag

SEQ ID NO: 36507 - DNA, 122 bp, Homo sapiens
tggggacgaggccatcactgccatctgggagacccggctaaaggcccaaccctggctcttcgacgcccccaagttccgcctgcactcagccaccctggcgcctattggctctcgggggccac

SEQ ID NO: 36508 - DNA, 122 bp, Homo sapiens
gccatgcggggcgcgggctggcgtggggcgcagcccacagctgggtcggaaggcggaaatcgggcgccgggccggaaggcaagaggcgggcacctttccggaggacaggaggcggaaacgcg

SEQ ID NO: 36509 - DNA, 122 bp, Homo sapiens
ctggaacctgaagggcagagagtacctgcaggaggagaccggaggaggccagccgggccgcgtggcccagcacctcctggctgcccatagcctccgcgccaggctcagacaccaggaaatgc

SEQ ID NO: 36510 - DNA, 122 bp, Homo sapiens
ggttctccaggacttcctgtgctgagaggggcgcagcctgtgggtatcgaggccgacagacgccagcacgcaaatccagaaagttccgagaggtgctgcctgaactcgagggacacagccac

SEQ ID NO: 36511 - DNA, 122 bp, Homo sapiens
tcccctgcacctcggactaccctcattccatagatgaggaccacaggttagaagcttgttcgaggccacacagctcctaagtgacagagctgggctctagactttgagctgccaagtctaat

SEQ ID NO: 36512 - DNA, 122 bp, Homo sapiens
tcctggactccaaaaggcaggtctctctggcctgttcgggtacgggttccgctcaaagcacgctagcagggaatcattttcgttcacgttacaaaccagtctccttcgccctcctcgtcctc

SEQ ID NO: 36513 - DNA, 122 bp, Homo sapiens
acctggtccttgagtcactgagacttgcagagcttcaggggcctccactcaaacatgggacgagaagcgcccttcagtgctgcctcaaggctctaaggaggtgaagctgctgcaggcagctg

SEQ ID NO: 36514 - DNA, 122 bp, Homo sapiens
ggttggggtgtggatcccgggaggctcggaggcgctcggaggctctcggagggggccaggcggaggatccaggagggccgcccagcccccgtccgcccacccagccctctgcccgccagtgg

SEQ ID NO: 36515 - DNA, 122 bp, Homo sapiens
gtggtggtcctcagatcctagcaaccacctaaagtttccagtagtaattagagcttttatcgggcttgctcttcagccctttatattgccgatttagcgttaaggcattaagtccacacacc

SEQ ID NO: 36516 - DNA, 122 bp, Homo sapiens
tgcccttgtggtatctgctgaccccggttcccttatttctaggcccagtgcctcggctttcgcctctcagccctcccctcccctccccggtgtggatgctttctgccctggcctgggagctg

SEQ ID NO: 36517 - DNA, 122 bp, Homo sapiens
tgcgggcggctggagagagcgctaggccgggagcgctgcagggcgaggcggaggcaggggcgcctccccccgccctgccgccccctcgttcttattccggtcacctcccatccctctccttg

SEQ ID NO: 36518 - DNA, 122 bp, Homo sapiens
gccctcatgatgctgctgcgtgtctgctctgcagggcacagggcgaggctgagctcactccggttcatcctcacacagaaatgccacggaggctgcactctctaccggatgttcctgagccc

SEQ ID NO: 36519 - DNA, 122 bp, Homo sapiens
acctctaggtgaaacacaggtcatgtgtaaagttgtaggtcggccaagcagtgctggattcgacacatcttctcaccttctctttccagccaccctccaaggtgccctgactcaccttctct

SEQ ID NO: 36520 - DNA, 122 bp, Homo sapiens
gatgggccagcacaagtcccgggtgggcgtggactcagtgggtcccgcacttggagtggccggccagtgctgctggccccgggcagtgaagggcttagcacccgggccagcagctgcagagg

SEQ ID NO: 36521 - DNA, 122 bp, Homo sapiens
ccctggccctgacagccggtctgagtgggttcctaatgctgcactagcaagcttgtgaagcgggggagcctgagctgcgggcgttttttcaggttccattgagtacatagattggtgaggat

SEQ ID NO: 36522 - DNA, 122 bp, Homo sapiens
aacaagaaagtgagcccacgttcagcctggttttccttgtggggcatcttcccacattggcgtggaggtccaaaaacagaaagcacagccttgccgagctgagaaacagggattagagtttg

SEQ ID NO: 36523 - DNA, 122 bp, Homo sapiens
atctcatgttgagccccagtcccttccactgagcaatccaccactgtctcctcccctccccgaaacctcctctgggccgccactcctctgagccctcagccggactcaccaggccccactct

SEQ ID NO: 36524 - DNA, 122 bp, Homo sapiens
tcactggcccgctcagatcacataccccttcctgaccatgcctgagccagccttgtcggccgggcaaggcttctctgctaggccgggctgggtcacatgtccaccccttgggtctgggctga

SEQ ID NO: 36525 - DNA, 122 bp, Homo sapiens
acgtcactgcactccagcctgggcaacaagagcgaaactccgtcaacacacacacacacacgcacaaaacctggagggtcacatctaaagggacattgcatttgtccagaaatagagaggga

SEQ ID NO: 36526 - DNA, 122 bp, Homo sapiens
tgagcaaggaagaatacttactgaattgtccaagtcaggcatggctggatccagaaagtccgggaatatgggcaggtatgtcatctctctctggattctgctgtccaccacagtgccttcat

SEQ ID NO: 36527 - DNA, 122 bp, Homo sapiens
aatcgtggaggaggagaaaacatagctcagtactttgactagaggcagctgggaaagtgacgtcctgtagcatttgctgttctagaaagtacagagacacgtagtgaaaatgggaggatcta

SEQ ID NO: 36528 - DNA, 122 bp, Homo sapiens
gtgacggtgggtagcacttctccttgtcccctcctcctgggcatccctccactctctcctcggtgaggcagtggcgcagcaaagtctttcctgcagccttatgccccatcaggagcagcttg

SEQ ID NO: 36529 - DNA, 122 bp, Homo sapiens
gacttactaccacgagaaaggcttgggagaagcctcccccacgattcaatgattttccaccgggtccctcccaagacatgtgggaattcaagatgagattgtggtggggacacagccaaatt

SEQ ID NO: 36530 - DNA, 122 bp, Homo sapiens
ccctcctcccctcccctcctcccctcccccctgtcctcctccctctccccgtttctctcccgttccaacaagcgccttcctggtgcctccctaggtgccactgaggggagttctttgcccca

SEQ ID NO: 36531 - DNA, 122 bp, Homo sapiens
gacatgagtggatgggacacagcactcatgggactcgtgtggctggtctgacacccccctcgcccctgacccaggagaagagacacatgcagcagagcaaactgccagccaggaccagcctg

SEQ ID NO: 36532 - DNA, 122 bp, Homo sapiens
ggtgtggctggcggccctgggactagggcgcaggcgagcggaggactgtgtgcccgtgtccgagctggggctgcctctgggcgaaaactctaccgacaggcggcacgcattccgcgcccgct

SEQ ID NO: 36533 - DNA, 122 bp, Homo sapiens
cgagagcgaagaagatctcgaagtagagacaggagacgctcaaggagtagaagccggggccggcgatcccgatcctccagtcctggaaataaaagcaagaaaactgagaataggtaatgtta

SEQ ID NO: 36534 - DNA, 122 bp, Homo sapiens
gctgcttcgcggccctggtctccggtcagaggcactgggctggggctgagcactccgaggcggaaaccaaagggtgtgcccctggggacaccgcctcaagacccctgactgaggctccaaaa

SEQ ID NO: 36535 - DNA, 122 bp, Homo sapiens
gacggtagcttctgcagttaggaggtgcagacacttgctctcctatgtagttctcagatgcgtaaagcagaacagcctcccgaatgaagcgttgccattgaactcaccagtgagttagcagc

SEQ ID NO: 36536 - DNA, 122 bp, Homo sapiens
aacatctcagcaatataataaggccaaagttcatctcataaaaaccgttttctaggagaccgtaaatattgctactcaaatatctaatatattatttaatattgggaataaattttcaagtc

SEQ ID NO: 36537 - DNA, 122 bp, Homo sapiens
gagtcatggtgagaatttatcaagacttcaaaagagcagataaataatccacaaggaccccggatcagagagtgctccgagctgggttgccccactgtgcttgtatctgcactctccaacac

SEQ ID NO: 36538 - DNA, 122 bp, Homo sapiens
agcatgggggaagccacccccatgatccaattgaaacaggaaaagttcccttgtccccttcgcagggcgtgcaatgggagtgtgactcacttctttagtgccccgctgctcaaacctctagg

SEQ ID NO: 36539 - DNA, 122 bp, Homo sapiens
cccaggtggccagtgcagaacccgcaagtgggggggagagatggcccgggaggctgcccccgcgctccacagcaagaggccactgggctgctgcctaaatccccagccacatggtggtaagg

SEQ ID NO: 36540 - DNA, 122 bp, Homo sapiens
acacacacacacagcaaaggcgtgtgactctcagtgcctggtgtgaggtttggaggacatcgtttcaggtctgctaggctaagcagtttgcagaacggtggccaggaacggtgggtactgag

SEQ ID NO: 36541 - DNA, 122 bp, Homo sapiens
agccgcagccacagccacaggcaccaccaccactgcagccgccaccgcccctgcagctaccgccacggccgcaccgcccgcccgccagccccgccccctggagcccagcccattggcccgcg

SEQ ID NO: 36542 - DNA, 122 bp, Homo sapiens
ttccagcggaggcgggatttccggtccgtgggaggggagacgtccgcttgccgggaaatccggcactggcttgaggattttatggagtggagtgagatttctttgtaagtgacagcccgccg

SEQ ID NO: 36543 - DNA, 122 bp, Homo sapiens
gctggccttgtaacagcatggaatctaaaggcgatattcaaaaccacttcactcatcatacgcttactgattctgaatagggcccatttgcaggggacatttggtagttttccaatacgctt

SEQ ID NO: 36544 - DNA, 122 bp, Homo sapiens
ggagtctgggtagcagctgggtaccagccactaggctggtgccaggacctggtccttgggcggggcagagggctatctttgtgggagtggagtggcttttcttgcttctggctgatgggact

SEQ ID NO: 36545 - DNA, 122 bp, Homo sapiens
ctgctaatgtgactaacgcgatgccgatgaacatctcggcgttttttggtgcaggataagcgggtgtagactctgtctgtttagtcccagattctcctcctttaatgaactaccgtggaaat

SEQ ID NO: 36546 - DNA, 122 bp, Homo sapiens
ggcctggggcggggaggcaccgagaaacccccgggttccaaacagagcaggtgcagggggcgtgcaggaacaggtgagggcgtcccggcgcggaggagcggcgggcgggcccggcagagcgg

SEQ ID NO: 36547 - DNA, 122 bp, Homo sapiens
tcctaacaagagaccagaacttcaggctggtctgaggcatgtgcccacctctgggtcacacgtcattcttgaagcagtgggcaagtcaaatatccccacccctcctgcacagaaaaggggag

SEQ ID NO: 36548 - DNA, 122 bp, Homo sapiens
agaggccctgcccacctctttgatatggacttgtactaatgaactacaattcccagcatgcgtcagaattagggccgtagagttttttaaaatatggactacaactcccggcatgccacacc

SEQ ID NO: 36549 - DNA, 122 bp, Homo sapiens
tcagcgtcttcttatgcctgcctctttcaaagcctcgtaggatttacacctgattaacaacgtttgcattaggatcgccagacaccggcgcacggccccgcaggcccgcgcgaatcttctac

SEQ ID NO: 36550 - DNA, 122 bp, Homo sapiens
aagaacaaacgaggaagggacggcgccaggagcctgggcttggcagctccctccggagggcgcccggggatgcccgcgagtgtccaggaggctggtgacctgccaaggctgggcgggctggc

SEQ ID NO: 36551 - DNA, 122 bp, Homo sapiens
cacacagaccaggcagctgtctcctcgctcctgctcctcgccccctctccaaaaatgagacgtccgtagaatatcaggaatgcttgggaaatagggcttatctatctgagtcccgatggctt

SEQ ID NO: 36552 - DNA, 122 bp, Homo sapiens
actccagcctgagtgacagagcaaaacctcctctctaaacaaacaaacaaaaaagaaccccgtgtgccttgtgtcctggggacttgtgcacaagtcttacctcccatccaccccatcctcca

SEQ ID NO: 36553 - DNA, 122 bp, Homo sapiens
ctatggtgacttgtgttttacgtgcccttcagcgtttatgaagctggggtgccaccgtctcgttttattctcaccagtgccctgtgaagagaaccaggcagattctccgatccctgtgctat

SEQ ID NO: 36554 - DNA, 122 bp, Homo sapiens
ctgtttcctaagctccgacacttgctccagaaatagcttcaaaaccatccattacaaaatcgaatcaactgcagggggcagcatttgaaaaatagaaatgttctgatgaagaatctgaactg

SEQ ID NO: 36555 - DNA, 122 bp, Homo sapiens
ttggtaatctagagggttttgagttaagtgcttttgacatggaaaatcaggagccaagggcgaagctgccttttaaatgctctttctgaaagagtccactgcagatgtaattgagcctctca

SEQ ID NO: 36556 - DNA, 122 bp, Homo sapiens
acggtgcctctggccccttccagcgcgccgcgctgcctgtggcgcccgtgggactctacacggcccatgtgggctacagcatgtaccacctgacatagagggtcccaggtcgcccacctgtg

SEQ ID NO: 36557 - DNA, 122 bp, Homo sapiens
tgggtggcttatggttcccgcagaggcattccaagttacacgatctgacaagacatggagcgacctgagtttgcgtgtttctaacacgttggcttgaatccagcatgtgctggtgctggctg

SEQ ID NO: 36558 - DNA, 122 bp, Homo sapiens
aataggtatcctgcataatcgagtcctattggtctaaataaaaataaaacgtaagccaatcgcacagcttccttttcgcgcccagtagaggctataaaatgtacgtttttctagtttcactt

SEQ ID NO: 36559 - DNA, 122 bp, Homo sapiens
gttcatttgagtctaccctcaaccagcacctgcccaagcttctggcctagaagaggcacacgtggcagaaatacaagcagacggcagaataaatagcatcaatgaaaagagtcaaactttgt

SEQ ID NO: 36560 - DNA, 122 bp, Homo sapiens
ccatgggctggatgatattgttatgaaaggccggccttaccgtgtctgtgggttggacaacgatactattacgaaaggccggcctggccgtgtctgtgggctgatgacgatattgttatgaa

SEQ ID NO: 36561 - DNA, 122 bp, Homo sapiens
ctaaataaaccactattaaacatgtgccaggttatcttcctgcataactctcttaaagcccgtaaaactctatgaggtaaagattattgtgtccatcttaggaataggaaaattgaggttca

SEQ ID NO: 36562 - DNA, 122 bp, Homo sapiens
caacatcccccagtgcactgttccttgagccccttcaccaactcctccaggatctctagacggaccctcagggcctgtacctctgaagcaaggactgggggctcggtgcctgggggacagcc

SEQ ID NO: 36563 - DNA, 122 bp, Homo sapiens
tcatcggggcagggagcattgcaggcagcaagggaaccagctttggggcctgcagagctgcgttaggggcggcctcaagcccttcccagctcctcccctgctgcaggaggggccgcggcgtg

SEQ ID NO: 36564 - DNA, 122 bp, Homo sapiens
cttcgtctctgcactctcacccgccagggggaaagcgctctacagccaggaaaagtgaagcgaaaacggcttccgtagactccgccaccaccgagtaacagaccaactctgacagcccgaag

SEQ ID NO: 36565 - DNA, 122 bp, Homo sapiens
tggtcactgggtctagccaggtctctcccccaagtttctgtgacccctccaggccagcagcgctcaagactaagccctgtccagttgaggccctgttcccaggcctctaaccacaaacctca

SEQ ID NO: 36566 - DNA, 122 bp, Homo sapiens
aactgaggcctgaagagtttaaaagttcaggctccccatctctatcttatgcctttcctccgcaccagatctcgaaactgttccctgataattttgagctggtccctggggtgagaagcagc

SEQ ID NO: 36567 - DNA, 122 bp, Homo sapiens
cggtcatctctgtaacctccctaccaaggactaattggtctttaaaactcctcaatgcaccgggcgcggtggctcacgcctgtaatcccagcactttgggaggccgaggcgggcagatcacg

SEQ ID NO: 36568 - DNA, 122 bp, Homo sapiens
acacacacacacacagctcccaaacaagccactggggaatcttagccaatgccatagggtcggctaaccgacacggacatgcacacaccccacacagacacacacaccacagacagagacac

SEQ ID NO: 36569 - DNA, 122 bp, Homo sapiens
ggtgtcccgagtcggtagtgcaccgacaatttagcagacaaaaaagacaggacgccagagcgcgcaggctgcattagcagagagcgggggtcgggcccgggcccgggagggaactagctgcc

SEQ ID NO: 36570 - DNA, 122 bp, Homo sapiens
gctgctgggggccagggctgggatgctttgtccctccacggggacggggacgtatggcctcgctgattctccgcgcagccgctcattctggtgcagctgccgcgccgccctccaggcgctgg

SEQ ID NO: 36571 - DNA, 122 bp, Homo sapiens
gcttgggcttcagtcttgctgtttggctctgtcgaatattctatgggccacctaaaatcccgtggtaggttaatttactgcctaaataagtctgagtggattcgttcttgcagtgactgaaa

SEQ ID NO: 36572 - DNA, 122 bp, Homo sapiens
gctggctcagatgtcagagatgcacaaacttgcatatgctcagtccacaagcaacacccccgcagctggcatctaaacccttggtaaagctcttggctacagagtgctcgttgatgacattt

SEQ ID NO: 36573 - DNA, 122 bp, Homo sapiens
aggaagcttccagtttctataaaaattgctttttgatagccctgtcttttaggctcatctcggtatcttgcatctctctgcatatctgtgagaactcgttgagagggaatgcagtctctggc

SEQ ID NO: 36574 - DNA, 122 bp, Homo sapiens
aggtacccgccctggccagctgctctagggtttccaaagtaatgatcctagtcaaggccacggaatacttacatgaactggcggaagccgaggagaggatggctacggagaaaaggcagctc

SEQ ID NO: 36575 - DNA, 122 bp, Homo sapiens
atgcccattgtactcaatcttcctgacaactcattattccatactgaagaaatggcttctcgaagcaaaacctgctctttcaagatcataaaattccccatatcatttgagttaaaatgaaa

SEQ ID NO: 36576 - DNA, 122 bp, Homo sapiens
cctaactgaccagggccctggctgctgtgctctgaactccagcactgggattgtgcccaacgccacccttcccacctggccgctcccagccaaggactggtggcggcatggacacgaaggca

SEQ ID NO: 36577 - DNA, 122 bp, Homo sapiens
tgcgccccgagggtctgttccgcttatggcgcccgccgggagtctccctttcttcgcaagcgttaacctgcgttttactcgtaaaaatttgctttctaggcttcgtataattgttctggtct

SEQ ID NO: 36578 - DNA, 122 bp, Homo sapiens
tgtgagggcggtcccgggagcggattgggtctgggagttcccagaggcggctataagaaccgggaactgggcgcggggagctgagttgctggtagtgcccgtggtgcttggttcgaggtggc

SEQ ID NO: 36579 - DNA, 122 bp, Homo sapiens
ttagggagatgtgtttaccgtcctggctgacactgaaggccaagcattcttgccaccaggcgtggcttgactcgcagaacccacactctggcggctgtgggcgcggcactggaccggcgccg

SEQ ID NO: 36580 - DNA, 122 bp, Homo sapiens
ggaaggctcgaaaggcgcggagcgccgaggggagcgccgaggggagggctgagggggacgcgactgctcagggacctcgcgaagcaagaccgaggcttcaaaacaagttaccttggccaggc

SEQ ID NO: 36581 - DNA, 122 bp, Homo sapiens
aatcgaatgttaggtcaatccattaagcttcgattaagtcctcggcagaacaatgccagccgggcccatcttcataaataccgtgattgccaggagagaggcactaattttaattaaacctc

SEQ ID NO: 36582 - DNA, 122 bp, Homo sapiens
cggaggagccggtggctctagtgcggtggagccaggcgtggaagtcggtccggcgcggggcggggggcgggcgggagctacaagcggcggcggcggcggcgaccgtgaccgtgacgcgcgag

SEQ ID NO: 36583 - DNA, 122 bp, Homo sapiens
cgagtctcaggcccagagtgggtgcgatggtcttgcttgcaccctgtatcccccggcagacgcccgggaactctactaagtgggtgaccccagagagctcgcccccacactccgactccgag

SEQ ID NO: 36584 - DNA, 122 bp, Homo sapiens
gccaagtctgaaattcctacggaaaagcaaagaactgggacagacaggccatcaggaaaacgaagagcaaacgggaggaccaggctgctctcaggacttgcccagtataagctcccgtcatg

SEQ ID NO: 36585 - DNA, 122 bp, Homo sapiens
ggtgttatctaatccttttatctttctgctaaatttacacttagcaagtgatttcacggacgatgtctcctctgaggtagagcagttatgaagatctctgctttctaggacccctcttcctt

SEQ ID NO: 36586 - DNA, 122 bp, Homo sapiens
ccgcaccctcgtcagtgcctgtggctggaggaagccacatgtcgggggggattgtgggctcgtgcaggctgcgtagtgggtcacctgtggccaaggcctgagctgctgggacacgctcacgt

SEQ ID NO: 36587 - DNA, 122 bp, Homo sapiens
aaatggagattgtttttatactctatgtgctgtttgtacactgacagcagcatggttattcgccaaataatcagagtatgttggcatttttataaataaagtgcttgggtttgacagtaatc

SEQ ID NO: 36588 - DNA, 122 bp, Homo sapiens
ctcccctcaccccctcctacactacatatgtaaaggttctgtttattgagtgcttttccacgtctgtgctcatttttaatttaaaatttcagaccccgtcctcacaataattttttaaagta

SEQ ID NO: 36589 - DNA, 122 bp, Homo sapiens
tctgtggtccaaaaacggtaccaaatgaaaaggccacttcccagcctctgtaataaaaggcgaaaagcagtcagggaatttagtcaagaccttattcagatggcgggaggagagggggcgga

SEQ ID NO: 36590 - DNA, 122 bp, Homo sapiens
agccacaactggagcaaactctcacatctagaagagtggccactgaatctgctctctacccgagggaggtttacctgggaagagacctgtgcaagccctggatgtgggtacatgccatttgg

SEQ ID NO: 36591 - DNA, 122 bp, Homo sapiens
aaaagttctcccttttcaatgctttttcaaacaccctgtcatgggttgaattgggtcccccgcaaaaacagaggttgaaatcctaacccctaatactcagaatatgactttatttggaaata

SEQ ID NO: 36592 - DNA, 122 bp, Homo sapiens
gtccacacagggttcatgctggtggggagagggggaccgtggcttcaggaaggggaataacgtggttggatgccctggcccagccagtgctgcccccagggaatgagacaccttttcatgag

SEQ ID NO: 36593 - DNA, 122 bp, Homo sapiens
gggccacgcggagccgcccctctcccggccctcgcgcaactgtcaggcgaaacgggccggcggatattggctcggcgacacgccgaggctcctccccgagtctggatctttatattttggga

SEQ ID NO: 36594 - DNA, 122 bp, Homo sapiens
agggggtgggggaagggatgaggacggccagacaagacagggcgcacacacggagcccctcgcagtgtgcaaaatgatggcgaatgacaaagccacatgcttccctaactctgcccgtaatc

SEQ ID NO: 36595 - DNA, 122 bp, Homo sapiens
ttttgtttttcttgcaattacttttggcatctttgtcatgaagatcatttccaggtcctacgtccgcaatggtatttcctaggttatcgtccaaggttttaatatgttttcattttagattt

SEQ ID NO: 36596 - DNA, 122 bp, Homo sapiens
cgccacagtacgacaggaagcctggctcccctgcagaactctttcccactgggcttatctcgggcttcccccggcgaggcaggagcgggactgacgggctggctgaaaggcagctgagagat

SEQ ID NO: 36597 - DNA, 122 bp, Homo sapiens
gagaccgtgccttagtggtgtaccaggaggtgcaaacaatttcctataaagttatggttccgggagagatttattcattcacacctatttaaatacactaagagtctgggcacagtggctca

SEQ ID NO: 36598 - DNA, 122 bp, Homo sapiens
agttcgttgaggatgtcattctcattgtcccagtccggctccgggctgctggggaagtcgcggtaggccacgcagatagtgcggagcccatcgcaagccatgggctcaatcaccttctttac

SEQ ID NO: 36599 - DNA, 122 bp, Homo sapiens
gcagctggtattaactccgtgtcggcgtaactgacccactgttggacaaggacagccgcccggctgccccctgggccccccaggcctgctggccacagcagctgggccacagccgtggcccc

SEQ ID NO: 36600 - DNA, 122 bp, Homo sapiens
tgtctactaaaccacatcttatatctattgtgaggccaactgtcttgaggccaaacaagacgcgaattatatggtagcacttgagagggctgcggacacattagagcagctttctcttccca

SEQ ID NO: 36601 - DNA, 122 bp, Homo sapiens
tggacattgttcaacctggtacacccaggtgcgcagatccttcaaaactgaacgtggattcgcaggcccgaaggagccgcaattccagtattttggggcccaaccagggtcctgatttctgg

SEQ ID NO: 36602 - DNA, 122 bp, Homo sapiens
ccaatcaaatcccagaaacagtgagtgctagaggcccggctgctaagcaacggcagagggcgggaagtttgaacgttctggacccgccccgaaggcaaataggccaatcagcgtccagactc

SEQ ID NO: 36603 - DNA, 122 bp, Homo sapiens
ccccggaggagcccagcttacggccactccacatcgcgacaaacgatcccacctcttttccggtccctcccgaaaaaagatccccaacataaaggttccgagatcactttcgccgtctgcag

SEQ ID NO: 36604 - DNA, 122 bp, Homo sapiens
ggtttagggaagggattcaggagagaagaggtccgtgtctatgaaaactcaaaaagcagtcgtgagatcagttcaagagggatttgactctagtcatctgaatatgtgccaaggccatttat

SEQ ID NO: 36605 - DNA, 122 bp, Homo sapiens
gctgggtggggatgctcctagtgccccgcctgcgtggcgccccccaggggccacccgccacggcgctcgtggtgtctgacccgcaagggcgcccctagtgacagccctcccttatacctccc

SEQ ID NO: 36606 - DNA, 122 bp, Homo sapiens
ggccccggggctcaggggcacaaggagaccagaggaggcatcgcccaacctgtcctttaccgagtgccctgcacaggccccatccagggatcagtcaccccactgaatcctcactaggacca

SEQ ID NO: 36607 - DNA, 122 bp, Homo sapiens
aggctctggccgcatacaccagtgcggcctcatccgggctctccgcctcgtaccgcagctcgcgctctgactcctgctcctgagcaagctccgaggcccagttgtccgcctggctgctgtag

SEQ ID NO: 36608 - DNA, 122 bp, Homo sapiens
agggactctcaactctcacgctcagtcgttctagtacacagcagggactctcaactctcacgctcagtcgttctagtacacagcaggtactctcaactctcgcgctcagacgttctagtaca

SEQ ID NO: 36609 - DNA, 122 bp, Homo sapiens
gtaaggtttccattttttgctttggagataatgttgataagagtggcagacacgtggtctcgtctgttttgcgtctttgcttctgatgaatcatattctggagctccatctaagaatcccca

SEQ ID NO: 36610 - DNA, 122 bp, Homo sapiens
gtcagcctccatcaggtgctcaggtttccctgaggactggagtcaggtgccagggaatcgcgtggtctaccttatgacctggtgctccccacacctgtctcctaggcctggggggtggggag

SEQ ID NO: 36611 - DNA, 122 bp, Homo sapiens
gcggggtttcccggaactgcttccagggactccgagctacggggcaatcgcttggcgaggcggcctgacaggcagctcagacgaccagtagtatccaggcaaaacggaccacgccggacgac

SEQ ID NO: 36612 - DNA, 122 bp, Homo sapiens
tgccaccttctagttcatcccataggaatgtttttccaagtccttccagtctttttagaacgtggtggaggagggttgtgtgtgccccagggggtcgggggtaggggatgcagggaggatct

SEQ ID NO: 36613 - DNA, 122 bp, Homo sapiens
cagctggagaccagaagcctgaggcagctcggccctccccagcccaaagtgccgttattccgtttctgtatcagtaaacacgtttcattttccgtagaccagggaagggtgatgggtgatcc

SEQ ID NO: 36614 - DNA, 122 bp, Homo sapiens
acctagggcggaagtgctctcggcggaagtgatcgctgtgtgaatcgtgggtgggatggccgcgggccgcctctttctaagtcggcttcgagcacccttcagttccatggccaagagcccac

SEQ ID NO: 36615 - DNA, 122 bp, Homo sapiens
acgtgctccattgtcttcaacctgccctcccattcattatggtctggtttcttgatatgccgaaggaatattaggcctctttgttggttgtgcagctctgtcactttctcattatattttct

SEQ ID NO: 36616 - DNA, 122 bp, Homo sapiens
ggccccacctcatctgacttgtgcccacatctcacacctcctctcaccgcccctcctcctcgctcaccctctggcaccacatgggctgtcagctggctctgtcctcagggcttctgctgtct

SEQ ID NO: 36617 - DNA, 122 bp, Homo sapiens
gtaactgaccccggaagcgcagggcccgggagaggctgcaggcggccgcctggggagggccggggatcgagaaaacgcttcaggagctgcttgtaatgactgggcacattcggtggtaattg

SEQ ID NO: 36618 - DNA, 122 bp, Homo sapiens
actttcaagtgattgatttttaggttatttgaatttcatctcaattaaaaaacccaaacacgcaaactgctcccgccagctcagccccgagcagacggcgcagcccgtggaggatgctgagc

SEQ ID NO: 36619 - DNA, 122 bp, Homo sapiens
tcccctggtgggaagcaggcatgaagcggggtatgtatgagtgcagaggcatgcacatcccgggcctgcctccagccgggtacgcggattcgggtgagctgtgtatttccacagcacctgaa

SEQ ID NO: 36620 - DNA, 122 bp, Homo sapiens
ggtgcggggcctcggtgcccctcaacccgtggcacccaggcagccggggcaggactatcgcggggagatgcaatactactcagttacgaggtgtgtagtgctagcacgagaaacttggagga

SEQ ID NO: 36621 - DNA, 122 bp, Homo sapiens
taaagggctgtagcggagttttggcttcggtgtttcccacccacggtcgtgcgggaattgcgcacctcagggactcgcagcactagcctcacagcaccgcgtggagttgcttgttcttttac

SEQ ID NO: 36622 - DNA, 122 bp, Homo sapiens
cttgtcaaacatggtctctgcccgggctgcccggcaagggcgatggactgagctgcgggacggcggccgaggcccttgattctcgagcccgggccggggctggcgacggccccgagctacgg

SEQ ID NO: 36623 - DNA, 122 bp, Homo sapiens
tgactctttctttgagggtccaagtaggaacctttatagcccagatcctggggccctgggcggcccactgattcatttcaattccactgcctttcatttctcttctcctatcttactgcctc

SEQ ID NO: 36624 - DNA, 122 bp, Homo sapiens
gtgctggtgcccttccgcgaacgcttcgaggagctcctggtcttcgtgccccacatgcgccgcttcctgagcaggaagaagatccggcaccacatctacgtgctcaaccaggtggaccactt

SEQ ID NO: 36625 - DNA, 122 bp, Homo sapiens
tcctccgacaaccgctcccctcaccctccacccctacccccgcccctcctccttcctccccggcatgcgccatatggtcttcccggtccagccaagagcctggaaccacgtgacctgcccat

SEQ ID NO: 36626 - DNA, 122 bp, Homo sapiens
tgaccgctattacctgatccccagtcctagcctgggcggaaagtttcatataacttgagacggtgcgcgtggggaaaacgtaaagctcccgttcagggctgctcctgcgcggaagctgcgtg

SEQ ID NO: 36627 - DNA, 122 bp, Homo sapiens
tgttagtcccactcaagtcacagcctcatggtgcactcctggggttgggggctttcttggcgtggtgggtgggtgcagacatcagcatctttcacagagcttgtcttagtcaattctgaagt

SEQ ID NO: 36628 - DNA, 122 bp, Homo sapiens
ggtgtagacagatgggtgggagagaaggaggcaggcagggtgcccggccggaaatgggggcggggagaagagtccccgcccagagcccagactgccggaggatacaggccagagccgcctgg

SEQ ID NO: 36629 - DNA, 122 bp, Homo sapiens
acacgcacgtggtgtactccagcatggcgcacttgcgctccaggttgtgcttgtccatggcgctctcctgctccttctgcaggctgccctcctcgtcgctgccctggtctgtgctgctgttc

SEQ ID NO: 36630 - DNA, 122 bp, Homo sapiens
atcagaccacagaagcggaagaggcggggcgtgcggacctgccaatcaccgcctcctacccggccccgcccctgagcacggcccctgctgccctgccgcggaagccccccggcgccgggagc

SEQ ID NO: 36631 - DNA, 122 bp, Homo sapiens
tcaggccactacactccagcctgggtgacagagcaagaccctgtcccccaaaaaacaaaacgaaaacccaaaaaaccaagaagtacctacttgactgtgctgggggatgcacacaggaataa

SEQ ID NO: 36632 - DNA, 122 bp, Homo sapiens
gtaaaggaatccccaacgtgctgcgccgcactcggcagtctttccttcgcgtaatgccgccgtttgtagtgttttatcttatctatacatgggggactcaagagtttgagagatccaagggg

SEQ ID NO: 36633 - DNA, 122 bp, Homo sapiens
acagagaaatttcgtgggaggcctaatgtcccgctaatgggcggcggaggctgcagccctcgtgtgcctaatggcgggtgactagccgcagagcctcttgagagctggcatattggagctat

SEQ ID NO: 36634 - DNA, 122 bp, Homo sapiens
cgccctctctttgtatctctgtccgtctgtgtgtgcttgtgcctcgggacacatgtgccccgtgcgccggagggtgggtttcttgcaggtcggcctttcttctggtcagcctctccccgcgt

SEQ ID NO: 36635 - DNA, 122 bp, Homo sapiens
gggtgcagtgcagcccctcatccacatccccatctcctggcagctttgtgcagatgtccccgggggatcccagatcaagggtgcagccccccatccacacacccgtttcctggcggttttgt

SEQ ID NO: 36636 - DNA, 122 bp, Homo sapiens
ggagaagctgaagaatagaactattggaccatgaaactcccaagagtccttccccctcagcgtttctcagaatttgcgaccacgattttctctgtgaggctcgcaattgctatttgccaaac

SEQ ID NO: 36637 - DNA, 122 bp, Homo sapiens
gagtccataaaggaccgtaaaattgcggcccacttgggcagcccgggtgctgcagccctccgaccagtttgcacgtcggtcagaggtccaaattaccttgtcacttcccgggcttcgcggcg

SEQ ID NO: 36638 - DNA, 122 bp, Homo sapiens
tcccacgtcagtgtgcgtgaactcccgcggcagtgtgcgtgaccgcgtggcggcagtgtacgtggcctactggcgggaatgtgcgtgacctccaggccctttacctttgcctgtgacctccc

SEQ ID NO: 36639 - DNA, 122 bp, Homo sapiens
gccaaatagctctgataagtgggcagaccttgagcctagagacccacagacacacttggacgattcctgcagaaatcagtgaggcagtctcctcccaggggcttggcgcctggctcgaggcg

SEQ ID NO: 36640 - DNA, 122 bp, Homo sapiens
aaatgggacaggcccacaatgtctaactttttcatgagcccagtactaactacagatgtccggacaatccccttttaggcgggctgtgttgccaacaatgcggtcatcagaaagaacgccgt

SEQ ID NO: 36641 - DNA, 122 bp, Homo sapiens
tcacccagtggatcctgcaccggggatgcaggtggagctgcctgccagtcccgtgccatgcgctcccactcctcggcccttgggtggtcgatgggactgggcgccctggagcagagggcggc

SEQ ID NO: 36642 - DNA, 122 bp, Homo sapiens
gggcgtcctccagctcagccactccactgagcacaaggactctctgtggggcccaggagccgggagtcacccctttggtgtccaaaacacccggctgtccccagacttgtgtccagggaaga

SEQ ID NO: 36643 - DNA, 122 bp, Homo sapiens
cgagtgtatgtagctctcatccttccctcagctatgaggagccatcttcttagggagctgcgacttggagaaatataaatgggtcactataaattatgtcaatgaaaactgacaaacctaaa

SEQ ID NO: 36644 - DNA, 122 bp, Homo sapiens
agtgtagttccctcccttcgctcggactggggagagcaccccgactcctccgcggagtgccgcctggccccgacacttggagagcaactccagcttcagctggccaggccgagcaatctctc

SEQ ID NO: 36645 - DNA, 122 bp, Homo sapiens
ctcactcccacaggatgaaatggagatcggctacatccaagccccacacaaaacgctgcccgtggtcttcgactctccaaggaacagaggcctgaaggagtttcccatcaaacgcgtgatgg

SEQ ID NO: 36646 - DNA, 122 bp, Homo sapiens
ggggcagaccctcagccggagcttcttcctcccccacccctgcaggccgggcccaagctgcgacacccccagcacgggctcagcctgtgaacaaactccgagctcagtactcggaggaactg

SEQ ID NO: 36647 - DNA, 122 bp, Homo sapiens
atctatccagtgctggctgttgcagatctgtgcagttgctttttgaacaggacccacatccgtcttccaaaatatctaaaattaggtctttgacagttcctgaaaatgttagttatcatata

SEQ ID NO: 36648 - DNA, 122 bp, Homo sapiens
cccaaggctctgataaggttccagttctgcccacgcaggccacacggaacagtctttcctcgtcaaagacccagagaggcctggaggtgtgggggagtgggcagacacggatccagcttcac

SEQ ID NO: 36649 - DNA, 122 bp, Homo sapiens
ggtgatctgcccccctttgcctcccaaagtactgggattacaggcgtgagccaccgcgcccggcatgtattacaaattctaagaacacgaagataatggggccggcttggtggcgcgaacct

SEQ ID NO: 36650 - DNA, 122 bp, Homo sapiens
cattgggaacagcatttgaaaaggccttaaagagtgctattgtttcatgtgttttagccacgacctgggcaggagcaccttaatgagaagagaataggttctggtgaggttggagagaaggg

SEQ ID NO: 36651 - DNA, 122 bp, Homo sapiens
gtgtgtgcgatgcacttcccatgtctgggggtcatttcagccatgagcaaggttgacattcggctgacaggcatggctgtgtgtggcttgtgtgtgttctggctgttggtcagaggctgtgc

SEQ ID NO: 36652 - DNA, 122 bp, Homo sapiens
aatataatgatgtgtcaacttcaaccatggataaggccatttagccttagtaaggccgatcgtattaagattgtgcctgtttggcaaaatttcaagtcatcccacttaatattcaggaaaca

SEQ ID NO: 36653 - DNA, 122 bp, Homo sapiens
tctcccttcttcctcttctactcttctcctcaatggcctattcactgttgtcttgtcacccgagtacttaggtcaaagcatagaaactggaggactgagctgagcagtttggggaatggaag

SEQ ID NO: 36654 - DNA, 122 bp, Homo sapiens
tggacagtcccgaaaataatgcacagaattatcagaagcaattaaaactccaggcaaccacgatcatattacaaaagaaaaagtgaaaccaggtcaaggtgcaaacctgccagtatcccccc

SEQ ID NO: 36655 - DNA, 122 bp, Homo sapiens
tataatgtgtccctccagaagactctaattaaattaccaagccagtctgttgtggcgactcggcttagtctcctggatgccaaatcaattttaaagcagaacatcctgctgatgttctaaag

SEQ ID NO: 36656 - DNA, 122 bp, Homo sapiens
aaacggctcaggcttgcaagacttcctgcctccccgggattcccagaatcttcaagtggacggaaaggcgattcctaaacaagttatagaaacttctagatgctatttgagatacatagaat

SEQ ID NO: 36657 - DNA, 122 bp, Homo sapiens
gccgagaagacgccagagtgcgctgctgaaattcccgcggagtccggtgtgctggagagccgcagcggggtgaactcccggccccgtctctgcgtaggaggtggttcgcaaagtggccccgg

SEQ ID NO: 36658 - DNA, 122 bp, Homo sapiens
aaaagcaccaacccaccgtggggctcattacaagaatcctaggagatgatgtacctgcagcgtgctggcagacgcggtcaacggtaagtgctccaggaacgcgtcacgttcttcttgctccc

SEQ ID NO: 36659 - DNA, 122 bp, Homo sapiens
ctttgaggcccagggtcagctggggactagcaggagctctaatctcgcgctgcgtcagggcgggaactgcaagaggccgcccccggcaggccgcgcatgcgcactcccgcgcgcacgctcac

SEQ ID NO: 36660 - DNA, 122 bp, Homo sapiens
gcggcgatggggctgggccaggtcgcccgctggcagaggagcagcgcagctggggagcagcgcgactggggagagcagggccctgaagtggaactgggcccagagcggtgctgctcttgcac

SEQ ID NO: 36661 - DNA, 122 bp, Homo sapiens
cagtttccgttacaagggtacaaactggccgctccccccaatagacggttttgttgagttcgcctctttttttttcttctttttttggccccacttcctatgagagaaactgcttgggtgag

SEQ ID NO: 36662 - DNA, 122 bp, Homo sapiens
ccgtaccaagagggaaggttccatagtagaaggaggcctcttctggggaccccttccgggcggcccccagcctgggcaccagcagtagcatccacagaagggtggcgacccacactggcttc

SEQ ID NO: 36663 - DNA, 122 bp, Homo sapiens
tcccccggctgcaggacccggtgctcctcagcgacgcccctcagcccaggaggccctctccgccttgagtcttccaagaccctctgcgacgccccccgggctgggacatcttctctgtctcg

SEQ ID NO: 36664 - DNA, 122 bp, Homo sapiens
actgccagcaaaacgggacagcagttgggtgggatttggccttcctgaggctggcggcaccgtctgtgggccgtgccatcacaaatggctctaggtcaacacctccagcctgcgtgcactgc

SEQ ID NO: 36665 - DNA, 122 bp, Homo sapiens
tcatcactcaccagaaaatactgcggggaggagtcccagggcttgagggagggggctccacgctcaccactgactcagaagataccgcaagggagcactctcgctgggaggagtcccaggtc

SEQ ID NO: 36666 - DNA, 122 bp, Homo sapiens
ctggtggctgcaaatgagcaagggagcttcattcagttgggacaattcagggttcaggtacgaaaagggtatgaagcctactgaaaaataaggaaatggagcatggagaaagaaagggtttt

SEQ ID NO: 36667 - DNA, 122 bp, Homo sapiens
ggcccagcgcagggaccctgagaccgccagatccggtgggcggcttacagtggcccagaacgcacccgccggctcgtgttagcgggttaagggcttgattaaaaatagtgctggaaggaaga

SEQ ID NO: 36668 - DNA, 122 bp, Homo sapiens
tggctggcgagcgcgccgccccctcgcacaccagccccgcggcggggaggggagcgcagccggcagctggccgccgcctcctctgcagtgcctccctccgtgcgctccctccggcggggata

SEQ ID NO: 36669 - DNA, 122 bp, Homo sapiens
tcaagatcctggcacgtagcgaaggctccataaatggcagccatcattcttggccaagtgcgggcgcattctcccgggcacgcctcccgcggggtccctcaggacaggccgagcccgcctcc

SEQ ID NO: 36670 - DNA, 122 bp, Homo sapiens
tttccacatttgccccgttagtgacctcatcttgtctcgtaactgaaaataccacccacacgctgatgacttcctacctgggctgcttacaggcacgtgctgccacgcccagctaatttttg

SEQ ID NO: 36671 - DNA, 122 bp, Homo sapiens
gccaggcccctttccccacgctgggttggttggccctggcagctggttcccccatcagtccgcagatgcagctctctcgaggtacaccccacatgaaacgcttgacagttgcagttgctgtt

SEQ ID NO: 36672 - DNA, 122 bp, Homo sapiens
ttcagggaatggagggtctcagagagcagggtgggcttcctgaagtgctatgcgatcggccgtgaggggcgggtccgggccctgtggtcctgtacgctgctaagatgtgatccctaagaatc

SEQ ID NO: 36673 - DNA, 122 bp, Homo sapiens
ctctatggtagttaaaatacagaattagatttttaacaggtgtcatttgactaaacgtttcggtagaatgcttcatacttgagtgatgctggataaggtattgtatttcaacaatggactat

SEQ ID NO: 36674 - DNA, 122 bp, Homo sapiens
gagaccccagccccagccgctcggcctcaggcctgtgaccttgacagtaacattggcaagcgaagcagaactgtcacgcccgagatgaatatttaattctcagtcctggggctggtcctcgc

SEQ ID NO: 36675 - DNA, 122 bp, Homo sapiens
aaggtgtgtgcacgagtgagtgcctgagatccacaagctccaggtatatgggagcgagtgcgtgagagccacgtgttccaggtgtgtgcgagcaagtgcgaccgtgccagtgtgtgtgagcg

SEQ ID NO: 36676 - DNA, 122 bp, Homo sapiens
gctgatatgacagaaagtgggtggctataaacttggaatttgttcaattaacatttaccacgatacttaagggactaatccagtcctcaatgaactcaaggtctggtactattagcctgatt

SEQ ID NO: 36677 - DNA, 122 bp, Homo sapiens
gccaaaccactgcgcacgctgggaacaagcacatctcaggccacatgatgagggattttacggaacccgctttcgcagagacatgggcaagggcagaaagagacacattcccagatgaggag

SEQ ID NO: 36678 - DNA, 122 bp, Homo sapiens
accctgagtgcctcctcgggctgggccctagggtcagagggcagggtgaaagcttctgggcggacctacttagtattctaattaaactcgtccaaccgctgaggatctaaagcggggcaact

SEQ ID NO: 36679 - DNA, 122 bp, Homo sapiens
atcacgtccccactcacccacaaggcagcggcgcctcctcggtggtcctggcgcccatgacgcgttgctgggaaaatctcccacccggacgttaactgtgggcttcacttactttcagttcc

SEQ ID NO: 36680 - DNA, 122 bp, Homo sapiens
tgagggtcccggggctgaggctgccacgcagagggccctccagagaatcactgagggtcccggggctgaggctgcgaggctgccacacagacggtcctccagagaatcactgggggtcccgg

SEQ ID NO: 36681 - DNA, 122 bp, Homo sapiens
gttgtgggagccacttaacctcccttcttaggctctgtttgccactaattggtggtgctacgttggcaagtcacttcgttgtcttccagacctaaaattctgttaccccacaaataacaaca

SEQ ID NO: 36682 - DNA, 122 bp, Homo sapiens
cttattttggttggtactgaggattttcttgtaaagtgcattagaaaaggtctttatatacgataagaacaataataaaagatctggtgatgccgcggtgaaaggattctcctccaggagct

SEQ ID NO: 36683 - DNA, 122 bp, Homo sapiens
cgggggtgacggggcgcgggcgcggggtgggctgggggcgcggatcagtgggacggagttcggggttcggctccgagcgggcgggctggaagtgggggatccctcagccgcctccacgggcc

SEQ ID NO: 36684 - DNA, 122 bp, Homo sapiens
gcggtggtaccgtgaatgagggagaggtacacgtcccccttcttccccgcctcctatcttcgcggctcgctaaagcgttatcagccgccccacggtactaccgtccgtctaggaacgcctcc

SEQ ID NO: 36685 - DNA, 122 bp, Homo sapiens
acttcccccaaaacttttgtctaaggagaggcagagccctgtctttaagaaccccagagccgttagatgaaagagaacagtgccctattccaaggaacatttgtccaaatggcaacagggct

SEQ ID NO: 36686 - DNA, 122 bp, Homo sapiens
ttgagtttctgagcctttggcttccctgtagcttccaggagtcccctggtacctttagcccgtggggtcttcagcattggtggagagtcaaagatggccacggtgcccccggtggcactggt

SEQ ID NO: 36687 - DNA, 122 bp, Homo sapiens
catttgtgccacctattcaatcactttctgtgaatagaatatggaactggactctttcctcgcccctggaagggagaaagacaatactgatgctgtcctctgggagaatacatcaggaggcc

SEQ ID NO: 36688 - DNA, 122 bp, Homo sapiens
gttaacagtctctttgttcccatctcctgttgcctcccatcagggggctcagcggatgtccggcttccagtcaaaaaggaaaaggttctgagaacaagggctctttaaggatgccaacctcc

SEQ ID NO: 36689 - DNA, 122 bp, Homo sapiens
aaacatgttagtagaaagtatgttctgttttaaatttcagacacacgcagtgataggagacgtataaatgcatctagattttagagtacttgtatattatcataaatgtggtttgtggtgtt

SEQ ID NO: 36690 - DNA, 122 bp, Homo sapiens
cctcagatgcaggcctttcccccgaatgcagtccccctcctccaggtgcagcccccataccgggacgtggcctcgcccgtcccaccccgtgacgcatccaggcccctccccctccctccctc

SEQ ID NO: 36691 - DNA, 122 bp, Homo sapiens
agcttataaagtagactcctctatcatagatgaggaggttcaggctctgagaagttaaatcggttgcccaaattgcacagcctttaagtgatggaaccaggcctcaaacagcaagctaagcc

SEQ ID NO: 36692 - DNA, 122 bp, Homo sapiens
ttcgtagcatggtttttatttcttacgcattcttggcacacagtgtagctatcctcctgacgagcaacccgtctgcgtacctaagtgtggctccccgtgggtcagcgtcctggtagcatgga

SEQ ID NO: 36693 - DNA, 122 bp, Homo sapiens
gctcaagaaggtgaagctgggccagagcgtgtcacacgacccgcacagcgtggagcagatcgagtggaagcactcggtgctggacgtggagcgcctgggccgcgatgacttccgcaaggagc

SEQ ID NO: 36694 - DNA, 122 bp, Homo sapiens
tggcctccgccgcccgggcccccgcagcctgtcgctggaccccgcgccggcccagcgcaccgccctcaggccccgagccccgccctggcctccgcctcggcctcgcctccagccccgggacg

SEQ ID NO: 36695 - DNA, 122 bp, Homo sapiens
ttcatcgtggtgcatacacacgatgggctctgggcacactacagggaggacggcttcagtcgtgcatacacacgatgggctctgggaacactctacagggaggacggcttcagtcgtgcata

SEQ ID NO: 36696 - DNA, 122 bp, Homo sapiens
atttccagggcgctgaagggaataataatactagttttaaaagcagggggctgtggaaggcgttatgccaattcttctgggggtttggcccgcatatttcgacggtggtgctggtcgtcagg

SEQ ID NO: 36697 - DNA, 122 bp, Homo sapiens
tatcagcatgtgtgcccttaaccgtaaccctataacggttagaagagcttcagggaccttcgtcaggacatacatcttgtaaataattggtttgggagtaaaatgcatgctgagtcaccagt

SEQ ID NO: 36698 - DNA, 122 bp, Homo sapiens
tgcctgaagtgttttaaagcacattttctttttgaaaagaaacctgttgctgcagcttagcgcatctgttctctgtgtccatgtgggaggagaatcctggcaccctcatctagtgaaatgtt

SEQ ID NO: 36699 - DNA, 122 bp, Homo sapiens
gctgcctggctgacctctgtgcctggctgtgctcaagcccctggcagacatggcgcaggtcgccgggcacagcaggtgcaggggcagagctagcagaagcctgtgggacctggggccacata

SEQ ID NO: 36700 - DNA, 122 bp, Homo sapiens
aggccgacgcagcacggggactctgaggactctgagatcgagtctccagtttgtcagctgcgtttgggggtctggagcaagatgttatttttgatgtttgcaaccagaaaacagaggagctg

SEQ ID NO: 36701 - DNA, 122 bp, Homo sapiens
agaaatgaaatgctttctcagcagacttcgctctccagggaaaccaaaagcatagctcttcgccctgcaaactagggaaactcccccaggacggtcttatccactgcaccctttctcctcct

SEQ ID NO: 36702 - DNA, 122 bp, Homo sapiens
cgagtcccatctgaaaaatagcagggccactcgaaggagcagagccccggctccccagcacgcacacagcctcccacggcggcccgtagaggaggaaccccggcaccggctgggctgcggct

SEQ ID NO: 36703 - DNA, 122 bp, Homo sapiens
tgttgactcttcccgggagttccactctcacttctgcgttcagccctcactggaaaggcccgcaggcaggtagcacctttctgaggttctggatgtgacagcttttttttgctgtatttttt

SEQ ID NO: 36704 - DNA, 122 bp, Homo sapiens
ccgcccaatcaaaggggtgcatgagcccgtcgagtgcgcgcttgagagcctcggaaagagcgaggctcctgcgaagggcccgctccgccgcctgcttccccctaattccttttgttgcaggg

SEQ ID NO: 36705 - DNA, 122 bp, Homo sapiens
tactaaaaattcagatatagattttatgctggaatcagccaagggcagtctgggcaataacgataatgcctgtgagtaccatgttgtgatcgctgtgggtgaccagaagacaataattgata

SEQ ID NO: 36706 - DNA, 122 bp, Homo sapiens
atctttagcagactgccacatcacccagggccaaggaggactttctgggctgggtgggaccgagacttcctctccaagagctgagagcagacattcctactagtagctcttacccggtgtgt

SEQ ID NO: 36707 - DNA, 122 bp, Homo sapiens
gtcataaattgcaattccttttagaaacctcaaagattgacaacccttggtcctaaatgccgactgctttaacacatactatcaagaaaacatttatgtattatttgctttcaagttagtcc

SEQ ID NO: 36708 - DNA, 122 bp, Homo sapiens
ccacaaagaggaacagatccatctcatttaccattggggtatggacggacgtgcggtgttcgagaagactgttattggtcagagttttgctctagaggacaagtaggactgtaacatctcta

SEQ ID NO: 36709 - DNA, 122 bp, Homo sapiens
tccgtcggctcggtgcaatggctttacggctctccagcatagtaagccccgagaggcaggcggctgtcgatgtttacaatcgcgggagcttcgggtgcaagagtcctttcctgacacaatcg

SEQ ID NO: 36710 - DNA, 122 bp, Homo sapiens
tgtttcttcgaacccaatggggaaacatcacaccttaccctaagccttgtgccagaattacgcatgtctgagcgctttgtttgatattgtttataacttactttccttagcagtgaaccact

SEQ ID NO: 36711 - DNA, 122 bp, Homo sapiens
agggaggactaagagaatttcacttgatgacccttgcctctttgtgtctgggatgagccgcgcggagcgcacccttatccacccagagtgctgtgcctttaaggtccactgggggcgtgatg

SEQ ID NO: 36712 - DNA, 122 bp, Homo sapiens
gccaatctcgaaaggtttctgtgggttaatttcagcgtagcaggtgtgttgctgtagtagcgtatactgggacaattaagtgagatgtgttgggatccaagcaatacagctaaaaataaata

SEQ ID NO: 36713 - DNA, 122 bp, Homo sapiens
aggcatacgtggagtattttatagctgtgtgcaccatttataacaacttcttcatggtggcgtgaggcatttcagagcattatataagaaagtctcttaatgtttatgctgtttttaaatta

SEQ ID NO: 36714 - DNA, 122 bp, Homo sapiens
aggggaatcagggcgagtgagatcaccttgtgagagggtggaggatctgtcaccccagagcgcatggctgagtgcagatctgcatcaggtttagggaactcttgttctggaaaaatctggcc

SEQ ID NO: 36715 - DNA, 122 bp, Homo sapiens
ctctgagtccagagaacggtgggtacgggggccctcctgtcagcgctgctggctcggtgacgtccccaggtggcctctcatccagcccacaacagcctgcaaagtgcgagcctcgaccctgt

SEQ ID NO: 36716 - DNA, 122 bp, Homo sapiens
atctcttcagtgacaatcttagctagagtttcagtttgaggggttttacaaaacttaacccgtagtatttttcaagtactaccctccctagtcccccaagcccccacattgtccactcctgt

SEQ ID NO: 36717 - DNA, 122 bp, Homo sapiens
gacctcttcatctgccttcccagatacacgaagctgaagctgcaggtgaaccaggatggtcggatccccgtcaagaagtgagcaccccttcccccagcaccttcctcctgccctgaccttgg

SEQ ID NO: 36718 - DNA, 122 bp, Homo sapiens
gagtatgccttctgtccagcagccgctgcacgatgctggcttcctcactaagcaggagtgcgggcgtgccgtcagggtcctggtgtccggcatgaggccgtcggaagtctccaggtctgggg

SEQ ID NO: 36719 - DNA, 122 bp, Homo sapiens
ctggcagccctgggacagagaacggtgtggctttggctgcctctgcatggaatcttgccccggactcctgaagactgcacaaggaatgaggaagatcagggacaacctgggaactgaataac

SEQ ID NO: 36720 - DNA, 122 bp, Homo sapiens
aaacttttatttacactgggtggcacacccctgaggcccacacccatcacccaggagtaccgcaatcttcctgatcccctggactcacctgggcggggtgcagactgcgaaggcgatagtac

SEQ ID NO: 36721 - DNA, 122 bp, Homo sapiens
catctggatcttcccttctaactttgcaggacagggcttgtctgctcagagacttaaccccgtagtcccactccctagaccattgtgttccctggagaactactcaggccattcacccacag

SEQ ID NO: 36722 - DNA, 122 bp, Homo sapiens
cgtgtaaagccttctttttcccgcccattgtcgggtccgggatggaaacggaagcagcctcgacccccgaccgagggacccgtgggatctgcgctcaccgccctgcgagcagaggcgttcgt

SEQ ID NO: 36723 - DNA, 122 bp, Homo sapiens
aaaaagagacaaccccaaatgcgaactaggaacattttcgcctaaaagtctagcaggaatcgagcccctccggccttaggagggaggggtaaccaaaatacacttctgggtttgatcgtgca

SEQ ID NO: 36724 - DNA, 122 bp, Homo sapiens
agccttcagagaaggatcctgactcggtggtttgtgcagtgacatttggcagtgttttctcggcaagcgagtctttgaggctgccctcatgctgctcagtgggcacaccaagaacaagagct

SEQ ID NO: 36725 - DNA, 122 bp, Homo sapiens
ggaggctattgtcgaagccacggcctgccatttcataccctttgcaataggtggcgctgacgcctggcagggagaaggcggcagcacatgctgggctcgggggcgatgggcttgtgcgcgga

SEQ ID NO: 36726 - DNA, 122 bp, Homo sapiens
tgcctgtcactggaaacatcccgttcccacatggtcacttgaggtctctgggtgtctagccgcctctctgagacatcttgatggcctgggggttggaccaggggaatgtctgagagccaggt

SEQ ID NO: 36727 - DNA, 122 bp, Homo sapiens
gggaaacagtccgacaagaggctgcacagcactgattggaaactcagatggttctggggccgggcaggaaactcaagtgagtggacagcttggcaggaggcagcagggagtggtggggactg

SEQ ID NO: 36728 - DNA, 122 bp, Homo sapiens
ggcctgcattccacctgatggctttccttctggcagctctctacaccctgcatcctgcaccgagagcactgctcaggctgcctgaggactgaaagttacagctactcctcccacgccatccc

SEQ ID NO: 36729 - DNA, 122 bp, Homo sapiens
ccgggccgactatgacacactctccctgcgctcgctgcggctggggcccgggggcctggacgaccgctacagcctggtgtctgagcagctggagcccgcggccacctccacctacagggcct

SEQ ID NO: 36730 - DNA, 122 bp, Homo sapiens
tttcagcagtggagactctggagagagccctgctgtccctgacctctcctgtgcagtacacggtcgcgagagccctcgggggtgcctgactgggcatggagtttggaactaacagacctctt

SEQ ID NO: 36731 - DNA, 122 bp, Homo sapiens
catctgcaatctctgatctaccattaatcccatccagcatattttgtacttggacattttcgtttcaactctaatttggatcttttaaaatacttccatgtctctacttaatgtgttcagtc

SEQ ID NO: 36732 - DNA, 122 bp, Homo sapiens
gggagctcgactcgctgacggagggagttgcgtttcgcgccctgctggcagaggatgtggcgcacaccttcgcggcagtcgagacttgctaacaacacagaatactctggctgaaaaaaaat

SEQ ID NO: 36733 - DNA, 122 bp, Homo sapiens
gtagacagccctggaaaccctagacgagaaaagatatatcctgctgggaacataaaatggcgcacaggacacacactaatgattcttgtaattgagattgtcatgtgtcttattaaaagcca

SEQ ID NO: 36734 - DNA, 122 bp, Homo sapiens
gtgcgacaagtacaatgtgccctccgtgagctccatcagccgcattctgcgcaacaagatcggcaacttggcccagcagggtcattacgactcatacaagcagcaccagccgacgccgcagc

SEQ ID NO: 36735 - DNA, 122 bp, Homo sapiens
tctccttaatgctccaggcctgtgaggatcggatgcccgagggtgctcctgcatgtcacgcggaggcgggggacgccagcgatgccctcccgggggcgtgggaaggggctctcggcctccct

SEQ ID NO: 36736 - DNA, 122 bp, Homo sapiens
ggcggtgccgcacttgcacacggagtgtggggggccaggcctgggaccaggagctggggccgggcttcggcgcagaggcaggaagaggaagcggcacccgcttcggggacccagccggcggc

SEQ ID NO: 36737 - DNA, 122 bp, Homo sapiens
gtctccctactgtggacggcgcttttgggggtaattggaatcggctgtagagtccggaagcggggatgctgagctctcaggtggtaggtcatcccctctggatactgccccctgcatctgtc

SEQ ID NO: 36738 - DNA, 122 bp, Homo sapiens
gccacttggcgctgaatgtttcaagaccatcttttaaaaataactgctctaggccgggcacggtagctcacgcgtgtaatcccagcactttgggaggccggggcgggcggatcacgaggtca

SEQ ID NO: 36739 - DNA, 122 bp, Homo sapiens
gttcccagagcagcacgtgagacctgttttatgggatgttaccacacacagcttaagacacgttgatccagttcactcctagtttctaggcaagacggtactcaaactgtcccagaaagaga

SEQ ID NO: 36740 - DNA, 122 bp, Homo sapiens
agcggacggtccggcttccggcggccgtttctgtctcttgctggctgtctcgctgagtcgcggccgccttctcatcgctcctggaaggtcccgagcgcgacaccatgtcggagcccgggggc

SEQ ID NO: 36741 - DNA, 122 bp, Homo sapiens
ttctcttccttctttccgtgttatttttctcttctctttccccttttctctctccctgaccgttcgcttgtacattcccattctccccccgtcgctctcctctccccctcccctcctcactg

SEQ ID NO: 36742 - DNA, 122 bp, Homo sapiens
gactccattgccgcactgcaggcgacttctcggaccccaccgttgaagcaccaggccccccgcccacccaagagcaaccgggaagcacagcacaagcccacagctccggacacgcgctcccg

SEQ ID NO: 36743 - DNA, 122 bp, Homo sapiens
ctatcactcaggaaattccagagaattagaggttacttcccagaaaccaaagacaaaggccgcctaattctttactacacagatggtcagagctggacacttaaaggtgaaacctggccagg

SEQ ID NO: 36744 - DNA, 122 bp, Homo sapiens
ggctcagggctgtgcctggtgctttctcaaggtaacttagcttgtataattagattttaccgtgatactagttctaggttctttttttttcattggccaagcatttaataactatctgtcat

SEQ ID NO: 36745 - DNA, 122 bp, Homo sapiens
ttttgaatatattccttgtggtgagaacacatattatcaaaatgaaatgttggtgttgaacgtgtcatggtaccttatgaaaatatgacagcacttcccgtggtaaaagccagtcccaggaa

SEQ ID NO: 36746 - DNA, 122 bp, Homo sapiens
caggtgcctgccaccatgcccggctaattttttgtatttttagtggagatggggtttcaccgtgttagccaggatggtctctgtctccaccgcacctggccaaaaaagtgttaaattagaaa

SEQ ID NO: 36747 - DNA, 122 bp, Homo sapiens
catcacagatgctcgggtgggtggtaaaatcacagccccatgatctgtctctgacccaaccgcaggcagcaaacagcaccaagcccccagacctattcactgcctactcttcagctcccctc

SEQ ID NO: 36748 - DNA, 122 bp, Homo sapiens
tccgccaagaatattccattttaaccttcaaggtctggctccatatcattctattatattcgtcactcactctcccctgctcacaacacctaccaagtactatcttccgtgaaccctgactt

SEQ ID NO: 36749 - DNA, 122 bp, Homo sapiens
gtatcatggactccttgaaggtcaccttacaactgttttatatgtaatactttgtttccacgtttctgtttagctgtgccagttcacaaagggctctgtgagtcacatgattccacaatatt

SEQ ID NO: 36750 - DNA, 122 bp, Homo sapiens
cacttaggcaactgtggtgaaaagtcagaatgcattctcagcggcattggagacacccctcggccctccactcccccgaaaattcctttggggctgaaattttccatcccttctttcagcct

SEQ ID NO: 36751 - DNA, 122 bp, Homo sapiens
ttcccgggatgctgagcgcttcattctgtctccaggactcaggcaggtaggtcccagctccgccgcgcccccggacctacaggtcagcgtggtccgaagtttcctctgggggcttcgcgggc

SEQ ID NO: 36752 - DNA, 122 bp, Homo sapiens
agtggagggttgggctccagggagctcagagctctctcgttcagggacccgagagtgacacgcgtggcatctctttgcaacccacgtccgcgccgcagcaccctcccctgcaggtgcctgcc

SEQ ID NO: 36753 - DNA, 122 bp, Homo sapiens
ccctccatagggtgaggtggagccatggtggtgcgtcctttactcaacaaccctccaatccggatgctgtgggaagggccgggtcactcggataccatcatccctgcggatgcaccgccgta

SEQ ID NO: 36754 - DNA, 122 bp, Homo sapiens
ggcggggcacggaggcccgagcgagggacaagactccgactccagctctgacttttttcgcggctctcggtaagtttccagtccgttattcagggctgggacttcttaatttacttgggaat

SEQ ID NO: 36755 - DNA, 122 bp, Homo sapiens
tgtggggcgggccttctggggcacagcctgggcacagaggtggctgtgcgaagaggggctcggtggcacagcgctcaccccgcctcccgccagcaggagtacctggacctgtcggcgccttt

SEQ ID NO: 36756 - DNA, 122 bp, Homo sapiens
caggccagtgggggaccgtatcctgcaagagtcggattttgaaaagattaattgctcttccggagattagccccgtcaaggctggctttaaatgctcctactatagattcccatagtactac

SEQ ID NO: 36757 - DNA, 122 bp, Homo sapiens
aaaaaaaagtaagagaaatgtaaagtcaacaacactgagggggcggggcgcagtggctcacgcctgtaatcccagcgctttgggaggccgaggtgggtggatcacctgaggtcaggagtttg

SEQ ID NO: 36758 - DNA, 122 bp, Homo sapiens
ctcagccttaggggagaccactacgcctcgtgcccgcgcacgccgcgccgctctcctcggcgcccccgccccgcctgctcctcgcagccccgcccatgtgcctttctgcggctgcctccttc

SEQ ID NO: 36759 - DNA, 122 bp, Homo sapiens
tgtctgataatcctttgacgggttttggtcggcggagaatggtctctaaacttcccaaaccgcccccgtttcacgtcctgtgaaaggaagtgctcctctgatgaccaatcagcggcgagaag

SEQ ID NO: 36760 - DNA, 122 bp, Homo sapiens
ggtgttagacatcaactctacatttattgcagtcctttaagtctatgacggcggggcagccgctgacagcatgcagagcaagttaggaaaaaccgaggccctgtgggaacagcaacgcgggc

SEQ ID NO: 36761 - DNA, 122 bp, Homo sapiens
agacaaggattcccccgtctttccccagcccgggtgatccaggtgctcccggctctgccgcgcactggggtgccaccgtctccaagggcgccgctgtcagctgtgacccctgcgcccccaga

SEQ ID NO: 36762 - DNA, 122 bp, Homo sapiens
ggggaccacagaagctcctcaccaggggctgccgtgagaatcaatggggctggtgtgtgacgatcaggtgaccagggcaccttggttggtttgactcactgtgagccccacccacagcactg

SEQ ID NO: 36763 - DNA, 122 bp, Homo sapiens
actcgggaatcccacagcttcacatgttagccatgtgcgctggcggcagcgggctccggccgcttcagacgttttaatttgtcactcgggaaagcagatgtgtcagggagttggagaacttg

SEQ ID NO: 36764 - DNA, 122 bp, Homo sapiens
cagtagatatttgtgcaggaatgccaaaaaaaaaaaaaaaaaaaaaaaaaaggaaggaggcgctgctctgtttttggcctccagaatcatatttttgagttgtagcaagtatcaaaagccag

SEQ ID NO: 36765 - DNA, 122 bp, Homo sapiens
attaggaaaatgaacagatatgtcaaatctcttctaacacccatgttctgtaactctcctcgtatgtaccttataataagacaaaggtaaagacatttccatgtgcagcgaggaaaagtaat

SEQ ID NO: 36766 - DNA, 122 bp, Homo sapiens
cgcttccgcactccccccaccaggggctggggcctgcaagggggactcgaagcctcccgccgcctcccgccccttgcctggcagcggaggacccaagcaagggcaaagagttccaacccagc

SEQ ID NO: 36767 - DNA, 122 bp, Homo sapiens
atattagtattcttttaccacgtaaaagtatgtggcctttttcaatgcaattctgaccagcgtcctaaagtccatgtccatgttttgacataggtttgactttgcttagtaattgttcttgc

SEQ ID NO: 36768 - DNA, 122 bp, Homo sapiens
cgacggccagcccggggcagctctggcgagaaggagaaccgtggggggcggcgggctgtgcgccctggcagtggggggcccctactcagctggcccctgggcccagccccaccaccccggcc

SEQ ID NO: 36769 - DNA, 122 bp, Homo sapiens
ctgcccgcaggacacgcatgggccagggtgccaggagcactgtctctgcctgcacggtggcgtctgccaggctaccagcggcctctgtcagtgcgcgccgggttacacggtgaggcgcgccc

SEQ ID NO: 36770 - DNA, 122 bp, Homo sapiens
gcgcaggtcccacctcctgcgccgccctcccgtgccgccctggcagggccgagcgcagagcgtgcgcgctcgggttgcaaagtttcagctccggttgctgcaaaccgaataaaagagagggc

SEQ ID NO: 36771 - DNA, 122 bp, Homo sapiens
cggtcctcaccgcggcagagccggggctgggtggcggggacgctgcctctgcaggcgaggcgctccggggcataagggattatcaggagtcgcggcctttcttggacatccctggctggggt

SEQ ID NO: 36772 - DNA, 122 bp, Homo sapiens
ggccccgcatcgcctggcgcaattggaataacaaatgcgacgcacgcaaattgtccacctcgtgttgctaagcgattgtttgtcggccccgcacgcacagctcagcatgggaggaccgcgag

SEQ ID NO: 36773 - DNA, 122 bp, Homo sapiens
tccttcatccagtgccgcagccggaaaaccgcagcggcggcggcggcggctgagggggaacgatccagcgagctgcagaaaggggggcaggaaaaaattacaaggacattactgataagaca

SEQ ID NO: 36774 - DNA, 122 bp, Homo sapiens
tctggaatccaggtatctagacccactcagtccatgagttctcccacgggtttacacgaacgcgccacattaatgaaggcaagggactgacaaactacgaaggcgtgttttcatctactctg

SEQ ID NO: 36775 - DNA, 122 bp, Homo sapiens
gagtcactctcagactctttataaatacagcttgactcagccactgtatgactgactccccggggacatgaggtggatactgttcattggggcccttattgggtccagcatctgtggccaag

SEQ ID NO: 36776 - DNA, 122 bp, Homo sapiens
agggggaaaaaaaaatcatgagactataagtcaacgagcacggtaattatgccacagcaccgagaaaaaaagcatttagtgtagattaagaaatatttaaagatgacagatccaacatctgg

SEQ ID NO: 36777 - DNA, 122 bp, Homo sapiens
ctgcttcatgagatgactgggaagggaagatgaattgtgatactggctcattcttagccacggagggagcctctttagaataagactggagcaatatggacaatttgtaccactcctttata

SEQ ID NO: 36778 - DNA, 122 bp, Homo sapiens
aatgaaggcaaaaatccaacacctggccattagcaatgctctggaaaggctatttaaacccgcattggatatcagagctgggagggcccatacagtctacctacctgccttttgcagatgga

SEQ ID NO: 36779 - DNA, 122 bp, Homo sapiens
ctgctacatgttttcataaaataaagtgctatgatgtactaaaacctcacattgccttctcgtaattttatttttatcacaagaaggaaatacatagtgattcctgaaccggaagaatgaac

SEQ ID NO: 36780 - DNA, 122 bp, Homo sapiens
tgctgagattacaggcatgagccaccgaacctggccttttttgtttttaaaaaactaaagcggagtcgctgaggacatttccactttgaagtttttccaagctgtgttctgtggggctgcct

SEQ ID NO: 36781 - DNA, 122 bp, Homo sapiens
tctgcggatgttttggtcagagtgatctcactattgcaatagtctccctctgctattgcacggttccttctctcccacctctctcacttcttgcagtaatcctttctttttttttttttttg

SEQ ID NO: 36782 - DNA, 122 bp, Homo sapiens
cgtccagaagctgtttgctggaatcgaacagctcggggagccgcggcggcggcaggaactcgtcttcagcagctgccatcttgggaaggctgatgcgaaatgttgattcctttcctttctgg

SEQ ID NO: 36783 - DNA, 122 bp, Homo sapiens
tgatgcaagtcatcattcctgagaggccaggccatggtgggcctgcggtcaggagcttcacgaggcctccattaactcttaccattggatgtgtgaagcactatcccaaggcaggcttctca

SEQ ID NO: 36784 - DNA, 122 bp, Homo sapiens
caagtgatccgcccacctcggcctcccacagtgctgggattacaggcgtgagatccactgcgcccagccaaagctgctattttttaaaagcggcaatgaacattcttgtacaagtctttgta

SEQ ID NO: 36785 - DNA, 122 bp, Homo sapiens
tcccggcactgcaggtccatctccaggtaggagtagtagttggggtcttctctgcacatgcgtgccagcagcgtgcggttccgggccgggtgcttgtcctgctggttgaagacaaagaagac

SEQ ID NO: 36786 - DNA, 122 bp, Homo sapiens
ggctgaaataagcaaggggttctcagaaggaatggactacggtggctacagctgtgattccggttatgtgcctgtcaaggtcaccgcgctgcacaaaactgtggtttttccaccctctggtg

SEQ ID NO: 36787 - DNA, 122 bp, Homo sapiens
gcgagagaggcggagcaatcctggcagagttcagccggcgctgaagaagccgcaagaaaacgtggaacaagacctctgtctagtgaaggtcatttatgtgcaagctgagggtttaacacttt

SEQ ID NO: 36788 - DNA, 122 bp, Homo sapiens
cctttctcctctccccctcccctccccaggcgtatggctgcagctacgcttgtcaccatccgagactgcattggccacaggagatgtggatgatttttccatttgtcctgatgtttatttca

SEQ ID NO: 36789 - DNA, 122 bp, Homo sapiens
tgatctggggtatattctaatactatatcccagaatgaaaatccatatacagacatacctcgtttgattgtgcttcacttcattgtgatttacagatattgtgttttttacaaatcaaagat

SEQ ID NO: 36790 - DNA, 122 bp, Homo sapiens
aactggggctgcgcgcggtgcttgcgggccagcgcgagttccgggtgggcgtgggctgggcggacccctcactcggagcggccagctggccccaccagccccgggcagtgaggggcttagca

SEQ ID NO: 36791 - DNA, 122 bp, Homo sapiens
ttgctcaccattgctgaggcttgagtaggaaagcaaagcagctgggcagctcaaactgggcgaagcccactgcagcaaggcaaggctttctgcctctatagactccacctctgggagcagtg

SEQ ID NO: 36792 - DNA, 122 bp, Homo sapiens
gaaggagggctgcagcccccagggcgcggggaggcccccttgcagcccgggccacggccgcgcacaggaagtcaggctgctacacatttcctgtgagtcaccccagggactccgcacccggg

SEQ ID NO: 36793 - DNA, 122 bp, Homo sapiens
caaccatggtggccgatccctgaaggtcaggaaggggcctcgccgctagccgccagaggtcgagtggcagggccaggactcacagctgccagttcccagattagcccctggcacagtcagca

SEQ ID NO: 36794 - DNA, 122 bp, Homo sapiens
tacgattgattggagagatgcctcaagaagatctgcacgcggtggtgaagaattgcttcgcggtggtgaatagctctgtctctgaaggcatgtcagctgcaattttggaggtaattatgtaa

SEQ ID NO: 36795 - DNA, 122 bp, Homo sapiens
cgtgtggcctcagcccgataactagcatcaatctccctctcctctccgcagcttgtccagcggatccagacactgtcccagctgctcctgaaccttcaggtacaggggcggggtggggccgg

SEQ ID NO: 36796 - DNA, 122 bp, Homo sapiens
agttatggcttactgtctaaaaaacatcacaccagaggacctctctagttccaacaaaaccgacatcctacaattctaagaggtatttataactgttttcttttttattttattttatttta

SEQ ID NO: 36797 - DNA, 122 bp, Homo sapiens
tctttctttagtcaggaaagaagattctcctttgagcaaatttactccttttaagaaggccgagctatttggaaagatgcccaccaggatggcaaagtggtgcttgagccctccctgcagca

SEQ ID NO: 36798 - DNA, 122 bp, Homo sapiens
ttggaagaggaggcagaagaggagcagcgcatcctccagcagtcagtgggtgagttcactcgctttcctctgcacctgtctgggttaggagatggctccctaagcctctgactgccctgcca

SEQ ID NO: 36799 - DNA, 122 bp, Homo sapiens
gtgtgcgccccaagtccagctcaaaagaggccccgagggcattctagggcgccttgggcacgcgtgccaggcccccggtttggcagccgagctgagcgagggtggattgcgaggggcactgg

SEQ ID NO: 36800 - DNA, 122 bp, Homo sapiens
ttaagtccttaatacacctatttaaactcatttcttcagcttcaactgactttgtaggatcgtaaggattacataagaaaatgaatttaaggccaggcgtggtggctcacgcctgtaatccc

SEQ ID NO: 36801 - DNA, 122 bp, Homo sapiens
cggcactttaccaacagttgttcaccgacgtggaaatcttatcactggcggcacctgccgcgtgtggtatctgagtggccgtgactcgtgcgtccgccctcgtgtgtcacacagtcacttag

SEQ ID NO: 36802 - DNA, 122 bp, Homo sapiens
ataatatctaaaagcctgtgacttggcagaacgtttttctgaatttcatcttatatccaccgtctgggacaatttctgagtcaaaaaatgcagctttgcttaaaacagatgttttgccgtaa

SEQ ID NO: 36803 - DNA, 122 bp, Homo sapiens
acatacccacaaaaattaaaaattaaaaatgtaacacaaagaaagaaaacagaaaagaatcgcatttgaatagtcatgttaaaataacaagatagcaggtgcttttccttctttttttagag

SEQ ID NO: 36804 - DNA, 122 bp, Homo sapiens
actcctgtccctgaattccctccgtggattccccaccccgtctctcagtgtttggacaagcgtgggttttctgaccaaacattctaaacaatggcctaaattcatccctgagaggctggcat

SEQ ID NO: 36805 - DNA, 122 bp, Homo sapiens
tgcccgtttttcggagtaggaagctgaggcatgctgagtgactaataggacagagtcagccgacacctttttgattctaagtgaaaggctctttctggcataaagtattgtgacaggtagga

SEQ ID NO: 36806 - DNA, 122 bp, Homo sapiens
acgggactctgcggattctctgcgggcgggaggcgtccaggcgggacagggcccggggagcggctggcaatgggctgctcttcccacttgactgatggaaaactaaggctcagtcacctgag

SEQ ID NO: 36807 - DNA, 122 bp, Homo sapiens
tcggtccttgcgccaggtcctttgaccagagtttttccatgtggacgctctttcaatggacgtgtccccgcgtgcttcttagacggactgcggtctcctaaaggtagaggacgcgggccagg

SEQ ID NO: 36808 - DNA, 122 bp, Homo sapiens
cctccgaagcacagtcacccgtcagcagcctcgagggctgacgtgtccttatcaagccggcgcgccccgcgattctatagccgccatgcctgagacctttttcctgaagggagaagcctgct

SEQ ID NO: 36809 - DNA, 122 bp, Homo sapiens
caaaggagcagagggggctggaggcagagggaggcgagagcgcgagggcgagaaagggggcgagcaaaggggagaggggccagccaggcgacacccacctccgacatacccgcctaaagaac

SEQ ID NO: 36810 - DNA, 122 bp, Homo sapiens
tcaatatcccccaccaaagttgtacatttgttagaactgatgaacctatgttgacattatcgtcattggattctcattatcatccatagtccatattttacattaggattcactcttggtgc

SEQ ID NO: 36811 - DNA, 122 bp, Homo sapiens
gctggctgcttattgccaaggcgttgcgttggctagtgtccccacattgaagttcagggccgcccagggctccctgctgcgtcctgggccagcctgtgacctcccttttccagcagagcagc

SEQ ID NO: 36812 - DNA, 122 bp, Homo sapiens
aaaaattagccgggcgtggtggcgggcacctctaattccagctactctggaggctgagaccggagaattgcttgaaccgggaggcggaggttgcagcgagccaggattgcaccactgcactc

SEQ ID NO: 36813 - DNA, 122 bp, Homo sapiens
cttgggatgtaacttaaatgacagtgtcagggcactgtcagaggaatatgaaggctgcagcgatgcctgcaagtcagcttttgctacactgggactgaggtgttctaagcctggaaagacac

SEQ ID NO: 36814 - DNA, 122 bp, Homo sapiens
cttttctaagcctcttcttttttctctctcctttcccaagcaacagaatctcctattagtcgctatatgtaatgcttcctcattcctccttttatgttttatatttttgtttatattttatt

SEQ ID NO: 36815 - DNA, 122 bp, Homo sapiens
ggccctgccttcctgtgtgcggcatcgtcctgaggtcggtgggaattgctgcagtggatccgggctccccatgcgacctgggtggcctcagaggctggagggggcagtcgttcctagtgttc

SEQ ID NO: 36816 - DNA, 122 bp, Homo sapiens
tcttttcttcagggaagaggcgggagcacgctccgctcgctcgcagtgcacagataaaggcgccagggttggcggctgggtctgccctccctcccctgtggcttagcagaagtggccggctc

SEQ ID NO: 36817 - DNA, 122 bp, Homo sapiens
ttctattatttatttgtatcaaccaatgtaagccagattccaaattgctaactataatgacgatattttaaccaaaaaatataaaggaagaaaataaaatatgttccttcacgtataggatc

SEQ ID NO: 36818 - DNA, 122 bp, Homo sapiens
ctccctctgtgccaacataggtggggcaggtcactctggggtctgtttgccctgtctgcccgctgcagcctcctcggggagggccagggttgtctgtgcatcctgtgagccccagggtctat

SEQ ID NO: 36819 - DNA, 122 bp, Homo sapiens
ccaagaactacgtgatggcagtctccagctaggcccttccgcccccgccctgggcgccgccgtgctcatgctgccgtgacaacaggccaccacatacctcaacctggggaactgtattttta

SEQ ID NO: 36820 - DNA, 122 bp, Homo sapiens
ggctggtggggcgggggtgggctgggtgctgatgtggctgtccccaggtgagccagctcccggtggagacctgtgagcagtaccagagctgcgcagcctgcctgggctccggggacccgcac

SEQ ID NO: 36821 - DNA, 122 bp, Homo sapiens
ggagccctgttaggccaccggcattgggggtcggtgaggaaggggactccccaactcccccgactcccaaccgccccacctccgcatagccttggagacccctgggggagggggctgggggg

SEQ ID NO: 36822 - DNA, 122 bp, Homo sapiens
agccaagtctttcgagatttaactccaccaacatttagagttcagatgtttttgtaaaatcgcttttttctaagtttgagtggggatttgctttctggaattgactgtctcctgtcttcaga

SEQ ID NO: 36823 - DNA, 122 bp, Homo sapiens
cagccctcgagcaccagaaatagaaactcggaggctggcgtcgaggctagacatggactccgcgcctggccccttccagatcccagttttctaaagtgacttcgcaccaaagtccggtataa

SEQ ID NO: 36824 - DNA, 122 bp, Homo sapiens
acttaccccaggcctggatacccagagcagagaagacaagaagccacggcagcatccccacgtggtcccaggacaccaatctggagagtgtggatggcagcctgagagagacgctgacagtt

SEQ ID NO: 36825 - DNA, 122 bp, Homo sapiens
ctgctgagagtgccagctgcgggcaggccactggttcttactgtctctgggcgtcttcagcgtgtgaagggcggtcagggttaagcatccccagagctgcagccatcactgctgggggttga

SEQ ID NO: 36826 - DNA, 122 bp, Homo sapiens
acctcgtgggggtgttgaaccagggtgaagtgagtgtgcggtgctcagtatgttcctgctcgtgggggtggagggagcatcgagtcagttgctccaccttccaccctcccttaacctcggcc

SEQ ID NO: 36827 - DNA, 122 bp, Homo sapiens
cccttcaattagccagggcctgtttctgttgcttgcaacccaaatacactcaatacgtcccggccaagtgtgtgacacgtgtgtgtgtgtgtgcgtgcatgcgcatgtgcaggtgggaggga

SEQ ID NO: 36828 - DNA, 122 bp, Homo sapiens
gccctgcgcggccaaatggataaccggtagcggtcaccatggagatggctgaactaggggcggagacactgggaagactgaaagcttgctcagcggggtcgcgcaccgctcctcctattggg

SEQ ID NO: 36829 - DNA, 122 bp, Homo sapiens
gattacaggcgtgagccaccgcgcccggccaagttctgacttttaaagtaacaacatggacgtgtcctgcctctgggtcgctggctttctgcttctgacctgaccctacaccagcctgctct

SEQ ID NO: 36830 - DNA, 122 bp, Homo sapiens
ttgtgtcgaacaaaccttcctacttttcaggtaacaaaatggcagcttaggctagaaagccgctcatattcgcaggtacaagggctgggtaagaacgccccgcctggctgactaacttgagt

SEQ ID NO: 36831 - DNA, 122 bp, Homo sapiens
gcagcaggctcgggtctggggtgcagtttccgcgctgctcattgaagactgcgccggacgcggtcctcgctccgctcttcccgctgctcctccccgcctcccacccgcgctgcgccgctgca

SEQ ID NO: 36832 - DNA, 122 bp, Homo sapiens
ctgctctctgtcactgaaccctataaatagcttagctaagtcactgtctcagtcactattcgttggggtgaggaatgagggagttgttgcaagtggctctttctggctatatcattcacaga

SEQ ID NO: 36833 - DNA, 122 bp, Homo sapiens
gccctgcgcgtggccggcggccgcttctttatctccgaccccactgcccagtactgtacgcgtccagactaaagaaacatcattcgcttaaggggctgggaaaagcgcgtgctccgctcgcc

SEQ ID NO: 36834 - DNA, 122 bp, Homo sapiens
aaaaaactcttaaaaatcctaagtttacatcattactcttccttcttaaaatcatctctccgccgccccctccccgtccctgccacaaaaaatttcttcttcttgtaagcactctagtcaag

SEQ ID NO: 36835 - DNA, 122 bp, Homo sapiens
gtggggtctggatccacacgagcctctctgaaccctctgccctggctcggggtgggctgccggccacacgctcagacaagttctcccggaaagaggacaacaagaatggcagccacttccag

SEQ ID NO: 36836 - DNA, 122 bp, Homo sapiens
atcgaacattttgacaaggaagtcctcctgaggatggcagagatgactgcacgtttggtccgtggccgcatgctgtgagtgcacaggcatactctccttcctgcagacagccccttcccaga

SEQ ID NO: 36837 - DNA, 122 bp, Homo sapiens
cgcgctgagcgcctctgtgctgcagccgtggctgggggccggggctctccacccgcctcccgcgtggttcgaggctgacttcccaccgcttctgcctctcgataaatgaggctcagctggtg

SEQ ID NO: 36838 - DNA, 122 bp, Homo sapiens
atttgctctgctgggagaggctagttgtcctcctgagacctccaattcacgggctgcaggcggcagctcctgtaggaggggctttgtggggaaaccctctctttgcaacttttgctcagggc

SEQ ID NO: 36839 - DNA, 122 bp, Homo sapiens
tcagttaaccctcccacagccttaagggtgggggcaggggggtgggggggaataaggctccgagaggttgagaaacagacccagggtcacacagcttggagatgggtgagctgggaatcaga

SEQ ID NO: 36840 - DNA, 122 bp, Homo sapiens
gctgggactacaggtgtgtgccatgacacccggctaagtttttgtacttttttgtagagacggggttttaccatgttgcccaggctgggctcaaactcctgagctcaagcaatccgcctacc

SEQ ID NO: 36841 - DNA, 122 bp, Homo sapiens
tctggcaatagatccttgttaatattaacttaatgcttctatgtgatcaatcatcatgctcgtatctgaaaccagagttgtactttttactgctatgctagtcaattgccacatggactcat

SEQ ID NO: 36842 - DNA, 122 bp, Homo sapiens
tcaatgggaaaagaatcaccttttcaacaaatggtattggaataactgaatacccacatgcggaaaaacgaagctgggcccttacctcacgccatctacacgaattaactcagcatagatta

SEQ ID NO: 36843 - DNA, 122 bp, Homo sapiens
gcgggggcggcggcgcgagcggccgggcttggtaggggagccgagcccggcccgggatcccgagcagcgagagtgtggggtacctaggcccctcacgctggacttcacagtctccgggccgc

SEQ ID NO: 36844 - DNA, 122 bp, Homo sapiens
ccctgtgcactcccgtaccagcctggaggtggtccagggccggacagggccgcccgaccgcgccccagcaacctccccagaacctgcctcccggcaggttgcggacaagtctgtctcttgct

SEQ ID NO: 36845 - DNA, 122 bp, Homo sapiens
caaatataaagaaaacataaaaaaagtattagttcaacaagcttgatgcttctcacactccgcttttcctgtctactttcatttccttaatcttcttcctttaagaattaaccaaactgtat

SEQ ID NO: 36846 - DNA, 122 bp, Homo sapiens
gctctgcatgcccagagctccttgttctctggcccggattcatgctgggctccagccaagcgccctatgccccaggcagccccaagcagggtcttggtagccaggggcagccatggagtggg

SEQ ID NO: 36847 - DNA, 122 bp, Homo sapiens
tcttttagattctacaggcaaattctggaaacacgtttctgcccccactcccaatacatgcgcatacacacacacacacacacattaacccatcccagtgcacacacatatgtcacggctgc

SEQ ID NO: 36848 - DNA, 122 bp, Homo sapiens
tggcctgatgaccctggtcctctctgccttcttcactgctttggtcaccaacagcagatccgtgaagaggaagcagtacacatccatctgcagtggcaggagggggggtggccagagaggcc

SEQ ID NO: 36849 - DNA, 122 bp, Homo sapiens
tccagtctccccattcggaacatctgtgtgctccatgatgaccagagccaaggatctcaccgtgggaatctcccattgtctctaacacggggctgggcacctaacaggtgctcactaagcac

SEQ ID NO: 36850 - DNA, 122 bp, Homo sapiens
ttgtctctagtggaacaggcaccagattcccacaagcagcagctcccatgtcctgtagcacgtggcatccgaccctggagtgaagagtaagctggcacagagccccgacgctgggattcaga

SEQ ID NO: 36851 - DNA, 122 bp, Homo sapiens
cgtgattgtgtgtgagggggctggacctctggagtaagccgctcctttacagtggggagacggcgggaacccgtgccccaagatgccgtgcacgtggtcggctccgcgcggaggctccttcc

SEQ ID NO: 36852 - DNA, 122 bp, Homo sapiens
acgtgaagactttcttaaggtctgggaactccacctcgcccggtcccggggatgctgtcccgtgttttctgttctgctggttggtctgcgtgtctgttctgccagcgcacactgtgtgacgg

SEQ ID NO: 36853 - DNA, 122 bp, Homo sapiens
ggaaagtgaaagataaactatgggccaatggcatttctccacgtagggcctggtgagtcccgccctctgaatgaatcagccgggccgtgtagctgtgctgttcacaggaggagccgtgggaa

SEQ ID NO: 36854 - DNA, 122 bp, Homo sapiens
caagatgctcttcccccagatatctgcacagtctattccctcgccttttaggtatttactcgaatgtcctcttttcaatgagacctcccttgtccaccctatctaaaactgcaatcccctcc

SEQ ID NO: 36855 - DNA, 122 bp, Homo sapiens
tgacggggagagggcaaggccgggccagaggggctgtgggcctggactgcggctgtcgcccgcggccctgctcttttgggcagccagacgtggggtcagcgcccagtcgcagcctccggggg

SEQ ID NO: 36856 - DNA, 122 bp, Homo sapiens
cctgaaaggaatgtgttttcttggtttttgtctgctacagaatttctcagctctccagctcgttggctcaaagtgtgtcaggaaagggggtgctgggtaacaagacgatggtggagagtgag

SEQ ID NO: 36857 - DNA, 122 bp, Homo sapiens
cggggtaggaaaggttggaattttaagattaagtggtcacacataatcaggcagatggtacgtgcctaaaagggtagccagagcaaaatcagatggagtggggaagagaaaggaagtgcgct

SEQ ID NO: 36858 - DNA, 122 bp, Homo sapiens
agggggactcagccctatgcccccaggtccctccccgccaggccgggccgtcagctccagcgatggagcaggctccggtgtggaccccagataccctttgcgtcttccagctccgcaccccc

SEQ ID NO: 36859 - DNA, 122 bp, Homo sapiens
gtcactgaaccactgcttctcttccgaaagtagagctagctgccactttcgcatggcctccggagtgtctccacctacacctctgtgctcccccgccacactgatggctcaagacaaggctg

SEQ ID NO: 36860 - DNA, 122 bp, Homo sapiens
caaaggactcctgaactgggtggaagattgtactacaattacctaatccttcttccaaagcgaaggagtgagcaatacagcaccccctccttatcagcagttcactttctgaggttttagcc

SEQ ID NO: 36861 - DNA, 122 bp, Homo sapiens
ggtccaaacttgaactggtcttttccttgcagattaattcttcctctaccccaacccagccggaagtctggtaatttccttacactttctcctctctttcaagtcccacatcttaaaagtga

SEQ ID NO: 36862 - DNA, 122 bp, Homo sapiens
tttgcgcgtgcgcggctccgccccaggctcctccctcgcgctggcactcccgccttcgcccggccctccccgcgctttacggcccggcacgccacttttactgcagtcgcgcccgccgccgt

SEQ ID NO: 36863 - DNA, 122 bp, Homo sapiens
gcaaattagacccagataaagctgacttaaaggaaagtccacgggcagtccggcagcagccgggcccacaggaggagggcggcaggtgggctccgggcgctcggggccgcctgcgggtaggg

SEQ ID NO: 36864 - DNA, 122 bp, Homo sapiens
tcgagtgaacacttggcttaaaatccattgctgttctccagaaatcctgcccaattttctcggttaaaggtacgtgtagtaggcattgctttttctctttggggacaaaactcaggaggatt

SEQ ID NO: 36865 - DNA, 122 bp, Homo sapiens
caatgttcttagttactgtcagagagtgaatgacttgtccttcctgagtttgtctctctccgtggcagacaaattgtctcttgcaagggtctgaagcattcaaatgtgggaacacttacaac

SEQ ID NO: 36866 - DNA, 122 bp, Homo sapiens
tcgctgccgctgggtgtggaggagttggggcagctgccacccgttgagggtcctgggggccgccctctccgcaagtccttccgccggggtgagggcaggagcgagcaacagagatgtgggga

SEQ ID NO: 36867 - DNA, 122 bp, Homo sapiens
ttgcattagcagcaaatccccagggttgctcagggtgggagactgtgagaagcctagcagcgtggccgtctgtgtgtgtgtgtgtgttggggggtcgggggggtccctattcacaagggaga

SEQ ID NO: 36868 - DNA, 122 bp, Homo sapiens
ttagtctcgtgtgacagtggctttaaagcatgtccacaaattctttgacttccccttttgcgaggtggagctcacttcccactgctgagtgtgggagctggctgcttctgatgaagagtggc

SEQ ID NO: 36869 - DNA, 122 bp, Homo sapiens
aggtccgttggcagcgactagaggacacgactgagctagggggtctggccccaaactgcccggtggtccgcctctcaggacagaggtgcaacatttgggagtttatgcaaggtcaggaggct

SEQ ID NO: 36870 - DNA, 122 bp, Homo sapiens
ctatcggaggggcatttgggaggcctctgcaatggtagaggagagaagctgatggcaggacgtgactgtgtttctgcaggttacttactgcgcaggagaccagctcggggggtcaagttgct

SEQ ID NO: 36871 - DNA, 122 bp, Homo sapiens
agcggaggcgggagggagctgacagccggagtggatggagaccaccagtccgaggggacccgcttgcgattagctgcttcttgggatgctccgcgcgccagttgagcatcctgcctgtggtc

SEQ ID NO: 36872 - DNA, 122 bp, Homo sapiens
cgctcccgctctcgggtcccaatcccgacgctccgcgcgctcccggactaagtgcggacgcgccccacgccccccggcgccagcccgggacagcgctgcacctgttgccacgtgcgacgcgg

SEQ ID NO: 36873 - DNA, 122 bp, Homo sapiens
ccagcggcccgtgcttgtcgttcaaggcctcggacaggtgcttaactcggaaatcatgctcgtgacctggcgagatgtcggccgcacaaacacaagcagcgtttatccaggggccaggcagg

SEQ ID NO: 36874 - DNA, 122 bp, Homo sapiens
cctcacagcctcctgcctccgtccccatgttctgggcgcctctcagaggtcctggctggacgcctgcaccccagagtctttgaaggtggaatggaggcccccgctcatcctcccggccccct

SEQ ID NO: 36875 - DNA, 122 bp, Homo sapiens
tggtggccacaccgacctgcagtatgatcttcttaagatcttctcgccagtcattgcctgcgtagttcttggtgatctcaatctggtatagctcgtatgcgttcatgaatgtggacagtttg

SEQ ID NO: 36876 - DNA, 122 bp, Homo sapiens
ccattgaaaagccctcctgagtgaccctacacatcctaactgagccattttgggaggtaacgggctccctcagcgcacactcacagagacctcccactgggcaggtgtcccttggctctgat

SEQ ID NO: 36877 - DNA, 122 bp, Homo sapiens
ctccggccccgcggccaccgcgcagccccagcggagggggcagctcccccgcgccgcgcgcgctctgtttgttttccttgccggactgacgtgagtcaaaatattggccatatgttcagcgg

SEQ ID NO: 36878 - DNA, 122 bp, Homo sapiens
catgagggcttcaccctcattcatggattaacgctgaccataaagggctacaaggtcaaccgcttgctctctctcaccctctctttgcccttctcccatgggatgatacagcaagaaggccc

SEQ ID NO: 36879 - DNA, 122 bp, Homo sapiens
aataaaacaccatgcaaaagcctctttctactgaaagaatcatctcgtccccaacacacacgtctcttactctttggaacatctagccagtggtcctcaaacctagccacttcacagaacca

SEQ ID NO: 36880 - DNA, 122 bp, Homo sapiens
tgaagcatgaaaggctaagaaatggaaatgcagtgctgcacatggccgggagcccgggtccggctgtgggctgcagttccgtgatcccggcggggaaggccacgtgggttactggggaggat

SEQ ID NO: 36881 - DNA, 122 bp, Homo sapiens
agatggggaaaccgaggctcagaaggaaagcacctctactgaccgcactgcctgcctgggcgcttgcagcactgcagggtgaccaactgtcttggcttacccaggcctgggggttcctggga

SEQ ID NO: 36882 - DNA, 122 bp, Homo sapiens
ggcgcccgggaagcccggaagtggcttcactcgggttagggaactaactggaagagcgggcggaagtatgcgataagcgagcgaagacgcctccaccctctctcccgccagaagtgacgtca

SEQ ID NO: 36883 - DNA, 122 bp, Homo sapiens
ggaacaggaattgctgttttaaaatatgcaactggcatttcacacctctacactggacgacgtattgcgtggaggatggagaaggaagatcacccctactcccaaattcgtagttataaggg

SEQ ID NO: 36884 - DNA, 122 bp, Homo sapiens
tgcagctggaggtagcagggggtgggggaatggaattggtgccatgggatgagctaggtccgtgtgacagggagatggagaccatggtaggggcataagcagcatccagcagagggctaggg

SEQ ID NO: 36885 - DNA, 122 bp, Homo sapiens
gcgtcgccccccagaacctcggggtcctcgtctccccagtagaggtgttgagaggggtcacgaaagggggtccaggagacgaggtcagcgaaacgcgcctggtaaacagttaagggccgcgc

SEQ ID NO: 36886 - DNA, 122 bp, Homo sapiens
aattcaatacctagacaaacaatcacttaagtgtaagggcagaaaaagaactttttcagccgggcgcgatggtcagcctgactaacatttagtatctctactaaaaatagaaaaactattag

SEQ ID NO: 36887 - DNA, 122 bp, Homo sapiens
accatatgcattgctgatatggtgtctctgttgttttacaacccatttttaactcaaaaacgaaaactgctcgaatttgcttttttgtctaacatcattttcattgtctaaaatacacatga

SEQ ID NO: 36888 - DNA, 122 bp, Homo sapiens
tgtgcggtgacgactctcaggcgtgttcctaagtgtggggttgcctagctgctgctgctccggtcagagcatctgttttgcagggcggctttgtcacggttctgccagctccacacccccca

SEQ ID NO: 36889 - DNA, 122 bp, Homo sapiens
ctcatcttcccatagtaaagatgacggcgccttgaggtaagctacaggcaacaccacttccgcgtttctcttgcgccctggtccaagatggcggatgaagccacgcgacgtgttgtgtctga

SEQ ID NO: 36890 - DNA, 122 bp, Homo sapiens
gccctggtccgctagggggcggcgcgcgcccggggtgggttgagctggactccttccgagcgcagcgcgcagacggccgcgggcgccggggcctccagggcgagggggctggggccggggct

SEQ ID NO: 36891 - DNA, 122 bp, Homo sapiens
cagggctgtgcctggtgaatcgcccaggaagcgccacagatggcagcgcagttcttcagacgtgcaagcagcagacccaacaggcggctcagcacccctgagcgcccacaagcacccaccac

SEQ ID NO: 36892 - DNA, 122 bp, Homo sapiens
ggggcctaccggtgagcgcagccgaggactggcgcttgggggcggggccacggcggtgagcgcagcccgggactggagtttggggcggggcctcgtcggtgggcgacaccggggactagagc

SEQ ID NO: 36893 - DNA, 122 bp, Homo sapiens
tctccatctatcggaccccagtttccatcactatctccagagatgtagctattatgcgcccgtctacagggggtgcccgacgatgacggtgccttcgcagtcaaattactcttcgggtccca

SEQ ID NO: 36894 - DNA, 122 bp, Homo sapiens
ctgtagctgcctcctgccttccgaaggcagaaggaatgaaagatgcacattctgggctgacgggcatggctagcaccatcctaggccacccacgaggggctcattggcatttgtcgtcgctg

SEQ ID NO: 36895 - DNA, 122 bp, Homo sapiens
tagagaaggaagttgcagctgtagagtcaccgccgggaaaggggctggaagggcagcgttcggggaacttcaaatgcacagactaccccgtagtgagactcactttacaaaggggaagctga

SEQ ID NO: 36896 - DNA, 122 bp, Homo sapiens
ctgggcgagcctcactggccgacatccctgcatctgagcatctctgcggttgctactgtccggtaatttcggtctgttccgggcacctggatcaaagtcagaggccctccctcagggctcct

SEQ ID NO: 36897 - DNA, 122 bp, Homo sapiens
ttcaggtttccacctgattgatagtcttcaaagccagtaggtctctaccttcaactgtttcgcggtggccttttgtttgtctggggcgtggagaaggagagaagtcgatgaataaggacttt

SEQ ID NO: 36898 - DNA, 122 bp, Homo sapiens
cttgcaatgtctcaccgagggcttcatttggagaaagaccaaaaagccacatcggggtaacgaggagggataaaaaggaaaaaccgtctgttccgatttgccgatcagcaacccggagaaca

SEQ ID NO: 36899 - DNA, 122 bp, Homo sapiens
catagactgcacccagatagttctggaatggaaaaccaagaagttaacccataagcaggacgtggccacacagtgttagtcattgttcggttatgaccacttcagagaatactgcttcttag

SEQ ID NO: 36900 - DNA, 122 bp, Homo sapiens
attcctggttccttattcccgctggctcccaccaactgaaaagcagaggtggctcgcaagcggcggggctctgccctagattgccagtaggcgctcgactcacatccagctccaccccggga

SEQ ID NO: 36901 - DNA, 122 bp, Homo sapiens
gttctgttcgtggcagtcttcagcacctagagcagtcccttgaatcagtagatagttgatcgatatctgtgtcatgtgtacgttagaaactgctcagaggccggtagtaatctcagcacttt

SEQ ID NO: 36902 - DNA, 122 bp, Homo sapiens
ggctcttctcccatcgcagcacctgagcagccccgtgactgcggcctgaggtctgccccacgtgcgctgtgggccaggcagagcgccaggtgcacccaggatgccttcatcttcaccgccgc

SEQ ID NO: 36903 - DNA, 122 bp, Homo sapiens
tcccatcatatccgggagccaacccccagcccgcatttggggccgctgaggggcagccaccgggggccgccaagccggcccttgcccccagctttggcagctctttcacttttggaaactct

SEQ ID NO: 36904 - DNA, 122 bp, Homo sapiens
agtaagatggggtgaggtggtgaaatattggtgggctggtaattgggagacctaggtgatcgcaccctcctggtaaggacatctccttgggtctgggtttctcagaaaggggtttagaaggg

SEQ ID NO: 36905 - DNA, 122 bp, Homo sapiens
ctgtggagggcggaaacagcggaggggccagtctcctggcgaaggggcctaatccttgcccgccatgtccgggggcttcgagctgcagccgcgggacggcggtccccgggtggccctggcgc

SEQ ID NO: 36906 - DNA, 122 bp, Homo sapiens
catgtttatcaaatgcctactgtgtaccattcaccctgctagacactggacatgaaaacacgtattctgtgcgcaaacatactcatattttctcccattttttccttctttctttcttcctt

SEQ ID NO: 36907 - DNA, 122 bp, Homo sapiens
gttggccccaaagtctacttagaatttgccggcggaacagcaatgaccactgggccacagcgcttaagacgcccgctgggtaccaatcctgggagtcgggggcggtgcgagtcgggcccccc

SEQ ID NO: 36908 - DNA, 122 bp, Homo sapiens
gagccctcacagagacagctccagatgtggatggcgaggagaaacgctcctgatgcccagcgcctcggcccgagtggcagattccggcctccctctgtccctccagtgactgcttgggaccc

SEQ ID NO: 36909 - DNA, 122 bp, Homo sapiens
ctgaaggactttatcacaggggaatatccaaacaatgattttagcaatagacaataaaatcgagggaaaagtttttgggtctgaaatctgagttagcagtgcccagggtaacaggaggggaa

SEQ ID NO: 36910 - DNA, 122 bp, Homo sapiens
gtacgcggggcgcggcggggtggaggtacgcggggcgcggcggggcggaggtacgcaggacgcggcacatgccagggtcgtagtgcttgttatggcccgcgctctgggctcaggacgacagg

SEQ ID NO: 36911 - DNA, 122 bp, Homo sapiens
gtgcagtggctcactcctgtaatgctagcactgtgagaggccaaggggggtgcggtggatcgcctgaggtcaggagttcgagaccagcctggccaacatagtgaaaccccatctctactaaa

SEQ ID NO: 36912 - DNA, 122 bp, Homo sapiens
aaattcacctgcagggctagggccaggcgcactcaccccacagccagccccactgggcctcggaggcagaatacgggaagaaccgcgaaacaaccctaaaccaattctgaggaccacgaatt

SEQ ID NO: 36913 - DNA, 122 bp, Homo sapiens
atgaggctttggcccggagctcctcgcctctgagtcgcgcaccgcctgctccagccccagcgccgctcggccactgattgcactctggccgctgaagctccccatcctctcccagagacggc

SEQ ID NO: 36914 - DNA, 122 bp, Homo sapiens
aacatgatttaagcaaaagcctagttgtttttgcttaaatcacattgtgcataattaaatcgcattgtgtgttatctgtttgttgataagttggtgatattctataccatcgttcgtctaaa

SEQ ID NO: 36915 - DNA, 122 bp, Homo sapiens
ttgcgtctcttaatcttcagagctacctgattttgcttattactaactcctttatcattacgaggtccacaccagggctatttaaatacttgaaacgaggaacagttaaacagtctgctgaa

SEQ ID NO: 36916 - DNA, 122 bp, Homo sapiens
ggaggagggagggaaggcaggcacacgaagacacaggtatgtcgggaagtgcacacaaaccgttgtctttcctttttggttaaagaagaaaaactttgtaatcaatatcctgctcataagta

SEQ ID NO: 36917 - DNA, 122 bp, Homo sapiens
cccctgccgcagcagtggcggtagcggtagccctcagagtccacttcactcgcctcagttcgccccgcttctctgtgcacggattggttccaccgaccggaagggccacaaggatccccgca

SEQ ID NO: 36918 - DNA, 122 bp, Homo sapiens
agttaaaatgggttctgaatagggaatcgcatcctgcagccataaagtcttaagaaacaacgtctcctctctcgcagacggtggggcgtccagtattggagtctcttcagatctagccatcc

SEQ ID NO: 36919 - DNA, 122 bp, Homo sapiens
cgagttcaggtctattcaggattctggattacatcctaacgtgggcgagtttctgttgaacgtgattgcacgtatcaagatgtgtgctcttagatttgttttcaatccagataatttcagaa

SEQ ID NO: 36920 - DNA, 122 bp, Homo sapiens
caactctcccttctggaggcccactgcaccccgacatgacaccagaggctggggtagagccgccgaagcagtttgaatttacaagtgacgtgagacaagagaactgtctgatgacctctctt

SEQ ID NO: 36921 - DNA, 122 bp, Homo sapiens
acagaggagcctcagcctatcatgtctggccgccgcgcgcagcccgagcccggagccaggcgctgtaacacgatacgctccagacccaggcaacttggcagcgctgggctcggttcctcacg

SEQ ID NO: 36922 - DNA, 122 bp, Homo sapiens
gcaaactaacaatttacccttacagtatctggttacagccagcaatttttcacaaaaatacgcttatctcctcccttcccatcatttaaaagggcaagcagttaaggtcacagtttaaaagt

SEQ ID NO: 36923 - DNA, 122 bp, Homo sapiens
caggcgtgactgtgctgcagatttgccagcctgtcctccttcgcgccggggcagcctgtccgcctgggctgccctccggggctcctttcaaaggctccacttcccagggttcacaggcttca

SEQ ID NO: 36924 - DNA, 122 bp, Homo sapiens
tgagtaccacccttccagattgctgactgcacagcccaggatcaggtttttcaaagcattcgagcacagaagtagggcagggctctgtggttagcagccagctgggtgtggtaaggagtaga

SEQ ID NO: 36925 - DNA, 122 bp, Homo sapiens
acctctactcaataatgtttaataaatacattttcttaaaagctggttgtataaaaatcacggtggttgatgagtaatcgtgttaactctctgtggtctgtatttcacaactaatctttcca

SEQ ID NO: 36926 - DNA, 122 bp, Homo sapiens
gggctataactaggtcggggtgatcagactctgccacaaaacacccacatttagacagcacgagtttaagcaaaaacaaaacagtttaaggcagtgtaaaattttgaggtcctcagcgaatt

SEQ ID NO: 36927 - DNA, 122 bp, Homo sapiens
ctgggttttgagcactgggccaattctatggccttcctgaagatggtcaaggaacaaaatcgaaaacaaaaattagggttacatcctccctgttttgtagagatagcgaaatattgaagaca

SEQ ID NO: 36928 - DNA, 122 bp, Homo sapiens
gggcggttccggaaaggcgcctgccgtgtagtcaggctgtgaactggcagaagctcttgccgccatgctggatcagggcggatgctgctagaataggaaggtgcttgaactttggagctaaa

SEQ ID NO: 36929 - DNA, 122 bp, Homo sapiens
gaccctctgagctctagcgagcctgaatccggctctgggggtggcgccccccgcctgctgcggctcccggggccagcgccctaacctttcagagcctggccctgccacctgtagaaggaagg

SEQ ID NO: 36930 - DNA, 122 bp, Homo sapiens
cggctgccgcgtacctccttccccgcctctcccaccgcgcagcgccgcgggccggcgccgcgcttcctacagtcctacgaaggggagtaaagcagaagactagcgcactctccctcaattgt

SEQ ID NO: 36931 - DNA, 122 bp, Homo sapiens
aggccatgtgaacccagagtgacacgcggccccagcccaagactcgctccgtggtgcccacgcctatatcctgtttccggggtgaagccctgagaatgtcctgaaaccacacggaagatctt

SEQ ID NO: 36932 - DNA, 122 bp, Homo sapiens
ccctactcctctggtccctctgtctcctggccctgggccagtcaccttagatgatttgatcgctgcggttgtagtcctgggatttaaatctcctgccctgggtggccctatgcagcatgagg

SEQ ID NO: 36933 - DNA, 122 bp, Homo sapiens
ctggtagcgcggaggaggggacgcctgaggagccgcagtctccaggagagcggtaagccccggcctgcgcgggttcccatccctgttctcaccagtacgagggctgcggccgccagcgccgc

SEQ ID NO: 36934 - DNA, 122 bp, Homo sapiens
gctctgcatctcctcacactctccacgggccattttctagctctctttggaaggagaaatcgcagaacccctgggctggtttattatcagcagcaatctccaaacaagccccaggggctgtc

SEQ ID NO: 36935 - DNA, 122 bp, Homo sapiens
ttcattcattacgtattacttaaataactaatagttcaggtactgcactaccgttacatacgggaaagtacacgatctggacctaggggagattaccgtttaaaggcgaatctggcacgtgt

SEQ ID NO: 36936 - DNA, 122 bp, Homo sapiens
tgccttacctcccctttaaagcctttttcttcaattccgtgccttcttcctgctttgggacgaaccccgtggtggcaacacgcaacttggctgtgaaccagggactccaggatctccgaggc

SEQ ID NO: 36937 - DNA, 122 bp, Homo sapiens
gcctccctggaaacggtgcacctggcagggctggccctgtttctgacggtcgtggggtcccgggtggctgccctcgtggtgctcgagttctccctccgggccgtgtccacgctgctgtccct

SEQ ID NO: 36938 - DNA, 122 bp, Homo sapiens
tgtgtgatcaaggactccttgtagttgttgttgcagtcataggcattttcgagagctcttcgttcatgagagaggacatctctcctgaactgaagctgtgtctaagttcttggctgattcag

SEQ ID NO: 36939 - DNA, 122 bp, Homo sapiens
agccccggccccctgtccaggctgcggaggagggaggcttccctcgctctcctccctgatcgacaggcataacggctcaaaagtcaccaagcaaatcactttgctccatctctctgaagggc

SEQ ID NO: 36940 - DNA, 122 bp, Homo sapiens
tctagtgacaccaatgaccgtgatctcagtggaaaagggcacagtgtgtcccaggcatttcgcgtttatgttaaaacgggtggaagatagcaagccggcagaggccgggccgctgcacccgc

SEQ ID NO: 36941 - DNA, 122 bp, Homo sapiens
ccattatttggagcaacaaggttacctactcgaatcactggatcctgagttgacacaaaacgcatctgttgactcagggtttgtataaccacgtgcagtatttactaggctatccaattctg

SEQ ID NO: 36942 - DNA, 122 bp, Homo sapiens
aaccctaggaacgagagcaagcggcgacctgaagactcacaggaagcgagggcagtgcggcggcagcgcgcatgcccgaacacgcacgccgggagaggtgcacacgcgcaggagtgcaccgg

SEQ ID NO: 36943 - DNA, 122 bp, Homo sapiens
cagagaaagaagaggagttataatccagctattttattggatgtgctttgcattcttggacgagggggtgtcttcaatcacgcggaacacttgattctggtgtttcccccttggcatgagat

SEQ ID NO: 36944 - DNA, 122 bp, Homo sapiens
taatgctgaaactaaccaccaggcttgtgctccaatttgggaacagtcaccctgaacagtcgatgctatcagtcaatagcatcaactccagcacgcacatcttcattcctcagggcctctgc

SEQ ID NO: 36945 - DNA, 122 bp, Homo sapiens
ggccccagaggtggcacacagttaagacttggcggctgtctcattctttttcataatgtgcgggttcccgggtgtccgggtgctagactttcagcaggccccaggccagacgggctttggtt

SEQ ID NO: 36946 - DNA, 122 bp, Homo sapiens
aagaaacgcccaagggagtaactccactgtgacgttaaaattggggcggtgcgagtaagtcgtttcctgctgtcgtcgtgagatttaaagacacctcgcgagacctcacctaaatcagtcac

SEQ ID NO: 36947 - DNA, 122 bp, Homo sapiens
cgagtgactcttgccaaccactctctgtggggcctgtgtgcttcctcctgggttctggggcgctggcggcgtccgcttcaccgggaacgggagccccagcctcccgaggccttcctgcctgg

SEQ ID NO: 36948 - DNA, 122 bp, Homo sapiens
atctgcccttagcgtttcttcgccttaagccaccccccgcccttttgctggagcgctggccggagcttgctaagctggagatggagccacgatctcctttatgagctctctcagtgcccacc

SEQ ID NO: 36949 - DNA, 122 bp, Homo sapiens
aacctagtatatccagtgtttgatcattttagcatataatcaatacaagaagttaccttgcgccctacagaaccttcaaaatctggtgtgtagttcacctatatagcacctctcggctggga

SEQ ID NO: 36950 - DNA, 122 bp, Homo sapiens
gctggtgggaaggtggccatcgtgcctggcttgtcttccctgcctctcttcttctcctaacgctttgtctgtctctgctttcctggccccgggcctctccactccctcagcttataaggctg

SEQ ID NO: 36951 - DNA, 122 bp, Homo sapiens
gtcccagtgatatttatgagagggatctgaagtatttattgataatgcatatatgaaaaacggagaagaattaatgaaacagatatatctgtgttagaatgattctgtataaagatagggaa

SEQ ID NO: 36952 - DNA, 122 bp, Homo sapiens
cggggctccgggggatggcccggggcggcgtggcgggcatgagagctcggggctccgtcacgtactccgagtcccgcacgcactcagcgtcgctctggggccccacgtccggccctcgacct

SEQ ID NO: 36953 - DNA, 122 bp, Homo sapiens
taggtccaggtcatgggtaggtgggcgcgcaggcagactttcgtgatgttgtgcacttgacgtgttgtgctggacttccacagcagacaggaagggtgaacagagcagcccttcagagagaa

SEQ ID NO: 36954 - DNA, 122 bp, Homo sapiens
ggaggcaggggcaggcctggccggctgaggtcacaggaaggccccttccagcctgaaacgcgatctcgggatgtggggcctgccaacctgcagcgaccctgggccagcagagatgaaaggct

SEQ ID NO: 36955 - DNA, 122 bp, Homo sapiens
tcactgttttctctcctccttctcttccatgttgtcttctgctgaatataaaccccacagcgggtaaagatggcaaccccagggcgcagccaccccgcgctcccgctcggccccgccaggtg

SEQ ID NO: 36956 - DNA, 122 bp, Homo sapiens
gaccaatgaagccaagcgataatctgttggaggggcctgttctgcgggttctgaggaccccggggatctttaagtcctcactttctttttgggcatgaacatttgggtgttgcaggcagata

SEQ ID NO: 36957 - DNA, 122 bp, Homo sapiens
ttctgccctccttgcccagcccgggcggtggggactaagcagcgcgaggctgcagaggggcggtcacaagtgtgaccattcgcactgcactccagacgccggctcctcaggctttactggag

SEQ ID NO: 36958 - DNA, 122 bp, Homo sapiens
tgtgtcagcgtgggcctgacacagtttgtggctgtgtccatttataccgtggcctaatggcgtgtgtgtggacgtctgagcctccagcctcttcctggctgccctttcaacagtgggccaca

SEQ ID NO: 36959 - DNA, 122 bp, Homo sapiens
taaactgggagagcagggggtcctgcgggtgacccttgtgcttcatcacctcccaccagacgtccaggaagaaggccacgtcttcggcagaagtgtcaacggtcacatgttccagaaagcgc

SEQ ID NO: 36960 - DNA, 122 bp, Homo sapiens
aatatggctgtgcctgcttttgaaatccaagggtcccttccaaagtctgcaagaaacaaccgatagcaaatttcccccaaacacaaaccaagtccttttttcccccccacaattcagggaat

SEQ ID NO: 36961 - DNA, 122 bp, Homo sapiens
gggaatttttatgtaataaaatgtttatccctagatagagccattcacttttaagccagacgcctggtgcagcacaggaaatcccaggtttcctttctgccacactcttccgaatattcaaa

SEQ ID NO: 36962 - DNA, 122 bp, Homo sapiens
attctggtaatcaggccaaatttgctcaggcaggaagttcaaatgtcacctaattggtttcgttcttatgcttcacttcattttcctcggaaatggaggtcccgaagttactactagtaact

SEQ ID NO: 36963 - DNA, 122 bp, Homo sapiens
ccgccctagcttcgcgccaagctgcagtgtccccgacacactgtcaggacacgcgcttttcgcccctactttgttcttgcgcagtcttcccagctgcggagaggagggagcgaaagcaaaac

SEQ ID NO: 36964 - DNA, 122 bp, Homo sapiens
cctcgccccggcggaagcagagctttatcagtactacctagcccagaacataggcctgaccggaatgaagctggaaaaccctgccgaccctcagctgatgatcaatccattccagctggatc

SEQ ID NO: 36965 - DNA, 122 bp, Homo sapiens
ttggcccgacaacccggcgggggatccctgctctccccaccgaggtcacaagccctctcccgtggtggttagtctgctgagtgcggaggtttcacccaagccagaagcttccccctgggctc

SEQ ID NO: 36966 - DNA, 122 bp, Homo sapiens
tccctattgccaaatccaacagccagtcctcagtgcatatcatactcaatctgtcactcccgtcttctagaaacactttcctcactccgcttctaggacacaccctctgttggttctccttc

SEQ ID NO: 36967 - DNA, 122 bp, Homo sapiens
cactttgtaagtttgaatttttgtcttcagattcttttaaagtgggcccttagtcaggagcggtggctcatgcctgtagtcctagcactttgggaggctgaggcaggcagatcacttgaggt

SEQ ID NO: 36968 - DNA, 122 bp, Homo sapiens
gggggctgcatttctccctttattggtagctggttcggctcgcccctttgcccgaccacacgctctttgtaaatacagaataggacaaaacggaaagagtgatgtgctgtcccctccgtcta

SEQ ID NO: 36969 - DNA, 122 bp, Homo sapiens
ggcgtttagtgcattcacactgacgtgtcaccaggtaattcccaacatctgcctcttccacgcccatgaagcagttgctccccactctgccctcccagtccctggcaaccagcaatccgtgc

SEQ ID NO: 36970 - DNA, 122 bp, Homo sapiens
atagaaagatttaacttttacggtcatctcttgctgctgactctcggcttggcaccccatcgggccaggggccaggtgtccggggcacacgtggtctcagcggcccaccccctccccgggcc

SEQ ID NO: 36971 - DNA, 122 bp, Homo sapiens
catcctggccttactgctatttggagttaggatcttaactattttcccactgttatcaagcgatgtctcatgggaatggattggggaagggtctttcatcctcatttatttacccaatgcca

SEQ ID NO: 36972 - DNA, 122 bp, Homo sapiens
gggcagcgcttcccgccttcgccagagacctcacttcctcgcgcggccgctgctgtagctcggtccgtcctgcccgccgccatgttgtgctcttgcctggcccgctgctgtcgccgccgccg

SEQ ID NO: 36973 - DNA, 122 bp, Homo sapiens
ccgcatgcgcgacggccgccccgcggctgcgcagcgccagcccggccccgccccggcccccgggaccccggccccgccccaccccgcccgggccccgcccagaccccgcccagaccccgccc

SEQ ID NO: 36974 - DNA, 122 bp, Homo sapiens
ggggtccgcatagtcccgatgaaaaacagacccgggaaagctggtgggagtcaggagccccggcgatgaggattgcgatgaaggaagcaggctcggagcgccgccagcgcatgcgtattggg

SEQ ID NO: 36975 - DNA, 122 bp, Homo sapiens
gaccttttcttaggaagctatttaagaggaatgtgctctaccaaaatatgaggcaatgctcgaaatcacagaagaaaatgctaggatgctggagaagggaagacccaagacagagaagcaag

SEQ ID NO: 36976 - DNA, 122 bp, Homo sapiens
ccggcgctcgggcgggaacccgggcgcatccgcacgtgcgggcgctgctgcaggtgtgtgcggctcagcccctgcctggacagcgctccctccccaagcctgagagtccctgcctcgcgcgc

SEQ ID NO: 36977 - DNA, 122 bp, Homo sapiens
tgcaatccctcgtagttagtggaactgaggctcagatagcatgctccctgggccccccttcgggagcagtgtggggtcctggccgagaacccctgtcagcatgtcacttcttcctatctccc

SEQ ID NO: 36978 - DNA, 122 bp, Homo sapiens
gacacgatgattaaatcagagagcgatggtgaatagaccacagagcacttagatcaactgcgtgacgaaaaaggagacctgtgtgttgcttctcaaactttgctgccctgtggaatcacctg

SEQ ID NO: 36979 - DNA, 122 bp, Homo sapiens
gcgcaattttcccacctgaaactcttagtgcagggcctaacaggccttcttagctagagtcgctctaaaggactcctgattcagttcgggtaatcggagtcttatttaggacaagtctgggt

SEQ ID NO: 36980 - DNA, 122 bp, Homo sapiens
acagctccctcctcagcaatgctgtcacctccctcctctggttatcctcatacctgcctgcgctggagacgtggctgctcggccactttccccagattgtgagctgcctgagggcactgatc

SEQ ID NO: 36981 - DNA, 122 bp, Homo sapiens
ctgccgcactccggccagctggtgtggtacatggactacgacgccttcctgggatgagggcgcctgtgccccttgcccgcttcgctcctgtgctttccttcgcccgtgtcttccctcccttc

SEQ ID NO: 36982 - DNA, 122 bp, Homo sapiens
aggttaactctggcctgcaaagagcaccttgactgggtgggtcggggtcagggagccagacgaatactgaaaacacaaaaacatagctgttcagacatgtagcaggggaggctgcaggggct

SEQ ID NO: 36983 - DNA, 122 bp, Homo sapiens
gctgagccccaggggagcgcctcagcatcagcacctgttgctgcaggtgggcggcgagggcggcgcggagggcgggccacagccgggcccagggaggctgggcgcgcacccggcgccgcggc

SEQ ID NO: 36984 - DNA, 122 bp, Homo sapiens
gccgacaccgccctccctccagccaatctaatagcgctctcatgggcgcattcctgatgacgtttaggggtagggttagatgcccgtttccgctttcttcccacccacttccgggtctcctc

SEQ ID NO: 36985 - DNA, 122 bp, Homo sapiens
tgctcacagcctcgcgagccttcgtcagcatccaggtccccatggcaaccacctccaaaacgccctgttcccgttgccccggtaactgcctccccaacacctgcctgccttccactgcgaaa

SEQ ID NO: 36986 - DNA, 122 bp, Homo sapiens
tcaggaggggcaggctggagctccgaaagggataggaactgcctgggcagctggcgacgccgtctggacagctgttaaggaggcccctcagaggaaaggatcacagtttcacaggaatttcc

SEQ ID NO: 36987 - DNA, 122 bp, Homo sapiens
caggaatcgggcgtgttccaggctgctctctatggtagctttgggcggatagagggggcgcgcaaagtattaagggacaataatggccgctttcaaggtgtggattttggctccttgagcct

SEQ ID NO: 36988 - DNA, 122 bp, Homo sapiens
tatgaggggggtggcatggcatggcatggcttgcaggcgccagagccagaccccgagggacggtgtccctggaaggtgggcgggccggccggcgccactggacgccgatgtcgtttgcgagc

SEQ ID NO: 36989 - DNA, 122 bp, Homo sapiens
gctgcatcgtggaccggctgcgtctccgcgctgctgcccggggatggggcatccgcaggccggggctgctcccccacaccaaccccagggaccccctccgggtcccttacctgctccccctc

SEQ ID NO: 36990 - DNA, 122 bp, Homo sapiens
gccttcagcccatgaagtcgctccgctgtgcagtcgtgggcctgtagtaggcagctggagcgtggaccgttgggcttttgtaattaaacagcttttattgtgataaaatatttataatgtat

SEQ ID NO: 36991 - DNA, 122 bp, Homo sapiens
ctattttacaagattaactcgacgccgaaaatgggctgatgactacaggtgaccttgggccgagatttttccaaggccagaagagcctctgctggccagtaacttctggcggctgcctggaa

SEQ ID NO: 36992 - DNA, 122 bp, Homo sapiens
ctgtgatccctgaagcagcaattgatgtgaaccaccccatcactcaccccgacgctcctgcgtcctcctgagcactcacccttgatggccccagctcctcggagactcagcaggaaagccaa

SEQ ID NO: 36993 - DNA, 122 bp, Homo sapiens
atgttggtggccggcaagacctttgagatcagtgtgggagtgatggtccatgttggtggccgggaagacctttgagatcagtgtgggagtaatggcccatgttggtggccggcaagaccttt

SEQ ID NO: 36994 - DNA, 122 bp, Homo sapiens
gagcggggggcggggctgcggtgcctgcagaaccttggacagaagctccctagctgccgccgccgccgccgccgccgtcgccgccgccgagcgcgagcccagccgatccccgccgagcgccc

SEQ ID NO: 36995 - DNA, 122 bp, Homo sapiens
ttagtgagagaaatagttataagaaacttaaaaaaaaaaaacaaaaaaaaaacctatgtacgttgaagtcaggatgctgcagcctaatttgggaggaaaccggttgttggaaaacttttcca

SEQ ID NO: 36996 - DNA, 122 bp, Homo sapiens
gcccagggcctggaatcgcgctgcaaccgcggcctctttccctggttctggccaggtgagcgaggcctagcaatctctcccgcatcacaaaggattgggtcagttaaggctcatccgaaagc

SEQ ID NO: 36997 - DNA, 122 bp, Homo sapiens
gatttttagcgtggtgaagcgaggtttggaagtagacgtgtgtgtgcttgttttattctgcgccgcacagcaacccgaactttcgtttggtagcacttgaaagagttttctccctttgtttg

SEQ ID NO: 36998 - DNA, 122 bp, Homo sapiens
acgctgaagcggcccatggagttcgaggcggcgctgctgagccccggctccccgaagcggcggcgctgcgcccctctgcccggccccactccgggcctcaggcccccggacgccgagccgcc

SEQ ID NO: 36999 - DNA, 122 bp, Homo sapiens
actctgtctcctttgacttttgcagtgaagatgattcttaaaagagagcccagccaggcgcggtggctcacgcctgtaatcccagcactttgggaggccgaggcgggtggatcacaaggtca

SEQ ID NO: 37000 - DNA, 122 bp, Homo sapiens
aaataaataaaagagagagaacagccgcatcagggtcctgagagcactacctttgggaaacgctcttcaaattttaacttttttttttttaaatgtaattttaaaaattatcaaaacaatat

SEQ ID NO: 37001 - DNA, 122 bp, Homo sapiens
agtgtagggcccactgtggcgtgaccagaatgggtgctggatggccccagccgcgcggcccgtgcggaagaccctccccttccttgcagccctcttggcttcgctggtgtctggggcgcccc

SEQ ID NO: 37002 - DNA, 122 bp, Homo sapiens
gtaatcagtgtatgtagtgcttgagggattgtgaataatacacaacatatcctcagtcatcgattcaacagatgtttattgagcatctactatgtgccagtccctattctaggtctgagagg

SEQ ID NO: 37003 - DNA, 122 bp, Homo sapiens
gtcgcctcccacagcggcggcggcggtggcgcaggagatccagatggaactgctagagaacgtggctcccgcgggggcgctcggagccgccgcacaggtagcgagagcgcggcgccttctcc

SEQ ID NO: 37004 - DNA, 122 bp, Homo sapiens
aaaggcgcccgttccaggggtcccagaacgcccgggcgtggggctgggggtgtggcgcagcgaggccgcgcagcaagcagtcctcccggcaccgtcggaagcgcagttgcagcagccgtcgg

SEQ ID NO: 37005 - DNA, 122 bp, Homo sapiens
cctgtgtggagtccttggcgcggcgcaatgcagcccccgggattctcgcggccttcagtgcgtgccctcctgggacagacctaggaggagacccagggaaccccccccccccacgtcgggtg

SEQ ID NO: 37006 - DNA, 122 bp, Homo sapiens
gccgcgcgcgcgcacgccgggctcagcacccgccgtgtacgcgcccgtgcgcgcgccccgcgcctccagcccagcgctcggagccgctttcgctgccactgtctgctcccccgggccgccgc

SEQ ID NO: 37007 - DNA, 122 bp, Homo sapiens
gtaatgggctattccatctcggtctaagtacactctttgatgtttgcaccatgatgaaatcgcctaacgacacatttctcaaaacataccctgttgttaaatggtatgtaactgtacttatt

SEQ ID NO: 37008 - DNA, 122 bp, Homo sapiens
gccggggggccggcggcggcccgggcgggacgatgaagcggcagaacgtgcgcacgctggcgctcatcgtgtgcaccttcacctacctgctggtgggcgccgcggtcttcgacgcgctggag

SEQ ID NO: 37009 - DNA, 122 bp, Homo sapiens
aggggcaggttgggtgtgtgctggggggcgcagcagctgggaccaaggccccctccctgccgcgcctgccccgggggagctgcctgcagcaggtaagatccccagcgacctgaaaggatgag

SEQ ID NO: 37010 - DNA, 122 bp, Homo sapiens
ttctctgatgttgaattaattttgcattaacattgaacgctttcccacagtcattacactcgtaaggtttctctccagtgtggactctctgatgtgtaatatatgcagaactacagctgaag

SEQ ID NO: 37011 - DNA, 122 bp, Homo sapiens
gccttgcagcgtctccggaagtggaggcgggagcggcacggcagccactgcttggggtagcgggagggcagactctgggcgccactcccgggccggtcatgaacgggccggcggacggcgaa

SEQ ID NO: 37012 - DNA, 122 bp, Homo sapiens
gcattaccgcctctccgtgccctcttctcttaacctgccctgggccaagggcctcggccccgcgaaactgcgagtcctccagaaagacacatcgctgttggggtgtccaacctttctgggat

SEQ ID NO: 37013 - DNA, 122 bp, Homo sapiens
ttaaagcttcttcaattgtaaattctccagaatcttcaggtgggtcaaggttagaggtgccgccatggattggtagacggcaccatgccagtcacgggctgtggccgcccggatgtgaacag

SEQ ID NO: 37014 - DNA, 122 bp, Homo sapiens
gtgcccctggccaggtgcagtgtgcagtgcaggcttgaacctgcaggggtcccccaggagcgtgtttccttcccagaggccccggggcaggcactgagtggcttggtgaaagcagaaggtcc

SEQ ID NO: 37015 - DNA, 122 bp, Homo sapiens
taaggcatcctagatacttcacttttgctcagatacatatggtcagtcaccagcagagcccggctacgaaaagtgtgcagagtcatgacagaggcattgtcattccagctggctgtggagtt

SEQ ID NO: 37016 - DNA, 122 bp, Homo sapiens
gcgcggggtgaggcgggggcggggcgtggggtgggcggggcgatggctgacccccgcccccggccccagcaggagcgacccccccaagctcaacgccttcatcatggacaagtcgctcctgg

SEQ ID NO: 37017 - DNA, 122 bp, Homo sapiens
gagaccacccttgatcaggctctagaagggcaaagtcatgaggcattttcctctctcaaacgtgaccacataggtctgctccttctacaagggcaatttctagaaaactgagatgtgggtag

SEQ ID NO: 37018 - DNA, 122 bp, Homo sapiens
gacctccatcggcaagatcctactaggccagtaggggccgctgcagttccctgagaagagcgtacctgggcgtatcaacccacaggcccctgccagacctcctgtaatcatatgattacttg

SEQ ID NO: 37019 - DNA, 122 bp, Homo sapiens
ctacagatttattaaactttatttcctctgagtctctgggcagtcagcagggatgtaaggcgaagtggcagtagctgaaggggcctgagcagagctggtgctgggaggggccggcatggaca

SEQ ID NO: 37020 - DNA, 122 bp, Homo sapiens
tagccgggcttgtgagcggtgcccatttccagatgaagcctttcagcccttctgagtccccggcccttggtgcgatgtctgtgagtttgacctgcccagcgtgtgggctggctcaatgctga

SEQ ID NO: 37021 - DNA, 122 bp, Homo sapiens
ctaacaagagcaggaattaagaataggtcagaagaacatctgcttttcttattttgattacgtgggcaagcaaaggaatttgcttttataacaccaaaataacttggaatgcggcaaaaata

SEQ ID NO: 37022 - DNA, 122 bp, Homo sapiens
gtgtggtggcttttggctgggaacagcctgagcctccctcgggcctggcacaactcctttcgcgagcgggcagcccagcgcctccctcgggaggcgccaaggcgtgggggcgcccggggcgc

SEQ ID NO: 37023 - DNA, 122 bp, Homo sapiens
agcctcagagtcccggagccgagtccagagggcgggatgcaggtattgcgaagaggcacacgctccgagaggaaccaccagagcgtgggctttgggcgaggaggggtctcctctggttgggg

SEQ ID NO: 37024 - DNA, 122 bp, Homo sapiens
ctgccctttcactgttcctgctgaagccaaaggtgccagaaaagcctagacattgagctccgcgctccccagtcgtgactctgtgtctacgacgaactttctaaaggcagtggcttataaac

SEQ ID NO: 37025 - DNA, 122 bp, Homo sapiens
cttatcacatttcttctattccacacctcagtattgtcatcgtctccacttgcccttcagcggaggagattaatagatttcaacaggaccttttgtgggctcagaggagctggctctgcact

SEQ ID NO: 37026 - DNA, 122 bp, Homo sapiens
gccaactacgtggaggccatctgaacccgcagcgcccccatctgtcttcagcacattccacggcatcgcatccgtcctgggcgtgacccgtccattcttcagtgtctctgttttttaaaacc

SEQ ID NO: 37027 - DNA, 122 bp, Homo sapiens
acgccgccgctcccctccggccggccaggcgccccgcgtgccccgggagagccgcggagtcggcccgccagccgcagctgagcagtagccctgacccaaggccccgcccgcaaccgcaggtc

SEQ ID NO: 37028 - DNA, 122 bp, Homo sapiens
acaaatgtgatgtggggcgcagggaattgccactgtcacaggcggcgtctgcgtctccctcgcccgccctcgctcactctcgaggaaggcgacgcatttatctgcagggcggccgggcgtcc

SEQ ID NO: 37029 - DNA, 122 bp, Homo sapiens
tgctgcagttaaaaagctcctagttggatcttgggagcgggcgggcagtccgccatgaggcgagccactgcccgtccccgccccttgcctcttggcgccccctcgatgctcttagctgagtg

SEQ ID NO: 37030 - DNA, 122 bp, Homo sapiens
ctgagcaaactgaagtgcactcaggacctctgggccaagccagccttatctccctgtccccgcatttacataccgaaaggagacctagccttattggtgagtccttcaactgttatcctcca

SEQ ID NO: 37031 - DNA, 122 bp, Homo sapiens
ttaggtgtagagccttgttagaccaaattatgcccctggaagacagtttatgaggttgcacggcctcaccctccattgcttgggctcacagctccttagggtcatggctctccagctctgat

SEQ ID NO: 37032 - DNA, 122 bp, Homo sapiens
tgccatatttgttcaatgaacgaatgattcccaaaagaaatagagcacagagttcagaggcggccttcagggaagaaatttcaacaatgtcaaaaattaattgtggagtatccattgataga

SEQ ID NO: 37033 - DNA, 122 bp, Homo sapiens
gtgagttcagagaggggaaaaagcaatgtcatggtcccagccctccaggagttcacagttcggtggaccagagacctaaacgaaattataatacagtatggtaagaactatactgaaaggtt

SEQ ID NO: 37034 - DNA, 122 bp, Homo sapiens
aaggaattcgttttcttagaagctgtgcctgtcactctgctcagaaacagtccaagcagccgttccaagtgtggccttcagcccatgccaaacttagatcaactgcaggcttggagctttct

SEQ ID NO: 37035 - DNA, 122 bp, Homo sapiens
gccgcatccgccccgggactggttgggcggccccgctctgcccctccgccctcagggccgcggcccagcccacgaccgctgcacagaaggagcccgcccagcccccgacccgcgccccgcgc

SEQ ID NO: 37036 - DNA, 122 bp, Homo sapiens
tgagttccaatggcatttacttttgcccacacatggtgcttagcatactctccattgcaccgtaatttagggatgttgtctcatttccagagcccacctgggagctcttgggggtgatagag

SEQ ID NO: 37037 - DNA, 122 bp, Homo sapiens
aacaggctgtcttttcctgctacattagcacccccaggcccagaatgaatgggatttgtccgtctctcctaggacagggatctgttaagggagaggcaaagaaggtaaaacaggatccttgc

SEQ ID NO: 37038 - DNA, 122 bp, Homo sapiens
aggctccagaagaaaagcaagcatgagagagtcagggaggccagggtgggggtcagacctcgatttaggttgtggtccaggaaggctttctggaggcagctgaagcaccaggcaaggagtgg

SEQ ID NO: 37039 - DNA, 122 bp, Homo sapiens
ggttcaaacccaggcggctctttccaagttcgaagcagggactcggttctgcgcatctggcgggtgtgcccagattgtaaccttcgcactaggcatccaagaacgtgctttggacacactcg

SEQ ID NO: 37040 - DNA, 122 bp, Homo sapiens
tgcaccccaaagctgctaagtctgtggtccaggaggtaggtggccgcagctgcacctgcccgtccctcagccaggggaagtgactcgcctctgaggctcctgcaggctgcctcctgggggag

SEQ ID NO: 37041 - DNA, 122 bp, Homo sapiens
cagctcgcacgtggtccggcaccagcgggcgcacagcggggagaggccctacgcgtgcgccgagtgcggcaaggccttcggccagagcttcaacctcctccggcaccagcgcgtgcacacgg

SEQ ID NO: 37042 - DNA, 122 bp, Homo sapiens
aattcgatctggggctgggctgggccctacttaatggggcccgggtgtccgagagcgtgccgagcggagcgaagccaggagcccgatcgagatgatgatggttatgcagcccgagggtctgg

SEQ ID NO: 37043 - DNA, 122 bp, Homo sapiens
cttaaatggtgtatttggccaaacatgttgaccttataattgtggaagaaaaaaatggtgcgaggaagagatttaacctaatttgtaaatgtgctcagcctagatacacacctgtcccaaat

SEQ ID NO: 37044 - DNA, 122 bp, Homo sapiens
atgtgagcctgcattctctgctcatttatttattttcagagcaggaaagtggatttgaaacgctccttctgaatgtttacccctgggggaatgtcgggtttatgaataatgcagcatgtcag

SEQ ID NO: 37045 - DNA, 122 bp, Homo sapiens
gaaaccggtgccccggaccactccttggagacggtggcgcctcttgcgtcatcacgcgggcgttggagcttacgccatcgcgcgtcctagagtcctagcacgctattggctggctgtcaagc

SEQ ID NO: 37046 - DNA, 122 bp, Homo sapiens
tagagaaggtgcggaacttgggcctttttcctgaactgtgcttcgcaggatgggccggcccggcgctggctgcggcttccgcagggcagggcagcacttgacatggtgagggctggttcagg

SEQ ID NO: 37047 - DNA, 122 bp, Homo sapiens
tggtctcaaacttctgggctcaagcaatcctgcctcagcctccctaagcgctgggattatcggtgtgagccaccacacttggtcgaaaagttttcttacgttgagtaacatgtttgcaataa

SEQ ID NO: 37048 - DNA, 122 bp, Homo sapiens
tgcttgcctgcctttggcctcgtgccacagcattagggaatggcagtgtgcttcgaaacccgctccctggtcaccgagtttgtcttgaaatctcgctctttggtgagaaatgagattacaca

SEQ ID NO: 37049 - DNA, 122 bp, Homo sapiens
ccgcagtgtgcggttcgtgcccttaaccacccgcttctttgtttcccgcccctctgctttcgcaggagctcttgtgcttgagttcagtgttagtggtagcgtggctcactccacttggaggt

SEQ ID NO: 37050 - DNA, 122 bp, Homo sapiens
agaccgggcagagccgaccttgtatagaaatgggccgggtcgggccggggggcaggaacgcgctggagacacagacaagtccccgtctcccgcttcttcctttcctgcaaatgtccaggtgt

SEQ ID NO: 37051 - DNA, 122 bp, Homo sapiens
gtccaatctccccgtccacgtctctccccaccccttgcctacacccccaaaactcagtggcgaaagaagcccctaaaatgcattgacattttttaaggggaattggggctcgccgggggcgg

SEQ ID NO: 37052 - DNA, 122 bp, Homo sapiens
aaatagcactttgggatggaaaggggacgccagcacaccccaggtctgtacccctggcctcgcagtcttcggggtccctgacaggcagtagggctcaaaaggaagccaagtgcagctgcagg

SEQ ID NO: 37053 - DNA, 122 bp, Homo sapiens
agtcgccctgccgcaatcgcgcgtctttccaccgaggccccggatgtagattccctcccccgttcagtggtcgtggcctcacagcgactctaagacttggggctctctcattggctgtaact

SEQ ID NO: 37054 - DNA, 122 bp, Homo sapiens
cagcgcccacccacgcaccctggtcctctgctgtgcatgtcattgagggtgtggggtctgcggagagcccggaccactcggaagccttggtctgagggccacgcgggcccagagcacctcag

SEQ ID NO: 37055 - DNA, 122 bp, Homo sapiens
gccaagtgtgcagagcttggtgaccattggaatcaggacgccagaaactgtgcaaagcatcgcgcgccgggcaccctctggccatagggtcccgcaagggctaggccggcgcgtcacggaat

SEQ ID NO: 37056 - DNA, 122 bp, Homo sapiens
acccgggaactgagaggccagtcgggagccagttggttggggggactctgggatcgcagtcggggattagaggctggaccaggagtcagatccacagccagaactctgtgggcacacgggtg

SEQ ID NO: 37057 - DNA, 122 bp, Homo sapiens
tactgctctccctggggcctaagtctgatcagagacaaccttgtcctaaaaacaggggcccgggtgtggggatgaggtcagctttaagaagggctggggggccaggcgcggtgctcacacct

SEQ ID NO: 37058 - DNA, 122 bp, Homo sapiens
gcgcctcacgttttgaaccatttagaacacttcaaaacatgaattgctgctgtatcccctcggagtcaatgaagggggatcgatctgggggtacctgcgggtgaataaagactggatgactg

SEQ ID NO: 37059 - DNA, 122 bp, Homo sapiens
gggcggggcgggcaggcgagactaggtctttccctgtttggcctccgtagccggcgccggcgggtcgttctgtttgaatgaatgatcccagcagccgcgcccaatgggcgtccacgcctgct

SEQ ID NO: 37060 - DNA, 122 bp, Homo sapiens
gaacatagccaacaaatgagatatcaaacgcagcttcccatgtaagagatcagactccggcgggcacgcacgccggcgctctgctggagctccttggctctgcagccagcttcatttaggat

SEQ ID NO: 37061 - DNA, 122 bp, Homo sapiens
gcttggcaagggggaggggaacaggtccacaagatgatccagacacattatccaaaaaatcgctttcctctttaataccaacccaccccaggagacagctgtccacccccagttggggaagg

SEQ ID NO: 37062 - DNA, 122 bp, Homo sapiens
cttgggattttgtgtgcaaactttagaaagaaaaattttctttttctttctggtgttagccgagatgctgtaagcctccggctgtctgccgccatgtcagccgacaccaccaccattcctgg

SEQ ID NO: 37063 - DNA, 122 bp, Homo sapiens
tcctacagctctttgttggttgttttgctggcactcaccaggaagcagagttcaccctggcggaagaggtttgagccctctccagcgcaggcagctgtgttcaggacctctggagaatgcag

SEQ ID NO: 37064 - DNA, 122 bp, Homo sapiens
gaaagggtgcgggtgcggcagtcggatccccacgcagctctatctgcttagacacccgggcgagggatgctttgggagtttggagccagaaagtttcccagaccctgcctccagtcattaat

SEQ ID NO: 37065 - DNA, 122 bp, Homo sapiens
tatgcagaacagaatgcagaacaccatcctatcttctctcttgcagaaagcccatcacttcggatttgtagatctgagagggctcccagggcactggccttttaagcatgaccacttctgcc

SEQ ID NO: 37066 - DNA, 122 bp, Homo sapiens
gtcctcatctgtgccccgggaggccggtccatcccggagaagcctgggcggggctggggtcgtcgtggcgcctcctggccgtccggcggtgaagggtaaacaggtgtgtccgccgggaaggc

SEQ ID NO: 37067 - DNA, 122 bp, Homo sapiens
accgctcccaccaacggccccacagctgctgtctttggggctgccatgacaccagtaggtcggctcagcagctctgggaccgtttcccaggccacggcggtgttgggggcagggagcgcagc

SEQ ID NO: 37068 - DNA, 122 bp, Homo sapiens
ttgccccatcacggcaagtgactagagcttttcgaagggctgaacaggactttgaaaaagcgcccaattgctgaaggactgtctctgcagagaagaacattttctgcaagattacttccaga

SEQ ID NO: 37069 - DNA, 122 bp, Homo sapiens
ccaccgcccgcccgttctcttgctcccctgggctctgtctgcgcgctgggcggcagctcgcgggatgtgcccttacatgttccgccgctcgcctcctgcgccgcccgcccgcagcgcattcc

SEQ ID NO: 37070 - DNA, 122 bp, Homo sapiens
ctccccctcctggtcgcttgctagcgcttgcgcagaacaagattagccttctttcttcaccgctccaccgcccagccaccccgtctcttcctttccccgccccacaacactgagaaccaacc

SEQ ID NO: 37071 - DNA, 122 bp, Homo sapiens
acaatctatccagggagataagccatgcacaaaatacattcacagatccagtgactcccccgaaaaatgaaaaaaataattttgaaaaaatgaatttaaaaaagagtgaaaacaataaaata

SEQ ID NO: 37072 - DNA, 122 bp, Homo sapiens
gggctcctgtaccatggttcaggggctacagagccagccgcacatcaagacacgagggcacgggcagaccctcccgggaactgctcacaggaactgatgcgcaagtgccaggctcgtggaaa

SEQ ID NO: 37073 - DNA, 122 bp, Homo sapiens
acagtctgtattttaaaccaacccatcttaaatgaattcctctcaagtgtgatggaatatcgcctaggtatttttgtatgatatggtaacagagacaaatagatagaaacttcattctattt

SEQ ID NO: 37074 - DNA, 122 bp, Homo sapiens
ttggggtgaaagggcaggggccgggacggggttagagcggcagatgcgggcgaggggctgcgtggagggggaaaggagatgagttctaggatgaaacatctgagccaggaggcagcaaacgg

SEQ ID NO: 37075 - DNA, 122 bp, Homo sapiens
gttgtaattttgtcttccaacagcactgatccagaatggatattaagaaagcatataggccgggtgcggtggttcgtgtctataatgccagcactttgggaggccgaagtgggtggatcacc

SEQ ID NO: 37076 - DNA, 122 bp, Homo sapiens
gtggaagatgtaattaccattttcacagaggaaaaactgaggcttagtgagatcaactgacgtcacccccagcaggcaagatcttgaattcagtccgcacttttgaccaccacactccacca

SEQ ID NO: 37077 - DNA, 122 bp, Homo sapiens
cgacagcgcccaggcgggcagaggggcttcatgtcagggatgccccaaccagcggctgtgcgcttctggagcgggggccactccggacacgggtgagaaaagggcaaggcctcaacaggaac

SEQ ID NO: 37078 - DNA, 122 bp, Homo sapiens
tactgcaagccaaatggagaaaagagtaccttggagtgcccctatttaataaacacggaacgaggaaacagttaactgtaaatacagtctagaggtatccaggtgactgacagttctccaga

SEQ ID NO: 37079 - DNA, 122 bp, Homo sapiens
gactgcagcgagagacaaaggccgcaccaaacccggaaaccgtcctcttcgctccagctgcgttcctgattggatggtttccagcccaccatccctgattggataatgcttaaggccccgcc

SEQ ID NO: 37080 - DNA, 122 bp, Homo sapiens
tcccagcctgggtgatgtagaggatggtggtgttcaataacaggtggaaaaatcaggaagcgtcttggggtagcaggatgcttatgttgggtttcaggtgctgtcctttagtctgtgaagtt

SEQ ID NO: 37081 - DNA, 122 bp, Homo sapiens
aggcagtcagactgaatgggagctggaatcacgcagcagctgggagccgagttaaccctgcgtgtctgtgtcaccctgtttgtcaatctttggcattcgaattccacacacggggtcctaga

SEQ ID NO: 37082 - DNA, 122 bp, Homo sapiens
cgtcgccccggagagcctcggagctctggctgcccacgatgggagtcctctggggggcgccggagccgtgccgggtccccgccgcaggggacagtaacgcggagtcggcctggccggcggaa

SEQ ID NO: 37083 - DNA, 122 bp, Homo sapiens
gcttaaaaatgtatttttaaaaaacataacagaaagtcctgaaactcacctttcggtccgcggaagggcttcctgcaggcccagggaatctcctggttgctgccccgtctgacagcgccccg

SEQ ID NO: 37084 - DNA, 122 bp, Homo sapiens
atcaccatagtttgtcgagtcgttactctcattcatcttattaaaatcatcttcatgctgcgaggtagtactattagcctatttagtaggtaagacaaatgaggcacaaagaggttagggaa

SEQ ID NO: 37085 - DNA, 122 bp, Homo sapiens
tctggcgtttgggaagcagcaggtcctcagcccgcccggggtcacgtgggaagaggcagtcgggctctgattggtggagcaggatgcaggtcccgggagggaggggtcgacgaggaggtgca

SEQ ID NO: 37086 - DNA, 122 bp, Homo sapiens
tagtaggctgaaccaccttggtttgggaaagtacacgctatgatgttagcaggacgaaatcgcctaaccacatatttctcagagtatcacatccccatcataatgcgacgcctaactgtata

SEQ ID NO: 37087 - DNA, 122 bp, Homo sapiens
tgcccgggacacaccggggagaccgcaggagcagcccgtgtcttctgtggctcagtcccgcgagaaactggaggccagcgcttcacagctcccatttgcagagaccagctcccgtgaatgaa

SEQ ID NO: 37088 - DNA, 122 bp, Homo sapiens
gagccggagccgcggcaacgtgcagctggaagcgggcgaggacgtgggtcaggtacgggccgcgggggcggggccagcgccgggcgcgggggctgcacgggggacctggctgggtgctcccg

SEQ ID NO: 37089 - DNA, 122 bp, Homo sapiens
atagatgctaatagcaaacctaaagaagagtgatgattattccattgtgtagtagcaaaacgaagtagcccagctagttatgggaaatatataattgaaaagcccattattaagttcaccta

SEQ ID NO: 37090 - DNA, 122 bp, Homo sapiens
cagtatttgaaggtcagcttaatgacccaaagataggagagcagatgacatgtaggtgcccgttgtcatgccagtgatgggggcagaatatctgtttgcatccttctgactgttgctgcaga

SEQ ID NO: 37091 - DNA, 122 bp, Homo sapiens
gtagcttgtgattggagaaaagctagagctagtgcctttgtcctcaacccagatggtgcccggtgttccttctgcagactaagaccctgccagcggcggaggcacctcagacgggatggcaa

SEQ ID NO: 37092 - DNA, 122 bp, Homo sapiens
ataggccaggaagtagctccatagagaaaaaaggaagtagtggacctgcctccaaggttccgatactgggaggtgaaagagatctgaagttccgaataagctgtttacactaccagagaaaa

SEQ ID NO: 37093 - DNA, 122 bp, Homo sapiens
gaccctgccccaggggtgggtctaggtctgtgccgaccaatcagagcaggcatacgccatcgtgcacagtgattggctcacaggtggccacgtgacctaggatacgccaatgaggagactca

SEQ ID NO: 37094 - DNA, 122 bp, Homo sapiens
cgcagtctgcgcagggactggcgggactgcgcggcggcaacagcagacatgtcgggggtccggggcctgtcgcggctgctgagcgctcggcgcctggcgctggccaaggcggtgagtccgtg

SEQ ID NO: 37095 - DNA, 122 bp, Homo sapiens
ggaatcgagcttagaaaacaagcaatatgtatcagcctatcatggcaaatgataagttaacgatttaactgatcttccatgttaaaaataggcattatatgtgtcaattaggttagtatatg

SEQ ID NO: 37096 - DNA, 122 bp, Homo sapiens
aattattccttccttcaaattttactttagtttttaaggaacctgtctaatgtgttttcccggctactcaggcagaaatgaaagacaaatgtaatagacacatgtaaatttaattgaaaatc

SEQ ID NO: 37097 - DNA, 122 bp, Homo sapiens
agcggaagtccctcgcctagcggcgtcccatctttcccagccttctgctcacacccgctccgccctggcggctgtggcatctgcccctttggagccccaggggggcatttctaagggcccat

SEQ ID NO: 37098 - DNA, 122 bp, Homo sapiens
cattatcttagagaagctgtgactcctaaaatctgtaggaacccgtccaccaactaaaaacgtatcatctgccaaccttgactttttcagccccatgcaatataggcaggcatatttttttc

SEQ ID NO: 37099 - DNA, 122 bp, Homo sapiens
atgcaaaccttaccttacttaagcctctgctgatctggcagccaaaagcaagtcctgactcgtgtgtgctcatactaataaccaatgaatttatcctgcagattttaatcaagaattatacc

SEQ ID NO: 37100 - DNA, 122 bp, Homo sapiens
gcaagaccctgtctcaaaaaattaataattaaaaaacacaagtttgtggctgcagccttccgtgtgttttcagcagggctgcaggaggattgtggtgcgaatgtgtgaatcacccctagcgg

SEQ ID NO: 37101 - DNA, 122 bp, Homo sapiens
cacgcctgtaatcccagcacttcgggaggccatggcgggcggatcatgaggtcaggagatcgagaccaacctggctaacacggtgaaaccccgtctctactaaaaatacagaaaaattagcc

SEQ ID NO: 37102 - DNA, 122 bp, Homo sapiens
ttcagaggaactacaaatcccataaagtgttgcacgtctagggcctttggggaacgaggtcggccccagcgcaggcgcggtggcgcgagttggactgtgaagaaacatggcggccgcgacgt

SEQ ID NO: 37103 - DNA, 122 bp, Homo sapiens
ctttacttcattcttaaagactccttttgtcctgatggtgtttgtttcattgctttctaccgtactccagtctgaattttactgactcctagtgattgcttagacttgctatttgattctgt

SEQ ID NO: 37104 - DNA, 122 bp, Homo sapiens
ctcatttctccaaatcctcgtgctgagtgccgtgcgtgtgcgtgcctctggtctcaggcccgtcacctgtgattcaggcgggccctccagctatgctttcccatgacctaatacggagaaga

SEQ ID NO: 37105 - DNA, 122 bp, Homo sapiens
gagtcgctcaggttcacggacatgcaccggcactgcttcaccttctggattttcttgagtcggaagggtgggtccaggccggggcactcgagctccacgaggacggaggtgacgcgctgggg

SEQ ID NO: 37106 - DNA, 122 bp, Homo sapiens
gagtggggattgggggaggctacagcaaccgggagaactctccaaccatgagatctgcagcgatctcctgggtcaggcagaaaagggctttccttttacagagatgagtgaacagggctaga

SEQ ID NO: 37107 - DNA, 122 bp, Homo sapiens
cttcagtttgcctgattccccagatggcttcatttagaggctggaccctatgtgggtcttcggagtagccatggtgtccagcagtgccagcaggaagcagactcctcaacaactctgccccg

SEQ ID NO: 37108 - DNA, 122 bp, Homo sapiens
ctccgaggggtctgcggaggcgacgtcccagtcaggagggatgcgcgcctgcgagccccccggggatctcggagccgctccactgcggtgcctgccgctatcttccccacgccttagtaact

SEQ ID NO: 37109 - DNA, 122 bp, Homo sapiens
gcagagacctcatcatccagcatatcccaggcttctgggtcaaagcagtatccttctaatcgatactccgtaggtcagaagcccgtgacaggaaaggggaaggtgggggagggacagaaaag

SEQ ID NO: 37110 - DNA, 122 bp, Homo sapiens
cactgccttctccaagaccgtgcaggtgtacgaccgcgaggccgacaagtggagcaggggcgtcgacctgcccaaggccatcgctggcgggtccgcctgtgtctgcgccctggagccacggc

SEQ ID NO: 37111 - DNA, 122 bp, Homo sapiens
ctagtcccacacagacacccactggcattatgagccaggcctccaggaaggtattacagacggttccctgagaagatccccagtggcactatcaggcaggttcctcaggtatagctaggtga

SEQ ID NO: 37112 - DNA, 122 bp, Homo sapiens
acccaagctccaataactccaattacctataggccgcgaacaagtgggacacaggcaagacgtcgaggtcggtgcagcagagaaacagaggataatggcgtctgcagtgctgtcgcctggag

SEQ ID NO: 37113 - DNA, 122 bp, Homo sapiens
cttggaggaaaaggttactttttgttcatacaaaatctccttgcctagttgagcctcaaacgggtggctttttctaattcatgcagaggccatctgcaactcttgaaggccagagttgtatg

SEQ ID NO: 37114 - DNA, 122 bp, Homo sapiens
ccaacaaactccccctaactttcccaatcctctgttcctgccccaaactccaacaaaaatcgctctctggtttgcagtcatttatttattgtccgctgcaagctgccccgagacaccgcgca

SEQ ID NO: 37115 - DNA, 122 bp, Homo sapiens
gctgggggaagcgttcactgcttctaatttatggctgtgattcctcccttttagatggctcggactcaaaagaacaaggccacagcacaccacttagggctgcttaaggctcgtcttgctaa

SEQ ID NO: 37116 - DNA, 122 bp, Homo sapiens
ctgaggcggctgagggcagggtcctcaggctgatggctgtgggagtcgtgccacgcccctcgtgcccccgggaggcccggccggggctgggtggggggatccggtggttccacatggtgcag

SEQ ID NO: 37117 - DNA, 122 bp, Homo sapiens
tcctcacacaaacgtagcgcttcaatcactaaaccgctttcacagccctcgaccctgccgcgagatgtccgccgcccaccgtcaggtcaccgcctccctaacgacttcggctgcccgggccc

SEQ ID NO: 37118 - DNA, 122 bp, Homo sapiens
cacacagccatatcacccacctgggtcaaatcgcagcatctctgccctggattattgctgcgctcctaactggtcttcctgtttctgccatgcccttcctggagtctattctcagcacagta

SEQ ID NO: 37119 - DNA, 122 bp, Homo sapiens
gatgggacatggggttctgaaagcattcaggtccaagttccagtatcagattccctggagcgtccctggtccctatatgcctgaggcttgtggttcagctgttcctccaattctgcaactct

SEQ ID NO: 37120 - DNA, 122 bp, Homo sapiens
aggcattacatcaactcctaaggggtcctctgggattagttatgcagatattaaatcacccgaagacactaacttacagaagacacaactccttccccagtgatcactgtcataaccagtgc

SEQ ID NO: 37121 - DNA, 122 bp, Homo sapiens
tcaataatgcacatatttgcgctcccaaagtaaactgtgagttctcagtaagtgtaaccccgttctgctgacccagcgggggaagaaaaattagaaaatctccccagtcaagtgaacaggtc

SEQ ID NO: 37122 - DNA, 122 bp, Homo sapiens
ctcccctttagcttaaagagtatataagtgaatgcggtgttttaagaatcgccagttctccgttcaacttggccacagcccaacacatttggactaccaggtttgtggtttcattcgtttac

SEQ ID NO: 37123 - DNA, 122 bp, Homo sapiens
tacggtctttggaaaagcagaagttatttccaatgacacatactatttgctgaaaatttacggtagattgactcatgcatctttgcattgtacttagattaaaattctatagctttggttga

SEQ ID NO: 37124 - DNA, 122 bp, Homo sapiens
ccccgggccagggctcctcaacagactgaaggtccagatcctactccatcctggcggtctcgggtggcccctgaggagggcaagccttctgctccacaggcaaggacagtcacagctaagtc

SEQ ID NO: 37125 - DNA, 122 bp, Homo sapiens
tgtctgtctgtctgtctgtccgtgtgttttgaatgcccaagatgttttaaacagacttctcgaatattcttttcatgtgtgttgcagggggggtcaggggcttctgaacaaaaacggcaccc

SEQ ID NO: 37126 - DNA, 122 bp, Homo sapiens
agcgtgggtctgtccacaccttgaggttgggcttctggcctccagagctgggagaggccacgctggtgccgtaagccaccgggtttgggaggagggggcggcggggaggaggctgcaggcgg

SEQ ID NO: 37127 - DNA, 122 bp, Homo sapiens
ctggggctagatatgtctgactcacatgtctgctgccttagttgctttcttttctccaaccgtatactgcattatttttaatacaatagctcatggccatggagggcaaactggaagctgcc

SEQ ID NO: 37128 - DNA, 122 bp, Homo sapiens
agggtagtaaaggcacgcacctgctttgctgcagactcagtgggggtgggacggccaggccggcagagctgcgtgttgatcgaaggccggttgctcaccgctgttctcacggaggggtgggc

SEQ ID NO: 37129 - DNA, 122 bp, Homo sapiens
gttcggaaaagccctttatagattaagagactgaggctggctgggaggacgccacggcgccgctcccaagaccaccgcggcggggcctgagctccggtgtcacgcaaagcttcccttccgcg

SEQ ID NO: 37130 - DNA, 122 bp, Homo sapiens
cacgaagctgacagtcttcagggctcggccgctgctttctggatgcataaagctcaccaccgcgatgaagagaatgttctcgaacagtgcatttccccaggggcccgtggtcaccctgtgct

SEQ ID NO: 37131 - DNA, 122 bp, Homo sapiens
tcccctaacggaaatgcttattggattcagttctgtcaccatgctggtattgcccccacccgcctcaaagccattgctttgctgtttttgtgcaaggtgtgggaaatcttgatgggaaaggc

SEQ ID NO: 37132 - DNA, 122 bp, Homo sapiens
agtgtttcccaatgtgtgagacacgttctgcccagagtttgcaaaatgattctatatgtacgcatataaacatgttttggttaggaatgtatttgtttaagttatctacttttaaagtcaca

SEQ ID NO: 37133 - DNA, 122 bp, Homo sapiens
atggggtgaaacagctgattaaggggcaaaggctctcactggccaggttctgccgtgtcccgggcaccacgcatcctgtccatgagctcacgtcgttgtcgtgatggagaaggcttggtgtg

SEQ ID NO: 37134 - DNA, 122 bp, Homo sapiens
cgctcctatgtgtctgatttcttttgctcagccctaggcggggtgagcccccaactgctgcgtgtagctggagtcgctccttcactgtccccgctgcattctatggtatgactgtgctatca

SEQ ID NO: 37135 - DNA, 122 bp, Homo sapiens
tgttacaatggccacagatatatattttctagtggcactactttcccatcctctacatttcgctttcttttctggctcaatggactctgtttaattcagagagctagtttgctaggcccctg

SEQ ID NO: 37136 - DNA, 122 bp, Homo sapiens
tgtatttaaaaaaaaaaaacagtcttgctctgtcacccagagtgcactggagtgcagtggcgtgatcttgtatcactgcaacctccacctcctgggttcaagcaattctcctgcctcagcct

SEQ ID NO: 37137 - DNA, 122 bp, Homo sapiens
aaaagggtgctcatttgcatagcccttcctcttctccctcagagaaggcctgggaggggccggaggagaggaaaaaggaaaaactgacaaagggatcctggtccctagacattgctttccca

SEQ ID NO: 37138 - DNA, 122 bp, Homo sapiens
ctcaatggatcttcccaccttttcctcccaaagtgctgggattacaggtgtgagccaccacgcccagctttgtctaggacacttatgggggcataagaccaaaaaggttggtgcagtctgtg

SEQ ID NO: 37139 - DNA, 122 bp, Homo sapiens
taaaaattaaatagttcactgatcccgctataccatactgtagaatataaacatggaatacgatgagaataaaaaaaaatgaacctcaaatcactgagctaaacagaattaattatactgga

SEQ ID NO: 37140 - DNA, 122 bp, Homo sapiens
ccaagagctagaggccaggcttcttccccatgtgtggaacattgtgtcacaggcctcacccgagctgctgggttgtttttctctgcatctgggaccacttaacccaacgtcatcactacata

SEQ ID NO: 37141 - DNA, 122 bp, Homo sapiens
tgctaataagcagcttcgcctagacttagataaacaacacttctgaggtaaactttgccccggaggtctggagacacttttttaatgtaacctgcttactaataattactagacttcagtgc

SEQ ID NO: 37142 - DNA, 122 bp, Homo sapiens
gcacctgccggcgcaacggggccgcttaacttttaggccattgatgaaaagtcaaacaagcgcacagtactcggtgtaatcaggggcatttttagcgagatacctgggatgaaaacgggtga

SEQ ID NO: 37143 - DNA, 122 bp, Homo sapiens
gtcggcccaaaccaaccaatcaagagacgtgttattgccgccgaggtggaactatggcaacgggcgaccaatcagaaggcgcgttgttgccgcggagccccctgccccggcagggggatgtg

SEQ ID NO: 37144 - DNA, 122 bp, Homo sapiens
cattccggttccacgtcagttttagctccgtccgcctccataggtcaagcttaaagggcccgtacctctcccttaatctgggatgcctccggctccaggaagatggctattgaaaggcaggg

SEQ ID NO: 37145 - DNA, 122 bp, Homo sapiens
cgtcccttttctttaggacctgtcccgttgccccttgaaacggttttgctctaccattttcgaggctgcggactatgccttctctctgcggccttagcgggggctgagggctccaaggaacc

SEQ ID NO: 37146 - DNA, 122 bp, Homo sapiens
attttaccccaatttctcatctgaagcctcagatggcatcttgcccaccaggaacaaacacgtgaataaataatatggcataaatgtctttcaagttcccagagaactaactctaagcccat

SEQ ID NO: 37147 - DNA, 122 bp, Homo sapiens
gcagactttagactggccctgctgctttattcctgctctgctcaggccaggagtggttcccgaacccaagacatagagagaaggggggattgggtttgcaatcaggcagataacaaggccgt

SEQ ID NO: 37148 - DNA, 122 bp, Homo sapiens
ctctagcacttacgcaagaaaagtgatgtcaggctcccaggtaagggagacccctgccctcgggactcccttggaaaaggcttggaaaagaggagaaaggcctgtaaagcctgtgaagtaga

SEQ ID NO: 37149 - DNA, 122 bp, Homo sapiens
gcccaagagatttgtggaggccacgcccagaccatgcctaccctagcctttctcgagctccgcccgtttctccaagactgggcccctccagcctgaagccccacccccaggacatccagctc

SEQ ID NO: 37150 - DNA, 122 bp, Homo sapiens
gctgcttgtgccccaggatggccacggcgggcttaagctggaggctatttcctggctccccgctgcccccactctgtgaaaagaggaacccctcccccccgccagcagtatagcagcaggga

SEQ ID NO: 37151 - DNA, 122 bp, Homo sapiens
ctgccagggtgcggagcgggagcgggtccttgggctgcacttgggcggcgccggatcggacgcttggcactctgggcggccccccggcggagtggtggtcccaggagaacctccgaggtggg

SEQ ID NO: 37152 - DNA, 122 bp, Homo sapiens
accgaccccggaacccggggctcccgggccccttcggcattccgcgccgccgccaggccgcgtcctcaggccattgtctacaacgagttccaatctgcatgttgggagaggccgatcagaac

SEQ ID NO: 37153 - DNA, 122 bp, Homo sapiens
cccccgctctccacgccagaatctggcattccttcgctcagcccctccgaggcccgccgtcggctctcgctcgaccccaagaaacgcggaacctgaagggcaaaactgcccacctccctgca

SEQ ID NO: 37154 - DNA, 122 bp, Homo sapiens
gaaaaggagaacaggagggccctgtccgctaaggtagcctcccattggctcctcttgctccgctctcggtcgcgattggctacgggccgggagcacgggccgagcacgctcccacgcgcaga

SEQ ID NO: 37155 - DNA, 122 bp, Homo sapiens
ctgtacgtgagactctttgagctgagaccggagtgagagtggcgtgggtacaggaagcagcgtcctgaggctgtgcagggcggacgcaccccggacctagcccccgaaaccactgagcctgt

SEQ ID NO: 37156 - DNA, 122 bp, Homo sapiens
ccctagagcatacattggaggaagcgggcgcagggcggggcagcgtcgcgcaggtctccccgcctctttgactcctgaacccggccgcagaacaagtccgggcatatgtggagatcgggtcc

SEQ ID NO: 37157 - DNA, 122 bp, Homo sapiens
tcctcaagtgatctgcctgccttggcctcccaaaatgctgggattacaggcatgagccaccgcacccagacattctttctgtatctattgacggggcatctatgagtcaggcactgttgttg

SEQ ID NO: 37158 - DNA, 122 bp, Homo sapiens
tttttgggggcggagcttaagcagcctggctaggaggctcaggttattcatttccggcggcggaggcggcagtttcctaagcttggcttctctccggtccgctgaccggcgtcagggaccag

SEQ ID NO: 37159 - DNA, 122 bp, Homo sapiens
ttggaaggcaatgagctcatgaatatgcacagcgggtcctcataaattatgcattccatacggaggcttctggggagaggctgaggagcaccgagtcgctcagccctgcaacagaaggcttg

SEQ ID NO: 37160 - DNA, 122 bp, Homo sapiens
gaaaagatagaagtgacctagaattacttggctggctaaacctaattatggcacaattaacggattccttggcattaaagcgattgtagggaccaagggactgattgctagaaagctgataa

SEQ ID NO: 37161 - DNA, 122 bp, Homo sapiens
tcgtaatttctaatccactcagcccacaggtcgcgggcgtggcccttccctcactgtgtgcgttcttgccagcatcctcaggttcccgagccggtgaccagggacctgtgcgggaaagcgtg

SEQ ID NO: 37162 - DNA, 122 bp, Homo sapiens
gaagcagctggtcatgtccacgccctctgcaggcctcgtgtccccctcgctgtcgcctgccgatttggtggctcctctcataacacacagcctcctgtgtatgtttttaccctacaaacgct

SEQ ID NO: 37163 - DNA, 122 bp, Homo sapiens
tagatgggggttcttaggagagaaggagagccttgctttccatgcggggactcctcgtaacgaaaccgggacggtagcagcactggactgaattgtgcgactctagcaggttgtttatcctc

SEQ ID NO: 37164 - DNA, 122 bp, Homo sapiens
aagagcagtgatcctagatttgcttttacaatactaagagttaaagatgcatcctgctcacgtttcaagtagctaaggctgaactaatactcaactcataaaaaaaaaaaaaagaacaaaca

SEQ ID NO: 37165 - DNA, 122 bp, Homo sapiens
ggtggaggtgctcactaaccagcgcgcgcgcgtcgacgtcgagcgcgacaacctgctcgacgacctgcagcggctcaaggccaagtgagggcccggcaccccagactcctctttctgcgggc

SEQ ID NO: 37166 - DNA, 122 bp, Homo sapiens
tgactgacctgttctggggaagagggggccacaggtccatgagccgcggccatcctggggcgagcgatcgcagcccgcgtgtctccgccgctcattcacacctctgccagctccagcgcgac

SEQ ID NO: 37167 - DNA, 122 bp, Homo sapiens
ctccctgcaaagctcctacttgattcactgggacatttctgaaaggcctaggaacagccccgggcggtacttctctccccagtcccagtcctgaacgtgcgctctgctccctcttctacccc

SEQ ID NO: 37168 - DNA, 122 bp, Homo sapiens
aaggaatgcccgcaagtgttaccatggcaaaactggaagagcctacaatgttccccagcacgctcttacgttgttgttaagggcaagattctcgccaagaggattaacgtgcgtattgagca

SEQ ID NO: 37169 - DNA, 122 bp, Homo sapiens
aaaaacacagggagggagactgtgggtagcgctggggtctgcgagaaaaatgaccacacacgggagaaacagaaaaagacacaggagaatgtgctgaggaaaactggaaagaaaatgaggtg

SEQ ID NO: 37170 - DNA, 122 bp, Homo sapiens
ctgggtctaatatcttctaaataaggaatgttgctgtggatataaaggaaattttatttgcgtttgctcagaacttatgcaggccaaaactaggttcagaatttattaagttaaatgatgga

SEQ ID NO: 37171 - DNA, 122 bp, Homo sapiens
aagaaaaggaactgcttatgcttttcctctgatacctggtagtaaatgtcatggactacacggtcctttctaaaccccatgaaaatgccagcttctttaacccaaataactgcctgtgtctg

SEQ ID NO: 37172 - DNA, 122 bp, Homo sapiens
gacgcggaacttgaaccgtgtccctcctaaacctgccccttgtccgccgcaacgcgccctcgacgcgcacaaaaccctcactttgctactgaggaaagttattcaatggccagagacaccct

SEQ ID NO: 37173 - DNA, 122 bp, Homo sapiens
ggaggctgctgtcccaggctgggtctggatacaaaacttggactgtgtcaagcagcgggacgctggcaggagcaccgggaaggccagcacgtggctgcaacgtctcccgccttcaggacgcg

SEQ ID NO: 37174 - DNA, 122 bp, Homo sapiens
tggggcaggggaatgggcagagcatgacttccaaacacctaggaagccccaggtggagggcggaggggggtcttgccatcttgggataggagttgacctttgaccccatcatgctcctgctg

SEQ ID NO: 37175 - DNA, 122 bp, Homo sapiens
gtgtgtcacggcagtttggtgtacagattatttctccacctaggtaaaaagcatagtacccgatagatggtttttcagtcctcactctcctcccttcctccaccctcaagtaggccccagag

SEQ ID NO: 37176 - DNA, 122 bp, Homo sapiens
caggttaagcaggtgtgagccagggggcggagtggagcctgtgtgtctgtttggacaaaacgggaggcacattttcaggtttaggaaataccatgtacaaaagcttgaattgatgaacttct

SEQ ID NO: 37177 - DNA, 122 bp, Homo sapiens
cgcgcggggcccggtccgccggggtgggctggcctgggagtggggggcgctcctggcgggcgccgtcccccccgggcccgggttcgcaggcgcctggacttgtttacaccgagcccagctgc

SEQ ID NO: 37178 - DNA, 122 bp, Homo sapiens
ccaccagccacatgcgagctgggggagcagggccgggaacccacacaagtgaaacagtgtcgcgcccggtcactgcctgaggggccctctccacggagaaggacgcacgcagcgccacgtgc

SEQ ID NO: 37179 - DNA, 122 bp, Homo sapiens
gtcagtcatccaagagagaacgggtgctgagtcacctgggacagtgggcgccgagtcacccggggacagtgggcgccgagtcaccccggggacactgggcgccgagtcacccggggacagtg

SEQ ID NO: 37180 - DNA, 122 bp, Homo sapiens
tcccggacgggagagaaggcggatacagggagacaaacacccacacccactgcacagacccggcggcacacacaccctcacaaaggcacactgtttccttgggctcctccccccacccaacc

SEQ ID NO: 37181 - DNA, 122 bp, Homo sapiens
gagctgttaatgtaagtggagtttctgcaatggtaattaggagggccctcattaccctggcggagccggctgagagccgataaagccgagggggagaagggccgacatcagggtaatggggg

SEQ ID NO: 37182 - DNA, 122 bp, Homo sapiens
tcgccggtgtctccggagggggctgaatttcactttgtaactttctgcggaacccgagcccgggtggcagctcgggtggtggtatcgtatgcaaatacgcatgctgacgttacagatcatgt

SEQ ID NO: 37183 - DNA, 122 bp, Homo sapiens
cacttgaaggcatgcggctaccaagggcatccttgtggctatggtctgtactttcttcgacgctttcaacgtcccggtgttctggccgattctggtgatgtacttcatcatgctcttctgta

SEQ ID NO: 37184 - DNA, 122 bp, Homo sapiens
tgctgtttggggaagaaaggccctttatctacaccctaccctaagttagttttaaaatatcgtatcagtcttgtgtattttcagtgctgggtaagtagacctactgtgatctcagaagccct

SEQ ID NO: 37185 - DNA, 122 bp, Homo sapiens
cgggtctatcgggccgtgactgactatgtgactgtaacaatgggagagaagtaagtgtgtcgttttgttgatttgccactttccgtggggtggaatctctagcgtcctcccaccttggactc

SEQ ID NO: 37186 - DNA, 122 bp, Homo sapiens
gacccgcgacacagggagtccccgcggcacagatagaacccgcggcacagggagtccccgcggcacagatagaccccgcggcacagggagtccccgcagcacagatagacccgtggcacagg

SEQ ID NO: 37187 - DNA, 122 bp, Homo sapiens
cgcagggcagcctcactccgggagccgcaacgggcctcgtcagaccttcctcccgagccacgctttcccggatctgctcgttcacggtgcccgggtgcgtgacacccatgtgtgtggctgtg

SEQ ID NO: 37188 - DNA, 122 bp, Homo sapiens
ccaaagcggccagcgcaggggctgaccactcagacctcactcctcgcaggggtgagcgggcgacgctgcctcacgtcattgtcctgccctccaaggcccgcgctcgtcctctgacaggatgc

SEQ ID NO: 37189 - DNA, 122 bp, Homo sapiens
ccgggcggccgcggctcgccaatgagctgaatggagtcctacacaaacagggacattcctcgcattcctccccaccttcctgcctcatcaactcacaccggattgatcctgaccccttgaca

SEQ ID NO: 37190 - DNA, 122 bp, Homo sapiens
gagaaacggtgttgagcttttccagaggcggcgagctgggcgggcttcaggcatccagagcgctctgtggcggccgaagaaccaggcgccccctagtgtgggataagcgggccatcgggttt

SEQ ID NO: 37191 - DNA, 122 bp, Homo sapiens
ttctttctttttagagtctacagaactttgaaagtatgtgttatttttcattaactaaaacgaggaagtattacatcgttattggcaggaagcacacaatgtatttgtctttcaaaggattt

SEQ ID NO: 37192 - DNA, 122 bp, Homo sapiens
ccagcctggcaaaaccaagctcccaccttctggaaggcgtccaggggaaaatttcagccccgccgaaccctagtcctaactcttccttcccttcgcttggaagctgggcccccggagctgta

SEQ ID NO: 37193 - DNA, 122 bp, Homo sapiens
ccagcctgcactctcaagtcctcccatgattttatgattttccagagctgccactcatgtcgcacagtgggtgcaaaccttctgctgctaggcattgtgccatcgctggacctgcaaacatg

SEQ ID NO: 37194 - DNA, 122 bp, Homo sapiens
tcaaacaaactttctctccttctgtccagcacttggggtcacacttgcatcgtggtctgccgccttttctcagggatttctggctcacttcccatattcccttacgggtgtgtccccttata

SEQ ID NO: 37195 - DNA, 122 bp, Homo sapiens
aggcctttgtcattaaatctgtactaaataaatacaagcagctccagcttattggggctgcgttctctcttcggcgtctctaaggccgagcagtttcctagctgcgctcacgcaaaatacct

SEQ ID NO: 37196 - DNA, 122 bp, Homo sapiens
ccatacacctgaggaacggaaaggaaagcagtgaaaaccctgggctgactccccaggcctcgttaggcaggggttccagaaaacctctctggcaatgacagagcgacagaaagcgccagcat

SEQ ID NO: 37197 - DNA, 122 bp, Homo sapiens
aaggtaaaatgaattgtttttccagattttcttttgtctctcttatcccgttaatattcccgccctaaaaaccccaaacaaaataggaatgagaaatatatgatgaaattgaaaagagtatt

SEQ ID NO: 37198 - DNA, 122 bp, Homo sapiens
tcagccctcactccctcctggttgtcatacttctgtgctgtgcacctgacgtccctccggcgaggctctgcccccacacacatcctgcactgtgcacctaacgtcccacctgcgaaggtcag

SEQ ID NO: 37199 - DNA, 122 bp, Homo sapiens
agatcccgggcgcaatcgctccccggagcggccgaggggcgcgcggggagaggcctgcgccggggtactttcaaactgaggcgcgcgcacacactcacacccacccacccactcacccacac

SEQ ID NO: 37200 - DNA, 122 bp, Homo sapiens
gcaccgtccaggtcatctcagccagagccttggccgggtctaggggaggggtcacgccaacgtgatgacctcctggcagctgtgtgacttgaaggttttcaagcaaaggctgaatagcccgg

SEQ ID NO: 37201 - DNA, 122 bp, Homo sapiens
aactgttgagttagaggacattttcctagcattccgggtactaaaatcatttcttgtccccgccttcagctccacaaatagttcagtcccgccccgcagcgtccgacgggaaaggaaagggg

SEQ ID NO: 37202 - DNA, 122 bp, Homo sapiens
agcccggcccagccccggtggcgctgcttcccgagagaagcctgaggggcagagaggccccgcacaggcccccagtgcctcaagtacttgacctcctggaactcgtggtagtgcgccctcag

SEQ ID NO: 37203 - DNA, 122 bp, Homo sapiens
gacctttccccagactctatcaggacacctgcgtgtgtttaataggcatagctggaaaatcgcaacatcttactaatgggaaacatgcatgcgaaggcaaacaacatctccaatttatgctt

SEQ ID NO: 37204 - DNA, 122 bp, Homo sapiens
aatcaaccgtgttctgtcccaacaagatgagacccctgcggcagctgcagagaacaggcgcgtctctaagtgcccattccgagagaactgcactttcacagtgcacctccacatgctctcaa

SEQ ID NO: 37205 - DNA, 122 bp, Homo sapiens
tgggctcctaggcttgcggaacagatcaggagtcgccggcattggggtaccaggaggacgcgagctgactacctgactccgggcggcgcaggacgcccgccgcgcgaggggcgggggctaag

SEQ ID NO: 37206 - DNA, 122 bp, Homo sapiens
tgtcaagtaactggcatcatacactatgtgctttttgtggctgttgtcaaggttcatgtacgcggtggcctcgatcccagcttcattcattttatggcctaatgagtctgccatgtgtatgc

SEQ ID NO: 37207 - DNA, 122 bp, Homo sapiens
aagtcacacatgttcgctaatgaacatttggaaaacacaaaccagcggaggagaacccctcgcaggcccatcatgaacacaacactgctgttaacagttttgctggaacgaggctgggagca

SEQ ID NO: 37208 - DNA, 122 bp, Homo sapiens
atgcagccagacgaattctttggcatctttgataccttcttgcaggccttctcagaggcccggcaggatctagaggccatgaggaggaggaaggaggaggaggagcggcgggcgcgcatgga

SEQ ID NO: 37209 - DNA, 122 bp, Homo sapiens
aattttgtaaatttcggttttcagagctttggggattacataattgtgcataaagccttgcggagctgtaacaactaatgtgccagtactgttgttaatacctaatgtcatccaatttacaa

SEQ ID NO: 37210 - DNA, 122 bp, Homo sapiens
ccgcccggatcctcctgaccctgagattcgcgggtctcacgtcccgtgcacgccttgcttcggcctcagttaagcctttgtgggctccaggtccctggtgagattagaaacgtttgcaaaca

SEQ ID NO: 37211 - DNA, 122 bp, Homo sapiens
gaactgggaggaagcagacagcatgaagagcagcgtggagtccctccagaaccgcgtgaccgagctggagagcgtggacaagagcgcggggcaagtggctcggaacacaggtgaggcagggg

SEQ ID NO: 37212 - DNA, 122 bp, Homo sapiens
aataaagtgctgtgggttcttctccccagctctgcctctgatggtgttctgggactgacacgtcggcttcctcttcagcctacttctttccttgcccaccactcccccacccccaccatccc

SEQ ID NO: 37213 - DNA, 122 bp, Homo sapiens
ctgtgtttgatcaaaatgatcaaagcttctggcagtggaaagccccctctccttctctctcgtctgatgcacttagacgagcaaaatatgatttataggagacagtttatgtgattttcatt

SEQ ID NO: 37214 - DNA, 122 bp, Homo sapiens
ccagcgccagcggggagtcggtaggtcagtgcccgcccggcctcctcgagcgagccccggcggctgcagagatttcttgagcgcccgcgtacctctccccggcctccccagcttccattata

SEQ ID NO: 37215 - DNA, 122 bp, Homo sapiens
agcagaaatcaactgacagcctccggttactcccccgcctcagcgaggcagggcaggcagcggaaagctcagcccatgtgaggtgcctcctgccaatcacagactacccttccctggtcctg

SEQ ID NO: 37216 - DNA, 122 bp, Homo sapiens
gcaccgaccctcagtctgcacctggtaccggcaaagggaatgccgacggtcgcgcgtcgccgctggactcgcgactagccaagcactccccactagagggcagtcccgtctagctcggttgg

SEQ ID NO: 37217 - DNA, 122 bp, Homo sapiens
aggtgatccacccgtcttggcctcccaaagtgctgggattacaggcatgagccactgcgccggaccagagttgggtttagattacagaatgaggaattcagattagatttaagaggggttgg

SEQ ID NO: 37218 - DNA, 122 bp, Homo sapiens
ggtttcgttatgttgcacaggttgttcccgaactcctgacctcaggtgatccacctgcctcgaccattgaaattgccgggattacaggcgagagccactgtgccagacccagcattatattt

SEQ ID NO: 37219 - DNA, 122 bp, Homo sapiens
ctggagccggttctgagtgcagggtcaccattttcctccctttccagcttgtttttgcgccgtcgttccaccccctctccctccggcctagtccactccctccccatgttgggacagccccc

SEQ ID NO: 37220 - DNA, 122 bp, Homo sapiens
agagattcggcaaattgggggtgacgttcaagatgtacttgatgccgaattcctccaacacgtccaagttggtggagtctttggcacagcccaagtagaggaagggcaagatctccactggg

SEQ ID NO: 37221 - DNA, 122 bp, Homo sapiens
aatggggccgagccatcccgggcagtgggcaccgtcaaagtatacctgcccaacaagcaacgcacggtggtgagtcatggaagcgaaatggcaggggctgtggatggacccagttgtaactc

SEQ ID NO: 37222 - DNA, 122 bp, Homo sapiens
gggcagagtagctgagggtcgtgcccaggcccaggaagagcctgcgggcggcacagaccgcggccccaggctcagccaccatgaggaaggtgatggcgtagatgaggaagatgccggtgagg

SEQ ID NO: 37223 - DNA, 122 bp, Homo sapiens
cctctggcggcagcagcactgtgagcaccagcacgccgcgggccagcagggccggcacctcgctggcacaatccagcccatcccagccgcactcctccgtgttgcagccctggtcgcagcgg

SEQ ID NO: 37224 - DNA, 122 bp, Homo sapiens
atcttccgcttctcgcctggatcatgggaacaatatgactggggtggtgtacactttctgcggtattgggagtaatatcatcctctccgccttggaatattagggacaatatcacagggggg

SEQ ID NO: 37225 - DNA, 122 bp, Homo sapiens
gtgtgacactgcccggtcccggcaccccaggagcaccgcctggatggagggggcctcccgcgtatcctccctgatttgaggcccgggtcctcaggatcccagagaacgtgacgtcaccaaag

SEQ ID NO: 37226 - DNA, 122 bp, Homo sapiens
aagcctggcatgcaggaggggctgcggcagggagggcacagtaagcacactgagcccttccggctgctcccgcagtggggacgctccttatcgtgaagaactacactggggatcggctcaac

SEQ ID NO: 37227 - DNA, 122 bp, Homo sapiens
aaaagaaggaggcaagaagtaggtaaaaaaataaaggaaggaagaaggaaaggaacgaagcgagagaaggaaaggaataggcactcacttgccaagatttttggggctaatacattttacta

SEQ ID NO: 37228 - DNA, 122 bp, Homo sapiens
taaattagttaaatggttatacctgtagacttaccagtgtatgaaactactgatgcaactcgatataggtgtatggtactagagacataagcagcaatgctcttctgagatagattttctga

SEQ ID NO: 37229 - DNA, 122 bp, Homo sapiens
ctcgcccgcccggcgtggtggttacgggccccggcgcagaagcaggtgtgtgtggctgggcgtggaggtgggaggggctgggggggcgcggtctccgatcctggggagaaggtgctcagagg

SEQ ID NO: 37230 - DNA, 122 bp, Homo sapiens
tggtggcagtggacaccaggaccaggggcctcgccccccttggcagtgacgccagggccccgacccctgacccttagctccccactgcctgacccagggctgcccgacccttgaccctgagc

SEQ ID NO: 37231 - DNA, 122 bp, Homo sapiens
cactgctatgaacaaaataggacttgttggtttgattgaagatttgagatgtctgggtgtcgagaagtcaactaaagggatatgaccttgagcaaattaattagcttttgtacctgcatctc

SEQ ID NO: 37232 - DNA, 122 bp, Homo sapiens
agcgaaaatgctctcgccctctgccacctcagccaatgacgtaggcggaggtagagaagacgcccctgacttggacactccctaccgagcacacggggaagacgcccccctaacctggaact

SEQ ID NO: 37233 - DNA, 122 bp, Homo sapiens
gacacgcagttcgtgcgggtcgacagtgacgccgtgagtctgaggatgaagacgcgggcgcggtgggtggagcaggaggggccggagtattgggacctacagacactgggcgccaaggccca

SEQ ID NO: 37234 - DNA, 122 bp, Homo sapiens
ccactgatgtgatggctgttctgcagatcaggccaccaataaagttattgaaattgaagccgcacccctcgctggcgaccagcgattcctcctaaaatggctacaaggccggcggcgcggag

SEQ ID NO: 37235 - DNA, 122 bp, Homo sapiens
caggggtcttggctgaagggaggcattggtgcgaactggcaggacaggtaggggtctcaccgcttagctggggctcagtgtggatcttcttactggctatgtagcttacaaggaaggagaga

SEQ ID NO: 37236 - DNA, 122 bp, Homo sapiens
acaggagccagactgaagagatccagggaggtgcctccagcacgtacggcccacaaggggcggagtcttaagaagcgtacccaagccccaccccttacagcacccccttcgtcagggcggtg

SEQ ID NO: 37237 - DNA, 122 bp, Homo sapiens
tgagggttggtggctgagctctcgtctgtctgggacctgaggatgcctgtgtgtcctgggcggaggcgtagcagctgtctctgcagggcgaggtggagacgtggcttgagggcctttagagt

SEQ ID NO: 37238 - DNA, 122 bp, Homo sapiens
gccgggcggtgcgagggtcgcctttcagcctttacctctacccactgaaatggagtaggtcggtgagcgccgatctgctggagaatctcattatcccatcggcgctctgcctgctcctggcc

SEQ ID NO: 37239 - DNA, 122 bp, Homo sapiens
agccgacagaaagggcaccacagaagccgacgccagcagcctgaaacccaacgctccctgcggtcagccctcccaagaggacctgtcatgtttctaagcttggccaccaggtgccccggctg

SEQ ID NO: 37240 - DNA, 122 bp, Homo sapiens
atggagttaaaatggcagaaaactgaggctgagtgagaggtctggtactgaggtggggatcggagttccagcactggcctttgacagcctctgggtcccaggtggaatgggtagggccagag

SEQ ID NO: 37241 - DNA, 122 bp, Homo sapiens
cgtcacaaatcagcgaccgaactctggcggtggtggttaagacggcgaaggcggcagcggcggcgacagctctggggtttgcgtctcggggtgtgtcggccgccgctgctgcttgggcctgg

SEQ ID NO: 37242 - DNA, 122 bp, Homo sapiens
tcagctcccatttgcaagaaccagtaaacaggggctgggccccaggggctggccatcacccgccactggctctcaacccttggattctccctctgccctcctctggctgtggcagggtctcc

SEQ ID NO: 37243 - DNA, 122 bp, Homo sapiens
aacccttctcttttatttgccacttcctgttttgtggacactccatgcctgagctgccaacgtgggtgctggcattactgcctcatcctgtggttttgctcattgactctggagaactagag

SEQ ID NO: 37244 - DNA, 122 bp, Homo sapiens
ccatctccaacagaacacaaggtcggaagcccttcccccgatttgaggttaatggcacttcggtgtttaggctccttctggctttggcccaagcttggcaggtgggcctcccgccttgctct

SEQ ID NO: 37245 - DNA, 122 bp, Homo sapiens
tacccatgggaggcagatgtgagtaggggttcatatactatagcccactctgaccatcaccgcagctcagagctccatagctcccctggtaaggagacaggttacactaggattatcctttc

SEQ ID NO: 37246 - DNA, 122 bp, Homo sapiens
cctccagtcaccatcgcgggtggggcgagccgggtctcctgctgggcttcccagccgcttcgctccggacctgcctggagcctacaaaaaacaagggctcgtccttgcactctcgcccccca

SEQ ID NO: 37247 - DNA, 122 bp, Homo sapiens
tggccttacatgtgggcaagcgatgtctttttgtattccaactgagtatacaatgcacatcgaaaggagagagtgtgcttattgcctaaccatcaacaccaccatctgtgctggatattgta

SEQ ID NO: 37248 - DNA, 122 bp, Homo sapiens
gacaaattggatttttaggaatgggaaggtcgcctggaccattgtgtgctagccattcagcggcctcgattatgcagggggctgagggaaccactccatgtgaccctctcgggtgggactct

SEQ ID NO: 37249 - DNA, 122 bp, Homo sapiens
agacaattcccacctccgcaaatctgtttttcccacgggaggccaggtgggggatggaagcgattgcgttgcctctctaaattacccccactgtagacgcggtttgtggaactaattttgag

SEQ ID NO: 37250 - DNA, 122 bp, Homo sapiens
ccctgttcttttctctcctgtgagtccagccctctctgcctctgagtctacctctgccagcgaccacctatcccaggagagggtcatgttcataggcaggccaccctatctaccctggatgg

SEQ ID NO: 37251 - DNA, 122 bp, Homo sapiens
agcaggcccagcacaaagcccccgactccactcagcatcttgctctgtgcagattcagaccgtgctcctgagagaggaagccaggtttagtgatgtttattccaaattgaacctttttactt

SEQ ID NO: 37252 - DNA, 122 bp, Homo sapiens
acatcgtgcccagagctcggacccagcagcccggccccgcgccctccctgtcccgcggcccgcaggcccagccctcaagcgcccagcctccgcggcctttgtggcgtcacagccagcctgaa

SEQ ID NO: 37253 - DNA, 122 bp, Homo sapiens
atcgggtgccctggtgcctgggctggagggtcctccgttccctcccacagaggagaggcacggcatgaagtatgtattctgtggctttgtggtcagcacagtgagacaggatggggcagcct

SEQ ID NO: 37254 - DNA, 122 bp, Homo sapiens
tgctgaaagaattagaagcaacagcagggaatgaggcaataaagggaacttggaggcaggcgaatttaaaaccttccttagacacaggtcccagtggttgccactggtcaggttaagagttg

SEQ ID NO: 37255 - DNA, 122 bp, Homo sapiens
acccactctggggttcctctggctgcagccatctgtgcccagcccatgctacccccaccccgcccctgccagcaaagggggtgcctcggggcctgagccactgttgtcctctgacccagtgc

SEQ ID NO: 37256 - DNA, 122 bp, Homo sapiens
aagctaagtagaattttaccatgacgatgagaggaagagctttcctggcagggggcacagcggttagttacagaagctcagagactcttggaggcacaaggagatgcttactgattgtgtct

SEQ ID NO: 37257 - DNA, 122 bp, Homo sapiens
caaggcggccgctgcagactgagctgagccctgcgaggtaaaccgtgagaacggcagctgcggtaagagaagcgattcctaccgcctgtatttcacatgtagcctgcagctggacgtgtgaa

SEQ ID NO: 37258 - DNA, 122 bp, Homo sapiens
agtgtacatttgagcgtgcactttcgcagctggtgcgtggagtgtctgtcctctccatgccgtgtggtggctcctgtctgtagtcactgggacccttccagtcacggtttcggtggctgcgt

SEQ ID NO: 37259 - DNA, 122 bp, Homo sapiens
atcatgcccaggagtccctgtcgctagtggacgcgtcgtgggagttggtggaccccacaccggacttgcaggcactgtttgttcagtttaacgaccaattcttctggggccagctggaggcc

SEQ ID NO: 37260 - DNA, 122 bp, Homo sapiens
ctcaagagatcttgttatttgaaagtggctcctgctctgctgttctcatgatagagttctcgcgagatcttatttaaaagtgtgtagcacgtccccattcactctctcctgctctgctgttc

SEQ ID NO: 37261 - DNA, 122 bp, Homo sapiens
ctcagggacagacatcagccagatcccatctgcaaacacaccaaagctttattcaacaggcgtggcttcctgaagcgtaaagccacttcacagacggtggccacagcggcacctcggccaga

SEQ ID NO: 37262 - DNA, 122 bp, Homo sapiens
aaaattgccgagaatgaggtgggtcatccgagaggggattggaatccatccaggcttttccgactctaaggcctgcagtaaaacctctgcagtgtcaagtgcaaatggagatggcgccctag

SEQ ID NO: 37263 - DNA, 122 bp, Homo sapiens
gatacattccattcctatttaaattgtttttaaaaatttgttttggtatgaaaatcggggcgggaaaatcggtttctgaggaacttgctaaaagtagaacgtattattcaagagttgttaaa

SEQ ID NO: 37264 - DNA, 122 bp, Homo sapiens
agattgtctccctcaatgttcccatagacccacgggtgtatgtgtgtgtgtgcgcacgcgcgcgtgtgtgtgtgttacagacgtgcaactctgttactaattttgctaataaagctatcaat

SEQ ID NO: 37265 - DNA, 122 bp, Homo sapiens
tctctgtgggccccgcctcggagcgccccttggaccccagcctggcgccggcgcatacctcggtcaggcccctcagagggaccgcttcctgccaccgttataaaaggaaaacatcgcatgga

SEQ ID NO: 37266 - DNA, 122 bp, Homo sapiens
gggcctggcgtggtcaccaggggcacccaccgttgggaggcccgcagggagcggggagtgcgcccaggtctggggttcagggccggcagcagtaacggcatcagaactgtgctagcgtctga

SEQ ID NO: 37267 - DNA, 122 bp, Homo sapiens
cagataaaaggctcagaatctgaacactgcagggcaatactttctttgttgccctgaatacgtcttctaggctgggacacctttattattctttcagtttactcactaaccctcccctctgg

SEQ ID NO: 37268 - DNA, 122 bp, Homo sapiens
cgtttcatgggaagtatagaatgttagcaaagtatcctttcttaagtttttctgcgaaaacggtaataatgtaagtataacaaggagcacttatagtattattttccaaagcccttgcttag

SEQ ID NO: 37269 - DNA, 122 bp, Homo sapiens
tgtgccgtggttggacttggggctgtgatcctggcccgctcccgggcgcaacttcagctccgtgcagggctgcagagaggtcagcagatggaccccgaccgagccttcatctgtggagagag

SEQ ID NO: 37270 - DNA, 122 bp, Homo sapiens
aagactggaaacagcatatgagcacataatcatatcacagtgtgtttctctctcaaaagccgaaccttctgccttaacactttcacagactcctccaggcctgcttcaaacagacaaaacac

SEQ ID NO: 37271 - DNA, 122 bp, Homo sapiens
cctgcaaggggcagttttggggcatcctccctgcttggggcaacccaggggcgcaaggcgcggccccgggagcgcagctccttccagggcagagggcggcgcgagggagggagcgagggagg

SEQ ID NO: 37272 - DNA, 122 bp, Homo sapiens
gcgctgcgtctggcctcgctcttcccggcccttttcagccgtgagaactacggccgcctgcggctcatcaccagttccaagcaccgctgcatggatagcagcgccgccttcctgcaggggct

SEQ ID NO: 37273 - DNA, 122 bp, Homo sapiens
cctagctggcttacagggcggcggcggggtgtgtgtcctctgttaagagtgctactcgcccggggttgatctgtgcatgccactcctgggtcagacggtgaggtcggcgtctgcgaggacgc

SEQ ID NO: 37274 - DNA, 122 bp, Homo sapiens
gatctcatcgaagcggatgtgcacaggtggcttgtggacgtagatgaagccccgctccagcgggtagagcagtcctgagcttgccttgtaggaacaggtaatgcactgggcccctgagtgcc

SEQ ID NO: 37275 - DNA, 122 bp, Homo sapiens
gcgcgatcccaactacagccctgcgacccccaggcagccccatcgggcaccccgaggatgcgccccctcagccaagggaccctcgagccccaaagggcgctcaccatgagctgcgccgggtc

SEQ ID NO: 37276 - DNA, 122 bp, Homo sapiens
agtggtcctcttagattgatatgttatgtccgtgatttccaaagtaagatttgtactcgtcgtctgttaaaaggaaaagcatacatataccctatgtatatatgcacacttttttattttta

SEQ ID NO: 37277 - DNA, 122 bp, Homo sapiens
gtcggaacagtattatttttgctgctacgggccatctggcccagggcaacaggggctctgcgaggaaccatagagaagaaggggcgccagatcccgcgtgcctgcccacccgtccttccttt

SEQ ID NO: 37278 - DNA, 122 bp, Homo sapiens
agcatgagccacaagctgttggtggtggtcttggggactcaacacatcactctgagggcccgggttcccactgccactggggaaaggagggccattccctgtggcttgctggtgtatggcaa

SEQ ID NO: 37279 - DNA, 122 bp, Homo sapiens
gaccctcctgctggcccacgtggctgccagagcccatgctggcacgacgctccagcaggtcggcgtccctgcgggacacactacccgtgacatggctagcatcaccctccttcctggaagtg

SEQ ID NO: 37280 - DNA, 122 bp, Homo sapiens
tccttttattaataaatcctagcgataaaatgtaagctaatggccaggtgcgatggttcacgcctgtaatcccagtactttgggaggccaaggcaggcagatcatctgaggtccagagttca

SEQ ID NO: 37281 - DNA, 122 bp, Homo sapiens
gcgaactggtatgaggggctaggagacctttaggcatgagcacattactacctggagacccgtttagcccctgcctgtatttgcaaatagttttattggaaaacctccatgcccatggcttt

SEQ ID NO: 37282 - DNA, 122 bp, Homo sapiens
gctactgctggccccacccatcacaaggacaactaaacatctgggtgatcatctgaccggcgactgtttcctccactagactagaaactctaggagggatgaactgtcagctctggtcgctg

SEQ ID NO: 37283 - DNA, 122 bp, Homo sapiens
ggttgccagactcttaagttccagcttcgtgcattctaccagcggcctcacagggttactcgggtagcagtgtgcaggatggaggagagaggacaggcaggacaggaacgtggcagctacta

SEQ ID NO: 37284 - DNA, 122 bp, Homo sapiens
tcggcctccatgctcttcagcttcttctcgttctctttggcctgggccaggatctcctcacgagaggcgcgggtgtcatccagctcgcgcatgcagtccttcatctgggcctggggtgggga

SEQ ID NO: 37285 - DNA, 122 bp, Homo sapiens
ccatgctccagccccacagtcctctttctgcttctttcccagcctctgggcttttgcacacgctgttccctctgcccaaacatgatccactgggctgagaacaactctctgagacgtctctc

SEQ ID NO: 37286 - DNA, 122 bp, Homo sapiens
agggagagaagaggaacgttccggactgaaggagtggccgagacggcggcacactctggccgtggccctggcgtgagcgcgctgtcgggtggggcaggcacaagttccttggggcagtgccc

SEQ ID NO: 37287 - DNA, 122 bp, Homo sapiens
ggcatggagctgggccactccggtgagcgcttcttgcaggaggatgtggggacgcggcaccggctggtggcagccacagtcaccaggcaggatgaaggcacctactcctgccgcgtgggcga

SEQ ID NO: 37288 - DNA, 122 bp, Homo sapiens
ggcggcgggacacagtgccggaaagcaatctgatgccgtgcgcccatggtgtgctctgtgcgcctggcatcgtgcctagaggccaggggtccagcacaattcacacttaccaggaagttctg

SEQ ID NO: 37289 - DNA, 122 bp, Homo sapiens
tcggagcaactgtgctgaaattccgtacgcgtgacgttcccaccctctgccactcggtgacgtcacgatcaatcccaccactaagttcccagccaagcgctaccgccgctatctcgcgagag

SEQ ID NO: 37290 - DNA, 122 bp, Homo sapiens
cagagattgccggaaaggggcacagcctcagggagccggctctgggcctgggttcagttccgccttcttctcttggcgccaggggaaacagagccggggcagcaggaggcccagaactacac

SEQ ID NO: 37291 - DNA, 122 bp, Homo sapiens
ggattttatagcaaatagatttctttgggaaatcctgatcagtctcagtgccaatctcttcggcactgagcaagtgaaggacacaaggtctctggcagacccagcatccaggcggggtggcc

SEQ ID NO: 37292 - DNA, 122 bp, Homo sapiens
cctcaatgcagctggagtagccctggcaatctaaacccgaagcctgtgtatatacacacacgcacacacgcgcacacacatgcacacgcgctcggacatacgcacttcggctctcccccttg

SEQ ID NO: 37293 - DNA, 122 bp, Homo sapiens
gccacctacgaggagagaaacaccccctcagcttaacagaaactcaaaggcaggcggccacgaatccaaggcagccttggaaacagggacagcagtggcgtccagtggtaagagggaccccg

SEQ ID NO: 37294 - DNA, 122 bp, Homo sapiens
acactcgcttgttgggggcaggatgggtttccttcctccgctttttcctcctggccttctcgggcagttccagccgcttctctctggcgcagcctctggccctccacccctccagcctctcc

SEQ ID NO: 37295 - DNA, 122 bp, Homo sapiens
cccctgactcctcgccgcaccccggggcccctctccattaggggagtcgggaggcacagacggtgggggtcccagcccccacccagaactcccaccctcggagccttgacttccagggcccg

SEQ ID NO: 37296 - DNA, 122 bp, Homo sapiens
gagtccccgtcacctcggggacgtaccagacggagaaggtgcggttcttgtcgttattggcggtcacttttgcctgcagtgggaaggagcctgtgagcctttgctaagagcagccccactga

SEQ ID NO: 37297 - DNA, 122 bp, Homo sapiens
acaggagggacagagagggagccaccgtctttcatgcccctcctgtcagggctgtcactgcgagtgtgcattgattttcacagcattaagaggctgggaagccccacagcgtgagggcacgt

SEQ ID NO: 37298 - DNA, 122 bp, Homo sapiens
gcggctgagagctgcgcctccacggaataactgccagccggcacagtgcgagtgagaaaccggccactccatgaaacgaccagtactgccacggaaaagaatccgacgtcgccaacaagcgg

SEQ ID NO: 37299 - DNA, 122 bp, Homo sapiens
tgactcagagtttcaggggtatcctggggtgatgaaatccttcttcagtcccccctcccccgaggagtcggttgggttggggagggagggtttcagctcctgtactccagcgttccgaggcc

SEQ ID NO: 37300 - DNA, 122 bp, Homo sapiens
ggccatcagttcgcccttcccagagagctttgggaatctaagccgggactgggcggagggcggggagaaggtgatggcgcgcgagggcttctgggagttgtagtttgacatattctaacagc

SEQ ID NO: 37301 - DNA, 122 bp, Homo sapiens
tcctgagagaaccagacggaagcgcgctgggactgacacgtggacttgggcggtgctgcccgggtgggtcagcctgggctgggaggcagccccgggacacagctgtgcccacgccgtctgag

SEQ ID NO: 37302 - DNA, 122 bp, Homo sapiens
cacatccccggtctgcctgtgcacacctgtgtgtactctcagtacccaagtattaatctccggagtggttttcattagcagtagccagggccccttcaaagaagctaattccatgtgtggga

SEQ ID NO: 37303 - DNA, 122 bp, Homo sapiens
ctgctgggtgggggtggggagcgcagggccggactatgcgggccccgcgggctggtagggcgccgggttcgtcgccgcgaaatgccacctcggcctgacccgaggaggcccggcagcccacg

SEQ ID NO: 37304 - DNA, 122 bp, Homo sapiens
atcagaaaaagggagatttgaactgagaaacaggagaagtagggggttaataggcagtgacggtagggtttggaggtattattcagtgtagaggaaacagtatgcataaaaactccaaggca

SEQ ID NO: 37305 - DNA, 122 bp, Homo sapiens
atctgagcagcatagctgccactgggtaccacaacccatgttgtggccacatggctgacccggaatctgtggggaccaaaggctcactcacctcaggatctgttcatggcgccaaatgtcag

SEQ ID NO: 37306 - DNA, 122 bp, Homo sapiens
tgggcggccggtctgggccctaggccccctccctgggcccaccgaggtaggcaagaccggcgcctaaacagggcgccacagacctcctcgccgaagagggggcttgagctgggctgggggcc

SEQ ID NO: 37307 - DNA, 122 bp, Homo sapiens
agaccttaggagggcagttggtcgaggacccacatctgctttccttgtttttcctgatcccgccctgggtctgcagtcacacatttctggaaacttctcgagggtccaagactaggaggttc

SEQ ID NO: 37308 - DNA, 122 bp, Homo sapiens
aaatctcttattagtattcccatttccatttctattttttattttcttcttttattcttacgaattccttctttcggcttttcttaggtttaccttgctattttttctgaattatttaattt

SEQ ID NO: 37309 - DNA, 122 bp, Homo sapiens
ccacgccaaaagaaacgcgctctgcttctcccgggcgtcagatgcaccgcctcggccggacgccagccctggacaaatttttccgggaaggcgacgtaaagaatgtcagacttgcaaaacca

SEQ ID NO: 37310 - DNA, 122 bp, Homo sapiens
aatgtggttcctggaatgttcaaaattacatatgtggctagtgttctatttcaattggaccgcactgatctatacattctctcttttatgacccccgatttacagataaggaaactgagtct

SEQ ID NO: 37311 - DNA, 122 bp, Homo sapiens
agtgcgtgtaccaagcgtggtaactggcctggctgaggacgcccgcgtggggacgggctgcgcgccctgcccaggctcctgccaactcggctcccccaggctgggctcggccgagggctcag

SEQ ID NO: 37312 - DNA, 122 bp, Homo sapiens
catctgtttatcctgattattaaaataaattaaggattagactgcctagaataaggtaaacgaacatgaaatgccaaggaggaaaacagaaaaagttacaccatgtcgatcccgaccaaaac

SEQ ID NO: 37313 - DNA, 122 bp, Homo sapiens
acagaagaaagcaaatggagtgtcatctttgctgcagatgctgtagggcagatggcatttcgctcttagttaaataatccagacttgccgtttgcctgcaatgtctactcagaacacagtaa

SEQ ID NO: 37314 - DNA, 122 bp, Homo sapiens
aagggaagagtgttgactagcgtcaccagctggaggatggcagaacccagatgaaaactccggccaggagaccccaggcctgcatcctttctctgcaccacactccttgctgcccagagtaa

SEQ ID NO: 37315 - DNA, 122 bp, Homo sapiens
cgcaggcggccgcgtccttgctggcccctatggacgtgggggaggagccgctggagaaggcggcgcgcgcccgcactgccaaggaccccaacacctataaagtactctcgctggtaggtccg

SEQ ID NO: 37316 - DNA, 122 bp, Homo sapiens
gagggaggatcccggcctaacctcagctctcctgttctcctcagacctctgtgtgagcggcggaagtttcttcatgacaacatggttgaaattccaaaccggatcatgttctcagaaatgaa

SEQ ID NO: 37317 - DNA, 122 bp, Homo sapiens
gcttcaaactctcaatcatttgaaaacaaccattcaagatttttatttttgcaccagctccggggatgtggggtgtagggctgggatgcgggggtgcagtctgggaaggccttgctgagaag

SEQ ID NO: 37318 - DNA, 122 bp, Homo sapiens
gcgattggcatctcaaccagccagtaggagcgcgcagcggcttcgcagggggactgttaacgtcaatgggaagggccctccccgggaagtcccataggacacaatattcatctggtgttgtt

SEQ ID NO: 37319 - DNA, 122 bp, Homo sapiens
agaacactcaggctttcagcaaggacacctcattgggtcctttctcactgctatagtacgcgggtggctggacctacatgcttcctgctgtggctgtctcggaacccgtggtcctccgcttc

SEQ ID NO: 37320 - DNA, 122 bp, Homo sapiens
catgattgggtggccccagatgtcattcacaagtataagccttggaggcggaacataactcgaagaagagcccttttgtgctccgcccatagcgtaggaaggtgtcaattggctgtttcgag

SEQ ID NO: 37321 - DNA, 122 bp, Homo sapiens
gttggagaaggttagtgtatgtgagagtgaaccgcaagacagccttgtcacttaataattcgcagactccaataaagaagaagagaaggatattttttaaaagattgttcagggattgttga

SEQ ID NO: 37322 - DNA, 122 bp, Homo sapiens
aacacccaacgatgactaagactcctgaagtctgcgggtgcctggaaacggcgtgagggacgcctgggccctggacagagctgcctcctcctgcccgtcttgccttgccgcctccccgcaca

SEQ ID NO: 37323 - DNA, 122 bp, Homo sapiens
tctggcctaaagacaatgctccggggaacggttcgcgtgctgggtgtttcgcttcgagaacggcggtcccagcttcccgtgaggtggaggtcacgctcagcctcccgggaggcggcggcgcg

SEQ ID NO: 37324 - DNA, 122 bp, Homo sapiens
ttcctcacacccatcagaggctggctccctttcatctgatcaaccaaggacacacaggggcgcctccagacctcccctgcatgccttccccacaccaggagcccctggtcagcggccgcgag

SEQ ID NO: 37325 - DNA, 122 bp, Homo sapiens
aaagtggaaaaatgtgtttttcagtttcatctgagccgtcaaagcaccaagaacatatgtcgtgatgtcctgctctgagtccccacaatgatcacatcagccatggaaaatcagcttctttg

SEQ ID NO: 37326 - DNA, 122 bp, Homo sapiens
caaccaggcatgctgtgagcggcttccaccttgggtgccagcaactagatgaggggaatgcggtggtgcctgataactcagagatgccagcagtcgtggagccccaaggggggttacagttc

SEQ ID NO: 37327 - DNA, 122 bp, Homo sapiens
gcctggaggggctgcatccctgcagggctgattgcagagcttagagctactggtactggtcgaggaagagttgcaggaaggagacaggcagttcaggaggtggcactgctgtgtgtgagctg

SEQ ID NO: 37328 - DNA, 122 bp, Homo sapiens
tcctcatggcgctgttggtgatgaagatcttcaccagcatgatgttgcccagcaagcccacggtgatgatgagcaggtagagggacgggatcacacagcggatcaccaactccgtggtggtc

SEQ ID NO: 37329 - DNA, 122 bp, Homo sapiens
gatggacctgcagggtaacagcctttgtagatctcagaatggatcagaatcatttgttaccgaacaagcgatgatgcgggcccaagctgcatgggtccgggccgagggcgggcccggggcga

SEQ ID NO: 37330 - DNA, 122 bp, Homo sapiens
gccacgtccttcatctgagaagatcgcggccatcgctgagaaactggaccttaaaaagaacgtggtgagagtctggttctgcaaccagagacagaaacagaaacgaatgaagtattcggctg

SEQ ID NO: 37331 - DNA, 122 bp, Homo sapiens
cttcccttgaatacgtttccctctcatggtgtcaactgtcaatgcattcattgcattatacgtttatttcccaaagtctagacaataagctcctggaggctagagactatattgtattcaac

SEQ ID NO: 37332 - DNA, 122 bp, Homo sapiens
gatgacagggtaccctgagcactgcgcatgcttggttgggaattacttttgcttgtggggcgggacctctgcctcgccgtttgtgtttcccttccacatcacaggcgccttgacctcccctt

SEQ ID NO: 37333 - DNA, 122 bp, Homo sapiens
acttggtttgggagaacctacagggctgggagtcactaaccaggcctgggtggctgtcctcgggccaatgccatagagcctcttgcagctcagccagcacagagaggagatcctcagtcact

SEQ ID NO: 37334 - DNA, 122 bp, Homo sapiens
tccgtattctgcacaaataagatatattaggtctcaatactggtctggaagttagagtcacgcctatttcattctgcctccatcaagaagcgcccgtaggaaaaaataacaacaaaaacaaa

SEQ ID NO: 37335 - DNA, 122 bp, Homo sapiens
gaccaccggcagtgtttagtgaggaccttccagcaccaccagcccctttggcgtttttcccgctgcagaggctgggactctcactggcctccaaactgcacctgaggcccagcggccagtcc

SEQ ID NO: 37336 - DNA, 122 bp, Homo sapiens
actctgggtctgggtttctttgaggagcaacttggttcgtaactccctgtgcgtgttttgcgactcttgtccagaaggtagcgccacagcctggaaaccaacatttctaaattcattctggg

SEQ ID NO: 37337 - DNA, 122 bp, Homo sapiens
ctaatggaagccactagtaagcaagcagtcaagctttgccctagccagtctccctcaatgcggtcaaaccccaagctgtgaccggcaggccgggaagagccagctaagagcttcccagcgaa

SEQ ID NO: 37338 - DNA, 122 bp, Homo sapiens
atgggctcacactgtgagtagttgatctttgaggcccacgtcccattctccaagcattctcgataggcattccctacaaaaaatgccaactgccaagagtcaggtcactcccctcctcaaga

SEQ ID NO: 37339 - DNA, 122 bp, Homo sapiens
acagctcatcttttgacctaagactcttaataagtaaagagcagttgtaatctgatagcccgaggagacatgttttctttggcctacatgatgctttttagaaaacattgaggcgatattaa

SEQ ID NO: 37340 - DNA, 122 bp, Homo sapiens
tgttattcagagctggtgctaagctttaggggaagtagagtccagggggtcgtaagaaaacggatcaaatgggtcctttcagtaaccatgtggctttgggcaactccatctctctggatgtc

SEQ ID NO: 37341 - DNA, 122 bp, Homo sapiens
atcccctccctcctcagcccacatcctgctcctcccaccgcggtggtcacatgggggcgccgccggatttaagcttaatctgcctggtgctcagcacagcatcctggctgtggcgcgtgctg

SEQ ID NO: 37342 - DNA, 122 bp, Homo sapiens
attgagaggagagatcattgtacctcgctttccttccgcacccccactacccccgcacctcgcagttattgttgagcatttgattagtgacaaggctaattaccgtttgaaacttttttatc

SEQ ID NO: 37343 - DNA, 122 bp, Homo sapiens
agttgagagatttaaagacaagaccatcgggacaacttttactaatctttgtgaaaaagacgcagtatgacttcaagaagcagcctcatggttaagagaaaggggttctggacctgggctgc

SEQ ID NO: 37344 - DNA, 122 bp, Homo sapiens
gcactaggagccggcgaccctggggcgaggggcggcccggagccctgcgggaggagctggcggccgccccaggtagcaaccatcctgcctcccgctggagcggcgtctcctccccgggagga

SEQ ID NO: 37345 - DNA, 122 bp, Homo sapiens
ttcgtgcaggtcgggcagatcctcacagcggaaaaccggcagcggcttcgaggcgtctagcgcccgcgcccgaaacgacagtttactcatctcaggcgcagcagatacctctccgctctggg

SEQ ID NO: 37346 - DNA, 122 bp, Homo sapiens
tcgggttcagagcagatccttaaagccttccagtccagctccctggttaggctcatgagacggccacgatgtgtctgcccagtgacaaccagcacaaaccggaaggtccacccctctctgcc

SEQ ID NO: 37347 - DNA, 122 bp, Homo sapiens
gggacgcccgcctggtacatgcacggcgaacgggcccactactcccacaccatgcccatgcgcagccccagcaagctcagccatatctcccgcctggagctggtcgaatccctggactcgga

SEQ ID NO: 37348 - DNA, 122 bp, Homo sapiens
actgtactgctttactcacaggaaaacaacctctctgggtcagctctttagatgttacagcgctgaacactgcacgaaagctgagttctcctctcctgatgaacagctagttatgcaacctt

SEQ ID NO: 37349 - DNA, 122 bp, Homo sapiens
caggcaaaatcctgaaccacagtctgtgccagaactgcaaaatttgctcccccatctccccggactgtttcaatttcccacaaggctgagttatacagctgtgacctcctgcctgatctcta

SEQ ID NO: 37350 - DNA, 122 bp, Homo sapiens
aaatacttcactggttaacttagagttaatatagcggtgaccaagattagcccttcctcccgtacagattatagggattaattgtcattcccagataataatgtactcatggtagccccaga

SEQ ID NO: 37351 - DNA, 122 bp, Homo sapiens
aagcaacagaaagaattggacggggcatggcataagaccagggtatagcggttggaggaacgccccaggcagaatcttgtaggcatgcaagaaagagcagaggaatgacatggtctgcgttg

SEQ ID NO: 37352 - DNA, 122 bp, Homo sapiens
actgacccctttttttcctacttaactgctcctgagcattcaaactatgctggtttcgtccgctctccttgtgaggtgagatagaaaccagctccttggacagctcaccaaaaggctaggat

SEQ ID NO: 37353 - DNA, 122 bp, Homo sapiens
gtgcaggtggcaggaccccggcccttcctgtgtatctgattgtgggttttgtctctgccacgtgcagggatgggtgcagactccgtccaaggtcttggcaggaagagaaaactgccactgca

SEQ ID NO: 37354 - DNA, 122 bp, Homo sapiens
aaggagccgttcgagatcaaggtgtacgagatcgatgacgtggagcgccttcagcggccccgccccaccccgagggaggcccccacccaggtagggcctttggtgggctggggtctatgacc

SEQ ID NO: 37355 - DNA, 122 bp, Homo sapiens
cgctcgccgcactttacggcagtgtggctggagccgcggctgacgggcccgcggtctgggcgtgagtgcagggaagtggagtatttgctgggccgggtaccatggacgtgggcgaacttctg

SEQ ID NO: 37356 - DNA, 122 bp, Homo sapiens
cgagtcgcactgcgcggagaaggggtccgagggcagtctgtgtcaaacgcaggtgggtatcgccgcccggggggagccagaggggatccaggggaagtgggagccagggcgggcccagattc

SEQ ID NO: 37357 - DNA, 122 bp, Homo sapiens
ccggccgggggatgggacccagcgcaaacctcctaccccgggagcgcagccaggaaatcgcgtccttgttaattcaggttcctcctttgcgctgaacggggctgctttccgtccgcgatcaa

SEQ ID NO: 37358 - DNA, 122 bp, Homo sapiens
gctgcctccaactcctgagttaatcctatacaagctcagcagcacaaagaaactgagaatcgcaaatcttttatatttttacttaaatgctatttatttttacacagcaaatagattttttt

SEQ ID NO: 37359 - DNA, 122 bp, Homo sapiens
gggaggctcagttcctgggcttgctgtttctgcagccgctttgggtggctccaggtaaaacggggatggcgggagggttgacctccagccccacaggaggggaccagcagggatctctgtgg

SEQ ID NO: 37360 - DNA, 122 bp, Homo sapiens
tcttcaaagccacatcatcgctgtcaaagtagtaagccacgcacaggtaaatggaggaggcgtagagctccaggttgatctggcggttgatggcggcctctgagtcttggtggtagttctgg

SEQ ID NO: 37361 - DNA, 122 bp, Homo sapiens
gcctttggaaagcagtctctctcctcctccgccacccccacctcccctcccaccgcatctcggctccttggcaatgtagtatcactccatgtgtgccctggccagtggatattgggttttgc

SEQ ID NO: 37362 - DNA, 122 bp, Homo sapiens
attaaaaaaaaaggaagtgaagcacatacttaggcactatttgttaagaataatgtgctacgtaattaaattattatgaaaatagcaagctggatagatgataaagggcctttagtctgaac

SEQ ID NO: 37363 - DNA, 122 bp, Homo sapiens
gttgggatggcggactggctggtgggaggaagggctaagtcaggcgccgcggcctggacgcgtgggttctactctggactcacaccagggaccactttgtgacgttgcatccgttccttccc

SEQ ID NO: 37364 - DNA, 122 bp, Homo sapiens
caccatcagcaactcctactggactcccaggagtttgcaagcgttcttaaccccttcggacgctccagccagatgccagtcaaacagatgatgctcttgcctgaggggaaaggaaagacaca

SEQ ID NO: 37365 - DNA, 122 bp, Homo sapiens
gttcttgagctccggatggagagggaccccaccacatgctggggatgcactccgccacgtcgctggcggaaggaatcatcagtgctccctgaacggtctgcggagttctcagccatcgcccg

SEQ ID NO: 37366 - DNA, 122 bp, Homo sapiens
cctcccaccaccatctcaccccaccgccatggagaagaggcaggaaaggccgttgacaaacggggacactgaggctcgaacaccctgccctgtctagggcctcagccctcggcagcccggcc

SEQ ID NO: 37367 - DNA, 122 bp, Homo sapiens
gaatccagaatatcaaggaggaaaacacattgggaggtaattgcaatattaccttcattgcgtctgtgttgcatgtactgtcccatcctagagaaagaggagtttgaacaaaatttaaactg

SEQ ID NO: 37368 - DNA, 122 bp, Homo sapiens
tgacttgttaagagatgcttcgctcatcaaagccaaatggtccgcagcgcaaagtagcaccgctgtctgctggaagttgttggtaggtaactaagctttaagtcaaagagcgaccctagaaa

SEQ ID NO: 37369 - DNA, 122 bp, Homo sapiens
aaaaacatttatcacatattagcatatttatataaaatgtcccagggccagggctggccacggtggctcatgcctgtgatcccagtgctttgggaggctgaggtgggaagattgcctgaggc

SEQ ID NO: 37370 - DNA, 122 bp, Homo sapiens
caggagccacggcgaaacaagaagagggggatcttccccaaggtggccaccaacatcatgcgagcctggttgttccagcacctctggcacccgtacccctcggaggagcagaagaaacagct

SEQ ID NO: 37371 - DNA, 122 bp, Homo sapiens
gtgggggtaaacaccccatgcagaaagcctctacttttacacaactctgctttattggatcgtcaataaaatcaaacaggaaagacttcagacctgcaaagctgccaaaaatgtagtggtct

SEQ ID NO: 37372 - DNA, 122 bp, Homo sapiens
tttatgaggaatgaggtaaccgtctagtccagaacaggcaggaacacagtcttaccttggcgttcattccttagaagccagggttagaactctcaagttgagatgcccctcatttccttcag

SEQ ID NO: 37373 - DNA, 122 bp, Homo sapiens
agaaagtctaaagagtttcattgcaaagtgtggctcgcgactgtcgcgctctcctctatacgcgactcccttttcgttctttcccagccccagccctcccttaatttctctcactccctctc

SEQ ID NO: 37374 - DNA, 122 bp, Homo sapiens
gatgaatagcacttgatgtaggaggattggataaatttggttagatttatcatttcttttcgcaggaaaacacagcagcaagaaagtgtatttctaaaagatcctgttagattgcattcagc

SEQ ID NO: 37375 - DNA, 122 bp, Homo sapiens
atacgggtggcctctaaaggcaagaaagggtaaagaactggattctcactctagagtcaccgggaaggaactatcaacatcttgatttcagcccagtgagactctgtcagacttctaagcta

SEQ ID NO: 37376 - DNA, 122 bp, Homo sapiens
gcagggatgcctggggacaatgacagaatacagcagcaactgctcctttactctcttccccggggcccctgaacataaaaatgacaaatgccaaactgttcgctctagcaagttggtgacag

SEQ ID NO: 37377 - DNA, 122 bp, Homo sapiens
aagggcctagagcgacagatgtttcccagcagggggttctgaggctgtgcgcccagatcgcgagagaggcaagtggggtgacgaggtcgtgcactgagggtggacgtagaggccaggagtag

SEQ ID NO: 37378 - DNA, 122 bp, Homo sapiens
gttcccctgatatcagtcatttagtcactcattcatttgacacagatgtattaagtgtctcgaacatgccaggcagtgtgctagatgctggaacatgagggtaaatagaacattccccactc

SEQ ID NO: 37379 - DNA, 122 bp, Homo sapiens
aaggcctaacagcagggtcctcaccactgaggaaaagagagaatgttctgtagattttcccgagactgacatatataaactgtgaatcattcacttgaggacaggatgggaagagctgatgg

SEQ ID NO: 37380 - DNA, 122 bp, Homo sapiens
cgagaatggaacaggccattcgccaaggaggcggtgagcgagagagcaaccttgcgcatgcgcaggactcgcagcgtcctcggcgcccggggacttgggggttttggggttgggggctgctt

SEQ ID NO: 37381 - DNA, 122 bp, Homo sapiens
cacgcactgcgtccagcaaaaccactaagtcagggaggccagggcgggcagcccattcatcgtcctcaccgcgctgttccttccgggcccttggctggaacgctcaggatgccccaccgctc

SEQ ID NO: 37382 - DNA, 122 bp, Homo sapiens
agaaaaggaaaaaaaaaaatcaaataggtgcgagctgccatctctgcaattctctggtaccggagccggcaaattgcttgcaggtgtatggagcaagcttgtcaatggccaggcctccaaat

SEQ ID NO: 37383 - DNA, 122 bp, Homo sapiens
tccgttaagacaattccccaaacttctgcttgtgcactgagtcacgcattctcttttcaccggacttagctctgtcggaagggaactatacagctgccaatcatcagcaactagggaaactg

SEQ ID NO: 37384 - DNA, 122 bp, Homo sapiens
ggcagatggccctcttgcctactgaagccgaggaggggcgcgtatacagcgggctaagggcgctcaagagatccgagtggaagaaaaagcagcggcacagcactggaatgggcgggagtggc

SEQ ID NO: 37385 - DNA, 122 bp, Homo sapiens
gcgggcgtggtcaggaccacccaagcccagatgcttttctcgcccccagatccgaggacccgggagacatgtggctaggaacatgtttcatgtgtcgtcaaaacactttcctcggcacagtc

SEQ ID NO: 37386 - DNA, 122 bp, Homo sapiens
ggcgctacctggccctttgtcaccagctgccaaagaattcagaaaatcaaatttatttcccgattacggccggagcgcccctttgtgcagaggggtctctttaactgctgagattccagcag

SEQ ID NO: 37387 - DNA, 122 bp, Homo sapiens
ctggaaatgcaggaccctcactgtggggcaagcatatgaacaaggacattccctggcctccgcatcctcgcggccatcttcggcctctccaccctccttgctacattcctggaggacagtcg

SEQ ID NO: 37388 - DNA, 122 bp, Homo sapiens
tggatcaggagcacagtggacaccctgccggatccggagggatagaagtcagcggcggtccgccaccgcgacaaacagcagtggtggacagcaagcgaaagctcagcttgagccgtaacaaa

SEQ ID NO: 37389 - DNA, 122 bp, Homo sapiens
gccagctggacccttttccagggcaaggcagcgcattgtggtcccatgccagagctggcgcgaggcaggctgggccaaggcagagaaaaccgcagccgcaagggaatagaacaatggtcccg

SEQ ID NO: 37390 - DNA, 122 bp, Homo sapiens
agattcaaaccactgaacaattattaacagagaaaagcaacttttatgggcaaaggctttcggcaactccaggcacagtctcacccaaggccttgattgtggcactgcttctgtcacagaga

SEQ ID NO: 37391 - DNA, 122 bp, Homo sapiens
tgagggggacgtagccgggcctccccgagttccgcggtcattatgtgagggggacgcagccgggccttcccgagtcctgcggtccttactggttaactgtagtcccgcactgttaatgtttt

SEQ ID NO: 37392 - DNA, 122 bp, Homo sapiens
attttcgacaggttttttgacttacacttctgccactgttaggattcttaaaattgttttcgccctttccgtggagaaagttttgaagatgctggctgggaggagccggctgtaatggggga

SEQ ID NO: 37393 - DNA, 122 bp, Homo sapiens
agttaagaaaagcacatgaagagtccaagttggtactacaatgtgtgattagtcttctcccgagagaactgagaaaattcaggtaaacttgactattagagggtaggtttggagtttgttcc

SEQ ID NO: 37394 - DNA, 122 bp, Homo sapiens
ctgcgcgctccgcgggcgctgcgggcaggtgcgcgccggcgaggctcggtccagtcccgccgcggcggctgctccactcccggccccgctccccactcgccgcccgctcccgctcccgccgc

SEQ ID NO: 37395 - DNA, 122 bp, Homo sapiens
ctgggtaaaatacagaaatcctgagtaaaattcagtgatccctcgccatccaggtgattccgaggcaggtgacccagccatgacacttgaagattgcctagaaaagcagacctaactctctc

SEQ ID NO: 37396 - DNA, 122 bp, Homo sapiens
aaaagtttggaaaatttgcagcctagtcaagtggtcaaaaagaaaagctgattttcagggcgaaaattcaataaggcttagagtatttgcataaaaaggaggttagtgcaagtgtccaagac

SEQ ID NO: 37397 - DNA, 122 bp, Homo sapiens
gggggcaccatgctgggcgctggatgtgcagaaatgaacaaacaggccggcctctgctctcgtggagcctgggatctagtgtctctgactgcaaacagtaagttctgggttggggggtgggc

SEQ ID NO: 37398 - DNA, 122 bp, Homo sapiens
aatggcggttgtggaccggggaagccggggcacttcggtacgcagcatggctccacgtctcgggccagcttcacgtctgattggatgaagtgtcacgcagggagcctctcagcaaacctacc

SEQ ID NO: 37399 - DNA, 122 bp, Homo sapiens
ccccgcgggatcccaggatgcctagaaattggcgcttgggttccccaggacaggacaagacgagacggcgacaaggggagctccccgcactcaccgtccacacgcgcggtgtacagcgccag

SEQ ID NO: 37400 - DNA, 122 bp, Homo sapiens
tggacgcgccccaccccgccctggcctcgcctaccggctcttcgcggctctggggtgccccgccaggcgcaaacctcccggacaggagctgccacccccacggagaccgcaacccacggcgc

SEQ ID NO: 37401 - DNA, 122 bp, Homo sapiens
gaaatgcctgactttgatgtggcccgaatctccccctggctgttgcgggtggagctggatcggaagcacatgactgaccggaagctcaccatggagcagattgctgaaaagatcaatgctgg

SEQ ID NO: 37402 - DNA, 122 bp, Homo sapiens
ccccactctgcccatttttttttctcattatggtgatgtctctgggttgctggtgacctgcgtaactattgggaaatctagtttctcaaaacttttagtttttttttagacagggtctcact

SEQ ID NO: 37403 - DNA, 122 bp, Homo sapiens
acagacacaaacggccacacgtacgcagacagccaacacagcaacactcccacagaagcacgcaacccagcagcttctgaggctgcgcggttctgctacaccagggagcccctccgtggaca

SEQ ID NO: 37404 - DNA, 122 bp, Homo sapiens
cacaagagggaggactgcatggccccccgggtgattgtcatcagccgctccctgacagcgcgctttcgccgtgggctggacaatgactacgtggagtcaccatgctgagtcgcccttctcag

SEQ ID NO: 37405 - DNA, 122 bp, Homo sapiens
tactggcggtggagagggggccaggcgtgacccctagcggcatgtcggagaggctgggcgcgggcatttacggaaggtcggtaggaagtggcaccaccgggtggagtacctctgcttgctgc

SEQ ID NO: 37406 - DNA, 122 bp, Homo sapiens
caggggtcagagtctcctggctcgccacacgaggggatcgaggatgtccccttaccctagcgccctgtttacaccgcccgggacggtgactccacaggctaggatccgttgtgtttctaaat

SEQ ID NO: 37407 - DNA, 122 bp, Homo sapiens
tggccgaggccggagccggctccctcagcttgtggggaggtgtggacagagaggcgcgggcgggaaccagggctgcgcacggtgcttgcgggccagcgccgagttccgagtgggcgtgggct

SEQ ID NO: 37408 - DNA, 122 bp, Homo sapiens
gatgtgttctcgttactagtaattcttggaacagaaaacgagaaaacatatccgtctccacgtgtgggagaagaccaagatgggaatgcgaaaagaaatgtactgcagcctgctgaattggt

SEQ ID NO: 37409 - DNA, 122 bp, Homo sapiens
gcccctgagggactccgggcaccccggccatgctgaaggaagggagggcgacttccccgccgcagatctggattcgctttgggaggatttctcccaaagtctcgcccgtggcaattcggagt

SEQ ID NO: 37410 - DNA, 122 bp, Homo sapiens
ggccggcctcgccattctagccaacatgctggtgccgcaaggtgaggcaggcggactgggcggtgggaccgggccctgcttccccgcccaccccactgctctgagcgtggggccacatcccc

SEQ ID NO: 37411 - DNA, 122 bp, Homo sapiens
gctcaaggtgctgggcacgggaggtgaggacccccatccaccgggcaggcgtcccaggcgcggtgcccctgacctcctgcctgctcactcttgggcctgggccaggccactgagcaggcccc

SEQ ID NO: 37412 - DNA, 122 bp, Homo sapiens
gaatgatatcactatttgtaaaacctaagataagtgcttgagatattttgcacccaaacccgtcatctgactcaaccggttctgtgatcccacccaggtacagaggacggcaagaaaacctc

SEQ ID NO: 37413 - DNA, 122 bp, Homo sapiens
tcgcgatttcaccctttctgtaatgagataagccttacacagcgcgatgaaaaattcaggcggggaagctgcgtcctccgcggtggatgggcctttgtgagttaggggtgatttctctcttg

SEQ ID NO: 37414 - DNA, 122 bp, Homo sapiens
cttcccgcacgagtatgtcagcgggaccccgcacgtgcccctcaatttcatagccccgggcggttcccagcatggccccttcacaggtaaggagcctgagatatggaatgatctggaggagg

SEQ ID NO: 37415 - DNA, 122 bp, Homo sapiens
gctcgacgcccccagaagtgcaggtggcgttaccaaaggccggctcagccagcttccggccgccgctgtcccccgcaccacccacagccggaagccggctgccgcgcggcatcccgggaggc

SEQ ID NO: 37416 - DNA, 122 bp, Homo sapiens
ccttcttgaagcactttcttctttagaattctatgccagaatcatttgattttcctatctcgcttcttaggtaactccttttacatcagacttttaactgttagagtgttccagggctctgt

SEQ ID NO: 37417 - DNA, 122 bp, Homo sapiens
cagtcccctcgcgtctcacgtgacacgcggcccggacgtgccaccctgcccacgcgctcacgcacgcgtgcacacaccagcctcctggtcgctgccccactccgtcccgacgcccctgcgac

SEQ ID NO: 37418 - DNA, 122 bp, Homo sapiens
tctagccccgtgagggccccagttgccaggtaaggctccccaagcaggaggcagggcctgcgttccaggccagccgccacggaagcatccacctgccccacccacccctgagagcagagggc

SEQ ID NO: 37419 - DNA, 122 bp, Homo sapiens
tctgctttgaactcctgctgctttgagtctcccactgccagcaagcacttctctgccaggcggaggggcggtgaagggaattaaaggggcagtcagtggcttgcctctggcgggaggtggcg

SEQ ID NO: 37420 - DNA, 122 bp, Homo sapiens
ggaccaggaaggtcaggtgctcgccccgcgtcggtgcttcaggagggaatgtggccagaacgagaaaggtgagagcaagcggcacctaaggatttttgcaccgaaaccacaatttctagaac

SEQ ID NO: 37421 - DNA, 122 bp, Homo sapiens
agccctcagggtccacgctcccgccctcggagctcagaaccgacgggaggtgcaggaggccgggcatttctacagccctggttcgttcctaaactactgaatcttttaaagagatctgagtg

SEQ ID NO: 37422 - DNA, 122 bp, Homo sapiens
taacctcctgggctcaagtggctctcacaccttagcctctcttgtggttgggaccacagacgtgtgccatcacgctgggctgatttttacattttttgtagagacgggtctccctatgttgc

SEQ ID NO: 37423 - DNA, 122 bp, Homo sapiens
gacgtaagccaccgcgcccggcctctgagaactacacttttaaaacagcccatggtcacgcgttttgaagggctggggaaatactgagggattttacctgcttttggggtggggggtggggg

SEQ ID NO: 37424 - DNA, 122 bp, Homo sapiens
tctcaggtgagaggtggcagcgagcagtgacctctcctcccgctctgctctgccgtgggtcggcctttggagcctctgcaggttgaattcttttaatctggctagtgaacggccgggctccc

SEQ ID NO: 37425 - DNA, 122 bp, Homo sapiens
cgcctggggcactcgcgtttgcattagcagagcgcaggagtcagggagcgcgggcaggggcgggaggaggggtctgcgcactggccacggtgtgggggacccagccctaccccttcccgggg

SEQ ID NO: 37426 - DNA, 122 bp, Homo sapiens
aaatggcagaggggcacatctgaatatctctacaggtaggtgctccttccacagcattaccgggcccaggcccatatcccataggacaatcctgggttaatgttaccccagccagggaggag

SEQ ID NO: 37427 - DNA, 122 bp, Homo sapiens
tattaatctatgtcatcaaattcaccacttacagcttatggaattaattcaagttccttccggtcagatcactatcctggcagcacctctggtagaggactcattgctagacacaccaacca

SEQ ID NO: 37428 - DNA, 122 bp, Homo sapiens
tcctgacgaagctcttcccccactgagacacgctggcagtgctttcctttggagacagcccgtgtgtgctcctggcttggcgtttgctgttctcatagatgtctagggagcttggccagaac

SEQ ID NO: 37429 - DNA, 122 bp, Homo sapiens
acgctacttggcccttacctgcgagcaactgacctttaataatcctcattttctgtgccccggaagtgccttaccctcttcgcgtctgtttcccggaagtggttcttctccctctccaccct

SEQ ID NO: 37430 - DNA, 122 bp, Homo sapiens
gccggggaagagttgaacagggttctggctagaactacaagtcccaggaggccatgagcacggaccggtcccgttgtggtgagcgcggggtgtgctgggagttgtagttctcagggaccgtt

SEQ ID NO: 37431 - DNA, 122 bp, Homo sapiens
atgttttcaagataaacactaatcagtcctcagggaagattagttgacaacagccttggtcgcacatagttcatcctggctgtacttggtaatggaggtgactatctgtgtcagctagttag

SEQ ID NO: 37432 - DNA, 122 bp, Homo sapiens
ctacccctgtgctttggaattaatccatcatcagtaagctctcctcgaattatccttatccgggagggccatctgctccctcctgggatcccgattgctgcagagaggtcacagcagggtgt

SEQ ID NO: 37433 - DNA, 122 bp, Homo sapiens
cgaagaaatgaaagtggaagccaggcgggcggggtgcgcggcgaggccgcaggggcacggcgcacactcacgggtcctcttctggccgtggggtcacattcccagccacaggatcgcctttc

SEQ ID NO: 37434 - DNA, 122 bp, Homo sapiens
tggggaaactgaggtaggtcttaggcaggtgctcgagtgggaggatgggtcctgggatggcgagaactcaggtgtgctatttcccagctcactgcccttgtcctctgcaaaacattttcacc

SEQ ID NO: 37435 - DNA, 122 bp, Homo sapiens
aaacctctgctggtttctggttttctgtgctttgtgtccgttctgcctttccagactccacggccctgagtactcttcacacacatgatagccaaacctacagatggccccgtccttcccta

SEQ ID NO: 37436 - DNA, 122 bp, Homo sapiens
cctgaattttcctgcttggggcacacctgtccctgcaggaaccaacaaccactgatgggccgggtgcagtggctcatgcctgtaatcccagcactttgggaggccgaggcaggcagatcacc

SEQ ID NO: 37437 - DNA, 122 bp, Homo sapiens
ctgggggagcaggggtcagcgaggcagtgtctggcagggggtgagctgcacctgctttaacgttgttcgtctcaaggccagcgtttgggtgtcagagaaaaagaaaactcccgtggcaggta

SEQ ID NO: 37438 - DNA, 122 bp, Homo sapiens
ccatgtggctaagtttgttttgaaatttcactgccccagcgtaacccagagtccaggccacgcccagcacggctggctcccgtccgggtctctgtgtcctgcagctcagggtggccagggcg

SEQ ID NO: 37439 - DNA, 122 bp, Homo sapiens
gcacgccccttgacgatgacatttagaaaagggctccacatccctgttattcgtaaaggacgggaaaaggagttgtgtcaagacctcgatcgaggagagtctctgattttttggcaagttgg

SEQ ID NO: 37440 - DNA, 122 bp, Homo sapiens
agcttatcaacgggtggcggaggctctgcacctgctcagggggtaccttagagccaaatgcgatcgtcaaagtttcggtgcaagagtccatctcgtcatagattacagccactgatcctgtc

SEQ ID NO: 37441 - DNA, 122 bp, Homo sapiens
ggtccccagccctgccccgcggggaggcggctgaggccccgcgagaattcgagcgcagcgcgggcgggccggtagtgctgggtatcccagcccaccctccgcagctgctagcccgagtgcta

SEQ ID NO: 37442 - DNA, 122 bp, Homo sapiens
gcagcaggcgcaattcagtttggattcacccaaaacaaaaatggtctccgtcggagtcaacgccctttcctgtgcggaccaatcagaatctcaaacacagggcacggggcccacacttccgt

SEQ ID NO: 37443 - DNA, 122 bp, Homo sapiens
gaagcatctagtgcacaccactctcacagagagaaaggagagaaaggagagagagagtggcgagtaaacagtagctttttaagtggatcattgactaggccatgttgggatgcaccaaggaa

SEQ ID NO: 37444 - DNA, 122 bp, Homo sapiens
cacttctcagatggggcggctgccgggtggagggtctccacacttctcagacggggcggccgggcagagacgctcctcacttcctagatgggatggcgggcgggcagagatgctcctcactt

SEQ ID NO: 37445 - DNA, 122 bp, Homo sapiens
tgcaagagtttcaaagttctgtcacagatagaaatctccagctcttgactccagactaggcgccagctgataaacaaacaatttaagtcaagagctggagaattcccagctttttcatttaa

SEQ ID NO: 37446 - DNA, 122 bp, Homo sapiens
acctctgtcactggcacccacaggccttcattctggcctctgaatctacataaaacaatccgctttcattttccacctaatcaccctttctgaagcagcaatatcagcatcatctagaaact

SEQ ID NO: 37447 - DNA, 122 bp, Homo sapiens
cgacggccggggcgggggcgctgctgctgcgggggcaggcggcggcaggggcggcggcggcggcggcggcccgctccagccatgccgaataaaaacaagaaggagaaagtgagtccgggccc

SEQ ID NO: 37448 - DNA, 122 bp, Homo sapiens
gtgagggctagagggaagagtgaggccttcagtgccagaaagatgtggcttaagttcctgcgactcccttaatgtggagctcagacacttgccatggggagagccaaactgccttcacagca

SEQ ID NO: 37449 - DNA, 122 bp, Homo sapiens
cctgctcctctacctgatccaccctcaatctaccagaatcatgggctgctgtggctgctccggaggctgtggctccggctgtgggggttgtggctccggctgtgggggctgtggctccggct

SEQ ID NO: 37450 - DNA, 122 bp, Homo sapiens
tgtcactatgtctgcaagtaacactcaggcaaattgtgttaagggctaaaattctgaacccggttgaggaattttgtatcaacatctagtcaacactgtccagggactaggcagaacaagca

SEQ ID NO: 37451 - DNA, 122 bp, Homo sapiens
ggcagcccgggaaggtgcagtggaagtgcgagcacttgagcttgtacttgcagtcgggcacggcgcagtcggcgctggagctgaactggcagaagcccgcggcgctgatcacgtcctgtttg

SEQ ID NO: 37452 - DNA, 122 bp, Homo sapiens
accacggcaggagaaaggaggtcatcagagtcttggcacactcatcacagtgagtgaatgcgggtcctagcaacctaatccttgattctagaagtcacctgtctgttttagagcatgtccaa

SEQ ID NO: 37453 - DNA, 122 bp, Homo sapiens
ggcaggcccatttgcataaatcctccgagctcctccaaacacgattggcgcgtgcgtgtgcgcactgcatcaatcctgatgatttggtaataatagttaaatcggcactaaatggttccttc

SEQ ID NO: 37454 - DNA, 122 bp, Homo sapiens
cgtggaaagtttagcatccttcccttcaatcagaatcttaagaaggggagcatggcgagacgttagttaaaaggtatgaagttacaatagctaggaagaaccagttctggtattctattctg

SEQ ID NO: 37455 - DNA, 122 bp, Homo sapiens
agaccagcctggccaacacggtgaaaccccgtctcttctaaaaatacaaaaaattggctgcgcacggtggctcacgcctgtaatcccagcactttgggaggccgaggcgggtggatcacaag

SEQ ID NO: 37456 - DNA, 122 bp, Homo sapiens
gaaagctgataaactaaagtataactagcaaggtcagaaaattccaagtgtcaggcctggcgtggtggctcatgcctataatctcagcactttgggagctcgaggcaggtggatcacttgag

SEQ ID NO: 37457 - DNA, 122 bp, Homo sapiens
aaggcagggcactgagggtcggaggcgcatgcccggccacagcaggtgccggggcgggggcgcgccgccgccgccgcggcggcctcccggcctcccctttaagagccgccaccgcccacggc

SEQ ID NO: 37458 - DNA, 122 bp, Homo sapiens
acctgggaggagacccggccgcaggcgcgcagcctggaggcgatggtgagccctgccacgcgtgagtcacggaccacccccgccgcgctctgctccccgcctggctctcttcttcccagccc

SEQ ID NO: 37459 - DNA, 122 bp, Homo sapiens
tttctttggccattttcttcacagctgtgtgttctccccacagcggaggaattgtcttctcgcacctgtgaagtgctattggattcacccactgtgccagccccttcctacgaacagtcggt

SEQ ID NO: 37460 - DNA, 122 bp, Homo sapiens
tcagttagtttcagctgccagtaggcggctccaaaaaatattaaaaaaaaaaaaaaaacccgcaagtttgatgatctaacttctaaatctgtgtacagttgtggctccttcacagtttcagg

SEQ ID NO: 37461 - DNA, 122 bp, Homo sapiens
ggctgccgcggagcgcggcgccggggagcgcctccgcgggaagtgagcgggctgcctctgcgaggcaagtgcagttgagctgatgtggatcttacgtcgcttgagtgcccacctcctcgtcc

SEQ ID NO: 37462 - DNA, 122 bp, Homo sapiens
ggaggctctgtggagtgggggccggggacaggccgcgtgtctgggcacctctgctccccgcgtgctgggtgctgatcatactaatgagttgcaggcatatggcaatgtggaatcatttaatc

SEQ ID NO: 37463 - DNA, 122 bp, Homo sapiens
ccttggtgctggctgaggctgctctcctggcccctcactcagctctgagcgcaggggtgccgagccccagctggatcccagccagtctcggtgctgccatcctggagtggaacacgcagggc

SEQ ID NO: 37464 - DNA, 122 bp, Homo sapiens
tggggctaagaggccccagtgactttcaaggattccatttttgttattttcctctaaaaacgatatgcaatgctccagaaagagaaaaccctagaagaatgtaaaactcaagttccctccta

SEQ ID NO: 37465 - DNA, 122 bp, Homo sapiens
aactgaggagcatttccttatatatgcaaaatgcaaagtataagggcagcagtttagtagcgttataaggccatagaaggttaaggtttgcttgccttgtggtgcagctgataaaacaattg

SEQ ID NO: 37466 - DNA, 122 bp, Homo sapiens
tcctgcacattcctcggacatcttctgtttatgttcttgacgcagatggactaatggagacgtccccctccactggataataatgcccaacaataacattgcatgttttatttgctatgctt

SEQ ID NO: 37467 - DNA, 122 bp, Homo sapiens
agcagtaggactcaagcctaaatgaattttaggtaacatacataatctctgtgtaaggcacgtcacagcctcttgcacttaggaacactaagcactgcagcactaagcgtgggcgccatttt

SEQ ID NO: 37468 - DNA, 122 bp, Homo sapiens
tgaggaagggaaggagagtaaccaagtttggatctcagaaagactcagatggtgtgaggtcgctgtcactgaccctcagcacaaggggctcggctttgccctcactggcctggtccttcttg

SEQ ID NO: 37469 - DNA, 122 bp, Homo sapiens
cccatcccaccatcgcaggtctctacttttgcccttccaccatctcactgggggccctgtcgctcctggtcagggcttacagtgccttctccagggacccaactcaaaggcccccagcccaa

SEQ ID NO: 37470 - DNA, 122 bp, Homo sapiens
cggggctgctgggcggaggcgttggctgcaccagggacggcggcgcccgggtcccggcggcgctgaggctggtactgtgagcccaggctcagcaagctgaacacctgcccgttgttctccca

SEQ ID NO: 37471 - DNA, 122 bp, Homo sapiens
gctttcaactgaatggcggcattggtttcactatttccttcctggagctgtggttgaggccgactgtcccagctagaatgaaatattattgtactctagcctctgtctctggtttgggattt

SEQ ID NO: 37472 - DNA, 122 bp, Homo sapiens
tctgggtctcggctggaatttcagccagcgccgaggaccagaggccctggttcctgtccacgtggcctgggacccccgcggccccgcacctgggctccgggggcaagtgtgttcgctttgag

SEQ ID NO: 37473 - DNA, 122 bp, Homo sapiens
atttggactcggggagaataggtagggtggtattagcaatgaaagcacagacctcggagccgggagagaccacggaaatccgtagcccgatcccgctcactttatagaagaggaaacgaggc

SEQ ID NO: 37474 - DNA, 122 bp, Homo sapiens
agatgcctggaggcacaggcggtgtgtggacggcaggactgaggctgctgccgggcaccacgatgccctccagacagcgaggaactgctgagggtgaggaacaggcaatgggaagccggtgt

SEQ ID NO: 37475 - DNA, 122 bp, Homo sapiens
cctccgccgggacccccttccctataagctgaagaaatcccttgcttggacgacgctagtcgctgggggaggttggggaaagggtggcccagccctcagcggccgccggcagcgcccccaag

SEQ ID NO: 37476 - DNA, 122 bp, Homo sapiens
gattcatgctgtcctagttaccctaaagctgggagatacactgcacttcctaccagaccccgaatgctctcagtgtctgtaattctttaagaagttcctagagcagacagcccttggatcgt

SEQ ID NO: 37477 - DNA, 122 bp, Homo sapiens
cccgcgggaggcggcgcggggaggggacgccaggggaggcggcggggggtcgccggccaccggctctcgccacaaatagtttctccgtcagggaattcgccggccgcgccaggcagggaaca

SEQ ID NO: 37478 - DNA, 122 bp, Homo sapiens
aaaatgcctgcatcactgcagtatgattatgccaaccacaaatcactcttcactgggcttcggagaaactattagtcatgaacatccaagaaaaatccctgtccttaccttgcagagaattt

SEQ ID NO: 37479 - DNA, 122 bp, Homo sapiens
cggagggcggtgcggcccccgttagtgatgactgcgttactgccgtgcagctgatggaagcgcaggtcagagcccccggcccctgaggacggagagcttggagacacctggttgttcccctc

SEQ ID NO: 37480 - DNA, 122 bp, Homo sapiens
cgaactcctgagctcaggcaatccacccgccttggcctcccaaagtgctaggattacaggcgtgagccactgcgccctgccgggatttttacttattaaacatctattgcataccgtgtact

SEQ ID NO: 37481 - DNA, 122 bp, Homo sapiens
agcagactcgcagcagggtgcccaccagagtggggacctgcagatgcccctgcccagagacgccgggaggccacagcccaggtcttccggatggagacagaacttcagcattccgtttggat

SEQ ID NO: 37482 - DNA, 122 bp, Homo sapiens
gtgcgggcgcttcgggcgccctgcaggggtgacctggggtcagcttgggggaaggcgtgtcggggaccctccccggcgccacgcgctccagccgcgccacgccgcagggccgccgcctccca

SEQ ID NO: 37483 - DNA, 122 bp, Homo sapiens
aggcttggtacccaaggtgcggtagggggtcgagggggaggaggccacctgaccaaatgccgccaaccccgagggccagtttcttgtcgaattggtacgggctctctggggcttcggcttct

SEQ ID NO: 37484 - DNA, 122 bp, Homo sapiens
gcaacatgactgtggacagaggacaaggtctgaggtggggagcagcggccggtcttgggtcgaagtgtggacaaggagcacctctgcgtcgctccaggtcactgggcagcagcccgcttcag

SEQ ID NO: 37485 - DNA, 122 bp, Homo sapiens
gcccttgcggtcaacacctcttaagatggcaagaagattatatgcttgagatgtgactagcgaaagatgctgcacactgagagtttggagacctggtctatcagcattgggcaagtcgtttg

SEQ ID NO: 37486 - DNA, 122 bp, Homo sapiens
aagaatatatgacagaggctgtatgcagtgactcaacaccattgcagtcccaccccagagcgtggggagagccaggctgcagggtgcaaagccccaggccacttcctgctgactgtggctgc

SEQ ID NO: 37487 - DNA, 122 bp, Homo sapiens
ccaagagttctgaaagtgacagaggcgctgatggcgcgctgggctggatccaagcgagcacgatctcgagtgcgctggagattttaaatcttctggagtatatttttaaaaaagttttgtgg

SEQ ID NO: 37488 - DNA, 122 bp, Homo sapiens
ggcgaggttagagctggagctgggaacagcctctctacaggctcctcgctccggagcgagcggaagacttccttggccgaactccgcgggcaacccggattgcactgtcccctcccctttct

SEQ ID NO: 37489 - DNA, 122 bp, Homo sapiens
cattctgtcctccctgtgccccaggtcgcatcagtgagggaagttctccctccagctgaccggggtccgtgcagccaccggagtgcacaaccacagcctctgtctctcctttgtggagtttg

SEQ ID NO: 37490 - DNA, 122 bp, Homo sapiens
ccgcctcctccgggaaggccccgcgggctagagagaggcccgggagaaggcggaggggtgcgcgggcccgccgaggcctaggccccacccgccgcccacctccccaccgcggcggcgcccgc

SEQ ID NO: 37491 - DNA, 122 bp, Homo sapiens
gaatagcagtggaaattcttgttgttagggccgcccccgctccatcttcctcaagctcctcgaagggagctgcactggccacctcttagaagtggtgagagctggcctgaatgctctgggcc

SEQ ID NO: 37492 - DNA, 122 bp, Homo sapiens
gattttgtaaaccaacatatttccagcacttggccttgcatctggcagccactaaataaacgtcgaatgaataaagtgttcctcacagcagggctcccttcttactatccgaaagacaaggg

SEQ ID NO: 37493 - DNA, 122 bp, Homo sapiens
tgaaggaagagttttggagacgctgtcactactttctcccttccctgcttctcaggcccccggccccagcacagccctagtgctcctgcctggtattggtggatgcagagtctcctctctcc

SEQ ID NO: 37494 - DNA, 122 bp, Homo sapiens
ccacatgcaggcagtgttgtaagcacggggacagagacgtacgtgagcagatggaacccccgaagacctgcagctgtcatcctgggactgtgtgcccggcactgtgctaaatgctccctggg

SEQ ID NO: 37495 - DNA, 122 bp, Homo sapiens
taatgctcttttctcattctctttacttctttaatacagcacttctcattctgcaggctacgtttctggctgccccactgcacaattgagcttggttaagagcatgacccatgtttcactcc

SEQ ID NO: 37496 - DNA, 122 bp, Homo sapiens
ctggcagggcctctcctctcccttctcagatttgctccttgacatttgcctgctgcctggcggtggcaacagctggggcggggcgcgcgcaggaggccccgtaaccctatccccgctccggc

SEQ ID NO: 37497 - DNA, 122 bp, Homo sapiens
tcacgcccacgctgggtatgacaggggagagaagtccgcagggggagccgggggactgcccgcttcctcgaagcctggactcataaggaggcgttccctggtatcaacgagcctctccgagc

SEQ ID NO: 37498 - DNA, 122 bp, Homo sapiens
gctggtaccaactcctagcaactttgcgttgttaaatatgcctgcgagtccttcacttcccgaccttccaaccctccaaccccgacgccattcaagccttgcgcatgcgtgcctccctctcc

SEQ ID NO: 37499 - DNA, 122 bp, Homo sapiens
agcagtgggggctgcaggagagacgtccgagatgggacgggacatttgggcagttggggccgatttgtcgccattttcacgggcagacttgtgaattaagtggcatgaaattgagcacagac

SEQ ID NO: 37500 - DNA, 122 bp, Homo sapiens
ggtcgggggagatggagtcgcatttagccgcacagcagcctggaacctgaagttttcggccgctgagcgttctgggtgattgcgtagtgcgagggccaacgaaaccttctgggaagtgtagt

SEQ ID NO: 37501 - DNA, 122 bp, Homo sapiens
gcttccctccagccccggctcccgtttggctggaggtgccctgggccattggcctgccctcgtcagcgtcaatcttgcagtctcagcagctggcctgggtttcagcgggagccatcctgtag

SEQ ID NO: 37502 - DNA, 122 bp, Homo sapiens
cagacttgtcctgaaagcagaacactggcaggtcaggaaacttccctccgaacagtcaaccgttgcttacactggggctgagtcacccgacaggaagttcctacaaaccttactggcatcat

SEQ ID NO: 37503 - DNA, 122 bp, Homo sapiens
ctgacgagaaaactgcccagctccaggcaccatagcgccccagtgacgcagccgaacacccgcgcctctgacgtcgccaaaggcccacctctatggtgtcggcgaagacccgcccttgtgac

SEQ ID NO: 37504 - DNA, 122 bp, Homo sapiens
cttgccgtggctttctccaactctcttcttcttttcagtctttgcaatacctgtccctgccggtctccaagtgcccctggttacaggtcagctccacactgaaggggaggagctacttccta

SEQ ID NO: 37505 - DNA, 122 bp, Homo sapiens
agaatctctgactctccctccttgctgagttgcacttaaattagaaaggatcttggagggcggcagcgctggctgctaggttagcgggaaagggaggctcggccggctgctgcttacgcggg

SEQ ID NO: 37506 - DNA, 122 bp, Homo sapiens
gtgagattacagtctctactagagccaattttgatctcaaagtcacgttcttccatttcccgcttcctctccaggcaaaatgaagctgaatctggtgcagatctttttcatgttgctgatgc

SEQ ID NO: 37507 - DNA, 122 bp, Homo sapiens
aggttgcagatttagatctcaaggctgaaaaggataagcttccaccagagcatcctgtagcgcctcctgtcctgccctgccctgccctgcgcgcgcaccgcactcacacgtacacccggtcc

SEQ ID NO: 37508 - DNA, 122 bp, Homo sapiens
gcagcctgtaggttcagaagcctgggtcatgaccgttccactgggcctaggcctaggcttcgaatggccatgggtggggcatagctgccactggaatggagaggatactgtgccttctcagc

SEQ ID NO: 37509 - DNA, 122 bp, Homo sapiens
gcccgaggctgcttcatacagcggccagaatgaggggtgacacagcgtccggcctgagaacgaggctcctgagctacagttggccccctagggtgaggaggacagagcactggagcctcagg

SEQ ID NO: 37510 - DNA, 122 bp, Homo sapiens
aacaatgtgaagtccagtcagctaaaaggcctgctggcttcccagccctggaagccaatgcgaggaaggctcggcatggttgtaggaatgaagtactaggaagggggtctgataaggaagca

SEQ ID NO: 37511 - DNA, 122 bp, Homo sapiens
cctagacctgcgctcctgccgccagctctcacccgaagcttgtgcccggctggcagctgccgggccccctggccccttccgctgccctgaggagaagctgcttctcaaggacagctagttgg

SEQ ID NO: 37512 - DNA, 122 bp, Homo sapiens
gcctaggaccgggacgcggcagcaaggcgtggagagagcccccgggggcgtcccatgaggcgttcgggatcggcgcctcctaggtgcgggctgtgcgggcagtcctgctcccgcccccgggg

SEQ ID NO: 37513 - DNA, 122 bp, Homo sapiens
cccgcgcgcggcgggctccgggctccgggctccgcgctccgcggtgctggaggagatgcgcgttatttactgggctctgtagtcactcgacaaccatcctcagtcacaaccctaagggtgtc

SEQ ID NO: 37514 - DNA, 122 bp, Homo sapiens
accactgaacaaaacttgcccattgaaagcaaacccggaacagctggataatgtccaccccgagccgattcaagaaggacaaagagatcatagccgagtatgaaagtcaagtcaaaggtaag

SEQ ID NO: 37515 - DNA, 122 bp, Homo sapiens
aatgtggcccagggaagccaaaagattggacatccctgttctaaggtcttttgcactctacggagtgggcccctggagagctggggcgtctcagtgggtgctgccggttttgcttctcctcc

SEQ ID NO: 37516 - DNA, 122 bp, Homo sapiens
aggtccagggctgcaaagccacatagggttggcccaaggctgagaagcctcagggggtgacgaggacgggccagtgcacctccttcccgcccagccctccacaccatcccctttggacgcga

SEQ ID NO: 37517 - DNA, 122 bp, Homo sapiens
ggagggtggcaaggccgcgacaggggctgtgggcttggaactctaaacatagtattcttacgtagccaactggaatatctggtcaaccgtgagagctttgggaacctgcctctcacctcaag

SEQ ID NO: 37518 - DNA, 122 bp, Homo sapiens
tccctggggacttaaattttggtatgtatctcatttttcagattctctaagcatgctaatcgaatccagcactgaatagatcaagcaatctggtgataaaatggaatggattttagttaggg

SEQ ID NO: 37519 - DNA, 122 bp, Homo sapiens
ctcatttgttcaaactgtgaatgttcatagttcaaataaatggctaaatgggtcaattcacgtaacaagcctttttgagctctgttctgcaccaggttacttatttggttccgagatacagt

SEQ ID NO: 37520 - DNA, 122 bp, Homo sapiens
gctcccctgtcctcctccaccgccactgcttagctgggggcttctctgtcttctgttggccgggtcggacttggagctgctgtcccctagtaaaggtcaaatcttggtgggcggggggcact

SEQ ID NO: 37521 - DNA, 122 bp, Homo sapiens
ctgtgatcatggctcagaggagcttcttctccagggatgctgccttcatgacgctgaccacgccatcccagccttcgccgcccgcttctgccagcctggctcttcccacacacatttctacc

SEQ ID NO: 37522 - DNA, 122 bp, Homo sapiens
gagggtttccagaatggctgttgtggcagttgtcacactgtgctcagttccccatgtggtcgtaggtctgatgcaacctttttcttgtctgtcctttagctgacccttttcagccttgccat

SEQ ID NO: 37523 - DNA, 122 bp, Homo sapiens
tttggtgtctggccttgctggcccggcgtccaaaggtgagccctttaacttctccagaatcgcctcccctccgcttccttcctgtgcagggtgggctgcgctgggagcccggcgggcggggg

SEQ ID NO: 37524 - DNA, 122 bp, Homo sapiens
ttctctgccctgagggtttggcccatttgtcagttcttaagctccggggcagccctggggcgtggggggcggctgtttcctgctgccccttgggctgccacctgcccgagctgccagccaca

SEQ ID NO: 37525 - DNA, 122 bp, Homo sapiens
aggctggtttttcttaataaacttgtcaggcagggaaggagggcagaggcactcaagggccggctcaggtggcttggctgcatgccctggctccagactccactgccatgttcccgttccct

SEQ ID NO: 37526 - DNA, 122 bp, Homo sapiens
gcgctaggaaattcctctgtctttagttctagaacccctgatctcctagcaacgaggctgcggaacctctgcagactccaagggttttatagcgtccggtagcgacacggagccggctcccc

SEQ ID NO: 37527 - DNA, 122 bp, Homo sapiens
ccaccaatcagatccatgctcagaagatttcaaatcagaagcaagctacttaagcaaggacgctctgcactttgctgccaaaggctgatgcacaggagtctggcttttggaagcatccaggg

SEQ ID NO: 37528 - DNA, 122 bp, Homo sapiens
ttaaaagcttgctctttagactcaaacagttctggctttgaatttcagctgcagcacatgcgtgactttaaacttgtcatttaatgtctctgtgcttcagttgcttaggctgtacaatgggg

SEQ ID NO: 37529 - DNA, 122 bp, Homo sapiens
atacttaatattggcgcaggagctgctctgaggacggggcatggagccaggggtcagctccgaggcaggtatgtgctgtgctccctctggcgccccgcagacccgcagtcccagtgggtgac

SEQ ID NO: 37530 - DNA, 122 bp, Homo sapiens
attatccacattctacaaaaagaaaacggaggcacagcatggcaactcgcccaagataaccgcagccagtaaacagcagagatggggctaaagtcccagggtgtcaggttccactaacttct

SEQ ID NO: 37531 - DNA, 122 bp, Homo sapiens
agctcctcctctaaccctgcatgatgctaggcattgagaatacaatggggaacaagctcacgaagttttcagttgaataggaaagatgcataataaagcaggcaagtgaggtaggatgagtg

SEQ ID NO: 37532 - DNA, 122 bp, Homo sapiens
ggtccccagggagctgctgtccacacagaatctggccagagcccagctaccaggctctgacgtcttcaaagaacacacacctccagtttctcctgtccccactcccatccccaccccaatca

SEQ ID NO: 37533 - DNA, 122 bp, Homo sapiens
gtggccttgccctggaacccggcccctgctgcctccctgggttcactctgttccaccacacgggccttcttgctgcccctgaaatgttctgggagctcctccgccgaagccctggctgttcc

SEQ ID NO: 37534 - DNA, 122 bp, Homo sapiens
atgcagtttgtagctagacatcactcaagccacgtgcagcccccggcatttgtcagacatcgcagtgagctcatttccttcgcagacaagcctgtgaaagctgaatcatgggaggactggtt

SEQ ID NO: 37535 - DNA, 122 bp, Homo sapiens
gggcaaacagcacctctaggacccaggacatctgtgtttcaggcctgtctttgacactatcgatcacaaatcaacaaatctgggcttcagaattctcactggcaaagggagaggattagatt

SEQ ID NO: 37536 - DNA, 122 bp, Homo sapiens
cgcagttccacaggtgcgccgagcctggggccatcgcctccctccggccgccgtccccagcgaatcgccgcctgcgttctgccgtttccccgccaccgcagccacccggggcccggggggcc

SEQ ID NO: 37537 - DNA, 122 bp, Homo sapiens
tcatcacaccgagtcaagggtacgtgccgaccccactgaccgctgtgcatgtgccctgatcgccggccagaggagcgctggccgggcggtttctccactgtatgcaaaggccccccttccac

SEQ ID NO: 37538 - DNA, 122 bp, Homo sapiens
ctgtaaacagttcagcactttcttgtaccaactggcatctccaaagaaggctctggagatcgataaaaaccaaactggagctgatttctagagaaataagaaatacaaatgccctaacaaga

SEQ ID NO: 37539 - DNA, 122 bp, Homo sapiens
tcagagcggcgggtcagaggcgtgattgggcgccgcacataacatgccggtagctcacagcgacaggaatagcgcgccgcctcggcctcccgggcgcgccccgccccgtgccctgactgctg

SEQ ID NO: 37540 - DNA, 122 bp, Homo sapiens
attaaccttttgagataggtgctattacattaccaccttatagatgttagctctagggcacggagttagagaaatttgcttaaggtcacaagtggcagaacctgggttcaacctatgcagtg

SEQ ID NO: 37541 - DNA, 122 bp, Homo sapiens
aattccagaggaacccactgtggtcaagacagtcagccctcaggccccagcaccagtacacgggttggcagggatgatatcaagtccccgtgattccaaagcacctctgtttagtttgggag

SEQ ID NO: 37542 - DNA, 122 bp, Homo sapiens
aaggcgctgcgcgagtgtcaactgccccacctaaggcgcctgccttcctcaagccaaagtcgactcctgggacctggaatcagcagctgagaacagacagcgggaagaccaccaaagatcag

SEQ ID NO: 37543 - DNA, 122 bp, Homo sapiens
gccgaaaggcctcaccacctccgacctccgcctgccccggggatgctcccagccctgctgcggcagaacgcgacgtgctaaccggaatccctaggccgcctgtctcctacccatacttggag

SEQ ID NO: 37544 - DNA, 122 bp, Homo sapiens
actgggcagaggagacctggccctgggggcccacagggcatcaggcggaggtgatgtggccgaccccatgctggccccaccgagcccacccaaccgagctccctggaggacgaagggccaag

SEQ ID NO: 37545 - DNA, 122 bp, Homo sapiens
ggtaggcattccctacctgtaaccactctgcccattttctctcctagatgggggctgtgacgactatgcagagggccgagtttgcaaagttcgctttgatgctaacggagccacaggaccag

SEQ ID NO: 37546 - DNA, 122 bp, Homo sapiens
tgggtgttaaagagcccgctcgcagcctgcatcgccggggctcgggacagaagtcagcggcggggaaatggggctctgtcactttaagtacagctggagccgtaagtacaagccctggtggt

SEQ ID NO: 37547 - DNA, 122 bp, Homo sapiens
cccgccacctcctccaccccccgccccgcattccccccggggcgaccctccctccacctgcggactgccccaaggaatggaaaacctgcactcagaagccaccccccaccccgcctctgccg

SEQ ID NO: 37548 - DNA, 122 bp, Homo sapiens
atcctgcagattttttgtgtccttaatgattccacaatttattcctggggttgtatttgacgtttcttcaggctggctcttgtctgccctctcttgggatcatggaactatcccatctatcc

SEQ ID NO: 37549 - DNA, 122 bp, Homo sapiens
ctaggcgtcacacaggtctcaccccctgctgtgaagttgcagaaaactcggaaggcatcccgagcacagccctggttggggtcgacccagtactctcctgttgggtgagggagaggggaggt

SEQ ID NO: 37550 - DNA, 122 bp, Homo sapiens
gcccccgggctcgccccccacctgccccccttaccttgggcaatggcaatagactcgaagcggtgcagctctttgagcaggcagctcctctccgtggagtgcaggctgtagatgaagtcgcg

SEQ ID NO: 37551 - DNA, 122 bp, Homo sapiens
tatatccgagggccgacggataattcgtgtaaacaacaatatccctcaagatgagctcttcggagcttcctacccagtggcagctccccgttttctcctttggacttggaaaaacttcactt

SEQ ID NO: 37552 - DNA, 122 bp, Homo sapiens
ggccccgcgcccgggacgctatgggagggggccgcagccgagcagggccccgcagccgggcggacccagccgccccagccgcgctgcagcccccgccgtccccggtctccgcctgcgggctg

SEQ ID NO: 37553 - DNA, 122 bp, Homo sapiens
ctccgcccgccgccattggcccgcggccctagcccagccttgttcccattggccagaggccgttcccgcggctgtccatcacctcttgtttaccctgtctgcgggcaaatccaaccaagccg

SEQ ID NO: 37554 - DNA, 122 bp, Homo sapiens
gaagcggaaggaaactgtgtgtgatgcaccccgctgagaaacgaacagagtgggcgcccacggaggtgcagtgagccaggcggctggcagagcagcaccccgggtcagcttctgcctcccgc

SEQ ID NO: 37555 - DNA, 122 bp, Homo sapiens
ggatccactgagtggctcttgctggcgtgtcagctgcgcgcgaaccagggctgggaggctcggctggaggtgtgaccagggcagggactgacctggcccggaacagaagcgcgcagagtccc

SEQ ID NO: 37556 - DNA, 122 bp, Homo sapiens
acagcatcatgcgaggcaaggtccagccgttccgcccggcatacaagcttatggagcagccgcctttgaagatctccaggtagacttcacagagatgccagagtgtggagggaataagtatt

SEQ ID NO: 37557 - DNA, 122 bp, Homo sapiens
gcgtcaggccgcttccccggcccctcgccggccccctaggccacgcccccagcccctcaccgcctcagaccccgccccctggcgcgatgccccacccctggcctcagtagaaactcctccgc

SEQ ID NO: 37558 - DNA, 122 bp, Homo sapiens
tggcgttaaagttctctatcatggccctggaggcctggtccatcagcttctgggccaggccgaggcgccggtgtgaacgcttcacggccagtgaggtgatatggccatgcgggacatcatct

SEQ ID NO: 37559 - DNA, 122 bp, Homo sapiens
gtgcgcgggccgccgccggcgggcgggagggggcggggggcaagcccggccgggccgcggcggcgcccctcgcgcctcagtcgcacactccggggtcaccagactcaagcgccgccccctca

SEQ ID NO: 37560 - DNA, 122 bp, Homo sapiens
aaatacaatttgttttggggagcatggatttagtaatctacaaaaaattcattttagtcacgtaccttggggttgagacctggcaaggatttaagctgattctcatagttttacctcagatt

SEQ ID NO: 37561 - DNA, 122 bp, Homo sapiens
ggggggcgacaggcgaggctccatcttccctgtgcacagtgtgtggtgctgaccaacccccgcaagggacagatggggacacggaggcccagaggagcggagaggagtctggcctcgctgcc

SEQ ID NO: 37562 - DNA, 122 bp, Homo sapiens
cacggcggagccttagtaattgccgctgcctccccgggggcgcctctcgtcacacacctgcggcccacgggcttctgctcagctgtcgctgtgtcagtgacagaaaagtaacgtatcccagt

SEQ ID NO: 37563 - DNA, 122 bp, Homo sapiens
ttccctcagttccacaatgttctgcaaaacaaatccctctactgccaccaggaggtgcagcgattgtggaaaatatacccccacttccagaaaaagtcttcaaggtctcaaaagccagtgtt

SEQ ID NO: 37564 - DNA, 122 bp, Homo sapiens
atctcctcaacattgtgttcgaagagaggcagctgccaggacctcgctgttcctcaccctcggaagccgtgcctcttctctgggcccttggtctggcatccccggccagtgcagccccttca

SEQ ID NO: 37565 - DNA, 122 bp, Homo sapiens
aggttgctgctggatccatgaagtcctcccaggcaccagggtctgctgttgtttttgtcacgtgctgggtgtcccaagatctaacaataatagctgtaattaatgtatagagtgcctatgac

SEQ ID NO: 37566 - DNA, 122 bp, Homo sapiens
gcgcagagccctgagcagcctcaacacctggacaatgcgccccacgttctccagctcctgcgtggtctggctcccacttaggctctctaccagaagagtgatgtagaagggcaagatggcaa

SEQ ID NO: 37567 - DNA, 122 bp, Homo sapiens
tgcgccaaagtgtagagggtgcccctgggaatccaggccaggcagatgagtggcccaggtcgcgatggtgaccgacaggaaggccgcagctgggacccacggcgaggctcgaccgtgctggg

SEQ ID NO: 37568 - DNA, 122 bp, Homo sapiens
aacttcctgatcatacttgtcctgagagcctgtgttaagctcatgccggctctcccaccccgcccccaacgccggccaaaaaaaagactctctaaaaacaggtgcccccgatgatctcacac

SEQ ID NO: 37569 - DNA, 122 bp, Homo sapiens
caccattgtttggtgtactgctccccagtaattgttctttcctggccttgtggagtttcacgttttttattcagttaaagattcaaggtactcctaagcagatttctgaagctctttttcca

SEQ ID NO: 37570 - DNA, 122 bp, Homo sapiens
gcacacctcgctcacaaaaaattgagccggccctggaggcctggggggcgagtccggttgcgcctcggagagcgcaacaggcaggtaggagtttactttcaaaaacgccggggtggagcaga

SEQ ID NO: 37571 - DNA, 122 bp, Homo sapiens
ggcttgagatccacggattctggtgcagttccttcaaagacccagatagggaaactgcctcggccaaggacacagcactagttgaagacacagctggcccttgccccccgctgcccctgcca

SEQ ID NO: 37572 - DNA, 122 bp, Homo sapiens
attactgcgatcccggctttggggccctgcctttgccgcgggagaataggctccaatttacgaagctggtcaatttcagaaatccgagacccggttcttgagaagcgactgcgtgctccggg

SEQ ID NO: 37573 - DNA, 122 bp, Homo sapiens
aataactaattaacgctagtgcagcacttttgaaagtaaaaagcactttgcaataattaacgtggtttctgctttcatctcctgcagcctcataaatagagagctaggtcccagatagctac

SEQ ID NO: 37574 - DNA, 122 bp, Homo sapiens
cttcccacacaactccggtgaggtttgtgtctgtgcccgagagaagctgcacaagaggaacgcaggaggccagggctggggagagcggcctggggaagggtgggaaggctgcagggcaggcc

SEQ ID NO: 37575 - DNA, 122 bp, Homo sapiens
agcgacagaggccgggctggaggaaaggaggggaagcggggcagggaggcactcagccagcgggagggggctcagggactaggacacccaggtgaggaaagacccacatcattgagccaggg

SEQ ID NO: 37576 - DNA, 122 bp, Homo sapiens
ggaagatgtttcttaaccacaaatgtgccatgtgtttgcgccctttcttggctcccgtcgcgtacagggtggagtccagactccttggcctgacgcaggaagtcctcccacatctggtctct

SEQ ID NO: 37577 - DNA, 122 bp, Homo sapiens
ctgaggtcagccatggggatatctgggttgagattcaggttttggtgaatatggggcaggcgtccagatgtgtttgtgtcacctgctgcaacgctgtagccaatgaagattccagcgggatg

SEQ ID NO: 37578 - DNA, 122 bp, Homo sapiens
aaaggtttataacttttgatactcacatctgctactttctattagaacctagcagtccttcgtggtactttcatctactgtgtctctgccgattccgtttcctggtgttttatcttctggtt

SEQ ID NO: 37579 - DNA, 122 bp, Homo sapiens
tggcaagagatgtctggggatgaggtgaggcggggaagggggaacatcgctgcatggttacgagcacacgcgaatacaggaacctttagggaagctccaggccaaagagcatccgtgggctc

SEQ ID NO: 37580 - DNA, 122 bp, Homo sapiens
cttgccctggctgtggacgcagggcaggtgtcagacgcatgcagggcggcgtttctgtcacgcagtgggtgggagcctcctgggcacccgcctctgggattcgggccctcctgggcacccgc

SEQ ID NO: 37581 - DNA, 122 bp, Homo sapiens
ctcctggcgggagactacaggcgctgcagctacatcctgtttcgtactgggagcaggtgccgccccgcggaacacttacttgccccgccctgcggtggagcagggcggtctcagccgccgga

SEQ ID NO: 37582 - DNA, 122 bp, Homo sapiens
cgcacactcgacgcgaccagacaggcgcgtgcgcgtcagtcgaaaactccgcccctcacacgccctcgccccgccccgccagtacctagagcggcctagcccgggcagccccgcccctgccg

SEQ ID NO: 37583 - DNA, 122 bp, Homo sapiens
ccagggcagcctgtgtggtgtctgacgatttccacagcagccagagcagcttgtggcagccggggcctgctcccagcgaggggtctgctcccagcacggggcctgctcccagcgcggggtct

SEQ ID NO: 37584 - DNA, 122 bp, Homo sapiens
cttcatcttcgctaggcctcacagcaccgcatgattccgggggagggtgcttatcagactcgcgtgtggccccacggcacctagggcaccgtcgagcacacggtccgggaagctccaatgaa

SEQ ID NO: 37585 - DNA, 122 bp, Homo sapiens
ggatccaagccatgacccagtacactcaagacgggaggaacaggccactgatccatgccacgacccagcactctctccacaccatgacccagcactctcaagatggaggaacgggccactga

SEQ ID NO: 37586 - DNA, 122 bp, Homo sapiens
ggactggggatcacggaagagggccaggcccgcgtgggtctccagggctgtgctcaggggcgtggtcttctgcagtgggggcttggctggtgagtggagactctgcgtgactctgggggcgt

SEQ ID NO: 37587 - DNA, 122 bp, Homo sapiens
ccctggcgtccactgcctttgaggatcctgagtcgattcaccttgggggtgtctcttcctcgccctctttgctctttggtggaggaggcttcctagaccccggactttgctgtgattctact

SEQ ID NO: 37588 - DNA, 122 bp, Homo sapiens
cccccattacacctcatccccctgctgccacctgccccctatgggtcagggtccagaggtcgccaaggctgttctggtccccaagactgctccctaagccaactctcctggaggtctaccgg

SEQ ID NO: 37589 - DNA, 122 bp, Homo sapiens
gccggaagctgcggcgcgacccggctgcgcatgcgcctctcacacgtgctgtcagaacgccgcctcctccgcttgcggccggtctgcaccatgctgcgaacgtccgtcctccgcctgctagg

SEQ ID NO: 37590 - DNA, 122 bp, Homo sapiens
gccccctcctctcattactaagcatgtaccgtgctcatgacaaatgcggccactagagggcgctgcgaccacaaacactccggagctgagggtccgagggccttcctgccctccagctggcc

SEQ ID NO: 37591 - DNA, 122 bp, Homo sapiens
caagtccttacctcttcatgtttccacaggcccctacctccaacttgggtaaataggccgcggacctcaagtcccagaactccgcgcggcggacttctaagggtattgtgatggagcatggg

SEQ ID NO: 37592 - DNA, 122 bp, Homo sapiens
aaacaaacaaggaagctaaatatgactggtaaaatttggtaatataagatgaggaagtagcgaccatttattgagcatttactgtatcctggacaggcagtgtgataagtgctgcacacatt

SEQ ID NO: 37593 - DNA, 122 bp, Homo sapiens
tgagtgcttgcttaaagagaatgcttcactattttacccactgagtacattatctaacaacgccaatatattggacatttccatgttgggcttaaattgtatcctcttgagttttagaaggt

SEQ ID NO: 37594 - DNA, 122 bp, Homo sapiens
cattttcccagtgtagggcgctatgttgtgtcagtgttaggagccaactctccctttcctcgtgtacttcctgcgcccaggctttctactgtttcctatccccacataggaagcccactcca

SEQ ID NO: 37595 - DNA, 122 bp, Homo sapiens
ccctcttcgagtgattgatcaagtcaggttctcacttagagatcctgtttaaacacaagacgctaaaacacacccccttgctccgtgtcacaggactagatctcttgggataaattaagcga

SEQ ID NO: 37596 - DNA, 122 bp, Homo sapiens
agagaccagggagcttcggtgtgggcgatgacgagaagatgacgttgctgtaatcggcaccgacagtgggcgcgtatggggcagtcagcacgcaggaggggctcttacgccttggcaagggt

SEQ ID NO: 37597 - DNA, 122 bp, Homo sapiens
gcctctggttctctggaaacaagtttgctgtaggacaagctgcccgcacactcacatacacggaaaagaggcttcactgagaacaaatcagaactgaaaaacagcttcaagtacaaatgttc

SEQ ID NO: 37598 - DNA, 122 bp, Homo sapiens
tacagcctctccagctttctaccaggtacacacaatgcatacagcctctccagctttccacgaggtacacgccacgcatacagcctctccagctttccacgaggtaagcgccacgcatacag

SEQ ID NO: 37599 - DNA, 122 bp, Homo sapiens
ataagccactgtccccaggccttgcgcatagccccaccatagccgactcgagagtagaagcgtcccaccatcctcacagcaggctgcaggggccatgtgtaactggcccctccacccttggc

SEQ ID NO: 37600 - DNA, 122 bp, Homo sapiens
tgcgtctgtgggtgacgcgcatcacggggtgtggagaggtgcacctgtgcgggatttccacgccacctccaccctccaccctccaccctccaccccacctcgtgccttcccagggaagtcct

SEQ ID NO: 37601 - DNA, 122 bp, Homo sapiens
gaccccttccaaaacccttaaatatccttagtctgtaacagaagttagtctgagctaactcggccagaagcccctctcaagtttattttctaaaataaacctgtccttgttgactgcccagc

SEQ ID NO: 37602 - DNA, 122 bp, Homo sapiens
tgccaaagtgcattccccaaacctctgccctctaaagcgttggataggagacagagtcaccggaagggaaggtttgcatgagagaggaaagcaaccatgtgcaagtagccagtggtcaactt

SEQ ID NO: 37603 - DNA, 122 bp, Homo sapiens
cgggtggggtggggagtgttgcaggagtgcatggagctggcggggactcctcagtagaatcgggggagtcccgtagggctccgggggctcggagccggccccgccctcctcaaacttctgta

SEQ ID NO: 37604 - DNA, 122 bp, Homo sapiens
cgttataaaagggaggcgaaggcccattccgccattttctctttgtggaggctgggttcgcgtgctcttctgagctgtggtcgtcatggaccggaagcgtgtgcggcgcgcctgccttgagg

SEQ ID NO: 37605 - DNA, 122 bp, Homo sapiens
gcactcactctttccactctgacccacacacagtctgtcgaggcaattaatcagcactcccggtggttttcctataggatgccagttcccttgccaatcaagtctttccacagactgtagca

SEQ ID NO: 37606 - DNA, 122 bp, Homo sapiens
ttaaggaatcacagagacctatggggttcaggaggatatttattaattatttaggtgcaccggcccagtcggattaacatccaaaggactgagcactgaacaaagagttaagttaactttta

SEQ ID NO: 37607 - DNA, 122 bp, Homo sapiens
gaggcgggctcggtgagtggagtcggacagtgggtgggtgccctgactgcctgacggccgcgcagggccttgcaggaccgctggggaggatgttgttaacgtaaagagccaggctgatgagg

SEQ ID NO: 37608 - DNA, 122 bp, Homo sapiens
taaagaaaaacttgacaatagttgatcatacccataaggatgaaaaaaaaataaggaagtcgtgggttaaaaatagctccacagagtgagccttagtgaataaaaaaggaggtaagtccacc

SEQ ID NO: 37609 - DNA, 122 bp, Homo sapiens
gagcagaactgcgtcttgtatcacctggcgcggtgaacgtgggggttgaaacgctccacgcggaaggtagagggcaggggccaagggggcgatcctggtggctgcgctttttgctatttgct

SEQ ID NO: 37610 - DNA, 122 bp, Homo sapiens
cacagccttgccccctgacatcctgctagccatgtggcctggaatgccacacagttccttcggtcccatccaccctagcactcctgtgatctttgctcttggggaagtctcgtgctatccct

SEQ ID NO: 37611 - DNA, 122 bp, Homo sapiens
gtcgaatactcgcttccacaccgcggccccggcagcgccgagctcgtgacggcgcacgcgcgctctccggagctccagccgggtcgagtcctctgttgctaccgcgcaccccacgagcgcgc

SEQ ID NO: 37612 - DNA, 122 bp, Homo sapiens
gataggaggggagctcaggtgggaatgcctgcttgcccaccgctctgtgtgctgtgtgcccggttcctaacaggccacgggctggtcccggttcacggcccgggtgttgggaacccctgtgt

SEQ ID NO: 37613 - DNA, 122 bp, Homo sapiens
cgctaataacctgaatgctgacaaataggaataagttacaactgaaaaggataagaattacgaatatcttagccatcaattcctggatcaggagttgtgacaatgtaacaacgtgttatcct

SEQ ID NO: 37614 - DNA, 122 bp, Homo sapiens
ccatagtgtgcactggtgaaagggcaggaggaggggtgtggccccgggcataaggggaggcggcaaagaaggggcctgtgctcagcctctctgggccctggcacaggcacccaagagtgagg

SEQ ID NO: 37615 - DNA, 122 bp, Homo sapiens
gtggacggcagtctgcatcaggaagaaccgggccagcgggccgatgggtgggcggtcgggcgccgggacggcactcggcaggctcctcggacgtctacgagcagccgctcccggcacgagcc

SEQ ID NO: 37616 - DNA, 122 bp, Homo sapiens
tgttccttctgatgttcggatgtgttcggcgttttcttccttctggtgggttcgtggtctcgctggctcaggagtgaagctgcagatcttcgcggtgagtattagagctcttaaggcagcgc

SEQ ID NO: 37617 - DNA, 122 bp, Homo sapiens
caaccgccttaatccacaaagcccagaggtaaaaactcacaagctgtttcttctctgaaccgcagaaacaaacctggttgcagttggggcactgtggaccagagaaagatgcagtgtttcat

SEQ ID NO: 37618 - DNA, 122 bp, Homo sapiens
ccagggcacggagataatcgaggaagtcgatccgccgagccctattcacctaaaagagcccgaacccacacgcagtttagatgcatctctccaaatttatgctgtgctttaggggaggaaca

SEQ ID NO: 37619 - DNA, 122 bp, Homo sapiens
tgcaaactcggtgtaaaaagaacaatggctggataaaaaccgaggcgagtcggccgagtacgctgaagacaagccagtgttgctaatgcaagggaagccaagcctggattctccccctcctt

SEQ ID NO: 37620 - DNA, 122 bp, Homo sapiens
ctctgaacaggccacaccctggaaggcgaagtcacctgcctgtatggcccagtcttggcccgcagaggcccgagcatcccctccacaacctgcgccccgcctgcgcaaggaccacgggcgga

SEQ ID NO: 37621 - DNA, 122 bp, Homo sapiens
gtgagcttggcaactcttcaagggatcacaatggtgtatctcatctggacctagaggtctcgaaggaggagataagtggaaatgttttgtgggctggagcttagtcattctcctcggtgact

SEQ ID NO: 37622 - DNA, 122 bp, Homo sapiens
actggcctaaataaaatacagcatttcttccatactcaaactttcaagattcaaagtcaccggaaagagcatctaatttgtcaaacttaatggtttgaaacaacaactgcaatatgtctgtg

SEQ ID NO: 37623 - DNA, 122 bp, Homo sapiens
aaaaaaagcgacctaagtttgttgagagctaagtgcctccaatccttgatgaagcagaggcgctcccatcagaaagtcactagagactaagtctgagggagggtgtcacgctggaccttaaa

SEQ ID NO: 37624 - DNA, 122 bp, Homo sapiens
gccccatcacatcaggaacttcagcagttccttccaccaaagctcaactattgctgcaagcgctttggtaatcacgagcattatctatgaagctactgctgtggtcagggccccagtcgtcc

SEQ ID NO: 37625 - DNA, 122 bp, Homo sapiens
ctggcctccctcaccccggctacagggacccggtgggctggacccccaagtggaaggaagcgcatctgctccagccaagtggccacaggctcaagagggaggaacctaagtggtcacaaagt

SEQ ID NO: 37626 - DNA, 122 bp, Homo sapiens
ctggccaggcagcatgaccttcttttccaactgaacggccactcctgagtgtctgtctcacgggcagacagcctttctgcctagagaaaagcatttggtcagggtccaaactgtgtcccaag

SEQ ID NO: 37627 - DNA, 122 bp, Homo sapiens
ccactcggggcctgggtttcaactcagtcctctcccaccaccttttccatgtgtcttcaacgcccttcttcagccggggtgacccgaactgcccagagggcttgcagccttcagggacgcag

SEQ ID NO: 37628 - DNA, 122 bp, Homo sapiens
cgcccacccctcactgtggcactggacgcgcgggggatgcggggttgttcccagagtagccgctaaggggagccggacgctagaccgccctcccgcgttcccatgacaacgacaccggcggg

SEQ ID NO: 37629 - DNA, 122 bp, Homo sapiens
atcagctggcatttcgtggggctgaaagagtggcaactgaatactctgccctgcctgacccggcccctgtaccaacgccgtagatcgatttctattttttcctttcttctgtaaacagtggc

SEQ ID NO: 37630 - DNA, 122 bp, Homo sapiens
ttggcccagcggagcgaaaaccatgtggaacaggtggagtgagaggtaacttagcggaggcgtgcagggcccaccgtttgtaccggctgctcgagcgttacgtatccattaggactcgtacg

SEQ ID NO: 37631 - DNA, 122 bp, Homo sapiens
gagaggactgacagcaggggctgtgagtgaattcagggtggagaatgttctccgtcttcacggactaggattctgtgggctgaagaagcacatccgaggtagagaaccaaggaccagagaga

SEQ ID NO: 37632 - DNA, 122 bp, Homo sapiens
taacaaagatttgccattcgctcctggctaatttcaaggttaacataatctgcttttctgcggcccttcatgcaaacgcagagtcaccctgactcatgaaaccatgccttgctttcccacct

SEQ ID NO: 37633 - DNA, 122 bp, Homo sapiens
accacacacacactatgctaggtcaagtccgaagagatctgaggccgggtttggggcgcacgtggatggggaagataaaacaaatgagctacagggaagatggttaggaggacagagagaag

SEQ ID NO: 37634 - DNA, 122 bp, Homo sapiens
gcgctcgccggaacccggcccctacccagcgctgggagcccgctctccccgccaccggagcggttcacctcccaattctttgcatggcttgccctagcgatgcaaagaattgggaggtgaac

SEQ ID NO: 37635 - DNA, 122 bp, Homo sapiens
aataaagatcctccactggccctacacacacacacacacacacacacacacacacacacacgtttcaattatttgtctttcccggagaaaagagagttgcatttgttggagttcgttttctt

SEQ ID NO: 37636 - DNA, 122 bp, Homo sapiens
gcccagccaactcaccctgatcccacgcctgcccccatccactcacccgtatagcctgcccggcagtggcacacaatctgctgggaatattcatcctggtggcaagaagtagcaaagtgccg

SEQ ID NO: 37637 - DNA, 122 bp, Homo sapiens
gcattgcgtggggaagctgccctggaccagaatgtgcccagctcgaatttccctggtagccgaggctcggtctccagtcagctccagtataaacgtctggagatgaacagcaaccctctgca

SEQ ID NO: 37638 - DNA, 122 bp, Homo sapiens
accctgcctctccagctgcgacacagatggcgcgcgggctcttgggttctgtagttttctcgcgatccaaaaggctccgtgcccaagtgagtccttaccgcctccctacccagcggcttccc

SEQ ID NO: 37639 - DNA, 122 bp, Homo sapiens
cccgaaaaaggactggaggctgcaggcaatacggtggtaggaatctctgccggtttccagcgtcgcggaagcaccaaagggcggtccctgaaggaaacgaggggtcttggggctggagagcg

SEQ ID NO: 37640 - DNA, 122 bp, Homo sapiens
cattctcctcacaaaatgaccctgtgctcaaggaacctgtaagtactgacttttcccactcggtccaaaatccctctgccaaacatgtgttcacagacagtaaatgagcacacccaggcgcc

SEQ ID NO: 37641 - DNA, 122 bp, Homo sapiens
gatggggcaaatatgttgtcaattctttactcatgccctaccctgtcctggaggcatgtgcgatgtggaagaatgagcaaccaccatcagagagagctgcaggggaagtgacattctgggtc

SEQ ID NO: 37642 - DNA, 122 bp, Homo sapiens
ggaagggcaattccctgcaatcagtgtttaagtgaatgtttgtcccagtgtgcgacaccacgctgtcagcaagcagcggggagctgttgagttgttactacatttgatttgactgccagtag

SEQ ID NO: 37643 - DNA, 122 bp, Homo sapiens
aggttgcagtgagccgagatcgtgccactgcactccagcctgggtgacagagcaagactccgtctcaaaaaagatggccatgctggccaaggctgggctcataggaaatatctgtagtagga

SEQ ID NO: 37644 - DNA, 122 bp, Homo sapiens
tataatcctgagaaacacccaaatgggcggctcttatagacacttagtacaggaaatgaccggccgaaaaggaacatgagttggctctgttaggctgatagcaatctgtttagttgaaaaga

SEQ ID NO: 37645 - DNA, 122 bp, Homo sapiens
aagtgagactggagatgtgcatatttaccatcaggaactggactgagcattaatgggctccggaggcttatttggaggcagttgcacttatcatgaatcaggaaaaggaaatagcagccctg

SEQ ID NO: 37646 - DNA, 122 bp, Homo sapiens
tttgagcataaacacaagtgtgagccgatgatctagaatccagatttactcaattaattccgtcaacaagtaagcatctagctcctctatacccagtgaagagtggaggggactgggaagag

SEQ ID NO: 37647 - DNA, 122 bp, Homo sapiens
cgtggaggaacgctgtgaacgagccgggagaccctccaagttgctctgggctccgtggagcgtcaaggtccaagacacaacttggcaaagacttgtgccacagtcaccgaagatgtttgtgc

SEQ ID NO: 37648 - DNA, 122 bp, Homo sapiens
ttgggatgtgggtgctaaacccctatcccaggagcagcctgagacccagtgtgatgcgcacgctgcgtagtgcacacacgtcacaactacagcacacacgtcacaactgcagcacacacgtc

SEQ ID NO: 37649 - DNA, 122 bp, Homo sapiens
gttccccagttcccttagaaagatgcaatcagaagaaactttcatgtattcccacaaccacgcgtctatgctgacaatgcgccttctcactgaaccacgacccacggcgctgcccctgcaca

SEQ ID NO: 37650 - DNA, 122 bp, Homo sapiens
cctaacctccttaaccaagatgctttgtgttgcccattggatccccacagtttcaccttacgaagttctcctagctcactcttcatccactcattcaataaaaatgtccttgctcaccaagc

SEQ ID NO: 37651 - DNA, 122 bp, Homo sapiens
attgggctgtcaaagtgatgttggcaagtagattggctactgcggttgccagttctgtttcgggccctacttatactgctctgtggggcggggacgaagagtcaggggctgaggagcgagtt

SEQ ID NO: 37652 - DNA, 122 bp, Homo sapiens
aagttttctggaacaaacacccgcatctggggcttggcgggccaggaggtgccggacgggcgtgggagggggagagcgagttggcgcggcccaggcgcccggcggccaggcctgggtttgct

SEQ ID NO: 37653 - DNA, 122 bp, Homo sapiens
cctatcttaccttctaggtatcatgcttaaaacaaaagccttctttctgcactgtgggtccgaagcctgttcacagaccagcctagcagggagtaggaagggtcaaggggtctctgacactt

SEQ ID NO: 37654 - DNA, 122 bp, Homo sapiens
aatattttacattattttattttattattattttttgagatggagtctcgctctgttgcccggcctggagtgcaatggcacaatcttgactgactgcaacctccacctcccgggttcaggtg

SEQ ID NO: 37655 - DNA, 122 bp, Homo sapiens
aacactcaccgcgaaggtctgcagcttcactccttaagtcagcgagaccacgaacccccccggggaggaagaagcaattctggacgtgccacctttaagagcttaacactgtgaaggtctgc

SEQ ID NO: 37656 - DNA, 122 bp, Homo sapiens
ctaactcgctctcctctcccgtcccaatcccgcctcctcttggcacttctctccaccgctcgcccagcagctcacatcacactcccacctcagaccccaggctccgagaggcgcagggccag

SEQ ID NO: 37657 - DNA, 122 bp, Homo sapiens
ggctggggggccgcgccaggcactacctttgcgcgccttcttctgcagcttcagcgtgtccgacgacttctttttgatctcatgccgggctcgtttgtactctgcagaaggggagagcggag

SEQ ID NO: 37658 - DNA, 122 bp, Homo sapiens
caggcaaacgcgacgtccggcatctctcacgcatcagcgcagaggcgcgactcggctgcacgaccctccgagatttcaccccgggggtagggccattccctgccagccggactctctccact

SEQ ID NO: 37659 - DNA, 122 bp, Homo sapiens
agaatatctctacctcagcatggcacttgccatattctaaaaggaacattacattacacacgtactgaaatacatatcaattttaggtatgtgctctcagctgattgtgaaaggtaaatgaa

SEQ ID NO: 37660 - DNA, 122 bp, Homo sapiens
agcgcccctcgacgtgtgggctcatggggtgatggcactggtctcgtcgctggcagaagacggtcataccgcgatgcccttggtttccaggatgaggctgggcacatgccgcacagacaagc

SEQ ID NO: 37661 - DNA, 122 bp, Homo sapiens
ccttgcgcttcccaagtgaggcaatgcctcgccctgcttcggctcgtgcacagtgcgctgcgcccactgtcctgcccccactgtctggcactccctagtgggatgaccttggtacctcagat

SEQ ID NO: 37662 - DNA, 122 bp, Homo sapiens
cctcaagtgatccacccgccttggcctctcgaagtgctgggattacaggcgtgagccacccgcccggctatcagcactgttctgattgcagacgtttcacagcatgtttggcttttggtaaa

SEQ ID NO: 37663 - DNA, 122 bp, Homo sapiens
tctgtacccttcacctagttttcccccatgctcctgatgttctctttggctttcttctttcgggggtgttaattctgagagtttgcttatttaaaatatgcagactctgtcaagtggcagag

SEQ ID NO: 37664 - DNA, 122 bp, Homo sapiens
ggcgcgccgcacaccaggccgctttgacccggactcccgtccaggcgcaccggccggcctcggagctctaccagcaggctttcatgggagcggaggtgcccacgtttccattgtgcggtaac

SEQ ID NO: 37665 - DNA, 122 bp, Homo sapiens
ttcactccttcttgggtttaaaaatgccatctatatgccaagcactcccaaagatatatccgtttacatgtcatctctacttgagtgtgtaataaacacctcacagttaatatgaccaaact

SEQ ID NO: 37666 - DNA, 122 bp, Homo sapiens
ttgagtctagttttgaatgtagaagacttccttccagtcctggaagcctggttgctgcagcgaggagctgagacacctgccgagtgattgccatttgcgaaacacagcactaggtgctttat

SEQ ID NO: 37667 - DNA, 122 bp, Homo sapiens
gagcataagaggactgtgcggggctagttccgagcggcagtatttagggccaacccagtgcggggctggaaggggcacagggctgagcgacgggggcaagggccaatggcgagtgcgaaaac

SEQ ID NO: 37668 - DNA, 122 bp, Homo sapiens
ttgggcctagagcaccagtgggccagtcacgctgcctctttggtcggccacatctttattcgcgggaaacaactttcaacgcatggttcccctttccgagaagtaactgcgcagaatgcgcg

SEQ ID NO: 37669 - DNA, 122 bp, Homo sapiens
ggaaaagtggttttttaaaagctagggaactcctccactaaaagtaaccattggaaacctcgaatgagggctaaagttttaatcataagagaaaaggcagcataatgaaatgtgtacacata

SEQ ID NO: 37670 - DNA, 122 bp, Homo sapiens
actttataggtggacttgccccaaaacataacattcagaactaagcaatttcttttttcccgattataatactgggcagagaatgcgcgtaaagagagaaaaggacaagtatcaaaaagcaa

SEQ ID NO: 37671 - DNA, 122 bp, Homo sapiens
ttggccccaagtcccggggctagccctcccatgtactaaaccctccctctggcgtggcgtcgccccaggagccagcctgggtatgggctcccgccctgggattgttgagctcgggcaggacc

SEQ ID NO: 37672 - DNA, 122 bp, Homo sapiens
ccagacattagtggataagtttatgaaactggatttggaagatcctaacctggacttgaacgttttcatgagccaggaagtgctgcctgctgccaccagcatcctctgagagtccttccagt

SEQ ID NO: 37673 - DNA, 122 bp, Homo sapiens
cgcccgctcccgcccccgctccctcggccgcggccgcgcacgcgcgcccctcccggcgcccggccccgcccaccccgtcacccgtaacaaccacaagtgccgtcgccgcgccccttccccct

SEQ ID NO: 37674 - DNA, 122 bp, Homo sapiens
tagtagcttgttctgacgccgctgcttcggacgggtaaagctgaattctggagcagagtccgaggagcggaaacgcgaaacttctttttcctctctgctttccagtgtttgtccctgattcg

SEQ ID NO: 37675 - DNA, 122 bp, Homo sapiens
ggttttctattggctagagcggagaagccgggcactgattgggcctttcaaacaaatttgcgtcccaccttccggccaatccactcccgagtttccagccacgccccaatgtccggcggaag

SEQ ID NO: 37676 - DNA, 122 bp, Homo sapiens
ggcccaggtgccgccgcacgaaggctgcggttccgtgagcgccgtcgcaggcttctggagcggggccaccattttcactcgagcacaggccgcaggctctgggtgccccacaccctcagcaa

SEQ ID NO: 37677 - DNA, 122 bp, Homo sapiens
gcggggccctatttgcgcctgcagcgcggccccctcagcctgttctgatcctgcccgttgcgggagagtgcatgggcagggagaatcgccagttcagcgccctcatttccctgagggcttgg

SEQ ID NO: 37678 - DNA, 122 bp, Homo sapiens
cccccgcccctttacccacctcatccctttctctggccaccacttctccctgcccggggccgtggccatcgctgcagattgagccccttgccctggctggcgtggactccgggggcccgagc

SEQ ID NO: 37679 - DNA, 122 bp, Homo sapiens
cagcggaggagccggtcttcctgggtccatgttgcgtggttaggagcgcagcggaggagccggtcttcctgggtttgagttgcagctccacctcttcctggcgggtggcctgggcgagtgcc

SEQ ID NO: 37680 - DNA, 122 bp, Homo sapiens
gctcctacctttatagttaatacacataaaaagagaatatttagacaggcacttcacaaacgtgtggttagcttaggaagtcagaagattataactgcccccaagaaaatgtcgtgcctttc

SEQ ID NO: 37681 - DNA, 122 bp, Homo sapiens
taaaattaccttcccttttctaatgaaaataatgttcagaacatttggtttcctaacaatcgaaatttgtactggtttctgcatcaaacacctcaactgtagggttaccctttatggaagtt

SEQ ID NO: 37682 - DNA, 122 bp, Homo sapiens
gaacctggaagcctgagacaccagacaaaatgttacagcacagggatcattgcaggaaaacgtttcccatttcagttttaaagtttctgctgctttgaagtccaaaatatccaataaataat

SEQ ID NO: 37683 - DNA, 122 bp, Homo sapiens
caagatgaaaatcacgggcgacaggactccgatgcatcccggctgagaaggcaaggggcccggcacgctggacagtcaggtgcagagtcaggcacataccacaggacccagcaaccccgccc

SEQ ID NO: 37684 - DNA, 122 bp, Homo sapiens
caggttcattcccctttgcgataagttgcaaggtcccctgccctgaggggtccacaccttcgggcctgccgccaggctcacccccactgagggaaagtggccctggatgcggagaggagagg

SEQ ID NO: 37685 - DNA, 122 bp, Homo sapiens
ttggactgtgcccttttagatatccaaacacagcctgtgagcttctgacttgtgatgtgccgcagatcagcgaccgcctcggtggggacgagagcctgctgagcctcctgtacgacttcttg

SEQ ID NO: 37686 - DNA, 122 bp, Homo sapiens
agcatcctctaggagccaataaaaacaaaatggagacagctgggccccacccaagacctacgtcattccaggggatttgactcagaaatctgcactaacaagctccttgggattttcagact

SEQ ID NO: 37687 - DNA, 122 bp, Homo sapiens
gggtctcctctgagctgccgacaccccagagaaactctcctgtgttctccctgattgaagcgattatgagggcctgcctgagctggatgacagaacagctggagtccaaagccttgaatctg

SEQ ID NO: 37688 - DNA, 122 bp, Homo sapiens
tttatgtagctgctcatcagagccagaggttagagcggagaggacccacttccgccaggccggcctgctctgctcagctcagctgggctaggccccaatgccacagttactgcgcgtgagtc

SEQ ID NO: 37689 - DNA, 122 bp, Homo sapiens
ttatctggtgaccagcagcagggcccgtggccttgcccccaagctgcagccagcaatccccgtgcccacccaggcactaagcatttgcggtgggcctctttctggaagctccccttctcctg

SEQ ID NO: 37690 - DNA, 122 bp, Homo sapiens
tcacctgccacgacgcacgacagggtttcccgcccagccgaccaggctcacgtccgtgggcgggacttccggccggcagccccgccgcccctgcaaggtgtcttacgcttccgcgggtgccc

SEQ ID NO: 37691 - DNA, 122 bp, Homo sapiens
gccaccagagccacggggccgtgtccctgaccatgtgtaagctcacctcagggaagcatccgaactgcaggtacaaagagaagcgacagaacaagtcttacgtagtggcctgtaagcctccc

SEQ ID NO: 37692 - DNA, 122 bp, Homo sapiens
tggaggggtgcttattttaaattcagattcctaggctccattcccagagaattatgatttcgggactagggtgccaggaatctgtatttttaggaaactgtccaggtgttcctcgtgaggta

SEQ ID NO: 37693 - DNA, 122 bp, Homo sapiens
ggtcagcactgacctcagccctggctcctgggtggtaacagagagcaattcatgaggccccgtctcctgtgtggcccctctgctccagctctgagctgcagactggatgatggtgggggtgc

SEQ ID NO: 37694 - DNA, 122 bp, Homo sapiens
cagtccctgtttatggagggctgggggcttgggtctagagaatttctctctgagaaactacgcccccgggggaatcggcccccccagccctgcgccagaatcccctgcagcaagtttcggag

SEQ ID NO: 37695 - DNA, 122 bp, Homo sapiens
gatcaggacccacgcccctgacatcaacccctcccccgtgttccagagcacggagcagcccggaactctgcggcctgtggttactgactgactgctcactaacttgtttctacatgaaacca

SEQ ID NO: 37696 - DNA, 122 bp, Homo sapiens
tctggtcccgccggggtgggggaggggcccacagtgttggtcccaggggtgggggaggggcggcgctctttagaagcaggagccggtggggtctaattgcatcactttatttcaccgacctc

SEQ ID NO: 37697 - DNA, 122 bp, Homo sapiens
cattagacattaactgtaacccctacgggttccgtctctttctccacttactccagacaacgtttccccacagctgcttggctcacgcacattctggaaccccagcaaatcccccctcaacg

SEQ ID NO: 37698 - DNA, 122 bp, Homo sapiens
gtgggcgagtgattccgattgtgcagcagaaacccagggtctcacgggaacgaggaaacccgcccacgcccagcctccaagcgacgctctccatgacaaccggcacttggtaacggcctcgc

SEQ ID NO: 37699 - DNA, 122 bp, Homo sapiens
caaaatatggatcatttatgaagcaggttcatattttagaggtgttaataaaatcctcatcggaaaagatccaaagtgcaaggatttgattataaacataatttcctagactgaaagttttt

SEQ ID NO: 37700 - DNA, 122 bp, Homo sapiens
accgcccgcatttgagttcttcaggttcagttccagcggcagcagcgttgctgcaaaaatcgcttgctattcgagatagccagcagagggaatcggaactttgcttgcagcaggggttgaag

SEQ ID NO: 37701 - DNA, 122 bp, Homo sapiens
gtgaagacctcagtgactctgtaaaatctggaagcccccctgacaatgacaaacaaccaccgaggaaacacaggtcacccaatcactgccagctgaagcgctggcacagaaacccagctaaa

SEQ ID NO: 37702 - DNA, 122 bp, Homo sapiens
ggactgacctctccacggggttgacggggacgtctccatatgccaggagtcgcaaagggccgaccaggatgaggaaaccccaggtcgagtccgggggagacagcacggcatcccagcctcag

SEQ ID NO: 37703 - DNA, 122 bp, Homo sapiens
ttgaccctaacccttaccggcaggttcctgtagctggtgctgctcctgggacgatgtagacgccccatatccaggcgcgggtgccaggtcgccgggcaccagctcactcccagggcctgtga

SEQ ID NO: 37704 - DNA, 122 bp, Homo sapiens
gcaggagctcacaggcgactgacagggcagcgaggccagggagcggcccagggtggaccgcggatgggttctagaagttctgggcaggttctagaaggggctgctctgttgaccacctctta

SEQ ID NO: 37705 - DNA, 122 bp, Homo sapiens
gggaagtgccctggggtgagataaggcagcctcagatgcgccgttttgtcgcatcattaccgtgggtaatgttccagccaggggagcctcccgctcccccgagtcctccccaagctcatccg

SEQ ID NO: 37706 - DNA, 122 bp, Homo sapiens
atacccaagataacactaaagacaatgataatgattactgatagctactgaaatgggaagcgtgtatgtgtcatgcattgtatgaggactttccatggtgaagctaatttagcccacatgac

SEQ ID NO: 37707 - DNA, 122 bp, Homo sapiens
atttcagtgaacagaaacccaggttcccacccatccaacatcagcatttcttcttagatccgaggaaggggaagggatgtgagttagctggaagagaaactgagattctgatgagcaagtct

SEQ ID NO: 37708 - DNA, 122 bp, Homo sapiens
ggatggtgagtaaacacaccagtggtttcatcagaggggaactcactactcaggaggtgacggtgacgtggtgccggtccctgaagtacgcgcacaagctccggaggttgcgggagctgagg

SEQ ID NO: 37709 - DNA, 122 bp, Homo sapiens
cacctgtaatcccaacactttgggaggccaaagagcaaggatcgcttgagcccaggagttcgaaaccagctggggcaacagagggagaacttgtctctacaaaaaatttaaaaatcagctgg

SEQ ID NO: 37710 - DNA, 122 bp, Homo sapiens
actttgctaggcactacccaccctttagggataagtgaagtatgtggtgggcatacaaggcgcacaggggagtcattctggcaaattccaagaaggttttaagggctcccgaggcaggcagg

SEQ ID NO: 37711 - DNA, 122 bp, Homo sapiens
gcccggcgtcaggcgtggagacaacagaaagttgtgcttaaagctcgaatcagaaatccccggcgagtgtctctgtgtcctccctgcttctctgctctgtgccatccttactttgcaccatt

SEQ ID NO: 37712 - DNA, 122 bp, Homo sapiens
gtggtttctcagacccgagagtttggccccaaacggctttttctacttttttgccccttgcgggacggcgactgtgcggagcttgtcccgcctcgcgcccacgcctctcccgcatttttggc

SEQ ID NO: 37713 - DNA, 122 bp, Homo sapiens
aatgtgctcaaacacattcaactggcaagcaagagacccagaatgagtccatcctgccaacgtcacagagccaagctgggcctccccagcattcattcagacctgaggcccaggttctagtc

SEQ ID NO: 37714 - DNA, 122 bp, Homo sapiens
ttttcctccccgtagtgtgggcgatacgaggaaagacctcggcaagaaccagcgaagccccggctgccctcgccctgcgggcgcacacttgctcctcgcgccgggctgcgccgggcgcccgc

SEQ ID NO: 37715 - DNA, 122 bp, Homo sapiens
cactttgtagatttggtgcttcctttgcagagcttgatgctattgccagcaatgtcttttcgcggaatgctcaaagactggtggggcttggcatcggtataagtgcagggatgggggtctga

SEQ ID NO: 37716 - DNA, 122 bp, Homo sapiens
ccctttccgagtcaaagaaaggcgtgacagacgcacctggaaaatcgggtcactcccacccgaatactgcgcttttcccaccggcttaaaaaatggcgcaccacgagattatatcccgcaca

SEQ ID NO: 37717 - DNA, 122 bp, Homo sapiens
tgaaaacaggataagatttttaaaatattttgtgttaatgaataaatgttcagtcttgagcgtagttcatgggagaaaaagaaactgcctttgacatgctgcttccaaatctgacattgccc

SEQ ID NO: 37718 - DNA, 122 bp, Homo sapiens
ttgagttcctttagcagtcttgggtgaatgccatctgggcctggtgatttatttacatttcgtttgccacttgggtctgggaaagtcctgttttccactgtttgttccaattcctctgacct

SEQ ID NO: 37719 - DNA, 122 bp, Homo sapiens
ttcccacgtaggaaagagggagagggcaatgccatcaacgagtccaggaactgggttgagcgctttaccccaagaacagacacacactgtctgccactgtctagctgttggtataaaaccca

SEQ ID NO: 37720 - DNA, 122 bp, Homo sapiens
atggagacctccacgacaacagcctagggcttgaaacccaagaaagatgaacaagcgattcgaggaaggcagggcactgagggtcggaggcgcatgcccggccacagcaggtgccggggcgg

SEQ ID NO: 37721 - DNA, 122 bp, Homo sapiens
tccaggggcccctgtccgccctggcccctgctctcccgggaagtctgcccccgcccagcccgttccacttcccggagcgccggccgcgcccccacctggccccgagcacaacccggcccgcg

SEQ ID NO: 37722 - DNA, 122 bp, Homo sapiens
aaacccaaaatactaatgtgaaaataactgttggtagggcaggcaacaatttcaaagaagcgcagttgcgtatcaggaactgtagtgaatacttgccaattcaggtttctaggaaaatgctg

SEQ ID NO: 37723 - DNA, 122 bp, Homo sapiens
ctgatatttgcggagtgtgaggcaccctgctaactcatttaacccgcacagcaacaccaccgggcactgttattactcccatttcactgtcgagaaaaatggaagcacagagagatgaaggg

SEQ ID NO: 37724 - DNA, 122 bp, Homo sapiens
accgagaccacggtcacctcatagcgagcgcctgggatcagcccctggagtttctgggtccgggcctggccatccacctgcacactctgaggctcccctgaaaacattggggatcgagggtt

SEQ ID NO: 37725 - DNA, 122 bp, Homo sapiens
gcttcatgaagctacagtacatcagtgaaaaatggtatatagaaaccaagatctggatttcgggcaatgaataacctcattgctactgtgtctggcattggttcctgccagtctactgtgtc

SEQ ID NO: 37726 - DNA, 122 bp, Homo sapiens
aatcataccaaaattaaattagaggaatgtaggaaatgtagttaggaagagaatgtaaaccggaatggagggcaggtgcacagaaaaatggcttaaaatttggacttcctagccaaattgcc

SEQ ID NO: 37727 - DNA, 122 bp, Homo sapiens
tcaaataaatatattttggggtaaaatactttcgctttcttcagggcctactatctgtcacgtgatgctatactagagtctgtttggaacttgctggcttattgctacagagcctgttctgt

SEQ ID NO: 37728 - DNA, 122 bp, Homo sapiens
cctattagggccagtttcagacgagtagggctgacgagctggctggggattggctggccccggctgggagggatttgtcggaaggaagggctgcagcttacagcaacagagtttagactgtc

SEQ ID NO: 37729 - DNA, 122 bp, Homo sapiens
gcgccaggagcaggaatgtagctgccaggaaacgcatcgcggataacgaagttccaagctcgggaaagaagcagcggccgcccgcggtcacaagacaaacctgtcggggcgggcccggggag

SEQ ID NO: 37730 - DNA, 122 bp, Homo sapiens
cctggggaccctggaatgcccggttcgcgcgaccggagcggctggacatggtgggggggccgcccaaaggtgcagggaggcttgaaagaggacgtagaggcaccggtggaacgcaaaaaaac

SEQ ID NO: 37731 - DNA, 122 bp, Homo sapiens
tgagtgcgttagttaagtttccacaatgtcaaacgtgagcccttcggaagaaaacgtacgcggccctgaaaagggccattaacgatattgcaaggaaaggcctggcctcacttaaccgccaa

SEQ ID NO: 37732 - DNA, 122 bp, Homo sapiens
tgggcccagtaaagtggggtagtccgagcatgaaacacttactccaagacaggaggggctcggccctgaggctggatctacccctgggccaatatttctggtgccaactaagagtgccaggc

SEQ ID NO: 37733 - DNA, 122 bp, Homo sapiens
tgtctcaaaaaaagaagaaattatctgatctaccctattgactgtaggtcataagacccccgtttcaaagaagtttctgccccacacaaggcctatctatctagattcttcttggcctctct

SEQ ID NO: 37734 - DNA, 122 bp, Homo sapiens
caaaagccaagttctcaatacctttggcgctcttcatgtctggatgggttctcccgactccggtgcttcagagcagcagagccaggtccctctctggctcctcccacaggcaggtgacagcg

SEQ ID NO: 37735 - DNA, 122 bp, Homo sapiens
tcaggccgagcgaaatgttgtctcaagtcacagaaaatccatgctttgggggatggccttcgccagccacagccagatttcttcgcgtgtaagtggccacaggggccctttaagagcgagcc

SEQ ID NO: 37736 - DNA, 122 bp, Homo sapiens
ggcctccagagccttccttttcttctcttcttgcaccagacactgagcctccaagaaggccgattttttcagggtcttttctattctctggtactccagttctttctcacgtcttaagcgat

SEQ ID NO: 37737 - DNA, 122 bp, Homo sapiens
ggcccgagcccagctgtatttaccctccacctccccgcctcatgaagggttagacggcttcgcccaagaattgagtcgaagcttgtcagtcggattggaaaagaacttgaagaaaaaggtga

SEQ ID NO: 37738 - DNA, 122 bp, Homo sapiens
agccacctcattatctgcccacagccaaccccacacatgggctgcaccactctcagcctccgagaggtcctgtgctccgccgtccttcatttgtccagacccacagtggtgtctggcctagt

SEQ ID NO: 37739 - DNA, 122 bp, Homo sapiens
tgacctcatgatccacccaccttggcctcccaaagtgctggcatcacaggcatgagccaccgcgcccggcctattattgcttaaagaggcggttttcattatgttgcccaaactggccttga

SEQ ID NO: 37740 - DNA, 122 bp, Homo sapiens
gtgttccaggccatgctgcaggggtgcctggccgggctggcagcgggcggttcggacgctcggaggccggcggggcttttgagacccgggcaggggggcggggcggccacgtggggcacgga

SEQ ID NO: 37741 - DNA, 122 bp, Homo sapiens
cactgagccaggggagccccgaccaccggccaagggaggcggtgagtgattgtgagaccacgcccgggaaaccacgcttttcccacagatctttgcaacctgtggatcgggagatcacctcg

SEQ ID NO: 37742 - DNA, 122 bp, Homo sapiens
tgggttaaaacgatatatgtataaatttctttttttacctcgttagctggtcaaccccggcggtaaacaaccaaggccacccctgcccaggcaacagctccaaggggcaggcgatggttgcc

SEQ ID NO: 37743 - DNA, 122 bp, Homo sapiens
aaaattgagcgaacttgggcgcaaaacccgcccggcaactcgtgacgtcatctcgtcccgcgctcggataggctgtacccactccacgctggttgaggcgctcttaaagtcctttgtaaccc

SEQ ID NO: 37744 - DNA, 122 bp, Homo sapiens
tgcaaaagcagcagcagcagcagcagcaacaccagcaaccaaacagagctcgtaacaatacggtgtgtgcattttcctaagctgtcgttgtatggactagtattatcttttctgactgtctt

SEQ ID NO: 37745 - DNA, 122 bp, Homo sapiens
ggagctggtgaagggaatggggagcccacgcaccctctgcacccagggcagcacccagggcggcacccaggcccctgctagtggagctttgtgggatgtgcatcgccaaggttagacttttt

SEQ ID NO: 37746 - DNA, 122 bp, Homo sapiens
atgcatggcgcagctcccaaaacaagaattaaccggcccaaaatgcagacggtgcagagccgtggccgagacaccgtcctccagccccaggctgtggtgtggacgtttcataattgattcaa

SEQ ID NO: 37747 - DNA, 122 bp, Homo sapiens
gcctgcaatgaaatgcgctttaattgcatcaaagggttcttctcaatggggtttcagaggcgcgagagcggcgttcccagcgagggttcctttccggctggccagcattcctcagccccgcg

SEQ ID NO: 37748 - DNA, 122 bp, Homo sapiens
cgttaacttttccccgaagagcatggcagagtgaagcacaagcaataatcctgtattattcgcgttcccagagtcccttcggatttgcgccatgcgcggcggggagaaccggcctcctgctc

SEQ ID NO: 37749 - DNA, 122 bp, Homo sapiens
ccctttttccagtaacatgtagacacacacacacattcagtttaaaagcccatattacaacgtacatccacctcatcttcacactgagatttgggtgacatctgtccctttttgagttttga

SEQ ID NO: 37750 - DNA, 122 bp, Homo sapiens
attatggcatcagacctggaagggacttggagatcagctaatgtaaccacttcctcttaccggtgagaagattgaaacccagagaagggaagtgacttgcccagttcagggatggagccagg

SEQ ID NO: 37751 - DNA, 122 bp, Homo sapiens
aagaggcagtcgtccaggagctgggatctcagtgagaaagacgcggtctgggcgcccagtcgccccctcttcaggccaagagggcgctgcattgaagggctccggtcccctcgccctgtgaa

SEQ ID NO: 37752 - DNA, 122 bp, Homo sapiens
cagcctgagaagagcgtctcgcccgggagcggcggcggccatcgagacccacccaaggcgcgtccccctcggcctcccagcgctcccaagccgcagcggccgcgccccttcagctagctcgc

SEQ ID NO: 37753 - DNA, 122 bp, Homo sapiens
gtagagacagagacactgggggcccagagtcggcccaggtgtctactgccctggtgagagcgagctccttctcccagacagctgacacctcccaaacctcacctcgcaacgcgcttcttctt

SEQ ID NO: 37754 - DNA, 122 bp, Homo sapiens
gcctttccagacgaatgtctggctacgtaaactgtgagctctgtagggcagaggtggcgacggttcagttatataaatccagtgcccggctcaataagggtatgtggaatggatgaatccat

SEQ ID NO: 37755 - DNA, 122 bp, Homo sapiens
ttaagagcatataacctttctggtgagcaaaccagaaaaataaatcaaaagccttaaaaacgtacacatttgacctatcaattagacttctagcattcaagttaggaaactttcagagaagt

SEQ ID NO: 37756 - DNA, 122 bp, Homo sapiens
ccaagaggattagtgcgggaggccatctgcagagaggataattagcttaatggggttacacggattgttcctggccctctgcccaagggtacacttgtcaagactgttaaacacagcctggg

SEQ ID NO: 37757 - DNA, 122 bp, Homo sapiens
tcccgacttccccttcttcctgcagaagctacaagacagcagccgagacagcagctgagacggcagcggcagcttctcaggtcagcctcctccgggcctctccccactctcctctgcccagt

SEQ ID NO: 37758 - DNA, 122 bp, Homo sapiens
tcttgctcttgcgggtactgtgcaggtctctgtgtgtgccaggttctgttgctgttttaacgtcctacgtaaataaacaaaacaccctagaatgaaaagtaacaagtcacctccttccctgt

SEQ ID NO: 37759 - DNA, 122 bp, Homo sapiens
caaacggaatttattagcgggatctatagaatgtgtttgaagagctacagtggtgtgagccggcaggcacacaggttggcccaccatcacacaaagtcaaacaggccaactgctcaggggat

SEQ ID NO: 37760 - DNA, 122 bp, Homo sapiens
cagaagtggggtggatgggccacaataaatataaataaatttacacaaggtcacggtacccggcatggcccaggaatctgcgctaataaaattctaacagactatcggaaaggtggggctga

SEQ ID NO: 37761 - DNA, 122 bp, Homo sapiens
tggttttcgagcaggaaacgtgctgtgagcaggaatcgcgagtgagttccatggcgtccccgggtcagcgcgcgtgcaggaatcgcgagtgagttccatggcgtccccgggtcagcgcgcgt

SEQ ID NO: 37762 - DNA, 122 bp, Homo sapiens
tttatagcctttactacttctcaaagcactgtcattatacagtgttggtggaggatggtgcgggatgctgagaggtgcactttccactgggattgatccagtcctcctccttcacttccaca

SEQ ID NO: 37763 - DNA, 122 bp, Homo sapiens
gaaatccagctttgaattgattttttacccaacagaagatcattttgcttctaaccaaagcgttgagttgaacttgacgacatcatggtcattttgcgtcttcagtgtatttggtgttgggg

SEQ ID NO: 37764 - DNA, 122 bp, Homo sapiens
gtgccccccagggattgtgggcaaatcctccccaggggaggaagctcaggggctgttgggcgcctaggcctcttcctggtgagcagagcctcatccatggggccactgaccccacagttacc

SEQ ID NO: 37765 - DNA, 122 bp, Homo sapiens
atttataaactcaggaaccatctttccaaagtataacacagcttaatttcaggacaaccacgtcacctaagtaattctgaaattttttttccacaagtattgccttacaagtttagattcac

SEQ ID NO: 37766 - DNA, 122 bp, Homo sapiens
gttgggacccacaggtcaagcctagccccttagttttaccatgaagataactcaggccgtcggagaaagtggcctgcccaacgcaggtgctagagcgcgaaccaagagaagtcgatcctcct

SEQ ID NO: 37767 - DNA, 122 bp, Homo sapiens
cccccttccttggcctaatctcaaaagccaagcaagatccgtgtctaaactctcattgaacgcgctaaaatgtttctgaagagcacaggaattacttaaatgaaaaataattgttgaggagc

SEQ ID NO: 37768 - DNA, 122 bp, Homo sapiens
gtattggagggggcctcttggaatatcgagccagcctccttgctggccatggctttgccacgttggctctagcttattataactttgaagatctccccaataacatggacaacatatccctg

SEQ ID NO: 37769 - DNA, 122 bp, Homo sapiens
tcccaccgccgggccctgccccgcatcccggccttatgcactgcccctcccacccggccccgcccaggcacggccgaccccgccccgggcaccgcccaccgagccatcctgcctcgcctccc

SEQ ID NO: 37770 - DNA, 122 bp, Homo sapiens
agggaaggaccgagcttggcagagacacttaactgtcccactgtgtggctgttcacagtccgcccagatttaggggtgggatggggggttttcgggccccggcctgctccccctctccagac

SEQ ID NO: 37771 - DNA, 122 bp, Homo sapiens
tggggcccgccttagagcagctcgcgggtgtaagacctggggaggcccggaccaggcctgcgaacgcagggtccaggtgctggccttgcgattcgagaatctcctcccccagaccctcccaa

SEQ ID NO: 37772 - DNA, 122 bp, Homo sapiens
gagtcctcaagatggcagtgtcttctcagggaccttggggcaagctctcatgtgctcctgcggtggggaggggaggggatgcatgtgcacttgcaagtgcacacacacacatgaataagagc

SEQ ID NO: 37773 - DNA, 122 bp, Homo sapiens
ggctttctcttctctgctaagtgctgcatggccaagggttgcgaacgcgagcagaaaatgcgcctctcactgtcgcgagggattcagacagtcaagcgccaaggcagcccgaggctccccaa

SEQ ID NO: 37774 - DNA, 122 bp, Homo sapiens
actacagagaccaggagggaatttgcctttgtggtcaggcttccagagttgaagagggcccggctaatgtctgccactgatgcagctcatcaaaacgccaccggaaatggagggcggcattg

SEQ ID NO: 37775 - DNA, 122 bp, Homo sapiens
ttagcttagacccttggtgccaggctgcctggtactgggagatgggtggctggcttacctcgactccactcagaggaaggccttgccagaaagacccgggaatgcaaacaatctcctggcaa

SEQ ID NO: 37776 - DNA, 122 bp, Homo sapiens
agttgacaagatgggccactggaaaatgaaaagagcatcggcacttcacgttcattaaaacgtgaagagatgaccaactaatgctgctttcataccctggatagtgctgagtacctaacagc

SEQ ID NO: 37777 - DNA, 122 bp, Homo sapiens
cgtggggcttggtcccaggaggctgcttactgggccctgctcctctggtttcccccaagtcgtgattctgaaatgaataaggacggtgcagaactggactacaaatgcaggagtgacttcct

SEQ ID NO: 37778 - DNA, 122 bp, Homo sapiens
ggggagggaaccccaggagacctggccggggcatcacgtgcgcagagcgggtcacgtgggcgcgggaggggtgctgagaggtggagagcgggagccggcggatttcttaatgaagtgtctcc

SEQ ID NO: 37779 - DNA, 122 bp, Homo sapiens
ccggcctcggccaagccaggtcactcggtgacccacccaggcagctggtcttcggaaccccgaagtttcccaagaactcacttaggaccagaggaagccaaaatgctggatgtgtttgctac

SEQ ID NO: 37780 - DNA, 122 bp, Homo sapiens
tggagcccaccaagtccacaaccacctgctctgaatagaaagctgacattgaacctaacacgtccgacgaggacgggcaagggcaccgcggggcgctctttctgaaaagcagcacattcccg

SEQ ID NO: 37781 - DNA, 122 bp, Homo sapiens
tccttacattcatagggtttctcaccactatgaagtctccgatgttgaataaggagggaacgccgcctgaaggcattcccacattcactgcactgatagggtttctctccagtatggatttt

SEQ ID NO: 37782 - DNA, 122 bp, Homo sapiens
gcgagctggcgggcgggcagggcccgcaaccacggcaaccgagcgggggcgggctcaggccgagacagagcggcgaaccaatgactacccttccagcttaaaccggtcccaaaaccaatcgg

SEQ ID NO: 37783 - DNA, 122 bp, Homo sapiens
acacaccaagttaatgatactagcattcatctccccccaccaccacattttctcaagcttcgtactgcggtacatgtgtgattagtgttacagaagagggtgtcagtaacccagcaaataag

SEQ ID NO: 37784 - DNA, 122 bp, Homo sapiens
aggagggcagtgcctgtcctgggcagcacaggggcccccaggtgtgtcctgctcccgggccggctggcaactaactaactgcctcctggtctcaagcagaggagctggacactgtcagggga

SEQ ID NO: 37785 - DNA, 122 bp, Homo sapiens
atgaatgtgtgcgtggtgccagggatcgatgggcatattaaggagcagcgccgcggtccccggcagccagcttcgtgatgctcccccacactgacgctggctattcatgatttaaaatgacc

SEQ ID NO: 37786 - DNA, 122 bp, Homo sapiens
cgccctgcgcgcctgctgatgcctagccagttggtaagccaggtgggcaaagaactactgcgcctggcctacagcgagccgtgcggcctgcggggggcgctgctggacgtctgcgtggagca

SEQ ID NO: 37787 - DNA, 122 bp, Homo sapiens
tccccaacccacaaaagaccccgcgaccctccaacagacccaaccctgagtctagccccacgccctggaactcagaggggcaagccccgccccctggtccctgaccgcccggtggagccccg

SEQ ID NO: 37788 - DNA, 122 bp, Homo sapiens
atggcccttccagtgtgcggcatagatccagatattctctcctctggctgggcagccactcgtctacccctcccactgtttacagggaacatggaaaaaattaaaacgtgtggccagtaaga

SEQ ID NO: 37789 - DNA, 122 bp, Homo sapiens
cttccttggggaccctccggggtgtgggcgaattgagctcccctccttcccacagactgccgctggcaaccccgcggttggttcgccctctcaggtcagtttcccctgagttaggcagactc

SEQ ID NO: 37790 - DNA, 122 bp, Homo sapiens
acgggagctgcttccgcgtccccatagcagggtgctcgggttcaggtaggagacgcactgcgcggtgccaggccagcctcggaagccgggcgccacggcctgcactcacctctgctgttccc

SEQ ID NO: 37791 - DNA, 122 bp, Homo sapiens
gaaaacatccaagaagaagtctacttcctgtactcaatttacgttgtaaataaaggaacacggctccggccgggctgcggggctccgctcagtccgggagcgcccccgggccgcggcgctcc

SEQ ID NO: 37792 - DNA, 122 bp, Homo sapiens
tcactccgtcccctcccccggcccagtgccgccaccaccagggtcctctccaggcgcctgcggcctccccgcctaggcccggagtacctgccttgtacctacctggtgtcgtcggccacgtt

SEQ ID NO: 37793 - DNA, 122 bp, Homo sapiens
tgatggcgactgaagggagacgacgacggcgctagcttagcacgagcctgaaactcggagcgagcgcggtgcagccggagcggcgctcggggggaggggggagcgggcggaaaaggccgact

SEQ ID NO: 37794 - DNA, 122 bp, Homo sapiens
gtgggcatgcagggagagtactcacccagagaaaggggtgtgtgcctgagggggtgcgcacgcacacatgtggacacatggaaaggggagaagtagtgcaaagaataaagacctgcagagtt

SEQ ID NO: 37795 - DNA, 122 bp, Homo sapiens
aacctgtgcgctattcatgccaaacgcgtgaccatcatgcctaaagacatccagcttgcccgccgcattcgtggggagagggcgtgaattgttttgagtacaaaccttaaatccaaaggctc

SEQ ID NO: 37796 - DNA, 122 bp, Homo sapiens
agactgaaaaacaaaataaactcccaattcacagtcctccgttgcgtaacagtgagcagacgttctgagaaatgcatcgtcaggcaattgcatcattgtgcaaacaatatagagtgtactta

SEQ ID NO: 37797 - DNA, 122 bp, Homo sapiens
aattggagatcctggactcaagatgttttcatgaggaacgattccagcccgcggtaactccggccagtctgcagcgtggacgacaaaacaggcaccacgtggttccggcgccggggcggggc

SEQ ID NO: 37798 - DNA, 122 bp, Homo sapiens
ttgtttgacgagaacatgcagctcacagctgccaatttcgttctatctcaaacacaaccacgatcttacagctgcggccagatctgtccgctgaagtggcgggaaagcgctgaggaaatgcg

SEQ ID NO: 37799 - DNA, 122 bp, Homo sapiens
cctttccccctttgctttcttccccctccgctgttggcgagggcaaagtggccgtggcggcgccatgcccgggccggagtgagtgcgcgcgggcgaaaatggcgtacatccaggtagggctg

SEQ ID NO: 37800 - DNA, 122 bp, Homo sapiens
aagaacttgaatatacatttccccaaagaaatatgcaaatggtcaataagcacatgaaaacgtgttccatcaatataattagggagatgcaaataaaaagtcatgaaacaccatttcacact

SEQ ID NO: 37801 - DNA, 122 bp, Homo sapiens
gagtgtgccccttttaaagatgagggaaccgaggctcagagaaggaaaggacttgcctggcgtcacacagctagcctaagatggtgaggtcaggagctccctggcaacacccaggctgccgt

SEQ ID NO: 37802 - DNA, 122 bp, Homo sapiens
tttcctcgcgttagtggtgcaggggcctccgcatttggggaaataacaaacacccacttccgccccccaccccaaccgggatccccagataatgagaaatagatggtggccctctgtttgta

SEQ ID NO: 37803 - DNA, 122 bp, Homo sapiens
tggtggcgagggtgggtgctgctatccggtgctactctgcctgtgggggacgggggcgggcgtgatatccagggcatcattgcctgcatctgggagctggttggggacactatccatggctg

SEQ ID NO: 37804 - DNA, 122 bp, Homo sapiens
gttcagatggcagcactgaagcatgaatatgaagcataatactgcagactcaccaagaaacgaaaattggagcaagggtgctcagaggtatctttgtatccatggtggctttttctcaaatt

SEQ ID NO: 37805 - DNA, 122 bp, Homo sapiens
gaatcggccagaagggctgatttcagcaactgggaaggagaaaaacaactagggtttcaacgcacatcgttgggtgctaatgcccctgattttccactatgccccgttttcttgaaccccat

SEQ ID NO: 37806 - DNA, 122 bp, Homo sapiens
acccggctgggcccggcgcacgccgaggagagggagcccccgccaccgccgctgcctccgcgtgctcagcctgtccccgcccagggagccggagcctccaactaactccgcccgccgctccg

SEQ ID NO: 37807 - DNA, 122 bp, Homo sapiens
ctgccaggagaccgccatctgggagcagggccaagagagaagctggcagcagttacacagcgcaaaataaaaggccttgggctggactcaggcggaaagaaagtgctggaggaaatgaaaga

SEQ ID NO: 37808 - DNA, 122 bp, Homo sapiens
agttgttggggaccgtgcgggacacgtttttgttcgggaccattcgggacacgtgaactgcggggatatgatggttaattcgacccttgtaatgtactgggtttaatagtgcgctttcaaaa

SEQ ID NO: 37809 - DNA, 122 bp, Homo sapiens
ggcccgaaggagactcagaggccagggtttggggaacaggtggcctgtgaagacctttcccggcccccagccctgtgggcgctggggaaggtgtccccctgtccccgccttgaagcttccct

SEQ ID NO: 37810 - DNA, 122 bp, Homo sapiens
gggctgtgttaggactcaggagtcaacttctgagacccccactggtcaaggatggcacaacgtgagtatcaaaaaggtgctgactgcaacagatagaaacataccaaatgggtctgatctat

SEQ ID NO: 37811 - DNA, 122 bp, Homo sapiens
agtcctgagtcctccagactggccctgccaagttgccaggcatctgatgcagcagagcagcgctatgctgccctctgctggccacatggaggcagtgagtccccacactgctgtccactcct

SEQ ID NO: 37812 - DNA, 122 bp, Homo sapiens
ggggcataaataaaggtcgaagagtcgttaccaaaacctttgaagccgcttttcggctctcgggccctccacgcggccagtgggtctctcccacctccccgcccccagctgctgctgggcag

SEQ ID NO: 37813 - DNA, 122 bp, Homo sapiens
gcaaacggcaccggtcctcctcctaaggaggatggctcctctccagtgagaggctgccgccgccgctgctgctgctgctggaattaaatttccctctattattaggtgcttgttaccataat

SEQ ID NO: 37814 - DNA, 122 bp, Homo sapiens
attcggatcccccaggcctagcggctgcacacctgcgagatggcggagggactgcagacccgggtgcgggagaccagcgccggcgaagacaggcgggcgagggaggcccctccagcgtcctg

SEQ ID NO: 37815 - DNA, 122 bp, Homo sapiens
gacaccgtttttagttccgcgttctccctcttctaatcctattaggttttgtccagacaacgttttgctctttcagaagagaaagagcgttctgcgctcgtcgtcttggattcgacaaccat

SEQ ID NO: 37816 - DNA, 122 bp, Homo sapiens
ccctacccacctgcatggcgaagtctgtggtcaggcagccaacccgcacgtcctcggggacgtcacactgctccagctcctgctggatctgcttgatgttactgggggttatccagccaccc

SEQ ID NO: 37817 - DNA, 122 bp, Homo sapiens
cgaccgaacgcgcttgctctgtctgcgggttcctaaccttgaagctaggccagtgaggggcgaacaagacctggtctctactctcggccagtatatatgttggcgggcgtcggggggacggg

SEQ ID NO: 37818 - DNA, 122 bp, Homo sapiens
cagggctcttcctgagagcccgctgaaggcgttacaggcactggtactggtatttacccacggaaggagcccttcaccagccagaaggcagaggcttggtgcccctaaacgctggggcccct

SEQ ID NO: 37819 - DNA, 122 bp, Homo sapiens
cagactatgatgcacacacacactgggctacaatacacatgtacatgccaggctatggtgcgcgcgcgcacacacacacacacacacacacacacacacacaccccgagctatgatgcccat

SEQ ID NO: 37820 - DNA, 122 bp, Homo sapiens
agagagtagagacagtttttcagcctccattgccccatggctggatgtgtttgtgcaggacgcagctgcataagcaaatgtccctgtgcatccctataactttaacaatcttactccttggc

SEQ ID NO: 37821 - DNA, 122 bp, Homo sapiens
atgacctgagtgtaatctctaacatgaatcacagcttctgcctcattggtttgccagaaccgcaggcacaaatggatgagaggagacacctatgaacatggagccagaataccccaattgct

SEQ ID NO: 37822 - DNA, 122 bp, Homo sapiens
tgcggcggccacaccttgctcacctacggtgacaccgggacctggcaccagttcaagcagcgcccacagcggaggagcaacctggaccccaggtgccccggccgcgggctgcggctcaggat

SEQ ID NO: 37823 - DNA, 122 bp, Homo sapiens
ccacttagatgtaggagtcatcaccaccgggcgcatcgtagggacccccacccctccccgcgccctcgccctcatcgccgctgccggagtcactggcgccatccacgtccagggtgggcgcg

SEQ ID NO: 37824 - DNA, 122 bp, Homo sapiens
aggattgacaaggtctgtgcttccagcctcccagacagctcctgcatccgtctgtgatagcgagggcttgggggaagacacgaaggcaggagaggcttacatcctctggatttccccgtctt

SEQ ID NO: 37825 - DNA, 122 bp, Homo sapiens
tccacggtgtccttgtcgctgttgtacatgtaggcataggggcgccgcaccaccacgaagcgcctggcccagcctgacgtgtgcggctccaggaagtgcaggtaccccttcttggaaacgat

SEQ ID NO: 37826 - DNA, 122 bp, Homo sapiens
aaagccagttctgtagtgtaagtgcaaaaatacagcacactttttaaaatctaaagccgccgcgtcccagtagactgcaggatggggacggtcctatttaaaagtgggctccctcctcacct

SEQ ID NO: 37827 - DNA, 122 bp, Homo sapiens
actctctctccagtgtgatgttcttggtgcatgggggtgcctggggtgctcccaggcctccgcccgccacctctgtctctccctgggcctccatccttccacctggctctggaatcacaacc

SEQ ID NO: 37828 - DNA, 122 bp, Homo sapiens
atcactaaagccaccagggagatccggatgcactgatacgatccagaaacatagcgagtccgggaactgatgcggactttgaggcagcctctttttttttttttttttttttttaaggattc

SEQ ID NO: 37829 - DNA, 122 bp, Homo sapiens
tttgccccaggccgggtgcaggaggagctagaccgcgtgctgggccctgggcggactccccggctggaggaccagcaggctctgccctacacaagcgccgtgctccacgaggtgcagcggtt

SEQ ID NO: 37830 - DNA, 122 bp, Homo sapiens
agttcaccagggtctcctatcttgccaaacagcagacaagtcttgctggccccgggaatccgcccagaaagctgcagtgggtttggaccccccagaacttggttccttggggagaggagcaa

SEQ ID NO: 37831 - DNA, 122 bp, Homo sapiens
tgaatcactcctattatttgcagttctgaaaccaatcagtctaaaaggtcagccatccctcgcattgagcacactctcatagttaggccacagcaacctggggactctggccctggcccttt

SEQ ID NO: 37832 - DNA, 122 bp, Homo sapiens
ctctcccaattactatcgcttgaaaaataccggatatttcattattatcctgtccggagtcggcaaactacggtctactatctgtcttcgtatacgtcaaaagctaagaatggtttttacat

SEQ ID NO: 37833 - DNA, 122 bp, Homo sapiens
cttggtctgtctcagtctagagaacactaggtggaggaaagttgtgactggcaatgaaaacgccatgtggaggatgctgtcgtcattctctaagtattggagaatagatattctccaatatt

SEQ ID NO: 37834 - DNA, 122 bp, Homo sapiens
ttgggataggaggcagccgctgtgagtgggagtgtgtgagcggaaatgccaggacagcaccgttaggtgttgatatccaggcgtccgcagtgcctgtgtatttactctcttcttagtttcgt

SEQ ID NO: 37835 - DNA, 122 bp, Homo sapiens
cctgggcttctccattttttatgggctcacttagcttggaggaaatccagaggtcaaagccggcgcagacgctccagtcaccttgcccgtccgggcgcgcagccattccgaaacgggctcac

SEQ ID NO: 37836 - DNA, 122 bp, Homo sapiens
acttaccctaggttccactgctcatagggctcaaactcaggagtgctagaagtcaggcctcgggcttgtctctctcttgctgtctaggtttggtgaaggaagctcaggttcttaaatgaatc

SEQ ID NO: 37837 - DNA, 122 bp, Homo sapiens
tcctgacgtcattggcgcgtgccccggtttcaaaagctcgggggcgggcttctgagttcgcgcatgcgcctctgtgcgtttgtcccatgctggttccgtgagtctggccttaggtgtctcgt

SEQ ID NO: 37838 - DNA, 122 bp, Homo sapiens
tgtaggaaaggtggcgtggagaggcgaccctagcgtggccgggagcgtgtttccaagttgcggcgagcatcctctttgggggaggggcgggaaaggaaaggaggggagggggacggacgcgg

SEQ ID NO: 37839 - DNA, 122 bp, Homo sapiens
gtggcattttcatttttttcatctgattcccaccaatcagaggccaggtacccatgaacccggctcggcgtggtcttttaataattaaatcagggctgccattgacctcaactaacgccagg

SEQ ID NO: 37840 - DNA, 122 bp, Homo sapiens
gggagaatgatttccaagggtctggaacctgcccttcctaacttccagatgattcataaacgttaaggagcactgtggcagagaagaggggaggacttggccatgaccatgttccttctcaa

SEQ ID NO: 37841 - DNA, 122 bp, Homo sapiens
cttggatctcctggagacaggccctgcgaaggagctgggctgggagcaggtttatcagggcgtgatcttaggaggcagatgtaggaggtgaggaaggcagggtgtgtagagtgcagctgacc

SEQ ID NO: 37842 - DNA, 122 bp, Homo sapiens
atgtggtcctagcaagcgagaactccctctctaaagaaaaagacagatgctcatgactgacggtgccataagacacacacttggatagacatgagcagagaggagtgtgtgctgagtaagag

SEQ ID NO: 37843 - DNA, 122 bp, Homo sapiens
gggcggcgagcgggcttgtgtgtctgcgtgtcggggtgggggcttcctcggctcccaccccgtccctctgggaggctgggggcccgttgtggcgatcccggggcccgccgaaggcagggcag

SEQ ID NO: 37844 - DNA, 122 bp, Homo sapiens
ggagcaccatgagaactacgccagggcgtgtggatgccagcttgccccaagaatgggcagcgccagccatccgcccacctggagcaccatgagaactacaccggggcgtgtggatgccagct

SEQ ID NO: 37845 - DNA, 122 bp, Homo sapiens
cttcttagcatcgtgcttcctgagcaagcctggcattgcctcacagaccttcctcagagccgctttcagaaaagcaaggtaagcagggacggggacattcccagggtcttgggtcgcacact

SEQ ID NO: 37846 - DNA, 122 bp, Homo sapiens
tgtgtgaggggcggggattggacccggaggggcgtgtctggactgccggcggaagtggaacgcggcctgacctgcgacggaaagccactgcaagcccggaggcgaacagaaggcattccgcg

SEQ ID NO: 37847 - DNA, 122 bp, Homo sapiens
ttcacgcgattctcctgcctcagcctccagagtagctgggattacaggcgtgcaccaccacgaccagctaatttttgtattattagtagagacgggatttgaccatgttggccaggctggac

SEQ ID NO: 37848 - DNA, 122 bp, Homo sapiens
cgacaatgatacagtcaagatacagcacatttcatcaccacaaaaacccctcgggttgtccgttcacagccacgattcctcctgtgcgtctccgtaactcacggcagccatccacaggctgt

SEQ ID NO: 37849 - DNA, 122 bp, Homo sapiens
tactcgagaggctgagatgggaggatcggttgagcctgggagttccacgctgtagtcatccgtgattgcaccactgcactgcaggctgggcaacaggaagaccctgtcttaaaaattagaag

SEQ ID NO: 37850 - DNA, 122 bp, Homo sapiens
tggggcaacagcctacctggtccttcttgagagtgatctgccctatctcgcggttccccacgaaggatctcgtcacgcggtgcacacgttctccagcccggacccgaatgatgaagtttgga

SEQ ID NO: 37851 - DNA, 122 bp, Homo sapiens
accgcccgagtggctgcggacctcacctcgacgccctggatagccggggccaggaggagacgagcaggcagtctcccgccctcacctagtcagctgcgacctccgcggcgtggactcttggc

SEQ ID NO: 37852 - DNA, 122 bp, Homo sapiens
gtgaaggggcgtgaactttgttgacctagggagattgaaggagaacctcatcaactcacacgtgaggaatttaagaggatgaatctgtgtatccccttgtgcaggcactcacactcacagat

SEQ ID NO: 37853 - DNA, 122 bp, Homo sapiens
gaggctttggttctctgaccattgacaacagagaacagacctttccaatgagttttaatccgtcaggtgtggggcaggcgtgggggttagaggaaaaactagaagagagtggtttattgctg

SEQ ID NO: 37854 - DNA, 122 bp, Homo sapiens
cacccccagcctggtacgtaccgatgaggcggcggcgggccggccctgggctggggtcgccgcccctgcactcaggtaacaagctctgggtggtgcagctcggacgcttccgtttcctaact

SEQ ID NO: 37855 - DNA, 122 bp, Homo sapiens
tggcttgacaagcaggctccccttatttcccattatgggcacttctggggagcaaaaggccgtaaagggtttggactgtaccacgttcttcggtggggaggaactcgactcacccaggagct

SEQ ID NO: 37856 - DNA, 122 bp, Homo sapiens
aatacatcagtttggggacatctttatgataggaaatcttctaatcctcgtatgtctttccgcttatttgagtcttttttcttttctttttttttttttttttactttggagacagtgcctt

SEQ ID NO: 37857 - DNA, 122 bp, Homo sapiens
gacgttcccgggggttgccaggcggcagcgtaactttccacgaaaaggcggctctcggatcgctcccggagcgtgtgaaaactgtggcccccggagctggctggaggaccacggggcagctg

SEQ ID NO: 37858 - DNA, 122 bp, Homo sapiens
gccaggcccgcgctggttgtggaggagagccaggtcagatgcgggaagacaaccggactccgccaggaccaccccagcccagcctggagaggagtccggacagaaaaaggagacagaggggc

SEQ ID NO: 37859 - DNA, 122 bp, Homo sapiens
catagataaaatgttactcttccagggtgcacacaagaggcaatgaagcccagggaattacggtaaaaaaagacacagtggacacaatctaaaaaaaatagatagttcccatttggacactt

SEQ ID NO: 37860 - DNA, 122 bp, Homo sapiens
ggctacccacccccacctcagcaacgcctcccagaacgctccaaagctttctcaagtccccgctcccaggttagggccctgtagccagttccaaggtctttttcaggagcgcgcttcccaaa

SEQ ID NO: 37861 - DNA, 122 bp, Homo sapiens
gcctcaagcgatcctccggtctggggcccccacagtgctgggattacaagcgtgagccaccgcgcccggccaaggaagtcttaatgtacctcttttcagacaggaaaactaaagtgtagcgc

SEQ ID NO: 37862 - DNA, 122 bp, Homo sapiens
ccttagcggagaagatcctccaggctaaggtccaaggcccatctcccttggggttgtggccgcccacctcctccccgccaccctgggctttggctttgtcctcaaccacgccccgggagtgc

SEQ ID NO: 37863 - DNA, 122 bp, Homo sapiens
gggccccggcgggctcaggcgaggctggaaggcgagccgagaggccgagcggcccggggccggcagcgccgccaccacctcaatgcagttgccgccgcctcagcagcagcagctcctcgaac

SEQ ID NO: 37864 - DNA, 122 bp, Homo sapiens
cttctgaggcttgtaaaagccttggcaggtgtttaacctattctattgtggagcctcacacgagagtgaaagccacctgcttatccaacagtctctgtggccaagggggttaattgaactta

SEQ ID NO: 37865 - DNA, 122 bp, Homo sapiens
ccctcccgccgtcctggttccagaccgcctctctcaggctgccggggagggggcacatcgcgccctccccgagaccctcggctccccgctttacccacgcgcgcgcctcctcgtggggagcg

SEQ ID NO: 37866 - DNA, 122 bp, Homo sapiens
cgcaggctcgttggggttgatcctggcagctgtcgtggaggtgggggcactgctgggcaacggcgcgctgctggtcgtggtgctgcgcacgccgggactgcgcgacgcgctctacctggcgc

SEQ ID NO: 37867 - DNA, 122 bp, Homo sapiens
gtcctgggtcccccttgctccctgtggccagtgtagatgggaggtgcagagggtgctgcccgcgaggttcctgagtctttctctgtgcacagatgagaggcaggtgagctcctgggccgagg

SEQ ID NO: 37868 - DNA, 122 bp, Homo sapiens
cagcggcttgggtttgccccccacagccttggatcttgaccttgggagaggcctccaccacgtgccctggggtggggtgggggcgggggcgtcctgcatctgcgccgttcagctcagttgcc

SEQ ID NO: 37869 - DNA, 122 bp, Homo sapiens
caataggcctccatattctaagtgatttcatatcactgttacattccataggctgaattacgctccttcatttagcctctttcttacaagaccaatttctggcattaaaatcatgtttctag

SEQ ID NO: 37870 - DNA, 122 bp, Homo sapiens
agagtaaatgacactacaatacagtgctgggctcacagctccggaaatgctcataggctccggaaatgctcagtcaccttctctgttagtcaccttgttccatcaagcagcattttttcctc

SEQ ID NO: 37871 - DNA, 122 bp, Homo sapiens
tacgttaaagctataaagttttccaaatgattttaaaagcacttctagttttcctagggccgcctagtaaagacaactggttctaaatacagtttctaactggaccagtgagtaagggagtt

SEQ ID NO: 37872 - DNA, 122 bp, Homo sapiens
caagtcaactgttgcaagatcataacccatttttcaataacaaggagagtagttgcatcccggagagcctaataagtctagcgtaaattcctccagtttccatggggctgaggaagccaccg

SEQ ID NO: 37873 - DNA, 122 bp, Homo sapiens
tctaaggagccagtggtgaaaccagagaggctttgggtttgtcaaatccccagcagcaaacgtaacctcgggccctggagtggcaaagccgtggactagaggtggagggagtgggttctcag

SEQ ID NO: 37874 - DNA, 122 bp, Homo sapiens
tatctgtgtcctggctggctttcaatgcatgtatccttaagtcatctgcctctacaaattcgtacaaaccactcgttcccctctcatccctagcatgttcccctagtggctgctctgaattc

SEQ ID NO: 37875 - DNA, 122 bp, Homo sapiens
cagcctccccgcgtcttgccccatcttccttgccctcctgctcgtagagacgcctccacccggtcctgcctgtctcactggtcccgtctcctcgcagaaccctctccgtttcccccaaatcc

SEQ ID NO: 37876 - DNA, 122 bp, Homo sapiens
gcgagggaccgagtctgggagagccttccgagtccggcctcctgccttcccgccatgggacggctcgccccaatcccgcgaggctcctgcgcctccgcaacccaggcccgcacccctttccc

SEQ ID NO: 37877 - DNA, 122 bp, Homo sapiens
gcgcagctgtcgactcggtcgcgcggagggaattgagcgacggttttggaacggtggtggcggctcggctactgctcgtggaggggaatacaggttgtcaatttatacgctattaatgccgc

SEQ ID NO: 37878 - DNA, 122 bp, Homo sapiens
accatttcctgttctctctctcttttttttctcctctgtttggtcagtgtggtaattcttcggctgttttctctgccaacagtggatgtgcttggcaactgcggtgcagttatagggaagct

SEQ ID NO: 37879 - DNA, 122 bp, Homo sapiens
cttttcaatggcacaggcagaatggcatcaaatggcctgtttctgactccactgcctccacgctgctgtgggtggcctgggcctgctactttcaccatctcatcccttgtggagcttacatc

SEQ ID NO: 37880 - DNA, 122 bp, Homo sapiens
atatatggataacttcccactacggataatgagaatctttttttctccctgcaacacacacgcacacactcctacacatccccaaagacactaaagcctataggaaattctaaatattttgg

SEQ ID NO: 37881 - DNA, 122 bp, Homo sapiens
ccacagcctgtggcactggggtgagaagtaactgcaggaggcgaggggaagcctggagcccgggaagtgtccacaggtctggcccgcagctcatcttggccactgatgaaaacaggtgttct

SEQ ID NO: 37882 - DNA, 122 bp, Homo sapiens
agaaatgccacatgtttgggatcatgggcatcctaatgaccctcatttcatcattacacacggtatatgtgtattaaagtgtcacacataccccataaacaatggcatatgtgtatcaaagt

SEQ ID NO: 37883 - DNA, 122 bp, Homo sapiens
aaaataataaataaaaagttgattcttacaaagtcagcacagttgtcacttgattctactcggatgcctctctaggtgctagaaactgcttttttcacatgtgggcaagtacagaggatttg

SEQ ID NO: 37884 - DNA, 122 bp, Homo sapiens
tgcgggtggggcggggcctgaattagcgggagcgcccgggaggggcggggccggggcctgcgtgagcgggtcggggagggggcggagcctgcggggggcggggcctgcgtgaatggggcggg

SEQ ID NO: 37885 - DNA, 122 bp, Homo sapiens
aatgcctctggtctccctctttttaatctcagaggcatgctttattctagaaattctatacgattgttatcctaactaattgaaaataaaaattaaagttgagttggctttttttgtgtgtg

SEQ ID NO: 37886 - DNA, 122 bp, Homo sapiens
ccgtgcagggaactgacggagattaaccgtcggcacatcactgagtcagtcaactccatccgtcgggtgagtcaggctcccgggccaccctaccccacctcccttccttcactcatcagaca

SEQ ID NO: 37887 - DNA, 122 bp, Homo sapiens
caggccggctcggagtccacccttcgatcccgcgctcctgtcccaacttttctcccggggcgagatccctccgaccatgggcgtcctcccaaggcctttgtcgctgcccctgtcccagactt

SEQ ID NO: 37888 - DNA, 122 bp, Homo sapiens
agaacgggtgctggaagtagttggcgtagctgacagtcaggccactcgagccgcagctgccgctgcagccacaggacgtgcacacaatgcagcctggcgggggtggggcgggctgcgggggt

SEQ ID NO: 37889 - DNA, 122 bp, Homo sapiens
atagctttggggaggagctggagatcccacgattctaacaacctgacctgtgagacctgacgctgccagttcacagactgcaccttgagcagctttatgcttgagaagctacacaaatattt

SEQ ID NO: 37890 - DNA, 122 bp, Homo sapiens
tcccctgggacacttcctgctccgctctaggactggggaggtctccgcatctcagtggttcgctcccccgccccccggccgaggtgtgcgctgggggtgacatccgacacccccggcccgcc

SEQ ID NO: 37891 - DNA, 122 bp, Homo sapiens
accttggccctgttggaggccactcccctttacacagaaggccaagcaaactgcaggctccgccctcttccccgcccaagtcacaacccacgccccttgcccccgcgtctcctaccaggcct

SEQ ID NO: 37892 - DNA, 122 bp, Homo sapiens
atccatccccatctgtggcggcctttcctccaaccattcccaataaaaccaaacaaaagccggatggagggaggcgtcagctggctgaggaagacccttaccagcgccagcagccccgccgt

SEQ ID NO: 37893 - DNA, 122 bp, Homo sapiens
gggttaataatgtatccggtcccgaccagatcagcttgagggctcctgtcggacgagccccggcctctgacttgcttatatagggctcaggggctatataaagctgcacggtcatcctcccc

SEQ ID NO: 37894 - DNA, 122 bp, Homo sapiens
ggtgatccgcccgcctcggcctcccaaagtgctgggattacaggcgtgagccactgcacccggcccaacaaatgttttagaaagccatctggatgatagtccatgactgctgaacaccggct

SEQ ID NO: 37895 - DNA, 122 bp, Homo sapiens
ggtctgggtttcccagcctccagaggtaggaacgccaaccatcctgggatggtaggtggccgctaggcccagatggactgcatccagacctgctgagtgaatgaatgcctttcttctgtaaa

SEQ ID NO: 37896 - DNA, 122 bp, Homo sapiens
gagaacaaccgctacatcgtcatcgacgggctgcgggagctcaaacgcctcaaggtgctgcggctcaagagcaacctaagcaagctgccacaggtggtcacagatgtgggcgtgcacctgca

SEQ ID NO: 37897 - DNA, 122 bp, Homo sapiens
tacggtcacagtaatatttggagttttatgtttgttgtagaacaaatacgcatacaatcgcgatttcattcaacaaggaatttaaagagacctgctgccccgggcgggatgggagcgcgggt

SEQ ID NO: 37898 - DNA, 122 bp, Homo sapiens
cacttggcaggacgtgggatcttggcacagcccagtgcccgctgtgctccaggtgccagacgtggcactcctgctggcagcctccttggccacttctccctgaatgttagtgccagctgtgc

SEQ ID NO: 37899 - DNA, 122 bp, Homo sapiens
ctgacctcaggcaggggcagagctttggccacccatggggtggccccctcttggatggctcggggaggtccttacccgagtcgcttgggctctcggacccggagcaggcctgggtcttgggt

SEQ ID NO: 37900 - DNA, 122 bp, Homo sapiens
aggagtcaagtaccctccattctacctgagccacccccacctccactgctcaacacagcacggggacttcagtctccacgaccagagaggggccacttccctggtgcacaggaatgtacggg

SEQ ID NO: 37901 - DNA, 122 bp, Homo sapiens
aaacgctctttgaaagccgggattgttggtccccaaaagcagcttccaatgtttgctgtccggatgataaacagagtcaggcagccacgccaaagacttgaggccagtctctcagctgtggg

SEQ ID NO: 37902 - DNA, 122 bp, Homo sapiens
aaaggaggcgggcagaaaactggagcccaagctggatacacacctcctttcctacctgaacgccgtgagagccaatccgcgggcagctctaatgtcgcgtgactaggaaacaggccccgccc

SEQ ID NO: 37903 - DNA, 122 bp, Homo sapiens
gggtccagctggggacatggctggagtgagatcctgcgcgtgggtcagcgggaggccgggcggcagcgggatcacctggcagtccctgaggatgatgggctggggcggctttgggaagcgcg

SEQ ID NO: 37904 - DNA, 122 bp, Homo sapiens
tgctgagggtggagacccacgagccgaggcctcctgcagtgttctgcacagcaaaccgcacgctatggctgacagccgggatcccgccagcgaccagatgcagcactggaaggagcagcggg

SEQ ID NO: 37905 - DNA, 122 bp, Homo sapiens
ttaactcactagcatccccactgactatattctgttttgctttatctgctcaagcactttcgaccatattttattttaggatttttatttttatcttccacagctggatattgctatttcac

SEQ ID NO: 37906 - DNA, 122 bp, Homo sapiens
tcccaaggaagcaagcagagagcccacgcgtgctgccaagaagggacggcagccctcaaacgacacgattccacacagacagatccgcgcaaaactgctctgagaattgctggggtcccgcc

SEQ ID NO: 37907 - DNA, 122 bp, Homo sapiens
catccatgcccagctggaaccaacatattgtgctgctgcatctgtgtttctggctagaaacgtggcagtgtttccgtcttcctctatcagttaccacagggaacccccgcgagagtgtggct

SEQ ID NO: 37908 - DNA, 122 bp, Homo sapiens
gggcgctggggtagtgcacgcgcatgacggtgtcgaacacgttggcgatggtgttagcatcgcccttcttggagctggggtccccggcgcctgtgtccaggatggtgcctccgtgcagcacc

SEQ ID NO: 37909 - DNA, 122 bp, Homo sapiens
accgcccctttggtaccagttttagttttgtcccgaggcagattgtaaacctttttgcttcgttttcgtttcatcaaacgttgcattggatttctgtatccgaaacgtggtgtgagctttca

SEQ ID NO: 37910 - DNA, 122 bp, Homo sapiens
aaaatccaggccgtctcatacccacagcatttccccgactgctgcgtgctagtgctggaccgtgagtgaccagagaaaccactgcattaaaatatgggggtcactccccctgcagtgtgtgt

SEQ ID NO: 37911 - DNA, 122 bp, Homo sapiens
gaggaagccaacgtcctctttgatggcgtgagccgaaccagagaagcagccctcgacgcccggtttcttgttatggcttctgatttgggtaaagaaaaggcaaagcagttaaactcagatat

SEQ ID NO: 37912 - DNA, 122 bp, Homo sapiens
ctcttgcgttgctcctcgcattgcctgttggagcgcagcagaggtgtgtggctacgggaacgttacttaaaatggatctttttgatcatgcgttccacagatcttgagcatctactgtatgt

SEQ ID NO: 37913 - DNA, 122 bp, Homo sapiens
gtgaatttacatattaataagaaacacatttaaaccttgccctgccacagaattattttgcgggggggggggggggggggaagatgtactttttgaatatgtgtacatcaaaaccaaaaagt

SEQ ID NO: 37914 - DNA, 122 bp, Homo sapiens
tcgcagcgggcgcgctgtcagacctcagtctggcggctgcattgctgggcgcgccgctctcgtctgatccctgctggggacggttgcccgggcaggatcctttacgatcccttctcggtttc

SEQ ID NO: 37915 - DNA, 122 bp, Homo sapiens
ggctggccgaaggcgacgggcccctggagccacagcctgcagtgggggtgccgtggagagcgggtgaccttcgctcgctcagctctgagtgctcaggtggcaccagaggcggcacgggctcc

SEQ ID NO: 37916 - DNA, 122 bp, Homo sapiens
caatggaacaagcatggctagtgagtcctcactgctgaggattccatgaggaattgttaccgtgtgtggccagggtgccaaggacatctaggactcctgatccctacgtttcttttttcctc

SEQ ID NO: 37917 - DNA, 122 bp, Homo sapiens
ccaatcagtggtgctagcgtgaaaactgcccaatcaggtgcgcagctagagaggaagaggcgggctcttcaatatggcaaggccttcgtctcctagcttctaggctctgagtccagtacccg

SEQ ID NO: 37918 - DNA, 122 bp, Homo sapiens
gtgcctcagtgtctgttttgtatttaactctgccccacatataacaccacaagacctgtccgtggttttgctgttagagaatggttaatatctaaagagggtgggtgccctcaccaagcacc

SEQ ID NO: 37919 - DNA, 122 bp, Homo sapiens
ctcacctcccgcagcagcaacagtgcccggggtcccgcagcgtaagttctgccggcaagtcggatcccctcacaggtccgccgctgcgttcatacacaagcgacttccgttccgccgctact

SEQ ID NO: 37920 - DNA, 122 bp, Homo sapiens
agtcagcggtgaccacctcttggcttctgttcccaagggtgacagtgtcctggggtcacacgggctcaaaccgaggtcgatttccgaacgctcactttggagcaggatgcgagcccgggcca

SEQ ID NO: 37921 - DNA, 122 bp, Homo sapiens
gctaagaaatacgggtaggtcaggaaaccactaaaatgttgctgccttttagcaatggttcgtgaaactgaattaattgatttttccgtcactgctttcattcttttctgagtttcaaggag

SEQ ID NO: 37922 - DNA, 122 bp, Homo sapiens
cgccgcgagaaggaggggcggagagccggggtaaccgtggagggcgacgcgcagaggctgcggctatttaggcgtggtcgccggcgcgcatgcgcaggctgcgcggcccgtcgtccccgcca

SEQ ID NO: 37923 - DNA, 122 bp, Homo sapiens
tggggagagagacaaacagggatatacaaagataagtggggggccgggcgccatggcttacgcctgtaatcccagcactttgggaggccgaggcaggtggatcaccaggttaggagtgtgag

SEQ ID NO: 37924 - DNA, 122 bp, Homo sapiens
ggtgcgtggggaggtggcagggcccagctttctcagcagcccgtggtcgtgccccagcgacgtggtgagtgaccaagctgcgttttaacgctttgtcgtgtctttcctagtgtcggagatgt

SEQ ID NO: 37925 - DNA, 122 bp, Homo sapiens
cacccaggccttcacccagactttaccacggaggcggctgagtgcagctacagctaggtccgcgtccctcactcttttcatcttctgcacgttcttcgtgaaactggaaggatcccgggtct

SEQ ID NO: 37926 - DNA, 122 bp, Homo sapiens
gccaatgcggagctgggtctggcgcggcaggaaggcgggactgccagtggggcgccggggcggggcggagagccgagcgccaacccgctagcgcctgaatccggcgtgctgcccgctcgccg

SEQ ID NO: 37927 - DNA, 122 bp, Homo sapiens
acctggaagccggagaaggggggcggggggacttttgacacagatggggaagggcggaggcgctgggtttgagcagcatcagcccagaaatgcagaactgccaaaagaaacccccctaaaag

SEQ ID NO: 37928 - DNA, 122 bp, Homo sapiens
catttgcaacttgaggggtgctaccggcatctagtgagtagagtgctgggtgctgctaaacgtcctgtagttctccggatagcccccacggcaaagaatttctcggcccacactgcaaatag

SEQ ID NO: 37929 - DNA, 122 bp, Homo sapiens
tgcagagcccagcaaaactgggcaagacaggcctgcacccctcaggagggctgtgtctaccgtggtagtacagctgagcggcctgatttcagcatttttaaacaaagcctccagatggactt

SEQ ID NO: 37930 - DNA, 122 bp, Homo sapiens
ggcggggcggacgcagcgtccgctgggcggtgggaagaaccccaggcatctgagtcaagacgcctaagttctatttgtagtgtaaccactgattcagcctgtaattattgataattattcat

SEQ ID NO: 37931 - DNA, 122 bp, Homo sapiens
cgtctaggctgctatatggcaagcactaaaccactatgcttactgagatggggttttcctcgcagaacgcctttatgcagaagtacactcagaagaagccttgtttttacaggcgacctgtt

SEQ ID NO: 37932 - DNA, 122 bp, Homo sapiens
tggcgcggcgcggggtaagtggcggtccccacggggcaagtggcggtccccacggggcagcggcctagagaggcggaccccgcagtgtccgggtcccgggccctcacccgcgcccactgcaa

SEQ ID NO: 37933 - DNA, 122 bp, Homo sapiens
ggccaaaaggaacaaggcgaggattgggcggggccagagggaaataggggcggggctaggcgccgggagcttccacatgcgtcccgagcccgccagaagctgctaggctgaggctgctgtcc

SEQ ID NO: 37934 - DNA, 122 bp, Homo sapiens
gtgctcagtcctgggcctaacgtgagggagccacggcttgaacctggcaccacgtgacagcggcccgcggtctgttacaccaacggctttacagggtgagagctctgcctcaccgtgtgcga

SEQ ID NO: 37935 - DNA, 122 bp, Homo sapiens
agacccaaacagcaacaaaggagcctggagacacctctggtccgcgggcagcgcccccatcgcccaccatcaaccaggcaaagcccagcgtgtctccatggagatggcagcaggacccgacc

SEQ ID NO: 37936 - DNA, 122 bp, Homo sapiens
cctgacctgtggagaactgtgaaaagagctgccccaggcccagtttggagcagacctgaccgtcctgttgctttggcttcagggatgccctttaatttcaagctcctggcttgctgtttgga

SEQ ID NO: 37937 - DNA, 122 bp, Homo sapiens
agatgcatgggtgccagccattgggaaaaaccacctaaaaagcttcctggggggcaaagacgaacaaaaagttgacaaactttggtttagcctattcccaccaatcctccaggaatcagccc

SEQ ID NO: 37938 - DNA, 122 bp, Homo sapiens
ttgcaatagctgtttgccagtacattcgagtatgtttggattgtcttctgcgtgtatgttcgttgtttcatttctgtaggaaatgaagtttctgaaagctgctaatttggggcagtaattga

SEQ ID NO: 37939 - DNA, 122 bp, Homo sapiens
tacctctctggctcccggtcaactcatcccgactctttagcccgcccgaggtttcctccccggagtgactccactgccctggtccctggggtcctcctggaccgttctggaagggcccccgc

SEQ ID NO: 37940 - DNA, 122 bp, Homo sapiens
tcggccagctgctccatgaccttaaacacctcatccaggttcaggaacatggagaagtcacgctccttattctgcgtggtgattcggatggtatccgtcagaaagacattggacgttctttc

SEQ ID NO: 37941 - DNA, 122 bp, Homo sapiens
cgcaccgctggagggtgcattgacaccgccctggtcgcctagcctaggagaacgccgtcccggggacacctgccgtgaggtcctaccagaaagcaaatcagggtgaggaagagggttgttct

SEQ ID NO: 37942 - DNA, 122 bp, Homo sapiens
gaggcagtggcgcggcagggcggggccggccagagcgaaccggctccggctccggggccgcgcccagggcgctccgctgggcacagcaagttcttggctgcttccccggccggaggaggcgg

SEQ ID NO: 37943 - DNA, 122 bp, Homo sapiens
tgagcccagcagacattgcgttggcctccgagcagggcgcatcatgcagcgttcgcgcaccggagagaaaactgagaatgaaattgctttggcaagctaaaatggtaacgagagctctctgc

SEQ ID NO: 37944 - DNA, 122 bp, Homo sapiens
ttggcattgctgtcccgttccagccaactggctaacggtgccgagtttgaatcagtgacccgcctcctggtccctcctccttagccggcctctctccctccctccttttttccctccctcgg

SEQ ID NO: 37945 - DNA, 122 bp, Homo sapiens
ggcggtcagccccccaacccggccagccgccccgtccgggaggtgaggggcgcctctgcccggcggcccttactgggaggtgaggagcccctctgcccggccaccaccccgtctgggaggtg

SEQ ID NO: 37946 - DNA, 122 bp, Homo sapiens
acaccagcggcctctcctccgcagccgccgcctcctcctccagctgcgccctctccatgtcggccaccgacgcgtcttcgctcatggagctccacatgctcgcccacttctgcaacagctgg

SEQ ID NO: 37947 - DNA, 122 bp, Homo sapiens
gtcacaggcacatcagcaaagaggtacagtcgaggcatgggcttgggttgcatcctttgccgggaccgagattcctcacttcttccactcttccgagagttgctgtctgtggactgccgtct

SEQ ID NO: 37948 - DNA, 122 bp, Homo sapiens
gaggtgctgccccctcctccgctggagccggagcccaggccagagccgccctgctctcgccgggagtcgaaaaacttcttcatcttgcgaatagggagcagcaaagcaaaataccgatggtt

SEQ ID NO: 37949 - DNA, 122 bp, Homo sapiens
gagtataatattaactctatggcatggaaaccatttcacccacaacacaagtaagataaccgcactaagattaaaagcaatgagcgcagtacagagataggaggaccacatctctctcagca

SEQ ID NO: 37950 - DNA, 122 bp, Homo sapiens
tgtgagagcgcccggcgctgcccagaagagctggaacgcccaaggaaggccgctgctcagcgcaggacccctgggctcccggaaacgggatagcgttgcttatctttaaggtaggcttggga

SEQ ID NO: 37951 - DNA, 122 bp, Homo sapiens
gccggcgaggggcgggcgctgcagtgcacgccgggggatgtagtttggctcggacgagagcgtctcgtcccggggtcgcgcgttgctccgggtgccaggttcagcccgcgcggcgacagcgg

SEQ ID NO: 37952 - DNA, 122 bp, Homo sapiens
cgagaacacgaatcccactgcccagtcaaccactgttagcattttgttgcatttcttccacgtttttcttttctgtatacttttagcatacttatatgcatataaattttatatattttaac

SEQ ID NO: 37953 - DNA, 122 bp, Homo sapiens
ccacagcatccccgacgctgctgccgcctcccgccgctccaacatggctcccggccgccccgatggttcgctccacctctgccccggcgcccgaaacacggtggtacaacccatcgcgcatg

SEQ ID NO: 37954 - DNA, 122 bp, Homo sapiens
ggaagttggccagcctcggctgcaggacaggtgcttccaggctccattaggggtgtccagcgccttcttttgccctaggcagcgccctgaagaacgcgtcggggcctcggttcgcggacttg

SEQ ID NO: 37955 - DNA, 122 bp, Homo sapiens
cgccccctgcggccgggaggaggacggcagccaggaaagatgaagagcgcgtgcagtccccgaagggtacaccctagggttcccccccacgcgaagtttctctccgcaatccgtgccaccta

SEQ ID NO: 37956 - DNA, 122 bp, Homo sapiens
tagctctttcccctcgcgcctcggggtctcctcgctccaaggttctcgaagtcttgcgcccgaaggactaaactaaactaaacttcggctgagtaatgggggaggaggggggtgcagataca

SEQ ID NO: 37957 - DNA, 122 bp, Homo sapiens
ctcaacccaaaggagcaggagatttcggtagcgttttaactttatctcagaatctgaaagcggaaggtaagctgcttatcactcagaaaaacaaatttgagaggagtgacctagtaaagtac

SEQ ID NO: 37958 - DNA, 122 bp, Homo sapiens
gactgaggcttgcctccgggatccccgagcgagtagtatgtctggttagtcaggctttgtcgcactgttggaaacgtttcctggttttcctggacctgagggtgagaaagggctatttggtc

SEQ ID NO: 37959 - DNA, 122 bp, Homo sapiens
ctacggaggttcactcaaaaagttaaaaacagaactaccagcccagtgttatccgtccttcgttaagttcaaagtcacggtgccacttcctttcccatctaaaggggactgctcgcgaccca

SEQ ID NO: 37960 - DNA, 122 bp, Homo sapiens
cgctgtcgagagagaggctgataacatttttttcaggttggtataaacgtggtctttctgcggcagtacaagaagcccatgggaaaacactgataaagctggcttggtgccaggaaggtttc

SEQ ID NO: 37961 - DNA, 122 bp, Homo sapiens
cagcaggcctcagattttgccggctgtgacccagaaggctgctctgggaggtgtatatcccgggattcggcctctgcacccaggaaaggtcactcaagggaggtgctctcaccatcagggag

SEQ ID NO: 37962 - DNA, 122 bp, Homo sapiens
aatagttcacagcataactgccttatacaatacataaaaagtgaaaactactccttccaacgcccatcccttatccaaatgattccagttctttctcttcaaaagaaaggagtaactggcaa

SEQ ID NO: 37963 - DNA, 122 bp, Homo sapiens
cacaagcccagctactcactaacatcacttttctgagacttcaattcttttcctccaaatcggggcaagaaatgcaagttaaaataaccatgaggtaccactctatgagactgaaacatgtt

SEQ ID NO: 37964 - DNA, 122 bp, Homo sapiens
ccaacccttctgtttcgcacctctctcccgagggctcctcctgggcagccagcaaacgcccgctcctcggcccgcccacccagctgcctgcaaaccccgggcctgccactccctgtagagcc

SEQ ID NO: 37965 - DNA, 122 bp, Homo sapiens
cagcagagaggagggccatcagaggggctggggcggcatcgccggaggcagggtgctgggcgcgtgcgcctgccaggcagagacagatggagagctgacactccggattgcacttggagcag

SEQ ID NO: 37966 - DNA, 122 bp, Homo sapiens
tttcacaaatggagaaaccgaggcccaggtggaacaaatgacttcaacatagtcacatggcgggaactcacagtacagctggggtcagaaggagcctggggagctgctcagctaggtcacct

SEQ ID NO: 37967 - DNA, 122 bp, Homo sapiens
cctggacactgccaacgtggaggcgctgcggctggctggtctggggctgcagcagctggacgaggggctcttcagccgcttgcgcaacctccacgacctggatgtgtccgacaaccagctgg

SEQ ID NO: 37968 - DNA, 122 bp, Homo sapiens
ctcaccaagccagccttagcattaacatttgtgtagtatttaccagttcacgaagtcctccgcatacactatctttgcagctgctagggtctgtgactgtgtctgtctacacatgagcaagg

SEQ ID NO: 37969 - DNA, 122 bp, Homo sapiens
ggcccgcagcacagagccccccagcacaggcacagggacccccccacagtacagggatcccgccagcacagagacctccagcacagggatgcccccagcacagggacccccagcacaggttc

SEQ ID NO: 37970 - DNA, 122 bp, Homo sapiens
cttccgtaggcctctaatatttccctctttacagaacactgacacacgctcagggctccccgggacatctttgtgcacatcaacatttatgctgagagtagcttctggactccaaagaggaa

SEQ ID NO: 37971 - DNA, 122 bp, Homo sapiens
cgtgaggtaggacagggagatcccaaagagccggccccaggcagccccgatgagcagggacgggatgaagaccccggcagacaccgtgagcccgtaggtccagcaggccaggaagaagtaga

SEQ ID NO: 37972 - DNA, 122 bp, Homo sapiens
cagctccgcggccccctgcgcctgggccctggcagactgaggggtccatgccgggctgcccgcggcttgcccccctggatgttgtgggctacgtgacgcgcctttactttcaatggcaaagc

SEQ ID NO: 37973 - DNA, 122 bp, Homo sapiens
cccttgtcgcgagacattatacgcgaggcgtgaactcattggtcaacccaaatgacaactcgccaactgattggctactctcacttcacctttgctccgcccctttccctggcactctcttc

SEQ ID NO: 37974 - DNA, 122 bp, Homo sapiens
ggcggaccgcgagtgacggcccagctgctgggcccaacgggcaggggtctgacatctggacggagtgggaaagcagcctcgcatcctgccctggggagtcgggaggagcccagttccatcca

SEQ ID NO: 37975 - DNA, 122 bp, Homo sapiens
tgtcatgctttaaagagatgtgcccaacctcccctggggcctactgagtggattgaaaaccgtgcataaacccattgtgtttcctcaggagtcaccaacgagatattatataacaacacata

SEQ ID NO: 37976 - DNA, 122 bp, Homo sapiens
tggtgacagatctgagaggctgacaggggccctggggatgggtcattctgctggcttaggcggtgaaaaaccatggggacatttccaagtctgcaggatgccttcctgctccaactgggtcc

SEQ ID NO: 37977 - DNA, 122 bp, Homo sapiens
aggaaatgcagaaggaccggccattgggcaatgggtttggggaacaccgggagaggcacacggacagcgaacagagggagggcccggcaagcactgactttcccgcagcacgaagagatccg

SEQ ID NO: 37978 - DNA, 122 bp, Homo sapiens
cttgtggccgaagggctgggactggccatgagattacatgtcctagcatgctcagccaggcgcgcgcagctctgccccttcctccagtgatgcgcacagtccctgatccctgtgcacgctgg

SEQ ID NO: 37979 - DNA, 122 bp, Homo sapiens
gcctcccgggctcaagcgattcacctgtctcaggctccggtgtagctgtgattacaggagcgcgccaccacggctaatttttgtatttttagtagagacgaagtttcaccatgttggccagg

SEQ ID NO: 37980 - DNA, 122 bp, Homo sapiens
tggggctttgagaaaccaatactgctcaggtgacagtccctctgagagtgtcacttcctccgcccacaggggcgcagacaccttctattttacacgtttctctccgtttctctgatgctgca

SEQ ID NO: 37981 - DNA, 122 bp, Homo sapiens
tggaaaacaaggctgtaggagcaccgggtaccctcttctcgtctctcagacacgagtgcacgtgtctacggctcctgatctgcctggcgggagctgatatgggggctggatgctggatttgc

SEQ ID NO: 37982 - DNA, 122 bp, Homo sapiens
ccccacggtgctggcgcttgaggtggcggcccaggctggagcgtgaggagaagcggagctcgcagaccaggcagcagtagggtttctcaccagtgtggacgacctaggggtgcgggaggaag

SEQ ID NO: 37983 - DNA, 122 bp, Homo sapiens
tccagatgtaggagtcctctgggcttggaccccaaataccctaaataccagccaggccaccgggagacctggggacgtgcaggaggcatgctggggactcccggcctcatcgagggcctgga

SEQ ID NO: 37984 - DNA, 122 bp, Homo sapiens
ccgcggggtttcgtggtcagagaggcgtctcctccatccagaagttgggccaccgcacagcgtggcgcgaggagagcggtccagcggctccgagtgcccgcccgaggcggagagggcgcgcc

SEQ ID NO: 37985 - DNA, 122 bp, Homo sapiens
aggaggcggtgtctgatttacgtggagcccagagattggttcgaccaggggtgacgtttacgtagcgcgcagggaaggctggtcaccccaccctaatcttgttatgcaaataggcttcccac

SEQ ID NO: 37986 - DNA, 122 bp, Homo sapiens
ccactccagaccaactggaccagaatttgcattttaaaagatcccttcctgggcaatgcacgtgaacatataaaaatcacgggaccagatctgtggctgtcaaacttgagtatgtattaaaa

SEQ ID NO: 37987 - DNA, 122 bp, Homo sapiens
gaacgatgaacgcctttccttccaccagctgctggttaccccggagacaagctctgtccgcggagaggagtgggacaactcctaaaggtagaatcagcttgtggagaggaaaggcccaacct

SEQ ID NO: 37988 - DNA, 122 bp, Homo sapiens
ctcaagtgatcctcctgcctctacctcccaaagtactaggattataggcatgatccactgcgtctggctagcactcctcaaagaacagtagcagtaagaataaaagggagttgaatgagtca

SEQ ID NO: 37989 - DNA, 122 bp, Homo sapiens
catggcaaaaccccatctctaccaaaaaaaaaaaaaaaaaattagccaagtgtggtggtgcgcacctgggtcccagatactcaggagggttatgtgggaggatcacttcagtccaggagcca

SEQ ID NO: 37990 - DNA, 122 bp, Homo sapiens
tgccatgctgtgtaaggcccccggcatctttcttgggcggccccagcctcgggcgcaaggcgagcaccctgatgagtttggcttcctgctggaccacgtgcaaacggcccgctccctcaacc

SEQ ID NO: 37991 - DNA, 122 bp, Homo sapiens
ccctcttgggggaacttaatgcccaaaacatcagagccaggcactggacaagcctttgtccgcctcacggctttaaccgtgctactcagcattcttgctgtgaccaagttttaccagggcaa

SEQ ID NO: 37992 - DNA, 122 bp, Homo sapiens
tgctagacctaatgctcctgtttgcctggggtcagaacaagatacagcaactagaggccacgcccacccggcagccacgccccctcgggaagaaagcacgcccaccaagcgctaccacgccc

SEQ ID NO: 37993 - DNA, 122 bp, Homo sapiens
gcaggctcccggcccagaaacgtcttccctctaagtcatgcctcggaggaatactcggcacgcccccgcccccgcccccacccccggcttcccgtagactctaactccatcctagccatcag

SEQ ID NO: 37994 - DNA, 122 bp, Homo sapiens
ctatttccccgagtctttgctgccgaagctgtgactgccgattcggaagtccttgaggagcgtcagaagcggcttccctacgtcccagagccctattacccggaatctggatgggaccgcct

SEQ ID NO: 37995 - DNA, 122 bp, Homo sapiens
ctgtttccctggggtccgtctattttcaggcggtggatgaggagggctgctcgctggctgcggctgaggctcggtcaccgtgtagagaggcccagggagagctgcttcactcaagtcctgtc

SEQ ID NO: 37996 - DNA, 122 bp, Homo sapiens
agccccccgcgcgcgttgtccggccgtcgccgtcacagcaggcgccgctcagcagctccccgttcacgttccgcagcgcgctcagctgcagctcgaaatagcccatgggccgcgccgcctaa

SEQ ID NO: 37997 - DNA, 122 bp, Homo sapiens
aggaggatggcactcagggtccgagccgccttcttctccttgaccagcgagaaggtcttccgcttggccagctgctcctttccacggggcttctggcccttgccagctcgatcacgcccttt

SEQ ID NO: 37998 - DNA, 122 bp, Homo sapiens
gcagagacaggctcctgggtaggtgatgactgggtgggctggcctgagaggcctgtagtccgcccacctccgtgcggctgctccgcactgagggctgtccgtgggccgaggcccgtgtgcgt

SEQ ID NO: 37999 - DNA, 122 bp, Homo sapiens
ccgcgccaggagcctggacccggcctcccggggctgcggcgccaccgagcccggcaaatgcgcacgacctacattaatttatgcagagacagctgtttgaattggaccccgccgccgacttg

SEQ ID NO: 38000 - DNA, 122 bp, Homo sapiens
ctggactccgcgggacgaagccacctccgccgacgcgtccaggaggccccacggcggcgccgctttcccaccccgccgccgcccccagcgccagcttctggcccaggaggcccagaaggccc

SEQ ID NO: 38001 - DNA, 122 bp, Homo sapiens
ggccgtctacacccgcgcctgggggagaaagcagggaagaaacggggggtgcatgagaaacgttttcatttgctccagggggaaaaatgtttctgcatcttctgatggaaagaaatctttac

SEQ ID NO: 38002 - DNA, 122 bp, Homo sapiens
gagtaagcgttgcctactcacaaggttgcaaactgtccttcacttacgattatcccccaacgccccctcctaaatctgatcaatcgcatggaacttgatggttacaaaagacagagctaaca

SEQ ID NO: 38003 - DNA, 122 bp, Homo sapiens
gtgagccaccacacccagacttgttttgcttttgaggcagcttttgagcaaaacaacagccggtctgttgcccaggctggagtacagtggtgcaatcacagatcacttcagcctcgaactcc

SEQ ID NO: 38004 - DNA, 122 bp, Homo sapiens
catttccccccattagaagataagctccatgagagataaacttcatcttgtctcattcaccgttatttccaaggatccaccatattaaaccatcaaatgagtagaaaacttagaaagtacag

SEQ ID NO: 38005 - DNA, 122 bp, Homo sapiens
gtttggaaaatagtgacatgtcagtacaaagggaatactgctctacaataagaaggaacacgccacagatacatagcatggatgaatgtcaaaaacattgtgagagaaaaatgcctgaacag

SEQ ID NO: 38006 - DNA, 122 bp, Homo sapiens
ttgtcgatgaaggaggcgaacttgttgttcagagccttgatctgctctcgctcctgggcacgcactttctggatctcggggtccagctccacgttgaggggggccaggaggctctcattgac

SEQ ID NO: 38007 - DNA, 122 bp, Homo sapiens
tggtcagacaactaggttgattccatgtcttggttattgtgaacagagctgcaataaacccggggctgcagatgactctgtgatataatgatttccattctgttggataaatgccccgtagt

SEQ ID NO: 38008 - DNA, 122 bp, Homo sapiens
cgagggccggcgtgggtgggcctgagccggggcccctgtgacctgagccttctgggtgaccgaggcctccggtgtcagcggggctgggggaggcacggccggttcctcccgctgagtgacct

SEQ ID NO: 38009 - DNA, 122 bp, Homo sapiens
aattgaccggaacaggaactatgagaaaatagtcgggcaaatgagaagtaagctcaaaagcgtaggctcaagagccatttcaagccgggctgcgccggaaattgaccagaacagggactatg

SEQ ID NO: 38010 - DNA, 122 bp, Homo sapiens
agtgtggcctcggccagggacccgggtgttccgcggggtctgccctggctggtcctgagccgccctgacagctgtgtcccccaccctgcagccgtcctgtttgagccaagccgccacgccgc

SEQ ID NO: 38011 - DNA, 122 bp, Homo sapiens
ctgggagcggctgccggagaggcggggcagaggtgtgacgtcatcgccgcggggcggaggcgacagtgtctagcgggagctccgcgtgtagctacgccggccgcctggctttgagacaacgt

SEQ ID NO: 38012 - DNA, 122 bp, Homo sapiens
ggcggctgttcttgcagttcaagtatcccgcgactattgaaatggaccaatgaaagcgctcgcggccttgacgtcattcaaggcgacagggtcgcaggcgagtgaagggtaaaccaaaggaa

SEQ ID NO: 38013 - DNA, 122 bp, Homo sapiens
accaaacgtctgcccaagggagggagggcgcggaacccacccatgggcaatgactcagcacgaatccactcttctgcttgctgacccctgacctctgactcgaagtcagggccctcagctgg

SEQ ID NO: 38014 - DNA, 122 bp, Homo sapiens
gaatcgtttttctcacctgcagggtgaagttatcttttctacaaccctggagggacacagcggcaccctgcaggctagacagaggcgctctgcgcagcacagcagagcctcatgctgtgcat

SEQ ID NO: 38015 - DNA, 122 bp, Homo sapiens
aaggactattttttctgagtaaatggtgattcctcttccatgtagcatctgcttggatcacggatgctaattataactggaaagggggtgttttggggagtgtattcaggaaaggaaaaaag

SEQ ID NO: 38016 - DNA, 122 bp, Homo sapiens
gcaggggagctggaggagctggaggaggagcgcgctgcctgccagggctgccgtgcccggcgcccatgggagctgttccagcatcgggccctgaggagacaggtgacaagcctcgtggttct

SEQ ID NO: 38017 - DNA, 122 bp, Homo sapiens
aaatggggcgggcgaggagtaaggaccccaaaaagcaggggtagggaagggccctcccagcgccccactgtaataggggcctcatcaatgccccatgctcactgaataaagcactgccagcg

SEQ ID NO: 38018 - DNA, 122 bp, Homo sapiens
cccagaacagccccgtgtttctcttttcagcgaatccactttctgttgccacccgtggaacgttctcactcttccaagaagccaggctagcagctcccccaccccagcagccgcgggacaga

SEQ ID NO: 38019 - DNA, 122 bp, Homo sapiens
ccaagtccaaggccaggtctcagtcggtgtcacccagcaagcaggcagcgccccggcccgcggcccccgcggcccactcggcgcactcagccagcgtctcccctgtggagagtcggggctcc

SEQ ID NO: 38020 - DNA, 122 bp, Homo sapiens
atgttttgaggctcatccacacacggcctgaatcagagttgcttcctttttactgcggggcggtgttccacggggcggacgggctaaatgttgtttactcatcccccagttgatggacgttc

SEQ ID NO: 38021 - DNA, 122 bp, Homo sapiens
gggagaggcggcttcaccggcgcgggcggcggcggccgcgctcctctcgctcctcagcagcggggaccgagagagggagctgtgtctgagaagacgccaaaatcccccttagcgctgcctgc

SEQ ID NO: 38022 - DNA, 122 bp, Homo sapiens
atgaaaacgtgaccttgcccttagttatgtcaaatacacatgtatgcatgcacagacatacgcaggaaaaatagctagaaaccagtgttgtgtatccagctgcctgttgctttctctgaaga

SEQ ID NO: 38023 - DNA, 122 bp, Homo sapiens
aaacgtcagtgcctcgatccaatttccatgtaaatacactgcctgcgaggtgcgtggactcgggagctctgacgtaaacgcgctgcctgcgaggtcggtggactcgggagctctgaggtaaa

SEQ ID NO: 38024 - DNA, 122 bp, Homo sapiens
gccgaccctgcctgagcgcgggagcctgaggaccgggtggaggcggtggggacccagccgcgcgccgggagcgctccccggaatgagccgccccacccaccccaaggctggagccgctgcac

SEQ ID NO: 38025 - DNA, 122 bp, Homo sapiens
gtcatgccagatgctcacaggagttctgtctggagagcactctccaatgacgctgggaaccgaccttcaagagcagtcagcactcgatgcacatgtggtccaaggagaatgtccccctgtca

SEQ ID NO: 38026 - DNA, 122 bp, Homo sapiens
ggagcccccttactgggggagggtccttgcaattccagcgaatcggaggccaggccaggacgtccttgctccctgcaccctcactgttctgtgcactttttctacctacataaacacacgca

SEQ ID NO: 38027 - DNA, 122 bp, Homo sapiens
aaaccatcctcacccagcccctttccatctgtggaaaaattatcttccacgaaactggttcgtggtatcaaaaaggttggggaccactgctctagacttaaagcatggtggggccagtattt

SEQ ID NO: 38028 - DNA, 122 bp, Homo sapiens
tcctctgctcagcgctgtcaggcagttgtcacagtcagatttgtctccacatcttaagcccgcccacaggaagtctctcatctgggggtgttgggcagtgcttcagcaggacaattcctccg

SEQ ID NO: 38029 - DNA, 122 bp, Homo sapiens
tctctcctctctctctctcctctcctctctgttttttcctttttctctttttaaacaagtcgtggacattttttaatcttgtggcatttttaatcaacacgtatttccttccaagacctatg

SEQ ID NO: 38030 - DNA, 122 bp, Homo sapiens
catttcactggagtgtactattaccagtaaaagggggtaaaaaattctgggaggccaaaacgacaaatgtccagcacaggcttctctccagagtagacatgctcaaggtgacctagctggga

SEQ ID NO: 38031 - DNA, 122 bp, Homo sapiens
tttttaaagggaaggtaagagattaagggactttccacctctttttccctgagaaatcagcggcgaggccaactgcagagccgtgagcgggacagaggctttgtgcaaggagtccaggagaa

SEQ ID NO: 38032 - DNA, 122 bp, Homo sapiens
aaggatatgctttttagaattaaaatttggcaaaacgaatcctgactctttttttccagtcggtcgtaaccaatgctcataaaatggggactgacttgactaatgaaaagagaaaggctttt

SEQ ID NO: 38033 - DNA, 122 bp, Homo sapiens
ctttagtagataaatatccacacatgctaggacctcaccactccacccaaaagaaacaaacgcttatgtgatgtgcagtagcatttaccagagccctagactggaaatagccaaatgtccat

SEQ ID NO: 38034 - DNA, 122 bp, Homo sapiens
cttccctccctccctgcctcccttctgtttaaccgatgttgagtgcctatgtgtcctaagcgctgttctagacactgtgtagagcagtcacgaatatacttccctgcccacacagagctcac

SEQ ID NO: 38035 - DNA, 122 bp, Homo sapiens
tttctgcatatttcccttccccggattcctgtagctcttaaagtgtgtccccaccccccacgcccaccatcagcatcacctggtaactgttagaaatacaagttattgggctccactgcaga

SEQ ID NO: 38036 - DNA, 122 bp, Homo sapiens
gctgctgctgccgtcgattctgtaacaggagaaagccccatccgcgcccggattacagaccgtctgggccctaaactcagggggagactcccggcgtcttttgattccctgtcctcctgcag

SEQ ID NO: 38037 - DNA, 122 bp, Homo sapiens
aggcctcgctgccccctccctgcctcctctggccctcctcagtgcccacgcaacccggttcgaaagagaggatgaccgtattctgcattttagaaaacaggctcttagcttcccccgccccc

SEQ ID NO: 38038 - DNA, 122 bp, Homo sapiens
tggcgtgctgtggtgcaggtggccgaagggggcgttactgttgcgactggcatccgcatccggcagatgtagatggaaccaaagtccagaagttacgcgtcacccttgctctacagccaaac

SEQ ID NO: 38039 - DNA, 122 bp, Homo sapiens
gcctctccgtgtggagcttcccacctgcatgtaccggctctctaacgtgcaaggcaggagcggcggcccagcgcccggcgttggccacctacaggtaggagcgcgggcccctccttcccccc

SEQ ID NO: 38040 - DNA, 122 bp, Homo sapiens
ggtgtggcgcacgcccaagctcacgctggatggacagggcagtcctggccctaccaacaccgctggttctgggatgtgtttctacagagagcagaaggctcaacttccctgggtactcaggc

SEQ ID NO: 38041 - DNA, 122 bp, Homo sapiens
aagcagcctccactagggggcttcggcgggaggattcccgggggcgtcgcctgcttccgccgccgcctccttcagtgaaagtcccttttgggtccagctgccacagccaccgcgctccctca

SEQ ID NO: 38042 - DNA, 122 bp, Homo sapiens
ggtgagccacccaccgacaagcagcggcaggcagctgtgacaacctgggactccagagaccggggaggaagtgccgatacccaaagcctgggaaccagactaggtgtgggacaccggaacca

SEQ ID NO: 38043 - DNA, 122 bp, Homo sapiens
cagcatcatcagacagaagcccgtcgacctcctgaagtacaatcaaaagggcctgacccgcgtctacccaaagggacaaagagttgactcttcaaactacgaccccttccgcctctggctgt

SEQ ID NO: 38044 - DNA, 122 bp, Homo sapiens
gatcagatgggcgcttgtgactgtgcgcgctccgactggatgtgtgtgtcctggacgagccgcgttgtgtgtacggatgtggacaaccagtgactgtgtggttcggactgcgtgtcccaggg

SEQ ID NO: 38045 - DNA, 122 bp, Homo sapiens
taagatattataagaattctcagtttcgccggaggtttactgtgtcggtgttcccttgcgcggcgtgaatctgagggcatcgtgttgaggagatgggggctgcggtgactcgcgggatcagg

SEQ ID NO: 38046 - DNA, 122 bp, Homo sapiens
gcccgggcgggattgctggggcccggcccgcgacgacgccgctgccatagcgatccgggccgggagcagttctgcgcatgctcctgcgtccccaaaggacggccatagagcggacgccacga

SEQ ID NO: 38047 - DNA, 122 bp, Homo sapiens
ctcttcccttgcgttcttctagtgtcttctaagggcttccatagttttggattgtatgaacgttactgtaaggaatctgggggaaaaaaagtgggtttcagaaaaccccctgggtcttagta

SEQ ID NO: 38048 - DNA, 122 bp, Homo sapiens
gtaggcgctcctcgttttgctcgccgatggccgcgatggtgccataggtgagcttgtcgtcggggatggcgtggcgccgcagccaaccgccgcaggcgaacgagtagaagtcctggcatggg

SEQ ID NO: 38049 - DNA, 122 bp, Homo sapiens
cctggcagtaatttggctctgaaaattggtgccacaggaacagctgagagctggcaaggccggcgcccccgtgggtcagcgtctgtcagtccgcattaagatatgcaaagccgaggcgcccg

SEQ ID NO: 38050 - DNA, 122 bp, Homo sapiens
tagcttccagagcggagccgggaggcaaattccaagcggttgtgggacccacgcctcacccggaactttaagccctgccgtctcgcctggcgcccaaactctgcggacctccactggccgcc

SEQ ID NO: 38051 - DNA, 122 bp, Homo sapiens
ccaaaatctggagtcagcctagatgtccttcaacgtggaaatggttaaacaaaccgtggtcgacccatacctttgaataccactcaagaatggcaaagaatgaactcctgatgcatcaaaca

SEQ ID NO: 38052 - DNA, 122 bp, Homo sapiens
tattttacagatgaggacactgaggcttgcccacaggcatagagctattaagtggcccagcgtggatttgaatccagatgtgtctgaatccagagccccaggtcttaccaccagccctgcca

SEQ ID NO: 38053 - DNA, 122 bp, Homo sapiens
caccaccggtccccgggctctgctgagcgctgcggcggtcttggctgaaaactgcgtccccgcccaaatcgagcgcaaaactcccttggacagaagtttgaaagaatccagtgtagaaacag

SEQ ID NO: 38054 - DNA, 122 bp, Homo sapiens
accccacccccaccaccactcaccttggaatttccgggagctgagcagtttaggtcagagcgctggggttaaaaccagccccatgttagatgcatgcagttaagcattgtggctatggcctc

SEQ ID NO: 38055 - DNA, 122 bp, Homo sapiens
aaagactagcgcgggccgggggtccgggagagcccgctaggggcggggattccggggagccgtcttcaccggttattccgggatccagctgggcgctggggctggcccgggcttcgctgggg

SEQ ID NO: 38056 - DNA, 122 bp, Homo sapiens
ttccactgggtgccatgccctttccactgggtgccatgccctttcctgtgttcagcagctcgagttgcctcctgggcagcagtcaagacagcttatcactctgctcctagcacttgggcttc

SEQ ID NO: 38057 - DNA, 122 bp, Homo sapiens
gactgcagtgtgtgctccccagcctggggtctgtgctggaggactgcaatgcgtgctccccggcccggggtctgtgctggaggactgcagtgcgtgctccccggggtctgtgctggaggact

SEQ ID NO: 38058 - DNA, 122 bp, Homo sapiens
cccacagagccgcggcaccatggcacctgctggacgcccgggggccaagaaggtgagtttcgtcccctcgatcctcgcggagctcctggccgctgggctgcgagcgactccgttcacacccg

SEQ ID NO: 38059 - DNA, 122 bp, Homo sapiens
atcacttcctgtcccaggtcgcggggccggacattttctccaagcgctttcctggcacagcgcgcaggcggcctgcgccaaagctctggcttcctccaggcgcccagaccccgccctccccg

SEQ ID NO: 38060 - DNA, 122 bp, Homo sapiens
cagcgagatactcacagatgccctggaggagccacttgggcttgtttttccaccagaccccgaagaagtagacgggcagcccgctgaggatgatggtgaagccgatgccacactccacgggt

SEQ ID NO: 38061 - DNA, 122 bp, Homo sapiens
agtaatgcaagacgccgtgaaaaggaggaagagctcgacgtcgccgcgtcgacgtcatcacgcacggactcttccgcgccacacctaacaaatacgccgacgagagctccccgccggcggaa

SEQ ID NO: 38062 - DNA, 122 bp, Homo sapiens
gacggcagagcaattttgagaggcaactcacagcattgataaggaggggaaaagcaccaccgggcttagggggcagagctcctcacagaagagacagctgctgtcccctcacccctcccaaa

SEQ ID NO: 38063 - DNA, 122 bp, Homo sapiens
gccacgggggcctggtgggtgccgaggggcccagccccacacgcccacagggccatttcccgccagacttcacacatggccgcccctgccccagcacccctgggcgggaaggagggtctgca

SEQ ID NO: 38064 - DNA, 122 bp, Homo sapiens
aggaggagaccggtggctggtgttcctgcagggcggggctggggctcctcgatgtccttgcgcttgccctgcaagttctgcgccccaggccccggcagggacggaaacaggccgggaagcag

SEQ ID NO: 38065 - DNA, 122 bp, Homo sapiens
gaggagggtgggaggaccaggaaggggcgagggaggggaaaaagcgcaaggcgcagcgcgcgggcacgcacttctggagcgagacagacccacacactcacacgcacggaacgcgcgcgaga

SEQ ID NO: 38066 - DNA, 122 bp, Homo sapiens
ccagggctgtctccgttagatgaagagactggcttgatccattcccaagaactagtcccacgtgcagttcggttgctccgaatgggatttgggtgcgaggggctgactggagatgtggggtc

SEQ ID NO: 38067 - DNA, 122 bp, Homo sapiens
attaacctgatgttactctgagaaggctctgtatgttgccaagttttgaactctactgaacggaaccaaaaataaaagtctaagaccaaagttgcaataaagtattgacgtttttatttaat

SEQ ID NO: 38068 - DNA, 122 bp, Homo sapiens
cacattgctgtggtgaccttaatctttgtgccttgcatctacgtctatacaaggccttttcggacattccccatggacaaggccgtctctgtgctatacacaattgtcacccccatgctgaa

SEQ ID NO: 38069 - DNA, 122 bp, Homo sapiens
cccgcctcactcgcggcccgcccccggcctgcctgacccgggggcggcggccccgcggatcgcccttatctggccccggcaccccgggccggcagctcgcgcagcacccactgagaaggcga

SEQ ID NO: 38070 - DNA, 122 bp, Homo sapiens
cccgcctcccaggcgagggcgcggtcaggaggcccagggagcatcacggtgttacaggcacgtgttcgctgagcacctgctatgtgccaggcatggttctagaacctagagagaaagtcaag

SEQ ID NO: 38071 - DNA, 122 bp, Homo sapiens
cctccgccaatggcagagctcccatcgcagagcctgcgggttaggttgtgaggcccgggccgggggcggggaggagccaagggggcgagcaagctcggtggctgggtgggttggggcgttcc

SEQ ID NO: 38072 - DNA, 122 bp, Homo sapiens
tggccttaccgacggtttacagtccagccagatttagttcacaaaaaaccaaaaccaggtcgacctcactgcagtatatgatggcagcgagcgttttaaagcgcaggacctttagtctcctc

SEQ ID NO: 38073 - DNA, 122 bp, Homo sapiens
agccacggcaccccccaccaagacttcttggactgggcggcagcacgcggccaggccaggcggccggacaggtggggaggtctctgtggctctccacgcccccattggtctgaggaggactc

SEQ ID NO: 38074 - DNA, 122 bp, Homo sapiens
tccgccggcgactcccgcgaagtccccacccccagaggcgtcgggcgcggcggcgccgcccgccctcggcctggagcgctttcctggggcgtcacccaaccacctgacccggtcgacctgtg

SEQ ID NO: 38075 - DNA, 122 bp, Homo sapiens
acgacgttgcgcagcgacgcgggggccttcgggaaatgtagtctacaactggaaaccggccggatcgtgtctgcgcaggcccagcagctaagatcgggtccggcgctccagaacagaacgat

SEQ ID NO: 38076 - DNA, 122 bp, Homo sapiens
atgacgaatggcacgggtttgattttcagttttattcacgttaataataataataattcacgttaaaaaaagcctcagcccacttttaggcaggccccagagtcctaagcaaggcccaggct

SEQ ID NO: 38077 - DNA, 122 bp, Homo sapiens
gcgccgcttgaccctggaaccatagagaatacccaagaattccaggaccagagtctcttccggttccatacaatactcaattggttggttgtcggctaagagcccgcctcattgcgctcatc

SEQ ID NO: 38078 - DNA, 122 bp, Homo sapiens
tcaccactcaaaatcagcagtggactaaggaccagagaacctagcttgattatggctcttcgtgagggcctgaggggccaaaccatgagtgaagtccatgaacattagtgtctggcctttgc

SEQ ID NO: 38079 - DNA, 122 bp, Homo sapiens
ggtgaggcgtgcgctcatccgcctaaagttgtattattagaaacttaattctccgggtgccgcgtccgcacttcccccggctgggccagcgccgactgggggaggccaggagtttggggcga

SEQ ID NO: 38080 - DNA, 122 bp, Homo sapiens
gggtgcataaccggcaccagaggctggtgccgatgcagctcccctgagcccatgtgtgcccgcgagtggggctgggccgggggctggccagggcttgcagctctcagcccggtgcccagtgt

SEQ ID NO: 38081 - DNA, 122 bp, Homo sapiens
tcctctcccgtcgtcaccgcttcccttcttccaagaaagttcgggtcctgaggagcggagcggcctggaagcctcgcgcgctccggaccccccagtgatgggagtggggggtgggtggtgag

SEQ ID NO: 38082 - DNA, 122 bp, Homo sapiens
gggagaccgggactccccccatctctctgctacctgagctgagctgcttaccacagtggacgctgctgcctcgtttataaagaaggcagatatcacatgccatgctctcttaaatttctgtc

SEQ ID NO: 38083 - DNA, 122 bp, Homo sapiens
ataatattcctcggaaatgtagaagacataccctaaaaaaagttatgatttagtattttacgaatcgtcctagctactacagggagattaagaactcttccgtaacttaaatctggtttcag

SEQ ID NO: 38084 - DNA, 122 bp, Homo sapiens
ggcaggaaagtcaggcaggtttgaggggctttgttagaaagctgcctgcgggtggttcatcgccagttgtgtttacttcagtgctaaaagggtatatttcctgtttaaatagtgtgcaacgt

SEQ ID NO: 38085 - DNA, 122 bp, Homo sapiens
aacaaacaaacaaacttgaatgctggcttatccagaaataccaccttggctttcttgccccggacttttgtgctatgaaatttcaccagcaactggtccctgggagtctccctcagacctgg

SEQ ID NO: 38086 - DNA, 122 bp, Homo sapiens
ggatgggaggatgctcagggtattggggtcagggtggcattagcccagctcaagccgggccgggctgactcagcatcctgccccagccagcttccatccctgacacctctgcattcccttgg

SEQ ID NO: 38087 - DNA, 122 bp, Homo sapiens
cgcgcgtaggccccgcccccgcgccgcgcgggacccaaccagggctgccgggccgctgtgcgccacgcccacttccggaggggaagcccgcttcccaccccacgttccacgcctcgctacgc

SEQ ID NO: 38088 - DNA, 122 bp, Homo sapiens
acagcgctctgctcagggatggggcagtggtgtgctgttgttacacaaggggctctctgtcggggagggaacagaagtctgttctgtagtgtttgccattttcggtggtgcaaatattccat

SEQ ID NO: 38089 - DNA, 122 bp, Homo sapiens
ggtgcgcctgcccgcccgggtcagccctccacctgccgccgccgtgccccgcagctcccgcggctccccgccccccgcgctctttgttacagcccgacttcctgtttgcggcagccgacccg

SEQ ID NO: 38090 - DNA, 122 bp, Homo sapiens
agcagcatccggcggcagcagtagcgcttcaggcccagggcatccagcgcatccctgtgtcgaggggaggagcagaggccaactgagttctctacggtctgcaaaggcctggagcccacatc

SEQ ID NO: 38091 - DNA, 122 bp, Homo sapiens
cccatcccaccccttactcggacccacagcctcatggccatgtccctgccaggaagtagacggacctctgctggatcacgcaggtgagtctccccctcgctcacagcctaggcttcggaggg

SEQ ID NO: 38092 - DNA, 122 bp, Homo sapiens
tggccaaatttttgtatttttagtagagacggggtttcaccatgtttgtcaggctggtctcgaactgctgacctcgtgatccacctgcctcgggctcccaaagtgctgagattacaggcatg

SEQ ID NO: 38093 - DNA, 122 bp, Homo sapiens
atttttcccttctttctgaccccacgaactcatctccccaacaggttcctaaagtatgggcggatgtgctccctctcgcccaccgccaggagccgagccccggcaggtgagcggtgcaaaac

SEQ ID NO: 38094 - DNA, 122 bp, Homo sapiens
ctggatggagtgcagcggcacaatctcaactcatggcaaggtccacctccctggttcaagcgattctcctgcctcagcctcccaagtagctgggactacaggcgcgtgccaccacacctggc

SEQ ID NO: 38095 - DNA, 122 bp, Homo sapiens
acacacacaaaggagtcaccaccatatgaaaccccacagctgcacatggattcgtggtcacgggagcaccagtcacaagggcacactcaacatgtgagtcacagttgcagccactgaggcca

SEQ ID NO: 38096 - DNA, 122 bp, Homo sapiens
ctgccctcagaacaccgctgggtcagagaagacttggcccaaccttcttaggcgcctcctcgttttcttaggaagtgaatgtgccttctctgggcccagatttaggaaattatgactggagc

SEQ ID NO: 38097 - DNA, 122 bp, Homo sapiens
acggggtggctgccgggcggaggggctcctcacttctcagacggggcggccgggcagagacgctcctcacctcgcagactgggtggcgatcgggcagagacactcctcagttcctagacagg

SEQ ID NO: 38098 - DNA, 122 bp, Homo sapiens
tgggatcgcaaactatttcattaattagcagtaaaggagcccacttcaacaacagctcctcgtctatttccagacagcactgcacaaggcaagccggcttagtctgacaaatctggctgcac

SEQ ID NO: 38099 - DNA, 122 bp, Homo sapiens
ctatggggccgccgacagctgcgtggctgccgagggcggaaaggagaaactgtcatgtcccgatagggccgcgcgaggtctccatcctcgacaacgctaataacaaagacgtgtgctcctct

SEQ ID NO: 38100 - DNA, 122 bp, Homo sapiens
cagtaacaaatgcacacacatgggcaaacccacagccatttgctcttccatcagcgaattcgtgtgtatgtaaactgtatctcccgtgagaatagggctatctttgtttattgtcaagtccc

SEQ ID NO: 38101 - DNA, 122 bp, Homo sapiens
cagacggcccgggtagctccagaaaaactacaaatcccggaagaaaccgcatccaggcgacgccagcccggcttgttgacggagcccaaggcgcctgcgcgtcccggggagggggggggggg

SEQ ID NO: 38102 - DNA, 122 bp, Homo sapiens
agaggcagagcagcctggcaagcagcaagagggcgtctgggctgcacctcaatccaggctcgcagggtcggagcccagcaaggccgcgagctctgcccgtgtgtgtctctgtgtgtgtgtcc

SEQ ID NO: 38103 - DNA, 122 bp, Homo sapiens
cccgactccaccgccctcggcgggcacagcccggccccggcgcgcctttgtgcagcgcctcgccaacctgccctccgtccgccaggacccgcgccctgcacctcaccgggagcccggcggcc

SEQ ID NO: 38104 - DNA, 122 bp, Homo sapiens
agaaagggagggatacccacagcctctcttccccctgctggagcctcccattgtggagtccggtgggagtcctgggccaggcagtcataggggccacttgtaagtgctcagcaggccggagc

SEQ ID NO: 38105 - DNA, 122 bp, Homo sapiens
cccgtggactgcggcatgagcaccaccccactgacgtccagcgtgagtcacccgagatcacggcctgatgcagaaccacactcagacacccgccctgtggagcacaacacaaggagcagcgg

SEQ ID NO: 38106 - DNA, 122 bp, Homo sapiens
gtccagtggggtgtgccaggtcagtaccaacatccacaggcaggggcaggaagcagcagccgctgctaaggcatgaaaaaggaatcctggctttactgaagaggcgactcccccaactccac

SEQ ID NO: 38107 - DNA, 122 bp, Homo sapiens
ctagcccaaagggccaggttggaggaagcagagaaggtggttattaaaatcaacaacattcgcaggagattggatcacttgctttcttcagtaaacagaaagagtagagctttggctgtgaa

SEQ ID NO: 38108 - DNA, 122 bp, Homo sapiens
gtgggtgggtgggtgggtggggatgcacacggaggggcggggcgcgcggggggcggggcgcgcactcactatgtctggtgtggtgccgatcttcttggctagctcgctgcgctccatggtgc

SEQ ID NO: 38109 - DNA, 122 bp, Homo sapiens
gaatcctacaatataccgtcttttgtgtctagcttctttcatctagcatcttgtgttcaacggtcatccaagccatagtatgtgtcagaatttctttcctgttcatggctgagtaatattct

SEQ ID NO: 38110 - DNA, 122 bp, Homo sapiens
caggatgtcgttgggccctggcagcggactggaagccatctccgccgcagaaccccgggccgagccctacaggtctgccttggacactggaagggaaaggagaaagcgttgacttgagcctt

SEQ ID NO: 38111 - DNA, 122 bp, Homo sapiens
ccttgcaactctaggaggttttaacttcatcaggagattaattacatcagaaagtggtaccgtctggagaggcttagtcaaattttacagttcttcctctgaaagcctacctagtgtggtgg

SEQ ID NO: 38112 - DNA, 122 bp, Homo sapiens
cagctttttgggctttgagattgtgagaccggggcatccccttgtccccaagagacccgacgcttgcttcatggcctacacgttcgagagagagtcttcgggagaggaggaggagtagggcc

SEQ ID NO: 38113 - DNA, 122 bp, Homo sapiens
agcgttttcacttgtacggacacctaagtgttaagatggccgcgcccattgtgtcattcccgtcattctttgtgcaaagcggatgacttttctccccagcccgctaaggtgcacgtagccat

SEQ ID NO: 38114 - DNA, 122 bp, Homo sapiens
tcccagtcaagtggcaaacagatacagaccaaaaagtgctataatcatgacgcacgaagacggaaagactggttggaggatgaagaattgaaagaaaacttacttgaaatgaggtaattatg

SEQ ID NO: 38115 - DNA, 122 bp, Homo sapiens
ctccccactcaccacctttctgctgtgtccctaggagctctggagccttaggaccatggacgctctcaataggaaccaaataggccctggatgccagacccagaccatggtgcaggtgagtg

SEQ ID NO: 38116 - DNA, 122 bp, Homo sapiens
gtcgctagccccgcaccagtgttctctgtcccttctccctggtcttaacggtatgggccgcggaaggcggctctgggagcctgattgcaaaggaccccttatgctggcccgcgggatggggg

SEQ ID NO: 38117 - DNA, 122 bp, Homo sapiens
caacccaacaagaaaaatcttttctctcctttctcgaagtctggggctgaggctaaggagcggacagtgccccctcctggctctgcaacaaaacgacccccgcgtccctgggatctgcgggc

SEQ ID NO: 38118 - DNA, 122 bp, Homo sapiens
ccacagctgtggccaccacagtgctgggggctgagcagtttgggaatggcatcacccggccgtgaggggctgcaggcacagctggagcaggtacaggaggaactctgtgctctttcttacaa

SEQ ID NO: 38119 - DNA, 122 bp, Homo sapiens
aggcacagctctggatggcattgggacagtggttagcactacaggtttgggctgcagtggcggcttccgggtgggcagggctttgcctgaaggaaggtgagagaaaagaacaagaaatgtca

SEQ ID NO: 38120 - DNA, 122 bp, Homo sapiens
ctccccagcagggcaaggcgccgggaaggcacccgagatgacagcgccgagccccataggcgctagtcccgccctggacgccgaccgccgcctccacagtctcggcttcggttgctggatga

SEQ ID NO: 38121 - DNA, 122 bp, Homo sapiens
acaaacctttataaagactcagcagcctagaataggagctgcggacagaacaggcttccccgccatagcccacccgctctcttcccatccaggctgcaacccacgcttcgagggccttgcgc

SEQ ID NO: 38122 - DNA, 122 bp, Homo sapiens
attagtgaactggagggtgatcgagaatggagcacagagactgaaaaatcaaagtggctgcgagagtaaagcatggaatagagcagaaacctgtggcatgtttcaccagagcccaccagtgg

SEQ ID NO: 38123 - DNA, 122 bp, Homo sapiens
tgaagctacagtacccagtttctttctaaaactgtaaccatgacgcccatgcgttttagccgtagaagaacaaataaggaagtatccttagtggtactggagtttctaattcaaattataac

SEQ ID NO: 38124 - DNA, 122 bp, Homo sapiens
ataagtcggcgtggcgccgcggtgggtgttgagaggcccgcgaactgacgggccagtgagcgggcgtcgggagtgggcggatgcgttggggttcgggtcgtgggtgttgaggcggagaggaa

SEQ ID NO: 38125 - DNA, 122 bp, Homo sapiens
agaacgaatgcaaagagaggctagcgttggggtggggctgccggggcaaagggacaggcccgggggaggcccgggccgccacggttagaaagcatggaaagagcttaagtaaaatagctgcg

SEQ ID NO: 38126 - DNA, 122 bp, Homo sapiens
taaacaaggtagggagggagatgtaaagaatccgcgtggaggggtgtcgggggttccggtcgggcctgcaggctgacctaaactcctggaagccaccgaggaagagtcagagacccaaacgt

SEQ ID NO: 38127 - DNA, 122 bp, Homo sapiens
tattaagagacagtcactgattgagttgaaaaaaacagaatatgttatttaccctagcaccgtagaaccactgacagctgagagaaaggtctttttctgttacaatatgttgatctcacaga

SEQ ID NO: 38128 - DNA, 122 bp, Homo sapiens
cggcccctgccgccggggaggagcccagcaaggaggaaggggaacccaaaaagactgaggcgcccgcagctcctgccgcccaggagaccaaaagtgacggggccccagcttcagactcaaaa

SEQ ID NO: 38129 - DNA, 122 bp, Homo sapiens
gggcccgaagccagcttgctccctaggatccggccacagttgcccaggcagctcgctgtgcgctggccgctggccgcgctggcgatcgtctgggtcggatgaagcgagctggagtggaaact

SEQ ID NO: 38130 - DNA, 122 bp, Homo sapiens
gagctgtgctggggcggctcctccgtcgcggggacagtgctgagagctgagaagtgtggccgcggtgccatggagacagaccgtccccttcctgccttcctttcctgatggtgagtgcactg

SEQ ID NO: 38131 - DNA, 122 bp, Homo sapiens
accgagggaggcggagatgcctctgggccgctgcagccttacactccgcaggttgcatcccgcccagggctgcctctgcagacagaccctgaccaaccagctgctgctttgccactgtgccc

SEQ ID NO: 38132 - DNA, 122 bp, Homo sapiens
gtggtaatatatttcaagcattgctaaattgagaaaaatagttcagaatattttgatcttcgacagtgctaccagtggacactgttttgttttgttttgtttaggggtatggtggtgtggaa

SEQ ID NO: 38133 - DNA, 122 bp, Homo sapiens
cctcagacacagtctttggcttcacttgccgctgcaggttggcacggaaatccatctgctcggctgggatctccttcaggtcgtcttccgatagggtctttgtactcaccttcttccccagg

SEQ ID NO: 38134 - DNA, 122 bp, Homo sapiens
agaatgggagcaaggggtgaggaggggccacacacttgtgaacaaccagatctgagtgaacgcactcatcaccaaggggatagcgctaaaccattcatgagggatccgcccccataattcaa

SEQ ID NO: 38135 - DNA, 122 bp, Homo sapiens
cctgtacagtgaaaggcaggtttgggaattgcgaaggaaggtggccgcagctggtttgtgcgtaaatatagaaaccggtgcagcactcaaaggagtgcaaatccagggtgagacctggggaa

SEQ ID NO: 38136 - DNA, 122 bp, Homo sapiens
taagagcaatctctgcagaggagcactgcattaaaataacagccgcggcaggcatgaggccgccttcagagataagtgctggagtttggctctaaatgccaacatccttagctaatctaagt

SEQ ID NO: 38137 - DNA, 122 bp, Homo sapiens
gatcgatgggggccccgatagcagagtgattggcctgccgcgtctggagtctaactgcagcgccgggcaccttccgaggggctcgcgctgtctgactgcaccccggagaccgccagggttaa

SEQ ID NO: 38138 - DNA, 122 bp, Homo sapiens
ggaggcgggggaggtgcggagatggcgctctgcacggcggcggagggagggcgctggcgccggggacacgaaaccgcagagcccggacgagtcagggagtgaggcgcgagccgggcgcccgg

SEQ ID NO: 38139 - DNA, 122 bp, Homo sapiens
tttgtgttgaggtttcaaaggcacgcaggcttttctacataaagatgttctaagaaaatacggatttttttttgaagttgctgtgtataaagggaaattcaaagcaaccgtcttcccttaca

SEQ ID NO: 38140 - DNA, 122 bp, Homo sapiens
acagtggccatgcctgacttctccataacctgaatcaagccaagtatatataatgacctccgccggatacattctctacaggtgagtggggtaaactggcactgcggtcctggcatggtgga

SEQ ID NO: 38141 - DNA, 122 bp, Homo sapiens
gagagagagacagaggcggcaggccgggggatcccgtaccccaaggcacacctcttggatcgctagagaaggctttctcaccgaggatgggtcacactccccacccgccagccgcccctcgt

SEQ ID NO: 38142 - DNA, 122 bp, Homo sapiens
gcctcggagtttgggcgactgacacggtttctggctgaagagcaggcagggctggaacggcgtctcagagagatgcatgaagcccagctggggcgtgcgggagccgcggctagtcgccttgc

SEQ ID NO: 38143 - DNA, 122 bp, Homo sapiens
agcaagcctgggccaccacacttaaatgtgaacaggtacaccaggttgattggacaagatcgtctgtgccttttacttggcagaatccattgcagtgactcaggatttaacctaaacacatt

SEQ ID NO: 38144 - DNA, 122 bp, Homo sapiens
tgcggagccgcctgcgaggactccactagggcgctttccaggctggactgccccgggctgcgctggagctgccagtgctcggggagtcttcctggagtccccagctgccctctccaccctct

SEQ ID NO: 38145 - DNA, 122 bp, Homo sapiens
ctaaattgcaggatttttaaatggcggggagtgggtaaggatattgacctgcttattacacgacaaaatttaaatccttaacttggtcagttcatagctgtggtctctgaacaaatatttga

SEQ ID NO: 38146 - DNA, 122 bp, Homo sapiens
gcttcctcctcctcctcctcctcctcacttaacaaaatggcggcggcaggaagtgccgggcgcctcggcccgccccccgcccgcccccgaccgccggccccgccgcggcgcccgcgcccccc

SEQ ID NO: 38147 - DNA, 122 bp, Homo sapiens
gtgttacagaaatggcagatgataaactgattcctctatcggagcttggtgctcatttcccggagtgatgtcatcgggccggcgggacgcattagccagagggctgggaaacagcggagatg

SEQ ID NO: 38148 - DNA, 122 bp, Homo sapiens
acaggtctgtggggaagccagattccttcatccacgccgagctcacataattttgctgaacgaatctgtcggcctgttcatctgtccctttgtcagcgccaccctaagcaccgactcgcacc

SEQ ID NO: 38149 - DNA, 122 bp, Homo sapiens
acttaccttactaaccctgtgcattgtgcaatcattaatgctttcacatgatctgttcaccggaaaaatcagaaagatggaaagtaatattgttgggaaagaaaatagtattgagggttatt

SEQ ID NO: 38150 - DNA, 122 bp, Homo sapiens
ccccgtctcaaaacaagatattacttccgctccaaacaaagatgggccagctaacgagcgcgggggaaacatccgcccggaaggccacttgaaggcacttccgccctctcttaacatggagc

SEQ ID NO: 38151 - DNA, 122 bp, Homo sapiens
gtgcacagagacatgtcacagtgtagactgtggccctcccacgttgattcaggggtgctgcggcaggcgtgtggaggggaccccacgcaggagcacctcctcatccctgaggagctggggga

SEQ ID NO: 38152 - DNA, 122 bp, Homo sapiens
ggatctgcgccatggctggtgcgggacctcggcggcggcggcggcagcggcaggaatgaacgccgacccctcgcgcgggctgaccggtggcgacggcgcaggcgcagtgccccgagctcccg

SEQ ID NO: 38153 - DNA, 122 bp, Homo sapiens
aagcctggatgtggtccccgctgagctgagcccaggatcctgatgcagcctctgggggaccggggcaggtggcacggtgcacgccaagatggctgtgtccacagaggagctggaggccacgg

SEQ ID NO: 38154 - DNA, 122 bp, Homo sapiens
gacgctctgttgcggggcagggacttgggacaggccgcgaggggaggcgcggggctctggcgctcgtggccgagcctgcccgcgacggtggtacggcacgacccgcgcgcgactgcgcgcgc

SEQ ID NO: 38155 - DNA, 122 bp, Homo sapiens
gaaacctcccccgaccatcgggccacactcacgcagcttggcttgaatggagggtgcgcgcgtcaccatgtatggcccccgcttttccacggccgcgggggtgcgctcccccagacggaggg

SEQ ID NO: 38156 - DNA, 122 bp, Homo sapiens
gcctcaggaggaggagtgcgggtatccatagtggttgtggtcagcctcgcccagggtcaacgtcagtgacaggctgggcttccgttccagctcctcctccttcagacagtgctgtgggggtc

SEQ ID NO: 38157 - DNA, 122 bp, Homo sapiens
gtggtgtccccggggcctcagagtagggccggctgcgcaagggacgaggcagccggggaacggcagaaattcccagtcaggaccccagggaggttagggccggccctggcccctcacaccga

SEQ ID NO: 38158 - DNA, 122 bp, Homo sapiens
ccctggccattgacgtcttcatctcacagtaataaagcattcttcctgggtgtgtcctggcgctgtacagtgagagagcacggcttgctgtcgtggagactagaggacagaatcccacttac

SEQ ID NO: 38159 - DNA, 122 bp, Homo sapiens
tgtagcaataagtaatagtatttcgtaataagtagtaagtaattgctacttgccagacaccgttctgagggcttcttgtatgttaactcatttaatcttcacaacaaccttttaaggaaggt

SEQ ID NO: 38160 - DNA, 122 bp, Homo sapiens
atatgatagaatccctaaccagttactttttgcttaaaagctgtactaggccaaaacaagcgaagcacccgtctgtgtgaggcagcgggtctggcttacaggcggcgcctcagggctcgctc

SEQ ID NO: 38161 - DNA, 122 bp, Homo sapiens
gggttgccggttcctggagacgagctgcacccctgcagtttactgggctcttctgtgacccgctttccgaccccgcctggggtattcagaccggggcagacaaggcccttctgcccctccta

SEQ ID NO: 38162 - DNA, 122 bp, Homo sapiens
cagagctggccctgcgggaaagcagctcccctgaggtgaggcccccccggggaagctttgcgcacccgcccgggccagccctcctccagcttctgtcgctggaatcagaccccatcccactg

SEQ ID NO: 38163 - DNA, 122 bp, Homo sapiens
caggcaacagcattgcatatccccaggtgtaaaatactagtcatcactcttgctgattcacgggagtaggagtcttttcctgcattttagcttacgggttttaattttatgacgtaaaattg

SEQ ID NO: 38164 - DNA, 122 bp, Homo sapiens
tccaccctagggcagtaaagattattctgacccagccctctggtctcccgcatcccaccccggcagctccctatcccatgaccctcaccatcacagtcagggcagcagtcgcccctggcagg

SEQ ID NO: 38165 - DNA, 122 bp, Homo sapiens
cgggcaagattccacgtttggcagtgggcccatgagcggaggcagatgcgtatgggcctgcgacagtctcggttcctgcctcctgagaagaaagtcatcaactgaggggcacaaggcagagg

SEQ ID NO: 38166 - DNA, 122 bp, Homo sapiens
gtggtacaatcttggctcactgcaacctgcggttccccagttcaagcaattcctgtgcctcggcctcccaattagctgggattgcaggtgcttgctacccgtgcctggctaatttttgtatt

SEQ ID NO: 38167 - DNA, 122 bp, Homo sapiens
atcaccgtcagccacgtgccgaggctgccgggcgcgtgagagtctcacaatgacaatgtccgggaaggatttccaaacgtcagggttaagcatgggagcgattctcgtccccgccacacccg

SEQ ID NO: 38168 - DNA, 122 bp, Homo sapiens
ggaccgggccgtggagaggagctgcgttcccacagggcatccctaagcgtcctctgtccccgcctatgaggacacaacctggaagtccaggccactggttgccgccttggagttggatgtac

SEQ ID NO: 38169 - DNA, 122 bp, Homo sapiens
gcagacgcgccttggcgcgaggcggcggcctcggcctggcgatgctgctcctggctttctcgaaacccgctgggggctggagttagccttgggacccctacttcttgcctgctatgacctcg

SEQ ID NO: 38170 - DNA, 122 bp, Homo sapiens
tacctactaatagcctaccattggctggaagccttagtgataacataaacactcactgaacgcaaatgttctatgtaatatatactgtattcttatgataaggtaaggtagagaaaagaaaa

SEQ ID NO: 38171 - DNA, 122 bp, Homo sapiens
gggctgaccctagaaaggcgctggactggagcccgtgacggggtgggaagggcgagggggcgcatgattcacaatgaaaaggccacgtttccagagttgccttgaaaatgcatccctggacg

SEQ ID NO: 38172 - DNA, 122 bp, Homo sapiens
cccgcgccagtcgcgcgcccctccccgcggcggcagcgtcggcggcgcatccaggggcggcgcggagccttgctcagcccagcagccagtgcctgcgagctccgctgctgcttggggaattc

SEQ ID NO: 38173 - DNA, 122 bp, Homo sapiens
cctccttagcgggagagaaggtggggatgtgggctctggcgtgggagctgggggcacacgcggggcgtagggacagtctctttgggtgactgcgattttctcagcatctcttctcaccccat

SEQ ID NO: 38174 - DNA, 122 bp, Homo sapiens
gggtcctcgacgcatagggtggggagcttctcggtaaagacagagacgggctgcgccacccgggtgccgggaacggtgcgtggccagggtgggcttgactcagactattgggccgacgagag

SEQ ID NO: 38175 - DNA, 122 bp, Homo sapiens
tgtgggcaaaactgctggaaccaggcaggtcctacctccacgacacagcatagagggtgacgtgtctgagggcacacaggctctggttaggctttgtggaattctgacctcaatgagtcact

SEQ ID NO: 38176 - DNA, 122 bp, Homo sapiens
aaacatgtcttggagggccggatcgccgcagaggcccagtcaggcgtcctggtctgaagacgccgggcctcccgcctcctgttgcaagggaggcctccatttttacgctcgtgtcccgctct

SEQ ID NO: 38177 - DNA, 122 bp, Homo sapiens
gaaacccctcgagctgtcagctggggggctgcaaagcggaattcccggcgccccagccggcgctaagacggaagaaactttccgattgttagcagtccttttgggattccgaggctgctcct

SEQ ID NO: 38178 - DNA, 122 bp, Homo sapiens
cagcgcgcgggctgctttgcatctctttgcattttagtgatgtttggtccagtcctggcccgggcagatctggggttcgggcgggtgccggtggggtagggctgggggtgggagcggcgttt

SEQ ID NO: 38179 - DNA, 122 bp, Homo sapiens
tagccgagccgcggtgacgaaccggctccgcggttgcggtgtttgcggttgctgtgatggcgatgtgagggggcccggggcgggatggtgctgacccgggtcgggccgtcttcttgcagctg

SEQ ID NO: 38180 - DNA, 122 bp, Homo sapiens
aaagtcgccaggccctgggtccctgagcagcgcacggcggaggcggggcttgagccttggcgcaattccaagctctggatgcgtccccaggtcactgcctggaagcagggaataggccagcg

SEQ ID NO: 38181 - DNA, 122 bp, Homo sapiens
acatccatggtgtcaccagattctcctagaaacacataaaatatcatagttataaactaccgtgacttttcaaatgcctactttgtgctcagcattaaggaaaatataaaaagaaacaaggt

SEQ ID NO: 38182 - DNA, 122 bp, Homo sapiens
actagtactggataaagcgctcgatcgggaggagcagccggaactcagcttaacgctcaccgcgctggacggcggctctccccctcggtctgggacagcccagataaacatccaggtcttag

SEQ ID NO: 38183 - DNA, 122 bp, Homo sapiens
cagaaaattgggagatggaataaaattgcatcacctatctctttttcctatctgattcctcgagctcatttttagcagcctgaagtcaggcatgtcaaaacaatcaggctggattgtcttgt

SEQ ID NO: 38184 - DNA, 122 bp, Homo sapiens
tcctcaggggaatgcctgaaatcctcctctgggggccgcctgaagtcatcctcgggtggtcgcctccattctccctgaagaggccgcctaaagtcctcctctgggggccgtctccagtcctc

SEQ ID NO: 38185 - DNA, 122 bp, Homo sapiens
gcctatgtacagatggcaagagggactaaatattctggacctgttgcatatgggcgctcccgctgatgcaaaacggcgttctgaacagggaaggcatgcgtgctgcgcagcagggctcccgc

SEQ ID NO: 38186 - DNA, 122 bp, Homo sapiens
gtcactctctacagcaaacagcatccccacaagctcgcaggaggacgtctgtgaggttcccgtctacgcacgtgcccggcttcagcgaccccaggaaaggagggtctccacttaatcttcca

SEQ ID NO: 38187 - DNA, 122 bp, Homo sapiens
cggcacacgcctgtagtcccagctgccctggaggctgagttgtgaggatcacctgagccccgaaagttgaggccgcatgcattgagccaagactgtgccactgcactctagcctgcgtggga

SEQ ID NO: 38188 - DNA, 122 bp, Homo sapiens
ccttgtttttggagtcttgcagaatgttgaaacgcccaaattcgttttaggcccacgaggcggggaaccaggcttctcaagaaatcgatgtagtaccagtgcctaacacctagtaggcgctc

SEQ ID NO: 38189 - DNA, 122 bp, Homo sapiens
cctggcactttgcaaggattgtggagttaaatattctgggtttcctcctaccactggctgcgatcgtcttcttcaactaccacatcctggcctccctgcgaacgcgggaggaggtcagcagg

SEQ ID NO: 38190 - DNA, 122 bp, Homo sapiens
acggcttaggtgcccgtccggggcctgggactcattgtcaccgggaagagctgcagtgagcgtctgcacctcgcgaccgtgtgccacggcaggtctgagcacgaaaccctgagagggctggc

SEQ ID NO: 38191 - DNA, 122 bp, Homo sapiens
caggcccagcgtcctctggtgtaagcacaatacctaaggattagggttgtgagccctaaacgaggtaaggcttctaagcacttggcagcagcagggggtccacccagactgtccgggtcgtc

SEQ ID NO: 38192 - DNA, 122 bp, Homo sapiens
cccttcacctgccactgattaggggaccagcatccagcccgggccctgtgcagtgccgcccgccatcctcctgcattagcatactcctaattgattaagtggatgattgattattggacccg

SEQ ID NO: 38193 - DNA, 122 bp, Homo sapiens
agtctccaataaaatggaaggagaccattaaaatctgaggaagaccatgtgtgtagaatacggtcagcaacagaaaccattatgggccaaaggtccagccttccaaaaccacttatggatgt

SEQ ID NO: 38194 - DNA, 122 bp, Homo sapiens
accggcgagccccctgaggatgcagacaaacatgtgactctccaggaagctggtgaggcccggtctacccccagcagtgaggacatttcagctctcctgtcattgggcaactggctccatgt

SEQ ID NO: 38195 - DNA, 122 bp, Homo sapiens
tcttattgtgacaaatggcatcgctagccaagttcttgtcaaagaagattatctttagagcgtggtggggagtaagcaagacctgatattttctggttttgtgcttcatgctaaccagatgg

SEQ ID NO: 38196 - DNA, 122 bp, Homo sapiens
agtttctgattctgcaggtttggggtagggcccgagaatttgtcattttaacagtatctccggtgttgctgatgccgctggtcccagaaccacacactgcgaacaactggcctagaacgttg

SEQ ID NO: 38197 - DNA, 122 bp, Homo sapiens
taaacccaagaacaacatagagtgaatttgggagaaactttgggggaaattataaattgacgctaagaaagaaaagcagaataacacagtaattaaaagcataggctgtgcaattgactact

SEQ ID NO: 38198 - DNA, 122 bp, Homo sapiens
aggaagggaaaagctaatgttaactaggtctagatcagagcgagtggcctgctttcgcgccggaagtaggacagaggtgaaagaggcagaagcggggagactgaggcacgcagtgaagagtc

SEQ ID NO: 38199 - DNA, 122 bp, Homo sapiens
gcagcatcggaaatcgatgcacttacacctcagctggaagcagggacgggagtcgaaccgcggccaccgagcagcgcgaggcggggaggggagggggcggctcttggaagggacttctccga

SEQ ID NO: 38200 - DNA, 122 bp, Homo sapiens
actgtgtcagctccagcggtgttaaacctcatttagtatcatgcctcttggacccaaatacgttgatgttcacgtaatgctgaccaccacaagaaccctctttaaatagagattttttaaaa

SEQ ID NO: 38201 - DNA, 122 bp, Homo sapiens
ctacctagagcagtaacctcttcctctctccttttcctgctgggtaggggttggtttgggcggcttgaaagcatcaattaaggctgtgctcagagcctgctgatgtgggctgcagtgcagga

SEQ ID NO: 38202 - DNA, 122 bp, Homo sapiens
gctgtagggctcagcctctagacagcaggagcacagaagggcgtggcggggtctcctgcccggccataataaacaggcccaagacttgttcacacaggtcccaggaatatgctgggtttgcc

SEQ ID NO: 38203 - DNA, 122 bp, Homo sapiens
tatggaagtcaaccccttccttgcgcagcaggagtcggaggtagcgggagacgtcgcggccggcaatgtccacccgcatgatggagtgaggcatggcaaagccctcatagatgggcacagca

SEQ ID NO: 38204 - DNA, 122 bp, Homo sapiens
ggcgtgaggggcacaggcagggcatcgcacactcgccacagccccaggaggcaccgcacacgccagagcccgggtgtaactacaggcgctagttaacaataatagatcaattctggttggtc

SEQ ID NO: 38205 - DNA, 122 bp, Homo sapiens
cctggaacaccctcccttcctccctcccaggctagctcttactcattcttcagctctcagcggacacgtcacttcctctgggaagactcccatgacctcccaatctgggctggatgcctctc

SEQ ID NO: 38206 - DNA, 122 bp, Homo sapiens
ttcagcatgcatagctcactctcaggccgagaaacagcacacgcgtgcagaccccagcctcgttccctgcaccgcccaccggcacctccccacgagccggaccgaagagggacccggtagcc

SEQ ID NO: 38207 - DNA, 122 bp, Homo sapiens
actcaggaagtgcaaggggtcagggagttccctttcctagtcaaagaaaggggtgacagacggcacctggaaaatcgggtccctcccacccaaatactgcgcttttccgacgggcttaaaaa

SEQ ID NO: 38208 - DNA, 122 bp, Homo sapiens
agtggcatgttatctgctcactgcaacctctcctcccaagtagatgggattacaggtgcacgtgccacgacgcctggctaatatttgcatttttagcagagatgcagtttcatcatgatggc

SEQ ID NO: 38209 - DNA, 122 bp, Homo sapiens
agaggagaaaagactgaaatcagggcgacgttgaaaaccggccaaggatgcaacacacagcgccgcaagctgaaccacatggaagagggaacctctcttaactgttggagcgcgaaaggacc

SEQ ID NO: 38210 - DNA, 122 bp, Homo sapiens
cgagatggaagaaccactgagtcaggagagccaggtggaggaaccactgagtcaggagagcgagatggaagaaccactgagtcaggagagcgagatggaagaactaccgagtgtgtagacgg

SEQ ID NO: 38211 - DNA, 122 bp, Homo sapiens
cagagccccttctctccattccctcggcgaggcaggaagctatctgcgttccgaatcccgcgacatcaggattatctcgcactgcagcacagagaccaatcgctagtaacctctgcctttaa

SEQ ID NO: 38212 - DNA, 122 bp, Homo sapiens
gcgggcccgccccgctgcggctcccacgcggggctgggcctcggagtttgccccgtaaagcgaattgcactttgatgttcagaaacccactttgttctcagccacgcaaaactccctgaccc

SEQ ID NO: 38213 - DNA, 122 bp, Homo sapiens
tattaacaaaaatttaggaggttggcaaaaaatacgcactcagtaatcactagttcttaacgacttaactaaactaaatatcttgataggtattgtatataaggctcacccattcaaaaaaa

SEQ ID NO: 38214 - DNA, 122 bp, Homo sapiens
cagtgagcagccgtgcttcaaaagtgaccacggacgcaggttcacgatgggagaaaggatcggcgcaattaagcaagagtccgaagaaccccccacaaaaaagaaccggatgcagctttcgg

SEQ ID NO: 38215 - DNA, 122 bp, Homo sapiens
ttaaactgtaagatgtgacgcaaaataaatgaaggcgatgacagtgaaaggggagagatacgaggttccacagctggagggtgaacgccccctacacctcctgggcttaatcgtaaccggag

SEQ ID NO: 38216 - DNA, 122 bp, Homo sapiens
ctcagtagaaagtcttgactgggtataattattaacttgaaaatgaccttttctctggctcgggtctcaaggtagacttagcttcatctgggaggccttggctggctccctggcctggagtg

SEQ ID NO: 38217 - DNA, 122 bp, Homo sapiens
tgttatttttcttttcatgcactccagatatgccataaacgttccagtccctcccaccaacgtgtcaaggggctcagttgctgagtgcgtccattcaaggagcagtgtcaggagaaagctga

SEQ ID NO: 38218 - DNA, 122 bp, Homo sapiens
acaggggaggcggctgctacaagcagaagttcctttgaggcctggtgactggactcttgtcggtgtgggacaaatattttaagagggaaaacctggaaatctctgttcacccacagtgatgt

SEQ ID NO: 38219 - DNA, 122 bp, Homo sapiens
aaactacagctagagggcacgtgaacgctgagcacagcaggtaaagagcaaatgtaagagcgatctgggtttaaatccagcctggtgttctccagctattcgcacaactgctcctgaagctc

SEQ ID NO: 38220 - DNA, 122 bp, Homo sapiens
ttcctgaccaagcacccagggaagcgcctgggctcagggcctgatggggaacctaccatccgtgcacatggctttttccgctggattgactgggagcggctggaacgattggagatcccgcc

SEQ ID NO: 38221 - DNA, 122 bp, Homo sapiens
gaccggacaagacaatagaggaggtgttgataaggacttgggagagcgcaggaaggaagacgatgggatgagaggcgccccaggcggcccccgtgtccccaggacacccccatccccactgc

SEQ ID NO: 38222 - DNA, 122 bp, Homo sapiens
atggagagtggaaaagacgatgggtgggaaacaggactcctccagggggccagctagggacgggcactgcatgccttaggcaagggtactgcgagtttcataggccatgggagcctagaagg

SEQ ID NO: 38223 - DNA, 122 bp, Homo sapiens
tccccaaaatcgggtccaatcagctgcctgccaaccctgggactgctgtgctgtgattggcgggtggctctaaggtgaggcggagtatttattaaagagaccctgggctgggagttggagag

SEQ ID NO: 38224 - DNA, 122 bp, Homo sapiens
gtgctggaattacaggtgtgacgcccagcccaaatgtgtagaattcttaatggcacccggcgcccttcgggatggcagctgtaatagtgtttccttcccaccagcaaaagctaatcagccac

SEQ ID NO: 38225 - DNA, 122 bp, Homo sapiens
aatcctttactagcaaagatagaaaacattagatttttcgttattgcttttagcaaaagtcgggtaatctgaggaaatgtaaaggctaggctgtactttcttgatattaagcgaagtttacc

SEQ ID NO: 38226 - DNA, 122 bp, Homo sapiens
ttacctggtgtgtccatcagggatttcagggactccagtgagttattaccctcgaatgctcggttctgcctgacaacccagaaatctctgccaagatgcctggtcttggggaaggctcagca

SEQ ID NO: 38227 - DNA, 122 bp, Homo sapiens
ctgcagcctcttttctatacagaactcagccctgcctcacggaagcttttccaggcagtgcgagatagaggagcgcttgagaaggcaggttttgcagcagacggcagtgacagcccagttct

SEQ ID NO: 38228 - DNA, 122 bp, Homo sapiens
ctgcgcaatagccccggtgaagttgtcgatgccctgaactctggtttttttactgccaggcgtggcaggagtctgtggccgcatttgggtggcagaagcccaccctcgttacggtctcctct

SEQ ID NO: 38229 - DNA, 122 bp, Homo sapiens
gaatgagtgaatttcaattcagcaaataattattgtgagctttgtgctctccaagagcaacgacgcggtgcgccaggcagagagcctggggagtgtgcgtgtcttacctgtgtctgcatcgt

SEQ ID NO: 38230 - DNA, 122 bp, Homo sapiens
gctctcaaagcagcagcgcgttgagaagccccaagagtctgcgcggaaccagtgcgcaggcgctctgaggggcggaagcggagaggcggggctaggcccgacaggggagcggaagaggccca

SEQ ID NO: 38231 - DNA, 122 bp, Homo sapiens
caggggacgtcgtcgtgcaggcgcccacccaggtgcccggcttcttgggcgactccgtgacgctgccctgctacctacaggtgcccaacatggaggtgacgcatgtgtcacagctgacttgg

SEQ ID NO: 38232 - DNA, 122 bp, Homo sapiens
aggttttgctggaaactcaaaaaagacttggctctgctggctcacagggaatctgggctccgctcttccaaaacctttgttctccagatgtcagtgcaaagttatgaacagctctccccctg

SEQ ID NO: 38233 - DNA, 122 bp, Homo sapiens
atgcagaggattccctcccggagactctggagttccagcacccctacccgcccccatccccggtgcaggccttttctcggagaccctacactcagccccgtgggcgcaggactagctgcgtg

SEQ ID NO: 38234 - DNA, 122 bp, Homo sapiens
gtcgaagagaaagcagcacagcatttggcctgctctgcaaggagctgggaattcttgctgcggggggcaacaagatacccaccctcccgccggggaagacacagcaggagtagggccgccac

SEQ ID NO: 38235 - DNA, 122 bp, Homo sapiens
cctgtgataagagctataaaatatataaattacaaagttctcggtctttgaggccaaacgcggtggctcacccctgtaatcccagcactttgggaggccgaggtgggcagatcacctgagat

SEQ ID NO: 38236 - DNA, 122 bp, Homo sapiens
tcgccgcccctcggcgttccagctctcaaccttgctcccagcagcccccgccggcgcactcgacctacaggaaagttgctcccgagctgtggaggggcgtcatcgcctcctagcaacgctcc

SEQ ID NO: 38237 - DNA, 122 bp, Homo sapiens
tggttgaatattacagttctcaattatttatctccatgtagaaggatgacagggactgtgcgctagtgccagcctccgctgagagcgccaagacattacagcaagcgacggtaggagagctt

SEQ ID NO: 38238 - DNA, 122 bp, Homo sapiens
taatacagtaatactccacaaagcatgaaaacacagtcacgaagttaggcattaccaaaacgtccagcaggtaagtcttcatcattgaaggtgaaagcactacaaaacacttaacgactcgc

SEQ ID NO: 38239 - DNA, 122 bp, Homo sapiens
cagctccggggcactacggtgaaggaggctgcagggcgccggggcttaccccattcccaccgccgggcttccgggcgactcctggccctgccccgagtccgcgcctccgacagcggtcgccg

SEQ ID NO: 38240 - DNA, 122 bp, Homo sapiens
ttttagtagagacagggtttcgccaggctggccagtgctgggattacaggagtgagccaccgcgcccagcctaaacactaatgtttttaaaagagtgataaagatatacttgctgactatag

SEQ ID NO: 38241 - DNA, 122 bp, Homo sapiens
ccgccattttgtgtctgagcctgtggagcgattaaaccgtgcgcggagctgcttctttggcggcagcggcggcggcggtggccggtgcggacgcgcggagctcgccggagacgccgggtggc

SEQ ID NO: 38242 - DNA, 122 bp, Homo sapiens
agatctctattgggtaaatattcagtcaattcaaaattcaattccctaacaaggctctctcgcccctcctcctcctctttcccaagctggcttctatgcctgggggtacttaccagtcctcc

SEQ ID NO: 38243 - DNA, 122 bp, Homo sapiens
tgttcaggggcggggccagaaaaccccgcccccagggaagtgggcctgaaggccaaggggcggggcggggttctgtagggacggagggggcgtgtccggggcggggcggggtgctgtagcgc

SEQ ID NO: 38244 - DNA, 122 bp, Homo sapiens
tgttcatggttttatttaacacgagggtttgaaattcccgccccatctcctaactccacccgaactctgcctgtgggttcttcaagaaaggcagagtggagttaactatccaagtttcagcc

SEQ ID NO: 38245 - DNA, 122 bp, Homo sapiens
tgcttgaaccagacctggggggcggaggttgcagtgagccgagatcacgccactgcactccggcctggcaacaaaatgagactccatctcagaaaaaaaagaaaaaagagagggagattagg

SEQ ID NO: 38246 - DNA, 122 bp, Homo sapiens
ttttctctctctgcacatggatgaacagtgagattctgaatactcccttgctgaaccaagcgatggcaggtcctgctggacccacctggggaagggagacagctgtgcgacagctttcagag

SEQ ID NO: 38247 - DNA, 122 bp, Homo sapiens
acagttaacacaattttctgaatgtgaggaccctccacctcttctccaactttcctctcccgcatggacttcgttatctgatcagcctctcccttcagctactcctcccccacctaacgatg

SEQ ID NO: 38248 - DNA, 122 bp, Homo sapiens
tcctggagggaccacaccgccgggagcccgagcagcctgcggtggctcggctcgggccggcggagatctgggagcattttctggaagcctccacagacttcaggcggaccggaaggacctgg

SEQ ID NO: 38249 - DNA, 122 bp, Homo sapiens
taggctggtgtcttcgcttgttgtttgttttttaaccgtaagcaggaaaccactcctctccgggagagagagctttttaggacgtggggaagccctgtttcctaaaagccctgtttatcagt

SEQ ID NO: 38250 - DNA, 122 bp, Homo sapiens
tcaaaatgcatacatatctcaccttcactgtcacagcattctaggatagaagggtcttcccgaatcactgcagtcagagcattgacatctccattagaggctgcttgataaaccatggtcag

SEQ ID NO: 38251 - DNA, 122 bp, Homo sapiens
cggctctctgaaagcgggtggagctgagaagcaacccagagaggctcctgcagccagggtcgggaggatttcaccttcctggatgggaattgattctccagacctagctttattaagtgtca

SEQ ID NO: 38252 - DNA, 122 bp, Homo sapiens
caggagcccagccttgcagccccatttgttgccagggattagaatgcagacacccagagccgccccataaggccccacgaggactgcgctgcctgactgcagagatcacccatgttcttccc

SEQ ID NO: 38253 - DNA, 122 bp, Homo sapiens
tcggcggagacggcctctgggccgcgcgccttccggcaccgtggcccccccacacccccgcgggatggctccacgagacacccagtcaggcaccctggttccctgactacgcgccgcgcccg

SEQ ID NO: 38254 - DNA, 122 bp, Homo sapiens
tgattagggaaggtctctctgagaagtgacatttgcgtaaagacagaaaggaggagagggcgtgaaccaggagattgtctggggaggcgttccaggcagatgaagcagctgagggcaagaag

SEQ ID NO: 38255 - DNA, 122 bp, Homo sapiens
ccggtgcgaagccaccgagccgggtccgcagccctactgtgcacctgcatcctcagtccccgagatcagtccccagggcgtcagctggggagtcaaggagtcagcctgctccgggctgacct

SEQ ID NO: 38256 - DNA, 122 bp, Homo sapiens
cattggccacccagctccgagctccctgagttctcattgcgccggctttggggccatcagcgcggtgggagtccagccctgccaacgcccccacctgctccctccctgctccgcagcccgga

SEQ ID NO: 38257 - DNA, 122 bp, Homo sapiens
acgctctccggagccgcgcggacccagaaccgctcccaccacgcagcgatggggaggtcgcggcctcgcccggtgaggctccctctccatgcaaacttgcctaacttgtgtcccggccctcg

SEQ ID NO: 38258 - DNA, 122 bp, Homo sapiens
ccacagatcttcatatacacggggatgttaaacataggaaagcctggtgtcttcaatagccgttttgtgaattcctgatacttatccttcagccctacctgcagtgttctgtttatgctttg

SEQ ID NO: 38259 - DNA, 122 bp, Homo sapiens
gtaccggggctgcgagtaccccaacctgaacggcctctacatttttggggatttcatgagcgggtaagtgacctagtgccctcgcgcccctggctgctgccactggctccttgggactggct

SEQ ID NO: 38260 - DNA, 122 bp, Homo sapiens
ctttctggatgtcctcattatctaacaacccctccctttgatttttaaatcctcacaggacgcgtgaccaaaaccaaagacggccatgaagtgagatcgtgcaaagtagcagataaaacggg

SEQ ID NO: 38261 - DNA, 122 bp, Homo sapiens
aaagaaaggtgaagctgtaagttttggtgccacacccagtccctgaactacaaaggtttacggagttttagcctaggactgagttgtactggcaggttgggccaagtgtgagtgcaaggaga

SEQ ID NO: 38262 - DNA, 122 bp, Homo sapiens
tcccttttcccagagcgcataccaaaggcagactcctttgcaggctccacgagccccattcgcggtggaaaggggcgttccagactgcagggtgaggggctccggtgtgtgtgtggtgtgtg

SEQ ID NO: 38263 - DNA, 122 bp, Homo sapiens
ggcttcgcggaccagggatgcttcaggtgtagagggggctctgtgtgtcgggagcacctgcgcccaggcacaaaccagccgcctggcagagtgccacgtggcttcgccgtccagggatgctt

SEQ ID NO: 38264 - DNA, 122 bp, Homo sapiens
agataagcacacatgtccccacattgactttttcctcagacaagcacatatagctgacaacgaacagttatgtggcaagatgagcttaggatagtggtaattatggactccagctctgatag

SEQ ID NO: 38265 - DNA, 122 bp, Homo sapiens
ttcgcccccagcctcagcctcactcggcgtcgcctgcatgggggggggggaggaggaggacggaggaagtttctgcgccgagtcctccgtcgggaaaactctaccaacttccccaggggaag

SEQ ID NO: 38266 - DNA, 122 bp, Homo sapiens
gcctcccaggttcaagagattctcctacctcagcctcctgtgtagctgggattacaggcacgcaccaccacacccagctgatttgtgtatttttagtagaaacgggttttcaccctgttgtt

SEQ ID NO: 38267 - DNA, 122 bp, Homo sapiens
taagagctgtaacactcactgtgaaggtctgcagcttcactcctgaagtcagcgagaccacgaacccaccagaaggaactaacaactccacatgcgccggctttaagagctgtaacactcac

SEQ ID NO: 38268 - DNA, 122 bp, Homo sapiens
ccggcccgcgtgacgtcatggcggctagagttgggcacagctctgcgccgactagttttccggccgggcgggagcctgcttctccccacccagggtccggccggctccaacccctgctttgg

SEQ ID NO: 38269 - DNA, 122 bp, Homo sapiens
gactccaccgccagtaactgggaggaaacatctgtactccaggatttagagacaccgacacgggagcagggcgcccccgtgtgcacagagccctgttctgcagctggaaaccgaacgggacc

SEQ ID NO: 38270 - DNA, 122 bp, Homo sapiens
ccgacctcctcagctgacaggattctaactcgggcctagaacacggagcctggagacccgcgcgccgttgaccacagggtttggcgccaaacgaggagggcggggcgaggaccaaggggccg

SEQ ID NO: 38271 - DNA, 122 bp, Homo sapiens
gctggcccagacgcgggatttggggtggaggacgctgggctgggaaccagcaccttgggacggccgggtagttcgggccttgaggagtcccacaccctgacagctggcgccccccacgcccc

SEQ ID NO: 38272 - DNA, 122 bp, Homo sapiens
ggcaggggagaggtttctgcagagagctgcatagctgggatcctcaaggctacacacacacgcttggagcagggatgcggttcacaggatggcagggcaaaggttgcagaactgaaaccttg

SEQ ID NO: 38273 - DNA, 122 bp, Homo sapiens
tggcgggctgcagtcccgaggcctgccctgcgggaaggcagctaaggcccggcgagaaatcgagtgcagcgccagtgggctggcacagctgggggacccagtacaccctccgcagccgctgg

SEQ ID NO: 38274 - DNA, 122 bp, Homo sapiens
ggcagacccagaaatctggttacaagctcctcacagaatttcctaatgaaaattcaagctcgagaaccactgccttaaagaatcatagggggacatttattccaggcggtctcttttccatc

SEQ ID NO: 38275 - DNA, 122 bp, Homo sapiens
cccggaggctcctcccgccgctgctgctgccgctgggaccgctgccgtcgcctccgccgccgccgccaccagcaccgccgtccgcaccggcgccagcacccccggccatcctcctcccaccg

SEQ ID NO: 38276 - DNA, 122 bp, Homo sapiens
tgcccttgaagagatagtttgttcctcacagttcccaagaggagggaccatgccacgccacggggagccacatgggaggtcctgggatcactcaggagcaagcaagaacctttactgtggtt

SEQ ID NO: 38277 - DNA, 122 bp, Homo sapiens
cactgtctctctgaaattttaagaacagaaaagctctcagaaccttcctgccaccatgttcgcacctcactgctccagcctctggggcacattctatcctttcagcctgcgactagcagcaa

SEQ ID NO: 38278 - DNA, 122 bp, Homo sapiens
cttaggccaggagtagtggctcatgcctgtaatcccagcactttgggaggctgaggtgggcgggtcaagaggtcaggagttcgagactgaccaacatgctgaaatcccgtctctactaaaaa

SEQ ID NO: 38279 - DNA, 122 bp, Homo sapiens
gcaacgtagttctctctggcggtcgcagggggcactgaggagcgtcccctaaatcaccggcgccgcgaaggctcatgggcgtagtagttctcaggtcggcgggctgtggaggtgatcagagt

SEQ ID NO: 38280 - DNA, 122 bp, Homo sapiens
aagggtagacactggggctggcacacacagagggtccctaatcctttccagtaagctaggcgcgcgcgcacacactcacacacgcgcgcgcgcacacatacacactcagtcctccgcaagct

SEQ ID NO: 38281 - DNA, 122 bp, Homo sapiens
tctcagaaaacacactgaaatttctcttctatttatatacttcaacttgatctgtgtcttcgatagctgtaacaaaaactctaaacatattcatcaaggaaaaataataaaatcaacgctag

SEQ ID NO: 38282 - DNA, 122 bp, Homo sapiens
ccaggaagtggcaatgctgattggaacacagacaaatctgactcaagtgccaagtcaggccgtcctatcacttgggaccttcctctgtttccatactgctcactgaccaccttcccgccttg

SEQ ID NO: 38283 - DNA, 122 bp, Homo sapiens
agcatctcttccagcccaagcccaggctttcacttgtgtatccatactcgcctcagtgtccgcagctcccagcacacagaatggtgtcctactgtggggtgagggggtccccttctaacagc

SEQ ID NO: 38284 - DNA, 122 bp, Homo sapiens
cgggtctacgcaggctggaagcgggcacgagcggcggcggataagttgagcagctgggggcggctgaaacggatggttgaggagcttcatccatcccagacctcccctccccatcagtatca

SEQ ID NO: 38285 - DNA, 122 bp, Homo sapiens
ctccaccgaaaccagcctcctttgcacgaatggtgaaactgaggcctggagcgggtaaggcgcctgttccgcgtcccccagtggaacacggagccggcggcaacgaggattcccagagcagg

SEQ ID NO: 38286 - DNA, 122 bp, Homo sapiens
tggtttttaaataagacaaattgcaaaaaacgttgccagacagcgttcgctggtttgggccgtcactgggtatggctcgtgtccgtctagatattcagaggccgagcacagtcctcagtagg

SEQ ID NO: 38287 - DNA, 122 bp, Homo sapiens
tgctgtccgagaagttcgtgcggtgccagcccagctcccagctggggacagaacaggaaacgtccccggcgagcctggcgggggtggcggcaggggtgtctgtcgcctgcgctgggcaggac

SEQ ID NO: 38288 - DNA, 122 bp, Homo sapiens
ggggtcaggactgtgcgcaggatgcagcatgttgtggaaggaacaaggagtgactgttctcgcagtttcagcagtttatgatgtctttgtctttcacaggctgaaaataaaacagatattac

SEQ ID NO: 38289 - DNA, 122 bp, Homo sapiens
cctgttcagcccgtctcccctcctcccgtctcctttgtcgtgttcccgctcccacgaaaccgcatcctgagaacgtgcaatacccaaaccagaaagcaatggaagccattttcaaaagaaaa

SEQ ID NO: 38290 - DNA, 122 bp, Homo sapiens
cgcagtggtggcctgcgaggtgggcggtggcggctgctgctggctctgctggatgaaggccgcggagtcgggggtcagctgtctcaaggcgggtaagctcctctgggtggaaagacagacac

SEQ ID NO: 38291 - DNA, 122 bp, Homo sapiens
tcgggagcttggggtagctttgtgaatgcgtggctccctggaaatcccgaggctggtctccgcagcatctaggtagagagggaaagtttggcctgagaaagtttgagtggtgggcgctcgca

SEQ ID NO: 38292 - DNA, 122 bp, Homo sapiens
ggcagctgcccaggctcttcctctgtgtagctgtgggctgagctgtccctctctgtggttcgagcaagcgtggctggaccaggatgggcacgggcagggctcccgtgagctgccgtccacac

SEQ ID NO: 38293 - DNA, 122 bp, Homo sapiens
tttgtgagccatatagtactaggtttaaataccagttcacctatttattatctgtataatcgtcagcaaatttcttaactcttctagcttcactctccacattaactaaaaacaaaagacac

SEQ ID NO: 38294 - DNA, 122 bp, Homo sapiens
ttgtttggaggaatttgaaataaaatattagagaacaactttaaaagggagatgaacagtcggctgtcaccacttagcacaaaagagagaaggtaacgtggcctctagactagtcaaactga

SEQ ID NO: 38295 - DNA, 122 bp, Homo sapiens
ccaattccacagcttctgcaactgcctggcacctgtgcatctgagacctcccacccagatcgtgcactggagctctacaccacatttccaattgcctccaagatgtcagcccctaaatgtcc

SEQ ID NO: 38296 - DNA, 122 bp, Homo sapiens
cacagtccctcacctttttcttgagcttgttgaatttcttctgcagagcctcctcttcctcgctcagtccggggggtatcaccaacatggtggctcctagttcaggggcagggcccaagaca

SEQ ID NO: 38297 - DNA, 122 bp, Homo sapiens
cgccgatggggagggttcccagataaaagggacattggggatcagcacacacaggggaaccgagacacaggaaaaagtgaaatggcaatagcagctccacccctgggtggcccctgctcccc

SEQ ID NO: 38298 - DNA, 122 bp, Homo sapiens
gtggcaggaagagctctggcgagagatgaataggacttggcccagccatgcgctcggtgacgggcgtgagagttcatttgctgcttgaagatttagttcccaattaataagtggagagccag

SEQ ID NO: 38299 - DNA, 122 bp, Homo sapiens
gatttctggcagccagaacacggacgaagcccagatcacacagagcaccatatccaggttcgcctgcaggatcgtgtgcgacaggaatgaaccttacacagcacggatattcgccgccggat

SEQ ID NO: 38300 - DNA, 122 bp, Homo sapiens
cctcatcatcatcccagtgggcatcaccttcttcaaggacgagaccactgccctgtggatcgtgttcaacgtggtctcggacaccttctgcctcatggacctggtgttgaacttccgcaccg

SEQ ID NO: 38301 - DNA, 122 bp, Homo sapiens
ttctacccgctcctaggtctcaagggaagcccgggactcacctggggccggggtctagaccgcatttaaagggatggggtgcagcctgtagaaaccaaggagccaccctataccaggggcag

SEQ ID NO: 38302 - DNA, 122 bp, Homo sapiens
ctcccatacccacccggctgccgcgcaacccctccttggcttccactgggagacaggggacgccgatgagcaggaagaagcagggcagtgactgcttagtttatcctggtacgcgggaactg

SEQ ID NO: 38303 - DNA, 122 bp, Homo sapiens
ccttccgcaaacgtttatcaaacctggcaaagatacttccgatacactcgcagaaagtgccgggggctgccttatcctaagcctcctagggagggagcagttggaagagaaagaactagaag

SEQ ID NO: 38304 - DNA, 122 bp, Homo sapiens
cactgtgctaagcacattacatatattaattcacttaatcctaacaacaaccctatgagacggatagtattacaatcctcattttacaggtgaagaaactgaggctcagaaaggtaaactac

SEQ ID NO: 38305 - DNA, 122 bp, Homo sapiens
ggggctgcggcagcaggaccactgactgtcctgccggcctccccctggtttccctgccttcgtggtccagcgccccttcacgctgggcggggacccagatccaaacccagtcccactgacct

SEQ ID NO: 38306 - DNA, 122 bp, Homo sapiens
aagaggccccgaggacagtttgtttggtggctctgggcccccgctcagtgacagtgtggacgtttgtctctcgtaaggagtgagaataaacagaggacagaaatgcagaaagaacattcccg

SEQ ID NO: 38307 - DNA, 122 bp, Homo sapiens
cggcgcgcctctccctcctggccctcactgcctgccagagggctgggaaattgcggctcccgcggctcctctaaacaccgcaattaccccagggaaattacttgcgccctcctcccgcgctc

SEQ ID NO: 38308 - DNA, 122 bp, Homo sapiens
gattgccccgtctagacaggggtgtgcgggcactcaatgttccacgcgcggccgggagctcgcagtgtggtccacgccagtgcgcctggaagcccaggggatctgtccggcactccactgga

SEQ ID NO: 38309 - DNA, 122 bp, Homo sapiens
tgaggccgagcgacgggccagggggggacggcagtcctggctgctcccaatgggcccttacgggcattattagtatccctttttaggggcacccagagagtgtgggaaaaggggagcgttct

SEQ ID NO: 38310 - DNA, 122 bp, Homo sapiens
gctggtgactggtcatgcaccattggcagggcctggagcacgtgcaaggaacagagttcccggctctgcacactcaacatgtgtgtttcatactgtcacctggctggctcctctttctgggt

SEQ ID NO: 38311 - DNA, 122 bp, Homo sapiens
gacaactgagactagtaaacccacactgtgttcaagccactggtcatattacacaaagtacgctatgccctgaaaagaatgtatacaataaaaactgagattcaaaaaacagttaggactat

SEQ ID NO: 38312 - DNA, 122 bp, Homo sapiens
gggtgaggatcgcttgatcccaaagcccaaatcccaggagtctgagactagtctgggtaacgcgggggaaacacccctctctaccaaacaaaaacaaaaaccatatatacatatgaaaacaa

SEQ ID NO: 38313 - DNA, 122 bp, Homo sapiens
tgtacgcagagcaatcatggagtccagcccagccgggggcggggctcaggcggctccctacgcttcctactccagctggccccgccccacgcccgcaactgcgcgtgcccagaacgtgaggg

SEQ ID NO: 38314 - DNA, 122 bp, Homo sapiens
gggatttgtcctcgcggctgaggatgccggtgctggtggacattagtgatgtttctcccccgtgcgtatgaagatgattctgtgggtccaccatgaggcaccaggcaggggtcctgtcgtcc

SEQ ID NO: 38315 - DNA, 122 bp, Homo sapiens
ggacccaactcctggacctttccagcctgtatcaggctgtggccacacgagaggacagcgcgagctcaggagagatttcgtgacaatgtacgcctttccctcagaattcagggaagagactg

SEQ ID NO: 38316 - DNA, 122 bp, Homo sapiens
agagtcaaagacgtggtaggcactgaccgtgcacccaccaagccgcgtgaaggagccattcgcttcacgaggaaactgcctgcacggaccacccaactctgctctcaccccacagaaacgcc

SEQ ID NO: 38317 - DNA, 122 bp, Homo sapiens
tactccccacaagtctatgagggagacataattactattgtcctaattttagggaggaggcgacctaggcacagagaggctaggtactctgccctggtcacacagctcgttactggcagagc

SEQ ID NO: 38318 - DNA, 122 bp, Homo sapiens
gaggggataggactcaagcgaagggcgtggcctgaagtgggcagggccaaaatacaggggcggagcctgagggatgctttgaggcacgggagagttagtggaagggacttaagagaaagggc

SEQ ID NO: 38319 - DNA, 122 bp, Homo sapiens
cagccgctgctgccggaagcggaaaccccctcctaccaggaggcggggcgagacagcttccgactccgcccccagaggaatctctctgaatgcggccatgctgggatgtcctattgtaacct

SEQ ID NO: 38320 - DNA, 122 bp, Homo sapiens
ccagcctcaaggagctgcaggggaaagggcgagcaggccggcttcccacctggagtgggccgcaaggccataagagagcaggtcctgggaaggccagtgcccacagctgaagctgggtgggt

SEQ ID NO: 38321 - DNA, 122 bp, Homo sapiens
gtagccatcctcgcaggggaagcgccacagaaacagccttcagagtcctcaactgagaggcggggttgagccacctacccagaggcctctgcgcacgccaccggcgcacaggcgcagtagga

SEQ ID NO: 38322 - DNA, 122 bp, Homo sapiens
cttaaggggtttcagggtgaatgtgacaatgtgagtcaacagcaggagcgccacaggtcacgcctagtctaacacacgctttggttaggagaacgtccccatcgcacaggcaccagggcaga

SEQ ID NO: 38323 - DNA, 122 bp, Homo sapiens
ccgccttgcccagaagccggaaagaggccttcgggtgcgggggtgcaggttcacttcggccggagcattcacaccaggcccccacctcggggcttgggcaaggggagagggcagagggagaa

SEQ ID NO: 38324 - DNA, 122 bp, Homo sapiens
ggtgctcccgcgccgggagtgggcgggcagaagagcgggcggggggcggtccggatgcctcgtcccgccccgccccgcccctttctgccctcctcgggagaaggaggtggcccggtggccct

SEQ ID NO: 38325 - DNA, 122 bp, Homo sapiens
ttgggagctcccttctggcaggggcagccactggattgcctcatctttctccccattgcccggatgccaagggcaggacgggggaatggtgtgtcttcggggatgagagagaggcatcagga

SEQ ID NO: 38326 - DNA, 122 bp, Homo sapiens
tgagccatttccgtggagggctttcctcctcctctgtaacttttcagacaccagggagcacgagacgtcgctgggaggagctgctctgtgtggacggggcccctccgagcaccctgcccact

SEQ ID NO: 38327 - DNA, 122 bp, Homo sapiens
agcccgccgttaggtcgggttccgagtgagccaggctcgcctggcccgcggctgcggctccggctgcagctgcagccactgccttgtgcccaccgcccccacccgggggccatgtgaaaagc

SEQ ID NO: 38328 - DNA, 122 bp, Homo sapiens
aaaagtcacaagaatgttctctccagaacccttttctcgggaaggaggaagttcaccaaacggagcagggaagagagtcttttgggattcaggaagcaagggtgtctcaacagcagggcgct

SEQ ID NO: 38329 - DNA, 122 bp, Homo sapiens
cccgcccggacctggcagggggaggggccgcccgccgcgcacccgaccccccccgcgccgcgcctcccgcagctccccacgcgcgcgggcgccccccagcaccagtctcggcccgccccctc

SEQ ID NO: 38330 - DNA, 122 bp, Homo sapiens
tctcctaaatctagatcacgctgctgtacttgaaggctagatgtctctcttctgattatgcgtgataagaaatcagtaagaagaataaaagacatgtttgagagccaacataaacttgtccg

SEQ ID NO: 38331 - DNA, 122 bp, Homo sapiens
tgaacctaggaggtggaggttgcagtgagctgagatcctgccactgttctccagcctgggcgacagaccgagaccctgtctctatgtgtatatatctacgtagatatagatagcttaagttt

SEQ ID NO: 38332 - DNA, 122 bp, Homo sapiens
gtttcccacgcatgagactaaacccccgagggcatctacaagtcccatttgatccacaaacgctacaccgtgcccagcaccactccacgcgtgtggggctcctgggtccgaggctccgccct

SEQ ID NO: 38333 - DNA, 122 bp, Homo sapiens
cccacgagtgaaaccggagccacgtgcccacacagacgcagggggtggtaaactgtcccccgctgctaaacaccccctagtcaccaaggggtcctgcctctcggcaaagccggtcagaaaga

SEQ ID NO: 38334 - DNA, 122 bp, Homo sapiens
aatccggaatgctgcccgatggccctgggtcctcgctgtggggcaatccgggcttgcagacgaggtaaggtcgattccatttggcccggggatggtcacacgcgcgggggccggaactgccg

SEQ ID NO: 38335 - DNA, 122 bp, Homo sapiens
ggaggcagcactgggtcagaaggatgcactggaatcaggggactgtaccaggttggggggcgtgcctcaggtcaggaggaggcactggggtccgggggcaacattgagtcaggggcagccct

SEQ ID NO: 38336 - DNA, 122 bp, Homo sapiens
ctgaaaaacttttgctagtcattaggcaaatacttcactgttctaccatctaacccactgcgtagatgtcatatgtgttatgtgatttgtgccatgcattgcaataagagagctttggttgc

SEQ ID NO: 38337 - DNA, 122 bp, Homo sapiens
gggccgggccaggcctgcagcgggccggggctctgggatggctggggacgggcgcgggggcgtcgcatcgacaggatccggaccgaggggagagcaaggggcgaacagagagaaggcaggat

SEQ ID NO: 38338 - DNA, 122 bp, Homo sapiens
aaccctccttccttgacctcgatgttctctgaacagtctttggggttccaaccgtggcgccgctgggcccccaggtcaggagggggtgcagacagcagctcttccaagccctcgggacagga

SEQ ID NO: 38339 - DNA, 122 bp, Homo sapiens
gcttccaaaaatagagaagcagagtcccttacaccctttgcactgcagagaagcagagtccgttactccctttgcagtgcagctttgaatagcgcccctcctgggcctcagcaaactgcaga

SEQ ID NO: 38340 - DNA, 122 bp, Homo sapiens
tctgataattcttgattaagcaaatttaactccccgtgtcccaggtgagggaggcagacccgtttgatttttacctccttccttgcttcccttattccccaggttaggcgagccagaggatt

SEQ ID NO: 38341 - DNA, 122 bp, Homo sapiens
gatgcagcaacaattgatcacatgctttcacatgtgaccacaataggaataaaataacagcgtaaagaaatttgaaagttgtattacatcattattcactgttcaaaaatttttttcaagaa

SEQ ID NO: 38342 - DNA, 122 bp, Homo sapiens
caccagtgggggttgcttgaaacacaaacagtgcacctctaggcctgccacggagaggaacggtgcctttgaagcacaaaaaaaaaaaaaaaacaggaagggagggcggagccagaaatgcc

SEQ ID NO: 38343 - DNA, 122 bp, Homo sapiens
ccggagaccggtgactggtccgtgggctaactcagggctgctcgggagacataggcgggccgtgggggcaggtgaagggtgctggacgtgcgagcctggcacgcagaagccagagggcagag

SEQ ID NO: 38344 - DNA, 122 bp, Homo sapiens
ttgcaacacaggaagaggcggcggccctatcactgtgctggttctgtgaggagtagacagcgggtggacctgtggtttgcaacacaggaagagactatgacataacacattggaaataaatg

SEQ ID NO: 38345 - DNA, 122 bp, Homo sapiens
gaccagcaggaactgcccagagaactggctggccttgtttcctgagtctgatctgtttggcggagtgggaggggtggagcaggacccggaccctgagtggctgggatccttcttcctgtccc

SEQ ID NO: 38346 - DNA, 122 bp, Homo sapiens
aagtcgcctgtgggaggaggtggcggtgggcggaactcctagcggacacctcgtggagtccggccggaagagcaaccgagatgaaggtgaagatgctgagccggaatccggacaattatgtc

SEQ ID NO: 38347 - DNA, 122 bp, Homo sapiens
tatcccctcagagttaagcaacatctattgcttaactagttgccctatatctagggcctgcgttatcccagttaacattcacaacagccaggtaacatcagttcccttacccccattttcta

SEQ ID NO: 38348 - DNA, 122 bp, Homo sapiens
ggtgtcagggaagcgaagggctttcatttgctcccgaggcagcaataaccatccatgcatcggtcatttaacacggtaacccagtgaaattgatactcgactcttccctgcccagggtccac

SEQ ID NO: 38349 - DNA, 122 bp, Homo sapiens
gtgagtgagtaattccgggaagctcgccttacaactccgcgcggcctcggccccctgcgccgcccgccccacaacaaaactcagcgcagcgctcccgggcgcccggttcagagcgacctgcg

SEQ ID NO: 38350 - DNA, 122 bp, Homo sapiens
cgagataagtggggatacatacttctttttttctcaaacgaggagagttttggggaaaggcgtcactgtcacggccccgtgaaagagaaaaggaggtaaagagattgactgcaatattaatg

SEQ ID NO: 38351 - DNA, 122 bp, Homo sapiens
gccctctgatcgcccacccgccgaaagggtttctaaaaatagcccagggcttcaaggccgcgcttctgtgaagtgtggagcgagcgggcacgtagcggtctctgccaggtggctggagccct

SEQ ID NO: 38352 - DNA, 122 bp, Homo sapiens
ccaggatgcgttgtcaccataagttacagtacaagttggttccctctcttctctctcccccgcacctcgaccttctgccctgtctcagacacacacacacacacacacacacacacacacac

SEQ ID NO: 38353 - DNA, 122 bp, Homo sapiens
gtgtcttgagctgccgggctgggtgcaggcgggttgatttatatgtatttaaaataaactcggtggtcagccagctccctgcattgttccggtagcgagctccacacacagcctttacctct

SEQ ID NO: 38354 - DNA, 122 bp, Homo sapiens
tccgaggggacctcacccctgggaagactccaataaatgcaacccggcgccactcgattccgggataatttttaatatatatgcaataaatgttcactttgttagattgaatgacagacaat

SEQ ID NO: 38355 - DNA, 122 bp, Homo sapiens
cttggccaatcaccgagagaaagaggaggtgtttgggaagaagccagaggacccgagtggcgggaccaagcgtaaccaatagaagcagaagataaagaagtttcctcacatccggggctgcc

SEQ ID NO: 38356 - DNA, 122 bp, Homo sapiens
gtccatttctcagaagctccagatattcctcctctgcagggacaaagactgtgcctggatcgatgatgacttccttatatacattccttggaaagctgaacaaaatgagtgaaaactctata

SEQ ID NO: 38357 - DNA, 122 bp, Homo sapiens
agaggagaatgaatcattggaatttttttttttttttaaacagtgattcagagcaaactgcgtagagtatgcaagatacagggaaacactgaatcctggggctgacagtttacatcctggct

SEQ ID NO: 38358 - DNA, 122 bp, Homo sapiens
ccagattgtgcgggggccacgggagggtcatgtgggtgatcccgactcgggtgtggggttcgtgcttgggaggagcagcggtctgtggggcccccagtgtccactttttctcctgttaaaaa

SEQ ID NO: 38359 - DNA, 122 bp, Homo sapiens
acctccgtttctctggacctcagccactgtgcttcttgctctgggagaaggaacagtacccgggggatcttgtgagaatgaaatacactatgggatataaaacattcagcattggccgggca

SEQ ID NO: 38360 - DNA, 122 bp, Homo sapiens
aactctgacaactgggcagcgggcatcctacttccaaggctatgccaaagcccaaggcaccgggtggcatattctgtccccacatagcccctctgggctaatgcaagatcttgctggcttgc

SEQ ID NO: 38361 - DNA, 122 bp, Homo sapiens
gggactcgggtcttcccatagccggttccgacaagtcccctcctcaggtctcgggactcccggccccgcacactcaccatttctcggcttacggaggctccaggagtcctccctacggatcc

SEQ ID NO: 38362 - DNA, 122 bp, Homo sapiens
acctcagagcactgtgtgtgtgtatgggttacctgagtcgatctttgaagaaatcacaggcgctaattagcgtcaccctcacctgactctccagaaaaggaaacagagatccagagaagtaa

SEQ ID NO: 38363 - DNA, 122 bp, Homo sapiens
gacaagtggcccagggttcctctattcctaacccttgtcatcttccagggaggctgcgcccgggggaaacaagagccttttctcggtgatgtcatctgagtatttgtagaatttcctttttg

SEQ ID NO: 38364 - DNA, 122 bp, Homo sapiens
cctattctgcccttcacagatcgttgtcattatcaagtcctacactttgagagcagaaaacgaccccgtacgtggtgggtctccgacatctgtttattacgttggaccgcatgctgcatatg

SEQ ID NO: 38365 - DNA, 122 bp, Homo sapiens
tatacttgctggctataaaatggccacagtttggtgttctcatctggcttggtgtcatcccgtggggctggggatactgatcttgattttgctgttggacttagtaatatatgaatccattt

SEQ ID NO: 38366 - DNA, 122 bp, Homo sapiens
tgaacttctgactggactccatgctgtcgccactcctgggaacccgtcggggaggctctgcgcggcctcaggtccaacttgtttctgcaaacattttttaaaagattttctcttttaagaaa

SEQ ID NO: 38367 - DNA, 122 bp, Homo sapiens
gctctcctgctctccagcacagggagggcattcaggttacaccttcaggttgcaaggccccgcctggttttcagggccggcttctgaatccctttcaccaaccaagttgagattttagtttg

SEQ ID NO: 38368 - DNA, 122 bp, Homo sapiens
catgccagctccgggggctcatttgctggggaagaatgtcagtgatcataactgctgcaccgctttcttgaagactttataggctccctctcgtgggaccctccgcataaggccagaaggcg

SEQ ID NO: 38369 - DNA, 122 bp, Homo sapiens
gtgaactgtgagtgtgctgtggctgtgagcgtgtgcacacgtgaactgagcgtgacagtgcgaatgtgtgtgccgcgaattccactggccacatgaatgcaggcgaggccgctccgctaggc

SEQ ID NO: 38370 - DNA, 122 bp, Homo sapiens
aggccagatccttgcactgtcagtgacccaaagcaacaggtgtccagagcagcagtgtggcgccttcacgcccccacacatcagcccaactcacccaggacagggactgtagcctcagcact

SEQ ID NO: 38371 - DNA, 122 bp, Homo sapiens
catggaggctgccgccttcctcaccagaggaaactcccagggtacaggtggcagcttgcacggccaccaggtcactcgaagtgtgggaggtgacgagacctgtgaactcgggaccctccctt

SEQ ID NO: 38372 - DNA, 122 bp, Homo sapiens
gttaatgatctccatttcacaaatgacgaaactgagacacagaggtttaagtgacttgcacgaggtcacacagctaacaagaggtatagctgggctcaaaggcaatcctgctcagaatctgt

SEQ ID NO: 38373 - DNA, 122 bp, Homo sapiens
tttccatttttgttcgaagatttttgcctttttggcttcggtgttggtttcctgtctccgcgtggcaaataccttttggccgggctagcgtgtggatcacctggactggggtttcagaggtg

SEQ ID NO: 38374 - DNA, 122 bp, Homo sapiens
cagacgcggcagggaggtgcgtggagggagaattgaattaaaaaaaaaaacaacaaaacacgaatatttagatttctttgttcagcggcccccctccagggatcagatgactggcccccctc

SEQ ID NO: 38375 - DNA, 122 bp, Homo sapiens
cccactcagtatccaagccaataaacaagatcgtgtcggctctatttgaaaacagctgctcgttaacccaattgctctctgaactactggaccatctctcttcaaatgcccaacttctcact

SEQ ID NO: 38376 - DNA, 122 bp, Homo sapiens
gacgccctagtaagcctccacgcacgtcagcgaagggtgggtggagggtcaccctgaccgcgccccacagctggctcccgcgctctgcccaccgccacgccaccttcaccgcgcgatctcgg

SEQ ID NO: 38377 - DNA, 122 bp, Homo sapiens
gcggtaggggagctccagtcgtcacaccgcaggctggaggttacgcttcgagtcgcttaccgaatttgtgtgcattcacgtggacacggcctgtggggccttttgcccctgtagggtcttta

SEQ ID NO: 38378 - DNA, 122 bp, Homo sapiens
actttaaaaaaatccatgaactatgaaaccagcagccgtccctctaaaactggaggagcacgcagggctgagctgtaattgaggttgtctagggatgatgctcccatctcagccattgctaa

SEQ ID NO: 38379 - DNA, 122 bp, Homo sapiens
tttactcgggatgggacaagacgaccaaaaaagagaggattcctcatcaggtttattactcgttgccattcttgcaatgattaccgcccccgttgctgtggttgggggaggcgagcaaaggg

SEQ ID NO: 38380 - DNA, 122 bp, Homo sapiens
agtttgtaaacaactgtaattaatcaaatcccagccacagtgctttggaagcattcctttcgtgagggaacagcactaaagatgttgttgtggcttctgtggtgcggtagctatggaagcat

SEQ ID NO: 38381 - DNA, 122 bp, Homo sapiens
gccccagagctggcgggagggagaggccaccagcagcgcgcgcgggagcccggggaacagcggtaggtgaccaaagtctcctctgtaacccctaaggtcgggctgagaatcgaggctccgag

SEQ ID NO: 38382 - DNA, 122 bp, Homo sapiens
tctctggaacaactcgctcccctcggaagtgactcacctgaacccgcacctgctctactacgttcaactcctctagcgtcagtggatgctccgggtcattgatggagcgaatcagatgtggg

SEQ ID NO: 38383 - DNA, 122 bp, Homo sapiens
ggcacgtgcggcggcccctgcgcgcctggctcagccctggcgccgctccattccgccaggcgcgggcgggcaggagctctggaaaaaattattctaagagacaaattaaaagaataatctgt

SEQ ID NO: 38384 - DNA, 122 bp, Homo sapiens
ctgaggcctacgtctgcgccgcggctctgaggtaactgcttggtaactgtgtggtaactgcgtacactcgttgtccgaggcacaatgaggcccgggcaggagcctggaccacgtctccgcgg

SEQ ID NO: 38385 - DNA, 122 bp, Homo sapiens
gggccccacgctggggggctgactcctgccacacacacagcggtggccgcgggcctggggcggcagcacagccattctgctcgggctgcgtgagctgaccccgctctctgtgcacctacttt

SEQ ID NO: 38386 - DNA, 122 bp, Homo sapiens
tttagaatatgatcatctgtccagtcttaaacacttttagccacaccaaatctactccctcgcttccacagtgaccagactggggctcttcctgggtggtctggcctcagttccctgcccag

SEQ ID NO: 38387 - DNA, 122 bp, Homo sapiens
ccaaaggagttaagtgcagtgctgtacccaccacatcttgcagaggattctaagtggcaacgagcttctgacaacgatgctgcttctaagcgggggtgtgtctggggttagcagtggggcca

SEQ ID NO: 38388 - DNA, 122 bp, Homo sapiens
ccagcctcggctcagcacatcccttgccacaaatcagtgtctggggcttggccaccctgccgctgcccagccacatcccttggttttgtattttatttacagagttttacagaaaataaaaa

SEQ ID NO: 38389 - DNA, 122 bp, Homo sapiens
gctgaagggaagtcaggcccttgcaagttcacgtgtcttcatgtagagctgcttactgcccggcttagagaaccaggaatgggttatcagcggctgtgcactggatggtggggccacgacaa

SEQ ID NO: 38390 - DNA, 122 bp, Homo sapiens
gcggggtgtgggcctgacgtcatcacgcagcctcttcctttccccgcccccttctcttggcgaacgaggcgtcagtttaacacctccgtgaatccggaagtatgctgtcaaaacaaccaaac

SEQ ID NO: 38391 - DNA, 122 bp, Homo sapiens
gaaaacaaatcattgtatcaaaaggatatctgcactggcatgtttcatcacagcaatattcgcaatcgcctagatatggaatcaacctaagtgtccaccaatggacgattaaagaaaatgtg

SEQ ID NO: 38392 - DNA, 122 bp, Homo sapiens
tcatgcagacccggagtttaatagggacaacagtaaatctgagaggctgtgtgtgtcccacgcgctcctgttttcccagccacccatgctagttgcagagaaaagccaacctgtatcccttc

SEQ ID NO: 38393 - DNA, 122 bp, Homo sapiens
atttcccagcggcccctgcggcctgccctagggctgcggcgcctttgtgagcgcggccgccggccaggatcgagccctggcccgggccctggcccagccccggcctccaaggaccgcgccga

SEQ ID NO: 38394 - DNA, 122 bp, Homo sapiens
actgtgactccgggacacctgtgacactcttgaggggagcgtgcccagtacccctggtcgcgtctctgggattccgccggggtgggggcccgcgcgaggccgcccctgagcctcacctgtgc

SEQ ID NO: 38395 - DNA, 122 bp, Homo sapiens
gtctggtccgctcctcgcagattggttgcagggcagagggtctgcaatgtcggcctgctccgggctgggggagcgcgtagctctggggaggggcagggcggtgcccgcctcgcgggacatgc

SEQ ID NO: 38396 - DNA, 122 bp, Homo sapiens
gggattttgtctttaattttatttccccaacaggggttagtttttccaaagtctcttcaccgtgtcccaccgcactgtcactccccccgtgtaacccatgccactgtgccctaaggatcagt

SEQ ID NO: 38397 - DNA, 122 bp, Homo sapiens
gagggagaactgacgcctttcgcccggatccttctccccttccgagaaccaggtaggtcgcgtttattttcaagtccgactgttttcgcggtaacatttgtgggaaacatcacggtggatcc

SEQ ID NO: 38398 - DNA, 122 bp, Homo sapiens
gacacgggccagttctctgcgtgatgtgttcaccaccccggggtgaccgcgtgaggacagcggccgcaccccgacactgctgtgggccctcggtgtggaggcctgtgggcgtccaggccacg

SEQ ID NO: 38399 - DNA, 122 bp, Homo sapiens
actgggccacgtgtggaagttgcagagggcatcacgtctgtcttaggccttcatgttttacgtttacattctttattgccattcccatggttctcccattatatctttcatagttttatgta

SEQ ID NO: 38400 - DNA, 122 bp, Homo sapiens
tgtccaccgtgctaactttacacgctccatttttactttgggcaagcaggatttgcagcgcgggagagatgacctggacatgagccggcagtggcctgcgcaccacaggaggcccttcagcc

SEQ ID NO: 38401 - DNA, 122 bp, Homo sapiens
ggttaccttggctcagtgcagccttctggcaggaggacagtggaaggttgcagagaggcccggtccatccctggaggcacaagcagtggaaggagggcccagtctggaggcagtgggaattg

SEQ ID NO: 38402 - DNA, 122 bp, Homo sapiens
ttggttttctttcccctcatccttttgcctgctcccggcgaggggtggctttgatttcggcgatgagctcccagaaaggcaacgtggctcgttccagacctcagaagcaccagaatacgttt

SEQ ID NO: 38403 - DNA, 122 bp, Homo sapiens
gtgtggaaggcccggcagggggaatgaaggattggccatgctgcttcagaaggacgacagcgggccggggtcctgcaccctctcggacacctgtgtgacaggcattatcactgcacgttgag

SEQ ID NO: 38404 - DNA, 122 bp, Homo sapiens
ctcccctttcttgcaacgctgagagggcgagtgcgcgctagcagcactttaaaaggaacccgtacgcttccagcgccccggctgccgggccaagaagggagcgacagtgctgccagggagca

SEQ ID NO: 38405 - DNA, 122 bp, Homo sapiens
aaggtcttttgtctgccctcaagcccttctggtgaaccaaatggactccaccagagtcagcgggtaaacacccttgtcagccttgcaggccagtcattctcaaagagaagcctgtggatcag

SEQ ID NO: 38406 - DNA, 122 bp, Homo sapiens
ctgggccacaagaggacaccctccactcagccatgagcatctatagtctccataaagctccgaagtgggttgagtgatgtgctggattatgaagaggggacagtcacctgctagagagggag

SEQ ID NO: 38407 - DNA, 122 bp, Homo sapiens
cccctttccaagtccgaacccctgccccgagagcccggagagaagcggctccgcgcctcccgcactcaccgccggtctcgtcagtaacatagggagtcgccatcttgaaaacgcaaaccact

SEQ ID NO: 38408 - DNA, 122 bp, Homo sapiens
accaaggaaattaaggacgctgacacaccagagtgaggttaagagcagaagtttaataggcgaaagaaagagaaaagctctgttgctacagagaggggccccagagaaaataggttgccact

SEQ ID NO: 38409 - DNA, 122 bp, Homo sapiens
tggcccataagaccttctgcatccacagccaagatatacatcattaccatcgcagagctgcgggaaatcccagagtagctaacatttctctgttcatgaactggacaaactccacctcaacc

SEQ ID NO: 38410 - DNA, 122 bp, Homo sapiens
caagggagcaagacattaggagggagctagtgagcagattacagggaccaggaggaggggcgagtttgcaaccatgacaggacatagagaagatggattagtgaaggtggttgtgtggcaaa

SEQ ID NO: 38411 - DNA, 122 bp, Homo sapiens
tttttagcagggcatggtggctcatgcttgtaatcccagggcagtgtgctaaatgcaagacgggatagaaaaaggcataaggaagtcttttccttgaattttaggaaggaatgtgacaagaa

SEQ ID NO: 38412 - DNA, 122 bp, Homo sapiens
ccgcagcctctgcttcagccaaacattgaaacaatcgctcctgagggtgacgtgtgaacacgctcaggcagacaagacattgtttgggccccgattatcttcaagagagagaaacagggtac

SEQ ID NO: 38413 - DNA, 122 bp, Homo sapiens
ccgcctccgctcctcactgcagccagcaggtcctccctcagctcggccccgcccccggcccggtccggcccacgtggtgccgccgccgcgcttcaacaacaactttattgggagcgcaggtc

SEQ ID NO: 38414 - DNA, 122 bp, Homo sapiens
agtaaggcactgtccttgcccttaaggaatttaaagtctggtagacgagagccatagacacggacaatgataatacaacctgctaagtgctaggacacttagcaggttgtattatatccatc

SEQ ID NO: 38415 - DNA, 122 bp, Homo sapiens
acatggcccccttcccgctggagggtccttggcaggtccccagcgcccgcccgggagctgcgcacctccagcaggcacccagtctaaacaagcacaaggaaacacacaacatacgtggaagc

SEQ ID NO: 38416 - DNA, 122 bp, Homo sapiens
aagaagggaggggtgggcagtggggcaggacctcagccagtcacaccatcatccacacaacggcccggctggcacactgcttccctcccactggggcactgcgggcaggccgcctccaagcc

SEQ ID NO: 38417 - DNA, 122 bp, Homo sapiens
gcttggcggcgcgaggaggagtcgccgggcgcagcccccaatcacccaggaacgcggggacgcctgggccactgctccggccgatggttccagaggaagccgtccccttgctaagggttccc

SEQ ID NO: 38418 - DNA, 122 bp, Homo sapiens
accccattataaaaagccacagatctctggcggcggcaaggggacagcactgagctctgccgcctggctctagccgcctgcctggcccccgccgggactcttgcccaccctcagccatggct

SEQ ID NO: 38419 - DNA, 122 bp, Homo sapiens
gcccagggaactcagtcttcggtggaagtggtgttctaggtcttctcactgtcctccctccgtcctggactgcatctacagtcagtggcagggcgattctggcaggcgccactgttctctgt

SEQ ID NO: 38420 - DNA, 122 bp, Homo sapiens
tcccattttgctccttccaactgtaaagagagaagacagagaataggtgcctagtccagtcggggaggggaaatcaaacaagctgaagtaaattgccatgggaaaggacagtcaagctttgg

SEQ ID NO: 38421 - DNA, 122 bp, Homo sapiens
acaaagcccgccacgtcttcctaaattggtttaccgcctgaaggcattggtgccccatcccgggtacttaaatgggggcctgccctctactcccctccctccaaagtgtggagccggaagcc

SEQ ID NO: 38422 - DNA, 122 bp, Homo sapiens
cctaggacaaactctccgctccttcgcccgcccctgcccgacatgtcccggggcctcactcgggtcagccagcggactccgctcaatgccgccatgtttcccgcaggaagtcgcgtgggaag

SEQ ID NO: 38423 - DNA, 122 bp, Homo sapiens
ggcgctcgcggcctgaagctgtttttctggcatctaagtcgccaaccttccttcccaccgcgcccccaacccccatctgctgatcgatgtgggcggtggaaagaggagcaagggctcaagcg

SEQ ID NO: 38424 - DNA, 122 bp, Homo sapiens
cgtgagaggtactcactatcacgagaacagcacggcaagaccacccccttcccccccgcccgaccacgattcaattacctccacctgggtccctcctgtgacatgtgggaattctgggagat

SEQ ID NO: 38425 - DNA, 122 bp, Homo sapiens
gagtgatgagaaagtgttctgtattttgtagggcatccagttgatatatgtacctcatgccgtataccaaggaggcagttatatgtacagttccagaactgaagaagaatattctagcctgg

SEQ ID NO: 38426 - DNA, 122 bp, Homo sapiens
gaggggccctccaaagctgaccaggaggccaggtctccaaacctggctgccaagcggcctcgtccacccaggggaccccatgcctgcccgtgctgttagaggcctcatgttgtcccagtggc

SEQ ID NO: 38427 - DNA, 122 bp, Homo sapiens
tggctgtcgtcttctgccgtgtgccagatgagcttgtgatctgggaagccggggcacccccgttttgtttctctgggcggttgtggcagctgaaggcggacgttgtttcctaaccataggtg

SEQ ID NO: 38428 - DNA, 122 bp, Homo sapiens
ctttgttgtctttaccccagacagatgaggatcaactgtagcatttctctccctctgaaacgtggctgggataggtacccaccagaggggcatcttagtatcctttggaagggggaacagca

SEQ ID NO: 38429 - DNA, 122 bp, Homo sapiens
tccatagccgattagctgtcacggccactctgtgtaaggactgcagaggcgtggcaaggccgtgactggcgtccgtccacagaagccctctcacaggcatggccacctccagttcggcattc

SEQ ID NO: 38430 - DNA, 122 bp, Homo sapiens
gccccgccccctgcctggcccggcttcggggttggggaacagcgcagggaggtgggtagccgggctcccaggcacgtgggtctctgcggctgcggcgggacccgggcactggcacccgggag

SEQ ID NO: 38431 - DNA, 122 bp, Homo sapiens
tgaggtcatcggggatgtggacgaaggggccgacctcctaggtaagcgcaagccttcccccgcaccgctgtgcctgcacaatgctggggctttctgctgttggttttgtttgtaatgaaagg

SEQ ID NO: 38432 - DNA, 122 bp, Homo sapiens
gcatgtgcgccgcgcggaggagccagaccaccggggcgcaggaggcgcggccgcagccggcgctcctctgggggagttaataaagagcttaaggcaggcaagtaagtgtatggaggctgcga

SEQ ID NO: 38433 - DNA, 122 bp, Homo sapiens
cctgatcatgactcacctggacctggaatctgggctctagcagctgcctgtcacagagcacgccggcctcaatccgggcctgtgggcggagtggaggggagggtgtcccagctgatagccaa

SEQ ID NO: 38434 - DNA, 122 bp, Homo sapiens
ccgatctggaggcgtatgtgcctttgcaaaacacggaggggaaacctcccgtgtcggaaacggaaaccaaggctgagagcctcctgaaggctgaagagctgctacagcaggagctccagggg

SEQ ID NO: 38435 - DNA, 122 bp, Homo sapiens
cagaaatcattcagaaagggaaaaatgtgtaaacaccaagtttttacaagactttcctttcgtgtggtagccatatgtgtgcagaatactatggtgccatgtatgtgtggtcccaagttatg

SEQ ID NO: 38436 - DNA, 122 bp, Homo sapiens
tctcccgtttctttgcctctttcttgagctgagcagctgtctttgggagggcaggagcctcggggcctagagagaggtgcagaaattcagactcagccagctggggaccctcttggacggcc

SEQ ID NO: 38437 - DNA, 122 bp, Homo sapiens
actgcggcggcccatggggccccgggcgggaggacaggttcttctgcccacagtgccgagcgctgcaggcacctgaccccactcgagactacttcagccttatggactggtacgagcgacgg

SEQ ID NO: 38438 - DNA, 122 bp, Homo sapiens
gggaggccgggctgtctcgtcagcagcaggcgtgcccagggaaacgcaggtggcatacatcgcatgcataatctcaggagacggccactttaaatcttaattggttgccttttaaatatcat

SEQ ID NO: 38439 - DNA, 122 bp, Homo sapiens
tgagcgtggtccaggttcgacgccttttgcgccttagaggcatcagcgtatcagtttcctcgtaagtcgggagtgatggaacgaccaccctgtagtgcggctgtgagaattgagatgaggct

SEQ ID NO: 38440 - DNA, 122 bp, Homo sapiens
aaaaggaagctgtggcgctgcgtagggaaggagggaagaaagtaggtctccgagatgctgcggcttgtggtgcagtcggccaagattgacccaccactagccccactacccaggccctgcat

SEQ ID NO: 38441 - DNA, 122 bp, Homo sapiens
ataatgtactcattccagcatgatcactcagcctcttcatttctccttttagagtatgcccgggtgattcaggcactacttcactcattgttggccagttctccaggcttttaagatgcact

SEQ ID NO: 38442 - DNA, 122 bp, Homo sapiens
caataccaccatcctgaccctccttgggaggtcctgaaatgaccccagttccaggggcaacgaaatgcatacgctttcgagggaaggaggggaggaaacgaccctgtggcgcaggtctgcac

SEQ ID NO: 38443 - DNA, 122 bp, Homo sapiens
ccaatgcttgttagcggatttgtttgtccagctgttggtgtctcttcttcctggctttgccgctcagccctgggctttccagagctttctaggggtctcctaagagggcaagcgggtggtac

SEQ ID NO: 38444 - DNA, 122 bp, Homo sapiens
ggcccgcggcctctcacctgccgggtggccgcagcgccgcccctcctccatctcgcagtccggaccccagctccgcctgccgctctggatgatgcaggactagaggcatcatcgccatcgcc

SEQ ID NO: 38445 - DNA, 122 bp, Homo sapiens
ctaacttgcagaggggagaggatgatatcactcccaatatctcagaagttctacatcccccgtgacgttgtacttcatatccagggaggagcaggatgacattccattgaatttcgcgacag

SEQ ID NO: 38446 - DNA, 122 bp, Homo sapiens
gtcttcagaagaaatagtccccttcctccctgagcatttcggagctgctctgaggcctggcgaggctccagaaggcccagtgaccttcgcaaggtctgatgtgggctcacagtgtgtggggc

SEQ ID NO: 38447 - DNA, 122 bp, Homo sapiens
gtaaggtacatgaaggaaagtgacagaactccaggccatgtggcttgtgagtagaaaagccgttaattcaaactcaggcagtcttgccctatggtctgaacgtttaaccataaagttgtggc

SEQ ID NO: 38448 - DNA, 122 bp, Homo sapiens
taacccttctatttcgatgaaacaagctgtcttgttttctttatttttaacactgactttcgtttctttgctaagcatcttactgtcatttaaatttctctgtctccaaccaagctgataat

SEQ ID NO: 38449 - DNA, 122 bp, Homo sapiens
aggtggttttttttttccccctctgctctagctcctgaataaacacattcatgcaagattcggttgcagacctttgctcgatggaaaatgtaccatgatttcaaagagtaatgtttcagatg

SEQ ID NO: 38450 - DNA, 122 bp, Homo sapiens
ccaagccacgccgttaggctgcggaaccgggttgggaatgcccttagcggagtgtgtacccgcgcccgcggcggtgtctcagaggcagctccagtggcctgtactatatgcggggatgtgac

SEQ ID NO: 38451 - DNA, 122 bp, Homo sapiens
tgactacattgtgaattatagcctaatggtcatatggatatagctaacaatggaatgtcacgactgaaggtgagtgggcctcttgaaaactgggaggcagttgaacacagtggtttaagagc

SEQ ID NO: 38452 - DNA, 122 bp, Homo sapiens
gggcagccagccgtttttgagaaggtgagcctctcacacaggttcaaggccccgtgagaacgggagagggcccgggacgcgctgcttcctgccgcccgcactgcagaagtgcaggagcctgc

SEQ ID NO: 38453 - DNA, 122 bp, Homo sapiens
aaaaacctaggcaggtcccctagtatcagtgcctctaggaacgtgagcacttctggatgccgggcagcacttctaaaggttacctacgggctccctagtaaattaaggttgtatattgcaat

SEQ ID NO: 38454 - DNA, 122 bp, Homo sapiens
tgcacttcttggctgaccttgcctggtacttctagctatttacgtttgaatttagcaaaacgggagttttattttcttgacacactgcagcaagattctacctacagatgaaatgtgtacac

SEQ ID NO: 38455 - DNA, 122 bp, Homo sapiens
cttaaaagcaaagattataatagtccctttctaaaactaaccccctccttgctaagggaccgagaacaacctttgcaagactaatgaaaagccacactaataggatttatatggtttggctg

SEQ ID NO: 38456 - DNA, 122 bp, Homo sapiens
atgtgattacattgggtctaactggacaatccagtataattcccctatgttaaggtcagccgattagcaactttaattctacctgttaatttaattccacttgccatgtaacatagcatatt

SEQ ID NO: 38457 - DNA, 122 bp, Homo sapiens
cgcccagagctcacaaagatctgccacaggagagaagccgctggaaagattgtcttcccccggccactcctgaaaaggagcttggaaacccagtacaggcgctcgcttgagtcacaaggtgt

SEQ ID NO: 38458 - DNA, 122 bp, Homo sapiens
actcgggccccaagtgatccttcagcctcagcctcccaggtagctgggattacaggtgcccgccatctcacttggctaaaaaatgtttgtttaacctttatggctccagttgctttggaaat

SEQ ID NO: 38459 - DNA, 122 bp, Homo sapiens
caggcagagagcccaccggctggtcatgagggcctcttcctttctctgacccaggcacctcgagggctattctcctgggttccttccggggtttattgctgaggcccagctgtgcagaattg

SEQ ID NO: 38460 - DNA, 122 bp, Homo sapiens
aagggaaagtgccctccaactgtggattacaattcagatcctactccttaaagccacatgcgaaggacagcctgcagtgaccagagagcccaaaggcctgaagacaaatctgggggtgacag

SEQ ID NO: 38461 - DNA, 122 bp, Homo sapiens
gacgctcacacacccccagacccccgccaccccgaagactggactgaaggaatcgcccaacggtccaggccaggcggccactgcctttgtccactgggaaagcagatccgggagcggtcgcc

SEQ ID NO: 38462 - DNA, 122 bp, Homo sapiens
ttttcctatgacagtgtctgaacctttctttttcccaggagtaggaatggcccctgctcccgcgcagcctccaggctgcaccacgctcgccccgcctctctctccgctccttactccgccca

SEQ ID NO: 38463 - DNA, 122 bp, Homo sapiens
acagcagctataattgttccgggcaggagtggacaagttctaacatcagcaggtgggctgcggctggggcccgaactgtagatgaccttctccaggggtctcagggtccaacacagctgttt

SEQ ID NO: 38464 - DNA, 122 bp, Homo sapiens
gggagggtgggcgaagctgcagcggcgcgtcatctgcagggcagggctctgggctccatccgcaggctgcagctgtgctcgcccgggcgctcggtgtgaggagcacccgctcccggtcgtgc

SEQ ID NO: 38465 - DNA, 122 bp, Homo sapiens
gctgcggcggggcggaggccgcctctcagctcgccccgccgacccctgagctgccgcccccgcctgcagccgggaacaccagcgtagcagctaatgccactctggccggggcgcccgccctc

SEQ ID NO: 38466 - DNA, 122 bp, Homo sapiens
tcgtctccgggaagaacctgtgtgtgtcaggatgcacgaaaggaatgactcccctctttgcgcccccggggttaactgcacgaccctgtcaaagtcccgccgtggagtgggatgagggtcga

SEQ ID NO: 38467 - DNA, 122 bp, Homo sapiens
gtccctccctggccgcgtggcttattgcacaagaatgggggaggggcggctagagagagccggtcaggaccagagcggttgagaaggttgaaacccacctcaccaactcaggtgggctcttc

SEQ ID NO: 38468 - DNA, 122 bp, Homo sapiens
agttaacacgtcactcagccaagttaacacgtcaaactgactgtcaccggttagttaacacgtcacacagccaagttaacacgtcaaactgaccgtcacaggttagttaacatgtcacacag

SEQ ID NO: 38469 - DNA, 122 bp, Homo sapiens
ggcggagggggagaaggggtagagctgcagcgtcccgttggcgtggacgtgccggatgtgcggcacgtcgtagatgtcgtcccctgtggccaggtaccatcgaagggccgcgctgggggagc

SEQ ID NO: 38470 - DNA, 122 bp, Homo sapiens
cctgtttccgacgtctaggagcactcaaggcagaagtgggtaaggtgctccggaggccctcgtggatctgtctctgctctgtttatggcccttcggtaattcactgactgagactgttcaca

SEQ ID NO: 38471 - DNA, 122 bp, Homo sapiens
acctgggaaacaatctgtcttctcctttcacgtgccccaaagcaggactccaatcttccccgggcctttctgattgggagtcttaagaccctccccagagagggccccaccctgttccctgg

SEQ ID NO: 38472 - DNA, 122 bp, Homo sapiens
gaggaaggaggacggcattggtcgctccagaccaggaaatgggtgacatcacggaagccccgacagataaagcattgctgagaccttagggattgaaagagtcaggaggccccgcccacctg

SEQ ID NO: 38473 - DNA, 122 bp, Homo sapiens
ggggaggagcccgggtgggtttgggctcccctgcccgtgagccttggtgccaggagggggcgccggcgggagctaggagcgagaaatcccctgcagggctctgaggccgcactgggggactt

SEQ ID NO: 38474 - DNA, 122 bp, Homo sapiens
ctccacctcccgggttcaaccaattctctgcctagtctcccgagtagctgggattttaggcgcccgccaccatgcccggctaatttttgtatttttagtagagatggggtttcaccatcttg

SEQ ID NO: 38475 - DNA, 122 bp, Homo sapiens
ctgtcacccccaccatggccctgcttgagctagttgggaaaagcagagggactccagtgccgttgagaagccgcaccgactgcctgctccacgcagcgaacgcttttcccccaccacacctt

SEQ ID NO: 38476 - DNA, 122 bp, Homo sapiens
tcacacagctgattaggaataaaattcaggtcaagctgaaagtcggccgccaccgtccagcgtggatcccaggacaccgtgaacggactacagaagttgactttcgcgtttttaaggagtgg

SEQ ID NO: 38477 - DNA, 122 bp, Homo sapiens
ttcacgtgtcctagaatcttagaattctgagttggaataagcctatcaaaatgcagaccacgcatcggacggttgggcgggtcggggaggggaggtccacaggcctgggctcaaatcctgac

SEQ ID NO: 38478 - DNA, 122 bp, Homo sapiens
ttcgtataaaccaagcccatgcacaagtagaaagtgcccgtggagccggcaggaggcccccgccgcgctagagaaccacaagcccggccgtgcagccctccccgcggcgccttaaatagatt

SEQ ID NO: 38479 - DNA, 122 bp, Homo sapiens
ctgaacacttgcctcgttttccattcctctttccctgggtagctgcggtgagttggctgccgagatgtagccctgaacctatccatcaagtctaaggaagagagagttagaaaggcaaacat

SEQ ID NO: 38480 - DNA, 122 bp, Homo sapiens
gtcatatttcctgccatgtttgtttagtctctttttccactggctctttccctttcaggccggtagaggcagagtctttcttgtggcttgatgccagttgaaactcttccagatgtggctga

SEQ ID NO: 38481 - DNA, 122 bp, Homo sapiens
aagtgggggaagctggctcagatgatgggccctaggggtgggctttgagtgagggactctcggggcgtggcttgagttgaagcactcctaggccctggggactatgggggcgtggcttggag

SEQ ID NO: 38482 - DNA, 122 bp, Homo sapiens
tagacccagcgcccctcctggggtctgcccagacccttggccccatgacattataacctgcgccctgggcctcctgttcagcctacagcctggagctggtgacctctggaaaggtgcccatc

SEQ ID NO: 38483 - DNA, 122 bp, Homo sapiens
tagattcggaaagcgtaggcgtcgatgagccggcgcagaggccggagggcataggggtctcggatgacgatctcccgggtcacaggcttcacccggcggtactggtagtagatccgcactga

SEQ ID NO: 38484 - DNA, 122 bp, Homo sapiens
gattcttccatatttgaatcttaaaatgagcatctgccccagggccccttcccagaggtacgcattcccagcacaatgcagttcttggctagggtcaagttgtattgcctcctgtgcctgcc

SEQ ID NO: 38485 - DNA, 122 bp, Homo sapiens
cgactgcagctccttggaggccttggggatgcccagagcatacaggcttcccagcagcttcgagagggtaccatgccagaccgaggcaatctaggcagagaaaggacacaggagaaatgatg

SEQ ID NO: 38486 - DNA, 122 bp, Homo sapiens
ttaaaacttttaagattcaattttggttttcgagatttagtctgttaatcttgagagctgcgtgtttcatcacctgaaaaagatgtaaagcctcagtgggcataaggagttcagtacttgtc

SEQ ID NO: 38487 - DNA, 122 bp, Homo sapiens
ccttaaactgtgacttctcacctagtgcagaacttttaccaggctgtaaaagcaaaacctcgtatcagctctggaacaatacctgcagttattcttcagctgtttggacaacttagattggg

SEQ ID NO: 38488 - DNA, 122 bp, Homo sapiens
ggagcgccccgccacccgagttctggagaactcctcatctccacagccccgtcccccaggcgagctagccccacctctgcacacagtcccgcccaccggttccaagcctcgctcctgaagcc

SEQ ID NO: 38489 - DNA, 122 bp, Homo sapiens
gcggccgcggctgctgctgcggcggcggcggcggtggtggcggcggtggggtggcgggagcggagcggcatggccacggcggcttctaacccctacctgccggggaacagcctgctcgcggc

SEQ ID NO: 38490 - DNA, 122 bp, Homo sapiens
tgcatggacttgtggcaggaacttctctggaatggatttagttatggaaaatattgggggcggggctgactgacaaatcccagaagcaagactctttaaggagaagctgtgtattccaacag

SEQ ID NO: 38491 - DNA, 122 bp, Homo sapiens
gttgactcctagtgctgtctgctccttcatattgcctctccctttaaattccttttcactcgcttaatgagtattgttagagcctaaaagcctgtgtatgtgttgtggttatattgctgtca

SEQ ID NO: 38492 - DNA, 122 bp, Homo sapiens
tgagtggcaagcccaggctaaacagtgaaggtcagagctggacctgggactcacatctcccgtgttcctgtgtagctggaaggtgaggaaaccaggaacagattcaaaaggcagttctctgt

SEQ ID NO: 38493 - DNA, 122 bp, Homo sapiens
agagaaaagaggaacagcttctcttaaagaaagttagctgggtaggtatacagtcattgccgaggaaggcttgcacagggtgaaagctttgcttctctgctgctgtaacagggactagcaca

SEQ ID NO: 38494 - DNA, 122 bp, Homo sapiens
gaaagggggaagaagtccaggggacccccggcctctggccgagagcttgggtgggggcctcggccgtcgccactcacccggggaggggaaaagctccagatcgactttttccgtcttgatga

SEQ ID NO: 38495 - DNA, 122 bp, Homo sapiens
tgaaaccagggagactccatagcgagtggacagagtgggctccggggacggctgggctgacgcaagccccacagtgcgaatgagcttgaggcccctggacggcacacttgaaatggtgaaaa

SEQ ID NO: 38496 - DNA, 122 bp, Homo sapiens
tagctctcttcggaatgaagcctatttgtatcttatcttttaatcttcataataatacttcggtaagatattttacttcacacatatggaaactgggtcagaaaagtctagaaggtggctac

SEQ ID NO: 38497 - DNA, 122 bp, Homo sapiens
ctaggaaaatctcctgtgaatgcagtgagcacaattgatggaagccgacgagcagattgacgcaaccctagatatggggccacagttctgatggcttcagcactaccacttcttaatcatat

SEQ ID NO: 38498 - DNA, 122 bp, Homo sapiens
tccggcagcttggtggcctcgtgcccgggccccactcctgccaggacacgattccttccacgacagactcatttaatcattatagcattttttattaatggtgaagaaacgtgcagaggaat

SEQ ID NO: 38499 - DNA, 122 bp, Homo sapiens
cgggactctccttggtgtgaaaaacctacaccactcaagattaacacaaacttggacttgcggattaaatgaaatgaatttcattaggctggggccagcggccactgagcacacacctgaca

SEQ ID NO: 38500 - DNA, 122 bp, Homo sapiens
gagaactgactcaggctggggtccatgataaggcagccagcagagcagccttcccatcatcgctgtggcctgtgctggccaggctgccatggtggttgtctgctcccattcctcagtgggat

SEQ ID NO: 38501 - DNA, 122 bp, Homo sapiens
gccccagcgcccgggccatggcggcggcggtggcgggagctgctgtctgagcagcggttgcggaccgagcgaacttggcccaggagcccgggcctagggagaggcgcggcggcggcgggagc

SEQ ID NO: 38502 - DNA, 122 bp, Homo sapiens
ggactgtccagcctcctcgctaccacttagcccctgtaaaggaggaagtccctttgtcaacggacatgagaatgctgtttggccaatgaccatagtctgccctccagggcccgtgaagatgg

SEQ ID NO: 38503 - DNA, 122 bp, Homo sapiens
ctgacaagtgggaaagctctctgtgtgttggatgagggatcactctttcaaactcactcccgagctcatcacagagaatcagggttctttgggaattagaggactatttggttttgataaaa

SEQ ID NO: 38504 - DNA, 122 bp, Homo sapiens
acggaccagcctcccccaggccgagtattttggagcactgggctgggaatctcttggctccgggccgcgagctccggctcctcccaggaaatagcgtcaaggaagtgggagggagtggcctc

SEQ ID NO: 38505 - DNA, 122 bp, Homo sapiens
atacaagtattttactgcacaatttttaagcataaaaataaaatcatagaatagacctgtcgcccagcttcaacaactgctaaccctgtgtgaaatggccttttaaccaaacatatttgtaa

SEQ ID NO: 38506 - DNA, 122 bp, Homo sapiens
cttaactcggacggcaaacttcccgtctgggatctgcaggcttcaacaactgtcaaagcacgggaaaatccccaggaagaaagtaagcaaaggcacggtagacgccaagggtccaggagtcg

SEQ ID NO: 38507 - DNA, 122 bp, Homo sapiens
aatttcccaagggccaatttacccgaccgattaccacttgccaatgcaaaaccaaataaacgtacatatgtttattgggaagaaaaccaaagctttggagaggacagggacaatgtctttgg

SEQ ID NO: 38508 - DNA, 122 bp, Homo sapiens
ccaaaagcccagagagcaatgtcaccaccaagggatcagggacgcagcaggtgcagggtgcggctaagcaggacattagccttgtccaggagggcacatgtgtatgagtgggtggacggggg

SEQ ID NO: 38509 - DNA, 122 bp, Homo sapiens
ataatgtagctgatgatgggtagcagttttgccatttccaaactgctttctggtccggtccgttctatggctccgtcttcacaaaagcccagagagggaggctgactacaagcggaaaccaa

SEQ ID NO: 38510 - DNA, 122 bp, Homo sapiens
atcccaaacacatagagacgaccaaggccctgatcccaaaagaagaacccaggctgccggcgatcctggggacaacgatgttaactcagggacaggcgcagtctctggaccaggccaggtcg

SEQ ID NO: 38511 - DNA, 122 bp, Homo sapiens
gtgcccaatcttacagttgagtgtttgatctgcaaattccaagggtatgctcctctcctgcgtgtaccttcacaaggcactcctttactccgtatacatttgcacttcttgacttctttttt

SEQ ID NO: 38512 - DNA, 122 bp, Homo sapiens
cgctcccgtgtttcctgtgtgtggagcgtgcacgcgctcccgtgtttcctttgtgtggagcgtgcacgcgctcccgtgtttcctttgtgtggagcgtgcacgcgctcccgtgtttcctttgt

SEQ ID NO: 38513 - DNA, 122 bp, Homo sapiens
caccctgggaaggacgccttgtgtatctcatgctattaaataattgttaaatattttagccgggagcagtggctcacgcctgtaatcccagccagcactttgggaggccaaggcgggcggat

SEQ ID NO: 38514 - DNA, 122 bp, Homo sapiens
gcgctgccgcggaggatcctgggtgcagccgctcagagaagcttctcgcgcacaggaagtcgctgcgaggaggcgcgtgtgcggggagttgaatctcccgctcccttgaggctggggttgcg

SEQ ID NO: 38515 - DNA, 122 bp, Homo sapiens
attacggcttgctgaatctccccaggtgagattaatgtgcaattcccttcctagaccacccgggccaggtgtgataggcgacagaacaggaaatacacattttgggttttgcagggtacctg

SEQ ID NO: 38516 - DNA, 122 bp, Homo sapiens
gccaccctccgtccccaggacaagcagctcacccctccctccataaagtgccaagaacaccgggttggcaaatattgcagggcctcgggagaggccacctcccaatagctgagatcgataat

SEQ ID NO: 38517 - DNA, 122 bp, Homo sapiens
ctgggcgcaggggccagtggggctcggaggcacaggcaccccgcgacactccaggttccccgacccacgtccctggcagccccgattatttacagcctcagcagagcacggggcgggggcag

SEQ ID NO: 38518 - DNA, 122 bp, Homo sapiens
tgttgaaactggactggggcagggaatacaggtgtatgtttccttcagtccaagaacaaacgcttaagtctttttaatttttagagacagggtcttgctggagtgcagtggtgcaatcatag

SEQ ID NO: 38519 - DNA, 122 bp, Homo sapiens
tgaagcaatctggaatcattccacttggctctgacgcgcgcgcgcgcacacacacacgcgcgcgcacacacacactctcacacacacgtgtaccgtgcatgtgtgggcgcctatggatctgt

SEQ ID NO: 38520 - DNA, 122 bp, Homo sapiens
atcccggaagccatcttgtctgctccagctgcgtgcctgattggacggttcccagcccagcgtgcctgattggacaacgtttaaggtcctgacccttcaggccctgagtgacagaagatgtg

SEQ ID NO: 38521 - DNA, 122 bp, Homo sapiens
agaagcagagcatataataatggtggttaccaggggcagtaggtgggagaaatggggagtcgctggccaaagagtacaaagtttcacttaggaaagatgagtaagttctggagggctaatgt

SEQ ID NO: 38522 - DNA, 122 bp, Homo sapiens
ccgaagagaactcggcctctgcgaagggctgtgcggggagatgcggtggagaggaagagccgccggggtgttgagaaacgatgatttcaaaaacttctgctgaaagtgaggaatgcataaga

SEQ ID NO: 38523 - DNA, 122 bp, Homo sapiens
tcaagaattagaaaactttgcaagatttgacttgtttaaaaatcacatttataagtgaaccgtattaaaacttttaaggaaccattcattgtgaggtaaactgatccagaataggggtcagc

SEQ ID NO: 38524 - DNA, 122 bp, Homo sapiens
gaattcccaagtggatgtaaagacccattcacttgctaagcctcttaggaaacccagagccggttttacccttaacaagctgttgacagagtctggtcaaggtaccacctggaacatgttaa

SEQ ID NO: 38525 - DNA, 122 bp, Homo sapiens
tttcaatgtcagaattgttaggtatattaaaatataagtctgttatgtaaaaggaaaactcgaggtagggaaaattattcactgaattaagtgttactaagatgagtattgagcctaagaat

SEQ ID NO: 38526 - DNA, 122 bp, Homo sapiens
atggtggaagtgtttgctaccaagtttatttgcagtgttaacagcacaacatttacaaaacgtattttgtacaatcaagtcttcactgcccttgcacactgggggggctagggaagacctag

SEQ ID NO: 38527 - DNA, 122 bp, Homo sapiens
cgtctcgtgagggtgcctcccaccccggccccccgccctctcccgccctgcccaggggcccgggcgccgggcactcaggacccacctctgccccataggcctgacgcctctgtgcttgcccc

SEQ ID NO: 38528 - DNA, 122 bp, Homo sapiens
gcttcatgatgtccacatttagggtcagcattcattgttcagctaagaacactgggtcctcggaatatggcaagcggttgaaataatggcctcagtttctatggcatgggtgcaaatcggtc

SEQ ID NO: 38529 - DNA, 122 bp, Homo sapiens
ttctctgaccctcgcttcccacaactgttgtcactggagctgcttcctagtttccatttccgggccgtccacggccccggagcctcccctttcccgatttccgggcccctcgtcccatttcc

SEQ ID NO: 38530 - DNA, 122 bp, Homo sapiens
gggtgccagcgacctacctggctaccgtaaatgtatcaagtccagagcgctgatggagcacggctgtaggaaggggctcctggcattcaccgccttccctggcatctcccaataattataaa

SEQ ID NO: 38531 - DNA, 122 bp, Homo sapiens
gccccagtgcccagctgcccaggcccggggttggggagaaccggagtctgcaccgattggcgaaactccccagttcccgcccctcccgacctcatcgcccacaccgactggcaccgcccccg

SEQ ID NO: 38532 - DNA, 122 bp, Homo sapiens
gcctgcttgtcctggacccctctgattgtccctggcctgcctgtgagtgtctagagatgtcggcatgagaggaagcttcatggtgacgtgaccctgagtgcctggagccgtctcttgattgt

SEQ ID NO: 38533 - DNA, 122 bp, Homo sapiens
ggctgcggggctgcccacggccttgcgcttcgtgctctggttgggtgactcccttccgcacggctgccctgggtccccagccccaagggacacttcctatgaccccccgcttgttgtaaagg

SEQ ID NO: 38534 - DNA, 122 bp, Homo sapiens
cgcgcccagcgccgcggcacccgtgacctccgcgcagctgccctggctggccagcctggccgccagctcctgcaacgacagcgtgcacgtcatcgagtgtgcttactccctggccgagggcc

SEQ ID NO: 38535 - DNA, 122 bp, Homo sapiens
cacctgtagcacctggaatcccggggcttggacaggcagccagccccctgctaggagccacgtggagtgctgggaagccatcggggccgggcgcggaagggctcgctggcaccgtctggcga

SEQ ID NO: 38536 - DNA, 122 bp, Homo sapiens
gctgcgtgatgctatgacgcagatttggagcacaggagacaggttgagacacgcttgttacgtgtgccactcagcagtgccatcagaaatcacggctttacctgaatgaagcattacggaag

SEQ ID NO: 38537 - DNA, 122 bp, Homo sapiens
cttagacttccaagagaaccccaaaagctcttttaagagctatcctcattaattccctcacgtcttccaacctcccccatgcaggtccctcaccgagtcctggctgctgcaggacacgacat

SEQ ID NO: 38538 - DNA, 122 bp, Homo sapiens
tcaattccaaggcagttttcccttctggagagaactactccgcgctctggcgtgtgtctgcgaggtggccattaggggtgtctttgctagaggccttggcttgacctcatttcacacccaag

SEQ ID NO: 38539 - DNA, 122 bp, Homo sapiens
tcggggcccacctcccagagggttgggcaagctgcctcatcctctgcccacaagcaagagcgggtggaaggtgtgggaagaggaaaagacagccttttccaagcgatgtctctaatcttggt

SEQ ID NO: 38540 - DNA, 122 bp, Homo sapiens
aaaggcagcatcttaggtaagtgaagttactcttgccttgagctgagtgtgggagcaccgcgattgcaagatggggcgaggtgatcaaagatcccgcctattttcaaccccggaacctcctc

SEQ ID NO: 38541 - DNA, 122 bp, Homo sapiens
gcactgcatgatggctggaggctggggagccactttccttccctcacgcatccgcctccacgcaagcctgctctccgccgtgggaaatcagacagctgggctgacagcctgcattcgggatg

SEQ ID NO: 38542 - DNA, 122 bp, Homo sapiens
tattaacattttaataaagagaatctttttgcactaggctggaagtggccgccagtcccccgtgcaattccattctctggaaaagtggaatcagctggcattgcccagcgtgatttgtgagg

SEQ ID NO: 38543 - DNA, 122 bp, Homo sapiens
tctcattctcaggggcagctgctacatacttcccactgattgggtttgcagagatggcctcgagggtgtctgatattctgatatttcaaaacagaatagaaatatgtattttaatgtgtatt

SEQ ID NO: 38544 - DNA, 122 bp, Homo sapiens
gagctgcggctgggacagcacccggtggaagcgatgatagagctggatcagctgggtcagcgctccctggtcaaagaaagtcattgagggatcaaaccgtaaaatggtgctaatagtgatga

SEQ ID NO: 38545 - DNA, 122 bp, Homo sapiens
ttgcaggtgtgagacaccatgcctggcctaacttttgtattcttagtagagacagggtttcgccatgttggccagactagtctcgaactcctggcctcaagtgatcctcccacctcggcctc

SEQ ID NO: 38546 - DNA, 122 bp, Homo sapiens
caatcggtttaggcgcggcccaggtcgattttgattggcttgcccagtggaaatgctctccgcctgagctactactggccaatatggctccacaattggctctcctggaagccgacagacac

SEQ ID NO: 38547 - DNA, 122 bp, Homo sapiens
gaaccttggccgcagtccttgcgaactgttcgcaaaacagtgcgggctgcggtgggtcagcgtcacatgctaatgacaggatgttcctcgtagctttttattttgtgcgtcttatgtttgta

SEQ ID NO: 38548 - DNA, 122 bp, Homo sapiens
aatcaatacctcacatctgttcccttggttacctgtactcattgttgccccaaaactgcacgtctcacacgctccaccactgtacctcacatcccccttctcttgtgtatttagaaaaatat

SEQ ID NO: 38549 - DNA, 122 bp, Homo sapiens
tgaagctggataaacatgcagttacattttttactggacattcaagttcagagacagctgcgttgcttaatcatggcatgtgtctgaatagaaggctgatctagcacagcacaaacatggaa

SEQ ID NO: 38550 - DNA, 122 bp, Homo sapiens
tggtttggagttggtgtttcatcttttccagttacagtgtgaaagtagcccaccagcccacgctcttattcctaaagaccgcagtgactccacggacttaagttctcattgcttccagtttc

SEQ ID NO: 38551 - DNA, 122 bp, Homo sapiens
gtgggttaggttcgagtccctacaagtaggaagaagtcgtcagggcccggcatgtggtcgcggcccaatctcaatttagggctgatcctgaccctcaaagccacccggaacgcgcgagaggg

SEQ ID NO: 38552 - DNA, 122 bp, Homo sapiens
tccttaggaggcaaaataaaataaaagtttgcacctattcttagatgaccccagtgtaatcgatgggatgttgatattgtgctggtgactcaagtaccatgggcaaggttgttatcagtgat

SEQ ID NO: 38553 - DNA, 122 bp, Homo sapiens
tgatccacccaccttgatatcccaaagtgctgggattacaaagagccactgcacccggcccgtattttcaatttcaataaaaagctaagaataaaaagtggtactggctgtaatcgtaaatt

SEQ ID NO: 38554 - DNA, 122 bp, Homo sapiens
taattgtagtttagcgtgaaatggcgcggtgtacgatgggaattgtagttcatacagatgcgcgccagcgagttaacatccacgctgctcactggcagcctagtagtgttcagggtctagcc

SEQ ID NO: 38555 - DNA, 122 bp, Homo sapiens
gggcaggcggaggcggcggcagcgcccagcgacggatgcggccaccactgcagggcctgccgccggtgtggagagcccgagtcacggagccccatgctgcccctcacagcacggacggggtc

SEQ ID NO: 38556 - DNA, 122 bp, Homo sapiens
tgtggagtcccctttggcccttgttctgccccgatttgggggctgggggctgggggctgacgtttctccctctcaaagttcaggttgaattgccctaacgtgctgattactgcaccgaggat

SEQ ID NO: 38557 - DNA, 122 bp, Homo sapiens
tccgagggaggacgctggggcgcgggggatgacgtagcggaagaccagccaatagagtggcgcggcccgcgttgcctaggcgatcgtagcctcgcccccttgctgcccctcccgccccctat

SEQ ID NO: 38558 - DNA, 122 bp, Homo sapiens
ctggatgcagggatcaggtagaggctgaacagggcggcaagacatagacccagaggcaggcgtctccccgtgcgctgtttgcactcccggagtggaaagcagggtccacctgccgagaagaa

SEQ ID NO: 38559 - DNA, 122 bp, Homo sapiens
gctgctcagggttctctggggtccgctctccggggtccgctctccgctcccgctaccgatcgaactccccagtggagagttctaagtggcatctctggtgtgagcggcctgcaggcatggcg

SEQ ID NO: 38560 - DNA, 122 bp, Homo sapiens
aggaggtaaaggtgggggtcggaaccaggggcagtcgtctgcagcggctgctccctcagccgtttagaggcacctactgtgtgcacagggtctggtgatggcagagagccagggtgagtggg

SEQ ID NO: 38561 - DNA, 122 bp, Homo sapiens
acgcgagatgggcgcaggggagagctgggcctggagcgctaggggcaggtgcccagatgccggccgcccgggccttgcctacgtggacctgttgcgtggtgggagctgcggtgaacgtcagc

SEQ ID NO: 38562 - DNA, 122 bp, Homo sapiens
cagagagctgtcccggggtgcggtgagctgtcccggggtgcggggagctgtcccgggttgcggagagctgtcctggcatgcacatggccattgtcttgacttcccatgatctcctggccctg

SEQ ID NO: 38563 - DNA, 122 bp, Homo sapiens
agatgccactcctcccgtggggtgtccaggcaaccacttcacccctcccctggcctgccccgactgagggctctccacgccctggcccagggctccctagatagtgaggagccctcttggga

SEQ ID NO: 38564 - DNA, 122 bp, Homo sapiens
caaatcccaaaatgaacatcactcctcccaccacaaggaagagccaaactgggtcaaagccgccgagatcggtgatggaagagatgttggacagaactccctgggagcagaaaagaacacac

SEQ ID NO: 38565 - DNA, 122 bp, Homo sapiens
ccacctagagtggcgagcctgagggttcccaggccttcctattttttgactcgtccttcccggtaataaagtcattgttatgaccaagccctgacctttggttatccaagtccattgtcctc

SEQ ID NO: 38566 - DNA, 122 bp, Homo sapiens
ctcggcagcctgccatgcccgaggccccccgcacccccgcccgtgggctcccacacagcccgagcctccccaacgggcaccaccccctgctccgcggcacccgatcccatcaaccacccaag

SEQ ID NO: 38567 - DNA, 122 bp, Homo sapiens
tttcattgtactgaatgattgtatcctttaagccgctgctggagttaggactgacaggaacgcagtacaaattactgggggctagagtcccaaagcaggccagggaccagtctacattgcat

SEQ ID NO: 38568 - DNA, 122 bp, Homo sapiens
gatccaggaagcacctgtggccgatgatggcttttattgttggagcctcctcagcattcccgcccccctccgccctgccaactcccttgctcccccgtgcaggaggctaaggctgagagtcc

SEQ ID NO: 38569 - DNA, 122 bp, Homo sapiens
gcaccgaccgggagatggaagtttttcgcggcggcgccccagccacttcgcagggccgagcggtctcctccaccggccgcccggctcaggaatgccctgcctgcgagtcaaagtcggggtcg

SEQ ID NO: 38570 - DNA, 122 bp, Homo sapiens
tgcttatgtttaacttttagaaactgccagactatcttccaaggtggctgcaccattcctcgtcctaccagcagtgagtgagagttcctgctgctccacgtcctggccagcgtgtgtggtgg

SEQ ID NO: 38571 - DNA, 122 bp, Homo sapiens
tgggctggctggagtggagtgacctgagaatggggcctgctttgtacccagagcacacgccggccacggcttttacgacctagcgagcaggacgggaaaaggccagcaggtgggagatggga

SEQ ID NO: 38572 - DNA, 122 bp, Homo sapiens
gcactcctcaccccttgggcggtcaatggaaccgggtgctgccaaacatggggcggcgcacgtcacggaggcccggctgcccgggagcccgccgcagtggcggggggcggggcttgggcatg

SEQ ID NO: 38573 - DNA, 122 bp, Homo sapiens
ctcaagccctcctgcccagtgagtccctgttatggcgccatgtttcccccttcctcttgacggcctctccagggtgcacaccaagccctcctgcagatgggcttgtgcaaaaccagctgagg

SEQ ID NO: 38574 - DNA, 122 bp, Homo sapiens
tccagaaagcctacctgaactccacgcccctcccggccagccaccctagggttctccctacgaccccaggcacacggccacctctgctgtccacaggatgttagcacaactcactcccgtgt

SEQ ID NO: 38575 - DNA, 122 bp, Homo sapiens
tctgggggcctgtatccagctgggcgtcctgctgatgtctctggtcctggcgggccagaccggctggatgcaggttggctccccactgctctactgccaggctcccgcccaggccccttcct

SEQ ID NO: 38576 - DNA, 122 bp, Homo sapiens
cgaacagacaaggaaaacagggttaaaaaccttagtgaagtgtttgattgtatccgttttcgccttatgacagaaaaatattttaaggatcatgttgagaaagatgatataattaaaagcaa

SEQ ID NO: 38577 - DNA, 122 bp, Homo sapiens
acgagttatttctagggagtagcctttgtaaatggccttggggaatcacagcaccatcaccgagttcctcctccttgggctgtctgccgaccccaacatccgggctctgctctttgtgctgt

SEQ ID NO: 38578 - DNA, 122 bp, Homo sapiens
cggcagagggcggggtggggggcacactctcccacaggcagatggtggacagcaggcagacgacgccagcagggatggtatagacaccgagctggggaggggtgtgtgtgcacaaggagacc

SEQ ID NO: 38579 - DNA, 122 bp, Homo sapiens
tgtccagaacagctcctaccttagcctaccccatctcagtaaatggccccaatatttatccgattgatcaagtgacaatcttaggaatccttgacaccgccctctccctcaatccccatgtc

SEQ ID NO: 38580 - DNA, 122 bp, Homo sapiens
gctcctgttcttgaaccatctggccccttcagtgcaactctgtaggactgtgctctgctccgtgggggttggtgtcactgtttaactgctggaggatgttcttaccacaatcgttttcacct

SEQ ID NO: 38581 - DNA, 122 bp, Homo sapiens
cgccggccgcgtaggggtggcagtgaggccgcgcagtgaggggacggactcgcccgaggtcgcagagcgttcagattgactcgacaggctggggggcggggccggggtccccacgcggagtc

SEQ ID NO: 38582 - DNA, 122 bp, Homo sapiens
tttcccacctgccaaacaccttttgctgttgctttttggttttattttgttttgcgaaaccggggaatagtgacttaaggactcggctttctgccttgtgccagagagccacagtacactgc

SEQ ID NO: 38583 - DNA, 122 bp, Homo sapiens
aggtagttaaaatgtaactatgctgtgctgtcaatcacatctcgtccttctggattttaacgcttgttttacttgagggaagatgatatttgaacattctatagcatccgtcaacaggaatg

SEQ ID NO: 38584 - DNA, 122 bp, Homo sapiens
atttcacttctggatgtcggttatgttttttttgagacaggatctcgctctgctgtcacccggcctggagttcagtggagggatctctgcaccgtcaacttcctgggctatcaagcgatcct

SEQ ID NO: 38585 - DNA, 122 bp, Homo sapiens
aagaatcagaagaccgacgagggagagaggagcgatcgtgaaatctaagtgggctgcccccgggtcttccagggttttgtactcggtggcttggcctgagttgatgtgcccatattttcaaa

SEQ ID NO: 38586 - DNA, 122 bp, Homo sapiens
ttttaaacaaccagaccttgcaagaattcactcactagcacaaggatagcaccaagaggacggtgctaaaccattcatgagaaatacacccgcaggagccaatcaactcccaacagacccca

SEQ ID NO: 38587 - DNA, 122 bp, Homo sapiens
gccgcgagggagggagctacgtgcatagggaggtgctcgggctgctctgcagggcacccccgaggcgggcccgtggcaggccgcacggaatacagaaccctgtcgctgggaagggtgagggt

SEQ ID NO: 38588 - DNA, 122 bp, Homo sapiens
caggttattgaggttttgtgaactgacctaagttaaagcaaaggcactgaaggcagccagcggggccgcgggcgggaccttccctctcctggaggaaagagacaaaacacttctcagaccgc

SEQ ID NO: 38589 - DNA, 122 bp, Homo sapiens
ttcactcaactaatttggaacagtgatcttgacactagaaaatgctcttatcctgctctgcggcctgggttgctccgcctgtgggtggacccgctcagctgaagcaaaaaattatccacaca

SEQ ID NO: 38590 - DNA, 122 bp, Homo sapiens
ggcgcggcttccgcagtgccgagcgttttgcagcctgggagacccgggcttctctccccgcgggtcagcagggcaccgcctccacaccccagcctgccctcctagggacaggtgcgacgaac

SEQ ID NO: 38591 - DNA, 122 bp, Homo sapiens
cccggtcttccctgaagcctgtgtattgcgaccgagcctctttaaagcagtagcggggcccgcggtcacgtgaggccgattcctggaaagttcctggaaagccgcctccgcagcagccgggc

SEQ ID NO: 38592 - DNA, 122 bp, Homo sapiens
atgcttgtagtcccagctacttgggaggctgaggcaggagaatcgtttgaacccaggaggcgaaggttgcagtgagccaagaccacaccaacctggatgacagcgagaccctgtctctaaat

SEQ ID NO: 38593 - DNA, 122 bp, Homo sapiens
tttccaatcagaagaaacaaatgcagtgcactattctgataacagtctttctctatgcatcgttttccttgcctaataacatcagtatatgaaaatgtttacataaatgataataatgcagt

SEQ ID NO: 38594 - DNA, 122 bp, Homo sapiens
tctagtgcatggcatgggaagccctctctaggaggatgctgtggccacacaagtgctggacgaaccgctggagtaggtgacttccaaggtgtcctgatgtagtagctattagacaagctcct

SEQ ID NO: 38595 - DNA, 122 bp, Homo sapiens
caggacttgcccacgcgggttgcaaacgtcagccactgtctgtgtcacgtgcagtgacgccgcccgaggtgcgcacggtgcgcacaccgcacgcgcacgcccacgtaacggcttggctgggc

SEQ ID NO: 38596 - DNA, 122 bp, Homo sapiens
ggccaggctggtgagagcagaggtgcacagacctggatacatttgtggtggcttgtggagcggaacccacagacaagggcacgcaccgaatgtggagggtgtgtggtgattcccaggtgcct

SEQ ID NO: 38597 - DNA, 122 bp, Homo sapiens
agtgtaggggaggcagcagtcactttggaatcaagcagtactggtatttaatggcacctccgtttattagtgtatattgtataacgtttattttcctatccagcaaataaaaataacaaaac

SEQ ID NO: 38598 - DNA, 122 bp, Homo sapiens
aaacaatacaagaattggccccaggaaatatttattctaaatccggcacatgcaaaaccccgagatagccatcaaggacaaaaatcgtcactgggaggtgggaagccctgaaggaaaagcac

SEQ ID NO: 38599 - DNA, 122 bp, Homo sapiens
tgtgtgttccatgtgtgttcaggcagacagaggaacagctgagtgcatttccaagctgcacggtgcagtggtgaagccgagcgttgccaggcgctagaaagaacggggtggaatatagtgat

SEQ ID NO: 38600 - DNA, 122 bp, Homo sapiens
cccttcccagcacctggggatcgtgcattgtgaagcagcacactcaggggttccctgctccgtgtttccctccctaatgccaaagggccaggagccattgtgtcgcagagtaggctgcttca

SEQ ID NO: 38601 - DNA, 122 bp, Homo sapiens
ctctgctaaagatatccccagcatctaaaccaacatctggcctatactgaatgctcattacgtatttattggacaaatgagtactattacaaccctgtaaagtggttaatgttacctctgtt

SEQ ID NO: 38602 - DNA, 122 bp, Homo sapiens
tgctggtttcctccaagcccagcgagctctggaagggagcctgacatagatggctgaattcgccactcctggctttgtactctagtatatatctggtacttttgtcgggtgggtcattattt

SEQ ID NO: 38603 - DNA, 122 bp, Homo sapiens
agcaacctggatcaaggacacatttcttagaagctatattggactttgtgttggatgccacgaaaacaatggtggcctgaccgtagggcactcacatccagctaagggaacaaccacatcaa

SEQ ID NO: 38604 - DNA, 122 bp, Homo sapiens
taaaccagttgtgaggaaattaagtaagataattctgtatatgtggagagttcaggatagcgcctgatacatagtaggtgttctgcataactgtgtaaataactgtaaaaaattacctgcta

SEQ ID NO: 38605 - DNA, 122 bp, Homo sapiens
tggcgactccgggaaggggcgaccgggcgcggagagcccctgggacccaggcctcagggacgcatcggggtcggagctgggcccgggggcggggctggggtggggaggctgaggttccttcg

SEQ ID NO: 38606 - DNA, 122 bp, Homo sapiens
aagatcagacggtgcgcagccctgaggcttctgagggcagagggtgcgcttccttgccctcggggcggggaagccgtgaacgccgaggccattgtaaggctgggtggtgcggagcgcgggaa

SEQ ID NO: 38607 - DNA, 122 bp, Homo sapiens
agcatctgatgctaggtcctcatgctggtgatgcaggagtaaactagacagacaaaagtccgtgccccacattgtctgacacctacacacctgctgttcggactccattacaaacagctcca

SEQ ID NO: 38608 - DNA, 122 bp, Homo sapiens
tagccccctgacagctccctccgattgcatcaaagaatttggctctttgggaaagcagagcgaacagccaaaatttcacatcccttaaaaaggcctgggggtgggggtgggggtgcaaaaga

SEQ ID NO: 38609 - DNA, 122 bp, Homo sapiens
ctcattgccggcttctaaggagccttttccaccagcaagcggagcctggatggagctcatcgggcagagccgagcggagctgagcagaggtccacaaggttaatttaagttacacgcattca

SEQ ID NO: 38610 - DNA, 122 bp, Homo sapiens
ctaccctgcctccttggagtccgagcttcactggcacaaagaccctgaacccagctggagcgttttctcctcactttgagcctctgcagctgtcgctctctacaaagctctcagataccttt

SEQ ID NO: 38611 - DNA, 122 bp, Homo sapiens
cctgagtcctcaaaccgaatcactttccggcagcaacacctgtctttagcatgcaaacatcggtctcatagagtcttccctgaaagatgtttaatgatcatgtcattactgtcactcttttt

SEQ ID NO: 38612 - DNA, 122 bp, Homo sapiens
ggacccgagccccgctgccagcccgcttcccgaccacgtggaggaaccctccccaaaacgcgggagaaaggggcgacttccccaccccgagctgggccaggcctgcttacatgtcctcgagc

SEQ ID NO: 38613 - DNA, 122 bp, Homo sapiens
ggcgtcctccagcaggcgacccacattgcattccccgcttaagagggtcaacgtgttcttcgggggagaaattttctgaatgctttgcagataaaattgatcagatgcaggccagattgcca

SEQ ID NO: 38614 - DNA, 122 bp, Homo sapiens
actaaaataagtagggtaaacatacttacttcattaaattttgggctgtgatctgttttccgtaatggagagtgagcagaaacaaagcacacagaatcttgctttcagtgtgtatgaatgat

SEQ ID NO: 38615 - DNA, 122 bp, Homo sapiens
tctgtcctccaaacctgtgcttcttctaacctctctctcgggattttcctcttctgttgccgtgctgcacttgccctctgggattgaacccacaattgtaggcaaccactgcccttgtatta

SEQ ID NO: 38616 - DNA, 122 bp, Homo sapiens
gtcagggcgccggagtagccgcggtaccctgagcggtaggagcggggctgggagtagtagcgggagaagggggtgtagaaggtggcaggcagtacgttggggaccacgtgcggcttcccgct

SEQ ID NO: 38617 - DNA, 122 bp, Homo sapiens
tttgagcccaggtctctcagagcaacccaacagccccctttttgcccacgccccaatccgcgtcccctgccccaccccaccactgagggccctgggggtcaccaaacatgcccccccatttc

SEQ ID NO: 38618 - DNA, 122 bp, Homo sapiens
atatacccagtttgattctggacctcagctcttcaacaaagctgaggtccagaatcaaaccgggatcccctccatttctaaagcccaagttctttcatctaagatatgctgcctcagagaaa

SEQ ID NO: 38619 - DNA, 122 bp, Homo sapiens
aaacccagtgatgaggcatcctgcacggacctcttctttctttggagttttcatcagcaacgccttcccttccagtgtccaagggagaggtgtacttcctccttccctgagcccaactctcc

SEQ ID NO: 38620 - DNA, 122 bp, Homo sapiens
ccgcgggtgtggtgggtggggaggcacagtgctggggtggcttctccctgcagcaggtgccgaacccacggccaggcttccgtggccagcagccctagaggaatggccatcctgtccctgcg

SEQ ID NO: 38621 - DNA, 122 bp, Homo sapiens
cgcgtggccctcctcgcgcgtgcacggcaggcggatgtggcctccacctgcacccgcgctcgggtgttctgaaactggaggccgggcccttccccaggtgtggcccctcacgagaggcacga

SEQ ID NO: 38622 - DNA, 122 bp, Homo sapiens
gacttggtccaaggagagtagggggctgggcgagggaggcagggccctgaacagaggctgcggctgcgccaagttggctccaactccccgcaactcccgacaccagacacacacacacacac

SEQ ID NO: 38623 - DNA, 122 bp, Homo sapiens
ttttgtccacaagtttggcgagtttgcatccgtgtctaataaagaaactaccgtttctcacgcaggcacgttctgaacgcccgagtgcgggagccacgtaagacccggctcagggaccccgg

SEQ ID NO: 38624 - DNA, 122 bp, Homo sapiens
gttccaaggcctgggatggtccttgggcccccagcctgttgcaggacctcaggttatctccgcggccccagcgagcctcccaggaaagcgccggaagctccttccttcctgcaggaaggaca

SEQ ID NO: 38625 - DNA, 122 bp, Homo sapiens
ctaaactgtggtgatgtcacactagctgggatgacattttacagttggatcccgtaccaccgccaggcacctttaaatcaccgcagagtctgcagtgcggagggggcgggaagtccaggccc

SEQ ID NO: 38626 - DNA, 122 bp, Homo sapiens
tgtccctgtataggaaaagtttgctgactcctggccttgacagcctagactaatgcttctcgatgtttacttgcatgtgaattacatggggatcttgtgaaaaggcagattctgattcagaa

SEQ ID NO: 38627 - DNA, 122 bp, Homo sapiens
aaagcacacggaataaagtcccctcgatctatattttttgggaggcccctctgtgccagacgctgagctgggcgatgatgacacgcgagggcgagcaagagagaccctaatggtcttttaca

SEQ ID NO: 38628 - DNA, 122 bp, Homo sapiens
tgaagagggaaagagaacgggcgcgtggtcgattcctcgagctgttggacttgagtgtggcggggagcgggtggcgtgagcgtgtgttggggagacgggggctgctcttgctgggtgtcccg

SEQ ID NO: 38629 - DNA, 122 bp, Homo sapiens
cattcttctaagaaaaacaaaccaaacatcattccctgtccctgccctatctgtcccacacgcacagatccaccctgctttgttattgaaaactggagtttggctttgttgggaagagctcc

SEQ ID NO: 38630 - DNA, 122 bp, Homo sapiens
ggacctgaaggttgtctttccaggactctttccaggagggccagggaggctctgtatatacgtagaggtcacccaggcgtgtgtgtgtgcgcgcccccacgcccctgcccacaggcctgcat

SEQ ID NO: 38631 - DNA, 122 bp, Homo sapiens
ttctctttgagtgtccagagggcatggtgcaggcacatggattgagtggagggaaggaagcgtgtgtcttgaggtcctttggctaggttgggaagactacctgtggccctgatgctgtttca

SEQ ID NO: 38632 - DNA, 122 bp, Homo sapiens
aaactgatggctgacttctctgaatttgtgtagcgcacaacgaatggtgatgctgtgctccgggggctgcagtgcaccctttttaaagggaccctgcaatctcattgtttaatttgactctt

SEQ ID NO: 38633 - DNA, 122 bp, Homo sapiens
gccccaacctcagcgcgcggacccaggcctcacctgcgagccctgccaccaactttatctcgctaggcctgccctttacggcttgccatccgtgccatctgtttggagcctccttggttatg

SEQ ID NO: 38634 - DNA, 122 bp, Homo sapiens
tgtcctcaagcagaccaaaggggtgggggcctcggggtccttccggctagccaagagcgacgaacccaagaagtcagtggccttcaagaagaccaagaaggaaatcaagaaggtagccacgc

SEQ ID NO: 38635 - DNA, 122 bp, Homo sapiens
ttcagcatctactatgtaccagacatgtgtccagagccaaggaatcaaagatgagtgcttcgattgcttccttggaggagatcatagacttgcaagggattcaaggtcagtttgttttggaa

SEQ ID NO: 38636 - DNA, 122 bp, Homo sapiens
atttactcagattccaaaccactacaacccttgccaaacacagcccactccatttcagaccgccttcctgaggagaaaatgcagactcagggttccagtaaccagtgatggattcaccccat

SEQ ID NO: 38637 - DNA, 122 bp, Homo sapiens
ttgcgaggagcaggctggggatatgtgcaagtgaatgtgtattccaagagggggatgatacgcagatcttttggtgtataggaattaatacttttagattatcagtaaaatgtatactttca

SEQ ID NO: 38638 - DNA, 122 bp, Homo sapiens
gccagctgccagccctcctgccgctcatacggtgtcgtcagcagttttgtcaggtgcccccgccacgtcactatggcctctgccagccagcctggacccctgagaggcaggagttacaggct

SEQ ID NO: 38639 - DNA, 122 bp, Homo sapiens
aagccattcaatacctcaaatctcagcttttccatctgtaaaatggggataaatagaatacgcatttcatagagctgttgtgagcattcattgaaatgatggatacaggtgctcaaatgaga

SEQ ID NO: 38640 - DNA, 122 bp, Homo sapiens
gcccacttccggccccagaatgccgcgcggctgcacacttccgtcgcccaggccccgccccgttccccgccccgccgcgccatgcccagccgagtagctttacggttctcccaccgcagcgc

SEQ ID NO: 38641 - DNA, 122 bp, Homo sapiens
cgcgagccctgcccctccggcaagaggcaccatagaaatgtgtgctaacaagcctccctgcggcctgcggggaataggagagagcaggaagctttcagaacaacaagagtggctagaaaagg

SEQ ID NO: 38642 - DNA, 122 bp, Homo sapiens
caaactcctgacctcaagtgatccgcctccctcagcctcccaaagtgctgggattacaggcgtgagccaccacgcccggccacaaatgtcttaagtctgggtccagcccaagctgggcagct

SEQ ID NO: 38643 - DNA, 122 bp, Homo sapiens
gtgtggggagagcagaggcgcagctctgctggagagacctgaggcttgcagcgctgggcccggccgggtcgctgcggctgggctggaggtgaggcgaaagaagggcatcctctgatgggagt

SEQ ID NO: 38644 - DNA, 122 bp, Homo sapiens
tgagcttgcccgctgaggtcagcagcgacaacttggagtcggcggagcgaggggcatcagcggcccaagtagacatgggcccccacccaaaggtggctgcagagggccccgcacctctaccg

SEQ ID NO: 38645 - DNA, 122 bp, Homo sapiens
gaacctattgctatcacagcagaggaagaacaagaagaagttgagagtttaaaaagtattcgaaaatatttgatttctaatgtagcatgtggatccaccggcattagggatgtacaccttga

SEQ ID NO: 38646 - DNA, 122 bp, Homo sapiens
cagcacaggcagcagcaggcacagggcactaagcagcacacacgtgttgtactcagtgaccgtggtgcgctctgggggatgaggaacatggctgtttctaggtcgtgacaatggcaccagct

SEQ ID NO: 38647 - DNA, 122 bp, Homo sapiens
gaatcaaaccaaatccagacctcaccagatctgtcaaggtccaggctcatgacccccctccgggtcgcccaccctaatcgcagtgactatccgtccttgctctgaacagaagtttttatatc

SEQ ID NO: 38648 - DNA, 122 bp, Homo sapiens
tgtagctgcctcccagccccagggtggaaatcatgacctttgagaagcaggcaagctgcacggcatagatactcaggcctggtgaaggcaaagtggggccacaccctagaaaaaccacaaaa

SEQ ID NO: 38649 - DNA, 122 bp, Homo sapiens
tctggatggccggagcagacactacagtcttcaccagaggcagccccataaaaatgtcatcgtctcgggctctccccgcattacaacacaatgatttctttggggaggagaaaaaaaaacta

SEQ ID NO: 38650 - DNA, 122 bp, Homo sapiens
tcttttgtatgtgttttacatttttcactttctttaaataattgcttcttgactcttagacgttccggttcacgggggtgacataattgcggggaaacatgccggtctgcccgtggcaagct

SEQ ID NO: 38651 - DNA, 122 bp, Homo sapiens
ttctcacgtccgcccgcagaaggtgacggttctttgcactacgtcctccctagcacctgacgctgccagacgtttcaactttggacttttcgactcaacttatggtgagtgtggtattatcc

SEQ ID NO: 38652 - DNA, 122 bp, Homo sapiens
ggatacgggtttagcaaatccgtgtgaaacgggggacgacacaggatcaagtgcacgggccgctgcgggggttaaactggatgacacgcatacagcacttagcacataggaagcacccaatc

SEQ ID NO: 38653 - DNA, 122 bp, Homo sapiens
attctcctgtaagcttctgatcctctctccagttagtatctttgggcccaggacaactcacgtgttgcaaaaagcataaaataaggaaaagagaaagcattcttgtttgtcgatgtttatgt

SEQ ID NO: 38654 - DNA, 122 bp, Homo sapiens
cgctgcgctgctgcctgttgaatgtggcggctgcggcagcggctgctgcgactaccaggccgcccgacttacgggatctgccgccgccccccgcccgcggcggcgcgcgcgccggcccgccc

SEQ ID NO: 38655 - DNA, 122 bp, Homo sapiens
agttgacggccttttcccccttggcgtacaagtattgagtcccgcgccctgggagggagacggcgctcagcaaatttagatgaatgcaacgcttcaacgtgggctctcgacctctggtcccc

SEQ ID NO: 38656 - DNA, 122 bp, Homo sapiens
ggcccagagcagccacagcatgttggaggttagggggtctggcctgcaatgcccaccacacgctagccggtcggtgtcatctcccagcgcccccgccctcacctctcacctgtgcgcaggag

SEQ ID NO: 38657 - DNA, 122 bp, Homo sapiens
gcctctccagcccaggttgctagggcttggcggggcaaccaaacctggcgtgccaggaggcgcggcgcgcgcgtgagcgcgcaggcgagcttgtataaggaaccagcgttcttcggcttcgg

SEQ ID NO: 38658 - DNA, 122 bp, Homo sapiens
ctaggtaggccacgtccaggtggcaatagtggtacttgtgggccttgcacaggcagatgccgtggatgatggaggcacagttcagctcgtccgacaggactgcgtcctcgggtctcagcagg

SEQ ID NO: 38659 - DNA, 122 bp, Homo sapiens
gagaacagcgattagggccttaaacctcacacccgaacaaattcggccggagttactgagcggcaggctctctgatggagatgggtgctttcagacttaagacgtgaaaacaaagatcagcc

SEQ ID NO: 38660 - DNA, 122 bp, Homo sapiens
ctaaagaaaacaatctatatgattcacttagcacaatgctgggcacacatataggctgcacgttttgcaaacaaaaatacagaacaatataacatcctacatgcacaataaaatgaagcagt

SEQ ID NO: 38661 - DNA, 122 bp, Homo sapiens
ccccggagacaaaacgggggtggtgactctgccgtggagtggccagccccagctcggaggcggaaaccgtcaccttgcatggatggatccaggaatcgaattcgaattccaccagagtggcg

SEQ ID NO: 38662 - DNA, 122 bp, Homo sapiens
gaacaaagaacacacctggccacggcatttcccaacctgggctctgcactcaataccccacggtggtttaaaaaggtgtagatgtctggtcctcagtgttgtcaaaatgtggacaggaacga

SEQ ID NO: 38663 - DNA, 122 bp, Homo sapiens
gcccagctgaggacccaagcaagatcctgggcttgggcctcttagagatgacaaagcaggcgccattctcccctcacctgcacggcccaggcttcaggtgagccacggggccaaggcggcca

SEQ ID NO: 38664 - DNA, 122 bp, Homo sapiens
tgtgtgtttaccgttcatcaccactcgggggcaccgggccgcccacccactcccaaaatccgtcagtattcactggacctcaggccctgtgcaggagtgcgatccgggctgggccgctgggc

SEQ ID NO: 38665 - DNA, 122 bp, Homo sapiens
gacggtgtgagatgagaagcaccgagccacacttgagcttaggtgaggcctcggcgggtgcgaggtgagggcagggatccacgaactcagagtcagatgctgttggcccgaatcccatgggg

SEQ ID NO: 38666 - DNA, 122 bp, Homo sapiens
taccttcttttctacttacttagttaactctgagccagtttcttcacattttaagagaatcgtggtgaagattaaatgaaataacatgtaaagagtgtcttgctcaattttgcatacacatt

SEQ ID NO: 38667 - DNA, 122 bp, Homo sapiens
cctccgtgtgccctcccgggtccctgggccttcgtgtgccctcccaggtctctgggcctccgtgtgcccactcccggagcgccaggagttaagtataagtctccgtcagggctcttggtggc

SEQ ID NO: 38668 - DNA, 122 bp, Homo sapiens
cctcagtcacagccctgaccacagggaggtcgggtctggatttactaaaggaccccagagcgggagactgcccctcgccggctgcctggcttcgccatggggtcgggtttcgaccggccggt

SEQ ID NO: 38669 - DNA, 122 bp, Homo sapiens
tgaggcaaagggctacgatgttagcttttagtgagcaaggccgggcagtggaaggctgaccggtacctctaactcaccctgcatgggaaggcccctcctcacaactctgtcctggaggaacg

SEQ ID NO: 38670 - DNA, 122 bp, Homo sapiens
tcctgggggccgagcctaggtgggctggaagtgacagccccgggggctccaggctcagaacgcccggcggggccccagcactatttgcatatccccagggaggcagcaaaggttcggctgca

SEQ ID NO: 38671 - DNA, 122 bp, Homo sapiens
tgatgggcagggacttggcgggaggcagagggacgtcggagggcagggcgggagtgagatcgcctctggtttctgtggagaactcctgcacctgggtcagggtctcagccacggacaagggg

SEQ ID NO: 38672 - DNA, 122 bp, Homo sapiens
ccactagaagctcaccgtgagtccattcacagggccagagttccaagtgtgcggcgtgggcggggcctgcagaaagggacggggcctgcagaaagggacggggctggcaaaggcctggtcta

SEQ ID NO: 38673 - DNA, 122 bp, Homo sapiens
cctcctggatacccgggccaggggaatcgcgtgcagctgaaggaagcctggaggaggaaccgcaggccccgcgctgcacagtgcagagccagctggggactccccagcatctgaccgctcca

SEQ ID NO: 38674 - DNA, 122 bp, Homo sapiens
gtccggcggtcagtctgtccgccccggagccccctgggccccacctcctcgtcccgctctcggaggcctgcggcttcacggccagacagaaccaggacagaacaaccccagcccgttaccgc

SEQ ID NO: 38675 - DNA, 122 bp, Homo sapiens
cactttcaaatgcctcccccatgaatgattgtgggccggccacgtgggtcttccatctgccgggccctgcagggcttcccagctaggcggcatctcacaggacagggctggggtgagactcg

SEQ ID NO: 38676 - DNA, 122 bp, Homo sapiens
gcccctgcacaggagacaagtgcgttcagggcacaggccccgacatcaccccaaggacaacggcacaagtagagagaaactacctacctcacttcaaattatgtttggacttgacaaaaatg

SEQ ID NO: 38677 - DNA, 122 bp, Homo sapiens
acgtattcatcatgtggcgcttttccctctgcatgtcccatctttggggacgtggtggagcgcctgtcgggtgtggcgggaacacgtgtgctgacctggccatgtctgcttagatctgcagc

SEQ ID NO: 38678 - DNA, 122 bp, Homo sapiens
gagccaggcgggaaggaggcacaggtgttccagctgccgcacactcaccagtaatggcgacggccgagatggggcccacacgcttgccgtggtgcagcccgtagagcagcagcttgtacctg

SEQ ID NO: 38679 - DNA, 122 bp, Homo sapiens
ggacagccaataggcacacgagatcctccatcaaggggcgttcccatctggggatccccacgccggcagcaccaaggcctctgggtcagcttctttaagggcaagcgcccttagagaagcag

SEQ ID NO: 38680 - DNA, 122 bp, Homo sapiens
gcccaggccccgccccctgttcggcccctccccaggcccctccccgcccccccccccccccggcccggcctcaggccccgccctctctgcgcacaggcttctttgcctacacgtgcggccgc

SEQ ID NO: 38681 - DNA, 122 bp, Homo sapiens
ggtgcaggatcctcacggtaggcttgacgttgatttcaataaggaaagcagaagcctctgcgtttgcatcctgaactttgcagcctaggaaaggaaatagtgcgcaggctggaggagctggg

SEQ ID NO: 38682 - DNA, 122 bp, Homo sapiens
tccctgatgggtgacacagagccaagggatgggataacaagagctaagggcaaactagcccggggctggcactggtgacttcatctgtcttgttatcttctgcatctggagcttcaaaggca

SEQ ID NO: 38683 - DNA, 122 bp, Homo sapiens
ctggctccgcgggcacccgcaccctgcggcgaggcgtcggcgccccgcacgtgccgctggcgatcagtctgcagttccccagccagtgcaggtttcgtgtgcaaggggagagcttccgcggc

SEQ ID NO: 38684 - DNA, 122 bp, Homo sapiens
agaggccacctcagaccggtcagagggcagcagccgggacggccagggtagcgacgagaacgaggagtcgagcgttgtggattacgtggaggtgacggtcggggaggaggatgcgatctcag

SEQ ID NO: 38685 - DNA, 122 bp, Homo sapiens
cccgctccccgaaaagagcttctctccagttgggtctagatgcccccttcccaaccagggcggatggccaaaggctccgctcccttgcagggtaggcttggaaaggcacggggcccgccttc

SEQ ID NO: 38686 - DNA, 122 bp, Homo sapiens
tacattgcaacgatgaataccaagttcagaagagcagttatctcagagtcagagagtagtcgtgattgggaaggtggttacacaaagctcttcaacaggaatggtaatgtttcatttattaa

SEQ ID NO: 38687 - DNA, 122 bp, Homo sapiens
tgtggagccctcagaatgggttttactccgggcagattccaacacaccctcatgctatcccgggagaactgcggaccaggaaggcagaggccccttcctcccacccccatggaagccagacc

SEQ ID NO: 38688 - DNA, 122 bp, Homo sapiens
cgcgccgccccgcctctactcccagaaggccgcggggggtggaccgcctaagagggcgtgcgctcccgacatgccccgcggcgcgccattaaccgccagatttgaatcgcgggacccgttgg

SEQ ID NO: 38689 - DNA, 122 bp, Homo sapiens
taagcactttttgagcatctactctgtgtcagtcactattccaggtcctcaggatatagccgtgacctaaacacagaaatctaccctggcggagctgatcttctagttgtggcggtgaggag

SEQ ID NO: 38690 - DNA, 122 bp, Homo sapiens
gccctcccgccagggtaaatactgtactcactgcagaagtgattcatagtgagagatggccggaaaaaggcttggccgtgacaacagtggctcacggggtggccaccgtgaccttgcagggg

SEQ ID NO: 38691 - DNA, 122 bp, Homo sapiens
gactcagctcggtgtcttctcgcaccttctcagaatcaagtttccaaaatgagggtcatccgcctgccttggaatttgggttgggaagtggatggagttcctggacacatgctctaggccct

SEQ ID NO: 38692 - DNA, 122 bp, Homo sapiens
catcaattaggaactccgggcagagagagctgcacttaggtcagggattaactgtggacccgcgggacccaagcgctggggtaggaggactggggatctttgttcggagtgcgctgcgaagg

SEQ ID NO: 38693 - DNA, 122 bp, Homo sapiens
tgtggctggggctggaggcggcctgttgaggggtgggtggagggtgggggggttggtgtgcgatttggggaggcccagcagggactccaagcaagggcaagggctagttctttttttttttt

SEQ ID NO: 38694 - DNA, 122 bp, Homo sapiens
gctgcccatcgatgatgggagaatcagagatgtgctgcagctcactgtcacttatcatcccggcttcaggcacttccatggcatctttcccgaggtcagctgcattgctacagagagtcagg

SEQ ID NO: 38695 - DNA, 122 bp, Homo sapiens
cgatagggcggccccgatctgggctcagataaagtttaaaatattacattctgcaagtcccgtcctgataagatcgttctgtcgggacgggctgaaattgtgatcttatctcgcgcggttga

SEQ ID NO: 38696 - DNA, 122 bp, Homo sapiens
cactgctctgtgggacgcggcgacccctctcccgcggcggccgggaccccgcgcccaccgcgtctggagcccacctggcggccccactggctacatttccgacctggaccccggccggctgc

SEQ ID NO: 38697 - DNA, 122 bp, Homo sapiens
ttcgtggggcggggggtcccgccaggtgcccactcacactgcttgggctctggcagtactcggaggctgcagcccgtcggaagcgcaggagtggggctgggacctgccaggatctcacagct

SEQ ID NO: 38698 - DNA, 122 bp, Homo sapiens
gttatgttctcagaaagagaaacaaaatgcccaagattaaaagaaaaaagataccaaccacgtggatttgactgcattaaaaacagtacgggggtcctggttctgtgtccctctgcctgggc

SEQ ID NO: 38699 - DNA, 122 bp, Homo sapiens
ggtgaaagcaaaagggaaatgctaaatgacatggcacagcaagcaaggtctaggcagctgcgcctttgataacaagctgcttgaagagaaagaccagatcggctgagtgaaagcactgtcca

SEQ ID NO: 38700 - DNA, 122 bp, Homo sapiens
catgtaaagaatttcatccatcatgtattctgatcccagtacaagtgtttattctcttaccgtcacgattcttatatgaaggaccaactcaaagagttgtcctagatataaccttatcctct

SEQ ID NO: 38701 - DNA, 122 bp, Homo sapiens
accgtttaagtctcaaagttactgctatttccattttcatgtattgaaaaatacttgttacgcactaatatccggtgtattcttggcttccctctgtttaggagctggttggagaagatgaa

SEQ ID NO: 38702 - DNA, 122 bp, Homo sapiens
ggtttaccaggatcacctgaaactcccaaaagaatgcagcaactaggcaaagagtgtctccgcctcacattatctgcccaagcacagtgctgttggccaagcctccagcagctgacgggacc

SEQ ID NO: 38703 - DNA, 122 bp, Homo sapiens
taaatctacaaaccttgttatataataaagcaagatgtactctgttatgatcagtgtgcacgttagagcaagcactacttttccgatcttaattattccagagatgcttgaccaatttactg

SEQ ID NO: 38704 - DNA, 122 bp, Homo sapiens
caaaattctttcataaagaatgagacaaaccagccaagcacgttaaagtcattgagctttcgggggaaaaatcagatttttccggtgactcggggtaaatgtggggacttagaaagctcccc

SEQ ID NO: 38705 - DNA, 122 bp, Homo sapiens
tagactgaggcaggctcagcctcgggggtccgccacggctgcggcagtttgtgcagaatccgaaataaaacggttgccttgcagctttcatttgtgttaaggccacaacagtttctgggctg

SEQ ID NO: 38706 - DNA, 122 bp, Homo sapiens
ggatcacgcccacgtgcttcttgttggggctgccgaagctctgcaaaacagcccgccccgcgtcagccgtttccactgcccgggacattcctaaatcccgcgcggggagcgggctgtcagcg

SEQ ID NO: 38707 - DNA, 122 bp, Homo sapiens
tgccctagtctcctgcactgagcttggtgagcccattcggatactgctggatgcatgggtcgggagggaggtgccctgggttgggtcgatgatgagaaccttatattgtcctgaagagaggt

SEQ ID NO: 38708 - DNA, 122 bp, Homo sapiens
aagaggcggcggcagcagcggcggcgtcaggcgagtctcacgagatttgggcggaactctcgcgcagccgggagccctcgccccgcccaacaggcccagcgcgggaggtgaaaggggaaccg

SEQ ID NO: 38709 - DNA, 122 bp, Homo sapiens
gacacagtctagagcaaccagagctgctggaaagtaagaaagggaatcccagagaggacacgccatgtcccgtgtataaattacactgggattttcagatgacgcctgaactgcacatatgt

SEQ ID NO: 38710 - DNA, 122 bp, Homo sapiens
agcgcccgtgccagagtgagggctcttggaggaagccctggctggccctccctggggactcgttctaactatcaagtcaccctcgggattaggagggaaacacggagaggcagaaggtgtct

SEQ ID NO: 38711 - DNA, 122 bp, Homo sapiens
cagattgtaaatggggttggggggtcggggtagagggcatggcgagtaaggattatttttcgcataataacagttttatgcagcatggttttgtacaagagaagtgttttctaaatatttgg

SEQ ID NO: 38712 - DNA, 122 bp, Homo sapiens
gtgcaattgggtgtgtaaggagaacatactgcagggttgggggtgagtgccctctgtgtgcgcatatgtttcaggaaatctgcacataggtaggctggaagcgtgggtccgcctaaggcaag

SEQ ID NO: 38713 - DNA, 122 bp, Homo sapiens
ctttgtgagcctgaacataccagtggggtgtgtaatgtaaagcctgacattatataacttcgcaccctctgtttgaattgggttctgaatgaagtgaatgagctggagtcctgctgtaggaa

SEQ ID NO: 38714 - DNA, 122 bp, Homo sapiens
tgtctgttgagaagctttggggctgtttactgcccaccaagctctcgaaactgtggctctcgaaacccagagggaaggggagccttatcactagtcatggcttctgcttgatatctgtccaa

SEQ ID NO: 38715 - DNA, 122 bp, Homo sapiens
ggcccgcgcgcttaccattggcgttcttgccgcagatgagatgctcatagggctgcaagacgccccagagctcggcgtcgttgttgatgaccatctccagggcctcagcagacacctccccg

SEQ ID NO: 38716 - DNA, 122 bp, Homo sapiens
attcacgccgcgcgggcgcctcggcccgcgccctacccggcagggctcggggtgtgagtgcgtttccgccggtttttcctgcctgaggaggaaagggggagctgttttctctctcctcagaa

SEQ ID NO: 38717 - DNA, 122 bp, Homo sapiens
gacactagagccgtctggatgtgttgacaaggatgccgctgggctccacccgggctcacccgggccctcccgagccctgggccgcgcagcaccggcgtccgcctcctccccattactcggcg

SEQ ID NO: 38718 - DNA, 122 bp, Homo sapiens
ggtccagaagagggccacgtgggcgagagcctcggtcgtcgcctcccagcacctcggggtcgtagagaacacaaaagtcacacaaccctcgccgaggcttgacccccgcgacagagtttagt

SEQ ID NO: 38719 - DNA, 122 bp, Homo sapiens
ctgctcgtcgtcgtcctccagcagcgcctcgctgggccggccgggcggcggccgcggcggcgccttcttcaacttcgccgacggcgcgcccagcgcccctggcacagccaacgggcaccccg

SEQ ID NO: 38720 - DNA, 122 bp, Homo sapiens
tggagttccccgaagaaatttctgtggctttccgtgttgtgtaccgacctgctttaggtgcgtttccaaagctgggaacatgttacttctggatggtaggctgaaaactagtcagtgacatt

SEQ ID NO: 38721 - DNA, 122 bp, Homo sapiens
ctctcccgttggaggcgcgggtggtgctgagcggctggacggatgctgcccgccggggttcggcgcgcaggcactcagatggctcccacctccgcctgggccttgcagctggcggtggggcg

SEQ ID NO: 38722 - DNA, 122 bp, Homo sapiens
catctgatgagagtgactccggttggggggtgggggcgtgtgggaggccgagcctgtcctcggatcagttgcgtactctgcccgccccctctgactcatgctgacaatcttcttccttcccc

SEQ ID NO: 38723 - DNA, 122 bp, Homo sapiens
ggattctgtggctaagcagttggggacgacggtgcccccgtgcccggggcaggcatcctgcgctctcacagccctggccagtggcaccggcagtgcccctccggccacaccccggccaggtt

SEQ ID NO: 38724 - DNA, 122 bp, Homo sapiens
cggggtccgcggagctggtggaaagttagtcgcggggcctcaaagtcccctccccagggccggaacccccacccccgcgtcccctggtgcccccggcgtccgagactccgcgtcctcgcggt

SEQ ID NO: 38725 - DNA, 122 bp, Homo sapiens
atgcagaataacagatgagtgctatggagagaaagacagcagccccactacggaggagcacgggatggggtttgcaattttagatgggtggcctttaaccaaatccttcagtgagagtaagt

SEQ ID NO: 38726 - DNA, 122 bp, Homo sapiens
ctcactaagcacccgccacaggtcaggcactgctccagacaccaagaatacggcagtgaacgcacaggcaaatgtccctgctctcctggatccgcaagagggcacgacccagggaacaggtt

SEQ ID NO: 38727 - DNA, 122 bp, Homo sapiens
agccagaaatgagatcctgggacaactaagcaactctgttttttgcttttctgagcaccacgccaccatgatcattgagtactgtgtgcactgccaaagaagcactgatcagggggctagtg

SEQ ID NO: 38728 - DNA, 122 bp, Homo sapiens
tccaagtataaccaatgatatctttctgtcagcaatatcactattccattgtgatcaacacgaacattaatcctcagatcgaagaagccctattactcccaagaaggagatcttgaaaaagg

SEQ ID NO: 38729 - DNA, 122 bp, Homo sapiens
gccacatagtgagaggatgttttcctactggagctgagccgcgggggcgcgccccccggccgcgccctcctagccacgccctccacgcccggccttccgagagcgagctcggtcggacgcac

SEQ ID NO: 38730 - DNA, 122 bp, Homo sapiens
gaggcgagggccttggggagcaaggtatgagggctgctctggttcagcggttcgtgccatcgacccgagctgcagcgtgcggaagaccggcaggagagtgcggtggctcgggggactacgcg

SEQ ID NO: 38731 - DNA, 122 bp, Homo sapiens
gtgtggcgcgggagcagctgcatgagggcccacgtactctgcacacatcagcagcccatccgaccttgtccctggtcatgcgaaacgcatgcccatccgacctccgaccttgttcctggtca

SEQ ID NO: 38732 - DNA, 122 bp, Homo sapiens
actcagcggcaccccggcctgcgcgggtgggtccaccaggctggggccgccgtacggcgtcggacagggaaatcagaagctcataataaactatctgatgtcggggtggtggggcggggggg

SEQ ID NO: 38733 - DNA, 122 bp, Homo sapiens
tgtatatgctgttgtggcagtgtctgtcagaggaaatgttgggctgaacaggttttgtgccggtagggtgagaaatgctatgaataagagataagaggcatcatattgtactataaagccaa

SEQ ID NO: 38734 - DNA, 122 bp, Homo sapiens
agaaaaggccgtgagagtcggaaggcgcgtcagtagttttcaggtttgcgagctcaaccacgagacagtcacacacagccgtactcataccacacggtctgcggatccccgccgggctccgg

SEQ ID NO: 38735 - DNA, 122 bp, Homo sapiens
agataaaaagaagcagggaagaggcaacagcaagacgtttgcaatagtggcacatgaaagcgttgagccactccaatattctgtattattcagtgcataattctagagcacctgagactggg

SEQ ID NO: 38736 - DNA, 122 bp, Homo sapiens
gtggctttccacccaggaatgacattttccaaccccgttccatctagagatgatcacagtcgtgtgaatagttacacgaagagtaggaagtggaattcatgggtgcctcccccaggctccct

SEQ ID NO: 38737 - DNA, 122 bp, Homo sapiens
ggcctctgcaacaggcccagctggtgtctctcggaggctggctggttcctgactcacccccgggcttccccttccactgtggttttcctgtcagcagctgattcactgtgctgacatggaca

SEQ ID NO: 38738 - DNA, 122 bp, Homo sapiens
ccgcagtgacccccatagtgtccccggaatggacggactcacgggctgtcacatcgcgcacgtcttccccggagatgggctggaagaccacgtcgttcctgggctcctcactcctccgtgga

SEQ ID NO: 38739 - DNA, 122 bp, Homo sapiens
cctgcgtgtgcgtgtcaacgcctgtgtgcgcgcgttaacgcctgtgtgtccgcgtgttaacgcctgtcctagactccatggtgctcatcaccgacaagttctggggtacatcgggtgtggag

SEQ ID NO: 38740 - DNA, 122 bp, Homo sapiens
gaagcgaagaaggaagaagagaaaggaagacagaagagtgagatactcaagttagttctgcggtagcatacatttggtgcctgtgcagatagagtagaaggtgagagacagaaaagtcaaca

SEQ ID NO: 38741 - DNA, 122 bp, Homo sapiens
ctgacagttgcctagaaaccagtcttgccctacctgtgttgcaggtgtacctcaagtcaccgacacatctcttttaaagctacagtctccattctgacttaagtttatgactaaccatctat

SEQ ID NO: 38742 - DNA, 122 bp, Homo sapiens
tgtgtgtgtcagttttacagcaccagaccttttaaaaatccatcttattcataggccaaacgtgtgtctactgtatccacttaagtctgcaaagttttggcacattacattaagggcgaact

SEQ ID NO: 38743 - DNA, 122 bp, Homo sapiens
taagaccagacaagagaaacaaaatctgagacctctcagttcacacaattaccacgtgcccgaaatgcaataacacaaggctgtactcatcttttttgccattttctttccctgctgagttc

SEQ ID NO: 38744 - DNA, 122 bp, Homo sapiens
tctccttaaggggtagcaaatgagaatcaaagcacatgctcttggcttcccattcaaaaacgtgctctttctgtggtgttcaacccataagggtggaaaaaaggacattcacatttgactcc

SEQ ID NO: 38745 - DNA, 122 bp, Homo sapiens
tgccagaggccccaggtcacctcgggtccccttgaaagaatgtctcggtcacatcaggcccgctaggtccagagagcgagcccccaatgcccggccaggctaagccgcagagaccctctcag

SEQ ID NO: 38746 - DNA, 122 bp, Homo sapiens
agcccttcacccctccactgcactatgggagcccctctctgggctggctgaggtcgcagccgactccctctgcttgcagggaggtgtatggggagacgcccaggcgggaactggggctgcgc

SEQ ID NO: 38747 - DNA, 122 bp, Homo sapiens
tcgacgggtaagggaagagcgcctcacatgagcatgtgcaccacttcagtaaacacaccgcgcatgcggcccctcccaggtgctggcatggcaggccatggcggcgcgtgcggacagcccag

SEQ ID NO: 38748 - DNA, 122 bp, Homo sapiens
ctccagtttgactctctgaggatactctctccctgcattactgaaagtgtcgtggttctacgaattaaagttatataagaagcatgtgagatgctggttaacccttcagagaatcagtccct

SEQ ID NO: 38749 - DNA, 122 bp, Homo sapiens
tgctgctgccacttccctggtctctgctggcttccctgccaccttccagacccttcctttcgtgtggctaattttcaggaggggcaggggcacaacctagcagctccaacctatgaaagact

SEQ ID NO: 38750 - DNA, 122 bp, Homo sapiens
gcacttggcaccccagggccccgggggtgctgcacgtgagccgtggcgtagcttaatcgacgcgcacaaggattccgtgtattcagtgtttattgaggctgtgttttgaagcatgccattga

SEQ ID NO: 38751 - DNA, 122 bp, Homo sapiens
cagaggactggctgtgatgggaggtaaatggccacactcccgtccctgcaacggggtgttcgtgagagaggggtggtgggagagatcctggagtttgcagtcagtcctcctggggtggaagc

SEQ ID NO: 38752 - DNA, 122 bp, Homo sapiens
cgtgagcctgtcttagcccttgggggcatcgtgaggttggattctttaaagacagggctccgagggttgggaatcttgagggctataacaatactaaaaactgaggacacgcatacatttcg

SEQ ID NO: 38753 - DNA, 122 bp, Homo sapiens
ccgtgcggggagaggccacatcctgaggcctcccaccgagaagcaccagggcttggtggacggggcccgcgaacccagggccacacgccgcctccctccttccttccccgcgggcctcgccc

SEQ ID NO: 38754 - DNA, 122 bp, Homo sapiens
gagcaggctgctccagatatacaagacatcattcctgcaggcattgtcagtcttgtagtccgttgacagtaattgcatggacaacacccaaattgattgacttttctgtaagtattgttgaa

SEQ ID NO: 38755 - DNA, 122 bp, Homo sapiens
tgggacccggctgaggggctccctggggccgaccccgagagatgccgagaggcgctttctcgcggaccggagccttcgacggccttcccgtgggggactctgctctagctgggtcacctcgt

SEQ ID NO: 38756 - DNA, 122 bp, Homo sapiens
tggcctgcactgcccaagtttcaaggctcctctgtcctcatccgctgtgggaggggtaggcgggcatagtgcccggtgagcctcctctcctgccgtccacctcccatcttcatgagcagctt

SEQ ID NO: 38757 - DNA, 122 bp, Homo sapiens
ccgcgcctccggcccggtccctgccccgccaaatccgcgcatcggtttcccatcccatagcgcagataggtagggcaggtacacagggaggtgttcgaatgatccccgtttcacagaagacg

SEQ ID NO: 38758 - DNA, 122 bp, Homo sapiens
gtgccagcgcgagcccttggccttgggcttgtcggcctatttcactaggaaaatcagatccggccaccgtggctaggatgctcgtggccgggatgagccggagctgcagtgaaaggaagccc

SEQ ID NO: 38759 - DNA, 122 bp, Homo sapiens
accactgccagtctcccgcttcgctgccctccccaagctcgtccatctagctccgggagccgacgggggttcctcaagctgctctggctgctgctccttgtcgctgcatatggctcttcgcc

SEQ ID NO: 38760 - DNA, 122 bp, Homo sapiens
gcgcccaggtggccgtaggtctcctgcatcacgtcccggtacagagccctctgcgcgggccgcagacagccccactcctccggggagaagtacacggccacgtccgcgaagctcacagtccc

SEQ ID NO: 38761 - DNA, 122 bp, Homo sapiens
ggcacccgcgaaggccggggacaactggtcacggggcagtgggggggtgagcttgttccgcgcggaggatcaactcaaagcctaggggattagggaggggagggcgcaggtcagagcggcgg

SEQ ID NO: 38762 - DNA, 122 bp, Homo sapiens
gggttgagtctagctgtgtaggccccttgttcctcacctggagaaactggggtggcaggccggtcccccacaaaagataactcatctcttaatttgcaagctgcctcaacaggagggtgggg

SEQ ID NO: 38763 - DNA, 122 bp, Homo sapiens
gagctcaggccgcagtcccctcctgccggctgcggaagctcccagaagcggagactcaatcgcccccctgcccctgctaccaggccagagtctggagtacagatactggctccctggggcct

SEQ ID NO: 38764 - DNA, 122 bp, Homo sapiens
cagtaccggaacctggtgctccagagcagaagagctgctccttgacaatcagaccgagcgcgcattcatttatggacaagctttgtgttccacaatggggtcctggggtgggtcgggatgca

SEQ ID NO: 38765 - DNA, 122 bp, Homo sapiens
ctgaaactggtgcagtctgcgcctcaccaggcagagaatggatgtggggcagcttgacaccgagcaggggctcatctgagcctcaggggtggttgctctatcaaagtgtttgcaagtaaaca

SEQ ID NO: 38766 - DNA, 122 bp, Homo sapiens
acacccaggcagaaagaaagaaagctgcggggttccgaccccacattccggcggagagctcgggcctctctgcgggggggacgcccagcctcccccggcctgccaccccaacccccctcctc

SEQ ID NO: 38767 - DNA, 122 bp, Homo sapiens
tgtgtttagaacaacaatccaggaatccaacgctactgctctaagtgcaggcaggcgtctcgtgggcacttacgatctttatcaaacttgggtaaggtcgctccactagcagccagctcggg

SEQ ID NO: 38768 - DNA, 122 bp, Homo sapiens
gtggaggctccagcaggagacctgggggccctctgtgctgggaggctcacttcctgtccacggggcgggcccagaggctgttctccaagaacttgagggttccaagaattcagtgcacttca

SEQ ID NO: 38769 - DNA, 122 bp, Homo sapiens
tcctaaacctccaagaggcaatggctgaattcggcagcggcgcaattcctgcaaaaaccacggcctctcctcccaaagtgaggaaactgcatctttacagagtcaacacacaggtgtggggg

SEQ ID NO: 38770 - DNA, 122 bp, Homo sapiens
tctttgctttgggctccttgattcacatttcttgtagcatgtgcttacatcatcctggctcgatttaataaccaatcaatgaaaaactaggcatgtcccacagatcagcactagcaaggatt

SEQ ID NO: 38771 - DNA, 122 bp, Homo sapiens
tgccccaggctggccgggcaggcctcgctgctgtttgaattgggcagtgggcggtccaggcggagggcacggactctgaaaggagagaagtggtgtttctgggggccacaagatcggggcac

SEQ ID NO: 38772 - DNA, 122 bp, Homo sapiens
cacgaataacatttcatttcaaaactaaattattttactgccccaggcaactgatatatccggtggaataaaaatcagctcttaattttcagaatcccattctagtcccacatgacagctca

SEQ ID NO: 38773 - DNA, 122 bp, Homo sapiens
cctccaattaaaattaagcataaaccctaggtagtaaccttctgcacatatgtatagctccgaatttcctcactgttcgtctggtgcaaaaacaatattcaagcttgtctgattatgcatat

SEQ ID NO: 38774 - DNA, 122 bp, Homo sapiens
ggcacctgctcacctgggcaagcgccccccactgcgcacaccttcccctggcctcacctgcgcacaccttggccactcacctgcgcacacctcggcccctcacctgcgcccaccttcccctg

SEQ ID NO: 38775 - DNA, 122 bp, Homo sapiens
agctgagcccgagtagagccgagtcgaaccgagccgaggctaacagtgccttacctgacacgggcgaagagctagaaggccccgggcgagaagaccactaggcctcctccgcctggcctccc

SEQ ID NO: 38776 - DNA, 122 bp, Homo sapiens
gagctgatgtggatcttacgtcgcttgagtgcccacctcctcgtcctctccccatttgtccgccgcacaaagacgctcgcacctacaaagcccgaggtgcacctgcaaggcggccgcccgcc

SEQ ID NO: 38777 - DNA, 122 bp, Homo sapiens
gcgctgcactctacttccagggcggcgccctggcaacccaggacgcgaccgccggcgctgcgactatttccggagtcagacttgcctggggctcctttgggctccatacctcgggcggccgc

SEQ ID NO: 38778 - DNA, 122 bp, Homo sapiens
gctgacgacctacgcaccgtgcagacctccctcctgggcctggcgagggagttcctggtgcggagtctctcagcagatgacgtgcaggtcacgcagaccatgctgagctttttggcggccac

SEQ ID NO: 38779 - DNA, 122 bp, Homo sapiens
tggaggaggcgttgctccccctccgctcccctgccttgcctttcgctcgcccaggcattgcgctcatcctggaacagcacagatgctaccaccgatgagcgggagaggcgtggcaggagcac

SEQ ID NO: 38780 - DNA, 122 bp, Homo sapiens
tttcacatatacgcaaaaatgactagcctcaaccttggagtttttttgagcagcttgttccgagtgttatttggttccaaacccaatactattttcaactgcttattagtttacaagtcctg

SEQ ID NO: 38781 - DNA, 122 bp, Homo sapiens
agacccggattccagtccgataagtgaacctcaattcccaacgcctccgataccggaacccgaatctccgaatctccgattcccagccccggtcctcggacccggctcccttcctctgaccc

SEQ ID NO: 38782 - DNA, 122 bp, Homo sapiens
gtttgacagctcagaaagcatggcctttactcaggctcagagacacacaaaaacctttcacgttttcctttcagcttcgcagccccgtccttctccacctgcacgggcacccactgaagcac

SEQ ID NO: 38783 - DNA, 122 bp, Homo sapiens
tttagttcaaacctaggcctgggtttgggtacaaacccagaccaaaggggcatctaatcccgtttaaggcaatttaagaagtatttccctaggccactagataaatgtattctttaaagtat

SEQ ID NO: 38784 - DNA, 122 bp, Homo sapiens
gatattttgcatatggagaaactgaggctgagagcctttagtctccaccttgtttttaaacgaagggggcagggagcaaatagaaacctgttcatgcagcattagtttcaattcttaaaata

SEQ ID NO: 38785 - DNA, 122 bp, Homo sapiens
tctggtccaaatcttgaccccttttcattttccccgaaagaaagacttgcggctcggaaccgagggcggcatgcccaaggtcacagaaagggtggtctaatgttttggttcctgcagcccag

SEQ ID NO: 38786 - DNA, 122 bp, Homo sapiens
caggcgccctgctgctgcagccaggaccaggctgtgggcttctctcctggcacctcttagcgccaccggccgtcagcacacggggtagggctgggggtgtcccggtcggggtgggaggcctg

SEQ ID NO: 38787 - DNA, 122 bp, Homo sapiens
gggcacagtggcgcagctctggatctaccctgtgaaatcctgcaagggggtgccggtgagcgaggcggagtgcacggccatggggctgcgcagcggcaacctgcgggacaggtacggccaag

SEQ ID NO: 38788 - DNA, 122 bp, Homo sapiens
tcacacctgctaggatgactgttataaaaaagataagcgataataagtgtcggtgatgtgcggagcaaagggaaccttgtacactggtggtgggaatgcggactggaacagccattatggaa

SEQ ID NO: 38789 - DNA, 122 bp, Homo sapiens
cagcaggagtgaggggaggttgtagcctcattaatggtgggcctaaggcagccactcggccggccattcagtcattccatttgtgctaccagtcatttggggaaaatgagaaaaatctgcat

SEQ ID NO: 38790 - DNA, 122 bp, Homo sapiens
ttgctgaactagctcagccacttcctgtgtttggctgtgcatagtgcctcgcttcactgtcggctacttgagccccgcgagccagccagcgcgctcagcagccagtgagactattttaggtc

SEQ ID NO: 38791 - DNA, 122 bp, Homo sapiens
ggctccaacactccttggctatgtgaagcttaacatctcgatgcctcagcttcctcatctcgaacaggaggatgctaataatacttagctcatagagttgataggatcacaacagtttcaaa

SEQ ID NO: 38792 - DNA, 122 bp, Homo sapiens
aacctatgtttagctccaggataaggaagccttggaaacaggattgtgtgagtaagagcccggagttaggattcaagtaaactgagcattaatcccacatgtgtcactgtcttgctgtgtga

SEQ ID NO: 38793 - DNA, 122 bp, Homo sapiens
cagggggtgagtggcaggggtggccgggacatgccaggccacccacctggcaaagggcagcgccgagggcgccccgcgcctgccagcgcccggccgggcccgccctgcccacctcccatccc

SEQ ID NO: 38794 - DNA, 122 bp, Homo sapiens
ggacgcggccgcgcggacgagtgacaggttggtccggcgcagcaaagggagcgggtgcggcggtagggcctctccgggggcagcgcgagggcctcccccggggcagcgcgggccaaggcggg

SEQ ID NO: 38795 - DNA, 122 bp, Homo sapiens
tgtgggcacagccaggaggaagaggccaaaggcagtggcgttgcgttcacactactcgcacggaacagtctacagccaacgaacgcttcaattcagagattactctgcctctagctagagga

SEQ ID NO: 38796 - DNA, 122 bp, Homo sapiens
cgccgccggggctccactgccttctgagtcccaccgggtgtcggacgcgaccggaccgagcgccaaacgcggcagcccaatcgccatcgcttttatttggcccccccagcccaatcaagcgc

SEQ ID NO: 38797 - DNA, 122 bp, Homo sapiens
gtactgggggtagggcagaggtgcggggtaagcctggcctgaccacccctgcccgcaggccgtggccccgctcatgaagtacctggatgagaagctggccctgctgaacgcctcgctggtga

SEQ ID NO: 38798 - DNA, 122 bp, Homo sapiens
cttagctaagaatagtgagcatctgaagcatttttgcctggagctgctcccagctctccccgcccttctcccccagcttagttggtatgagagttctaccaaggtgggcaagcaataaaagc

SEQ ID NO: 38799 - DNA, 122 bp, Homo sapiens
ggagcagctggaccagacgggggactgcccaaatagtcaggcaggcttgaaaaatgagatcgaggcaccagtggaaggaaaaaacaccggcgaggcagagcagaggtattggcccctgtcca

SEQ ID NO: 38800 - DNA, 122 bp, Homo sapiens
taaacacaccgtgaggaaaacccccaggaaaagtgagctgtgcttgcttgcccctgtcaccgacactcggacccttggagttggcctgccagggtgcaaaggagggcaggccaggagggccg

SEQ ID NO: 38801 - DNA, 122 bp, Homo sapiens
aaaccccacagaacaaacagtacattctggaatgatacgccggccaatccggctggcagccgattgacctgacccaggcgagggttgctgcaccgagtatttagtttggccccctactgaat

SEQ ID NO: 38802 - DNA, 122 bp, Homo sapiens
ctgctgtctggcagctggggtctctccaaacatattctcttttttctcagaacagcatgacgaaaaacataagctgagccagagtaactgctgtctggcacagcacagggtagttgcgtgcg

SEQ ID NO: 38803 - DNA, 122 bp, Homo sapiens
actgttcaactcaacacctagtaatgtccagtcctggcccttggggtaggtgagctcaaccgtctcaagtatcaagcccaaaatataacatcaggtgataccacaactatcctgcctgctgc

SEQ ID NO: 38804 - DNA, 122 bp, Homo sapiens
gttgtttttcttttcctgggtgtgtagtaggagttgcaaatgcgggctgcagattagcaacgggaaccatctgggtgagcctagcagggaccagccctcccatgggagagagaggtgacacg

SEQ ID NO: 38805 - DNA, 122 bp, Homo sapiens
ctacctggcctatagtcatctgtgaggtggcagccaaagttgtagatgagatcgaggtgacgtcgctcctgtaacctgatgcccacatctcggaaggcatcctgagccatgagctggagctg

SEQ ID NO: 38806 - DNA, 122 bp, Homo sapiens
tagcccagcccaggcttggcagcctggggctcagctgtgccacgaggcatcctgtccacccgctcccatacaaggctccctctgtgagtcctgcagagaaggagacccctgccaacccacaa

SEQ ID NO: 38807 - DNA, 122 bp, Homo sapiens
acatggaaaccccattgcagttccagcgcggcttcttcccagagcagccgccgccgccgccgcgctcctcacacctgcattgccagcagcagcaacagagccaggacaagccgtgcccgccc

SEQ ID NO: 38808 - DNA, 122 bp, Homo sapiens
aggcattcatggacattcttcttagaaggcctagtgctaagtcgcagttgtcaagggaaccgcgtgtctggagggagaacaggctctccggagtttcccgggaaaccaccccccgcagaggc

SEQ ID NO: 38809 - DNA, 122 bp, Homo sapiens
acacatacaggcaatcatgaacactgaagtgaatttacaaacgaacaagaaactgttgtccgtatcgacaagacaattgccaactggatcaccagctgacataattatttgcatttctgtgg

SEQ ID NO: 38810 - DNA, 122 bp, Homo sapiens
gcagccgaccgcgcgccgattggcccgggctccgggtgacgtcacgggggactgtgggttcgcagcgaacaaaagagatgctgatggcccgccaggactggggcaagacaactttttttcgg

SEQ ID NO: 38811 - DNA, 122 bp, Homo sapiens
tcctctgacttccaagtcctcctttctctccttaaaacccagagaactgtggcccagagccgagcggactcacagccgtgggtctgaaaatccttggggtggacggctgtggctgcctcatt

SEQ ID NO: 38812 - DNA, 122 bp, Homo sapiens
actgcactggctgcagactattatgtcctcagcctcggaattgttctgtcccttggagcccggggcaggagtatgtggattggcatctatgactgggcagtgccagggagtggggactatgc

SEQ ID NO: 38813 - DNA, 122 bp, Homo sapiens
aaagggatgagagcgcgagcgcggttaatgtcgaggctgctaagtgatgctcgttaatttcgcagcagggtgtgactggcccagccttgactctcagtttcctctctcagtaaatgggcata

SEQ ID NO: 38814 - DNA, 122 bp, Homo sapiens
caaaagaacaactctgcactgctgctgtgtttcctggcacactggaggtgaggacaggctcgcaagctgtgcagtgcaccttggccaggggcgatgcttacagtgagccttctctggaatgt

SEQ ID NO: 38815 - DNA, 122 bp, Homo sapiens
gcactgggatcgaaagacgatctgctccttcggaagaaaacacagggtgcggcggtgactcgcagagctcccagcgccccagcgcccccgcgaggcccgggcagcgtccgcgctccctacag

SEQ ID NO: 38816 - DNA, 122 bp, Homo sapiens
tttgtcatcagccagtgaaggaaggggaggcagggaccagacgcccatcagctcagagaccggggaagccgccattggcctccccaacaagtgactactttgagtggtcaaaggaaaacagt

SEQ ID NO: 38817 - DNA, 122 bp, Homo sapiens
tccccatcctccacgctgcaggtcaggaacttgttgcaagcaatgtccaggaggggcaggcggtcgcggcagaagcggtcccccagggagcctttgggcgccagcaccaggatggcgtagtg

SEQ ID NO: 38818 - DNA, 122 bp, Homo sapiens
cggtgagttttcccccaaagaaattaaaatcaaaattttgcctagcttttcaatgagaaacgttttacagcccgagaagacagacgtggaggtaaatgcgcagccgcctgaccccgccccgc

SEQ ID NO: 38819 - DNA, 122 bp, Homo sapiens
tgcgctccccagcctctgatgtcatgcggggcccgcggggctgcggggctggggggcgtgcgcccgcccacccgagcccgcacccgggcaggagagaacctcctcgccgtacccctgagagc

SEQ ID NO: 38820 - DNA, 122 bp, Homo sapiens
cagcccatcaccgcttcaccctctgcccccaagcgtgttctggcctcacagtgtacattccgtcttccctggcccgtctctgtattgcctggcaaaacccaacctggccctgtactcagcag

SEQ ID NO: 38821 - DNA, 122 bp, Homo sapiens
ggggaagctgtgtctcaacaagcctctctatgggattctggcgcctgctcagcttgagaacgcgctcatcgtggagcccggcagacaggcggcctgacccggagaaaaggcaggacggcggg

SEQ ID NO: 38822 - DNA, 122 bp, Homo sapiens
gagcccaggagtttgagacctgcctgggcaatataacgagaccccattctccacaaaaagcgggggaaaaagacaacaaaacaaaagtaaaaacaggttcagaaaaattaagtatgtcccta

SEQ ID NO: 38823 - DNA, 122 bp, Homo sapiens
gaaagatcagcctggggcctgcagtgacagcacttgagcccaactcctccacccaacctccgtttcttctaggctcctggggggaccaaaaaggaagctgcagcagagtaccactgaagggc

SEQ ID NO: 38824 - DNA, 122 bp, Homo sapiens
aaaaatattaattagttgtaaggatgaagtgaaagtgcagatgattgaagtttgggaaagcgtagatcatatgatctcagaggccccatctagttctaatattccagaagaataagagagtg

SEQ ID NO: 38825 - DNA, 122 bp, Homo sapiens
tgccctgcgtaccccatcaacatcgtggctttggtcttttccatcatggtgagtgaatcacggccagaggcagcctgggaggagagacccgggcggctttgagcccctgcaggggagtccgc

SEQ ID NO: 38826 - DNA, 122 bp, Homo sapiens
gactccagctcaaaataaataaataaataaaaataataaaataaaataaaacaatgacctcgcctagcagagggtgagtgctccagcaccctcagctgtccctgtccttttttttttttttt

SEQ ID NO: 38827 - DNA, 122 bp, Homo sapiens
atccccggtgtgaccaggccagaaacacctcttttacagcatgggatctgtgcaggtactcggacgctccccgcagggccgcccgggccggtttcaggcgggcttgcggccccaatcactgc

SEQ ID NO: 38828 - DNA, 122 bp, Homo sapiens
caggccataaacaaagggctttggagacaggcagtccgcggcagataatgatcggaattccggctcctcccttccagggtggaacctgaatgcagccctctaagatgcagccaggaaagcac

SEQ ID NO: 38829 - DNA, 122 bp, Homo sapiens
gaatatggtggcttacaacagaggcagtcgagggtaattattagtatcatggtttgacctcgagatctggcacttcctggacctattccgttgtatatttctctgtgcactccctgagcctc

SEQ ID NO: 38830 - DNA, 122 bp, Homo sapiens
gatgccactatccaatttcccttcagttcttggggactgtaagccgtgtggacgggaccccgcattacacatccttgtcttcccagggctcggtgcctgggaggtgcttcagggtctttgct

SEQ ID NO: 38831 - DNA, 122 bp, Homo sapiens
ggcccgccgtccgcgccacccccaggccgccgcgcgtcccacggcatgctggcggcggggcgttcctgggcctcaaggcatggatcccgcgaaggcacacctgcggggaaaggaagaggcca

SEQ ID NO: 38832 - DNA, 122 bp, Homo sapiens
tgtgggatgtacacggaggtccagggggccccccagcaggtggccttgggggcgggtctccgcgtgccctgagaagggccttgcgtggtgcctgtgtcagggccgggtctccccaccggccc

SEQ ID NO: 38833 - DNA, 122 bp, Homo sapiens
ggcaaaggcccctgccttgcggagcgtctacaccggccgaggtcatggggccgggacttgcgcacaatgaacccagatgccaggttctgtgtctcccggttaggccaccactgctctgctgc

SEQ ID NO: 38834 - DNA, 122 bp, Homo sapiens
gtggcttctttcctggcaactatgattatttgaaaacaacgtcaagagaaggctcgaaggcgccgcgggctggggtcggtggcttagggagcccgtccggccatggtggccgcgggtggtgg

SEQ ID NO: 38835 - DNA, 122 bp, Homo sapiens
aagtggagtccagccttgggtcaccttcagactgtgatgtgagtcaccactgccgcctctcggccatttccgtctccacagccacaaccgattctgtgccatcgctgggagatgggctcact

SEQ ID NO: 38836 - DNA, 122 bp, Homo sapiens
actcagtttcctgagaggaacccaggcctctagggctcagtcctgggggacccagcatgccgtccttgttctgccagggcactggggacgctgggtgcactggagcccgagacccctcttcc

SEQ ID NO: 38837 - DNA, 122 bp, Homo sapiens
cctggccaacacggcaaaaacccgtctccaccaaaaaatataaaaaccagtcaggcatggcggcgcacgcctgcaatcccaggcactccgcatgccgaggcaggagaatcaggcagggaggt

SEQ ID NO: 38838 - DNA, 122 bp, Homo sapiens
tggtggggttgaatatttgtgatagggacaggaaaaacttaactttttcccagtctcacacgttcaacacagaacacttcacctctggtccctggaatgtgtgtggggtttctccctaccag

SEQ ID NO: 38839 - DNA, 122 bp, Homo sapiens
ctaactgggaggctgaggcaggaggatcgcctgagcctgggaggttgagaccagcctgggcgacatagtgggacttgtctcaaaaaagtaagataaaataaaaataagcagcacacatttta

SEQ ID NO: 38840 - DNA, 122 bp, Homo sapiens
ccagacactgaacccggtaaagaagaatcctgggtctcaatcaagaagtttattcctggacgaaggaagaaaaggccagatgggaaacaagaacaagcccctgttgaagacgcagggccaac

SEQ ID NO: 38841 - DNA, 122 bp, Homo sapiens
tatacatatactagtatgtatgcgtgtgcatatatagaggtatatacatgtgtgtgtacccgtatctatttactagtatatatgatgtgtgtgtgtactggtatggatgtgtgggtatgtgc

SEQ ID NO: 38842 - DNA, 122 bp, Homo sapiens
ccccaggaggtttcatccccaacccaacagtctttacctcggagatgctgatgctcctatcgctgggtttccagcccctgttggtgctggcagggactgcccctcatcatggcgctgctcac

SEQ ID NO: 38843 - DNA, 122 bp, Homo sapiens
ggattagaaaattgaggattagagaagtcaccaaccagtgctccaggcaactgcaggtcacgaagctgtgacttgcctccaaagactgctgactaaaggctggaaagtctggcttaacctac

SEQ ID NO: 38844 - DNA, 122 bp, Homo sapiens
aaggaggtcacctgggaacaagcagccaaagtcaccagagtagcagaacagccccctccccgggggtcccaacgcccctcctatcccaccctcaaacaacctgacacagctcccagggaaga

SEQ ID NO: 38845 - DNA, 122 bp, Homo sapiens
acgccgggcccgcatcattttggctccacagctgcctttactcccaattactgcttgatccgggttgtgctctggatcgatgagattgtcagcaagctccaggcagccaagggggccctgtg

SEQ ID NO: 38846 - DNA, 122 bp, Homo sapiens
ccagcgagtaaagaagcagatttgctctccctcccgcttcctccctcccatcttcccacccgggctgtgcccaggccacagagcagctgcaggccttgggagaggacccacacagcctcctg

SEQ ID NO: 38847 - DNA, 122 bp, Homo sapiens
tgcccctgccgcagcctcctcccagccccccgccgtgggctcccccggaacccccccgtgcgatccttccaatccagggcagcctcactgtcctggacgcccggccactgcatcctctgccc

SEQ ID NO: 38848 - DNA, 122 bp, Homo sapiens
aggattcagagtcactgtacagactttccaggctgcatccagggccttggcactcagaggcgtcccagtttcagcttgaattgggaggcctctctcaaggagagtctcatggtgtgagaatg

SEQ ID NO: 38849 - DNA, 122 bp, Homo sapiens
ttggggaaaccacaaatatgaaacaaatctttcgcttccgggaaaatggcgactcccgctcgtgccccggagtcaccgccgtccgaggtcatccggcgctagtagcggagcctgccgaggaa

SEQ ID NO: 38850 - DNA, 122 bp, Homo sapiens
tgagctttcgagagactctatggggtcccctgccccaggcatctcagaagcacagaaggacgaggaggctgaatgggtgctgcccctgaggggcacctgggacccctgagcctgcccggccc

SEQ ID NO: 38851 - DNA, 122 bp, Homo sapiens
tcagttttcttcgcaatcctgtaagggcaattttaaggtatttggcatgttaagacaatacgtcaaataccttaaatattggcagaggcaatgccaacattagggcctccaaagtctacaat

SEQ ID NO: 38852 - DNA, 122 bp, Homo sapiens
cgtctgtgtcatccctttcccccgcccgccgtgcccaggctctgtgtcgtcccttttccccgcccgtcgtgcctagggactgtgacgccctccttacggtcctgccaccccccacccacctt

SEQ ID NO: 38853 - DNA, 122 bp, Homo sapiens
cagtgccaggtctggcactcagaggttaggccgggcgcagggagggtgcgggctccgcagcgagcgcgccgggcggcctctaggagccgggtcagcgagtctgggctctgagcgagcggcgc

SEQ ID NO: 38854 - DNA, 122 bp, Homo sapiens
gtgttggaaacaaacttgagaaatacctgtctacctcaacctcttccatcttcccacatgcgtgtttaatttgtagactgggttgaggtgtagtctttatttagtagaggtgaaattctttt

SEQ ID NO: 38855 - DNA, 122 bp, Homo sapiens
aaaccaaaacccagctggatccaggatacaaagactgccctgtgggtcttttcatagcatcgtgcagatgctcaacaaactgccagcaagtgcaagaccgaatgaacaaaaccccacatttc

SEQ ID NO: 38856 - DNA, 122 bp, Homo sapiens
tgtgttttgatagagaagtgggacgccttcataaaggaaaccgaggacatcaacacgctccgggagtgtgtgcagatcctgtttaacagcagatatggtgagtgggcggcgcggcccgccgt

SEQ ID NO: 38857 - DNA, 122 bp, Homo sapiens
cggtttcccactttgaatacgaagtgcagagctctgcgagcagccatgattcccgccgcacgcagccgtcacgcgcaccgtacagcccagtccacgaagggcgccacgggccgtgacgtcac

SEQ ID NO: 38858 - DNA, 122 bp, Homo sapiens
ccccgagggagcccaggaggttttgtcggaagaagggcgatctggaccttccctgaccagcgtctttgtgtcctttgagctccggacctggtcctgggttcctcccacctcgggctgtgctg

SEQ ID NO: 38859 - DNA, 122 bp, Homo sapiens
gattgttccctacagtcaaggagcaaagggaatagacatgtaaagcaataattgacagttcgggtggtggagatgcagtagaaaaatcagttctagggcagccctaaggaaggagataccta

SEQ ID NO: 38860 - DNA, 122 bp, Homo sapiens
ggggccggtgggcaacttaggtcacctttgtaagcctcggctttctcatccctaacaacacgtctgataatacccactctcggactgaaagttgtcacacagtcgaggcccattgcatctat

SEQ ID NO: 38861 - DNA, 122 bp, Homo sapiens
ccccggcagaggatcgtgcggcggtcaaagtcgcacacggggcttctgagacgtgcggcccgggcctaagagctgcatgtgtgcaagccgctccgtgttggaaaatgtatgtaaagtaaaat

SEQ ID NO: 38862 - DNA, 122 bp, Homo sapiens
gtccagagataagtacaaagggagccctgcaattttactaaacatatacacattataaagcgcaatgtgatccaatgtcaatgaaagtgtgtccatatcctgtcctttttgttttattttat

SEQ ID NO: 38863 - DNA, 122 bp, Homo sapiens
cccaacctcaggtgatctgcccgcctcagcctcccaaagtgctgggattacatgagccaccgtgcccggcctcctctactaatgttttagggacttacacaagtttagttcaaaaagacttt

SEQ ID NO: 38864 - DNA, 122 bp, Homo sapiens
agcgtctggaggcttcgaacccaccaagcaaagacccagtgcatctgtgcgttgcacagtcgcatctgtgaatccctgcatccctcctgccctgcctgccaagactgatgtgcagcttttct

SEQ ID NO: 38865 - DNA, 122 bp, Homo sapiens
cctaggtgattctagattacagccagagcacagaagccctgagactggctatgggctccacgggggctggcatccatctgccttgctctccactgttttccagctccaagtccagtgcctga

SEQ ID NO: 38866 - DNA, 122 bp, Homo sapiens
gtaattacctttgttgttagtaggtcctgagcagtgatagtctcataaccctggggcctccggacgccgcgcctcctgcgtgggcgaattcctcgtgtcgtggccgcgcgggcgctcaggtt

SEQ ID NO: 38867 - DNA, 122 bp, Homo sapiens
tcgggggtaccacatccgggactgggaactgcggaagatccacagggctgccatcaagggcgacgccgcggaggtggagcactgcctgacgcgcaggttccgggacttggacgcccgcgaca

SEQ ID NO: 38868 - DNA, 122 bp, Homo sapiens
gattgaagccgtgcgttctgctctaacaaccgcccgagctgcccctcctcagaaaatgaccgattaggaagggaggctggcctggcatctcaaaagctgtcaggacagagaaaaatggggat

SEQ ID NO: 38869 - DNA, 122 bp, Homo sapiens
ggctccccatgagatcagctctcggaacaaggcaagtcccggcagggccaagcccagtgccgcagctaatggcttcaaagcagccagccagccctgggcacctgcgttttcgctcttggagc

SEQ ID NO: 38870 - DNA, 122 bp, Homo sapiens
ctgggactttgggatattcattttctgccccaaattcctggagaggcagtgagtccacctcgctgaagatacagcctgtgaggggggaccttaggtccccgatgaccccccgcgtacggggt

SEQ ID NO: 38871 - DNA, 122 bp, Homo sapiens
ggcaacgccgagccacctcccaactctgcccctcgaattcccccccttgcggcccctcggcgcgatcccaggcgaggcaatgtcctgagaacgtgtggggcttagcaaacaaagtgtctgtg

SEQ ID NO: 38872 - DNA, 122 bp, Homo sapiens
tgaaagtggtcctgggatatagccagccctcattaatgttgatggtgattatcagtgcatcggtgctgctgctattgttgccttgtcctgaccctcatttgctacatatgctttgacattta

SEQ ID NO: 38873 - DNA, 122 bp, Homo sapiens
cctccgcctccgccagggaaacttggaggaggagaaaagtttgtacagagggtggaaaggcgagagcggagctccaagcccggcagcccgagaggaagatgaacagccccaggccagagcct

SEQ ID NO: 38874 - DNA, 122 bp, Homo sapiens
cggcggccgccggcgccgcgcagcgctgcgcacaatgagccgctggcccctcccccggtccgccaccctagcgcaacctgcagcagcagccgccagcacccggatgacggccgcgcgtgcgc

SEQ ID NO: 38875 - DNA, 122 bp, Homo sapiens
gaggggcaacgctcacttggtcttaaccggggtgacctggtctcgtctcccccttgggtccgaagccaattgatgcctctcccccagcgcaaatcactgtgaagcagagatgttcttctttc

SEQ ID NO: 38876 - DNA, 122 bp, Homo sapiens
cgctcgcgggtatataggcggccgccgcgccccgccccccgattcctggaactgcgcggccggccttcttgtaatgtttagtcactactcgcagcagagaaaggctgagcgcggagggtgag

SEQ ID NO: 38877 - DNA, 122 bp, Homo sapiens
tgcatggaaggccagccacgagggagcacatccatgtgagaatctgaggaaacagtgcaacgccatcaacatggcatcaaattctaccacagctgctttgttgcctctcccagaaagatcaa

SEQ ID NO: 38878 - DNA, 122 bp, Homo sapiens
cctgcgccctcacgcctcacctgggagctgatgagacacacaaaagctccagccccaccccggacctgcagggaccaggggatgcatttgaaccagggatccaggtcaaacaagtgcacatt

SEQ ID NO: 38879 - DNA, 122 bp, Homo sapiens
aacctgtagcctttaaaagtagacatctttttccaaccaagtttaggcaagccctgtagccgagttctgcttgcggttgtttttctttttcctgttctcaggcgcgctgcgggcacctctcg

SEQ ID NO: 38880 - DNA, 122 bp, Homo sapiens
ctgtgtttttgaacagcataattgtgtagcagcacattgcaaaaatgcattcatccaaagcgacacatgtggcaacgtagaccacgccagtgaaataagccccttcgtgatcacctgactcc

SEQ ID NO: 38881 - DNA, 122 bp, Homo sapiens
ggctatcgttgattggctgaacgagaggaaacccggcagtgattggttcgcgccttcttccgcctccggccgactgggcggatacgattggtgcaggggcatcggcccgcccccatcctgct

SEQ ID NO: 38882 - DNA, 122 bp, Homo sapiens
gtggagaggccgccccgcggtgtgtgccaggctgacaatggctccttgtgtctgtgccgacggtgggagaggggaggtattgtttgccaggacaccttcccgccaaggctggctgcaggcgg

SEQ ID NO: 38883 - DNA, 122 bp, Homo sapiens
tacctactgactgcacacccaggccttcgccctgcaccgcagcccatacactgccctggacggctctggcccagcatgcctgggtctgctgcagggacacctctgtccctgaacaagtatct

SEQ ID NO: 38884 - DNA, 122 bp, Homo sapiens
caaagcctggggctcacagatgactaataaaattttactcacatagatgtagagaaacgtcgacaagcagttttggtttggttttggtttcactagtggataattttgttaaccgttgtctc

SEQ ID NO: 38885 - DNA, 122 bp, Homo sapiens
cttcatgccagccaatgaggacaggctggggcagggctggtcccatgtttccctcagccccggagggagggaaaggggtgtgctcagagcaaaccctccccaaagacttctcctctagctca

SEQ ID NO: 38886 - DNA, 122 bp, Homo sapiens
catcctgccctgccggactgcgacgcccgcgggcaaagggaagggcggggccggtcaccccgccccggaccacctcgtgcccaccaggagggccccagcggggctttgcccaggaaggtgcg

SEQ ID NO: 38887 - DNA, 122 bp, Homo sapiens
gcggcggcgcgggcggtggagcccagagcttggtgcacccggggctggtgcgcggggacacgccagagctggccgagcaccaccaccaccaccaccaccacgcgcatcctcacccgccgcac

SEQ ID NO: 38888 - DNA, 122 bp, Homo sapiens
tcagaacgcccagctatccccactgcagaaggctctccctgaaagggcacaggtggaggacgtttgcatttatctggagacagttcatggagaaacacaaagaggtgtcctgacaagacaac

SEQ ID NO: 38889 - DNA, 122 bp, Homo sapiens
gcatctttaactcaagtcccagactcccccacccaaccttgcctaatgctggtcgtcttccggtgttccttgctgtggggacaaccaacaccagcatccatccagttaatcaggttaaaact

SEQ ID NO: 38890 - DNA, 122 bp, Homo sapiens
cgtgtagttgtattacttaatgtgaaggctctcaaaaggtgacattttaaaactctggagcgcctaaaaaatgcaaaggtccttggcagctttaattggggaggtgcctaaacctctgggag

SEQ ID NO: 38891 - DNA, 122 bp, Homo sapiens
ccaggattcgctgcagcagcttccggaaaaggcggtgactgggggcggggccagagagggcggagcattgtcctccgtctgggagggtgggccggaggtctgacgggcggttgggtggatag

SEQ ID NO: 38892 - DNA, 122 bp, Homo sapiens
tttaataataaatgcccttatgccattacattatattgtgggttttgaaaatttaaaatacggctgatgcaatattaattgcctatagtggtataaaacacagggcaggagcccagccgggc

SEQ ID NO: 38893 - DNA, 122 bp, Homo sapiens
agtcctttcttggatggaacaagggagccaaagaaatgcaaagggcttacctgttccagtcggacttgcacaccgcagggaatcaccacctttcaaagagagaagaaacagataagcaaatg

SEQ ID NO: 38894 - DNA, 122 bp, Homo sapiens
tcactaaatgacattttcttccggaatgtacatattacaattcatcttcaaaaggcaaaacggtttctcatccagttcttgagaagggaaggaagggagagtttgaatgttcgaaagccttg

SEQ ID NO: 38895 - DNA, 122 bp, Homo sapiens
agccaacccagtactgatgagctattctcatcctctcagccagccttgtcacaaacactacgtttcttggtaagagttcaagttttcacgtataaagttatctttactaacattttgctcct

SEQ ID NO: 38896 - DNA, 122 bp, Homo sapiens
atgcaaataaccgattaggtcaggggtggatcagtaactaccaggcccagggtgtggcgccgggctgtctgcttatggatttcatttctgccttttagtttttacttctttctttggaggca

SEQ ID NO: 38897 - DNA, 122 bp, Homo sapiens
tcttctgcttcctagaagcaaaacaaggaataacattatgatacctttaaaaagctgaggcgtgaaactgctcctgcaacttggaagcgcagggcacttgaactttattccctaaatgctcg

SEQ ID NO: 38898 - DNA, 122 bp, Homo sapiens
aagcgtagccttaattacccggaagtgcggtcccagggacttcaaaccttttgtccaggccgccggaggtgcctgtgattagtcggcatttcgcggctgaggctgattcagcccattacatc

SEQ ID NO: 38899 - DNA, 122 bp, Homo sapiens
gattgggagacatcctcttcctttccttgtacacacttttttctctcctcaggaacctcacgcctgggtcattgtccatttgggtgggtcaagaaagcgatcgcttctgcccgggagcagtt

SEQ ID NO: 38900 - DNA, 122 bp, Homo sapiens
tactttgggagaaataggctttcaaccacaggaaacagttctgacaactagttgaggatacgaatgaaaggaggtggcagagtgagactgatttctaaagtagtcattgcttaggattattt

SEQ ID NO: 38901 - DNA, 122 bp, Homo sapiens
ccggggctggcggccgctcggcccggcccatcccgcctggccggcgccgcggcctcacctcgctcaccagcccctgccagtcgctctcagtccggtcgccgttcatggcctcctcctccatg

SEQ ID NO: 38902 - DNA, 122 bp, Homo sapiens
agtgctcaaaatattttgatatgtcaaaaattcttttctccattttttggaaaacagatgcgagaaaggaaaggacttgcctaggtcacccagcaaggcaggtcatgaacaagagttgggtc

SEQ ID NO: 38903 - DNA, 122 bp, Homo sapiens
gctcccgccccccgaagcaaggagggcatgtgctgattatctgagtgtgcagcctgctcacggggcatcctgggctctaagaatgccagggggttagaaactggggaggggtgggggaatta

SEQ ID NO: 38904 - DNA, 122 bp, Homo sapiens
ccaggaggcatcagacactcctgtgccactggctagacatgggttatctcgtttcatgtccgaagctccccgcacccaccctccttgcagagttgaagaggtgctgtgagcagaaaacctgc

SEQ ID NO: 38905 - DNA, 122 bp, Homo sapiens
ttaataatactacctacctcacaaggttgttctaagaattaaaggagttgataattacaacgcacctagaacagtgcttggctcactcagaaaggttaactagtattaccatcaatgcccaa

SEQ ID NO: 38906 - DNA, 122 bp, Homo sapiens
gagtctggtatcctactctgcatggcttttgatagatatgtggctatttgtcaccctcttcgctatccatcaattgtcaccagttccttaatcttaaaagctaccctgttcatggtgctgag

SEQ ID NO: 38907 - DNA, 122 bp, Homo sapiens
ctcgggaggaagggttcctgtccacgttcagcacccccgtgcagacctcaccattcccgacgggaacacttgtgatattcacttccaaccacacgagggtgcagctgggcaaccgcagcttt

SEQ ID NO: 38908 - DNA, 122 bp, Homo sapiens
ttaaaatgtctgatttcgtacatgctagatatagcaaagaatctgctggaagctggacttcggtagatatgactagtttgcaccttaaggatttagattgcatattctcaactgaggagcac

SEQ ID NO: 38909 - DNA, 122 bp, Homo sapiens
tcacagggcacagctgaggaggcgctgggagtgggagcgccgtcagtccagagctcgccccgcatgtactgggcagcctcgcacagaggccggctgagccttgagcgccgctgggaaaggct

SEQ ID NO: 38910 - DNA, 122 bp, Homo sapiens
agccaagcgcccccggcctccccacccccacgccattccttcagactctcccagcctaagcggaagtgccccagcagacccccaacaatgaggatttgtgcgatgcagttgggggttggggg

SEQ ID NO: 38911 - DNA, 122 bp, Homo sapiens
ctccaacattggggattgcagtttgacacatttggtggggacacagatccaaaccatatccgaagtggactcatgggggatttggagtgactcaggagctgtccctgtttggggtaccttct

SEQ ID NO: 38912 - DNA, 122 bp, Homo sapiens
ggacataaatccatcctttaacaaagattcctttggatagtagaatggtgaacgttattgcgcttccattaccgccctccaattgggaagcccccagcatcgaattcggagggccggcaata

SEQ ID NO: 38913 - DNA, 122 bp, Homo sapiens
ttccacccttgtgcctgccccagtgtcgcgattaccggagcttgcaatagggcttacaatcggcttgcaatagggcttgcaatgtgtatgtcctctaactctgaggagggagagtggcttga

SEQ ID NO: 38914 - DNA, 122 bp, Homo sapiens
aaataacaaaaatgctgactccagccagggctttatgtggaagggcacacactccctctgcggcagtcagcccgggggggtgggggaggccttccatctcttacatctggaagcagtaaatg

SEQ ID NO: 38915 - DNA, 122 bp, Homo sapiens
ccctccctggggaccttccttcctttcagtggctcttcaccctccaaacccaaagaccagcggagggcccggccccacccacgtttggcccatggcctttggggacaggtctctgagtgttt

SEQ ID NO: 38916 - DNA, 122 bp, Homo sapiens
tgactgtcccagttctctgacttggctgggaatctattcaccttaaatggctcctccattcgcatgtccactgggcaaaagtagccgacagcagagaaccagatcaatccatccttcccaag

SEQ ID NO: 38917 - DNA, 122 bp, Homo sapiens
tgtaccctttacccattcctccatgttgcaaaactagcacaatatcaccgccacggtagacgcagtgaggccataagacatttccgtcagcaaaagggtcacttcttgtgcccctttagaac

SEQ ID NO: 38918 - DNA, 122 bp, Homo sapiens
ttaaagtgtggcagttttgagtagtaacttagaatgtataagattaagagttaaagaaaccgaacaataagtggcaaccaattatcttaacattggaaatactggggtgccattttgttttc

SEQ ID NO: 38919 - DNA, 122 bp, Homo sapiens
tcacattcgtcacagtgaacaccgcaaaccctctacatgatcatcaacagaatatggctccggcagcggctgtatgcttctagaatggacactctaccaccggaaaatgtctgaacgagagc

SEQ ID NO: 38920 - DNA, 122 bp, Homo sapiens
caggacagtcgcgctccctgcctttggatgagcccctcaggcctgatcacccagccttggcgcacatgcacacacgcacgtgccctcactgtgctgcctgaaacagggaattgcggcactag

SEQ ID NO: 38921 - DNA, 122 bp, Homo sapiens
ctgcttctccctcccatgttccttggtggggggttttgctgacggtggcagaccctccaacggccctgatgtgatgaaacatggttcccggtaatttggagtggggttttaagagaattctg

SEQ ID NO: 38922 - DNA, 122 bp, Homo sapiens
tgggcatgtaacaggcatattcttctgatctttacaactctcccatgaggcaggcactatcgttagcccattttacagatgtggccatagaggcccagagaggagaaggggcttacctaagg

SEQ ID NO: 38923 - DNA, 122 bp, Homo sapiens
ctaccccaggcctgtccggcagggtcgcagcgagcggctcccagaacctgggcgcgagctcgcaggcacatccccgagcgccacgcttgcgttgtctctttggagcctcacgggaggcagac

SEQ ID NO: 38924 - DNA, 122 bp, Homo sapiens
gaattcatcattcttctcatagacattttgcactgtattaaagagatcctcaacattttccgcttcccaagtcagcatcactttcagagttttgtctccaggtgactttatcatgggattta

SEQ ID NO: 38925 - DNA, 122 bp, Homo sapiens
cccacccccgtgcgaggagttccaggagaggggtcaaactgcttgaatcgcataagaacccggtgccccagggaccttttcccaactcggaccaaatatttgtggtttgaaaaagttgagag

SEQ ID NO: 38926 - DNA, 122 bp, Homo sapiens
atcatctggtgacatcacagccatgattacgtcacagcacaacgcgtcgctccgtgcttgcggcagcactggtgactggtgtaaacagacccgctgcactgccagccgtatgaaagtctcgc

SEQ ID NO: 38927 - DNA, 122 bp, Homo sapiens
agaggacagtgcacaggctagcctggagctcaccaggcctggggagctgggacggggccccgctgccggacctgcagccctggacagatggggaacactgtgcctccctgaacagaaatggc

SEQ ID NO: 38928 - DNA, 122 bp, Homo sapiens
caggcattattctaagtgcaaatggcatgtagcatttcaattcatcttgaaactacaaatcgtattatcccattttccagatgagaaagccgaagaacagatgttaactcgcccaaaatcac

SEQ ID NO: 38929 - DNA, 122 bp, Homo sapiens
gccgaggttctgcagtccagggtggcacgaggcacccacggggctcaggctcttggagcacgccccaccccacactcgcccacctgcccaccccacgtgggtgcccagcaccttccttctgg

SEQ ID NO: 38930 - DNA, 122 bp, Homo sapiens
gttcaaatgttagctctgacacttacctaaccttctcacctccctgagtcacagttatctcgcttataaaatgtagctaaataagatctaattgatcagataatcccattttaacctaaaga

SEQ ID NO: 38931 - DNA, 122 bp, Homo sapiens
tgccaccgcaccccccgcaaaatcccacattcacaatcacatcccagccctatacacgcgcgctgtgacactcatccccaccaatatctgacatgcacaatcacacgggcacccggccacgc

SEQ ID NO: 38932 - DNA, 122 bp, Homo sapiens
ataataataatgtctcaaaataataataataatgaaacccatgtcatggcattctaaaatcggcttgtgttccatattctataaaataacttcttgacagggagcagattagatgatatgag

SEQ ID NO: 38933 - DNA, 122 bp, Homo sapiens
agattctcacgacccgaaacagagttgctagtaaacaccgcttttccgcctttgatccatcgagggaagagggaaaaggatagagcttgggcaagccgttttggtagggatttcagcttttg

SEQ ID NO: 38934 - DNA, 122 bp, Homo sapiens
catgagatgtaatctcattattgagaggcgtacaggccgacgagctgtcattctcaacgccgcacctgcacgttgattgaaaccaccctggaagtcagcgggaaaaccagcagacggtttgg

SEQ ID NO: 38935 - DNA, 122 bp, Homo sapiens
tctgtttgcccctgtctcctctcaggaccttccacccattacccaggcaccctgcgcagacgtattggtcccttggtgattaagatgtagatcaccagagagctagattcccagtctgccac

SEQ ID NO: 38936 - DNA, 122 bp, Homo sapiens
ttagaggcattgtttggaggtgaggtgggagggctctgcttacatagaacttggcctcagcgtacagacccacaaaaagcaacctctggacaaaagctggggtttttttgttttttgagaca

SEQ ID NO: 38937 - DNA, 122 bp, Homo sapiens
cccgcgggcgtctgacgcggcccggtggcccgcagatgccatgcttcgcaaggactcgtgcgcctgccccaacccgtgcgccagcacgcgctacgccaaggagctctccatggtgcggatcc

SEQ ID NO: 38938 - DNA, 122 bp, Homo sapiens
ctcaatgaagcaatatcctgtttgaataatttaggatggggcataggccagcccacacagcgcatttgtgtgacagggcgtcccactcagacgtctccatttccggtatctagagccggctg

SEQ ID NO: 38939 - DNA, 122 bp, Homo sapiens
agcccgaggacaagggcgaccccgagggccccgaagcaggttggtggacatgggaaagggcgtgttgggcgggagtaaaaaggaaaagagaggcctggagggggcgcgcacggggcctggag

SEQ ID NO: 38940 - DNA, 122 bp, Homo sapiens
gaaacagggtcagggttggcttgatgtctggggcatcaggtcctgacacttgggtgaccacgtagacacttgtgcatccaggtgtatgccctcctcccaggtgagtacccattccatggctg

SEQ ID NO: 38941 - DNA, 122 bp, Homo sapiens
gaagcatgctatgtacctctgtgtcaagaggcccagttggctgtgaactccccaggaaaccgaagccccatcggggacagggatgagaccaaagtcccccccagagcaggaggcagccctgg

SEQ ID NO: 38942 - DNA, 122 bp, Homo sapiens
aggtgtggagggaggccaggcataggcaccccgacttctctggaactactgacattttctcgcaagcagagaggaagatggaaaggtcagggaggagaatgagggaggggtctgccgcgggg

SEQ ID NO: 38943 - DNA, 122 bp, Homo sapiens
ataaagtgcaacaatattagtcttaaatgtcagctgcagtatcacaaactatatcatcttcgattggaagcccctcctcctggctttctgtgtgactttagatagatttcaggtcaaaaact

SEQ ID NO: 38944 - DNA, 122 bp, Homo sapiens
gattcactcacccatggcttgaacctttaatggatacattcatcagttacctgtcaagtgcgtttcctctgtgccagattgtgtggcgctcagcactgtgaaagtaatgatgactaaacatt

SEQ ID NO: 38945 - DNA, 122 bp, Homo sapiens
gagtgtgacgcactacatcatcatagcttctgcgcaacatctcatgttatctgcctttcccgtaacaccaaaacaagtgtgtaccaacagagttcgccacctctcacgaaccccaccccaca

SEQ ID NO: 38946 - DNA, 122 bp, Homo sapiens
tgtgtggacctcccggctcggcggcttctatgaggtctgcctcctgctccaaggggaaggcgctgcacctcgtatgtccaaaagcaccgactgtgggcgggctgttatttcgagctgcattt

SEQ ID NO: 38947 - DNA, 122 bp, Homo sapiens
gcaggcggggtttgccctggaccagcgtgtggagagacccgggcacacggctgctcaggacgcagtcagacgcggaacccgacccctcaggtttgatcacagaaacctgtggcgtgtttctg

SEQ ID NO: 38948 - DNA, 122 bp, Homo sapiens
tgatggagatgactaacattcatttcactaaattttaacatctgtgggttttagtcctagcgctttgctcttctctttcttttctttttctttgagacagtgtagtggcgcgatctccactc

SEQ ID NO: 38949 - DNA, 122 bp, Homo sapiens
gtttttgaatcctgcaagcacattccaagactggcctgaaactgcatgagcaacatcactcgaaataattttttttttcaaaagcaccttaacaaccaattgcgatgctgtcctgttccttt

SEQ ID NO: 38950 - DNA, 122 bp, Homo sapiens
ttctgctattcagttattagagtaaaggacacttctttcaccgtagcttcatggaggactcgccgtattgccttagccctcactcatggccgtaggatcctgagaaccttctcatggacctg

SEQ ID NO: 38951 - DNA, 122 bp, Homo sapiens
ggcaaccgacggctcacagaaaggagccaatagcaaggccgcaccgaaaggagccagtggcgggggcggggttagcgggcgtggcgctgccggggacggtcggcctagcttttcgagctgtg

SEQ ID NO: 38952 - DNA, 122 bp, Homo sapiens
tttaagcatcatttctggcagctctttttcaggaactgtctctgcaggtctttcagtgttcgcctctggagctctgctcgggcccgcgagttctcctggcgttgccatctgtgcccttttcc

SEQ ID NO: 38953 - DNA, 122 bp, Homo sapiens
agtgtgaccgtccatgtgagagtccgtgtgaccatccgtgtgagcatccgtgtgaccatccgtgtgagcatccgtgtgactgtccatgtgagtgtgaccatccatgtgagcatccgtgtgac

SEQ ID NO: 38954 - DNA, 122 bp, Homo sapiens
gcctggaattttaccggcggactccagagggacggaacgccaccgccatttcctgtccctcgattgtggcgtgaacgtcacttccttagcaatgcgctttaactcttgctgtccacattttc

SEQ ID NO: 38955 - DNA, 122 bp, Homo sapiens
ttgtcttattatttagtcataaaaactgatatttgtaatagaaaatagattgtgtatttgcgaggtactttgcttattatctgcatagcattctttaatgaagttacaattttcaatgagag

SEQ ID NO: 38956 - DNA, 122 bp, Homo sapiens
gtgcgtgtcacatatctatgcagagactgctgcagacaggccgccgccatctgtgggcgtcgcatgcccatgcagagactgctccagacaggccgccgccatctgtgggcgtcgcatgccca

SEQ ID NO: 38957 - DNA, 122 bp, Homo sapiens
tgtggtgtgtgtgtgtgtgtatgtgtatgtgttgggaagcgggttgttccgaggactccccgattccctcctggttgaaacgtggcccagaaagagaggcacactggctagggcacacagcc

SEQ ID NO: 38958 - DNA, 122 bp, Homo sapiens
cgaaagtcccgtgctgggcctgggatctcccgctgcaggtcaccctctcggacggccgctcgacaaccacctatcggggtttataagggagccgtcctgcctggccgccccccagagaaagg

SEQ ID NO: 38959 - DNA, 122 bp, Homo sapiens
ccctcacagctcaccttcctctcatggactttccaccgcgttggggtatccctagtggcccgagactctccctgagctccaaccagggactctaggttccccggggccccacgcaggggctg

SEQ ID NO: 38960 - DNA, 122 bp, Homo sapiens
ccgaccctcgcccgcagctctttgggctaatccgtccgggaactcttcggactgtcccctcgcgttttggaaaagtcagcagcctggccaagcagcctggccttgcgagtcgccggctggtc

SEQ ID NO: 38961 - DNA, 122 bp, Homo sapiens
tacaatttcacatgagagatcactgttctgctggcttttacacttgcacactgactgatacgtcaattaaaatgaaaaaatgaagcatggagagaatttttaatgagctcattttcaatgct

SEQ ID NO: 38962 - DNA, 122 bp, Homo sapiens
tcacaactctgcttcaagttaattcctagtccatttgattttgttttgcttttaagatcacgaagctggtgtacacttccgtgcgagcttagagtggtaatgaactccacaatacactgaaa

SEQ ID NO: 38963 - DNA, 122 bp, Homo sapiens
ggcctggggaagtgaaagtcaagtgaaatccttcccctcttccaggtgttctcagcctttcggctgccaactgtggactttgcccttgaaattcaactcctggcctaaagagataatctccc

SEQ ID NO: 38964 - DNA, 122 bp, Homo sapiens
tgaaacaggaactgaacactgccatgtcgcaagttgtggacactgtggtcaaagtcttttcggccaagccctcccgccaggttcctcaggtcttcccacctctccagatcccccaggccaga

SEQ ID NO: 38965 - DNA, 122 bp, Homo sapiens
agtagatttaatttgcacaataaccataagaagtaggtgctattattactcaaacatcatcgatgaggaaagtaaatcaaagggttaataaataacttgcccaaagttgtacggccataggg

SEQ ID NO: 38966 - DNA, 122 bp, Homo sapiens
cctctggcgaccaaacggtcccttcgaagcagggtccagcggggcgccagaagcaggtggcggcgctgcatgctgggaactgtagtctcgacggccccctgagaggaagtaggaggaatgtt

SEQ ID NO: 38967 - DNA, 122 bp, Homo sapiens
ggaggagggcagcgcggggctcctggcacagcggccgccgggcgcctggtgctgccgagccgcggacccgcccagagatataaataacattatctgaggagggacattcctgccgggggaca

SEQ ID NO: 38968 - DNA, 122 bp, Homo sapiens
ggggctcactcctgagcgccctgcccgcaggtacatgatcatgcgggagtgctggcatgccgcgccctcccagaggcccaccttcaagcagctggtggaggacctggaccgtgtccttaccg

SEQ ID NO: 38969 - DNA, 122 bp, Homo sapiens
gaccagcgtgtggagagacccgggcacacggctgctcaggacgcagtcagacgcggaacccgacccctcaggtttgatcacagaaacctgtggcgtgtttctggggtaggatccttccttta

SEQ ID NO: 38970 - DNA, 122 bp, Homo sapiens
cacgggcgtctggggagggccctactgtccggctgccaccgcccgaaggcacaaccacagcggccaggggagacggcatctggggagagccctactgtccagctgccaccgcccgaaggcac

SEQ ID NO: 38971 - DNA, 122 bp, Homo sapiens
aactcatggctccagaattacagttgagtcagtcaatctaagccaaatggccaaactacacgaatttattttgggaacagggaattgtcaagggggatgtggatgaagatggttaaaattag

SEQ ID NO: 38972 - DNA, 122 bp, Homo sapiens
cctctgcctcttcagactcccattttggtttgggggagagggcgaggctgctcctcactgcggtcacagccacatcctgcagagcagaggagggggaagtaagaagcaaaacaaccagaaga

SEQ ID NO: 38973 - DNA, 122 bp, Homo sapiens
aggagtggcggcgtgtgcctggaatcccaggcactcagcaggccgaggcaagagaatcaccggagcccgaggcagggaggttgcagcgagccgagatcatggcagtacagtccaggctccgc

SEQ ID NO: 38974 - DNA, 122 bp, Homo sapiens
gcagagtgcagaactgggagccaccaggacattgtgtttctccaaagagcggtgcaggcccgggcagcgacctcttgctgttcagcaaaaagcaaacattcaaagcagtccctgcgggctca

SEQ ID NO: 38975 - DNA, 122 bp, Homo sapiens
tctctgtctattcaaatgcaagatgccctttcatcttctacaaatgattttctcttaatccgcaaaaaactagttcattctttctaacaacatcattgtattttgagtgaattatcatggaa

SEQ ID NO: 38976 - DNA, 122 bp, Homo sapiens
ggctctctgggggacgcacgggtcaaagacgaggcgggcgatatactccttaggcatgcgcggcagctggtgggaaaagacattctgcagccccacgagccacagcaacacccgccggttgg

SEQ ID NO: 38977 - DNA, 122 bp, Homo sapiens
ctcggccagagcttccgcaccttcctgcactccctcagcacgcgctgtgctgggtgtgggcgccccatcgtgttcacagcagcaccacactgtgtcctcaaaatgagggtgacaagagttag

SEQ ID NO: 38978 - DNA, 122 bp, Homo sapiens
ggcaaaacctaatgttgggtttgttagtcacattagcagcgttcccggctcagcagagcccgtgactgatgctgccggggcggctccacgccgcagttctcaggagttattaaccaaggctt

SEQ ID NO: 38979 - DNA, 122 bp, Homo sapiens
acgctgctaagtagcgcccgtctaagtggcgtggccagtttcctttccggcgctgacaggcgccagtttgcttgttagcaggatcgaagggcagagctagaagaccccaaaggccccattta

SEQ ID NO: 38980 - DNA, 122 bp, Homo sapiens
gtcctggcagctgagggtaccactgttatgccactttgcatgttcagactttgcctgtgacgtgcctcagggtccaagggtcatcctgccttggctgtgctattaccaaccccacaacccat

SEQ ID NO: 38981 - DNA, 122 bp, Homo sapiens
ccggcctacatccctctggtttctgattaatcatttcctcaaagcaaaattagagtaaatcgtacacagaagaaatatgagcagttgggtgtttgagcaaaatgtacaactgataactggaa

SEQ ID NO: 38982 - DNA, 122 bp, Homo sapiens
ctgacaacatccctcctgcccattgggcgagcatggacggggctgtccaatggagcgaggcgttggtgcgaggaggcgccgccatcttggggctgctgggactcgcgtcggttggcgactcc

SEQ ID NO: 38983 - DNA, 122 bp, Homo sapiens
caggaaatcagatgaataaataaataaatgcagtgacgagctttgtggtgactcaacagacgtcagcataggggctggtaaaggcacaaaggaaagagtagtcaaaattcttttaacttcag

SEQ ID NO: 38984 - DNA, 122 bp, Homo sapiens
agaaggtcccggcagacgaagcgagccccctggtggaagccagcagaaccaggtgcgtggcggcggaggcggggcggcccgctgggaaaccgaggaggggtcggattagttgaggggtgggg

SEQ ID NO: 38985 - DNA, 122 bp, Homo sapiens
ggtcagaccaaaccgtctttgagaattattattttttccattaaaaaatggtggagaggacgacccgcccgtagccacacaattcgcgccttcccaggacgcaaccgcagaaaaagcggcgg

SEQ ID NO: 38986 - DNA, 122 bp, Homo sapiens
taccgggcagcggtgtgatttcggaaacccgagagcgatctggccacctccagccttccccggtctccgagaatcacagccccacttgagaggaaaacaaaagccggggcagcgggggaggc

SEQ ID NO: 38987 - DNA, 122 bp, Homo sapiens
agggggacagactttgagacctgcttcccttggctaacactttgttgacacgaggaggggcgagtgctgcgtttcaggccgggattactcagcaaagacctctgcagattagagaggaagat

SEQ ID NO: 38988 - DNA, 122 bp, Homo sapiens
aaatttcagaagtgctcattttccccttcaaatatttgcattttggttcaagagacttgacgtttctcacaccactgacttgctttttcaccattttctctttaaagaagtctcatagtttg

SEQ ID NO: 38989 - DNA, 122 bp, Homo sapiens
gagatggtggtgtctgttgtgctaagtagggcatggaagatgcactgtgtttggtcctggcggctgctgacagagttgggggagaggtggaatttaatggttaaatttctatcccccatttt

SEQ ID NO: 38990 - DNA, 122 bp, Homo sapiens
ggagctctagtatccctatttcccatctcactcactaactcattaccagaactaccatcacgctcaatcctgaacaataagcaaggcatgataaggtatcttgatacatctgtgctggatca

SEQ ID NO: 38991 - DNA, 122 bp, Homo sapiens
gcgccgcgcccctacccggcgccaggcccggggttgcgagcggtgatcttcaacgttgatcgtcgcatcttcaaactcgctgccaccgccaagatgctcctgaattcttttttttagtggca

SEQ ID NO: 38992 - DNA, 122 bp, Homo sapiens
tcccaccaggacctctagagaggctgcagggcacccggccgcagcctggagctgcagtgccgcgggcctccacacgggggcgcccctaccggctgcggcggcgatggcggcttcacccgcgg

SEQ ID NO: 38993 - DNA, 122 bp, Homo sapiens
actctcccagctacactctggagggcttttggggcacttttagtctctgtaaattctacacgaacacaaagcactgcaaactcaaagctttgggatcagaagggaacgatcccttctcctgc

SEQ ID NO: 38994 - DNA, 122 bp, Homo sapiens
ctaattgaaagagcctcaggagctccactgccttcagaacctaatttctcaggacaaagacgtgcccttgaggatgtggcctctcctcaccttgttgggtgcacagataccagcctccaaat

SEQ ID NO: 38995 - DNA, 122 bp, Homo sapiens
tgagagccatgtgtttgagcttttccaaccagggtaaggagcagtagatgttaggagcctcgtgcttagagccaagtgaaccagctttttctgggaaggagagaccaaatcatccctgggag

SEQ ID NO: 38996 - DNA, 122 bp, Homo sapiens
tacctttaaaataacattgtccagtggagtctcccagcaaagggattcctagcagcccagcgggtcagactcccaaggctttgcctcccagtccctccatgctgttgtccagataggagtta

SEQ ID NO: 38997 - DNA, 122 bp, Homo sapiens
cccaggtaagtagaagaacaggctctgaagcaggaagtggaagctgtatgcaaatttctacggagcctaggaagcctctgctcaaaatctccctgtgggcagtgaatcaacggctgaggagt

SEQ ID NO: 38998 - DNA, 122 bp, Homo sapiens
gataggagcctgggtctcggtagatgaacgtcacctcagggcccctggcacgggtgggggcggcttcctcggtgccaaagtcccaggtgtagcggtaggggaacgggggccaggcacatgcc

SEQ ID NO: 38999 - DNA, 122 bp, Homo sapiens
gaagagagatcggggccgccccaggggccatctgcagccacaggggatggggctgagggtcggttcctgccctggtgcagccgcccctgtgcagaccgcctggcttggtcgcagtcatggtg

SEQ ID NO: 39000 - DNA, 122 bp, Homo sapiens
aggtgtggaccctagaaatattaggaaatatcctaagacaaaaaattaggcaaaatttcacgttgaggaaagggctctgcaatcataatttgacattacattagaaagacatcaggaggata

SEQ ID NO: 39001 - DNA, 122 bp, Homo sapiens
gggcgagctcccccggcggcggcggtggcggcgggagcggcggctcgtcggcctgaggagcggattgctgcccgtcagtctcgccatccggcacagacgcttcagtggccgtgaccgggagg

SEQ ID NO: 39002 - DNA, 122 bp, Homo sapiens
tgcgcatgagggcagaggtcaggttgtaggcctgggacgccaccatccgagatggtgactcggctcccagctctgagggctgtggtgcccgcacgtccgagctggccaggtggatgaggtct

SEQ ID NO: 39003 - DNA, 122 bp, Homo sapiens
gggcaccgcagcagggctgtggccatggaaaccgctctccaactgtctcgggctccaccacggcaaccaacgcgaaatgtgaaatgtgcgtaaggggctgttctctcttattcacttctgac

SEQ ID NO: 39004 - DNA, 122 bp, Homo sapiens
tcagtttaaataggagagtgaaggtagttaaatcctctatcgttttaaaaggagatcttacgaatacttttggctttaaaagcttatgtcactgattcataatgtaagaggtgacattaaaa

SEQ ID NO: 39005 - DNA, 122 bp, Homo sapiens
cttagtcgccattagtaccactgtatttgtcatgcatctggatttctgacttagctaacacggtaagagaacccacagatacaatatagaaaagcttcattctcagaaactctccctatgcg

SEQ ID NO: 39006 - DNA, 122 bp, Homo sapiens
tgcagtggtggcaatcagcctggagccactaggacagaccttacatgcccagggggaaagcgtggaccatatgcagcgggccaaaggagccacagaaagtccaagaacagcggaggttgtgg

SEQ ID NO: 39007 - DNA, 122 bp, Homo sapiens
aaccatatctaagccatagcagcctgcgtcttcatagatggtgccttctacatcctcacacggtggaaggagcgagagttctctctcgggactcttttgtaagggcactagtcccactcatg

SEQ ID NO: 39008 - DNA, 122 bp, Homo sapiens
tcagccttggggagctccttgttatcagaagggttggagatgggcttggaatggtctttccgggaaggctgctctggaaccaccttgttagggctgtcttttgaggtctgctcctccgcacc

SEQ ID NO: 39009 - DNA, 122 bp, Homo sapiens
tgccagagagcaaatggcacccatggcttctttacctttggacatcttcagcatcttcggcgtcttcgggaggctgaggtactgcatgagttgggccttcttagctttcaaatccaatttgg

SEQ ID NO: 39010 - DNA, 122 bp, Homo sapiens
ggaactggtatcacactgggttgcatcccaagcttcctgcatctaagaccagtgcagcaccggggcttgcccaaggacagcagtccttgtttcctgacttccattcaaatttatctgggggc

SEQ ID NO: 39011 - DNA, 122 bp, Homo sapiens
gcctggcacataggaagcacataacaaacatttgttgaattaatgcagagctgcatactacgtcccaggattgtgctaagctacggttactgtacccttcccatctcagcaggatagtttca

SEQ ID NO: 39012 - DNA, 122 bp, Homo sapiens
ccgcagcgtcggccgagaggacgccgggatactggccagctccaagtcgaaaggaagcgacgcatgagttgtttggtgcggtgggtagatacctcgagtttctcctcgcccaccgtaggccc

SEQ ID NO: 39013 - DNA, 122 bp, Homo sapiens
gagggtcccacgcaccaggcgcacaccgtggggttcctggacgaggccattcagccctaccgggtaagaagtgtagctttacctagggcctgtttggggcaggatgatgtcctgttatgagg

SEQ ID NO: 39014 - DNA, 122 bp, Homo sapiens
aggtgggtctccggagcccagccccaggaaccactgcccccctcccatccccaccatcatcgcacagctcatctgcctccagcagcagctttccagatgtggcccctccactgccaacgaca

SEQ ID NO: 39015 - DNA, 122 bp, Homo sapiens
cacactgccccgacaaacccatctcctggggcggcatgggcggcactacgattcctcaaacgcttctggtcctggcttacctaacaaaacccaagttctgggccccattgcataactcccag

SEQ ID NO: 39016 - DNA, 122 bp, Homo sapiens
gcctgggggcgagggtcggcgggggcggctgagtcatcgctttccagctgggcagacgggcggttttatttaccctcttcctttaaagggtttaatagacaggaagcgaaagccggctcttc

SEQ ID NO: 39017 - DNA, 122 bp, Homo sapiens
ctgacaggccatggtgaagacttccagctcccagcaccctgcaaagcccagggttctagtcgtccaacaaccactccagccctctacaagactggcttcagacctggggaagagaaattgga

SEQ ID NO: 39018 - DNA, 122 bp, Homo sapiens
gcaccgcacgatccgagggagatgcgggtctacagaggcagagctgcccagaaagggttccgggcctggccgaagcggcggggcagggacaagccaggcggcccggggtctggctgcgggtc

SEQ ID NO: 39019 - DNA, 122 bp, Homo sapiens
ccctctcccaggcacagtggctcacatagacatggggatgccacagggacctagcccaaacgtccattgctggatccctggagtgaggtttctggtctatccaaggcctagtttagctcctc

SEQ ID NO: 39020 - DNA, 122 bp, Homo sapiens
tggtccccgccagaacactcaaccagcctgtggactggcaggatctgaactcaggcctgccgggtcccacctgcagctctctctggcccctgccattgagctacgcaccaccctgtccccac

SEQ ID NO: 39021 - DNA, 122 bp, Homo sapiens
caggacccgggaggcggcgcagccggggccgccggaggagcgcgggtgacctggcggcggcgagatgccgctcgcccagctcaaggagccctggccgctcatggagctagtgcctctggacc

SEQ ID NO: 39022 - DNA, 122 bp, Homo sapiens
gtccagggagcttatttgtataagtgcctcgaagccaagaactatgtcttagaggctgggcgcagtggctcacacctgtaatctcagcactttgggaggctgaggtgggcagatcacctgag

SEQ ID NO: 39023 - DNA, 122 bp, Homo sapiens
cgcacagcaggtgggggcccgccctgcccacagcgtgaaaacaggagccccggccagccacggctgggcagggccagaagcgcctcctccaggatcctccccgcgctggcccgccccacagg

SEQ ID NO: 39024 - DNA, 122 bp, Homo sapiens
tacaggccatcaaacaaaaggactaaatgcattgacatcagaaacctctgggaagggagtcgttagctgtgaacaggcagcagctggtgagacaatgtccccgtagtccccagagcaggaac

SEQ ID NO: 39025 - DNA, 122 bp, Homo sapiens
cccgcgccatcttgaccgagggcagctttccactatttccgttccttctccataaggggccgccgtcgtcagtgagggtgaggcggagagacagagcgggaagggaaacaggatggggagag

SEQ ID NO: 39026 - DNA, 122 bp, Homo sapiens
ccctggggccgggcagcccagcacgtgaacccgggtgcccgggctcggacagaggccaggcggctttctgccggggcctgtttcctgttggggcaagaattgtcaggacaagtgtgggtacg

SEQ ID NO: 39027 - DNA, 122 bp, Homo sapiens
ccgccactgaacacccacactgcacaatcgaggcgcagccctcccgagaggaagccccaacgacctccacctacaaggcctctaagtgtaactgtcctgggcgaggcgcggcggttcggttc

SEQ ID NO: 39028 - DNA, 122 bp, Homo sapiens
cgtgcgccctcttcgatcctggggtgctccggtccctcctccccgccacttcctcccggccggcccgcctcctccaaagtctcccgggctgatcaggtgtgtctcctcctctgtcccctccc

SEQ ID NO: 39029 - DNA, 122 bp, Homo sapiens
gcggaggagccctgagcgccggcctccctatttcaccatgcagctcattatcatagaggccgcgcgcgttaaccccctccccgccggccgcgtccgcccgggctggggccgcgcccgctgct

SEQ ID NO: 39030 - DNA, 122 bp, Homo sapiens
cgccctaccttcacctctcccttgtcctgggccagcctgctgatgcactcctcctccttccgcactgccctctggctctggtacagtgcgatgtactctcctgcaggaggacaggactcaga

SEQ ID NO: 39031 - DNA, 122 bp, Homo sapiens
cacacaactacgcagtgacaagtgccaggaaggtggctgttgagagctctgcgggagtcccgagaagaatccccagcggtcactagaggccttgacgaaagagatttccaggagactcagca

SEQ ID NO: 39032 - DNA, 122 bp, Homo sapiens
cggggccgaggagcctgggccgggccgggcggggactactccggagtcaggaggcagcagcggcggaggacgaggatctctggcagtcagcgccgctcggacgccgccggcaccatgggctg

SEQ ID NO: 39033 - DNA, 122 bp, Homo sapiens
tccctggcctgatggcccccgcatttgcatatatcaagtccctggggctgggaatagtggcgcgggctgcacctgctgccctgggttccaagggctgaccccagtgagaccttccaggtaat

SEQ ID NO: 39034 - DNA, 122 bp, Homo sapiens
attttgtactatatttaatgtatacatagcatttctgcatcagttcttccccacctggaccgctcctcattcccacgtaggctcccgctcccctccgtccctcttcccggaggttttcagcg

SEQ ID NO: 39035 - DNA, 122 bp, Homo sapiens
tgccattctgttagatactatccttataattgatgagcaagacatactgaatgcatatttcggtttgtgtatccatgcacctacgtcagaaaacaagtattgtcaggtattctctccataga

SEQ ID NO: 39036 - DNA, 122 bp, Homo sapiens
cgccattctggtggcggaaaggaagagtaaaagtggtagaaccttgcaatgctcttgaagcgcctatttggaatgtctacatcatgtaaatggtaatggacaagtatgtataatccccacac

SEQ ID NO: 39037 - DNA, 122 bp, Homo sapiens
tcccccaaatgtgtgaccaggattactgtcccattctgagaccgtcagagacatctctgccgggacacatgccagtgattgaaaacacagcaagggccccactagctgaaaccaagttgcag

SEQ ID NO: 39038 - DNA, 122 bp, Homo sapiens
cgcgtgtcctcgcctcttgggggagctactgcgcaggtctgcgtggaacctggtggggtgcgcctgcgtcttggagaactagggttgtcgctcgtggagacttttgaacaatttttaaagcc

SEQ ID NO: 39039 - DNA, 122 bp, Homo sapiens
gccgtcccgcatgcgcgtttgggcggcgtggagcctgctgccatgaagtcagcgtgagtacgaggccgccgagcagggagagagggcggacgggggccgaggcctcggggctgggggcaggc

SEQ ID NO: 39040 - DNA, 122 bp, Homo sapiens
ctcacatgatccacccgccttggcctcccaaaatgctgtgattacaggcatgagccaccacgcctggctgatagctatttattatgccaggcattgttctgccaggcaaactgatactaaac

SEQ ID NO: 39041 - DNA, 122 bp, Homo sapiens
agctttgcaacggcctccatattttcccgcgcgtcccgacccccgggtcctcccgtgccccggacctgctcagatgtctcccaaggctattcatcagggagcaccccaatcccggcctgctc

SEQ ID NO: 39042 - DNA, 122 bp, Homo sapiens
cctaccaggcggaggtggacaagctccgcgcggccaacgagaagtacgcacaggaggtggcgggcctgaaggacaaggttcagcaggccaccagcgagaacatggggctaatggacaactgg

SEQ ID NO: 39043 - DNA, 122 bp, Homo sapiens
ctccactggcgcttccttggtggggcgctggaggctccccaagttctgaccgctcttctccgaccgcactgtcctgggcccgaaaccacccccaaagctgccacccattccgctggcgcccg

SEQ ID NO: 39044 - DNA, 122 bp, Homo sapiens
cagaccaggaattgaatcctgcctctgcagcttacaaactgcacaccatctatctgtttacgaaaccactgaaagcttccttgtttcatctgttcatgaggatagtattttttacctcacgg

SEQ ID NO: 39045 - DNA, 122 bp, Homo sapiens
cgctgtttttctacccatgtggcccacacgcgtctccgtttcagtggcggggctggcaaacgtcattccctagccccgcggccctttaaagcccggacaggtgcagctcggtgccgcctctg

SEQ ID NO: 39046 - DNA, 122 bp, Homo sapiens
tctccggtgcctcctttcataccagggaggaaacgtccccaaacagaccttccttttgagcgatatggtcccccaaagaactataggcaaaatgaaactcagaatttggggtctgacttaac

SEQ ID NO: 39047 - DNA, 122 bp, Homo sapiens
caggtggtgtttgagaagggcggagtgtacctgcacaccagcgctaagaagtatcaggaccgagactctctcatcgctggtgtcatccgtgtcgtggaaaaggtgcgctgggagggagcagg

SEQ ID NO: 39048 - DNA, 122 bp, Homo sapiens
cttgccaatccgtacttgggaagacgcgcgaggtgtggatgcattctttctccacctccacggccgtccccccatcccctttctgggcagggtttgccaagcgcattcaaggagaagaaagt

SEQ ID NO: 39049 - DNA, 122 bp, Homo sapiens
aagctgaagctacctttaagagtttggtgaagacgcatgaaaaatatggttgggtcaccccgcccgtgtccgacggctgatgtctgccacgtgcagtagacgctcgagcgcctgtccacaca

SEQ ID NO: 39050 - DNA, 122 bp, Homo sapiens
taaacttgaaagttttgagaagtactggccagttatgttgtgggatgtcccactatgggacgtcatctgctggttttctcattaggttaaattgggttatgagatatgaaaggagactagag

SEQ ID NO: 39051 - DNA, 122 bp, Homo sapiens
caactcttttagcaaactgaggcgtgtcctgatgtggtaagcataaaatctgctttcactcgtcattgttctttctcctactattcttaatcgaccccctctgcataactattcttaagttt

SEQ ID NO: 39052 - DNA, 122 bp, Homo sapiens
tggtgctgctgagggttttctccaggcgctgaaggcacatggcaagctgcttctccccagcggctggagtgccggcctccagcccctcccgcagccgctctgcagaggctgccgtgcagcgc

SEQ ID NO: 39053 - DNA, 122 bp, Homo sapiens
agggtgatcgcgctgctgaaagccgactgcgcctacgtggactgcgggttcgctccgggccgctcctccctgctgttcacgaggaaacctaaagtctgtgttgacccatgaaacctgatctc

SEQ ID NO: 39054 - DNA, 122 bp, Homo sapiens
tggcacctggaggccgcagggacctgccctttcctccccttaacggttttttcctgctggcggaggtcattctaggaggtgggtcccaagctgacctcgctcagccttggccttcctcaccc

SEQ ID NO: 39055 - DNA, 122 bp, Homo sapiens
gaaggagaaacttcatctaggtcaggcttggtagagtgggaggaacacggggctgggggtcgggaggcctgggctcacatccctgctctgccaccaggtctcggacagccttgggcaagtcc

SEQ ID NO: 39056 - DNA, 122 bp, Homo sapiens
gaaacatgatctctctcctgtctcctcagtttgggaccattgccgtggcagcaagagaagcgggggacgttctcggcccctcgccctgagagtcgcgaggagaatcagtattgagcttttaa

SEQ ID NO: 39057 - DNA, 122 bp, Homo sapiens
tcttccctggccaccgtcttctccaatgagagcgatgacaggatctaaggggccccctggcgctctaaggtcctggccagtggagaccctggggtgcgacaaaggggttagggggctccccc

SEQ ID NO: 39058 - DNA, 122 bp, Homo sapiens
ccgggcccgatccagaagatgggctggggcaccgaggcaataaggaggctcctcttgacccgcagcactgctttctcccacccatcggcggcccccggggcacgagtgtgacctcggggcct

SEQ ID NO: 39059 - DNA, 122 bp, Homo sapiens
gtcttaccaagaaaagccatagatgatacataaacataaacatatgagctcactaaagtacgtttgtgtgcaggatgcaacactacagtgttgggtagaaattgtgatttctatcttcatgg

SEQ ID NO: 39060 - DNA, 122 bp, Homo sapiens
ttcctcgaagtgggggtcccggctcccctaacgctgggccagagggcctaggccccacagcgcccctgactccgcatcgagggagtctccagcttttctcgggaaaggagggaggtctcgcc

SEQ ID NO: 39061 - DNA, 122 bp, Homo sapiens
ggccaagcctcggcaggaacgggtcagaggaagcatcgattgatcagcccaatgccgccccggccccttgctcctgggtgacctcaggaaagtgtttcagccactcagcctcaatttccaca

SEQ ID NO: 39062 - DNA, 122 bp, Homo sapiens
gcccagggtgactgggtgaggcctgtggggcaggtgggccctgggctgctgtgtcagggccgcggctgtggaccgatcctgtgttctgtttgcactggagttcttgtctgggatgagaactt

SEQ ID NO: 39063 - DNA, 122 bp, Homo sapiens
gggtaatgcctttctttgcccagaatttctcgggagcgtaggtggtcatcctactttctccgcgttcacctctcgcgaggcaggatgacgggcgcactcgggagaccggagggaggcagagc

SEQ ID NO: 39064 - DNA, 122 bp, Homo sapiens
tttattggaggaattcttctgtccagaggggctttgaaagcaaatgtgctgaaagtcctgcggcttttctcagtggtttgagaatgtttatcctaagaagtgtttctcagtgagttggaaaa

SEQ ID NO: 39065 - DNA, 122 bp, Homo sapiens
cttttcaattatcttagtaactttcaccccaatggcacggcttatcttaacactgattaccgcaccccgcaccccccgctattctcccccactccgcgcactcccagatgcttcacatgaaa

SEQ ID NO: 39066 - DNA, 122 bp, Homo sapiens
tcagacttcccagcggagacagccaggctgtcctgtggcagcagtgggtttgtcagaggccgggggctttggccagggccggcagagagccccagtcctgaagaaccctcgttcttcgcgtg

SEQ ID NO: 39067 - DNA, 122 bp, Homo sapiens
ttctccccaactccaggtcccccttcatctattccggggctggccgcggagtttcctgagcgctctccaagtgggtcctctagatgttaggagaacactgtacctcccccggtcaggggtct

SEQ ID NO: 39068 - DNA, 122 bp, Homo sapiens
ctcctttaggccaccacccttggatgggaactggctgggcccctatgagcccatcatttccgcagccacattgtccaaagcacagaaggcagagccctcccctgctatcacacttgtctctg

SEQ ID NO: 39069 - DNA, 122 bp, Homo sapiens
caccgtatggccctctagacccagctgggcctcaccccactccctcagcttggatcctcacgtggcctggagccagcattaaactcctgtatgtccttcaagaccccttcaaatgtcctttt

SEQ ID NO: 39070 - DNA, 122 bp, Homo sapiens
atgagcttagacccagcaaggggccttgacaatcgtcctgagatcatcacttccacctctcgccaggcacactgaatgcagatttctcaagttaattaatgaattaatgtgagtcaagcttt

SEQ ID NO: 39071 - DNA, 122 bp, Homo sapiens
ggggccgggtcccactcctagacaccaagacctggtggtggcactagttaaaggatgtttcgctgcagctgccccctgccccagggccagccatccagcctggggcacgtggggcattggca

SEQ ID NO: 39072 - DNA, 122 bp, Homo sapiens
gtggtttcttaagacttaacgaatgaaaaaagggatgaaagaataacatttccgaaaggccggacaccgcagaaggcacagaaggagaaactgagggaaatccagcttcggagcgcagggga

SEQ ID NO: 39073 - DNA, 122 bp, Homo sapiens
aaggtgctagagaccccggggggaggctgggccagcaccaggcattggggggcaggttcccgtctctacaccccagccccaggcggacagcgcgtgcccctcccgctgccccacctgtcacc

SEQ ID NO: 39074 - DNA, 122 bp, Homo sapiens
tggggacctggggtcgggaggcctagggactttgtggcgtcagcgggggctggggggcggcgggggaggggaatgctgggcgagggagtgttcggcggccgggactggggcggcgcctctta

SEQ ID NO: 39075 - DNA, 122 bp, Homo sapiens
aagtagagttgcgagagcggggcccgaaccttcttttctccctggactagatagagaacccggtccgactgcagcaaggacgccatcttggggagggaggaggcgatgacgctcccggcgca

SEQ ID NO: 39076 - DNA, 122 bp, Homo sapiens
cgctccatgacggtcgggcccgggctgggacagctgactgaggcggcgggggcgggttaacgaagacctggcaccaggatccccgccccgtccgctggcggcggcgacggcagctggactcc

SEQ ID NO: 39077 - DNA, 122 bp, Homo sapiens
gcggccttctctagcaaaatggtggagccggtacccggctgtaaggcaagctgggatgcgcggagtagcgggtggaaagctggactggagttctcactcggccgctgggtgacttcggtgca

SEQ ID NO: 39078 - DNA, 122 bp, Homo sapiens
gagtgctaactactctaggagagattaaagcctgtgaaatagaacttttccagataatggcgagtttttaggcttgctcatgctgaagcttaatataagctaataagtagagaaattaggag

SEQ ID NO: 39079 - DNA, 122 bp, Homo sapiens
tcttatacattggcatgcttctgggggcttgtgtccctttttccctgattcttcccctggcgggggctgttcacacgtgcagtggcctgttagcccttgggaggggagcatgcgcagtgtgt

SEQ ID NO: 39080 - DNA, 122 bp, Homo sapiens
cttcacagacaagaccggcaccctcacggaaaacaacatggagttcaaggagtgctgcatcgaaggccatgtctacgtgccccacgtcatctgcaacgggcaggtcctcccagagtcgtcag

SEQ ID NO: 39081 - DNA, 122 bp, Homo sapiens
aataaacttatacagttgtacaattgtcaccacaatccacttttagaacatttctattaccgctttcctccaattttttcaagcccatctgcattcaatacccgctcccacacctcgcccca

SEQ ID NO: 39082 - DNA, 122 bp, Homo sapiens
gccccgtccccgctcctcccaggaaagcagacaggccatttcaataccagcccagagacacgcagagaagccgccccctcgccgcccacagcctcccattaactcttccagtattctttcta

SEQ ID NO: 39083 - DNA, 122 bp, Homo sapiens
aaaatagaatggggaaaggtgagcctgagaacttgccaagctttggatgactgattcaaacgttatatgtctagaaaatcaacatcgccaacaacaaaaaaagaactggccaacaggaatgt

SEQ ID NO: 39084 - DNA, 122 bp, Homo sapiens
ggggactggattgtgagtgggatgattgtaaccagaagccatagcaaagggtggactagccgcctaaacatagaaagagcagggcttccttctgcgtttcacgggctgcactgacttcatct

SEQ ID NO: 39085 - DNA, 122 bp, Homo sapiens
aagggccacaaccacagggaggccaggacccagggagaggccctgctcacctgtacaatgcgtacacctttccatctgcaaagtagatatcatatttcttctcatgctgcagctggtggatg

SEQ ID NO: 39086 - DNA, 122 bp, Homo sapiens
ggcagcgcctcggtttccttccaattcattctcgattcccagatactcagatgagaaatccgcactcaggccgtcaggctcctgggcccgggccaccctgcctgcgctcagcccggcccctc

SEQ ID NO: 39087 - DNA, 122 bp, Homo sapiens
taacgagctcccattaggaggaattgtcactcctctgggagcgagcttgtcccattagggcgaattgtcattcctcctggagcgaggttgtcccggctccgcgcaggctgagtgctggggcc

SEQ ID NO: 39088 - DNA, 122 bp, Homo sapiens
caaactcctgacctcaaatgatccacctgcctcagcctcctaaagtgctgggattacaggcgtgagccaccacgcccagccaggttctgcatttttaacaagttcccaggaatgcatgtact

SEQ ID NO: 39089 - DNA, 122 bp, Homo sapiens
tggtggttgactaagttttttaaaaagccacttctaagggtacattcattaaccagtcagcgaatccacttgttccagcgagaggtgggaggtgggggcaggggtggagcgtggggaggagc

SEQ ID NO: 39090 - DNA, 122 bp, Homo sapiens
cactcacacgtgcatgtgtgcatcctcaggcaccctgacgcgttcacatgcacgtacacgcgtgtgcacacgcacagtctttcacaagagtatgacgcattcacacaagagtgtgacgcgtt

SEQ ID NO: 39091 - DNA, 122 bp, Homo sapiens
ggagcgcgggaggggcacggttcccatagacaggcaggcgggcggtgccagaacttgagccggccccaggggatgcccgaacgtccccctctgtcctagctggggtgtaggtgcagccccag

SEQ ID NO: 39092 - DNA, 122 bp, Homo sapiens
cagaccctcacccttgtcccagctttcctgggctgggggctgggctccacctgcctttgccggtgacttccgtccctgcagactcacaattttcaaagccctctccccgcctcctctggtag

SEQ ID NO: 39093 - DNA, 122 bp, Homo sapiens
cggggcttcgccccctgaggacctccgggtcacagcggcgtgaatcctgcccgcaaggcgcgctgactcggttccgaaccctttcgcgggccctagaccccgtggagagttcacctgcccgg

SEQ ID NO: 39094 - DNA, 122 bp, Homo sapiens
gccgaggagccgagagttgcagaaacccggagctcctcgctcctcgcaaccgtctgtacgcggcgcccccgccagccaggcagcccctggagggcaggaccccggttataagcctcagaaaa

SEQ ID NO: 39095 - DNA, 122 bp, Homo sapiens
tcccaagaaataatctgtggctttctcaacatatgctcgccactccaccctgccatctttcgccttcaggttgtcagggttgcatgaattctgcccagttcctgggcagaattttccagcat

SEQ ID NO: 39096 - DNA, 122 bp, Homo sapiens
cgtgatccgcctgcctcagcttcccaaagtgctaggattacaggcgtgagccactgtgcccggcctaggatgttatttttaaatcagtgaagtacatactctaaaagacaaaagtcataaac

SEQ ID NO: 39097 - DNA, 122 bp, Homo sapiens
ttcgacgggaaaacggacggtgagtaagaccccatcccactcccggaacacgaagagaggcggcccagaacggctggcactagaactgcaggtggactgtgccaggtgccaggtggggccct

SEQ ID NO: 39098 - DNA, 122 bp, Homo sapiens
gaccctgagaggctttttcctggccccttagttgtgggttttcctgcgggcggtggagcccgtttccatcagaaccgcccagaggcgggcgctgccttccaggggtgaagtgttttcggacc

SEQ ID NO: 39099 - DNA, 122 bp, Homo sapiens
gaacttcagcacccacagggcggacagcgctcccctctacctggagacttgactcccgcgcgccccaaccctgcttatcccttgaccgtcgagtgtcagagatcctgcagccgcccagtccc

SEQ ID NO: 39100 - DNA, 122 bp, Homo sapiens
agagatgggtctcacaatgttgccagggctggtttggaactcctggtctcaagtgatgtccgcacttggcctcccaaaatgctgagattacaggtgtgagcctccacacccagccttgaggg

SEQ ID NO: 39101 - DNA, 122 bp, Homo sapiens
tatgtgaccacggattccttccgtagtaataattatattataaagccacttgaggccgggcgcagtggctcacgcctgtaatcccagcactttgggaggccgaggtgggtggatcacgaggt

SEQ ID NO: 39102 - DNA, 122 bp, Homo sapiens
tccatgaccgggtgtcctccatgaccggggtgtcctctatgaccgggtgtcctccatgaccggggtgtcctccctgaccgggtgtcctccctgaccggggtgtcctccctgaccgggtgtcc

SEQ ID NO: 39103 - DNA, 122 bp, Homo sapiens
tggagaaagcatggcaatggagacttttgctgggcccgcagtgacccgctgaagggcctccggaaactgggtgaactggttcccgtgtccctccccgtcgctggtgtggctgtgtctggcct

SEQ ID NO: 39104 - DNA, 122 bp, Homo sapiens
gaagtcttccgtggaaacaccgggctttctgtgcatgaggtcagggccaggacgggcacgcgggtagaagatcatcttgagcgttctagactctgacagacggtccttgtgtccttggctct

SEQ ID NO: 39105 - DNA, 122 bp, Homo sapiens
tagccacactgagattcagacccaggtctatgaagtgctgatccctgtgttcttaatcaccgagttatcagtactcacccagttggttgagtgtgatgattgttctcaaccttgttgcaatt

SEQ ID NO: 39106 - DNA, 122 bp, Homo sapiens
cccgacagctcggcatcagcaaggcagtccaagacagaacaaggcacccgacgggtagaacgcaggggcatcccgggcacagcccccaaagccacctgggacccacagctgtttgatgtgct

SEQ ID NO: 39107 - DNA, 122 bp, Homo sapiens
tgcccagagtgacattctcactttctcagtaacttaaaaaaacaatcagattcttccttccgctctttaacctccaacatacatgccaattagccacactcttctctagagaggtttcaagt

SEQ ID NO: 39108 - DNA, 122 bp, Homo sapiens
gtcggatataaagtatgtccgcgctgtcgttatcctgtgctgagaattgaggcgcataaacgaggttctgtcttcatgtgtagtattgttcagcagtgcaagagaacatacttgtctcagaa

SEQ ID NO: 39109 - DNA, 122 bp, Homo sapiens
ccccggggccctgggatggggaaccatggtggcttccgtggaggtttcggcagtggcatccgaggccggggtcactgccgtggaccaggctggggccgaagccacggagctcgcggaggcaa

SEQ ID NO: 39110 - DNA, 122 bp, Homo sapiens
actccaccctagaagattcttctctgggcccgcggaggctcacgggatgaggtaatgctccgctgccctcctacagtcgggcccttctttctcctaccctcccccctgccgcacgcctctcg

SEQ ID NO: 39111 - DNA, 122 bp, Homo sapiens
actgaagctcagaaaggctgtgccaactgcttaaggacatagagcacacagaggatggaacggggagtcgaacccaggcagcgcactgcctccacactctgagaatggggctgcaggtagct

SEQ ID NO: 39112 - DNA, 122 bp, Homo sapiens
cttcatccccctcttcatcctgtgcgtctaccccagcggcatgcccgccctccgtcaccccgcctggccctgcatcttctcactgctcatgggcatcagcaacggctacttcggcagcgtgc

SEQ ID NO: 39113 - DNA, 122 bp, Homo sapiens
tccccgggtggccctgggcaagcctttaagccgtgcctgccgtcaggcgccccagcttcgcgcctttggagactcagaattcccaattatttgagggcctccactaccctcaactcctcagg

SEQ ID NO: 39114 - DNA, 122 bp, Homo sapiens
agggcagtggtttgtcctgtgacctcatttctctgacagattttgagttgctgatttttccgtttgtttagctttttacttgttattaggacagggtggcgacttctaagtttcttgcatgc

SEQ ID NO: 39115 - DNA, 122 bp, Homo sapiens
gttggggtctaagggccactgtccacttagctctgccagggaaatacagatcctttgcagcgacaccccattcggggaagagagcggagctttgaagacttcgttctgcctgcagaagcgcc

SEQ ID NO: 39116 - DNA, 122 bp, Homo sapiens
ggccctgcccccattgacgtcatgccaccatgtgactcactctgaccaatgagaggcaagcggaagtgacggttattcctcctgcgcgggagctttggggacgcacttctggatgcctaggc

SEQ ID NO: 39117 - DNA, 122 bp, Homo sapiens
tttccttctcacttcactgttctcttccctgtctgaaatggcaggtgacctaagagggagcggtgtgcaaattgatttggaggcgatcaatggctcggggcgcggccccggctcgctgccgt

SEQ ID NO: 39118 - DNA, 122 bp, Homo sapiens
cgtggatgtgaatgctttaggagttggccacccatgttgtgaactgaggttgttcccaggcgccaacttcctttctccccagagcctctggagggagcattgctgtgcgccctttgtgtccg

SEQ ID NO: 39119 - DNA, 122 bp, Homo sapiens
tggtgctgtagtcacccttgaaggtgtgccggcgccgacgcagggcgaccacgatcccgccgaccacaatcaacaccagcaggatgctccccgccacgcccccaatgatggccgtgggcacc

SEQ ID NO: 39120 - DNA, 122 bp, Homo sapiens
ggagcctgaggtggcccacggaggagtgcccaagccctcagcagccagaccagctccacacgcagcataattgctggtgattaagtaattgccagactttgtccaataaaagtcagcacgtg

SEQ ID NO: 39121 - DNA, 122 bp, Homo sapiens
gggaagctccggcagaacccaggcgagggacagctccggacaggtgagtgctggaggatgcgtttctacgcttttgttttgaaatgtgcctgtgcgccgcaggtggcttcacagcaggctcc

SEQ ID NO: 39122 - DNA, 122 bp, Homo sapiens
aagcaaacaaacttagcagtgaaaaacaagcgcgtccagtaacaccagaaaaacacgtggcgggggtggggcatctggtcgcaaccgcaggtgagactctaagtcccatcattcccttcggc

SEQ ID NO: 39123 - DNA, 122 bp, Homo sapiens
cccccccagcccccgcccctacagtcccaaccccctggggctccgatccccccccccccccgcaatccccgctccgactcgcgtgctctcgcctgctggtccccagtgggtgccccgagtcc

SEQ ID NO: 39124 - DNA, 122 bp, Homo sapiens
tccccctgcgaacacggtgccactgtttccgggagggctgccgggctgctcctcctccctcgagagccgctgtcctcacgcctttcctgctgtccgtccagtgttgatgacttggccagctc

SEQ ID NO: 39125 - DNA, 122 bp, Homo sapiens
agaagggcgaggagaaggtgtctgagtctgagtcaaaggagctgtctctgctcacgccctcggctgacagttccaaagagccatcctcctccccggcctcgggccgcggctcccgcccctcc

SEQ ID NO: 39126 - DNA, 122 bp, Homo sapiens
gactagtactgggagttggggaaccctcccttaaatcattcgttttcaaatctaagtgtgcgtaaggattacctaggcctaactgcagagattctgattcacaaagtctgggatggggctca

SEQ ID NO: 39127 - DNA, 122 bp, Homo sapiens
cggaaggaggcgaggtcatgcactttgcagccaatcatcttcggcagacagtccgggcggcggggctggagggctcagaacggtccaatcgctggccgcgaggctccggcgaaccaatggga

SEQ ID NO: 39128 - DNA, 122 bp, Homo sapiens
gggaggagctggcgcccggctggacggagcggcccccgcccttcccccgactccgcggagcgctcaccaccgcggccccagcgcagttaagtgtggacgtctgtacacggtttccgcctgcc

SEQ ID NO: 39129 - DNA, 122 bp, Homo sapiens
cgggggtcggggggtggctatcaggagccctcagcagtgcaactttccttttctgaaacacgtggaaccagaggactctgtcctcgcagacacgctggccctcagagcccctgtttctccca

SEQ ID NO: 39130 - DNA, 122 bp, Homo sapiens
cctgccgaggcccggaaacccgcccgggacgtgagccccgagggcgcggcacaccccgggcgcccccaccccgaagcgagcccggggccctctgctgcggagcctagctcccgcggtagcgc

SEQ ID NO: 39131 - DNA, 122 bp, Homo sapiens
gaagagcagtgacttgcttcgtgtggcctgggagactcgggaccttctgtcccctcttcccgaggacccaggggcgatgcccagagctgtcaccacccggggtctcagtttctagcaggctg

SEQ ID NO: 39132 - DNA, 122 bp, Homo sapiens
tgtgttgtcttcattggcagggccaaatgacttatacttttgttgaactgctccctctaccgtacgtgcagtatctaattatacaaagggttggttagtaggcactgtttttttcttttttt

SEQ ID NO: 39133 - DNA, 122 bp, Homo sapiens
tctcccagggcaacccccgccgccgggtgtgagaggaaagagtatgtgtcactgtgtatgcgtgacactccgggtctttttgaagggaggggttcgtgcgtcacccctttccactggttctg

SEQ ID NO: 39134 - DNA, 122 bp, Homo sapiens
gggcaggattcgggaccaagcgcaaaggcaggtctcgaccaagcacctcaaggccccatacggagaaagttctagacgcagtatcctcagaagccaggggtccttacagtagccctcgcggg

SEQ ID NO: 39135 - DNA, 122 bp, Homo sapiens
caccgaaggcatggtctaacttgattttgtgaagctgtttccacacttcaccagcactgccgtcagtattttgttcccagccatggccttcaaaattttccagaaaattctgcgaaacttca

SEQ ID NO: 39136 - DNA, 122 bp, Homo sapiens
atttgctctgctgtcctaagagaccagtaacattgatatagaaatgggcactattaatgccgtaaatgaaagcctctaaggcataagttttagcttgaggttaccaatgtggatacagatga

SEQ ID NO: 39137 - DNA, 122 bp, Homo sapiens
ggacaggagggaggggagctgtgcacacggcggaggcgcacggcgtgggcacccagcacccggtacactgtgtcctcccgctgcacccagccccttccgcgccgaggcgtccccgaggcgca

SEQ ID NO: 39138 - DNA, 122 bp, Homo sapiens
agaaaagcgggtgaagcacagagcccaaggctccgtgtggcccccccagtcagctgaagtcgtgaccctcaccgcagcctccgccccgcgccaagcctgactgtggtggcttccgatgggtg

SEQ ID NO: 39139 - DNA, 122 bp, Homo sapiens
ggaagcagccccttccagcaggtatggccccccgaggcctgccctcaccctgcccacagccgctcccccttgaccctaagcctcaccactgaccaagatggcggaggtggcagggccttgct

SEQ ID NO: 39140 - DNA, 122 bp, Homo sapiens
ccacctcagcataggaatctccctaattttgtccccctccccacccatcccgctgggaggcgcattgcaaacttccaggttccgcggcccgagaggaaggttttctggagcggggaacgcgg

SEQ ID NO: 39141 - DNA, 122 bp, Homo sapiens
ctccagatgacataccacctgagcaaggcttccggaagtagatgatgagaacaatgcccacgatgatgcccagcacacccaggccaaaggccacgccacacagcacattctccagcagatct

SEQ ID NO: 39142 - DNA, 122 bp, Homo sapiens
ccttcttgctcagggtgtgcttgtcaccctccctgccggagtacttgtggaagatggccacgaggaggccaatggcctgatccagggggcatgccatggctgagggctgggcttggagctgg

SEQ ID NO: 39143 - DNA, 122 bp, Homo sapiens
tctggatcaagtcccaaccctcccgtgatgctaacggttcctgggtgacgccatcctccccgggtccttcccatcaggcatcctcagtcatgctgtacggaaacactgccttcaacaaatca

SEQ ID NO: 39144 - DNA, 122 bp, Homo sapiens
gcttaacattggctgggatagatggtacctgaaagttgttaggagggtttgcgcagggcgcgaggaacagaagcaaattagaggagctataatgtttggagggaggacaaaaatgaaataga

SEQ ID NO: 39145 - DNA, 122 bp, Homo sapiens
gaaccgcggaattaaggcacctagaggccaagggcttgtgtcaagctctgcattttgccccgcaggggaacctctataccccgcgattgaactcgaaagactcctcccggcggatgaaagcc

SEQ ID NO: 39146 - DNA, 122 bp, Homo sapiens
ctcctgaggaactcctcagggcctggatctcataggtttgcggaagggcccaggtgaagccgagaacctggtctgcatgacatggaaaccatgaggggacaagttgtgtttctgttttccgc

SEQ ID NO: 39147 - DNA, 122 bp, Homo sapiens
cggcgccacatctgtgtgtgggtccatttaccctccaggaagcagcgagacagcgcggcgcgggagaagggccctgcagggttggactttgcagaaactgcccgcgaaggactcggccccga

SEQ ID NO: 39148 - DNA, 122 bp, Homo sapiens
gcatttcatttctccgactccagctctgtactaaatcctcacaagtttctcgttttcatacgggaactggatggaatgactccccaaaaaatacagctttatttctcaaatactgaccccca

SEQ ID NO: 39149 - DNA, 122 bp, Homo sapiens
ccagggccttaggtggcagcttccaggcacaaatcaccactggagctcatcaaacgtggacgtctgagccccaggaaaaagccttcaaaggacagagactagaaaaatgagcagtgaacaag

SEQ ID NO: 39150 - DNA, 122 bp, Homo sapiens
aaccatctctccaacgggggcacaaagtctccgctactctggattctgtcttttcttgtgcgttttttcccctccaccaaaatctaccccaattctggctcgttatagcaaccaccagaaac

SEQ ID NO: 39151 - DNA, 122 bp, Homo sapiens
actcccagggcgtttgctagctttccaggtagtgcaacccctagtccttaacttgcctgtcgagataagaaactactgtactttttcttcttgcacttttttgctgcctcctctctccagtt

SEQ ID NO: 39152 - DNA, 122 bp, Homo sapiens
ctcaggtcagctcagtgcaggggaataatgttggtaactgcaagcagcatcctgaacggccgcgggaagaacttggaaattctttaagagaacgtactttttgctctctgtgatccggcggc

SEQ ID NO: 39153 - DNA, 122 bp, Homo sapiens
cccctgccagcaccttccaccttggggccttgtcaatgaacactgcgttagcacctacgacgtgccaggcgccctggcgactattggaaaacccggctcccctctcaccccgttttcctcgt

SEQ ID NO: 39154 - DNA, 122 bp, Homo sapiens
acaaaggctccttcgtcggcaacatagccaaggaccttgggctggagccccaggagctggcggagcgcggagtccgcatcgtctccagaggtaggacgcagctttttgccctgaacccgcga

SEQ ID NO: 39155 - DNA, 122 bp, Homo sapiens
tcactaagtcgggatggcatggcgggaacctgggagagggaagagtcccacgctgacggccgtgccattaacaggccttctggggtgccggctccagccgctggggccctgccccttcccct

SEQ ID NO: 39156 - DNA, 122 bp, Homo sapiens
tcgaggggcgggcgatggggcgccggcccgtcttggtaggggtgggctccgcactggaggcggagctgctgctgggtggggcgcgcctccggcgcggacggaggcggcgggacgcccgctcc

SEQ ID NO: 39157 - DNA, 122 bp, Homo sapiens
tccaacatctgagcttactggtccccaggctctgacctctgaacccactggcccctgcttcgacctctgagcccaccggtccccaggatccaacctctgaacccgccggcccctgctccaac

SEQ ID NO: 39158 - DNA, 122 bp, Homo sapiens
cagcggtggccttccgggcggcgggcacgatggcgggcagcggggttgacatgttattgccgcacatacaccgcctcagctcacagcgcaagcggaaggaagagcgggcgcccggccgcggc

SEQ ID NO: 39159 - DNA, 122 bp, Homo sapiens
tctcactgcctggggccagcattgtcagctgcctgctcggaatgcggggccagccgagcccgcacccaccgggaactcgtgctggccagcgagcgccagcgcgcggcccaggttccacccgc

SEQ ID NO: 39160 - DNA, 122 bp, Homo sapiens
cactcttccgcaggcgcttgctctaattcgtcagcctccccgtggctttagggagcttcacgggcttcaccgcgcacctgccaggcaaaggtgtgcttttccttttttgtcagtttgaggtg

SEQ ID NO: 39161 - DNA, 122 bp, Homo sapiens
gttgtgaagtcacgtggtttgggttcaaatcctggcgctggcgcctgtcggccgggttaacgccaccaaattatttcatctctccgagcttgttactcactctacaaagtgggaagaggccg

SEQ ID NO: 39162 - DNA, 122 bp, Homo sapiens
cctgttttggggactttagattgggggtaggatagaggatgccctggtcaccaactgcagcgtactactaggatcctgagtgggaagagtttttaggtgttcttagtcttcttttacccaag

SEQ ID NO: 39163 - DNA, 122 bp, Homo sapiens
tgtgatttggccaaagcatcagtgaggcacccagcctttgaggctgagaatggggcttctcgcattgtactgactgggtcagaatctaggctctggtctaaactagcagggagacttgagta

SEQ ID NO: 39164 - DNA, 122 bp, Homo sapiens
tgttccttctgatgttcggatgtgttcggagttttttctttctggtgggctgcagactttcgcggtgagtgttacagctcttaaagcggcgcatctggagttgcttgttcctcccgctgggc

SEQ ID NO: 39165 - DNA, 122 bp, Homo sapiens
aacagcgagcgaatctgagggcacccaggttgatggccgtccaaccaaaacagtgccgtgcgcctgggcacaagtgagggatccttccgaaagcttgcaattattaccacgcggttttgaag

SEQ ID NO: 39166 - DNA, 122 bp, Homo sapiens
agagggggaccgttcttaaaggggcgatggcgcggcctctcgggtagcgaggggcggcgccgcggccccaggacagacctgcagctgaggggagcccgccctggacgcggcagggatgaccg

SEQ ID NO: 39167 - DNA, 122 bp, Homo sapiens
cagcccgcccgctgcgttccctccacttgatactgtcaatcttttttcgtatttgccaatcggagacaataaactgttatcttcgccctggagtatttattcgcctttctcagattaccagg

SEQ ID NO: 39168 - DNA, 122 bp, Homo sapiens
ggtacggctgctgcagctccagcccaagggagccattgaccttgatgctggtgaccagcacgggctcctgcacctccaccagggctgagtcattggcagcagagatgttgttggacgcggtg

SEQ ID NO: 39169 - DNA, 122 bp, Homo sapiens
cggaggtcagccggcccaggcctgagaggatcagcaagagagacagcattgcgtagccggcggcccagccacagggatggccgttgtccttggaacggctgcagctcgaggccagggtggtg

SEQ ID NO: 39170 - DNA, 122 bp, Homo sapiens
ggacgacgtgggaggttgttaccccagttgggggccagacgcctgggttccggtttcccacgggttctggccttgggggaagggctattcgggccggctggtccctcaaaggcgggaagcgt

SEQ ID NO: 39171 - DNA, 122 bp, Homo sapiens
aaggtctttcacttgccggtgtgagcagaggatcctggggagactccttggaaggggcttcggatccagccaggctcccgcgcagtcctcagggggcgtggcccggctcgtgggggcggagt

SEQ ID NO: 39172 - DNA, 122 bp, Homo sapiens
tcctggtagaaatgacacccctgtgaaatctgcttcatagatgacattaggtgaccacaacgattagtgtaccatgaacctcagaaccactggagctgtgggtgccaaaccctgtgggacct

SEQ ID NO: 39173 - DNA, 122 bp, Homo sapiens
aattgaagccatccacggaagccaaatggttatagatctctcaggagctgagatcagggtcggctccagctacttataacataccctagaggcatcagcccacctttgggtggggttaaagc

SEQ ID NO: 39174 - DNA, 122 bp, Homo sapiens
ccctacttgttgcgggcaggcagggtggccgaagtccggtggggagggccgggcctgcggcggtaggagcggtagtgctgctggatgagcacagccgctcggcggctctgctgaaatcgctt

SEQ ID NO: 39175 - DNA, 122 bp, Homo sapiens
aaggcaggcagcagcaccgacgcgttctcgtacacctgcagcacgcgatagaacggccgccgccacttctccagcttgtggaacctacacagggcgcgagtgagaggtgagcacccactcct

SEQ ID NO: 39176 - DNA, 122 bp, Homo sapiens
atggggactccgtgccgggaggctgaggctatggggactccgtggggcaggctgaggctacggtgactccgtgcagggctgtgaggctacggggactccgtggggggtggctgaggctacgg

SEQ ID NO: 39177 - DNA, 122 bp, Homo sapiens
tttactccctgcattattcaatcatgattgctttcagactttcattagtttcactagcttcgcgctgtaagagccaagaggcagagccacagggctgggctgcctggtttcactccccactg

SEQ ID NO: 39178 - DNA, 122 bp, Homo sapiens
aggaggatacccctcaggagggctaggagaggaatgacaaatacagaggatagaaggtcccgtggcctggttgtgccctcacacagggtatgggttgtccaggactgccactcccgctgcca

SEQ ID NO: 39179 - DNA, 122 bp, Homo sapiens
cagctgtgagcacaggcctccctcctaagcaggttcctcacctacagggcaccccagacacggctgttctggacgcaaagagaaggctgctgccaagcagggaggcagaaactaggaaccac

SEQ ID NO: 39180 - DNA, 122 bp, Homo sapiens
ctgcatctccaatctgggagctatcctcaccttgggagggtggggcaacaatgttattctcgtttcccgataaggaaaccaacgtccctacaacttgacgttaaatggtcccaggttcctga

SEQ ID NO: 39181 - DNA, 122 bp, Homo sapiens
cacaggagcaccatcatgcagttggtatttataacttcgggggatgctatcacagcatcgcggacggcctggtccctgaccaatcctctgtggacgaattcggatttgattcctgccaaatc

SEQ ID NO: 39182 - DNA, 122 bp, Homo sapiens
taactgtagtcgtctcgatggttgtgatgcccatgaggtgttgggctgggggcatgatgacgctgaggcaacatgagaggggacgtctttgacaccagggccccagccacgtgtctcagggg

SEQ ID NO: 39183 - DNA, 122 bp, Homo sapiens
ttggtttgttttccctgattgtatcatggtgccaagcaggccagattctggcgattatctcgaatccacctcctgtgttgtgctgggacccggactgattgaaataaggaaaatgcctgtaa

SEQ ID NO: 39184 - DNA, 122 bp, Homo sapiens
ggccgcggagctcagctccggccttctggcctcggcggccgcgtcctcgcgcgcggggatcgcacccccgctggcgctcggcgcctactcgcccggccagagctccctctacagctccccct

SEQ ID NO: 39185 - DNA, 122 bp, Homo sapiens
caaacagactggatctggacctaaggtttagacgactgcttgcccttcagggacagtggccgggagggcaggaggggctgctggcacacacctgcacctgcgggacctctgatgagggcagg

SEQ ID NO: 39186 - DNA, 122 bp, Homo sapiens
tttacttagggcgaatcacaagtgggctttcatttaggtgatttaagattcactaatcagcgttgctctttcaacggccaacttcttcctcattagcttacgcctagcgcggctcccggcaa

SEQ ID NO: 39187 - DNA, 122 bp, Homo sapiens
gtgatccagatccagtttttccatgagtccgaggcgcggaacctggcttcccagatccggcgtgtacttccatcttttaccagttgccggctctttcccacccaacccgtttcctggacaag

SEQ ID NO: 39188 - DNA, 122 bp, Homo sapiens
gaagtcctgtgaagaattggcctcctaagcacaaaaggtgaattggaacccaataggtcgcggcccccaacctggagcttctcctgggtctggggatagattgtggctccacctagtgtcct

SEQ ID NO: 39189 - DNA, 122 bp, Homo sapiens
gccaaatgtggggggagcgacggattgttttaggttggaagatggaaaaccgcacttctccgaggacagaagacccaatgtaatatttacataaacgatgttgcttgattcattatcgaagc

SEQ ID NO: 39190 - DNA, 122 bp, Homo sapiens
ggagctgcaagggcagagtctaggagggcccgcaagccaggatcccaagtatcagacacgcggcatttcgctaccctcaggacaacagctaactacccttcttaaaatccctacttcaataa

SEQ ID NO: 39191 - DNA, 122 bp, Homo sapiens
gtttccttggggagataagaataacattcgtggacggtaaataaagcagcatgtggtgaacggctaatttcgccacacagaaaacaaacacacaaatctctgtatggagagaacaggaggtc

SEQ ID NO: 39192 - DNA, 122 bp, Homo sapiens
ccaggcccctcctgtacagggcagcaccgtgccgagaaggccgagccacacagcccctcccggtctgggaggccaggactcccgagtgtcaccaggcacgtccccatccatgtgacaagggc

SEQ ID NO: 39193 - DNA, 122 bp, Homo sapiens
ttccaatgggatctcctcccttccctccctcccaggcggatgttcccccccttcaaggtgcgagtcagcggcctggacaagaaggccaagtatatcctgctgatggacattgtagccgctga

SEQ ID NO: 39194 - DNA, 122 bp, Homo sapiens
ctgcagcttcactcctcagcggcgagaccacgaacccaccaggaggatcccaactccagacgtgccgccttaagagctgtgacactcaccgcgatggtctgcagtttcactcctgagccagc

SEQ ID NO: 39195 - DNA, 122 bp, Homo sapiens
agaggtccctaccgggtggcacgatctattatctaggaagccaatcgatgtatgaccgcccggtgtaggtcaggagagaggcgggagacggcaggggatggaagactctttaggtgcctgtt

SEQ ID NO: 39196 - DNA, 122 bp, Homo sapiens
gcaattgtctcctaaacactgttatagtcactaagtctgcatactttagaaactccagatcgtcactaaatctcatggaaatgtgtattggcattttccttgagatttcttttaaagtatca

SEQ ID NO: 39197 - DNA, 122 bp, Homo sapiens
gctgaggggctgaaaggctgaagggcgggcagcgtgccgggtccctgcggctgggtccaccgcacgtcacgtggcagaatcccggggctgctttctctccggctgctcagccacttgttttc

SEQ ID NO: 39198 - DNA, 122 bp, Homo sapiens
gggcagagccggatacccgggcccagtgcgacgctcgcgcctcatcctttctccttaaggcgaggacatcctcctcaaagggagggacctccccccgcagacacccgggagctcccaaactc

SEQ ID NO: 39199 - DNA, 122 bp, Homo sapiens
gcctgttccacgcccacagactttggtcaggcaaagcggccgcagggcgtctgggctaaacgcaaccaggaacacattggcaaacttttgcgcctgcgcccaccgggcgtgcacctgtaggc

SEQ ID NO: 39200 - DNA, 122 bp, Homo sapiens
cgcttcccacaaagaggtccggctcctccacttccgttaggctgagcaccggctgaatcgcggaaacccgactctggcaatgtaggttccccacgccgggagttcccaagctgggttggaga

SEQ ID NO: 39201 - DNA, 122 bp, Homo sapiens
ctggggtgctgcggttcgagctgggggtgtgtaactcgggggcagctctctgaggggcggcgatcgagtcatgctggcggggatggggggcgcgggcgcccccaacccgcgttatctgggcg

SEQ ID NO: 39202 - DNA, 122 bp, Homo sapiens
acaactcttctaagttttttctccttagttctgctaagtgaaaacacaagtcattatcaacgtgtacttgaaaagagaaaaaaaaagaaaaaagaaaccagagacacgcctgctgggtatag

SEQ ID NO: 39203 - DNA, 122 bp, Homo sapiens
tcatgacttgggatcctctgaagtgggggagggcgatccgtccccagatgctgcccgtaacgctgcacccctgcccttggaggaggcccacacgcccctgtctgggacagccggggacgggc

SEQ ID NO: 39204 - DNA, 122 bp, Homo sapiens
tatgatttaggtcagtgggttaccaaccccagatctaagctggcaactagatggaaagcccgtacgccctgacagtgctcacaagatgctggtgcgtgagaacggggtgcactctctgatca

SEQ ID NO: 39205 - DNA, 122 bp, Homo sapiens
tgtgggctcacatcgccggctggcttgagggaggagagtggtggcggctccggaggtggacgtgtcaattatatcctggagctccgggaagccagattgcttctaccggcggctgcaggggc

SEQ ID NO: 39206 - DNA, 122 bp, Homo sapiens
tggggatgccagccatggatgccgctgggcagtgggcaggacacagaccttgcccttccccggcctcccaccctagtggaaatgtgattgcagattaccattggggatgtggaggcagcatg

SEQ ID NO: 39207 - DNA, 122 bp, Homo sapiens
ccttgaactatgccttccatgggtatgtcccaggattatgtccaattcctctttctctaccgcccattgtggaatgtgtacagtagtgacaccgtaatgtcaaccaactttataaccagaag

SEQ ID NO: 39208 - DNA, 122 bp, Homo sapiens
ctgcggagcacccggctctgggctgcgcgtcgcctcctctgggctctcctgggcccggggcgtcctgcttcccagctcgaattctgcgaagtgactccagagggaacccgaaagcctctgaa

SEQ ID NO: 39209 - DNA, 122 bp, Homo sapiens
cattcctctgatactctcagcagtcacagaacagagacaggaaacattgtgtggagggcccgccggaaggactcggcggcagaggattccacctgcacaggaaaggtggacagctgcttggt

SEQ ID NO: 39210 - DNA, 122 bp, Homo sapiens
aggagccgcaggtcgggcctgaactgccgctgggagaggaagcggcgcccttgccaggaacgtggggctgtggtagcagcaacacctgctccagcttcacctccagcagctgctgcgccgca

SEQ ID NO: 39211 - DNA, 122 bp, Homo sapiens
gagaagaaaaagtatttggtcttctcacacaggttttataccaacagaggtgctatacagcgctttctttttttgagatggagttccgcttttattgcccagctggagtgcaatggcgtgat

SEQ ID NO: 39212 - DNA, 122 bp, Homo sapiens
acgccccgaacctcgtccgtggaccggggaggccaacgcgaagcccaggcctaatcccttcgccttggccctgctaacttccgggggtgttctcgggcctgatagtcctgtatagacagctc

SEQ ID NO: 39213 - DNA, 122 bp, Homo sapiens
ttttctctcgctctgccaaccctgttcccctttcaagaatgtttaaactcttcattcaagcgatgagagggaaacacttgagctgcacactcaaggagatgtgggtttccattctggccttg

SEQ ID NO: 39214 - DNA, 122 bp, Homo sapiens
gtccaggcccagtttcctcagagagactcggggagccccactttgagggatggggttccccggaacgactccgaagtcccggagaccaggcgcggcccaggccctctgcccttctccagccc

SEQ ID NO: 39215 - DNA, 122 bp, Homo sapiens
ggcatggaccctcatctcactcagccaatgggaaggcacgctggcaagaggccctatcaccgccgcgactatggggtagcgttcaagggcaggccgcacctcactcagcacatgagcatgta

SEQ ID NO: 39216 - DNA, 122 bp, Homo sapiens
gagcacagacccagtttgatgttaagaatgaccgttacattgtcaatggatctcatgaggcgaataagctgcaagacatgttggatggattcattaaaaaatttgttctctgtcctgaatgt

SEQ ID NO: 39217 - DNA, 122 bp, Homo sapiens
gctcgactatgtcatcagctccttttaccccgagatccaggctgctcatgccagcgacagcgtgcagagaaatgctgccttcttccgggaggtcagtgggccgcacgccacccctccctgcg

SEQ ID NO: 39218 - DNA, 122 bp, Homo sapiens
aggtgcatttgcactttttgcacttgcaggagccggcgcaggcgtaggagcctccagcggcgcaggagcagttggggtccattgcaagccgaggtgagaccggcgttcccaagcgagaagag

SEQ ID NO: 39219 - DNA, 122 bp, Homo sapiens
agggcggggcagaagacggaagagttgaaatcagctgactgggtctcgtgacagcctgggcggtggcgacgcaggcgtattagagcgcgctcgctcaaagcctgagcgaagatggcggcctc

SEQ ID NO: 39220 - DNA, 122 bp, Homo sapiens
ggtaggagtcgggtctagccctagtttgctcctgagcgcttcgttcctctcaggctactgcgtttaaatcaatactgggtggcaaacgatacccattctttgggctctgaagtttggaattc

SEQ ID NO: 39221 - DNA, 122 bp, Homo sapiens
cgccctccctgcccgcgcctgcgcaccggctgctgggcgggaactggtcgcgtccggacgcgcgacagcttccacccgcctcaggcagtatcagccgcgccgcagtcggaggaaatagacgc

SEQ ID NO: 39222 - DNA, 122 bp, Homo sapiens
gggactgggaactatatatacccgggcacacgtgtgtgtgcctgtctctgtgtgtgcgcgcgcatgtgacaccgcgcggactgctccgcgctgctacctcccccatgtgcacggccgccccc

SEQ ID NO: 39223 - DNA, 122 bp, Homo sapiens
aggggtgtcctctgcctccatctaacttgctgtctgaccctccttcagctcctgaacacccgccaccgagatgtcttgccagcagagccagcagcagtgccagccccctcccaagtgcactc

SEQ ID NO: 39224 - DNA, 122 bp, Homo sapiens
ctaaagacagaccaggttgtcagtgacaggcagaggtcatgtgacttgacaggctgaggtcgtgttgtgacatgttgacctggggaggcgggtcaagtcccagcacactacccgggaagcct

SEQ ID NO: 39225 - DNA, 122 bp, Homo sapiens
caacgaacagctgggcctgaaaccacttctcccccaggtttgcacagcaactcaagccaccgcaaagctcacctttgtagcctttgcccttggtcaccccgatgacgtcgatcatctcatcc

SEQ ID NO: 39226 - DNA, 122 bp, Homo sapiens
cggggctgcagccaggcccctgtcctgatgaggtgcgtctgcagggatgggactcagcggcggggaaatgagacgctctgttttccaggcagcctgggctggtggcaggaagagctctggcg

SEQ ID NO: 39227 - DNA, 122 bp, Homo sapiens
cctattttccacacagtttgctttttgtgctttctgtctggtgaatcatggatgcttttgcgatatgatatgaagagaaaaaagccagcagatgtaggctcatatcccagcattctgctgaa

SEQ ID NO: 39228 - DNA, 122 bp, Homo sapiens
tcggcctgacctagcgcaggtctggtgcgcgcagagaacaactccaagcgcaccgacgcccgcgagctccttccaaacaccgaacgggatccagagcccgagcccacaggcggcggccgggg

SEQ ID NO: 39229 - DNA, 122 bp, Homo sapiens
ggctgtgggagccgggagccaacagctctgaagctctgagctctgaggctttgaagctaccgcacactctgtcatctgttgattgttcctgggcagagtgggcccttgcatctgtttattga

SEQ ID NO: 39230 - DNA, 122 bp, Homo sapiens
cgtccttcgttaagttcaaagtcacggtgccacttcctttcccatctaaaggggactgctcgcgacccaagccaaggcccgcaagtgtggctctccctgcggggagagtagggcaggaggtg

SEQ ID NO: 39231 - DNA, 122 bp, Homo sapiens
cttccctacacccctatctctagtgtaaggacacagtgagaaggcaagccagaaaaggaacgctcaccagaaaccaaacaggcgggaacctagatcttggaccgcttaacttccagaactgt

SEQ ID NO: 39232 - DNA, 122 bp, Homo sapiens
caggccttccattctctggagagctgagagccccccaccccgccccccacctaagagcgacggggacctcccacccgctgcagtgtgcgggcctcagattcccattgactccggaagccctt

SEQ ID NO: 39233 - DNA, 122 bp, Homo sapiens
aggagggaaacggaaggcggggttacgtgccagccgccgggggcgggagtttcagcaagccgctggccaggggaagagacgcgctggggtgcccgagttcagtattggaagaggcaggtaat

SEQ ID NO: 39234 - DNA, 122 bp, Homo sapiens
gctcacagtggggtctaggagggcttgcaggcagtaagtgccaggacccgtgttggcgcccgaggatccctggcatgttcggggacggtgaggtcagtccagcagcggtgaggtcagtctag

SEQ ID NO: 39235 - DNA, 122 bp, Homo sapiens
gaatggcgtgaacctgggaggcggagcttgcagcgagcccagatcacaccactgcactcccgcctgggcaacacggcaagactcagtctcaaaaaaaagaaattagttgatatatcctatgg

SEQ ID NO: 39236 - DNA, 122 bp, Homo sapiens
gacgcaggtggaggagaggccctcacctgtcttcaccgcatggcgtgtggaaggcggggccggcatgttctgagggcgggggctgaggcgtgcacctgtgtgtggaggtgacgggtgtcctc

SEQ ID NO: 39237 - DNA, 122 bp, Homo sapiens
ccgctccccatcgccgcccgcaccgcccacagcgggaggctcagcgctccgttaccttgtcgcagtagagccccaccagctgcttcatccgccagtgtggggcggtgaagacgtccacttct

SEQ ID NO: 39238 - DNA, 122 bp, Homo sapiens
ggcggcgccggcgccggcggttttatctccgggagggggtccacctattgacggtggcggcgcagtgcaccgcgccctgcagcacgccaatgcggaaccgcgcgggagggggcggggcgcgg

SEQ ID NO: 39239 - DNA, 122 bp, Homo sapiens
cgcggcgctctcccggcgctgctgcctcggcttggtctcggcctgcgggccgtcggccggcgatggccctggattatctactactgctcctcctggcatccgcagtggctgcgatggaaggt

SEQ ID NO: 39240 - DNA, 122 bp, Homo sapiens
cagagctgtcaaggaagggtttctgaggtgtgtccctatatggcatggtggcaggtccttcgtgggagggttgccacatatgtgagtgtgcaggggcgagcgtggcgcagtggcatcgtctc

SEQ ID NO: 39241 - DNA, 122 bp, Homo sapiens
agtcaagtgggttgacagatatgtcaaaaatactttatgaaaagagggaggtagctcatgcgagttggcaaccttttgtgtattgtttcctgttcaagcaggctgcctccctttgacatctt

SEQ ID NO: 39242 - DNA, 122 bp, Homo sapiens
agttggcagggcgggcggtgcgggttcgcggcgaggcgcagggtgtcatggcaaatgttacggctcagattaagcgattgttaattaaaaagcgacggtaattaatactcgctacgccatat

SEQ ID NO: 39243 - DNA, 122 bp, Homo sapiens
cctcctcttccccagcagctgctgctcgctcagctcacaagccaaggccaggggacagggcggcagcgactcctctggctcccgagaagtggatccggtcgcggccactacgatgccgggag

SEQ ID NO: 39244 - DNA, 122 bp, Homo sapiens
taaacacttggtcaatatgaggtaaagccaacaggatggatttgggaccacattggacaacgccatcggctgcaccggacgcccagcaacagtaggtaaattaggtcatcattaaattatca

SEQ ID NO: 39245 - DNA, 122 bp, Homo sapiens
gcgccgcggggagggtcgctgtcagtcaggccgagcggggctcgctggcctgggggcggccgcaggggcgcagcgcagcctgagggcgcggcggccccggcagcctccgcagtggcagtggt

SEQ ID NO: 39246 - DNA, 122 bp, Homo sapiens
tacttagagaagttgattatcttggccagggttccacagtggtggaaccggaacctgaaccgcagtagtaaaccccaaagcctagttcttaaacattgcaccatatttcctaaccactttta

SEQ ID NO: 39247 - DNA, 122 bp, Homo sapiens
cctcgtggctgccatgaacacaggtgtgcagatacctcctgggaccctgccttcagttctcgtggcctactggggactcaggagccttgtgcctaacgttctgaggaattgcctcgctgctc

SEQ ID NO: 39248 - DNA, 122 bp, Homo sapiens
gattttgtacaataatttagttttatggagcccatgctaagaaaaataaagtgtgataatcgaagctcattgaaacaaagaaatccagaaacattctactgatctttgtggaaagagcattc

SEQ ID NO: 39249 - DNA, 122 bp, Homo sapiens
tgggcggggctggggcacgaccgggagcatgcgcagagcgcgcgtttcgcccatcgcgcacgcgcacacacctgctccgcccccacgctgcgtgccgctgctgggttccgccacgcccgtca

SEQ ID NO: 39250 - DNA, 122 bp, Homo sapiens
tggcccagaaaccctctgctacccagcttttgacttaattgccatttggtgtggctgcagcggggagggcttgtctgcgtatttggagctgaggctgaggctggcttcctgccctctggctt

SEQ ID NO: 39251 - DNA, 122 bp, Homo sapiens
ttatcttcctctttatgcctagcctggagctcaactccaggattgaagactatcgctgaccggagtgcttttcacgtactagttcatgtattactttatttaatcctcagaacaacctcatt

SEQ ID NO: 39252 - DNA, 122 bp, Homo sapiens
agggtttggcacccctctggcctttgtgaaaggcttaggaaacgggctgtttctttactccggttttacaggaaaggaaactgaggctcaagacgttttagtaacttctccaaggttaccca

SEQ ID NO: 39253 - DNA, 122 bp, Homo sapiens
ccccaagcctcagtttgctcatctataaaatagccggagtgatccttgcctcacctgattcgtggttggtgatgatcaaatgaggcaatgaatgagaaagcctttgcgttagcctctgtttt

SEQ ID NO: 39254 - DNA, 122 bp, Homo sapiens
ttcctgcaatttctcaatcagtccagtccctgccaaaacctaaggaggtctcaatggcctcggattggggcccagggtccttcccacccagagacctcgcagaaacaagactttgcaggacc

SEQ ID NO: 39255 - DNA, 122 bp, Homo sapiens
gcagagccgcacaggagctgccccggagctgaggggacggtcttcggctcctctgcaccccgtgattctgcccacgctcctccaccacgaggcactgacctgcgtcgggtggtgaccgtggc

SEQ ID NO: 39256 - DNA, 122 bp, Homo sapiens
cagccggaggagcagcagtttgaatcccaagcccgcgggctgcgggcgctgattgggcggcgcggcagcacgtcaccggaaatgcgcggggaggcaggcgtcttctccgagacccgcggcgc

SEQ ID NO: 39257 - DNA, 122 bp, Homo sapiens
cctaggggaccaaccaaccgaccaaagggactattgcttggatgcccaggtactgagacccgtgacttctgtggccagaggctgcgaggggccccaggagagaacacagcgccctaggattg

SEQ ID NO: 39258 - DNA, 122 bp, Homo sapiens
agtgacagccgagccggctttgaggaaccttgcagaggaagtggcttcagaactgctttacgcgaggggcaggaaaggcgcgggaggcgggggaggtgcggagatggcgctctgcacggcgg

SEQ ID NO: 39259 - DNA, 122 bp, Homo sapiens
tcctgggcgtagctcatctgtctgcacctgcaggaaacacggtttggggtgcggtcagggcgcagcatgagggaccccggaagccatagctcatctgtctgcacctgcaggagacacggttt

SEQ ID NO: 39260 - DNA, 122 bp, Homo sapiens
agttcagggtcagtcccatcattccacagggctgagaattagtgagcttgcagccccagccgctcctgcagccaagcctgaacgtgaaatacgctgaactccgtcacacgcctatttcgcta

SEQ ID NO: 39261 - DNA, 122 bp, Homo sapiens
tcttccctgtcccctgtgaggatcgtgagcctatgcgtgtgaggccaccaaatcccaattcgtatgaacgtgctggaagcaagggggtcagagcacttagcggctctctcctctggtgggga

SEQ ID NO: 39262 - DNA, 122 bp, Homo sapiens
agcggccctcacctccgcggggcgcaaaccctgcagctccggggcaggctgcggggcgcgcgggccgcactttaaaggaatctcaccagattttctccttggaaggggacgctctcttcgcc

SEQ ID NO: 39263 - DNA, 122 bp, Homo sapiens
tgccgtaaagacagaggcgggttgttaagtatactctctactttacggcgtacccgagaacgcccccgcaggggcggtgctttggaggtgaacccgggttgggaggttcagctcctcccacc

SEQ ID NO: 39264 - DNA, 122 bp, Homo sapiens
tcacattgggtgtaagttctcccatctccgaggcatcaataggagcggaaaggagtctttcgagaatgtcacagcaggcccagggccacaggatgatagctagagaatctaagaacagtagc

SEQ ID NO: 39265 - DNA, 122 bp, Homo sapiens
gaagtggccatcctaatgaccagttcaactttgcatatgtaaaccccttccagaaacagtcgttgccttcttctcaatccatttcttttcctggaaacatccacagcacaaatggagctcaa

SEQ ID NO: 39266 - DNA, 122 bp, Homo sapiens
aaggcaaatagaaagagggctgcaagctcatgggagagactccaggtctgtgcaccactgcgacctcatatctaaacattgaccttctagacccttccctttagtgcacatggggatttata

SEQ ID NO: 39267 - DNA, 122 bp, Homo sapiens
ctttagtcctcaaacaatggcaccatgaaggaggaactataaaggtccctatttcacagacgacagaactgagacacaacaacacagctcactggtgacaaggctggaaacgagacctggcg

SEQ ID NO: 39268 - DNA, 122 bp, Homo sapiens
ctcccgaggccccgcggacggtcgcgacagccccaacttcccggtgagaaccccgcgaatcggccagaagggctgatttcagcaactgggaaggagaaaaacaactagggtttcaacgcaca

SEQ ID NO: 39269 - DNA, 122 bp, Homo sapiens
gagcagaccagggtccgcgcatgcagcctctggaagagtggcttcgggttggcttcagctcgaggagtccaaccctatttcctcctccctccccccaccaactaccactgtcctccccccac

SEQ ID NO: 39270 - DNA, 122 bp, Homo sapiens
cttgctaatttcctgggttttcttcatgttttctggcgggcaagttctcgttgatttccacggaccatgccgaccaccgacagagccaggaagaaagcaagtcggaaaagcaacggttccct

SEQ ID NO: 39271 - DNA, 122 bp, Homo sapiens
aggggctttgacagaggtagttatttcttcctaatttacaaccccaaggctctgtgctcccggccccggcggccgcaagcaggagcggcggaacgtgtttccaggcactgaggctttgccta

SEQ ID NO: 39272 - DNA, 122 bp, Homo sapiens
gggagattaagtttaattggtaattcgaaaactccagaattctatcattgttccaacagacgtgtgttgaacaagacaagctgggtcaagcatttgaagatgcttttgaggttctgaggcaa

SEQ ID NO: 39273 - DNA, 122 bp, Homo sapiens
caggcagggccctggagacccccccgggaggcaggtggggaagatgcaggctggaagcgacgtgctcctggtcagcttcctagagctccgcgtgcgtggtgcagccaagttcctcgggtgag

SEQ ID NO: 39274 - DNA, 122 bp, Homo sapiens
gtgatatgtgtatgtatgtggtgtgtgtgtggtgtgtgtgtgatgtgtgtgtgcgatgtgcgtgtggtgtgcatttgtttgggggagggctgtgcatttctgctctcagcttggcccccagc

SEQ ID NO: 39275 - DNA, 122 bp, Homo sapiens
attaaatcccactggctgcacctgagtttgtctgccagctctgatgatgaggggtggtctcgatatgcctgaagtatggggtctgcaaagtgcattttagcatagctcaggggacagtggag

SEQ ID NO: 39276 - DNA, 122 bp, Homo sapiens
accttcatttacacacacatggagcaggagtgttgtatgatatgagacataaatttacctcgtgtccttatatgtgcttaatgtagggattcgtattttgaaataggctttcttttaaatat

SEQ ID NO: 39277 - DNA, 122 bp, Homo sapiens
ctctcctgacgcggggacttgcgtctcagtgcagagggcagtggagggacagtgcagctccgaaatgagcatctgagttcactgctggtgggcaccatcccggccaacaggccactagtgtg

SEQ ID NO: 39278 - DNA, 122 bp, Homo sapiens
aaagcacctccaaatatatatgatgccacatcttctcctcacacaggttgccttgtggtgcggcttccaggccggttccgcggttggggttgaccgtacacagggttcgggccccaggccgg

SEQ ID NO: 39279 - DNA, 122 bp, Homo sapiens
aagtcaattcttttaccattgtgatatagcaatgaaagcaaagaaaaagtctggcattagcggttggttacagaataaatacgccagtagctcatgcagccttttcttaaccagaatcattg

SEQ ID NO: 39280 - DNA, 122 bp, Homo sapiens
aagcagaagcagattaattagtattctgataaaaagaatataatcatttggtaaaatctgcgttgaattgtaaaggttcattttaattaccccaactaggtaactgtgcagttggagcataa

SEQ ID NO: 39281 - DNA, 122 bp, Homo sapiens
agctgagagtacaggtgcgcaccaccatgcctggctactttacctctactttgcctatcccggtaggatcttttcagcctacatcaaggaggtggaggaacggccggcacccaccccgtggg

SEQ ID NO: 39282 - DNA, 122 bp, Homo sapiens
catcgcccacaggacgcctgtctctgctgcgtggtggtgacctctgcatcgcccacaggacgcctgtctctgctgcgtcgtggtgacctctgcatcgcccacaggacgcctgtctctgatgt

SEQ ID NO: 39283 - DNA, 122 bp, Homo sapiens
agagaacaacaacaacaaaaagctcccttctgatgctcattatagacccatgcatagaatcgtcctatttgagatctcaaaggagcgtggttgaactttcttattttgcatatgaagaagct

SEQ ID NO: 39284 - DNA, 122 bp, Homo sapiens
ttccggcgtccgctccgggtctggacctcctggcgtttggattggagactgtgttctcttcgctgtttagttagcgagcagctagggtggagtcggcctcaaaggttccgctctcatgtcgg

SEQ ID NO: 39285 - DNA, 122 bp, Homo sapiens
aagagacacagtgagggaatagcagtaaggacagtcatgaagagccaagtattcagggagcgccactgtgcgccttcattgtgctggagacccaggagcggcctaaagagaagagcctggca

SEQ ID NO: 39286 - DNA, 122 bp, Homo sapiens
tgcccccacccgtgcacgctcaccgtgagaaacccactcccatgccgtgcactgatcgcccggcgtgctgcccggactccagccctgctgcctcggcctttccattctgcaccgcagggaag

SEQ ID NO: 39287 - DNA, 122 bp, Homo sapiens
cctgattttgtaatgcctcataggcccatagaagattgttgtttttcaggcattcaacctcgttcaaacaaaccaagcaattattttaggccagaattgttgggtgctgatgatacagagat

SEQ ID NO: 39288 - DNA, 122 bp, Homo sapiens
cttctagtggcaaatttctccctgctgtggcaggaggacggctcgggggagctctgaccacgatttcatgcaaagatacggtgagaccctccgctcaacagtggcttttctaaggctctcct

SEQ ID NO: 39289 - DNA, 122 bp, Homo sapiens
tcacagtgcgcgggcggccgggggcagggccagggctgagtcacgtggcttggttgcctacgcgctggtgggccgtgggaagatggcggacggaaagggagacgccgccgctgtcgccgggg

SEQ ID NO: 39290 - DNA, 122 bp, Homo sapiens
aaactgcaacccacctgcccccagccctgcccctcgccctgatgcgaagctggagaggggcgtgctgcggggccctgatgcccccacccacctcggtccagcgcggccctgcccaggaggcg

SEQ ID NO: 39291 - DNA, 122 bp, Homo sapiens
ggtcttgaactcctcaggtgatccgccctcctcagcttcccaaagtactgggattacaggcgtgagccactgcacctggcctatatgtgtgtttttagaacgcttcaggacactaaaggtta

SEQ ID NO: 39292 - DNA, 122 bp, Homo sapiens
caggcggcgggtcggggcagccttgaagccgggatccggcccgaagggtgagcaccagctcgtctccggtgggcgccgccttcaatgtcaagttccagggcagtcgcttggacccgtttggc

SEQ ID NO: 39293 - DNA, 122 bp, Homo sapiens
atccggcggcggggggccacggaaagactcgggcccagggaccacggagggggcacctggcgcggagcccccaccctacccccggctagcttgcgtgcgccggcgacatccctctagggggc

SEQ ID NO: 39294 - DNA, 122 bp, Homo sapiens
ttaataggagacaggtccgctggcccaagcaaagatgcgggtgccacgagggccaggcctcggccaagccctgctggggtaaatcccagcagcccaggctccagtctcgcctcgggggtccc

SEQ ID NO: 39295 - DNA, 122 bp, Homo sapiens
gtctgtccagcggtccctccgacagcttagagtccagcgactttgagcaaagttgggaatcgcggcaggaaggaaaggccggagcggattctgggaaggagcgcaacaccgggcggagagcg

SEQ ID NO: 39296 - DNA, 122 bp, Homo sapiens
gtaactgctaggtagtacccagacggcctccctctcgatcttcagggggtatgtgtcttccggccagctctcttcctgcttctgctatcttgctgacaccggctgctggcgcaagtgacctt

SEQ ID NO: 39297 - DNA, 122 bp, Homo sapiens
gctgcgtgaagcctctgggcaggctgcaaaggggaatgacgaatgtatattatttcctcccgcctgccccccgcccgacccttgacacagtttgttccagcaaatttccgggcggagttttc

SEQ ID NO: 39298 - DNA, 122 bp, Homo sapiens
ccatccaaccccccagctactctctgcggccggttggtcctgaactggtgggtgcagttccgatgtttaaccaaattctcaagcaatttcaaggtatttggattttttgaacctgggcccta

SEQ ID NO: 39299 - DNA, 122 bp, Homo sapiens
tcctaagacttaacgtgagaaagtctcaatcttggctgtacatagacatcttttgaggaacgtacaaaaatgttgatacctatggtagataaaagaaaagttgatccctaggccccacccct

SEQ ID NO: 39300 - DNA, 122 bp, Homo sapiens
ttggagttggatgtatgcaggtccacgcgtgagtgttcgctcacagccctgtaacatgtacgctgaggaagcgggtgaccgactccctacatgtgagcaacactcagcctagttaacagttt

SEQ ID NO: 39301 - DNA, 122 bp, Homo sapiens
ctcagatgatccacccacctcggtctcccaaagtgctgggattacaggcgtgaaccaccgcgcctggccatataatgttattattgaaggcacaaatgatcagggaagacttcatgaaggag

SEQ ID NO: 39302 - DNA, 122 bp, Homo sapiens
aaaagtgatgacttagttgattcctgaaacctgagaaagtattggacagaaaaagaggaacggtatgttcaaggcaagtgcaaaggtaggggagagaacatggcaaattataggagtacctg

SEQ ID NO: 39303 - DNA, 122 bp, Homo sapiens
acaagaagctttcagtagaggttagatattaatgttttccccaaaacttaaagcacttttcggggctgggcatggtggctcacgcctgtaatcccagcactttgggaggctgagtgaggtgg

SEQ ID NO: 39304 - DNA, 122 bp, Homo sapiens
ctacgcagtggctacgggagatggcttccagggcaactgttctccaagttcatttctgagcgccgggtaaccatggccagtaattaatccaattctaagcgttgctatcaattctacgcgtt

SEQ ID NO: 39305 - DNA, 122 bp, Homo sapiens
gtctcggcgtagctcttggcgcgggctcgttctccctcttctgttcagattcagcctcaccggacttgttacaacatgacagcaacttactggaggcaggaagagcagcacgaaataagatg

SEQ ID NO: 39306 - DNA, 122 bp, Homo sapiens
caggtcttcgaaaggccgttttgtccggaggctgtggacccggaggcccgggagcatcggcgggcagcgtggcacccactcggcggtctcaaccgggcaggacccgggtccggagctcgggc

SEQ ID NO: 39307 - DNA, 122 bp, Homo sapiens
ctgctcattcgggattcgccgaaacccctgctcctcagagcccagcccagagcctggacccggctctcaggccccccagtcagcctgtgtgaagtctaatgtcacagctgtgtcctgtgtgc

SEQ ID NO: 39308 - DNA, 122 bp, Homo sapiens
acagtggtgtgacttgggggtctggtctggtggtgtgcatgtgtgtctcttttgaaaggtcgttctcagactcctgctggctgctggagaaggaggggcacaggtgggagcacatggtcaga

SEQ ID NO: 39309 - DNA, 122 bp, Homo sapiens
cttcaggtgatctgcccccgctaggcctcccaaagtgttgtgattacaggcgtgagccaccgcgcctggcagatacattccagtcttgacaaacacagacataaggatgatttaggtgtccg

SEQ ID NO: 39310 - DNA, 122 bp, Homo sapiens
accccggcagacgccggggacagaggcctgcccgggcgcggccagccccggccctgggctcggaggctgcccccggccccctggtctctggtccggacactcctagagaacgcagccctaga

SEQ ID NO: 39311 - DNA, 122 bp, Homo sapiens
caggggtgtgcgggttctgcgtgtaggagaatctgcttgggaaaccacagccctgcctgccgtggagatggacgcagcgtcccgctcacccggcgcacactgcagggctccatgcgggagtg

SEQ ID NO: 39312 - DNA, 122 bp, Homo sapiens
agaaccgcagggacagaaacagttggggtgagtagcaaatgagaacttctgcagcctgcacggggtcttctggccctccactttctgcttctgtggagacagggagggccaagggctgctag

SEQ ID NO: 39313 - DNA, 122 bp, Homo sapiens
atgaaatgtatcagaaaatgaatacatacacttcataatattaatgtggacaaataaacacggatgttgaagtcacatgatagcaaaaataatgctgactgggccaggcacagtggtgcaat

SEQ ID NO: 39314 - DNA, 122 bp, Homo sapiens
agccttgcggccccatcctctgctccatcaacaccgacaagaaggagtgggcgaaatggacgaaagaagagctcatcgggcagctgaaacccatgtgtgagtggccttggccggcctggcgc

SEQ ID NO: 39315 - DNA, 122 bp, Homo sapiens
ggcaggagcaggtttcccctgctccagcacctctctgtgaaaggactggggttggtttcccgaacagggcaaaaagcagagggtgtgtgttctcgccagctggacctcgatatctgaaagga

SEQ ID NO: 39316 - DNA, 122 bp, Homo sapiens
cctgacctaggatatcgcgtgtaagtgcgacagctcctgtagatggcagtggagcacttccgcaaatgctttggcctggcgttctgggcctggggttgagggatgcaaaggataaaagctgc

SEQ ID NO: 39317 - DNA, 122 bp, Homo sapiens
catctggctcactccccactccgtctctggagcccaccagggaaggccctcatcccctgccgctacttctctggggaatgtgggttccatccaggattgggggcctctctgctcacccactc

SEQ ID NO: 39318 - DNA, 122 bp, Homo sapiens
cacacacccagggtattccatagcttgatggttttatctcgagatccagagacaatctgccggttgtcagaggagaaggccacactcagcacatccttggtatggcccacaaatcgcctcgt

SEQ ID NO: 39319 - DNA, 122 bp, Homo sapiens
atctggtgctgatgtggctgctcccctgagcaattgctcctcagacacaaatgatgcaatcggttacagccatcatttaccttcaactttctttgtgccaagcatgaaacaggtgacatgca

SEQ ID NO: 39320 - DNA, 122 bp, Homo sapiens
ccacacgcgtgtgagtttaacatgcacatatgtggcctcccatgctgtggtctgcagagccgtgtagccgcacctttaccacacgcatgtgaatttaacgtctacatacgtggcctcccatg

SEQ ID NO: 39321 - DNA, 122 bp, Homo sapiens
caaaacttcaatgagatagtgatcataaagaaaccacatacttcagaaggcaaagcttcacgaacagacactatcactgtctggtcatgcaattaacccccaatttcaattccatttttgac

SEQ ID NO: 39322 - DNA, 122 bp, Homo sapiens
agatgtctgctaacaaagccattgtcaggaactatttagccacaggcttcctcctattaacgtaacttgagacttgactaggtcagtacatccaaactacaacttttttcattccattcatt

SEQ ID NO: 39323 - DNA, 122 bp, Homo sapiens
ccccccttttcggaggcggcttttcttattcaaaacaggcccacaatgggcttcacagtgcgcctcgccacggccccatctgacgagcggccattcatcaggccggctggcctatcaatgac

SEQ ID NO: 39324 - DNA, 122 bp, Homo sapiens
ggacccgccctcgagtcggcccagccctaacactcaggaccgcctccagccggaggtctgcgcccttctgaggaccctgcctgggggagcttattgcggttcttttgcaaatacccgctgcg

SEQ ID NO: 39325 - DNA, 122 bp, Homo sapiens
ggcggtcggaggtaatccccacaccgcttcctcctggaagtcaggctggccgggagctcccgtatccaggacggttggtcgcctctggcctggcagggatcctagtgtctcgggacctcccg

SEQ ID NO: 39326 - DNA, 122 bp, Homo sapiens
agggaaggtggccagcctgatcggcgtggagggcggccactccattgacagcagtttgggcgtcctgcgggcactctatcagctgggcatgcggtacctgaccctcacccacagctgcaaca

SEQ ID NO: 39327 - DNA, 122 bp, Homo sapiens
gctgtgtgaccttaggcagatcattttacttctctgaacttttgtttctgtgcacacgcgcgtgtgtgtgtgtgtgtgtctatagttttttgagtgcttactatatgctgagcattgtgtct

SEQ ID NO: 39328 - DNA, 122 bp, Homo sapiens
cctcagccccacactaggcccgcccacgtaagcagccggcgaccgcggcgcgaacccggccgctgaaggactggtcctgccccacacgcctccccccggcaacggcgacgcgagaagaaagg

SEQ ID NO: 39329 - DNA, 122 bp, Homo sapiens
cgaagcttcttttcctccagaagccccgccaccttctaagcttctccccagcctcagccacgccccagcctgcaaaagccgggtcctttacgccccctggctccgtatttgatttcggcgcg

SEQ ID NO: 39330 - DNA, 122 bp, Homo sapiens
acagagagcaaaatgttcagtttttagatgtgtggtacccttggagatttgtggcccgtgcgtttgtagtaattccagctggatggggctttccagctcccggctttcttattctttctgtc

SEQ ID NO: 39331 - DNA, 122 bp, Homo sapiens
tccccctaggccgccacctccaaccaatcggactggctcttctgtcattcgggtcacctccgctgagatgccttccctgaccacccaagttgaaggaactgctaaccttttctcttggactt

SEQ ID NO: 39332 - DNA, 122 bp, Homo sapiens
gcactgcaatgggtcaaggatgctttgccagaaaagatgttcataggatttcaggaagaacgtaatttactgacaagacttaagggctctagggtttcagatggtttgttttcaaggatgaa

SEQ ID NO: 39333 - DNA, 122 bp, Homo sapiens
actcgtgcactgggctccggagcagccccggggtgcagggcactccccctccagggcgtgcggaggaaggccaccaaaacacgctgcactgccgaggtggagctgggcaaagtaggtagaga

SEQ ID NO: 39334 - DNA, 122 bp, Homo sapiens
cggagtgttcacaggtggcccagatgtctcattggccctgcccttcctcagcctgcgctccggacagactgggcagtgtgcgggaaccaccctgcgttttactgcctcttgttcacactgct

SEQ ID NO: 39335 - DNA, 122 bp, Homo sapiens
ttccgggcactcctcagccaggaggtgctggcctggggcccggagctcggcagggccgggcggctccgcggcgttggcccagaggacgcgcgcccccgcccggccgcgtctccttccctccc

SEQ ID NO: 39336 - DNA, 122 bp, Homo sapiens
actcaagcggccgtccgtgctcatctcggcgctcacctggaagcgcctggtggccgcgtccgccaagaagaagaaaggcagcaagaaggtgacacccaagccggcatccacgggccccgacc

SEQ ID NO: 39337 - DNA, 122 bp, Homo sapiens
aatataatcaattaatttttttaaaaaagaccacactttctgacactccagcgtggtgtacgcaggtgggggttgtaagccctgaggctcagagtgacccctaccatgccccttctgtagtt

SEQ ID NO: 39338 - DNA, 122 bp, Homo sapiens
tgaaaagaatggggttcactcaccacctgcattcctccacagccatttgatatctgctttcgataacagcagaggaaactgatcagtcatataaatccaatcctgagcatagttcctcgttt

SEQ ID NO: 39339 - DNA, 122 bp, Homo sapiens
ttgcttccagctctctgaccatatcagttagcatggagagaaagcagatggatgcagggccgccacacccagctctgtccctgagttctgataccatctcaggctatctgaacttgtcctga

SEQ ID NO: 39340 - DNA, 122 bp, Homo sapiens
tgacacttggcagttacttgacaccctggaatgttggtggacgtggcactggtaaaatggcggggggggggggaataagggggacaaagcagggttcaagaatcagcagaaaaattggattt

SEQ ID NO: 39341 - DNA, 122 bp, Homo sapiens
taacaggtgaaatctggcccattgcgttgtttcatgggttgtttttttttttttttttgacggaatctctgttgcccaggcttgagtgcggtggtgtgatcttggctcactgctgcaacctc

SEQ ID NO: 39342 - DNA, 122 bp, Homo sapiens
tcagcatttagcctttatccacaaacatggataggaagccctgcccctgggcatggcagacgggcaggaccaaccaagaagcagggaccagcccaggcacagtgaggaccctcagcatcagg

SEQ ID NO: 39343 - DNA, 122 bp, Homo sapiens
tgtggattacttttgtctagataacttcaacccagttaagctcaatgaaactgaacacttcgtttagtaaccggcaccaaaaataatctgacaaagaaatttcgaaatagaactattagtgt

SEQ ID NO: 39344 - DNA, 122 bp, Homo sapiens
aagccgccggcggagtagatagtaaacagtctgggccgaggagtgcaggcaagggccgcccggcgctcggtggactgggcccctgcgccgcctctcccggcgtcgccccgcccggccgggac

SEQ ID NO: 39345 - DNA, 122 bp, Homo sapiens
ataggatttacaggatgagccgggtcaagaaggcagagctgggctttgttcagccccagccggggacgtgcatggcgggcaactctgatttctgctcactctgaatgtcgcaagtaactgta

SEQ ID NO: 39346 - DNA, 122 bp, Homo sapiens
tactgagagtcctccttctctgccacttgggcattattttactagtttttaagccatcatcgcacaagaatccaaaaacccttaaattttttaaccactggcaaatatgtacagcaaattag

SEQ ID NO: 39347 - DNA, 122 bp, Homo sapiens
ctgctggctgtggtggaggtggtgatgatgctgggtcgcgtctgctaccagatgcggctccgggggctccatggtgactgagataggagaagaaggcgccgtccctacggtatcaatctccg

SEQ ID NO: 39348 - DNA, 122 bp, Homo sapiens
taacgtaagctgtacacatccgacagtgatgtatgagtgcaggtgcctggatggaacaaacgcgccatgaatgaaccctaacgtaagctgtacacatccgacggcgatgtacgagtgcaggt

SEQ ID NO: 39349 - DNA, 122 bp, Homo sapiens
ggaccatccaggaccgcatcctaggaggctctcaacaagcacgtggcaggtgacggcacccgcagaccacggcctgcacccatggcagagaccctgctgccactccagtgcgtgccaggtgg

SEQ ID NO: 39350 - DNA, 122 bp, Homo sapiens
atcaaaaagtcaagaaataacatatgatggtgaggctgcagaaaaaagggaacactaatacgctgttagtagaaggtaaattagtgcagccactgtggagagcagtttagggacttctcaag

SEQ ID NO: 39351 - DNA, 122 bp, Homo sapiens
ttgtcgtggctacttacgtgtatttagaaaatgtaaccttcggctgggcatggtggctcacggctgtaatcccaacactttgggaggccgaagcgggtggattgcctgagctcaggagttca

SEQ ID NO: 39352 - DNA, 122 bp, Homo sapiens
aacaggattaaaaagaaatttttaattccttgtctctcttctgatggctgaacagaactgcggtgtcaaatggaaagcagcacacaagaattcccttgcagaccttgatctttcgcagaaat

SEQ ID NO: 39353 - DNA, 122 bp, Homo sapiens
ggctcgtggtccgcctttgcctgggctgagggtctctggccccgcagcctctcttggaggcgggcctgtccctaagcccgccaaggggcgccgcgccgaggggctgcggagtgggggacgga

SEQ ID NO: 39354 - DNA, 122 bp, Homo sapiens
gccatttacaaaacgcccaccaagtgctaccagaaatgggacatgcagagctggtatgagcgcacacacggcatcagacgcccagaggaagccaaactcaagagtgagctccagccgtctac

SEQ ID NO: 39355 - DNA, 122 bp, Homo sapiens
cctagttgttggtgcccagcctgggaggcctgggcggaagttatgcaggcctggatcttccggtccagcgccaccaggaagcgcctccaggtggcgctgtcgggatttgctctcctcagggc

SEQ ID NO: 39356 - DNA, 122 bp, Homo sapiens
agtgatctgcccacctcggcctcccaaagtactgggattacaggagtgagccactgcgcccggccaggattctgttttaaaaatacataggaagctgggcacggtggctcatgcctgtaatc

SEQ ID NO: 39357 - DNA, 122 bp, Homo sapiens
agcaggctcctgaggtgagggcgagtgtgtgggaaatctggcgagcgtgccacgtgcatgcgtgagtgtggatatgtggggagcatgcgtgcgcgtgaatatgcggggagcagccgcacctt

SEQ ID NO: 39358 - DNA, 122 bp, Homo sapiens
gcctcagagcctgtctgtggctgcccatacctcagccttcccaagtgctgggattataggcgtgagccaccacacccagccgacatagagtaggttctttattggatggatgaaggactccg

SEQ ID NO: 39359 - DNA, 122 bp, Homo sapiens
ctgcccaaagtttctctcaaagcttcagcttaacccctgatgtgctcaccagcaccaaggcgccctcctgagtgctttgctgggggtgggatggcgtttgtgggaaaggccggctacttctg

SEQ ID NO: 39360 - DNA, 122 bp, Homo sapiens
aaaagtcaggacctagaataccaaaagaatagtgggttgggggaatgtcaggaacattgacgaagtggcataaggtgaggccagttgtgaagagccatgtgtacaaggtcgggggttacatt

SEQ ID NO: 39361 - DNA, 122 bp, Homo sapiens
gagcccaggagtttttgttgttcttgtttttgtttgtttgtttgttttgaaacggagtttcgctcttattgcccaggcaggagtgcagatgtgatctcggcacaccgcaacctctgcctctt

SEQ ID NO: 39362 - DNA, 122 bp, Homo sapiens
gaaggacgtgtgtttggctggctcagccctttgcttcagggcttccttgcggtgctggcacgtggcccctccaggggaacatctgcatttaagcagaacttggttgtgcctttccagtgttc

SEQ ID NO: 39363 - DNA, 122 bp, Homo sapiens
tgcggatcccccagatgcccgccccgccccatcccaggacacccctggggtctccagctgcgtactggaaacgagtgggacactctgcatgctcagcgtcctgcgggaaaggtgagacatca

SEQ ID NO: 39364 - DNA, 122 bp, Homo sapiens
gccggcctcctctggctttcctcgcccacctacccacgctgcgccgcttaacctcagcaccggctgtttcccacagcccatggagcccctgcatcctgaaacctatccggttccaaagcacc

SEQ ID NO: 39365 - DNA, 122 bp, Homo sapiens
ctatcaccttggaaaggcactatttctctgagcctggatttgttttctgccaacaagtgacggcacaagctctctattacagagagtaaaaagcccaggcagtctttttcatggctgctcac

SEQ ID NO: 39366 - DNA, 122 bp, Homo sapiens
ccccaccccccggggcctccctactttcctctgcgggaagtcacaccaagccattagcagcgcgccgcctcccggggcggcaccagctggagaggccgcctttcagctcaggaattgatttc

SEQ ID NO: 39367 - DNA, 122 bp, Homo sapiens
gcctcaagattctaaattcaaacgcacacggaataaaacatttcggtttatcgccaggcgcggcggctcacacctgccatcccagccctttgggaggccggggtgggtggatcacctgaggt

SEQ ID NO: 39368 - DNA, 122 bp, Homo sapiens
tgcggctcccaccctgaacagctgcccggagccctcgcctgaggtatgggtctgcaacagcgacggctacgtgggccaggtgtgcctgctgagcctgcgcgccgagccggacgtggaggcct

SEQ ID NO: 39369 - DNA, 122 bp, Homo sapiens
tctttactgggcaacaggcaaggcctgacgacagcagggctgggccagtctggggagacacgcagtggggccagtgtgacatttgcggagtaaaacgtcatcaaaatacatgcttcgaggta

SEQ ID NO: 39370 - DNA, 122 bp, Homo sapiens
ggctggggccgctgagcaagggaaaaaccgcagcagccccagctggggtccttcccacgacgtccacccccatggccagctcctcagtcagccaagcctggctaaaacgagagaatgccccc

SEQ ID NO: 39371 - DNA, 122 bp, Homo sapiens
taagggtagtggaactaggagtaataatgagtcctttttagaagaaacaatagtgtccaacggatgtgacagccccttatattggtataggcacttttatttttagctgacagaataccata

SEQ ID NO: 39372 - DNA, 122 bp, Homo sapiens
ccaaggaaccgagagaaaacacagctggtctcagtcggtgctaaccccagcgcccccctccgattctctgggctccacaggttcccttgtctcggaggttgcactcacacccccagctcctg

SEQ ID NO: 39373 - DNA, 122 bp, Homo sapiens
agaaagtgtggcttctaaaggttgagtaacttgactgcatgcttttcactgacactacaccgttacgtactcaggctattaccatgaaaaggaaaactcagtactacagctactgtgaattt

SEQ ID NO: 39374 - DNA, 122 bp, Homo sapiens
gaccttttgaccagttgagggaagactccttggttttcggtactctaagactgcacacaacgggaggcggtaggaaactgggagatgtaaattgatgctccagaggaaagacagcatggatg

SEQ ID NO: 39375 - DNA, 122 bp, Homo sapiens
caggcctgccccgacccgcctgctggagagccacagggagcctttgttctagggcacagacggcggatgcttgggggcagaggctgcaggcctgagtgagccccatggaggtgctgctggtt

SEQ ID NO: 39376 - DNA, 122 bp, Homo sapiens
cagtttgccctgaaatactccctttggtcctaaaaacattacgcactcctttagggagttcgaggcaaaggagccagtgtgttttgagggacaaggtataaatgctacggcatccaagagga

SEQ ID NO: 39377 - DNA, 122 bp, Homo sapiens
tcctctgagctctgctgctgcctcctgctcctgcctgctttgtccagctcatttgttgaccgactccaggcttccaggcttggctgtgtgggtcctgaccattcttggcaactctctcctca

SEQ ID NO: 39378 - DNA, 122 bp, Homo sapiens
gcagcttctgcagctgggttcgggggcgtcactggcccttccctcttgctaggagataaacgctgcgcaaagccaatcaccaggctgagggggcggaggctgcttggagagtaacgtccccg

SEQ ID NO: 39379 - DNA, 122 bp, Homo sapiens
ttttatcctgtgatattcatttgttctcccttggcctcaatgacataccaggtgtccattcgcagaattgacaatcacagtgtttccaaacagctgaatcaaaaagaaagatttatcaatgc

SEQ ID NO: 39380 - DNA, 122 bp, Homo sapiens
tgcaaggcaccatatcgaaggttttataagaattctctcatttaatactctcaatagccacgtgagatttgggtattattattgccctagtttactagtaaggaatgacagaatttattctg

SEQ ID NO: 39381 - DNA, 122 bp, Homo sapiens
cttcccagacacagatccggaggtggctcacagatgtgcaggatcagattcaaggtgacacgcaccagcatacacagaaccacagggctgcccgggcccggactgccccacagaggcggcag

SEQ ID NO: 39382 - DNA, 122 bp, Homo sapiens
gctcatgtgtgcggtggagcgcgcctgtgcgtggtaagtggtggtgattgttgctaccatcgctgttcccatcagttcccgccacatgcatctgtcaagggcccccaggaagcagatgaccc

SEQ ID NO: 39383 - DNA, 122 bp, Homo sapiens
ggctgctgggtctcggccttgctgctcattggttgcggtgatggagactggggccggctgcggcagctgcggctcctcccgtggtatgacggtaactaggccggcagcggcggggctgctca

SEQ ID NO: 39384 - DNA, 122 bp, Homo sapiens
catcatcttgcgggttgcagttcccggcaacagggctggctccagagcagaagcgcaacccgtcatcttcctgcgggccgcagccataggtggagaaaggtggtaccacaaggctctcccac

SEQ ID NO: 39385 - DNA, 122 bp, Homo sapiens
gaggctgttttcttggtaaagaaatcgggagtgttttccttccactattgtccccactcccgcccaccccccgagggattttcatagttgggttggctgccacactggctcatccattcatt

SEQ ID NO: 39386 - DNA, 122 bp, Homo sapiens
cggcgcctgtttcctggcagtggggcatagtccaacagctggctcccccaagatagccagcggccattacgcgcttgggtcgggggagatggagtcgcatttagccgcacagcagcctggaa

SEQ ID NO: 39387 - DNA, 122 bp, Homo sapiens
cgcggcggcgggtggcggggccccttggggcgggcctggcggggcgggaggtgacatacgcggtcctgcgccctcgcctcagacctctcgggcgagcgcggcgcagcgcaggtaatggctcc

SEQ ID NO: 39388 - DNA, 122 bp, Homo sapiens
actctacccgagacgaaactcagagccgaggtgggggcgaaggccgggtaatgcactgatcgagggtgaggagggatgtttcatagccttttccgacatacctcacgacaaaacacctttca

SEQ ID NO: 39389 - DNA, 122 bp, Homo sapiens
gagcggccggggcccgcagccaggagcctccagcgcccgggctcccttcccactgggagacgccatgatggcctgagaggagagccagtcacgtgggattttgttttcaaccgggtgcattc

SEQ ID NO: 39390 - DNA, 122 bp, Homo sapiens
ccgagagcagggcagtcccgacatcaggcacagcagctgcacttttccgaagcccctttgcggatgcagccctgggcacacttggcacagcccagggggcaacaggagcagcagctcttctt

SEQ ID NO: 39391 - DNA, 122 bp, Homo sapiens
tcccaggggagaccaacgctgctgacttgtgggtcatactttgagttgcaaggttgcgtacgtggtatttgccagtgtgcacattcatgaaaaagtatcctgccttaagcctggtagatcca

SEQ ID NO: 39392 - DNA, 122 bp, Homo sapiens
accccctgcactgcactctggctgcctccaggcttcagaaaccatccccttaaccaaggccgcaggggattctgtgattggcacagcgatagtccctggtcaggctcttcctccctaacctg

SEQ ID NO: 39393 - DNA, 122 bp, Homo sapiens
cctgcttggacaccgaggaagcgtgttgaacttgatgtttggggcccagccgctcctccccgagacccactcatgcccctttccttgctgttgtgagatgggatggtgttgcgccctcagat

SEQ ID NO: 39394 - DNA, 122 bp, Homo sapiens
cacacacaagcacacacccgtgctgcttcgtgcctttgcaaagcttttatttcatgtctgcggcatggaatccacctgcacatggcatcttagctgtgaaggagaaagcagtgcacgagaag

SEQ ID NO: 39395 - DNA, 122 bp, Homo sapiens
gtttctacctcttcttcctgcatgcacccaacacatgccctgctacaaccatagcagttgcggtgagctggcctgggagcaggagccgggagacagcaagcctcctcagcctcccctcccca

SEQ ID NO: 39396 - DNA, 122 bp, Homo sapiens
tgttgtcactggaacacttgttgttgttggaatgctcgttgtcgttggaacgctcgttgtcgttgaaacagtcattgtcgtcagaacagtcgttgtcgttggaatgctcattgttgttggaa

SEQ ID NO: 39397 - DNA, 122 bp, Homo sapiens
ttgttgacattcccccgggccttccaagcaggaatgtttgctttggaggtattggatagacgtggtaaaatcaagggctttccatcagcttcctagctgtccatcacccagtgccacgtctc

SEQ ID NO: 39398 - DNA, 122 bp, Homo sapiens
agaacctttcagttgccagaatcctccgctgccgctcacgatggtggcgagtcccttcagcgtgaagcccagatgaagcgttttgcgtttgcagtcatttccatttatttttatttccagcc

SEQ ID NO: 39399 - DNA, 122 bp, Homo sapiens
cgccaggtcggctggcagctcgcgcagccggttgccgctgaggttgaggctctgcagctgcggaaggcccggcggctcggcggggcccaggccttggcccggcggcagcgcctccagcgcgt

SEQ ID NO: 39400 - DNA, 122 bp, Homo sapiens
acacacatacacacaggttcacagcctcttccagtgcacctgtggcctaggtagccttggcgtcttccctctgggaagtcaagagtgagtcacatcctccatttttggtcttgttagcttta

SEQ ID NO: 39401 - DNA, 122 bp, Homo sapiens
gtgacgcctggggccatggccggctggcgacgcagcttgagtgtggcggcgggcactctgcgtgaggtagggagggcggcggggcgcgaggcagccgggcccgcgtcgcggggcgtgtgcag

SEQ ID NO: 39402 - DNA, 122 bp, Homo sapiens
ctctgcctcctcctttttgtgcctggtatatggatgtgattggagctccaacggccatctcgggtcatgaaaagacttgagaatagggccatgcgataatgtggaacagaaagctaacagag

SEQ ID NO: 39403 - DNA, 122 bp, Homo sapiens
cctcaatgaaacatttactgggcataagacagcctaggcatgtttctaggctatggataccgcagctgaaataaagaaagccctctgccccgtggggctgacaatctagtgggggatacaga

SEQ ID NO: 39404 - DNA, 122 bp, Homo sapiens
cttaatcccaggaccctctgttttcacatctgtacccactgtggcgcatccatagcagatcgtagagtataataacctacacttagagagcagttaccacattttaggcacatgctaagcag

SEQ ID NO: 39405 - DNA, 122 bp, Homo sapiens
acgcgggggtccttgtgcgcacttaaatggagtcggctgcgcttggtgagttcccacacccggtagatgtgagggaaaaactgccttactcagaaggcaccaccccttgcgtcggccgcgga

SEQ ID NO: 39406 - DNA, 122 bp, Homo sapiens
ctgttggatatgatctcagtcattctagcaataacatggtcatttaaagttgtttttctacgtctagccaaaactggcctcctgtaactgccagctattggtgttagttctaattttgagaa

SEQ ID NO: 39407 - DNA, 122 bp, Homo sapiens
cactttgggacccttgctcttttctttaacagattggtattttgttacttttaaacattccgtcatatagtattccacctgaagaatattttagctcatataatgacatttaagaaaaatat

SEQ ID NO: 39408 - DNA, 122 bp, Homo sapiens
cttttgttctgtcctcagagaggaatgtgcatcttttgttcttagctactcagcttcggccgggtctggcggcgcctttgagtaacatgggcaacgcgcgccctcttctggacaatccacta

SEQ ID NO: 39409 - DNA, 122 bp, Homo sapiens
tttgagatataaaaatttcttttggttttttatgatgagcaaatataagttaatgccaaacgttatgttaaagttattttttcaaatacaggatttggggagagaagccaattttgcatggc

SEQ ID NO: 39410 - DNA, 122 bp, Homo sapiens
ctggctctcacactgtatctggatgaaggctggaattgtagacatggtgagaggtccgaccggggaacctcttaggacttagaccacacacatgcaggccagctctgggcccacctcaaacc

SEQ ID NO: 39411 - DNA, 122 bp, Homo sapiens
acaaagcttccagcacaggggacagtggacaatagcaaggactagggaggattagaatggcggtttcctgctgaagagaggggttccctggggtggcccctgacagtaatccccagggacct

SEQ ID NO: 39412 - DNA, 122 bp, Homo sapiens
ccacctgttctcagtctctcacgcccctgcgcccgcagctcctcacctctttcgtcctctcggctcgctgggctccaggcactagatacccgctccaactggcccgatttgcctgtcagttg

SEQ ID NO: 39413 - DNA, 122 bp, Homo sapiens
aaagagggaggaagagagggagaaagggagcagcggctgctactgcaaacagttccccttcgcagctctgcgctcagctcgcccatcagtgtgccactgcctctccgtcctcctcctcggag

SEQ ID NO: 39414 - DNA, 122 bp, Homo sapiens
ggggcggagccaacctaccacggccggctcccgcatgcgttgagaactatcgcgatattacgctttagcctcggcgagaccttcttaattcaccgcaggatgccgcccgcgcctcgccttta

SEQ ID NO: 39415 - DNA, 122 bp, Homo sapiens
gaccatgggcctgaacccttctcaccctgcccctctagcccaaattttattttattttttcgttgtttcatgtagtttgtgtgttgctgtgtgacctttggtttcattctctgaatagatac

SEQ ID NO: 39416 - DNA, 122 bp, Homo sapiens
tgcgcctttgcagtgtcttctgaagaagaagaggcgggatctcatttgcttttgaggagtcgggtgttcctggtcacggtcgcatgttgtcacgaatccagtctaggtagttggtaaccttg

SEQ ID NO: 39417 - DNA, 122 bp, Homo sapiens
acttacttttgtgggaggcagtgttgtataataggccatttgttgcttctctgttttgtacgttgtgtaaccttagggagattatccagaaagtttaccctcagtcttctcattggtaagta

SEQ ID NO: 39418 - DNA, 122 bp, Homo sapiens
attcaaagaaaaaatatttgactctctgcttacctaaatatccatggaatacatagcagacgtaatatagctcttaattttaattgaatcactatattcaatgaagctataccagagtcctg

SEQ ID NO: 39419 - DNA, 122 bp, Homo sapiens
ataatagctgccacttcctaaagttgttgtgaggattaagtggatctgttgcagatgaagcgcttgagcagggcctgctgcttaagtgtttgctctggccttccctgccggggtatgcaaat

SEQ ID NO: 39420 - DNA, 122 bp, Homo sapiens
cgagtcccgggttccctgtagcaggcttgggagcggggcgccaccttcctgggccctggacgtggccgacgcgttctcagtgtccgtgaggccggggcaggagtggcgggggtcgccccgaa

SEQ ID NO: 39421 - DNA, 122 bp, Homo sapiens
gcgtgggctgcagttcccaaggccgtgagcaggaggcgctatcaggatcaaaggcgggaccgtgggtcttcagggccacatccgtgagaatcgctgacgtccgcagggagggagcctcggtg

SEQ ID NO: 39422 - DNA, 122 bp, Homo sapiens
ccgcccaccgcctgcagcgcagtccagcggcgcccacacagactcgtgctacagtcccctcgcccaagttcactggctgtttttaaaagcttagtcccccgtaaagtcctccaaagcccgag

SEQ ID NO: 39423 - DNA, 122 bp, Homo sapiens
ttccaccaggctgctcatggtcatgcggtcggagggcttcagggctgaggacggggtcagcgtgctgggctccagctcctccgacactgcacaggccgggcacacgtggtcatcacggggcc

SEQ ID NO: 39424 - DNA, 122 bp, Homo sapiens
gaggtcaggggccgaggtcaggggtagctgttgcaaggctccatgtggctttcataaggacgcctctcccgcggcccgtgtggggctccctggctatcctgctgtctccaggagcagcaacg

SEQ ID NO: 39425 - DNA, 122 bp, Homo sapiens
gagctagctgcccagcattctcaaagccttccaggcaaaaccacatcctccctaaataaccgaaaaggtatgcatcctattatggaatgttaaatgtaaatggctccttggccatgtgtggg

SEQ ID NO: 39426 - DNA, 122 bp, Homo sapiens
ggtgggaggggtaggggagcgggagaaggtataaaggaaatgcttcagtcgtgcagtcaccggcgattgtaattcagcggtgttaactttggttactccagccgaaaggctctgaccgggga

SEQ ID NO: 39427 - DNA, 122 bp, Homo sapiens
gccgccgggcaccgtcgcaaaagacccgcgcgcttgcgctcgccgccgaccctcgctcggcgcccacagcagcccgcatggagtaatcgccaaatggcgacagaccctctcccagtgcggcc

SEQ ID NO: 39428 - DNA, 122 bp, Homo sapiens
gctggtcctcagcaccaggtgagtccaggagcgtgagtgacctgaggccaggggcgctgccggggcgaggttggtcctactgtgggtcaccagtgggggccaaggcacttcagctgtttgca

SEQ ID NO: 39429 - DNA, 122 bp, Homo sapiens
gacaaaatccatgggagccccactatttttgagaagcaagaatatctgctgctctctgagcgccagggatttccaaaatgaagcactgcatacctcataacagctcccaccaatagaagtca

SEQ ID NO: 39430 - DNA, 122 bp, Homo sapiens
ttgtctgataaaagaatctttttattgcttctgtgcctctgttacattttagaatgttttcgacaatctcaatttgcataccgctttttagaaatgtggctactacaaaaagcatctttgta

SEQ ID NO: 39431 - DNA, 122 bp, Homo sapiens
cgccggacccgggacgtctgaacggaagttcgacccatcggcgacccgacggcgagaccccgccccatccccgactgcctgaaccgcgccaggagacggaccgcaagtccagcgtacccaca

SEQ ID NO: 39432 - DNA, 122 bp, Homo sapiens
ccaaagttttcctcttgtcttaataccataaggactggatgacttctcctgagatagaaccgtttggttcaatgagggactgtgttgctaagagcgttgggggcaaagccaggctggttcct

SEQ ID NO: 39433 - DNA, 122 bp, Homo sapiens
gtaagtcaaaggtcctcgcagatccgcaggcaggtggggagcagcagaatatcacggacacgcgttagaaacttggggacccaccctcgaccaagtgaattcgcatctgtgttgtaggaagg

SEQ ID NO: 39434 - DNA, 122 bp, Homo sapiens
gggcggggggggaagggccggggcacccgttgcgaagccctggagcggtgaggcccgccccggaacccgagcccactgtaacccaagcctcaaggccgctctgccggcagaaagtaaaaccc

SEQ ID NO: 39435 - DNA, 122 bp, Homo sapiens
tgcttcattttatcttttaactctcttactcatcaggtactgctcactttgttgaggggtcgctatttctcatttctggaagctctgagattgtcagcgcagggatgtggagagggctgagt

SEQ ID NO: 39436 - DNA, 122 bp, Homo sapiens
cacaaaaaggccttcaggtctgagccccttaattccagggctgttaatgattaaagagaacgatgggggtggggagggaaatgagggcggagggagctgggagattcacccaccacctcccc

SEQ ID NO: 39437 - DNA, 122 bp, Homo sapiens
ttcctgctaaacggctgtatggacgtgatcccccagaggcacggcgggctccagcctgcccgctcagcccttctctgactggagaggaaagcacgtgtgcccatcagcccacgagctgcagc

SEQ ID NO: 39438 - DNA, 122 bp, Homo sapiens
ggggcgggccagggtggccagagcccggggccaggaatgtgcagctgaggtcaatggtcccggagtcctcccgactcggggtcgggcggcgggaaggagggtggccgtggcgggggtggagg

SEQ ID NO: 39439 - DNA, 122 bp, Homo sapiens
tgattggtcgaatttgaaaaccttttgcccggggagaaaaggcgaggaggaggggtagcacgcagactgccaactatccgctgatgtagccaatccttgtaaagcgcgcgagatttaaacac

SEQ ID NO: 39440 - DNA, 122 bp, Homo sapiens
caggcggaagcaaccctgttccaaatgcagcgcgctttacggcggcgcgtccttttaccgcggtgtggccggctcgcttgtcgctcgcacttttgccctattggctctgcggctccgctcgc

SEQ ID NO: 39441 - DNA, 122 bp, Homo sapiens
tccgggttccacgtccctcccagcttgttcctgcagcacggcagccggcaaggcatgggacgcccaggacgttcaccccagtgggcatcaagggcaccaccatgtgggtggttccccagcaa

SEQ ID NO: 39442 - DNA, 122 bp, Homo sapiens
cctgtggccgcaggaggccacacgcgggccccggggtcatgggggcgaccggcagctgcgcgccccagctggccgcccagccccacctcctgtttgccgcccgagccgggaaggggcgccgc

SEQ ID NO: 39443 - DNA, 122 bp, Homo sapiens
gcagagacagagatgcgcggggcgcacagaaacacggacgcgcagaggcggccccggagacgctcacctctcccggcccggcctcgcccccgggtcccactcaccgaggccgcagacctcgc

SEQ ID NO: 39444 - DNA, 122 bp, Homo sapiens
ccatcgtgcatcacgatgcagtagaagccgcggctgggctggatctggatgctgcccttgcggcttgcggcttcgtgtgccagcccgatcacccactgggtcttctccgccaccaccacctc

SEQ ID NO: 39445 - DNA, 122 bp, Homo sapiens
aaaccaaggccgggtaaagtaatgtagggcccttaaagttgcagagccaggaataaagtccggattggggctcaggtctgtgggcaatccaaggccgtcccctttacacttcaaatgctctt

SEQ ID NO: 39446 - DNA, 122 bp, Homo sapiens
atgtctgtgcttttatttattgatccaataagatgacttaaatatctaactccttttccacgtaaaagtttttattatgtgcaatgcattgttaaacaggtgaagaatgaacaagtttagaa

SEQ ID NO: 39447 - DNA, 122 bp, Homo sapiens
ctggctgctgcctgctagatgccaggagctctttgtgaaagaggtgcaaagactttaagccgctctccagagtgacctgtctgatgattcaaagccagttatctcaatgctcttcaataagt

SEQ ID NO: 39448 - DNA, 122 bp, Homo sapiens
gggtctccacgtcgtcctatcacaggcgcaggctagagccactcagatgcccgcgcgtcacggccttgcaggagctgctgatgtgcctcacgggctctgcgctctccacagtggccagcacc

SEQ ID NO: 39449 - DNA, 122 bp, Homo sapiens
aaagatgagaaaagaaaaaggatatgggagtcagttctcaaaatggtagtgacttgaaaccgcagttgcctactaggagtttgctgccgtatcctattcctttgaaattgttctgaactatt

SEQ ID NO: 39450 - DNA, 122 bp, Homo sapiens
aaagaacataacagtgagctccaacacctctggcagcagactttacggtggaaaccctaccggccaggagagagaagcaataaatatttaaagtactaaaggaaaaaaaaccttttacctta

SEQ ID NO: 39451 - DNA, 122 bp, Homo sapiens
attcatttcccttcttgttcccgagttccaccaagaggaattgagttctgcccctttcagcggcgcaactgggttaactggggagctctggaccctatgatctcggcatcttcatggccatg

SEQ ID NO: 39452 - DNA, 122 bp, Homo sapiens
cttggatgtgggaagaaacagcctccaaaactacactatcactccgaattcccacttccacgtactcactcgcagtcgtagggacggaaggaagtacccggaactagtactggataaagcgc

SEQ ID NO: 39453 - DNA, 122 bp, Homo sapiens
gctgaagctaagggatgcattgctattgagcaaaaaccttattctgaatttcctgattatcgaggaacatacaagggaactaaattttggggaaaaacattcatactgatactttacaccta

SEQ ID NO: 39454 - DNA, 122 bp, Homo sapiens
ctgatgtccttcacatgcaccgggcggacagcggaggccccgggcccggggaggcggcagcggccgctcaagtgaacccgggtctggaagctccttacagcacgatgatgcccaagcccggc

SEQ ID NO: 39455 - DNA, 122 bp, Homo sapiens
gaagttgaacccaatcttgaaggataaatggtggtgagtaaataagaggaagaccagtgtcggctggggcatgacattagcatcaaggaggaagacagcaccacagagacctgcccttttgc

SEQ ID NO: 39456 - DNA, 122 bp, Homo sapiens
taggcgcgttccctcggtaccgccgcacacgtctgaagcggtctcttctcctcgttgctacggcaacgcagtgggcctgttcctgtcgccccccgcctcccgccgcaatcgctaaggcaagg

SEQ ID NO: 39457 - DNA, 122 bp, Homo sapiens
gcgcctccgggatcgctctcactttgcactcggaagcgggcgcggggattcgggctgccgcgtgtagcctataaatagcaaactttttgaccgaagcaactaacaaataagaggagcaggcg

SEQ ID NO: 39458 - DNA, 122 bp, Homo sapiens
tgctgcagaagggattccatgaggtgcgcgaaggccctacttccgctttcaccttggagacggcgactctctgcgtactgattggaacatccgcgaaatgatacgcctctctgcaatgctat

SEQ ID NO: 39459 - DNA, 122 bp, Homo sapiens
ttcctttcagctttgtgctgaaacacacgtacctacagaacagtgcccatgcaagggcctcgtgtgcggagagctgtgcagagagctgacgtttaccagtccagcacaccggtgcagccagc

SEQ ID NO: 39460 - DNA, 122 bp, Homo sapiens
ggagggactgcgggacttgcgcgaaagtgggggaccggaccctccggggccacacccgcccgccccgtggagtccctggtgcgatggttgcgttgacacctgtactcctgcgggcctgggtg

SEQ ID NO: 39461 - DNA, 122 bp, Homo sapiens
gagacgcgctggaaaggggctggaattagcactgtcctgccgaaggcgcacctggccgctcgccctcaggaagaacttaattatggatggcgttgggtctccgcttagaacgggcgggaggc

SEQ ID NO: 39462 - DNA, 122 bp, Homo sapiens
acttttcctcatttagaacaactgagttttttccttccataaccaaggacaaggagcaaccggagggaggaggttgaagagggagggggcgggcaatatgtccccaagtttcagacagtagc

SEQ ID NO: 39463 - DNA, 122 bp, Homo sapiens
ctgcctcggctggcgggcggggggaggcggagagctcggggcacgcgctgccgtccggaccgcggctccgctcgctgtgcagcagccctcgcaccgccacttcctgctcctccccccccccg

SEQ ID NO: 39464 - DNA, 122 bp, Homo sapiens
tgtgcgtgggtaaatgtcctaatgatggcagaatgcccaaacatgaagatgtagtagaaccgtcagtggtagagcaatatagcacagactctctatggctaattgtgcaaggttcctctcac

SEQ ID NO: 39465 - DNA, 122 bp, Homo sapiens
tttttcttaataagctcgcgggcttctggatcctttactcctttgctgcggtccttttcccgttctttattcttcccgcgtctccttgcttgtcttacttgtcgggagtggggcattgagca

SEQ ID NO: 39466 - DNA, 122 bp, Homo sapiens
cgtgatccgctggcctcggcctcccaaagtgctgggattacaggcgtgagcccccgctcccggctgggcctctatatttttttggcaggtaaccctacagcatactgtcagaccaagtaggg

SEQ ID NO: 39467 - DNA, 122 bp, Homo sapiens
cctgccccgaggactcattgcccctagccgtgttttatgggccgctggacgcgaaaaacccgctcctggcctcttgtgagaaggagatccaggagttgttaggctttatgaggaaaaagaag

SEQ ID NO: 39468 - DNA, 122 bp, Homo sapiens
ctcccgcttacaagaagccttctgatttcacctcctccactagctcagtcctcagctcgccgctgaggcatcccatttattgcgaagacatcatttggcattgctcacaggtgggctccgag

SEQ ID NO: 39469 - DNA, 122 bp, Homo sapiens
ctcgggcccttctggggagtccccaggtccacactccgggctaggcccagtgacagctgccgccgccatagctccaactgcagcccacgggcgtaactttttttatttttaagttggataca

SEQ ID NO: 39470 - DNA, 122 bp, Homo sapiens
cagagtaattagaaacctgcattcaaaaacacctatcaaaatccaatagctaattataaacgaccttttgaagaggactgaaaataagacaattgtctgtggatgacaaagtcttaggacag

SEQ ID NO: 39471 - DNA, 122 bp, Homo sapiens
cagagccctctgaagcgtgggctgagatggatgagcgcagacacacagcctggggctgcccggcggtggcggcggatccgtggctccatactgccatctagtgggaaaagaggacgaggacg

SEQ ID NO: 39472 - DNA, 122 bp, Homo sapiens
cgtagggagcgcgggcagcgaagtcctttttgaggtaacaggtgtcggtgctaggcgaggcgggttggggcggaaggggcgaaggaccgcgcggcgcggggagagtcctgggagctccaggg

SEQ ID NO: 39473 - DNA, 122 bp, Homo sapiens
caccctcgctgtagtagcgcagcgaggagcccgactcggcggagctgaagtcatagttctcgtcactgaggcaggggtccagcgcgaggtggtggttgtggtcgtcggtgcccggcgccaaa

SEQ ID NO: 39474 - DNA, 122 bp, Homo sapiens
tcaaatgacaggtgttagcaggactccagacgggatctgcgggatcggccgggtgggagccgcaccgcacggcgccgggtcggggagagaacccggcctggggaggccgcggggtgcccccg

SEQ ID NO: 39475 - DNA, 122 bp, Homo sapiens
gtaggataacgaggagagtgtttgtgctgggacctggcaggactggaggaggaaaggagccgccttccagcaggtccagcatccctaggttgcaaacacaccaaatgacgtccacgcagcac

SEQ ID NO: 39476 - DNA, 122 bp, Homo sapiens
cctgtttccggcgtcccgtgtccacatttccggtgcccggtgtccacatttccggcgtcccgtgtccacatttccggtgcccggtgtccacatttccggtgcccggtgtccacatttccggt

SEQ ID NO: 39477 - DNA, 122 bp, Homo sapiens
cagttgctttggcctttctttagcctaggaatttattcttctccaggcagaggaataaaacgaacagccattattcctgacagccagaggcctggattcaaggtcttggttatagacgcaaa

SEQ ID NO: 39478 - DNA, 122 bp, Homo sapiens
cccaaaaaaaaaaaaaaaagaaagtaaattccacgaaagacgggccttgctcaccctgctcgacgctgggttcccaagcccagtcctgcacctagtcctcgaaggagggggttttcatacta

SEQ ID NO: 39479 - DNA, 122 bp, Homo sapiens
agtctctggatgtgaactgtcctttggagggtgtgttttgggcgggtggctgttagtagccgaggcaaaccctgaaggactaactgctagaggctgtctccaactaaggcagtggggtcctt

SEQ ID NO: 39480 - DNA, 122 bp, Homo sapiens
ctgttgagagcaaacagtggaagggactcattgtctcacctggggagaaagagcctttggcggatatttcaaagagactctagacagtgtaggaacaaatacaggaacctgccatactggct

SEQ ID NO: 39481 - DNA, 122 bp, Homo sapiens
agcagaccgagtgtgggcaccgcttctgcgagagctgcatggcggccctgctgaggtaggcgccctcgcccggcccgtcgcccggccccttctcagccctcggcctcaccctctccttcatt

SEQ ID NO: 39482 - DNA, 122 bp, Homo sapiens
gcctgggtgtgaagccaatggccgtcagccgacgtcagtagagcatggcgtgaagtccggcggctcaggctgagcgttggaagccattttggctgcaacctacctgaagcgatgtctgcctt

SEQ ID NO: 39483 - DNA, 122 bp, Homo sapiens
gaaagtggatttcgccaagtgggcctgactggtcccagcatctgcacagcgctcagcgctcgcctgcaagcgcagctcagggcttccctggggccagctcccggctcctctcggcctcgccc

SEQ ID NO: 39484 - DNA, 122 bp, Homo sapiens
tggtgcccacacgggctcttgctcacacaggctggctgttcctttgcagctctggcagcccggccatctgtgacaccctctagcctctgtgcccccaggtgagaggtaggccctcacacccc

SEQ ID NO: 39485 - DNA, 122 bp, Homo sapiens
gtctaggccacagggctgctgggcccgggcctggctcagagcgcattcgggcggggaggccgcacgccgcacccgggcctctcctccgagcccgaggcaggcactgagctccgggccagcca

SEQ ID NO: 39486 - DNA, 122 bp, Homo sapiens
tttagagctacaattcatctggaatctgaattcctttgtaatctttcctttaaggtggtacgcagtggtgggacggggctgggagggggtagcaggccgctccgtgcaaaggcagccctgcc

SEQ ID NO: 39487 - DNA, 122 bp, Homo sapiens
acgtcagagaattggtgtttctggcgaggagggaccaagcctcaccacggagaaggacgccgtcaccggcgtgcaggctgccaacctgccactctgggaggccccacgcggcccctgcacct

SEQ ID NO: 39488 - DNA, 122 bp, Homo sapiens
actttgcaacaccgcgttccgggaggaccggcctcggcgagggaggaggcgggggagctgcgaacacccagacccaaaccctgacatgctctggggcggagaggaggaagccaggagctgag

SEQ ID NO: 39489 - DNA, 122 bp, Homo sapiens
caagaccatcacgatgacttcacgtcagtgccagcatatgcagccgtggaatacagtgagcgctctctgcggctgacagcaatagcggtgatctaatttacccggcgactggaagaaactct

SEQ ID NO: 39490 - DNA, 122 bp, Homo sapiens
ccagaccctcgaggggcaccctggtgacgtcagagctttgagagagaagcttcactgaaacggagcaaaccttccactgagaagccacttcaagaggctggtgctgctagatctcatgatgt

SEQ ID NO: 39491 - DNA, 122 bp, Homo sapiens
cacctcgggcacccccaaaattccatattgtctgcatggggcccaggctttggacacttccggagccgagtccggtcgcagtgcaacttcatccctacctgtccagcccccaaccccacccc

SEQ ID NO: 39492 - DNA, 122 bp, Homo sapiens
gaagggtaaagaagaccctcaaactggatttgctgctgaagtgcttttaactcacctgtgcggagagcggacttcaagagagggcgtgccggtgctccggacaaaacctggggaatactgaa

SEQ ID NO: 39493 - DNA, 122 bp, Homo sapiens
cgatgcgagtggaatacattctgaaatgtgttttatgatcaaaatatctgtgacctactgcggtccactacaaagagggatttaagtgtttatatctgtaggaatgcctacagatagatttc

SEQ ID NO: 39494 - DNA, 122 bp, Homo sapiens
tagatggtgtgtgtgtggatggtgtgtgtgtagatggtgtgagtgtgtggatggtgtgtgcgtgtcgggccactcaccacagttcagctcttccggggtgatggttgccactgagcgtccct

SEQ ID NO: 39495 - DNA, 122 bp, Homo sapiens
gtgaagagaaaaaccccacctgtaggcaagtcacaacttcaggtccagaaaacatgtgcgcgggacctcactagagcacgcaggccagatgaggtggcctccaaggaatgcttactcgtacc

SEQ ID NO: 39496 - DNA, 122 bp, Homo sapiens
tacattgtcggccacgtgcccccggggttctttgagaagacgcaaaacaaggcatggttccgggagggcttcaatgaaaaatacctgaaggtggtccggaagcatcatcgcgtcatagcagg

SEQ ID NO: 39497 - DNA, 122 bp, Homo sapiens
ggccggcgtccgactcctcccatgtagtgatcggtttaggtaggtcggcctggtccccggcggaggttacgccttccctcatccccggtagaggcagggcgggactgttgtggttgagatga

SEQ ID NO: 39498 - DNA, 122 bp, Homo sapiens
cagaaaagctgcgtgcttctgagatttattttccttttgcaagtatattatttccaaactcgtcttttcaagatcttgcaaattcccttgaaaagaaaagattcaacagtttaaggaaaaca

SEQ ID NO: 39499 - DNA, 122 bp, Homo sapiens
actgtaaggcctaaataaaccaggtaaacgtggcaagacagaattctgcaatatattagccgagtttctccccatatgcacgctccttcccaaccacaatttctatcacctttgccctctgt

SEQ ID NO: 39500 - DNA, 122 bp, Homo sapiens
aattatagataattttaaaaattttgtttttattgtatttcgtttgaattaatgacagaacgtcaaagaagacactgtccagattaagtgttattactggtatattaagcggtgacatgggt

SEQ ID NO: 39501 - DNA, 122 bp, Homo sapiens
gtggtgcccagctgggccagtcagctccctgtggaccttggcctttgccctgggagcatgcggtgcaggcctgccctgtggctcagcagctgcagaatggctggtgttctgtggcctggtga

SEQ ID NO: 39502 - DNA, 122 bp, Homo sapiens
atcgcgtgctcctgtgtccagcaccagcttgcagtgctttagatcaaagatcaagggcctcgtttggattagagttagctttgcccaaaggccgtttggacatgtgagtgctgcctttgttc

SEQ ID NO: 39503 - DNA, 122 bp, Homo sapiens
tgattgacagttcaggcatgaactgtagatgagaaagtggaggcaggtgcttcccaggtccggcggatagagctctgtagctgcacttaagttcaaactgtgacatcttccagggtaggccg

SEQ ID NO: 39504 - DNA, 122 bp, Homo sapiens
tctcacccattgtggaagcccaagggaagtcatgaaaattggggaacggagtaggggcaccgctcacctgggtcccaggggtgccctgttgtccaggaggtcctggctctccctggggtccc

SEQ ID NO: 39505 - DNA, 122 bp, Homo sapiens
gatacagtccaaggagccagacctggctcccaggtcttccagggatgcatcatcaatgaccgttcctctgtcatcatgcccgcgctccaggcagttgcagaattcgaaaaatcaaccgccaa

SEQ ID NO: 39506 - DNA, 122 bp, Homo sapiens
ccgcccctcccaacccccacttttcttgccaaatgtcaatgatttgggacagctcccagccgtgaattaataaagaccgaggttctgttgcaggaaagggcagacattagggaacaaatacg

SEQ ID NO: 39507 - DNA, 122 bp, Homo sapiens
tcagagggagtgcaggtgtccggctcctggtgtgggagaggcaccctgtgctccctggcccgtgagacaagattgggtttgggggccagggcaggagtaggggcccgtcaccaggggaaacg

SEQ ID NO: 39508 - DNA, 122 bp, Homo sapiens
ttgtgcagaactttgagtgaaaataccttttgggtgtttttgggacccagttcactctaacgagcatctttgttggaaaagagaggtgattatcaaatgatagctttttaggtcactctttg

SEQ ID NO: 39509 - DNA, 122 bp, Homo sapiens
gtaggccgtgtctgggtccagagtcacgtccactgtagagacacaaggaagacagtcagccgtgggccaggagagcctattttagaacacccagcgcctttctactacctccccaataataa

SEQ ID NO: 39510 - DNA, 122 bp, Homo sapiens
atgctccgcccccctttaccttgcataaaacttcgctcaagtcgaagatggtggcagacacgagggtggtggtcatcctgtgcgttcgcgcgagccaggggcgaggatctggtgtgtcgcga

SEQ ID NO: 39511 - DNA, 122 bp, Homo sapiens
tgctgatgtcaggggacctggaacgaccaccctctgcatcgccgaaggctttggtgatagcgaactggatggccaggccggtcatggtgcctgtggacagcggctggatacggcgcacagcc

SEQ ID NO: 39512 - DNA, 122 bp, Homo sapiens
ccacaccctgcccgggcccagggaacttcgaagcaaagttgctccagggcggctggagagcgccggacgagtctccgcgggcctggggcgagccctggaggaagggactgcgggtggtctct

SEQ ID NO: 39513 - DNA, 122 bp, Homo sapiens
gctggcgtccgggccgctggtgatctccggtagcactcgggccggcggacagtgagggcgcggtaagctccccgcaaggagcccctgagaaactggtcgctttttgtcctagatatagggga

SEQ ID NO: 39514 - DNA, 122 bp, Homo sapiens
cctggcaggtcagacctatgccgtgcccctcatccagccagacctgcggtgagaggaggccgtccagcagatggcagatgccctgcagtacctgcagaaggtctctggagacatcttcagca

SEQ ID NO: 39515 - DNA, 122 bp, Homo sapiens
tgcatgcccacgtatccatctgtgtgcgcgcccgcatgcccatgtgtgcacctgtatgcccgcccttcacgagcacctccacctacacctgcacttctcagacagtggagatgctgacccct

SEQ ID NO: 39516 - DNA, 122 bp, Homo sapiens
caggcaacccctcctgcttttctgtgttggaatctctagtttctaccaaaaggaaagacgcgcctggtttcacgctgaaattctttggagtctttggcttgaaataacataaaagacctttg

SEQ ID NO: 39517 - DNA, 122 bp, Homo sapiens
tggcccttctcctgcagctcctgcaccagaaggctgacccacagggactccagggaccctcgcaccctctggctacagtgaaagacaatttggccactgaaagtcataggtaggagatgaag

SEQ ID NO: 39518 - DNA, 122 bp, Homo sapiens
tgctcctcgcctgcagataagccacgtgggtctcagaaacaaagcggcagcctcaacgtgcggcccagtgcagaccttcttacagagatgcacttcttacctcttccgacaccacaggccgc

SEQ ID NO: 39519 - DNA, 122 bp, Homo sapiens
agtggaagaaacatagaactagcttttctctttgcttagcacatacaaatggaaaaacagcgacaccgttacctacatttactagtccaatgcgtacaaccttctgtagtatatcaactgcc

SEQ ID NO: 39520 - DNA, 122 bp, Homo sapiens
gtcattagtcatatagaggcactactcccattttaagggtcccgtcttttactctatggccgcacaagcatcttccaagggaaatatctctatcatcctccaccaccaacaaggcaactctg

SEQ ID NO: 39521 - DNA, 122 bp, Homo sapiens
tttggcgcggattagggggtctcggcgaggtgaggcgccaggcagcgctgggcgggcgggcgggtggcggagcgcgagcccctctagcgggactagggagaagcgggggccacgaggtgcgg

SEQ ID NO: 39522 - DNA, 122 bp, Homo sapiens
gattcccctcttcctggctctttaccccaccccacggacgcttcctcggggtacagatatcggcatggagaggtgcccgccgcccatctgccaagttccaccgacacacaggtgcattgagc

SEQ ID NO: 39523 - DNA, 122 bp, Homo sapiens
ataactaaaacaataacgctggatggaggcagggttttgttcggttttgtttgctattgtcgggccctcaaatagcatttcctgtggtcagtgatgcttcgggggttgccaggttgtggcac

SEQ ID NO: 39524 - DNA, 122 bp, Homo sapiens
ctgagacctgccaggctattcccaaaataactcttctcgtgtgtcactccctgccccaggcgcccgacaccttccccgccaagctctctgttcccctgctcctggctctctctcctgcacac

SEQ ID NO: 39525 - DNA, 122 bp, Homo sapiens
tgagtggagcggcgatttgtggaacgaaatgaatgaaatcgatgtggcagcgggcccggacgggtcggtggcgtagacgcggagcgcgcagctcacacctggcggccgcggtttccaggagg

SEQ ID NO: 39526 - DNA, 122 bp, Homo sapiens
cctcatgcagcttggccttgagctccgaaatgtaggccgtgtgccgtcgctgctcctgctcgcgctccagcttcgcctcctgcagccgctcgcgcagtttgcccacctgcagccagagcggc

SEQ ID NO: 39527 - DNA, 122 bp, Homo sapiens
aaaaagaaatatgcttcaatttttgttcacaggattataccttactcaattgttaaaagccgtaaaaagctcaaaagaaaaaaaaagttttcttgactccaaaaatcaaaaggatcagcaac

SEQ ID NO: 39528 - DNA, 122 bp, Homo sapiens
tgagtacgatgtgggcataggctcctgttgtttcttgacttggagaacatctcccagaggcgtcaagccttctctggccatggtttctttttcacttttgtctgcagattcactcggtgagc

SEQ ID NO: 39529 - DNA, 122 bp, Homo sapiens
aaccgcccgggcgtggcagggacaggcgggcgacttcacaacatcatcactcggcgacctcggttctgcggcgacaccgggtcaatggcagcccccacacaattggggaagccaaaggagag

SEQ ID NO: 39530 - DNA, 122 bp, Homo sapiens
ctttctcctgggggtcggcccaggtactgcctgcccacccaaatgggccagctggggactcgggcctggccagggcttctgccgtcccctccacgtcatccatgaagaacacgcgctcctcc

SEQ ID NO: 39531 - DNA, 122 bp, Homo sapiens
cgctaacgctaggaatgatgaaacctcctgttctggaaatgcatttccctttagcaccagcgccttctaatgaggtccctctgccccgcaggacaaaagcgcccattagggggccctgtggt

SEQ ID NO: 39532 - DNA, 122 bp, Homo sapiens
tacttcacatatctctcagcttataaggacagctccgaaattaattacaaaacaaaacctcgatggactggaagttaaggtcctactaaaataacaaagagagagagccctaaatggtatta

SEQ ID NO: 39533 - DNA, 122 bp, Homo sapiens
gctcccggcgccctcttttccagccccgctcccgcgctgccgccggagagggactcggggcgcagccgccccgcctctgccggggccccaggaggaatctaagaaaagagagatggagggag

SEQ ID NO: 39534 - DNA, 122 bp, Homo sapiens
agagtgtgctgaaataaacaaggtaacacctgtaaaacgcccacttagcacaccgggtagcgcctattaaaagtggcagctgttagcaacggttaggcaagccgtctcttcccttctcccac

SEQ ID NO: 39535 - DNA, 122 bp, Homo sapiens
cactttttttttcttaagtatttaagtataccagtgaaaggaatcctttcccacctttcccggccatagttaatagcttcctccattgtactctcatagtatgttgaatgtgacataattat

SEQ ID NO: 39536 - DNA, 122 bp, Homo sapiens
ccgtcttaaataaataaataaataaataaaaagacacactatgtgaaatacctaacatgccgaatgctgaataaatggcagaattaatatctacagagttgtgtaccataacttcaaaaaaa

SEQ ID NO: 39537 - DNA, 122 bp, Homo sapiens
caaaagcaagtcctccccccgattatgtgactgagtccgaagtttgacgggcagaattaccggagtacaagggcatcattgtagcttgagtttgccttcactgaggttggatggacaggtgc

SEQ ID NO: 39538 - DNA, 122 bp, Homo sapiens
tttaagggcccaagaatttgcatttctaaaatgtttccaggtgatgctgaagcttctggccggaaagacatcctttgagaacatatttcctccccagccctcggcccttaagccccagaacg

SEQ ID NO: 39539 - DNA, 122 bp, Homo sapiens
cacttcaacaccaatgcaacgcttccgggtccaggagctgttttgtttggatgatggaatcgcatcaggaaatgaactgtacagcatttccaaaaaaactgggtcctcagtttgaaaaacct

SEQ ID NO: 39540 - DNA, 122 bp, Homo sapiens
gccgcggcggtcgcctggaaaagtttccccgccagggctccccagggtaagtagcgagggcgcggggcccggggcccggggaaggcaagcgcgtctgggagccgggcccgaggggagccggc

SEQ ID NO: 39541 - DNA, 122 bp, Homo sapiens
acatgggcttctcttcgaggaggtaacatgtccgcgccctgagccacggctctctgggcgcggccatcttggtagatctgccgtacagaagggaaacagttgttcttgtgtcattaaaccgg

SEQ ID NO: 39542 - DNA, 122 bp, Homo sapiens
tttaaaagaaacacagcctgaggcgaaatctttaaaaagttacctaggtgatgtagggtacggtacacacgaagcagagaagatagaatgaaccaagttatggaggtgagaaacgtgtgtgt

SEQ ID NO: 39543 - DNA, 122 bp, Homo sapiens
ggacgtcggaggggcactcatccagaaaggggtcctcagagtctgagggggcaagggccccgcccaccacctccctgagactgtagaacagcgtgcaggacacggtcacgggcaggtcgagc

SEQ ID NO: 39544 - DNA, 122 bp, Homo sapiens
tggaggagggccaggagggctgtggcacctgccaacagcctcttcccttcccagccccttcgacaaggatgaccagccctcagctgcttcttctgtcaacaaggcctccacagtcaccaagc

SEQ ID NO: 39545 - DNA, 122 bp, Homo sapiens
gggttgttcaggcagccagggtcctgtgcccaccagcgggccctgcctggtaggactttgcggtctgagtttgactcctagggtaagatttcagccattccgctggggagggcaggtcctgg

SEQ ID NO: 39546 - DNA, 122 bp, Homo sapiens
ggtagactgtggcagaattaggtactttcacttctctttgccaatcaaggacagcaataacgtcagtcctctcctcttcatgctgttacaagcaggctgcagtcaccagaacagaccagggt

SEQ ID NO: 39547 - DNA, 122 bp, Homo sapiens
ctgcaaaagtgtgagagtggaggtggtgttgaggctgccagtggctgggtgtggaggaatcgatggttcctgtgcaggaagtgactaaagaagggtctggataaggaagcagaggctggata

SEQ ID NO: 39548 - DNA, 122 bp, Homo sapiens
agcaggtggaagagctctgccaggctagagcaaagcgcgtgggcctgagctgagtgaagccggctgttaggtaaggcagcgctagttggtagtgggtcttgaagcctgagactagaggagtt

SEQ ID NO: 39549 - DNA, 122 bp, Homo sapiens
tggacagaaggctgtgactaactttattggcatctctctagagacataagtaggcttcaccgccaatttgcctaaggtgttcagcaggactattgaaggcctggcagctgccggaggagagc

SEQ ID NO: 39550 - DNA, 122 bp, Homo sapiens
gtgatgccgtgtctgaggagtcttaggccgggtctccacctcttctgtggccggctttttcgatgtactttatctgcagtaacgtcacagccctccagaatccgcccggtctctagagcaca

SEQ ID NO: 39551 - DNA, 122 bp, Homo sapiens
ggcggcgcggggcaggcgctggcctctccattcacaggtggtgctggcgttgcgaagggacgcactccaggacgcacggcggggaggagtggcgtcagggatccgcggatgagtcaagtggc

SEQ ID NO: 39552 - DNA, 122 bp, Homo sapiens
gcagcgcgccccgcccccgcgccccgcgtcctcacgccctggtcccgccctcgcgtcccgcgccagtcctcccgctttggtcccgccctgaggctcggcccggctcccccgccccggatttg

SEQ ID NO: 39553 - DNA, 122 bp, Homo sapiens
tttccagtgggcctgagacagagacaaagtgacatgatgtttagagagcaagaaagagatcgaaagggaagagggcaagcagtctcaggcttccatggtaggaaataaataatgtccagaag

SEQ ID NO: 39554 - DNA, 122 bp, Homo sapiens
ccaaacttgctgaagttctttgggcctagaagtaggtagaaatgggctttaaaagaagggcgtatgttatctgactttgtcctaccggatagaattacttagccccattttacaggtgagga

SEQ ID NO: 39555 - DNA, 122 bp, Homo sapiens
ccccgacccccagccggcgcgcctccgccctcgggtggcggggccgcctggcgtcacttccgtccagaccggaacccaagatggctgcgctgttgctgaggtgacttcagtgggactgggag

SEQ ID NO: 39556 - DNA, 122 bp, Homo sapiens
gccgccgccgccttccgcaggctcggctgtctccacggaaacctcacttccgcttccgcacgctgccacctctgattggctgttgctcaagtcgtgggggcgggaccaatgggcgcccttag

SEQ ID NO: 39557 - DNA, 122 bp, Homo sapiens
agttttcccgccccgccctctgccccctgccccgccagccctcgggcgccaggagggctgcgccccacgcaggcactcatccccgggacccgctcatcacctgtgggttccttgtcttccac

SEQ ID NO: 39558 - DNA, 122 bp, Homo sapiens
cttgtgatctcatgcctcgagctgctccttagtatctggctggccgcctctctttggccacgaagaggtgggagtacgacaaggcacaaacaaggtcttttatgatctggttccagcctact

SEQ ID NO: 39559 - DNA, 122 bp, Homo sapiens
cggagcttgacgaacgccgagcgaggcggagtcgggcagggggcggggcttccgaaggggcggggtgaggcaaggcagctcttctgtgacgtcaaactgcgcccaaagccggacgaaaggga

SEQ ID NO: 39560 - DNA, 122 bp, Homo sapiens
cgcatcccttaccttccagtctgaggcagcctgaggactgtgggaggggaggaaagatcacgccctgatattggatggagatggagagattccaagagaactaacagcagagtctcaggaag

SEQ ID NO: 39561 - DNA, 122 bp, Homo sapiens
tgtccggccggctggccttaaaggggacgcggtcagagtggcagctcgcggggtggcccccgctccggctccgccccatttcacgcacctcgcccctccccatgcttcatcccgcagccccg

SEQ ID NO: 39562 - DNA, 122 bp, Homo sapiens
gttattcaaatcttcatagtgagattaatttatcttgtacacaatttgttgaatgtttttcgcagcaggtgaatcaaacccaaagactccggacagtctgtgaaagggagtaagaattgcag

SEQ ID NO: 39563 - DNA, 122 bp, Homo sapiens
aggaagggcttagcgatgtctttgatgaggcagcctgtgcaggctgcaggctagacaatgcgaggacagtctgcagaggtgtcttctctccctcccctctcaagcccccactctcctctctt

SEQ ID NO: 39564 - DNA, 122 bp, Homo sapiens
gaagggagaggttcgccgctggcagccagaagccttaccactgctaggacgctggcagaacgcacccataacttggcaacactcggaggatggatggcaaataataccagcgactgaagggt

SEQ ID NO: 39565 - DNA, 122 bp, Homo sapiens
ttttcctgggtaaatagccggatgtccaagaaatgaaaggctggtctggcagcagcacatcgtctaacagttggtagtcatatgtgggaagtactgaagggggagatgacagcaggcccaga

SEQ ID NO: 39566 - DNA, 122 bp, Homo sapiens
tccctctgccctgggaagaaggaagcaggatttattataacatttagctcactgtccaatcgactaaaacaagctctcccagggctcgggccagctgtcggcacgcggcaggtgttgagtgt

SEQ ID NO: 39567 - DNA, 122 bp, Homo sapiens
aaggagggaggggaggggatggccgccatgcccaggtgccgggacaggagccgagggccgcgtgcaccccttgggcccttggaggggccggcatgtgcctctctgtccctgtgccacttcca

SEQ ID NO: 39568 - DNA, 122 bp, Homo sapiens
agtgcaggtggaggccccggcggggcaaagtggcaggaacctcttaaagggcgagagcggcgcggagccagaacgcggtcggcccggtccccgccgcacccagcccaggtgagcctggacca

SEQ ID NO: 39569 - DNA, 122 bp, Homo sapiens
ggagttttctaggaaaaattaaacagcttttaataactggcccgctggtgtgagagctaccgtggaataaattagcacaaaaatggaaaaaaagtcttataactgttcactgttacagacat

SEQ ID NO: 39570 - DNA, 122 bp, Homo sapiens
agggggggtgtctcacgtatgagggcgaggaaggtggtttgggctctacgtgattgccgacgtccagaaagagggattgaacttctacaggatatgccagactgcagggtgggctgagactc

SEQ ID NO: 39571 - DNA, 122 bp, Homo sapiens
tgaatcaatcttaaatattatgaatgtcttgtcaatcaaatactctgttcaaaactccatcgtctccgtgctgtctttacaataacacaaaatgccaatgtgtagtattaaaatcttccacc

SEQ ID NO: 39572 - DNA, 122 bp, Homo sapiens
acgccgggcgggggagggggcggcggggcggcgggacggtgggtgggggccaccaggcggcgccggagaccaccaaactttacagcgagcgagcctgcttcctggagggagtgcagacaagg

SEQ ID NO: 39573 - DNA, 122 bp, Homo sapiens
gaggatgcttagaaatattaatcgtgaaactgccttgcctccagggctagctagcaacagcgtctttggccatattattctagggtctgacatttttacagcttcccataggtcataggaaa

SEQ ID NO: 39574 - DNA, 122 bp, Homo sapiens
gtggaggttgcagtgagctgagatcttgccattgcacaccagcctgggtgatggaggctccgtctggaggaaaaaaaaaaaaaaaaaacaaaaaaggcggggctgaggtgagaagaatattg

SEQ ID NO: 39575 - DNA, 122 bp, Homo sapiens
ccaaaagcagatccccctgtagtggctgcaggagacctcactggatcctaggaaggatgccgctgcccagtgctcaggggctcgggggccctggccaccccccctgacctgcccatactctg

SEQ ID NO: 39576 - DNA, 122 bp, Homo sapiens
tttctaatccccaaagaatgtatgtgatggaggagatcccctcaactcacttccttcccccgagaagccatcttcagcatggagcttatgtcattcttggccgatgatgtggcaagctttta

SEQ ID NO: 39577 - DNA, 122 bp, Homo sapiens
gaaaaacaacatgttcaaacctgcgggaatcctggaggggtttgatttcgtacgcaaggtcgtccagcctcatgatgcctctgaggtccccatagcacgtgtcgacggtgaccatggacaga

SEQ ID NO: 39578 - DNA, 122 bp, Homo sapiens
cccagtactggccagaggcaagcccactcttcaggaacctggcactgggaacccagacaccgttcctgatgggagggtcccacatttgctcacacaatttgatgactatggctgtctgttta

SEQ ID NO: 39579 - DNA, 122 bp, Homo sapiens
ggttacgttggagatgggcgctaaagtcgtcacgttcgggtgctgggtcgtgttcttgtccgcggacagcacgcagagcacgcccaggcaggtggcggcccaaagcagtgagcgggagagcc

SEQ ID NO: 39580 - DNA, 122 bp, Homo sapiens
tcgtgatccacctgcctcggcctcccaaagtgctaggattacaggcgtgagccaccgcgccgggccttaggttggattcttaagagtggagttattgtaaaacttaaaagtcatattgagaa

SEQ ID NO: 39581 - DNA, 122 bp, Homo sapiens
caaggctcaccaggagagacaggttgggttgctgagacccagacagccatcagaaccttccggagacatcccctcaaagttctccatgaagatgggttgacatcttagaatacttgacacct

SEQ ID NO: 39582 - DNA, 122 bp, Homo sapiens
gggctggcggcggcgggcggcggcgcgcagggaaccgcagcactggtagcacacggcccacgcctgctcctcgttgatgggctggttgtacagccgcaggatctcctccaggctcagcgcgt

SEQ ID NO: 39583 - DNA, 122 bp, Homo sapiens
ataggcatttgtatgaagtaagaattcattgctcgttaataatctggaaaagaagacacccgtggctaattgaggaagatttagtcaggctttttaagtagaatgtcatattaggaacaact

SEQ ID NO: 39584 - DNA, 122 bp, Homo sapiens
gcagtgggggttaggtgctacgcgtaggtccacatctggcatgtccagtttttgatggtacggagatttgtgacaggcagagccaggcccaggccagtcacacacacgtgtgcaccgattct

SEQ ID NO: 39585 - DNA, 122 bp, Homo sapiens
ttcatcacccaaggctgctcaggaagtttgcccacaaactgccggagatgtgggtgagaccgtgtaatccaagccaacatagtgagctcttgagcagctgctaagtcagtgccgagagcaga

SEQ ID NO: 39586 - DNA, 122 bp, Homo sapiens
ctaccccctgcagctcctgctcagctcctttgcagattctgactcaacttccatatctcacgatgaagtctgggctcagtcctgatcactggcctggtctgtctacattcatctgccccaga

SEQ ID NO: 39587 - DNA, 122 bp, Homo sapiens
aggggtccgatggtactcactgcttggcaataggtgattgtctcaccgctcagcaataggcgatggtcttactgcttggtgattggcgaaggtcccatctgggtcgccaaaatgtgtctgga

SEQ ID NO: 39588 - DNA, 122 bp, Homo sapiens
ctcctgctctcctcccacaccctccagcctggttcaagccataggcaccatctgggtcttcgtcctcatgcccagagccaggctctgtgcccagcttgttgcaggtctcatcaaaccctgac

SEQ ID NO: 39589 - DNA, 122 bp, Homo sapiens
gctgataccgcctgtgaccaggccatgaagggccagaggggctccagtgagaccataatccgcccctctttaaaagggggtagaggaagttcacgcgaagccaacagtcttctccccagctt

SEQ ID NO: 39590 - DNA, 122 bp, Homo sapiens
cgcttccactccccgggcgcgcctctggcctcggctctgcgcgcctccttcctgtgtccccggggcgccgtccagtcccccagctcggtccctcccgtcattccgccgccattccatacgct

SEQ ID NO: 39591 - DNA, 122 bp, Homo sapiens
tcagggtcgtgcaggtccagcactccagtcctgtcctccccgggtgaggattgatcccggcgcttccctcagccacctctgtcgagagatgcaatttaccaccagctcggaggtcaccgtag

SEQ ID NO: 39592 - DNA, 122 bp, Homo sapiens
atgccctgggagcccacaatctgttaacaggaagcaggtaaacccgagagcgtccgcctgcgttccagtccagtgcccgtcccagcacacacctgctttttcagacctgccgctcatatgcc

SEQ ID NO: 39593 - DNA, 122 bp, Homo sapiens
ctgattcctgaaaacatagttttagacttggttcttctgaatggtgttttggtgcaaggccgtcagcttgcactgtggcacactcctgagaaaaatccctgtgaaacccttatttaccatga

SEQ ID NO: 39594 - DNA, 122 bp, Homo sapiens
ttcaaatcctctagaagccaaaatgggacacagtaaacagattcgaattttacttctgaacgaaatggagaaactggaaaagaccctcttcagacttgaacaaggtcagtagcaagttgttt

SEQ ID NO: 39595 - DNA, 122 bp, Homo sapiens
aggctgcgggttggagcaagggtccaagattctaagggccaggactcagctccagaagctcgatcccgccccacgcgttcctgctccggccaggggagggggctaaggaccggcgtccccag

SEQ ID NO: 39596 - DNA, 122 bp, Homo sapiens
cccggggccaagtccctgcctgcctcccagcagcccacgtgcggcccagctcctccctcacggtggcctgttgatgcccaactcatgcatctggcacactgcccagaggcgtgagcccttgc

SEQ ID NO: 39597 - DNA, 122 bp, Homo sapiens
gccatggagcagggggcggtgctcatcagggaggctcgggcggcacaggagcccacggagcgggtgggaggctcaggcatggcgagctgcaggtcccgaaccctgccccgcgggaaggcagc

SEQ ID NO: 39598 - DNA, 122 bp, Homo sapiens
tatatctttataatcctgtgttctttatagaaaagcaatatattttgtaaaatgaatgaacgaatgcttccatgtatccaggaagagtactgtgtccctgggagggtaagacatgggcagtt

SEQ ID NO: 39599 - DNA, 122 bp, Homo sapiens
agcgcctgcgcccttctatacttctcgctctttcttcaagtcacttctacccggcgagcccgccctcccgccaatcgtcatttccggcgggtgctctgcgtcatttacgtcgtcacttcctg

SEQ ID NO: 39600 - DNA, 122 bp, Homo sapiens
acagacacccctctcttggcttccttcaaattactgaaaacaagtctctccaccccctaccgtaccaaccaaccaaccaaagactggccagcacatgctgtagtctcagaactttgggaggc

SEQ ID NO: 39601 - DNA, 122 bp, Homo sapiens
cccctacaaacactcattctcacacaacgttgccctacctccctcgccgcttgccctggccgctgttgcacactcccctgggggctgtctgcacgccctagagcagacactgcggtcactta

SEQ ID NO: 39602 - DNA, 122 bp, Homo sapiens
cgggccctgagtctgctttttgaactggagatactgttggagcaggtccagggaccacaacgagatccttttcaagacaagattcctacaaaacccagaaatgattgccaagcaaatagaag

SEQ ID NO: 39603 - DNA, 122 bp, Homo sapiens
ggcggctttctacctggatgcggccctggcggcccgcagcaccagccgagcgggctgtggcgaggacgcccgacgcagctcccacatgttgttcacgctgcacgtctaccagtaccgcatgg

SEQ ID NO: 39604 - DNA, 122 bp, Homo sapiens
acagctggaggatgaagctctgggctggtttctttttaacaggaaggaaattctgaaagccggaatgtgaagaaaaaacttaagaatctcttgtgtcttgtgagctctgtggaaatggcagt

SEQ ID NO: 39605 - DNA, 122 bp, Homo sapiens
gatcacttcccttaaccgtccatctaggcacctctccagctttctccctctctggactcccggggctccattttcagccactcagatctcatctcagaggcaccacgtccaatttcttttgt

SEQ ID NO: 39606 - DNA, 122 bp, Homo sapiens
ctgacttcaagaatgaagccgcggaccctcgcggtgagtgttaagagttcttacaggcggcgtgtccggagtttgttccttctgatgttcagatgtgttcagagtttctttcttctggtggg

SEQ ID NO: 39607 - DNA, 122 bp, Homo sapiens
gttcctgatttcctaattcaagcgtaccactttcccaatgatttccacatcccctcgctgcggccccaggttcagcagttgctgcagagctggatgaaaaggcttgaggtcagcacattgta

SEQ ID NO: 39608 - DNA, 122 bp, Homo sapiens
cactgcactccagcctgggtgacagagtgagaccctatctcaaaaaataataaagatgggcgaggagcaatcggccccgaggaaaagacaaaacaaaacaacaacaacaacaacaacaacaa

SEQ ID NO: 39609 - DNA, 122 bp, Homo sapiens
attaagacataagaaaacaaaggtcctgctctctcagagtttgtgtttcagtgggggagacggacagtaaacaacaaaagtatgcatactgtcagaggtagaaatggtacaaaagatgaaga

SEQ ID NO: 39610 - DNA, 122 bp, Homo sapiens
cacagactcacaggccagatggacctccagccacggccgggccagactcgtggacacaggcgcagtgtcacgtacagaccacggggagacatggcactaggggacaaatggacgtgacacca

SEQ ID NO: 39611 - DNA, 122 bp, Homo sapiens
cgggcccggggccggcggccacggggccaggacctggggaccccagctgcaggcaacgcacgcggcgcagcagcccctcccgcagcagcagcaccgcctctccagcttcagccagcgcgctc

SEQ ID NO: 39612 - DNA, 122 bp, Homo sapiens
gaacccgggcttcaacgatagagctaaatgaattcagagtgcgctacccttccccccagccgcactttaaaaattttggctgaacgtctgaagaagatacgagcaccccgaggcctttaagg

SEQ ID NO: 39613 - DNA, 122 bp, Homo sapiens
gaagccagcctctgccctctcagagcccagaagctttagaagagggttgtggtaggcactcgggagggcctgggaaagatgctctttcatggcactcttgtcactgatccttgaacccaagg

SEQ ID NO: 39614 - DNA, 122 bp, Homo sapiens
cgtcagcacaggagggtcatccagctgtccggaaatgaaaactcacagtcaccaagcatacgcagtgccatctgatgagaattcatctgctctgtcctgcacggtcccatgggaaagtcaag

SEQ ID NO: 39615 - DNA, 122 bp, Homo sapiens
cctttgagccaaggcactgcaaccaccccgtcagaacttacacacctctcagagtgtttgcgggatcgggaagggagtggggggcaatgtagaccgcctcctccgtccttatctttcccttg

SEQ ID NO: 39616 - DNA, 122 bp, Homo sapiens
tggaattcctcagtcctgcctgcggcccggttctcgctcctgtggggacacagcctgccccgtcccactgaaagggttttctgagaggcggctgatccaccccgcctgatgccttcaacgga

SEQ ID NO: 39617 - DNA, 122 bp, Homo sapiens
tctgccacaggccctgctgctcctccaccacggggaagcacttcttcagcgcctcctgcacggcaagcagaggccggtcttgagtcatcttctgctgaaaaagataaaaacagaaaataacc

SEQ ID NO: 39618 - DNA, 122 bp, Homo sapiens
tggcccaggaaactgctgcggtggcaggtggcggcggcaggagggctcggctgccccgagcgcccgccaggtacgggggcgggacaggtgcggggcgacgcgccgccgattttcatgacctg

SEQ ID NO: 39619 - DNA, 122 bp, Homo sapiens
cccctcttgccaggttgcgctaatcagtgaccccagtgtgctgtgttgatactaacaatgcgaggcctagcagattcaagggaaaagagaaccaactgggtttccaccagacccaactaaac

SEQ ID NO: 39620 - DNA, 122 bp, Homo sapiens
tgcaagaaggcgaagacagtggcgcgcggtgatgacgtcaggaggcgcgagctttgcttccgtcccgcccagaggcgggaggtgcgacgcctgcccaggtgctgccccgagggcaggcgggc

SEQ ID NO: 39621 - DNA, 122 bp, Homo sapiens
gcaactcccaccacccggacactgctgcccatcttagtggtttcgagatgggggcagccgcgggagaccaacctctgggcctcagtggacggtgtgcaggtgtactctggggggtaataggg

SEQ ID NO: 39622 - DNA, 122 bp, Homo sapiens
aattctttctttttgagcatgttgcgtacgtatcccatggaggtggcagttttgactcagcgtaattcccttgagatgcctgcaggctttataaacggcatgttcctcttcactgtgaggaa

SEQ ID NO: 39623 - DNA, 122 bp, Homo sapiens
gcacagctcagagcacactttagagtcagccagccctgagtccagggctctctgacccttcgtgttgtcacctgtagcatgggggggcagcagtaccccttcccagggcagcagggaagata

SEQ ID NO: 39624 - DNA, 122 bp, Homo sapiens
attcaccttgtgagggacatctttgattcttccagggtctcgtgattatgaataaacattcgggtacaagtttttgtgtgggcatgttttcagcacaattgggtaaatacctaggagtgtga

SEQ ID NO: 39625 - DNA, 122 bp, Homo sapiens
ggtaacagatttctaaaggattcacaatataccaatgtaccatggcaaaccaattgagaacgcttatatttttgcataacagacaaagccactccttcatttaaagggacaactttaaataa

SEQ ID NO: 39626 - DNA, 122 bp, Homo sapiens
ccgggcaaggccacgaggcttcttatacccggtcctcgcccctccagcgccggcctcgcccgcgctcctgagaaagccctgcccgctccgctcacggccgtgccctggccaacttcctgctg

SEQ ID NO: 39627 - DNA, 122 bp, Homo sapiens
cacgtggacgaggaggtaccggatgcctggggcccacccagggcctgggctacagggacccgctctgccatgcgccgagcctgctcgggtgcggcggtgccacagcgccctctgttggccag

SEQ ID NO: 39628 - DNA, 122 bp, Homo sapiens
tagctggggctgttatcagttttcagtttctcgggacagcccataacggagaaacaggaacgcatatgtcgtttaccatgagctgtactttcccctgcgtgacaagtggcccagataaaatg

SEQ ID NO: 39629 - DNA, 122 bp, Homo sapiens
atcccttcgtttatgctctgtgtgcccttcctggaggtgaaatcccttctcctttttcttcgggcccttgttttcttccatcctttcaaacatctctctaacatatccttttgctatttgac

SEQ ID NO: 39630 - DNA, 122 bp, Homo sapiens
ataaactaaagagtcccttcccacagacatagttgcctctgttcctgtaatggggataatcgaacccttcatagaaattgcaaaatcctgttttcttactatgtggacagccaaaaacatct

SEQ ID NO: 39631 - DNA, 122 bp, Homo sapiens
aaagcggggaagcagagcagcgtgaggaagatggtgctcacgtgggaggccagccaaggccggagcagtgcctggcagttggccaaaaggctggtctacttgacgtagaagacgagcagcag

SEQ ID NO: 39632 - DNA, 122 bp, Homo sapiens
agtcctaaacctgaagaaagtttagagcctggggctctaaactacctgagtctttccaaacgacaagccaagaagacctgttgaaagtttcctcttaagtttcgtggagagagactcaggta

SEQ ID NO: 39633 - DNA, 122 bp, Homo sapiens
caaatgcctttaaaaaaacaagagattctaacattaaataattacattcttctcatgccacgtgtttacatttttatatgtaagcttttttaaaagggtacccactctgaagtatatggatg

SEQ ID NO: 39634 - DNA, 122 bp, Homo sapiens
cacctgctgcgtgcccggccggaagcccctcattggagaccctggcacacccgcagagcgcgaaaacaagtgactgcacggatcagttcagacagtgacagtgaaagcacccgagggcttgc

SEQ ID NO: 39635 - DNA, 122 bp, Homo sapiens
gatagtttttccacttctgagctctgcgatctgaggcgatgcctgtaaaagacgcagtttcgccaagcgtggtggctcaggcatgtagtcccagcgttttgggaggccaaggcaggaggatc

SEQ ID NO: 39636 - DNA, 122 bp, Homo sapiens
ctttctcaaggggaagaaagtcttccccggccctgtggcctccacaggcctcctcttctccggagtagctcaggaagcgtgagctctgtctacatgggatcccagttttgtggtgagtatgt

SEQ ID NO: 39637 - DNA, 122 bp, Homo sapiens
gctgagggtatcctcggaggtgggcagcatggaggaggtggctgcctccggggtggagcccgcgtgcagcttctcaaagctgatcttcctggccagctcgtcccgcgtgttctggtcatcat

SEQ ID NO: 39638 - DNA, 122 bp, Homo sapiens
ggtgtcggggagacgtggtttcctggcgacgtggtcccggcaggcgacttagacctgagccgaatgtgttgaccccaaattgtgcttttcccaagaagaaaagggagagaaacattaggaca

SEQ ID NO: 39639 - DNA, 122 bp, Homo sapiens
gtccagaggggccgctgcactagcgcgaaaagggacccttcttccgggagtgggccccaccgcctcctcgggatgcccaggcagctccagccgccatattatcaacaagccgcccgcccgga

SEQ ID NO: 39640 - DNA, 122 bp, Homo sapiens
aagttaagtggctgctggagcgtctcgggggacagccagtgtctgcggcgccgagagggccgttcgtggactcaaatgggtatcacccctaccgtttatagtcctcccaatagtctgcatct

SEQ ID NO: 39641 - DNA, 122 bp, Homo sapiens
ggagatggagattgcagtaggccaagatgatgccactgcactccagcctgggctacagagcgagacacggtctcaaaaaacaaatgtgtggctaaggagttacctgggggaagtagaatgag

SEQ ID NO: 39642 - DNA, 122 bp, Homo sapiens
ggccggtggcaagagcccaggccagggcaggcaagggccactggggcctgggaggggttgcgctctgattccccgatcaccaccccagtcctgccgtgggcgtctctttttgtctgagaatg

SEQ ID NO: 39643 - DNA, 122 bp, Homo sapiens
aggcggcagggggcggccagacgcccgagctccctccgggctccgagcccctaagccgagcgggcaaaatggggagaacccagtgcggggctttcccccaaatatcctcccagtgtcctggg

SEQ ID NO: 39644 - DNA, 122 bp, Homo sapiens
cccccacccccagcccgctgcgcgcacatcaaagctcctctccgccgcgcacagtggccgcggctcactaatgggattgcaggctggtgcctggctccgctgctgccgccgccgctgctcgc

SEQ ID NO: 39645 - DNA, 122 bp, Homo sapiens
aaccactagaaccagggcctttaccagtctctactgccatgccccctggcttggccaaatcgtcttcagagtcctccagtgaggaaagtagcagtgagagctcctctgaggaagaggaggag

SEQ ID NO: 39646 - DNA, 122 bp, Homo sapiens
ccagacattcatggtgtgggcaatcaccccagggcaagccccgcacctgcccccaggccccggcgaccacggtctgcttcctatctcggtggatttgcccgtctgggcattccacgggtacc

SEQ ID NO: 39647 - DNA, 122 bp, Homo sapiens
cccccctagccgagggtccccacctcgcaggtcggagccacccggtccgggctgccccagcgccagcagctgctgcttcccttgactcagcagttggctcctgggaatttatcccagaaaaa

SEQ ID NO: 39648 - DNA, 122 bp, Homo sapiens
agtccctgtgcttttatgattatggatcatggttgttgtttcccatttattccaagggagcgatgtttggggaagggctgagtacacaagatcacattcagttgctaaatttgtacccaaac

SEQ ID NO: 39649 - DNA, 122 bp, Homo sapiens
ggttacggccccctgactcagagccggggatttttgatctctttttgcagacggagaacacggatgcagggaagaaaagagttcagccaggggtggcagccactgggccccgagcagactct

SEQ ID NO: 39650 - DNA, 122 bp, Homo sapiens
gcccggggaggagcgcccggggagcagcgctgggcatcccggaccaggcttcctgacgcacgtgttctgcgcgctctcgtgggaacccagcgtttccgactcccagatcccattctgatggc

SEQ ID NO: 39651 - DNA, 122 bp, Homo sapiens
cgcctgctgccggacatccgcggcgtgccagggaccgagcctgagaaagacccggggccgcgggcctagccatgattctacttcccaacctgactgcaatttgggggtaggccttgctgcct

SEQ ID NO: 39652 - DNA, 122 bp, Homo sapiens
ttagtggcatactatacgagaagtgtgtggtacagtatcttgcctgtgaaaggtgttcagcgaatgatagttatgatgataaggcagatattttatatgtaacctagaaaattacatacggc

SEQ ID NO: 39653 - DNA, 122 bp, Homo sapiens
caggagggcgcttcgccccgaactcggtgcccagtaggcacaaggtcgttctgggcttcccggctcagactgccaaagcgtctgcctccaggcagtgccacagcaccacccactctcccact

SEQ ID NO: 39654 - DNA, 122 bp, Homo sapiens
tgctggctgcctcctgaaggaagccctcctggactgcttcttttggctctccgacaactccggccaataaacactttctgaattgagtttgcgaatgctatggatcctatctttccatgtca

SEQ ID NO: 39655 - DNA, 122 bp, Homo sapiens
tctgcgaaacctcaggagtcccgtttgagaagaaaggggcccgcagacacctgattctcacgctcggtttatgcacaggtgccagcctgcaagccggagaggcacgcagagaggaaactgca

SEQ ID NO: 39656 - DNA, 122 bp, Homo sapiens
gctttacgttgaagtccaggatccgttttgagttatttttgtgtggggtgagacgtgggtcgaagattttgtttttgtccatggaattgcttttgcgcttttgtaaaaaaaactcatccggg

SEQ ID NO: 39657 - DNA, 122 bp, Homo sapiens
ccagaaaaatgcacgaacgcacggacctgcccgtcactcggattttggaaggtggcctggcggaccctcctgctacatctcctctacaggtggagcccaggctgtgatgcaccggctcagcg

SEQ ID NO: 39658 - DNA, 122 bp, Homo sapiens
ccccccgggctgggccgggctggcggcgcgggcaggtcccgggtggggtggggggaagtccggttgatcttgctgttacccgggtcttaattggccttttcagtcattaggacgcggatcca

SEQ ID NO: 39659 - DNA, 122 bp, Homo sapiens
gtggtgcctgctgagtcctggaagagagtgaggggccagggggccccagagcccaggggacgagagctgtgcacagcagaatggcccaggacactgcacagggcctcacccacctgtccacc

SEQ ID NO: 39660 - DNA, 122 bp, Homo sapiens
gaaggctaagccagtctgtctttgcggagtccacgtgctgccagcacacagtccatgctccggagtcagcatcccaccacatggtggaggggatgttctgaaacccctctttgaaactcaca

SEQ ID NO: 39661 - DNA, 122 bp, Homo sapiens
aaatcctgtttggtggtctcttcacacggatgcaagtgaaatataggaggaagtgcaacccgccacaggcttagagttgtatgagactcaggagtaacaggtgccctcacataagggagtgt

SEQ ID NO: 39662 - DNA, 122 bp, Homo sapiens
ggtggtctcttctgcggatataccttggctcctcccaagtcctacgagtttaaacttcgacgcaccaaacatggcttcttcgcggttctgctccttgttttatttcgctcccacctttcggc

SEQ ID NO: 39663 - DNA, 122 bp, Homo sapiens
attcctctgcgactacagggcttcatatttggtcaaagactccaaggtacctgtgcagttcggcgctcttgctctgtggtgcccctgcccctctggtattctgcccaacatgttccagctgt

SEQ ID NO: 39664 - DNA, 122 bp, Homo sapiens
gggtttagtactgatggaggtttcaggcatccattggggctcttggaacatagtgcacatcgataaaaggattctactatagtctatatctagaattgagcactgtgatccacagagggctg

SEQ ID NO: 39665 - DNA, 122 bp, Homo sapiens
gcgcgggggcgtccatcctgaggggtccgggaaccaagagggcacggagggtgccggacgcggcgctcacccgcgggccgcctccaagctcttaatgagcttcttgatcttccagatctcca

SEQ ID NO: 39666 - DNA, 122 bp, Homo sapiens
tgattgagggaggggacactgaggaaagaggaggctgttggacacagtaaatatatgaagcgcctactttataccagacactctgttgtgtgatacgtaatgtaaccctcccaaggctctac

SEQ ID NO: 39667 - DNA, 122 bp, Homo sapiens
tcatctccccagattgtctcccaatttcttcgtctgtaaaatggggctggcagcagtgcccgcccgcaggcctgtgccgggaccaagctgcgtgtgctgtgtgtcctgtgtctggcagataa

SEQ ID NO: 39668 - DNA, 122 bp, Homo sapiens
cgacctcccttccctctccgcgacttgagcttgcttcccggaaagccagtgtagtggcagcggtttgcctcacagcgcccctggttggttgtttaaattttatcttaggttctcgcaaacaa

SEQ ID NO: 39669 - DNA, 122 bp, Homo sapiens
ggcttccagggcagctgcctttcctgaggcattgggcagaattccttgtggcaaggagatcgtagcacagagcccagctgggactgcgcacagtaattcagggttgccattgttcctctatg

SEQ ID NO: 39670 - DNA, 122 bp, Homo sapiens
tgtgagttcgggttgggggtgggaacgccgggcgcctcaggctggcctcacaaccaagggcggctgtcgctaaggtctggagctcgggtgcctgtgaggttggggggtcctgggcagcctcc

SEQ ID NO: 39671 - DNA, 122 bp, Homo sapiens
aacaaacctcacagactttgaggacctggatggtcctgcattcacggcatcaacactacccgcgctgctgttagacactccgccattcctggttctctccgaaccgttctttgtacagtaaa

SEQ ID NO: 39672 - DNA, 122 bp, Homo sapiens
ttatcagcccgtgggaagcaaggtaggacccgcagcttgcaagaatctgcaaggtgggaacggcgttcgggatgtgtttggccccccaaggccaaggcacgaaggggtcccaggcgggtcgc

SEQ ID NO: 39673 - DNA, 122 bp, Homo sapiens
ttagaagagcctgcttgcgatcgccgagggaaaaagggtggccagaaccggaagcccgcccgagggccaagccgtttccgcgatccgcctgtccccggctccatctcctttttcttgacagt

SEQ ID NO: 39674 - DNA, 122 bp, Homo sapiens
atctgcctgccttggcctcccgaagtgctgggattacagatgtgagccattgtgcccagccgagaaattggtatttttagaaacctctccagatgtaactaggcttgagaatcacagttata

SEQ ID NO: 39675 - DNA, 122 bp, Homo sapiens
tcacttcctagtgttttccctgagcttggacaagtcactgaacctctttgaattggcttccgctttagtaaagcaaggattgtgttactgtactcatggggttattgaacaaatgaaataca

SEQ ID NO: 39676 - DNA, 122 bp, Homo sapiens
cagacatcctctctggaagcctcttgcaaaccaaggttaaattcaaagtccccagcccaccgaatggaccctccgctcctctacagggcttccagagaaacctggaaaaccagctcaggccc

SEQ ID NO: 39677 - DNA, 122 bp, Homo sapiens
gttttgagactttattgttcttcccacagaaaccaccctcagggcccccttgaatccgagcgaaccttgtgaagatatgcttccaccaacaagacgtggagagagtgatattccctcggctt

SEQ ID NO: 39678 - DNA, 122 bp, Homo sapiens
tctgattcccatctgcctaagcagctcatgcatctcatacttctgatctagcttgaacttcggaaagaaaacttccatgtttctgtggtacaagaacagatgatggtgaaatgtagacaaag

SEQ ID NO: 39679 - DNA, 122 bp, Homo sapiens
atgtggtgaacaattcctctccggcactgggaggcaccttcccgccagccccctggtggccgcctggcccacctcccaccaacttcagcagcttgggtgagcaatcttgggtgggcgtgtgg

SEQ ID NO: 39680 - DNA, 122 bp, Homo sapiens
accaaataccaatatttaaattcaattatgaaggtaaagccagctctaggcagggaacagcgccttccagagatttgggtggcaggcaaattgcttcctaaaggtttccacccttgcctctc

SEQ ID NO: 39681 - DNA, 122 bp, Homo sapiens
tcctccatgcaacctcgtcttagggcaccgggtacgttacctcgtgaggagccgagtccgcgggtcctggggttgagatgtggacgccctcagggctggcactctgccctggcggccacagt

SEQ ID NO: 39682 - DNA, 122 bp, Homo sapiens
aggggcgcgcgtgtcagggcgcaaggaccccgcgataggacccgggcgctcccggcggcgcgcggaggctgggcatccccgccccacccgagagtgcccagttcccaggagacccggcccgg

SEQ ID NO: 39683 - DNA, 122 bp, Homo sapiens
cgggccgggccgagccgccgagaggggatttggaacaaacaacggcggccatgttgagagcgcgtcggggccgctaaacttcccggcctgcgcccgcctcaccggccgcctcccctctcccg

SEQ ID NO: 39684 - DNA, 122 bp, Homo sapiens
gagggcgcatcgaggatgtgacccattccctggccaagggtgtgggtggggaacggcaaccgatctcactgcctggcggggcagcttcctttccaggcaaggcggagacctgcagggcgtgg

SEQ ID NO: 39685 - DNA, 122 bp, Homo sapiens
ccgttcgggaccccagcctgggggaaagccgacagcgtccctctccgcgcaaactccacgcggcagcctggactgggatgtggggccagggggctgaataattaacaaccaggagaagccgg

SEQ ID NO: 39686 - DNA, 122 bp, Homo sapiens
tcatacaatagacatggaacttaaccagtcatttctgaagtttcatctggtggtaaaaaacggaaggaacacaaaatggagaaatcaacatgtgtagaaccaagtgaattcagttctccctt

SEQ ID NO: 39687 - DNA, 122 bp, Homo sapiens
tgcggcccagcagcgtggcgtggtgcaggggcgcccggccccggctgtctctttggttcacgtccgctccgttttgcagcaggaactcacagacgatcaaggagccctggggagccggggca

SEQ ID NO: 39688 - DNA, 122 bp, Homo sapiens
acctctttttctttataaattgcctggtctcaggtatgtctttattagcagtgtgagaaccgactaatacagacccctaagaagtaactgtacaggtttccagaaaacagtcttggaaaatc

SEQ ID NO: 39689 - DNA, 122 bp, Homo sapiens
cagcgggccggaccgggaagacagcagggtgctgcgagcaggtctggggaaaccgaagcgcgagcccgcgcgtggggcgaggcgggaccgcgcaggcgcagcgggaagcgacgcagaaagct

SEQ ID NO: 39690 - DNA, 122 bp, Homo sapiens
aggaggctgagacacaagaattgctggaacctggcagcagaggttgcagagagctgaaatcgtgccactacactccagcctgggcaacagagcaaaaccctatttaaaaaaaaaaaaggctg

SEQ ID NO: 39691 - DNA, 122 bp, Homo sapiens
ccagggcctcccaggtctgggctggcagccacagttgaggttgcttttggtttacagtgtcgggctctatccgcctaagcacgcaatcaagtatggcttctccgcaaagatgatgaagaagg

SEQ ID NO: 39692 - DNA, 122 bp, Homo sapiens
aacagctgctcgctcctgttctttccccgtcaggcgtgtgagacgtgtctcctttctctccgccaagagtgaactccctttgaccaggcctcgtggtggttcagggagagatgttcgtgaag

SEQ ID NO: 39693 - DNA, 122 bp, Homo sapiens
gtacggagcaggagcaagaggtcgccgccagcctccgccgccgagcctcgttcgtgtccccgcccctcgctcctgcagctactgctcagaaacgctggggcgcccaccctggcagactaacg

SEQ ID NO: 39694 - DNA, 122 bp, Homo sapiens
tggggactgagaaggaaaggacagacagacagacagacagggggttgtacagaagaggtccggtttcttgaagcagctggaagtcctggatagttcccacctgaaagtctgtttgcaaaggc

SEQ ID NO: 39695 - DNA, 122 bp, Homo sapiens
aggcggaaggtagatggtggaggggcgccgcggcggatggaggtgcccagggccacagaccgctcacagcggtaccggggcggggagcagggcgggcagggaatcggcccgcccttcgtcct

SEQ ID NO: 39696 - DNA, 122 bp, Homo sapiens
ttgccaaggactgctttgtttgctcttcccttccaggaggaagggaacgaacgacacgaacggcgtcgtgggtaccctgatgcccacaatgagtttataaataactgcgcataggtggcgcg

SEQ ID NO: 39697 - DNA, 122 bp, Homo sapiens
tgtccctgcccgtggtgctcccgggctcctgctgccccgtggctgggctttcgggtgggccgcaggccgggggcccgggcgccgctgccgccgccgctcaggagccgccgctgcccccgctg

SEQ ID NO: 39698 - DNA, 122 bp, Homo sapiens
gcccccgcggaacaccgggcgcccccggcctccagcagtgggaagcagcccgggggctgacgctccctgcaggagccaggagcaagcaaacaagcagcttgagtgcaggcgcggggacgggc

SEQ ID NO: 39699 - DNA, 122 bp, Homo sapiens
cattttgtgcttttgaatgaattcaagcagaggtccttggcaacagcaatgccactccaacggggcatttcggaaatgccaggggtccctctggttctcttaataactcagggagccagaat

SEQ ID NO: 39700 - DNA, 122 bp, Homo sapiens
cagcactgtgtctccactcctctcctgtaatgtgaggcagggctgtaaaggggaccagcccgtgggcagctgctcactcacccctcggaacctgatctcaggtgggtgttgtgaggagggag

SEQ ID NO: 39701 - DNA, 122 bp, Homo sapiens
ccacctcctcagcagctctgagagggaagtctgttctcttccccacttcgctcagaggcccgaaggcagtcccccaggatcacaccacaaggaagtgcctatgtgagatttgaacccagaga

SEQ ID NO: 39702 - DNA, 122 bp, Homo sapiens
gacgactagtcccaaagatgaagggttactcttccctccttccccaggctgtggagcaggcggttcctggcatcctacccacctccctcctccctccctgcaccacggctaaaaggaaccac

SEQ ID NO: 39703 - DNA, 122 bp, Homo sapiens
tgcggccaggcttccaagtcgagctgccgtttgggtgggaccagaagacgggctagtctgcgccccaggatccctccctgaggacaaacagaaggccgggtcctcccttctcccgcttgtcc

SEQ ID NO: 39704 - DNA, 122 bp, Homo sapiens
tgtcaccatcaggcaagaccctccaccagcaaaaagattatgccttgctaaaggcttaaacgattgttagcattttttaccaatcaaatattttatttttatttttgaacttttagatttag

SEQ ID NO: 39705 - DNA, 122 bp, Homo sapiens
ccactttacagataaagaacatgaggcccagagtgcaggcagtggcacaagtggtgcagccgaagctgtgttcagttcagagctgcaagatgccacatcccagggcagtttcagttctcaag

SEQ ID NO: 39706 - DNA, 122 bp, Homo sapiens
catgctagagggctgacggagatacagaagctcatcgcaagctctggtttctcttcaaaacgaatacatcttttaccttttactgcagattttcgtggagaggaacagttgttagtaacctt

SEQ ID NO: 39707 - DNA, 122 bp, Homo sapiens
ttcacaggttgaagacaccgaggctcagagaggggaaatgactggcccaaggggacaagacgcatcttaagatgtcaagtcctggacccttccctgcaaggccccctgtggaaggaaatagc

SEQ ID NO: 39708 - DNA, 122 bp, Homo sapiens
aggccgccacgttcctgctgtgaaaaccttcacgtgcgctcgcagcctcggctctacagacggttcagtccgggaaatggtttaaggaggccgtgcacagaaacagtctttgcagccaggga

SEQ ID NO: 39709 - DNA, 122 bp, Homo sapiens
gccttcagcaatttgagggcgctttgtttcttacgttgggagagaaatccatcaggaaatcgacgcccaggatcagatgcagatcctgggatccttggctctgagtagcacggtggaaaagt

SEQ ID NO: 39710 - DNA, 122 bp, Homo sapiens
atttcatagacggccttggctcacgatcggtttggcacttcgcgttcctaggccacaggacgtcgaacctcgggcgacagcagcctcccgctagggggctcccgacttcccacggaggttcc

SEQ ID NO: 39711 - DNA, 122 bp, Homo sapiens
atttttgtatttgtagtagagacggggtttcgctttgctggccaggctgtcttgaactcccggcctcaggtgatccgcccacctcggcctcccaaactgctgggattacaggcatgagccaa

SEQ ID NO: 39712 - DNA, 122 bp, Homo sapiens
ttcatcagattcccagaggggccatgaggcaagacaagccaggaaccacctagccagaggcgcaaaccccgaacagttctccatccgtgcggcttgcttgcctccagggatggggcgctcag

SEQ ID NO: 39713 - DNA, 122 bp, Homo sapiens
gtccgcgctgggtacatcaccatggaagcaatcggtttggtcacgtggtgcccttggttacgcccggtggcagctgtggggtctagggctcagacgggggccattttgccagaggctgcctc

SEQ ID NO: 39714 - DNA, 122 bp, Homo sapiens
aggcgaggaggccccggcctgtgtcaggattcgcacttggatgcccgaggggctccagggcggcctcacccaggcgccggccgtgtgcggcacataccgaactgctgcagggagtacacggc

SEQ ID NO: 39715 - DNA, 122 bp, Homo sapiens
ttacgaacagactaaggtacttttaaaaaattacaatgttaggctgggcactgtggctcacgcctgtaatcctagcactttgggacaccgagtcgggcagatcacctgaggtcaggagttct

SEQ ID NO: 39716 - DNA, 122 bp, Homo sapiens
caggtgccctaggggctgggctgagatctctccagcagaaggatatcatcttggcagcctcggcctcaccctcggcctgcacaattttctgccgctgttcctgctttgctttttctaccaag

SEQ ID NO: 39717 - DNA, 122 bp, Homo sapiens
gactctggaattttaaaaacttgggtttaaatcctgatattcagggtatttacttaatctcgctgacctcagttttttcacctgaaaagtgggataacaatacccactcattggcataagaa

SEQ ID NO: 39718 - DNA, 122 bp, Homo sapiens
tgctcagggcctgagtgactgtgcccctttagtgctgaaagaccagaggtgcaattgtcccgtcctcactgctcaagcccccaggcccctcactccctgactgtactctagtctaatggtct

SEQ ID NO: 39719 - DNA, 122 bp, Homo sapiens
tgaggtgactttcagcctggagtccggttccgagtacctgaagatcgacaacctcactggcgagctgagcacgagcgagcggcgcatcgaccgcgagaagctgccccagtgtcagatgatct

SEQ ID NO: 39720 - DNA, 122 bp, Homo sapiens
ctggggcagaccccgctctgtaccccagtcccagagccccggctgccacaccgctcttcccggggcaaacagggacagcctatccgggcgtaactaaggctgcctctgccataaagccgtaa

SEQ ID NO: 39721 - DNA, 122 bp, Homo sapiens
gtcgttttctcgaagccagagaaatttgtcctgtccgccccacccactcccctaagatggcgccctcgcgaaacccgcccggccacccccgcgagggaatattcccacgccttccttccgtt

SEQ ID NO: 39722 - DNA, 122 bp, Homo sapiens
acagctttttctcttttggtctgtgtctctatcactcgccgcggtcagctgccgcaccaccgcatcaattctttggcatggctaggcaagaaccttaggcgttacatcttggcgagccagcc

SEQ ID NO: 39723 - DNA, 122 bp, Homo sapiens
ttccgcggccgtgcttctcacccttcaggccactgtagacagcagtcaggctccgggatccgtacagccggcgcccatcactcccactggagaagacgtgaagcccatcgatctcacagtgc

SEQ ID NO: 39724 - DNA, 122 bp, Homo sapiens
ttgccggcatacactggaaacgcgcatctgcgtctgtctgcagagatgcagggtcttagacgcggtgctggggattccagtgaaacgctgggcaggatcccaagtccgccagcaatggaatg

SEQ ID NO: 39725 - DNA, 122 bp, Homo sapiens
gggccgggcgcactgacagtgagtgtcatccatctcccccttgccagcccgcctggtggccgccagcgtttcccggccaggactcacagagcggctcgctgctgccccccggcggttgccgg

SEQ ID NO: 39726 - DNA, 122 bp, Homo sapiens
attggccgctagctctgttttgactgcctgtacaaagcgagtagacggcgggggatggggcgattagggaccggatttgggaaaggaggcagcagccccttcccctccccctccgtcctcgc

SEQ ID NO: 39727 - DNA, 122 bp, Homo sapiens
cggcacgggagggaggggcgcctttctcttttctcctccccctgcagcccagctgcactgcgtgggggctctccatctccacgcaatcagcaggcggaatccctgccctggagcgccctggc

SEQ ID NO: 39728 - DNA, 122 bp, Homo sapiens
acgccggctgagatgcagaatcaggcctctgagctactgagctggaatctgccttttggccggacccggttgattggaaccgcgttcatttgaggaatgctccctgcgaccagagctccacc

SEQ ID NO: 39729 - DNA, 122 bp, Homo sapiens
tttgtgatgataatgatgatgctctttgtttcctctgggtacagaccctgctgcccctatcgttggaggacaggagggaattgtattgagcttcacttcctcctatggagttgtgctaggag

SEQ ID NO: 39730 - DNA, 122 bp, Homo sapiens
gtcatagacatagaacaggtgggatgtaaacagacgggctgggcctagctgctcctttcccgcctcactcgagtctggcaccagattggccgctcccagcccgctccgggtgccggcccctg

SEQ ID NO: 39731 - DNA, 122 bp, Homo sapiens
ctgactgaatcagaagctttgttaatacctctgttagagcatgtgttatgctgctgttcacgctggaagctgagctccttatagcgacacttgcagcatgttgatctctatattcccagcac

SEQ ID NO: 39732 - DNA, 122 bp, Homo sapiens
gattggtggctgagaggcctagtcgactgtttcttagctagaggtacgtgtcacccagtacgcggctggagttttgcataaattattccgataaggagcggggcggggctctgtgcatagat

SEQ ID NO: 39733 - DNA, 122 bp, Homo sapiens
accggggcgcaggtggaggtggttgatggcactgggcgctgtggagcagggggcggtgctcgtcgcggaggctcgggccgtacaggagcccacggaggggtgggccggcgggcggctcagac

SEQ ID NO: 39734 - DNA, 122 bp, Homo sapiens
gccagaagtttggggaagttggagcgcaagagcgcacacagatgcacaggtgtccgcgttcgggcaggcacgcgcggcggggccaccatggcgcgctgggtccgaggaggggcggtggctgt

SEQ ID NO: 39735 - DNA, 122 bp, Homo sapiens
cagcgcgcggagtggtgagactgagccgcgatggaacgcgctggggagacccagcctgttcggctccagggttcggagacatcctgggctgaaggcggcggcgaaccgaagaagccggcata

SEQ ID NO: 39736 - DNA, 122 bp, Homo sapiens
ccgggtttccgctcccagggctcagcctgccttgggcacctacggtatgggagcctttaacgtggaaaggaaaggagatcgatcactcgagcctccacttgccaagcctgtggaagcgagac

SEQ ID NO: 39737 - DNA, 122 bp, Homo sapiens
caaacttgtgggctcaagagatactcccgccttggcctcccaaagttctgggattacaggcgtgaacctccacacccagccaaggaacttttaaagttggaggaggcctttataagttgtat

SEQ ID NO: 39738 - DNA, 122 bp, Homo sapiens
gtctccgaatcctgagcccctgacccctcctcatggtggccgagtccctgcgcgaaagggcgcaagctgtcacccgccgacctgcagagggcccagcacgccctgccccacaggagggcggg

SEQ ID NO: 39739 - DNA, 122 bp, Homo sapiens
aactctcacctctgactgaccgtcagctttcatgcaagcaggaagtgaaggctaaggtggcgttgtaaactacctcgttaagcattgaaggggtgccagaacacatagctaactggcaaaga

SEQ ID NO: 39740 - DNA, 122 bp, Homo sapiens
tgtttcccttactatcttgcgcaaacacctcagctgccgcctcggaaaaacagccttaaacgatcatggtcgtgtcgtattgtgttaaaagcaagtgtcatttcacagtcacacaagcaaga

SEQ ID NO: 39741 - DNA, 122 bp, Homo sapiens
tgcaccggccagggcagtcgtgctgggctcctcagagcaggctgttgcagttgctctgttcgcaggaaattatttggggcgagagggaaagagatgcagctcgcggtggctgctgtaccctt

SEQ ID NO: 39742 - DNA, 122 bp, Homo sapiens
tcggcgcttgcagaacccagaagtgaacagcaggcgacccggaaggtttgcgcgcggctccgcagcgagccagagccggagcccgagcccggagcctgtgccggagccccagcccggccctg

SEQ ID NO: 39743 - DNA, 122 bp, Homo sapiens
acaggggacggggactcccggctgttcaggggctgtacctctggatacaagaagccggagcggtccctagaaggcaggcaaaatgaggaagagcccctcacctccggaggcactgtgttctc

SEQ ID NO: 39744 - DNA, 122 bp, Homo sapiens
gagcgagccaacagataaagaaggatatttatttttgtttgtaatgtcgacgtcttctttcgggctcgatcaaacaatcaggagatctgtgtaggccacagcgtcattgcacgccggggtcc

SEQ ID NO: 39745 - DNA, 122 bp, Homo sapiens
tgtatatcatataaacaaatatgcaaaggtatattgaggaaagctggtttaatatatgcacgttagtttggggaagtatatcaaatccacttaaactgcttttttggagaaaaagtccttac

SEQ ID NO: 39746 - DNA, 122 bp, Homo sapiens
tagcacatgcacctgagccacctggcactcctcaatctcagcaaagattttcaagggccacgaccccagtgagtacaagggagcctctgccctgcggcttttctgtatctggaaacaacact

SEQ ID NO: 39747 - DNA, 122 bp, Homo sapiens
aaaaaaaatttcaatttacagaatttaatccactggtttcagtcagagtttacaactctgcgtttattctacacaaacattctaagaggcaacaacgatagagctgtggccacctttgttac

SEQ ID NO: 39748 - DNA, 122 bp, Homo sapiens
cgggggatcgggatcggcggcgggggctgcggccttgcagtggaagcatgggcggcgagccgggccgtgctctcggggcgcggggtccccattttgggcgagggcggccgctcccgcgctcg

SEQ ID NO: 39749 - DNA, 122 bp, Homo sapiens
gctcctttctctcatctctttaaagcatggtaacactgccctgtttgagaatctactgttcgctttctattacttattctctgaagtctaaattcttttggttagttttcaggcttttcatg

SEQ ID NO: 39750 - DNA, 122 bp, Homo sapiens
accctcaagatgatcccgatatcactgcaaaatctgaatgttttcttgtatggggggctccggctttcacatctggcaaatattattgggaggttcacgtgggggactcttggaattgggct

SEQ ID NO: 39751 - DNA, 122 bp, Homo sapiens
gagggagaggcgcgagcgggaaccagggctgtgtgcggcgcttgcgggccagctggagttcggtgggcgtgggcttggcgggcccggcactcggagcagccggccggccctgccggccccgg

SEQ ID NO: 39752 - DNA, 122 bp, Homo sapiens
agttatgattatggagtcacagaattctagaaatcctctattccagtcttcgaatcaggccgcatattggaatcacccggggagctttaaaaattcctaatattggggtcccacccgcccca

SEQ ID NO: 39753 - DNA, 122 bp, Homo sapiens
ccttgtccaggcctggcctcctgatgaatgtaagtgcgcctgacaaacccgtgctatggccgcgcccagaggctggcgcctgcttcccagaggctggcgttctggcccctgtgggccctggc

SEQ ID NO: 39754 - DNA, 122 bp, Homo sapiens
catatgtgaaaaaacacttcaatactggatcgtgaacaatatgtaaaactgctttggtagcgcagttactgctactgaacattgttatatatgctattcaaaataggtgcaatagttctgca

SEQ ID NO: 39755 - DNA, 122 bp, Homo sapiens
tttttttttttttttttatcatagtaactgattattctgtttaattctctcttttccgggcgttttctctcccagaactcctacccttctgttccaatctaactaagttcctgggacttccc

SEQ ID NO: 39756 - DNA, 122 bp, Homo sapiens
tctttaatctccagctcagcttcaacaattcaacgctgttctttctgaaaaagtacacatcgtgccttctctacttcgctcttggaacataatttctcatggcaggtatgtgtgatttcagt

SEQ ID NO: 39757 - DNA, 122 bp, Homo sapiens
tgtggtgaggggcaccccagggtgggcagtacctcaggatgcattttcaacacagcctcacggtgcacagaaaccgaaaaccgcatgccgacaaacggctccctcggcaaacatttttattt

SEQ ID NO: 39758 - DNA, 122 bp, Homo sapiens
acggcgcgcgtcagggaccgcggcaggctgtgtccgtctgtccgtccccgtctgtccgtccgccagcccgcccgctcccggtgccctccgcaggcctttccgcagcaagcccgctcccgccc

SEQ ID NO: 39759 - DNA, 122 bp, Homo sapiens
gggaggcgctgggcacggggcctggcacgtagggggccttcattgcatctctcttcccttcgcctttcttgtccacgacctgtcctagccaaggccaagtggggtgggggaaggagcagagg

SEQ ID NO: 39760 - DNA, 122 bp, Homo sapiens
ccatgccaagtcagaagaggttataatttggctcttactcttttattcaggcacttctttcggctgcccagggttttcagcttaagcaaataaattacccttctccactggactctgtgttc

SEQ ID NO: 39761 - DNA, 122 bp, Homo sapiens
cagggatggaggtgcccagggcaacgaagacaacagcattgacagagtccttgaggccaacggtgcagccgaagtgggaggcgaggtccccaatgagggcggtgagcaggccgatgaccagg

SEQ ID NO: 39762 - DNA, 122 bp, Homo sapiens
acagtgtgccctccatcatattctgttaccgtattttattcggactccaaaggaaagtgtcgcttgggggagggggaagcactttgatgagcggcggccgcggccccttttcactcagcggg

SEQ ID NO: 39763 - DNA, 122 bp, Homo sapiens
atgctgccaggtcttgggactgaagaggtgaccaaagtgcctccgaactccagctcctaccgcagtagggcagatacagccatgaaaacagacaaatgcaacagggcaagatcacgacgctg

SEQ ID NO: 39764 - DNA, 122 bp, Homo sapiens
gaaaagtttcaaaccttcaaaaaattggaaagaatgggaagatgcccccagcaccccaggcgattgcatgcgcgtgctcgctcatctatatgtgcgcacgttgacccacgcgtgctcgccct

SEQ ID NO: 39765 - DNA, 122 bp, Homo sapiens
tgtttcttgattttgccatcatagatatgattatgaggctaattaaacagtaatcctaaccgctctgagaatggacctaagaaatgaatgtgagaaagaaagtagaagcagcccacttgcta

SEQ ID NO: 39766 - DNA, 122 bp, Homo sapiens
caattcctggccagccagtctgagatggaaacgtcctgggctgagcattttggttttaaccggcttacagctgaaagttcagattctctctcccaactccgctcatgcgctttccaaaaatt

SEQ ID NO: 39767 - DNA, 122 bp, Homo sapiens
ctccgcgctccctccgcgctcccgaggccccgcccctcccctcgggccaacgtcacgtgccgccccatccccctgcgcctgcgcactgcttatttcccgctgtcaggatgaggaggcggagg

SEQ ID NO: 39768 - DNA, 122 bp, Homo sapiens
tagctgtctttatttttccactcctcatcatcttccttcagccctcagctcctgcttgctcgctggaatgctccgtacagcccccagctaaggaaccagaggaaacagctgtgtccagggtg

SEQ ID NO: 39769 - DNA, 122 bp, Homo sapiens
tctgtcaagaaagagaatctagcatcctacctctatcactctcagctgtgctgctgcctgcgggctggagaagcagtgcttggtgtgtctgaatccacaaggctggttaaacattgcagggc

SEQ ID NO: 39770 - DNA, 122 bp, Homo sapiens
tgtcaatcaagaagccactggggtcatttctaggccgcattcacttcaaatgtagaagggcggtgagcacagcgacccccagccatctccagagaccctgccccatcactctgaggaagaca

SEQ ID NO: 39771 - DNA, 122 bp, Homo sapiens
catcatttagcatctgccctcgggcttccgggtccatcacgtggttactgacaggcaggccgcgcatgcgcgctgctactccgccgagcctacgtgacacgacgtcaagtggcaatggcggc

SEQ ID NO: 39772 - DNA, 122 bp, Homo sapiens
cagcctttcttgaccagctctttcctgtctctgcatttataagagcaagacaatggattgcgaaagtgtgggcagtaaatccaccagtgtcatgttgctatatttatccataaagaattacg

SEQ ID NO: 39773 - DNA, 122 bp, Homo sapiens
ttagcaactgttaaatagctaatgtctactttctggagaataaatgctttgcaagaccctcggcaatgaaaccaaagaaagaatttaaatagcctcaccgaataattagtcagcttttcgaa

SEQ ID NO: 39774 - DNA, 122 bp, Homo sapiens
ctcgagcgcggcggccgggggtgagcagctcggctgcgaagcccaacaggtagaacgttccgagaagccttccgggtaacgcgggtctccccgccaagccgtggctcccctgctccctttta

SEQ ID NO: 39775 - DNA, 122 bp, Homo sapiens
gatcgggggaccgaggaggaagcgcggggtcccgtccgcctcgacccctaggacacgaagcgccccaaagggccactgtgcacccccaacccgcggcggggacccccaaccccgcgccggcg

SEQ ID NO: 39776 - DNA, 122 bp, Homo sapiens
ggggaaagccctattcgagaggagatgggcatctgacctgggaagcagaataggaatctccgttgagcccaggcatccccagaaacatgtctccagatcctgagagattgaaagagccgcca

SEQ ID NO: 39777 - DNA, 122 bp, Homo sapiens
gaccctggggctgcagccgggggttcagttcggggaagtggagctgtcgcggaaggtaaccgaactgaggcaggctcccaggactacagccttctgcaggcctactacagtcaggaaagcaa

SEQ ID NO: 39778 - DNA, 122 bp, Homo sapiens
cgaggggagctggcgcgggaggccctcttcgtgcatgtgctcagcagctgggttcaggcccgggggccaggacaggcagggcccagcctcagaaacctaaaaaggcactgagcgagcgcggg

SEQ ID NO: 39779 - DNA, 122 bp, Homo sapiens
cgctgaggacgccatcttaactccgggagccccacagggaccccccagctccgcgcgccccgaatgcgggcaaaacgctatcgcttcacccccaattccggctcggggcccgcccacggcgt

SEQ ID NO: 39780 - DNA, 122 bp, Homo sapiens
ggcctcccaaagttctgggattacaggcgtgagccaccgcgcctgacccagtctggcattcgacacttgctgatctggcctaagttcccattctacaggaaaggaaactgaggcccaggcag

SEQ ID NO: 39781 - DNA, 122 bp, Homo sapiens
gaacagccctcatggcaaacgtctcagagcgtttttccactctgaaaatcgcggagaccgcgcctgagccacagtccagtttttaaggccttggtgtcaggccgttttgctgacgagaaagc

SEQ ID NO: 39782 - DNA, 122 bp, Homo sapiens
cagagtccgagcccctgaccgcccgcctgccgctcccggcttcgccgtgcacacgtctcccgctctccccggttcgtttttcgccacagctgctggattcgcgtctcgccagtggcgctccc

SEQ ID NO: 39783 - DNA, 122 bp, Homo sapiens
attcaaaggcaccacaatgcagaaaatggtcccacaatggtgctgggacaactagatgtccgcatgtgcaaaagaaatcaaacagaccctacaccctaaacagaaattaatgaaaaggagct

SEQ ID NO: 39784 - DNA, 122 bp, Homo sapiens
gcagctttcagggaccgattcaggacattatccctgtggttccctcagtgaaaggagactcgaagcgcgactagaagtcgccgggccccatagatctgcggtgcccaggccgtaggcggagg

SEQ ID NO: 39785 - DNA, 122 bp, Homo sapiens
aggagagaaacatgctaatcatgttctttttccgcttcctcctgcttgcaattagctatgcgagccaagggctctctctcctctcttactctcttccctgaggaacaaaccctccaaggaga

SEQ ID NO: 39786 - DNA, 122 bp, Homo sapiens
cacggctaggccaccttcctctgcaaccaccaccatcccatgaagtccaggagctgtggccgttgccttgctctcagctgcagcagaaagtgccagagcgtcacaggtgggtccatcgccgg

SEQ ID NO: 39787 - DNA, 122 bp, Homo sapiens
cggggcaccaggaggactctgaagagcagagcgccaggcacggagggcacgtgtggcaggcgggaagttcagggataggcagagctcacctgtgctgctagacaccagctccactgtggctc

SEQ ID NO: 39788 - DNA, 122 bp, Homo sapiens
caggcgggggaggccgccctttatcccggctgaggagtcctcgggggctgcagatggagccgcggctacccggaggagaaagagcccggcttcgtggaggcagcagcccccaggcataggag

SEQ ID NO: 39789 - DNA, 122 bp, Homo sapiens
gtgcctgtttaaacgtgatgttgtgcagaaggaacagcatgtacaggacagagatagagacggaggctactgaaacactttttttgttgttgttgttcacctatttggttgcttgtctcttt

SEQ ID NO: 39790 - DNA, 122 bp, Homo sapiens
tgtgtgtgtgtctttctttaacccttgccttcttttcaaaacctaacacgagtagacaaacgttctttctgaagagccagattgtaaatattattgtaggctttgcaggctatagctcttct

SEQ ID NO: 39791 - DNA, 122 bp, Homo sapiens
tggaagctacaacatggatttatggaatctgtcttggtttctgttcttggatgctcttctcgtgatttctggcttggtaaggaaacagtatatagaagataatttaaaaattttggggcagt

SEQ ID NO: 39792 - DNA, 122 bp, Homo sapiens
taaggggacgatttccctggagctcctgagctggaggagtgacccctgtcatgagaaatgcgtgcaattatacatcctgtttcatgtggtggaaaagaaaccaaatacctctggaatgctct

SEQ ID NO: 39793 - DNA, 122 bp, Homo sapiens
aacagagctagtcctagtccctcgcgcggccagtttggccgggtgttcccaaaaataaagcgaggagggaaggtacagacagatcttgaaaacacccgggccacacacgccgcgacctacag

SEQ ID NO: 39794 - DNA, 122 bp, Homo sapiens
gaggaggccttcacggacctctctctcgccttccctcctcctgagcgctgtcgccgccgccgcctgggctctgtgatgcgccccacagaagacatcacagcccgggagttgcccccaccaac

SEQ ID NO: 39795 - DNA, 122 bp, Homo sapiens
cgcccaccgcggcgtcccgcgccccgggcccctggcttcagaagactggccgcgcgcggacggcagctcgggactcacaaggactccaggtgcttgagctgctgcagctgctgcgcgtcgtg

SEQ ID NO: 39796 - DNA, 122 bp, Homo sapiens
gcctcgcaggagcactggaaggagccggccaggttggtgcagtggtgctcgcagccgccacggctggaggcgcactcatccacatctgcgggcgacccgggaccactgaggcctgtgctccc

SEQ ID NO: 39797 - DNA, 122 bp, Homo sapiens
cttgaaccgctcctgaaaatcctgatattttttcccgctgcagcccgcacgggtcaagcgcgcgggggctgaccaacactttccaggtcaggtcgagttgattgctcccagctcacgctccg

SEQ ID NO: 39798 - DNA, 122 bp, Homo sapiens
gtccaggatcccagcagtaactcactttgtctctccttgtgtctctcttccatgcttccacgccccttcgaccaccttgaaggtttatctgcgggattcttttgggttgaagactctattgg

SEQ ID NO: 39799 - DNA, 122 bp, Homo sapiens
ataaattgaaagtgtcaaatactgcattaggaggggtgatcgagtgaggcgggggccgaccgcctggccttcgcattgggtagtttcacaaacccgaggatttaggcaagtttctttttcca

SEQ ID NO: 39800 - DNA, 122 bp, Homo sapiens
cagtttccagcttggccctggacttcctgtttttcccacctagctggacgtaaaggttgtcgcgccttggaaagttaagtcactacacccgaatcgacgcactcttggctcgcctggctatg

SEQ ID NO: 39801 - DNA, 122 bp, Homo sapiens
aaagcgagtcccggccggtcatggttccttagcaagcaaggcgcgagcctctctggatcccgtttgcggagggcccagcttagaggaagctttataggattgggctgccggtcgggcgcggg

SEQ ID NO: 39802 - DNA, 122 bp, Homo sapiens
gaacctcagccaccaccagagggtccacagcggggagaagccctacacctgtgccgagtgcggcaagtccttccggtggcccaagggcttcagcatccaccggaggctgcacctgacgaaga

SEQ ID NO: 39803 - DNA, 122 bp, Homo sapiens
gaagtgacttccattaattggtgtgaaatggggagaattttatgtgcacaggcatagagacggacatgtttaggtgaaggtgaagaaaattagttcaagtgaccttgattagaattgaaatg

SEQ ID NO: 39804 - DNA, 122 bp, Homo sapiens
gatgcctgattgttacaggttcttctcaggtgccctcccaggccagtcctgcagcatctccgtgggcctcacattcatccaaggctaaggatcctacaggtttctggggactgatcctccag

SEQ ID NO: 39805 - DNA, 122 bp, Homo sapiens
ggcgtggggcgggaggcagccgtgcccgggatttcgcgctgcccccggcgtctccttccccgtgcttttgtgacttgatcagggtagatttattttccgatccactggtttgtcaacatgtc

SEQ ID NO: 39806 - DNA, 122 bp, Homo sapiens
gatgatgatgatgatgaaaaaaatgcagcatcaacggcagcagcaagcggaccacgcgaacggtgagcagccagagcccgggcacccgctgccaaatccgatcctgtcatggtcctccagcc

SEQ ID NO: 39807 - DNA, 122 bp, Homo sapiens
tcccttggacagccgcttttctcaggagggtccccaaccccctccgagcgtttcctcagacgcccctacttggagcaagtctgctccctgtcacccgggaccctggccaccctcggccttcc

SEQ ID NO: 39808 - DNA, 122 bp, Homo sapiens
tggaacgttcttgggcagagctgctcaatgttaatgcttcaggctgaatcttcgcaaagacggtgatatgatatgtaacttgtctgttcagagcatggaagccctcatacattcacggccag

SEQ ID NO: 39809 - DNA, 122 bp, Homo sapiens
ctgctttctcagagcccatggttaagtgggaaagtgggagaaaagctcattatgatccagcgagtcatgtattagaatgggacaacagcagccacaacaacaacaataatggccactattta

SEQ ID NO: 39810 - DNA, 122 bp, Homo sapiens
tgaggtctacaggggataaagtccctgagaaatggagtgctttgttagatggagtggagacgaagggcatacatcctgcttatcatgcacactcaaggcttgatgcaatgctgacttgacag

SEQ ID NO: 39811 - DNA, 122 bp, Homo sapiens
attacattcagtattgtgtgagagctcccaaactagctgggaccgttggatttcagagtacgtgaaggtgaagcctgtgaggttcccccaggagtgctgggcagaaccctgagttttagaac

SEQ ID NO: 39812 - DNA, 122 bp, Homo sapiens
cagcctgttacagttttgtgtggaatgtcttggtgagacgggtagattgccagtgggttgcgttttgggtcaaggggaattatactcagggcactaaccctttgtggggctgcccaggtcct

SEQ ID NO: 39813 - DNA, 122 bp, Homo sapiens
agtcaacaaataattatttgcctgtttaattaaagtgttcgggcacgggggaaacaaagacgagtttgcagactccagcaaaaatcttaagagtttaagtatttgggccgggcgcggtggct

SEQ ID NO: 39814 - DNA, 122 bp, Homo sapiens
aagggcaagaagtacaagcccctggacctgcggcctaagaagacacgcgccacgcgccaccggctcaacaagcgcgaggagcacctgaagaccaagaagcagcagtggaaggagcggctgtg

SEQ ID NO: 39815 - DNA, 122 bp, Homo sapiens
gtatccattaattagtatttgccctggagaaatgagaaaaatcagtaacaacactggcaccgcagtgcacactgatgagcagagcaggccacgcagcgtttagtcaagcaggtggctccagt

SEQ ID NO: 39816 - DNA, 122 bp, Homo sapiens
ccaatgcaaatgagtcagaggatttgcttcagacactgagataattgtgtaactctacagcggaaaatgccattggagagtacttgctgacctcacagttgaaaaaaactatttaaaagatg

SEQ ID NO: 39817 - DNA, 122 bp, Homo sapiens
cgtggcactgatatcacctcagtcaatgaagtggccggtgcagggcacagggccacctgccgctcactcagctgccccttatcagatgactcaagtggataaacaaggtcattaactcaggc

SEQ ID NO: 39818 - DNA, 122 bp, Homo sapiens
tggagtcttcacagatggagtaaggagtggggacaggagccttgctggggtcctaagcaccgagaggagctgtgaagctgagtttggggaccccaggtcctcaccatcaaattttctgtgcc

SEQ ID NO: 39819 - DNA, 122 bp, Homo sapiens
gagtacaatgagtagccagccgcctgccccacctaccccgccgttccggactgccgcctgcgccgagcctaggccgcccagcctgactgaaactgccgctgctgaactcagcgtatccagtc

SEQ ID NO: 39820 - DNA, 122 bp, Homo sapiens
cggctggaacttacgaggcagacacctgctttactgcctttacagacagaaaagctggagcgtagagagatggagaagcggcaaagcccacacagctgagggtggcagagccagccaggaga

SEQ ID NO: 39821 - DNA, 122 bp, Homo sapiens
aagctacagcttgcaggactccctgagatcacagcccatgattgcagcctgtcctgctcacggactgtcacctagtacagcatgttataagcagtgaagaatgtgtttaagtataaatagct

SEQ ID NO: 39822 - DNA, 122 bp, Homo sapiens
cactgcgcacaacacaaagccccggaagtcgggctgccggtggcgaaaaccagctaaagccgcgggccggcgccggccacgcctgacacgggagagcagcggctgttcggggcgagaccatt

SEQ ID NO: 39823 - DNA, 122 bp, Homo sapiens
gaatctgagaccaaatgttcagattaagattatatgttgttgcttttcatccagtttttacggtgtttaaacaaggatttggtggagccttgacttctaaaaggtcacactgtgcgacactg

SEQ ID NO: 39824 - DNA, 122 bp, Homo sapiens
agcgtccgggctcccttgccgcagaaggcaggaatccagaggaacggggccagctggcagcgtctgggaaccggcatttgttctgaacaggcagtacccagctcagagcagacgtggttctc

SEQ ID NO: 39825 - DNA, 122 bp, Homo sapiens
acacaggagcaggaaagctgatccaaaaaagtgtgggaagttccacaatcactagaataacgagaaaatctttaaaatgctggagtgggaaggggaactggacagtctaaactcttattcta

SEQ ID NO: 39826 - DNA, 122 bp, Homo sapiens
ttaaaataatgcgagtttgttcttacatgcttggaggccaggattctgagacgagtcttgcggagctgatgctgggtgtggtagggctgctccgtcaggaggctccagggcaaagtccgttc

SEQ ID NO: 39827 - DNA, 122 bp, Homo sapiens
ccgcccccaactcttggtcatcccacgcaccagccggtgcaggttggtgcctgcggccgtcgtgggccgctcctcctcggtcaccatcgaccacagccggcccgcctcttcccggggcggcg

SEQ ID NO: 39828 - DNA, 122 bp, Homo sapiens
cagccggggcccgcctggccctttaaggctgacctagcggggccccaagttgggatgacgcgcagggagcggggggtggagtgggggagtgggggaggggggggtggggaggggggggaggt

SEQ ID NO: 39829 - DNA, 122 bp, Homo sapiens
ctcactcgtcactcaagtcgccggctagccaggcaggttcggcggccttcgctaccgcgccgcttactcctcagaagccgcagctgcgagctccgtggcagccgctgcactccttccggccc

SEQ ID NO: 39830 - DNA, 122 bp, Homo sapiens
agatgagtaggagcccctaatctataattgcaagaggaagcttggcctggcggtttaaaacggtaataaatgtctggagagcactttgtatgttagttacaaagcgctctcactcacattat

SEQ ID NO: 39831 - DNA, 122 bp, Homo sapiens
atcccacgagggactgccggagcccagtggcctcctgccccagcagctgccgctctcgcccgctgcccccagtttagatccgcagcaccggctgggctcaccctgcggccctcgcgagctcc

SEQ ID NO: 39832 - DNA, 122 bp, Homo sapiens
ggtttcttctgaggcctctctccttagcttatagatagccaacttctctgtgtcctctcacgatctttcctctgtgtctgtgtgttaatctcttcttattaggacactgtaagaccaaatta

SEQ ID NO: 39833 - DNA, 122 bp, Homo sapiens
accatctgtcaccggggcctggagggtggtattgggtgttctccaaggacagagcaaacccggaggacttgcaagctggtaacttggtggggagcctggcaagaccctctcatgtcctctct

SEQ ID NO: 39834 - DNA, 122 bp, Homo sapiens
tggtaattcttaggacattaccatggttaccaggcacagagtccagtgccccaacctggacgttccagaagaggccagggaggatctgagatggccttcttcaacttgtatctattgggata

SEQ ID NO: 39835 - DNA, 122 bp, Homo sapiens
gctcctacgtcgctagttgccctggggaggcgacctgtgcctgggaggcgggaaaccccgcggcaccagagaagccaagtgaagtcccagaagccaagtaaaggtgagagaaagagggtgga

SEQ ID NO: 39836 - DNA, 122 bp, Homo sapiens
gcctggtaccctgcggctcccgaaccgggcccttctggtcaacgttaagtttgagggcagcgaggtgagcccatgcgtggcctgcggcatccaggctgctctgtccatggggagcacttcct

SEQ ID NO: 39837 - DNA, 122 bp, Homo sapiens
ttattacctcgattgtgatgatggttccgtgggtttacgcctatgtccgaactcgtcaaacggtacagattaaggaagtccatttggctggttgtgttttgtatagcaattccacctcaata

SEQ ID NO: 39838 - DNA, 122 bp, Homo sapiens
agcaaccaacaatgttttcaagtctagagttcaacactcggccaaacagtgaaccaaatacgaaagcaaataaacacattttgcaaagtttcataaaatgtttacttcccagctatctactc

SEQ ID NO: 39839 - DNA, 122 bp, Homo sapiens
cgacatccgaggctgtgcggtgctggacctggcctccctgcagtgggtggccatgcagtgcgacacacagctggactggatctgcaagatccccagaggttggccggagtggcgctggggga

SEQ ID NO: 39840 - DNA, 122 bp, Homo sapiens
gtagtgagatcctgcaccgtcttcagcagcggggtgtcctgctcagtagcctacatctctcggctacaaatccctctctgaaagcagggctgcaatatgactttcgggggccctaggcactt

SEQ ID NO: 39841 - DNA, 122 bp, Homo sapiens
gctggttacctaacggtccggcccagccagtcaggttcccaaagcccacaccgcgcgggccgccgaggtggcagcacagccacaatcgccccaagggctaaggagcacgtcaggagcacccg

SEQ ID NO: 39842 - DNA, 122 bp, Homo sapiens
gcaggccgacgcgcaggtgaatgggagccctgtgggtctcgaccgccgagagagggggagcgaaagcctcagggctctggaggcagttgacctaaattctaattatggtccttccacatggt

SEQ ID NO: 39843 - DNA, 122 bp, Homo sapiens
tttctcacagtcatcgcccccgggtgcttcggacacgggaggtgctcagtgaaggtggcgcgggggatggctgagtggcagttgtgtctgcagggcagagtcatatcggaatgtacaagcgc

SEQ ID NO: 39844 - DNA, 122 bp, Homo sapiens
tagctacttctttctacgtaaggctacagtgacagccgaaattgctgcctttccatctgccgacttgtgacatagggcttgttctttatcttaatatgttacttagatattctattccacct

SEQ ID NO: 39845 - DNA, 122 bp, Homo sapiens
tcaccctcccgtctccttgcccttgcagttctgggaactggacagattggacaactataacgacacctccctggtggaaaatcatctctgccctgccacagaggggcccctcatggcctcct

SEQ ID NO: 39846 - DNA, 122 bp, Homo sapiens
ccttctgataatccactgctgtccctccttccatctaggtggccaaatgaagaaagtcaccggatctcactgtactttggcaccccaggcctgcttcctgaagcctgccctccccaactctg

SEQ ID NO: 39847 - DNA, 122 bp, Homo sapiens
ctctcacctggccggcgggctgggctactgtcaccactcagcagccaaggacttgggccccgcagcggcggccactcggggtctgccgggtcccctctctttccgcctgctctcggccccgg

SEQ ID NO: 39848 - DNA, 122 bp, Homo sapiens
ccttcctcctcccggcccccgcctcttgcgcgcctgcagcctcctcctccccactgagcccgcccccgacctcccgccccgacgccggagttcctcgcgttcattggctagagggcgcatca

SEQ ID NO: 39849 - DNA, 122 bp, Homo sapiens
ggggacgacaggggaaaacctctccgtggcatctaagtgcaaatgcagtacagtctcagacggaacctgtcaggttcatgacaaagggatatgaagaaatcagctgtgatgcgagaatcaaa

SEQ ID NO: 39850 - DNA, 122 bp, Homo sapiens
gatctaatctataaccatgatatgaaagaaaatgtcaaaattaaattgtaggtcatacaccgggatattaagaagaatttctgcactgactacatagacttcatcagcctggagtcaatcaa

SEQ ID NO: 39851 - DNA, 122 bp, Homo sapiens
gccaaaataataactatgcaaatcacctcaaaatttgttctccttttggcttgcagttgccgatatactacacatacagtaattgaataagaataaaacaaaattttagaagctaaagaacc

SEQ ID NO: 39852 - DNA, 122 bp, Homo sapiens
agccgcgcggcgcttagggcaaggtgcagagggcggcgcggcggtgcagcgagaaagacgcggagagagggcgctgctctgtggctctgcaaccttccgccagctcccacgctttccccgcg

SEQ ID NO: 39853 - DNA, 122 bp, Homo sapiens
gcagatcgcccgtcccgcgttcccaaaagcaccgcgctcgctcagaagctcgggcagcctcgcgaccctcacctacgcctcccagtaccgccgctgtctcaaccgccacccagcccctcgcc

SEQ ID NO: 39854 - DNA, 122 bp, Homo sapiens
tggagtcctataccctgtgtccagcaaggtatccatgacaaacacacatcaggatggccccggtgtgcttcccttttggtaagaatggcccttggcaggagaataatctctggacagacatc

SEQ ID NO: 39855 - DNA, 122 bp, Homo sapiens
agggggacgtggacggggcccagcgtctgggccgggtagccaagctcttaagcatcgtggcgctggtggggggagtcctcatcatcatcgcctcctgcgtcatcaacttaggcggtgagtgg

SEQ ID NO: 39856 - DNA, 122 bp, Homo sapiens
cggaagatgaatcccacattcctggctttgaagctttttgaaactgcagctaggaagaaccgagggagggagggagttgagcagagtttattggctgtctctccagcagaaaattcctcttg

SEQ ID NO: 39857 - DNA, 122 bp, Homo sapiens
ccccgcccctttcctgggcggggccaaggctggggcaggggagtcagcagaggcctcgctcgggcgcccagtggtcctgccgcctggtctcacctcgctatggttcgtctgcctctgcagtg

SEQ ID NO: 39858 - DNA, 122 bp, Homo sapiens
tgagagcagaagaaaaaattaacctcacacacttacctcaaattgtttgcccatctagttcgtttgttgccagaaacttagattcagtagactcaacagcacatgaagcaagaattcccgaa

SEQ ID NO: 39859 - DNA, 122 bp, Homo sapiens
gagccccgttctcccgttccccattctttccccccaggacgcagccacctccagaggcctcgctcacccgcagccggcgcccaaagacagtgacctggccccgagcctgctctttgcgctgg

SEQ ID NO: 39860 - DNA, 122 bp, Homo sapiens
tcgcagcaggaccagcccggctgctacggccgcggatacacgccctcaggcccggcgctgcgcagcttgcggaagctttcccggacagactcgctgccagcggattggctgcgagcagcgcc

SEQ ID NO: 39861 - DNA, 122 bp, Homo sapiens
cctctcccccacgcccctcacctggtaaaccgaggcacagcaagaggctgtagtagaccacgggcacgaaacccaagccgcaggccgagccgggggaccaccaagacagcgagctgttggct

SEQ ID NO: 39862 - DNA, 122 bp, Homo sapiens
ggggcagcgcggcggggaggggcgcagggggcgcgctccgggagccatttgtcttaagaacgtttaaaaaaatacagttcctcctcccccaacccttttgtccctctttcgctagctttctc

SEQ ID NO: 39863 - DNA, 122 bp, Homo sapiens
acgggtagggcttgtgcttctgcatgtggttgtagaacacttgggtgtagtcagatagcacgcgctccgacgggtctcgcaggatgagcagcagccggatggacgggttcatgctgtagact

SEQ ID NO: 39864 - DNA, 122 bp, Homo sapiens
agccccaaaatagtacatagaaagttaattacaacattggttatttgagagtgttggggacgtgggtggtttttatactactctgtctttgaatttaaaatagttttcaaaataaaatttga

SEQ ID NO: 39865 - DNA, 122 bp, Homo sapiens
ctgcacaggcctggaagtcaggtgggtgctggcctgaccctgctgaaggagggtctattccgccagcgtggtgtggaggcggctgggctcgactccctcatggagggaaggaactgaggagg

SEQ ID NO: 39866 - DNA, 122 bp, Homo sapiens
aaatgacagtgctggctgctcaaggctgcagtgagcccaccccaggaggccaggagtgtccgaaaaccacatgtgcttctggaagatgtggaaactctcccagaagccctgggaggcaggct

SEQ ID NO: 39867 - DNA, 122 bp, Homo sapiens
gggctcgtgacacgtgtctgagctttccagtcgtggccgtgacgctctgtgcggaggctccgtccgcgtgctgcctccgtcccctctgccctggacggccactcactacctttgtctctcac

SEQ ID NO: 39868 - DNA, 122 bp, Homo sapiens
atggggagggagtggtgctggtatatatcccggtacacaccccagtgaagatactgggcccggcccctgtagtgcccaggggctaaagcaatagaggggattgctgccccagccacagcgcc

SEQ ID NO: 39869 - DNA, 122 bp, Homo sapiens
ctaacggtccgagaaccgggcagggagagagatgcggaaacggtcgcagacaaagcggggcgaggttttgcccatgtgcatcccgcccaacccccctgcggggtacttagggccaaaccgga

SEQ ID NO: 39870 - DNA, 122 bp, Homo sapiens
cctggcggaaagaatttaaattataaaaacttagaagtatgaaatgtgaaatcatcccgtcggtgcttatttaacaacgaaatcatcccgacacaatgagccatatgtgaaaagtcctcctc

SEQ ID NO: 39871 - DNA, 122 bp, Homo sapiens
acacttttacactgttcgtgggactgtaaactcgttcaaccattgtggaagtcagtgtggcgattcctcagggatctagaactagaaataccatttgacccagccatcccattactgggtat

SEQ ID NO: 39872 - DNA, 122 bp, Homo sapiens
agcgtacatgtgctgcaaggcgagtacgggttggtaaacaaaactatattcagatgagctcgggccgggtgacttaacagatgaggaagtgtctcggggccatcggcggaggcgcagcccag

SEQ ID NO: 39873 - DNA, 122 bp, Homo sapiens
ctaaggtccaacgccacggagctgcagctcacgggttccggtgatgccgccccgcccgggcgagtccccgcaagctgcctcacaggagctgtccaggtggaggcagttctcgcgggagcacg

SEQ ID NO: 39874 - DNA, 122 bp, Homo sapiens
tctatcaaatggcactttctgggtggtggagacctcgctaacccccggcgcaaagaggaacgcagggcaccctctgtaccggcctaggccgtgtctcccaaaagtgagggtctgggggaggc

SEQ ID NO: 39875 - DNA, 122 bp, Homo sapiens
cagtcagggctgaccaggagaggcctggcaacaagtctgcccaggcttggcagctcagcccggggaagggtcatgtcttgctcaggtgtctggtgtgacttgggggtaggctctgcttccca

SEQ ID NO: 39876 - DNA, 122 bp, Homo sapiens
ttccaaattatactctcctagtttcgtggcgttgccataacaaattaacaaactgggtggcggaaaacaacagaaacttattctctcatttggtggaggccagaagtccaaagtgaaggtgt

SEQ ID NO: 39877 - DNA, 122 bp, Homo sapiens
gtaacgagtcttcccgggaaggggcggggtgaggacagagaggagtcgagggtttattctcgcagtagaggaactcctggtggtgggaagagggacccaatggacaaaaccgtttttgtttt

SEQ ID NO: 39878 - DNA, 122 bp, Homo sapiens
taagagctcttcacccttcaccaccttctccacccagcatggccggcacactttggtctacggcacatctccaagtatagagtgggttttgaatgctgttatgtctcaccgtggggatggga

SEQ ID NO: 39879 - DNA, 122 bp, Homo sapiens
ctccctttgagctttggccagatccagagcgggaaggccagcccccgcaccttcccccgacgccaggctctctgggactccccggatcagggcatgggagcagcggcccagcccctcccccg

SEQ ID NO: 39880 - DNA, 122 bp, Homo sapiens
tgatgaggaagagatccagcatgtggtagaggtgattcaaaattccacggccaaagtcatcgtggttttctccagtggcccagatcttgagcccctcatcaaggagattgtccggcgcaata

SEQ ID NO: 39881 - DNA, 122 bp, Homo sapiens
aggacgaggatggaacgcgattcacaaacaccacagtcacaactcaccatctcgcttctgcggccgagaccagaaagaccggaagagaaggcacttccgctatatcacgctcagaagcttcc

SEQ ID NO: 39882 - DNA, 122 bp, Homo sapiens
ggcagctcaagtggccaaggcaagatggtgagtgactaagggtttctttccgctggtcgtcgcggtgcgatggggtctcagcagcctgaggcgagagaaagaggcggctgcccgaggaactg

SEQ ID NO: 39883 - DNA, 122 bp, Homo sapiens
tcgtacgtccctagccaatgtttccttcgagaaactggatttgttagcctctttctttggcgtctcagctcgctcagcctttgggggtgagtttgcatagacctgctcacttcggaatagcc

SEQ ID NO: 39884 - DNA, 122 bp, Homo sapiens
ttagctttgggagtgggtttgggagagggaggaggagccgccgggagtctggcgggagggcggtgttcccgtctgggttcctctctgctgtcccagccccggtagcttccacagcagcctcg

SEQ ID NO: 39885 - DNA, 122 bp, Homo sapiens
gccctgtgcacctgtcatcccacttcacagaggacgcaggggcgggtggttacccaaagccgcagaaaagtttatgcaaaagcagctcgttgtgcagagtgtgccacgtcccacccacaaat

SEQ ID NO: 39886 - DNA, 122 bp, Homo sapiens
ctgcggaagccctcccccacccccgcctcatcccatctcttggcagcccaccctgtgtcccggggtctgcccaggtccgtgctctggggcacggtccctacacacaagctgcccctgctcag

SEQ ID NO: 39887 - DNA, 122 bp, Homo sapiens
cgtgtgtagagggagacagccaggtgatggaaactcattaggttcagaaaccagattgtgcgcgcggttctgagacgtagccaagcgacctcacgcaagaccctctttggggcttagttttc

SEQ ID NO: 39888 - DNA, 122 bp, Homo sapiens
tctggtctgacggacggtaagtggctgtaaatgaggacgttcccagggaacagaaagaggcgcaccccgacgcaagaaggacaagggaaaacattaggagagcggtcacgaacttacgctcg

SEQ ID NO: 39889 - DNA, 122 bp, Homo sapiens
cgcagatagccctagaaaaatacacgtcttccaaaaccagacgtgtaacttctgaacgcacgcacactcacacacacgcaccccgcaaactcatccctcccaccccgcacagaggcacacac

SEQ ID NO: 39890 - DNA, 122 bp, Homo sapiens
ttcactgcaagctataaactctgcaagtggtgcacccgacgtgatcgccttgaagttatgcgtgaaaggaggagagctcatcaattttaagaaaatcccggtaagggacagtcctgactacc

SEQ ID NO: 39891 - DNA, 122 bp, Homo sapiens
ggggaggaggttgggcactgtctggactctcatagccgacagaaagggcaccacagaagccgacgccagcagcctgaaacccaacgctccctgcggtcagccctcccaagaggacctgtcat

SEQ ID NO: 39892 - DNA, 122 bp, Homo sapiens
cgacagtggtctatgagactataatacatatttttactctaccttttctacatttagatgcgcaaataccattgtgttcagattgcctctagtattcagtacggtaacatgctgttcaggtt

SEQ ID NO: 39893 - DNA, 122 bp, Homo sapiens
cttcctggatctctgtgtcccaagagcagcacgctggtgcacttgccacgctctctcacacgagactgctccgtggaagcccttcctgctacatgcagtccccccaaaatgtgccaggctcc

SEQ ID NO: 39894 - DNA, 122 bp, Homo sapiens
tggagcggagcgggctggtgctgggggcgcggagagcgcagtgctggccggggccgggagcggggccgagcgggagcggagtcgggcgtcgggcccggggagccggggccgggcggggagca

SEQ ID NO: 39895 - DNA, 122 bp, Homo sapiens
ctgtcatgtatttagaaaaaaaaaaaatcttctcttccttttcttctcagtaacagaacccgttttacttagggtaactatgcatcagctaaatgatgacatttctcagccttctagctagg

SEQ ID NO: 39896 - DNA, 122 bp, Homo sapiens
aataatatccaggtgaaaatgtttgtgtgtatgtgtgtggtattttacccatgtgacaggcgacttccttgctattaagctataggagcccaaagagagttgctgttgttgttttgtaaatg

SEQ ID NO: 39897 - DNA, 122 bp, Homo sapiens
tacatttcccagagcgacgcgcgcggagcgggcgggaaagagagcgtttcgggtccagtgcgcaggtgcgaaagccatctttggttatataagggaggttcaggaagccattcgttctttcg

SEQ ID NO: 39898 - DNA, 122 bp, Homo sapiens
ttccctttgagtcttcgtgcaactttggagtgtccctgtgggtgcaaaatgcaccgtgaacgtgtaccagggatggaagtaaccctggtgccctgtgcaggggttgctgggaagccactttc

SEQ ID NO: 39899 - DNA, 122 bp, Homo sapiens
ggccttcgggaagcatgtcaaggctggtaacactgaatagggagcaggtactcatctcttcgtcacctttaatggctaaagtgtcatgatttaccccttattgtgcaacaaaatgaagtcac

SEQ ID NO: 39900 - DNA, 122 bp, Homo sapiens
gcttttttggattgtgtgaatgcttcattcgcctcacaaacaaccacagaaccacaagtgcggtgcaaactttctccaggaggacagcaagaagtctctggtttttaaatggttaatctccg

SEQ ID NO: 39901 - DNA, 122 bp, Homo sapiens
ggaggcggaagtgactgatcaattcaggggcgtggggttcgtttagggtaagaggcggctcgggctcttcaagtgtttagagaaattattttaataaggcataaaaattctgttatttcata

SEQ ID NO: 39902 - DNA, 122 bp, Homo sapiens
tccagggctgccaagccgagaggctccaagccaaggggcctcatccgcgcgctctttcctcgagggccctccactcagggtgtcaacagaggtaggtcaggtgagaaacctggatttctaca

SEQ ID NO: 39903 - DNA, 122 bp, Homo sapiens
agtgggttttttaagccccgtcagggttttttgcccgtgggcgtacgtgggagtgctgctcgcattgcgagggggagccatctccagcgagcccagcagcgtggatcgaattgacccaggcc

SEQ ID NO: 39904 - DNA, 122 bp, Homo sapiens
aggagctgctttcagccttctgctctccccaggccctccggctagttctggggttggttccgccggttagtttgacagggataagaaagttgctcttcttccccacaacgtttcctgagagg

SEQ ID NO: 39905 - DNA, 122 bp, Homo sapiens
ttttaccatgagaaaactgatttaatagaagctttaacaatctcacagctacttaagggacgggcaggatttgcaccctgactgaagagctctgctggttttattctactacaatcggaaca

SEQ ID NO: 39906 - DNA, 122 bp, Homo sapiens
gccgggactgccagctcggccgccgtccttccgcggcctgggctagtgctcaaggttgggcggcttgcactcttgagtccctggccggctgcaaaaggaacagcagaaaactttgcttgaag

SEQ ID NO: 39907 - DNA, 122 bp, Homo sapiens
ggaagtcccaactctggggtcagaattggcctcaatgacggggctcacgcaaaatgaaaacgagagtcccctgattcaaaatgtatttaaaatgtcaagacagtggcagcagagcgtaaaac

SEQ ID NO: 39908 - DNA, 122 bp, Homo sapiens
agccgacgccttgcaggagggttcaaatccgcgcgggggagctgcgacgcgcaagggctgcggagccgcgggccggcgagcgcgtcgccaccatggtaagtggggcgcgcgaggggctgggg

SEQ ID NO: 39909 - DNA, 122 bp, Homo sapiens
ctttggcctcacattcctggcaggagaagagaaaataaataataggtgtggtggaccaggcgcagttgtttcagaatattccaggatggaaacaatagtgggcagaactcagggaggaagaa

SEQ ID NO: 39910 - DNA, 122 bp, Homo sapiens
cttctcaggacatggcgtactccctgcgctcgcctgcacactgcagggtcagctgactgccgtccctccacttacaacagcgggacggccactctccctgacgcacgcagtgacccgaacaa

SEQ ID NO: 39911 - DNA, 122 bp, Homo sapiens
gcggtgggcgcctgagggccttgtgaccgtgttgtgaggtgctgctccccgcaggaaggacgggggcaggcgagtgggacagggacctggaggccggaggccggaggccgggaacccagtgc

SEQ ID NO: 39912 - DNA, 122 bp, Homo sapiens
taagtgatagatacaattttattctggtagttttattcattattatcaagaccacatggccgggcatggtggctcatgcctgaaatccctgaactttgggaggccaaggcaggtggatcatt

SEQ ID NO: 39913 - DNA, 122 bp, Homo sapiens
catggggagacaaaatggccgccacgccccgagccgaaattacatccgggctccgcgacacgcccgaaccacaactcccagaatgctctgcatcgacagcgggagacgagacgcgctcgggc

SEQ ID NO: 39914 - DNA, 122 bp, Homo sapiens
tggggtgatttgcaaagagagtagcctctcttccttttgttactgaggcatggagagttgcggttttcctttcgatttagttctaggaagtcagagggaatcggccttaggttccctgcctc

SEQ ID NO: 39915 - DNA, 122 bp, Homo sapiens
ggacgcgcagggagggcgttcagcttcagaaagcagcggctacgctgggtccaaacccggcggctcgggaggccatagctcctaggtgcgtccgagctcctgctaccctgcgcggtgttgtc

SEQ ID NO: 39916 - DNA, 122 bp, Homo sapiens
tgtggcggcagggccgcgtcgcggcgaggggcagccgggagggggctttttgccctcgtccggtcctgctggggctctcagcttctggaggactaggccttctgaggttacggagctccgag

SEQ ID NO: 39917 - DNA, 122 bp, Homo sapiens
atcgtcccagcaagattcacagaaaccggcccctccgcctgccacaccctccacagcccacgacaccaggcttgtaaatgggagccccacccgcgagggcctcatagtcctggactctaggg

SEQ ID NO: 39918 - DNA, 122 bp, Homo sapiens
actgttacattttaatttgttcgatgtttgggtccttaagatgatggtttgcggcctcttcgcgcttcaggggattttgtccctgcactggcgttcctttctcatcccagccccggcccctg

SEQ ID NO: 39919 - DNA, 122 bp, Homo sapiens
ggcagctgagcagaccggagccctgcagcggcgcggggcggggaggggcgcgcgcacgggcgcgcagccaccacccccgcgcgccagcagggccccccacgctcaagggtgcgcgcgggccc

SEQ ID NO: 39920 - DNA, 122 bp, Homo sapiens
catatacaatgatgggacagtgccacactccttcaataaacgtggctgctggccagaggacgtgagcgtgtgacgggcgccttggcgccacctgttgggtgctcactgcctctgcaggtgca

SEQ ID NO: 39921 - DNA, 122 bp, Homo sapiens
ggtgaggtggggcaggctataaggccacacggcgcagaagggcggctctgtgggagagggcggctcgcagtcaacagggatgacagcccccgggctggcctcgggcagcccacatgcgcagg

SEQ ID NO: 39922 - DNA, 122 bp, Homo sapiens
tgtcgtagtgggaggttgagacctctgtcctctcagcccccgagacctgactgttccctccgggcagagccgcctccctggctgcccttccagctgcactccgtaaaaaaacaacctttgca

SEQ ID NO: 39923 - DNA, 122 bp, Homo sapiens
gctgcagggcggcggcagcagcgccaacttccacccaggcctcggcggccgccggcgccgcgcagcgctgcgcacaatgagccgctggcccctcccccggtccgccaccctagcgcaacctg

SEQ ID NO: 39924 - DNA, 122 bp, Homo sapiens
aaattttttgtagttttagtagaatcggggtttcaccttgttagccagggtggtggagcccggccccgtcgccattccttaaaggggctgcaacctgacttaacaggagcggagcgcaagtc

SEQ ID NO: 39925 - DNA, 122 bp, Homo sapiens
aaaactgtgtgtatgtagcatattacacacaatggtgctcagggattcaggatcttttctcgtccccaccaaactgaggaccctcctctgccctcccccgttctcagttcagggccaaagcc

SEQ ID NO: 39926 - DNA, 122 bp, Homo sapiens
gtggccgaggcccaggtccttgtggcccctcccggtggggtgaaggtgcccgggactcctcggggttgcatggctacagccggggcgctgccagggcctcctctgcggctgagagatggaag

SEQ ID NO: 39927 - DNA, 122 bp, Homo sapiens
gatggctctctgcccacctgctgcactgggggggtctgggagaggtgcccctgcagctcacgatgcttccttcttggtcgtgttgtcactgtcagaagggcgaaggcctcccgatgtggcgg

SEQ ID NO: 39928 - DNA, 122 bp, Homo sapiens
ggccctctgactccacctttccacgctgtccgtgggaccaggggctgagccgtcagcggccgtggaccttgccttgatcccacactgggccccgagccactttctgcacatgatctctccca

SEQ ID NO: 39929 - DNA, 122 bp, Homo sapiens
agcaccgcggccgtgtgcctgtgatctccttctgagtttgaaaaagaagatcctagacaccgagccaaatatgtttgcataaaccgggagacttgtggctctattttgtaacagcttggcgc

SEQ ID NO: 39930 - DNA, 122 bp, Homo sapiens
agttcccctccaggccgctgattccatgtgacagccgttaagtccttggaatgccagccacgctgtccaaggcattacagagtatcaccttgagacagaacaaaacagggacctgccacccc

SEQ ID NO: 39931 - DNA, 122 bp, Homo sapiens
cacgtcggggtcgtagaaataggccacggtcttggccatggtgccggcgggagcaggccccgcacctccgccgcccgccgcccgcggccgccgccagcccctccccggccgtgcgtgctgcg

SEQ ID NO: 39932 - DNA, 122 bp, Homo sapiens
gcactcatggggcaggaatcacagtgccagctgccccccgaaacgtgggaacaaaagcagcgtcgggtgggagccggaatggggcctggatggagagcaggcgccaccctgggaacaaagct

SEQ ID NO: 39933 - DNA, 122 bp, Homo sapiens
ccaggagagatgcaagaatgatggctgtgttacccaccaatgtaattaagtagaagatggcgacaactcctgacaggatcatctccatttttggatggttagagaagccaagcagaataaaa

SEQ ID NO: 39934 - DNA, 122 bp, Homo sapiens
aggaggtgctgggatggtgactccgcggagtcgagggtgtgaggcgggatgtgggcaggccgtgaggtttgtgttgcaagactgggaggcaggatgaggggaggccatggggcggctggagg

SEQ ID NO: 39935 - DNA, 122 bp, Homo sapiens
gcccggttcccgctcattagccactgacactgtttgctttcccgccatggacgcccaccccgtcacaggccatttctcccggcgccccccacccctgaggacctgcccaggggtccagggtg

SEQ ID NO: 39936 - DNA, 122 bp, Homo sapiens
gtgaaggcagggtctgccgtgttcctccttcggggctcaaaccctctcactcctcctctgcgcccccagcccttcctaaggaagctggggaccaacaggtgctccgagcttcccctgtctct

SEQ ID NO: 39937 - DNA, 122 bp, Homo sapiens
acctcagatgatccacccgcctcagcctcgcaaagtgctgggattccaggtgtgagccaccgtgcccggccaccagtgataatttcctggttttgatcattattctatagttctgtaacatg

SEQ ID NO: 39938 - DNA, 122 bp, Homo sapiens
acatatggtgacgtctcttctgggctgtatgcttggcatgtagaaatgatttgtcttggccgggcgcggtggctcacgcctgtaaccccagcactttgggaggccgaggtgggcagatcacg

SEQ ID NO: 39939 - DNA, 122 bp, Homo sapiens
ccctcaggaagaacacaggtgggctcctagcagctgatccccaatgcctggccttaaagccgagctcagttaccatagggacaggtccacctctactgggccctcatgcttgcctttcctgg

SEQ ID NO: 39940 - DNA, 122 bp, Homo sapiens
ctcctggcagtcttgccgccaattccccagttgagcgaggctgctcgcaacccctaacaccgcctgggtctcccagccgcctggtctccccacacccgcccgcccgaagggattttaggggc

SEQ ID NO: 39941 - DNA, 122 bp, Homo sapiens
gccaagaaaactgggagcttctgcaaatcgttcttcttgccctcagattaccagacacgacgcagctggacttgtctcatgcctgcgatagggacggcccccaccctgacttgcatggaaca

SEQ ID NO: 39942 - DNA, 122 bp, Homo sapiens
ttacggttggagaggggcctgccctcctccggcgtggggctctggctcttcggtggacctcgaccttgattttgatctggatctgaagggtctgcggatcttcagaggcttaactaccgggt

SEQ ID NO: 39943 - DNA, 122 bp, Homo sapiens
aaatcacactgcctgaatgtcaacgtagagccgtcacagcggccacattggaggggctgtcgatcgaccacaggtgcccattgtcgagggcctgccggggcctcttctccgagtctctagtg

SEQ ID NO: 39944 - DNA, 122 bp, Homo sapiens
cgggcggctgaagagtcgaggccgggagtcgccgccgtccccgcccccgcccggtccggccgttgctgcagcctgaacgaagcccccgccggccaccgaaccacgtccttaccacggtgttt

SEQ ID NO: 39945 - DNA, 122 bp, Homo sapiens
gggaatggggtgcctagggaggggaaccaatctacacacacacatacacacacgcacgcccgcgcacacacacgcatgcatacatggacatgcgagcctcccaggctgcacttctccctgcc

SEQ ID NO: 39946 - DNA, 122 bp, Homo sapiens
ctgggatggtatggtggtccataaggcctcgtgggctgtccagctccagccagccagcctcggtgaagccagccgacttggcggcagtctccagcactttgagacgtttgtccccctcctgc

SEQ ID NO: 39947 - DNA, 122 bp, Homo sapiens
aattccctaattctgagtctgaaccctcaggagtaccaggttacccctgagctgcacatgcgtgtgacatgccttaagggcacagcaaagactttgagaactgaatgaagattagatctttt

SEQ ID NO: 39948 - DNA, 122 bp, Homo sapiens
tgaatgagaacgcctgcgcctccctccatcctcgcaataaatcctggaaaggcagtttttcgccccttaagtggcctgaactaagcacccccagacctttctccgtagtccacccaattacc

SEQ ID NO: 39949 - DNA, 122 bp, Homo sapiens
tccagagggcagacatgctcctgttggttttgctcattttcaattccccagcaccgagaacggtgcctggcccacggtggttctccacagatattagatttgagccacatggtccagtacga

SEQ ID NO: 39950 - DNA, 122 bp, Homo sapiens
atatttacaatgaccaccatccaatacaaattactagagaaattcacagaaacaggaaaacgtgattcataaccagaaaaatatcagtcaataaaaacaaaccagaagtgatagagattatg

SEQ ID NO: 39951 - DNA, 122 bp, Homo sapiens
cttttaaaagatggtagacacagttgaaaacgcacatctcctagacgactaaagagctcccggagaaagcaatgtcttttcgcgccgaattccatctaccacatcccccggaatgtcccacg

SEQ ID NO: 39952 - DNA, 122 bp, Homo sapiens
atgggaaaggcaggaggggcgaaggctgggagcctttcaccgccaagggtccaaggaggtcggaggctccttgggaatgagggagaacagtggtccccgcccagctggggagggaggtgggc

SEQ ID NO: 39953 - DNA, 122 bp, Homo sapiens
ctgggcctagggtgcctgcctgccccttgctggggggacatctgagccctctgggcctggcgccagggcctgagtcgctgacaggggcggagaagtctagggggcctgtcctgctgtcagcg

SEQ ID NO: 39954 - DNA, 122 bp, Homo sapiens
gaggacttggtatatgtgccgatggttccgcgatgggtcccattgctgggaatgggtagccgggttccttggtccacctggctagtttttgggaggagtcatgccttctcaggtgtcaatga

SEQ ID NO: 39955 - DNA, 122 bp, Homo sapiens
tgctgctgtgtcctgaagctctgaactggtttggctctgctctggagaccacccagggtccggagaccaggtcgggcttatgggaccctctgagctcacagctgtttctggagcattggtgt

SEQ ID NO: 39956 - DNA, 122 bp, Homo sapiens
ccctcccagcccctttatcatgtttgaacctaaatcaaagaagcaaaaccatagctcggtcggccaagccagccgcgctgcactgatgtgtctccttcaggctgaccacagcccatggcaac

SEQ ID NO: 39957 - DNA, 122 bp, Homo sapiens
aagtgcatcctctggtaggccttgggccgggggcgggcatgagagagctgcgctgggatgcgctgccagggcacacttggtgggtcacacactcttgtcaactgtttgggggctggagagta

SEQ ID NO: 39958 - DNA, 122 bp, Homo sapiens
ggcatggttaaatctgaatggttacctcactgctgaaaacccagaggggcgtggcacactcgcttgtgtggaaaagcctctaaatgcatcccttcctttctttcctgcttcctttgccttac

SEQ ID NO: 39959 - DNA, 122 bp, Homo sapiens
gcgtcctgcaaagaggccgggtcaaaaggtcactgccccgatttttattgctgtctcttacgttctcacgacctcttgccctctgcacagatgggcggggctggagcttccacgagggccgg

SEQ ID NO: 39960 - DNA, 122 bp, Homo sapiens
gtatggtctctccctactattcagcgggtggtcctagccccaaagcagccagacgcagtacgtggtgatgggggaggctgagttctaataagtcttcatttatgcaacaaaatgggctggat

SEQ ID NO: 39961 - DNA, 122 bp, Homo sapiens
ttctatcttcatatatccaatgtgtcagcaattaagactgtatagtcctcttcaatacagcgagaaaatttgctttttatagcaactctttccgtccccagtgtctccttgttttgtggtaa

SEQ ID NO: 39962 - DNA, 122 bp, Homo sapiens
tcctccccacaaaccccataaaagcaccttaaaccctgtaaagaggggcttatttcacttcgcagaaatcattccgctctccctctgagagtatattactgtgcttcaatacactttgcctt

SEQ ID NO: 39963 - DNA, 122 bp, Homo sapiens
ctcgaggccgaccaggccctgcgcctgtgcctgggcaggaaatgtgctggaggctggctccgcttcccgctggagaccccggggcggccagttcccgtgggggacaggacccccctggagcg

SEQ ID NO: 39964 - DNA, 122 bp, Homo sapiens
atagctaaaggtcagcgctcaccccattcaaccactgtattccctagacttagcatgaggcggtttctaaaaatcaaagccacacttagcgtggtaatgtggctttgtaccatgtcaaccta

SEQ ID NO: 39965 - DNA, 122 bp, Homo sapiens
gcacccatcacccaccaaagcagatccccgggcccacccgcccgtcgcacgtagagggggcggtacctcctcagacttgagctgcagcagtttggcctcctgttggagcttctccttctcac

SEQ ID NO: 39966 - DNA, 122 bp, Homo sapiens
ggcgtgtcctcgggtggacgcgggcagcccgaaggggagtttacagacgctccctcacatcggggacgcggctcctttaagggcgtaggtgtccagggcgccgcctgactggaaagtcgccc

SEQ ID NO: 39967 - DNA, 122 bp, Homo sapiens
tgggtgagcagggtctgggcgacctcagacatgacactgatggcatcccccgtgcgcttccggtcgatgaagatgactcctgccagccagcaggccagcccggcagagccagcccacagtag

SEQ ID NO: 39968 - DNA, 122 bp, Homo sapiens
atccccgcggccgtccgcaacgggtccccgcgcctgtcggggccagaatcagatcatctccgttgtaaacatttgtccaagtcaatggaagaggaggagacactgactaacccaaagcagct

SEQ ID NO: 39969 - DNA, 122 bp, Homo sapiens
catgtgtgacccacatgaatagaagactgaggctctccattaaaaacaagcatggcagggcgcagtggctcatgcctgtaatcccagcactttgggaggccgaggcaggaggatcacgaggt

SEQ ID NO: 39970 - DNA, 122 bp, Homo sapiens
cctaagggttcaccatgaaatgcttgataattgtagctattatcaagtgtccactgtgcccgctaatattatgtatcaactcagtcctcacagcaacctaatagggtattataatccccata

SEQ ID NO: 39971 - DNA, 122 bp, Homo sapiens
cctcggccgccatcatgctctaatttcccctgagtctctctgggtcctcgaccgaggaagcggcctctgggatgctgagggggtgtgtccccacatgattggctcaggcagctcagccaatc

SEQ ID NO: 39972 - DNA, 122 bp, Homo sapiens
gtgaagatcagtttgaccggtgtggacacgtgctggttaagcactcaggcctacgtgggccgagcgggatcttgatcatggggctggtgtatggatccaccgtcggattccgtctgcagagg

SEQ ID NO: 39973 - DNA, 122 bp, Homo sapiens
caatgcgcaggcgtcatcgctcacttctcccctcccggcttctgctccacctgacgcctgcgcagtaagtaagcctgccagacacgctgtggcggctgcctgaagctagtgagtcgcggcgc

SEQ ID NO: 39974 - DNA, 122 bp, Homo sapiens
cgggctgctgtctacctctgtgaatctgccctggaccaccccgggagagaaggagggctccggggaatctcgcacattccaggcaaaggctcccgggccgcagcctctgtgccacacccttg

SEQ ID NO: 39975 - DNA, 122 bp, Homo sapiens
tccacctcgaaaaaaagtaaagccttactaagcatgacactaatgcaaactcaatgcatacgctacacaaacatataactccttatttggagctaataatattccaagccaaggaaacctac

SEQ ID NO: 39976 - DNA, 122 bp, Homo sapiens
tctgaaactctcctgcaggggaggctaaagagccacacatatccccaatgagtccctgctcgctggggatgtgtcctggccacgcagggaggaagtgaagcttcttgccatgtcggtgtcca

SEQ ID NO: 39977 - DNA, 122 bp, Homo sapiens
tcttcctcatccctcccacatcctcctgacctccctgtaaacctgaactaccaggtacctcgattttcttcaaggccagactgttcttaatgttgctaaattggttgagggaatgggtgagc

SEQ ID NO: 39978 - DNA, 122 bp, Homo sapiens
ggtgaaaccccatctctactaaaaaaatacaaaaattagtcaggtgtggtagccggcgcccgtaatcccagctactcaggaggctgaggcagaagaattgcttgaacctgggaggcagaggt

SEQ ID NO: 39979 - DNA, 122 bp, Homo sapiens
tgtgtccaaaagcgtgcctgcttgggctcgccacgtgtgcgcacgtgtgcccgtgacagacgaccttcctgtgtgcctgagcatttgggagcctcgtgctggaccctgaagcatgaggtcgc

SEQ ID NO: 39980 - DNA, 122 bp, Homo sapiens
tgccaggccctaggggtcttgatatcagttggcagggaaagccattctcagacctcctgccgggtcatgtcccattttggggccttccacagcaggcctgcaagaggatgtccgtggggtgg

SEQ ID NO: 39981 - DNA, 122 bp, Homo sapiens
ggattaagtccgggctgctgcgcccaccattcaaaacctgtttcggacgctagccctgcccgcctttctgaatgagcccaacccaatgtccatcctggactgctcccccacttaccggctaa

SEQ ID NO: 39982 - DNA, 122 bp, Homo sapiens
gggctgcgcgggtgtgaagaacttgctcaatgcgctttgtaggatccactgttcctctttcggccgcgggctgcgccgatggtccggggagcccggcttctcgccccctgccccttccttct

SEQ ID NO: 39983 - DNA, 122 bp, Homo sapiens
tgattcctcgcggctgctttacggcaacagagtgaaggatttggttcacagagaagcagacgagttcactagacaaggtgggtaactgtcctagtaaaataaggcaatgctcacgttactaa

SEQ ID NO: 39984 - DNA, 122 bp, Homo sapiens
gagacggggtttcactgtgttagccagtatggcctcgatcttctgacctcgggttccgcccgcctcagcctccgaaagtgctgggattacaggcgtgagccacccgcgcaaggcggatagtg

SEQ ID NO: 39985 - DNA, 122 bp, Homo sapiens
ccctcacagtccaagccactgtggtcagccgggaagccgcccactgcccctgacggctttcgttttacctaggttgcccttggcacagagctggcctgtaggcatgtgtgcacaggtgtgtc

SEQ ID NO: 39986 - DNA, 122 bp, Homo sapiens
atcctgttaaacccagaaaatatggtgtcttcatgcccaggaagggaaggtcctctcccccgggtccctgagtggtgggggtgtcctcttggatttggctaatttgaacaggaagctctgca

SEQ ID NO: 39987 - DNA, 122 bp, Homo sapiens
ctgcattccttgctgagctgccggcttgtcatctccgcgtgggttaaccgagctccggcacgctggcctcatcgcagcctgccctgattaatcttggtctcactcgaccctgtcccagaaat

SEQ ID NO: 39988 - DNA, 122 bp, Homo sapiens
aacaaggtcacgcctgagctcggcaaacaaggacttcggtgcctgcctacggcgccattgcgccctctagtggctgctgaggaaccgctgtccagcccgaagctcacagagccccgttcagg

SEQ ID NO: 39989 - DNA, 122 bp, Homo sapiens
ggaagctcggttggggtttctgcagaagtttcccccttgggcggtggcggagctgataagcgcgctagtagcagctctggcagaagcaacggtggcttcgagggatggcggcggctgcaaca

SEQ ID NO: 39990 - DNA, 122 bp, Homo sapiens
attttaaaaatctaaattaccacagcaatcagtgtctacatcatttgtttggcatagtgacggactattaacactaagtcgattcattctgataaagtttgtttctaaaaatagatgttaaa

SEQ ID NO: 39991 - DNA, 122 bp, Homo sapiens
tgacatgaataggattatttttctttttctttggtttcttcaggcctagttccccgagagcgttcagacagtgggggctcaagctcagagccatttgaccgtcatgcacctgctatgttacg

SEQ ID NO: 39992 - DNA, 122 bp, Homo sapiens
atctgtggtgccagaggagcaaacccatcgcacacgccaggtctgccatggggccctgggcggtggggattttggatgtaacgtgtctaggccgagcccgcgccgtgaaaggcctaccctgc

SEQ ID NO: 39993 - DNA, 122 bp, Homo sapiens
tgggtgcggagtgcgccagcggccaagtcaagactccttgaatgctcaggttagggggcgcgggcggcaagtgcggcgactccccggggcgcctccaactttccgaatcgcccgcagggttg

SEQ ID NO: 39994 - DNA, 122 bp, Homo sapiens
ctctacagcactatgcacacctgttacagcaggcatcacttcgaattaattatctccaagcgaaacacaccaaataacattttcgataccacttctcctttcacttcactcaaatggcaacc

SEQ ID NO: 39995 - DNA, 122 bp, Homo sapiens
aaatcaagattttcagcatttcttcccattacatgccttttcttaattaatggcattaaacgtgtttaggcagcaatttttcttttcggtcaaaaagtagaaaaagacatattgagtgtagg

SEQ ID NO: 39996 - DNA, 122 bp, Homo sapiens
cctgctgttcccctggcaggagcccaaggctatcccaacaaaaatggtggccatgttgggcggaggaagaggctggcgccccttgagacactggtcccacttctcagcctctgcgtaccctc

SEQ ID NO: 39997 - DNA, 122 bp, Homo sapiens
aaaaactgtacgattatggtttaaaaaagaaagaaagaaaccacactgaaaacagtaattcgtttgccaaatgagctcagttaggttagcaccttagcaagaccctttgggaccaagtggcc

SEQ ID NO: 39998 - DNA, 122 bp, Homo sapiens
aagtgagcggccactgtctctccccatccggggcagcggggaatggctgagccaggggttcgccgcccccgccgccgccgccgccgccgccgccgccgccgccgcccgctttcggctcgggc

SEQ ID NO: 39999 - DNA, 122 bp, Homo sapiens
gtaggcgccctggggccctctccctccccagccaccacctcagataagttacctcatcctcgcttcgcgttcttccactaaagaacctggggctcccacgccgcactacagcgccgcggcct

SEQ ID NO: 40000 - DNA, 122 bp, Homo sapiens
ggcaggagcccccgaaaatgacagtaccactaattgcaactcaaagtgaatttctgtcaccgcggcgtgcttgtcagtgggcctgccctggccccagccgcagagcgggtccaccctcccag

SEQ ID NO: 40001 - DNA, 122 bp, Homo sapiens
ttaaattagggttgcagacatggtcacagtaaaaaatgatcagatttgggatatatctcgcgttggcagctgactatatgagttgggaattcagtagagaggtcagggctgtagatacagct

SEQ ID NO: 40002 - DNA, 122 bp, Homo sapiens
gagggcttcacaggcctggactgtgcccagggtgagagcggagatgtgccctcgggccgccggactcttctttccaatgcaccatttaaccctcaattacacgttgtcatctttgggggtct

SEQ ID NO: 40003 - DNA, 122 bp, Homo sapiens
agctcctcttgcgtggcagagttcttctgcccatagaggtcggctccccgggcgacgaggcgtcctgcagagcctaccaccatgacttcatgcacaaaggcgcctggcatgttgaagttgag

SEQ ID NO: 40004 - DNA, 122 bp, Homo sapiens
ctggagaagctggacacagacctgaagaactacaagggcaactccatcaaagagagcatccggcgcggccacgacgacctgggcgaccactacctggactgtggggacctcagcaacgccct

SEQ ID NO: 40005 - DNA, 122 bp, Homo sapiens
taatatctgctttgcaaggttgttgtaagggctgaatgaagtaacgggaaatctggggtacgtgggagatagtaaatggcagccgtccctgtgcgccccctgacacctcccgcccggtccta

SEQ ID NO: 40006 - DNA, 122 bp, Homo sapiens
gcggggcggacacggcacttacggtcggggggtccgggggatccggcgggcggcggacggcgcacactcgcgactcggtccgggagtcgctgctccttccagcttggtccccgcctccacga

SEQ ID NO: 40007 - DNA, 122 bp, Homo sapiens
gatgatgtgtaaagcaaaatttcatcttcagataatggaacgactgatataatttaatgacggtagatgacagaagaacaccataatctcaggaatatgagaactattccacttgaaggctt

SEQ ID NO: 40008 - DNA, 122 bp, Homo sapiens
tgggtccaggccagctaagctgccctaagactattagaagattccccaggtggccgggtgcggtggctcatgcctgtaatcccagcactttgggaggccgaggtgggtggatcacaaggtca

SEQ ID NO: 40009 - DNA, 122 bp, Homo sapiens
cgctgccgtccagacggggtctcccttggtccgcgatcctctctgggcctgctcgccaggcggcctcaggaacggaggcccacaggctgtgaagctgcaggagagctttccagccccactgc

SEQ ID NO: 40010 - DNA, 122 bp, Homo sapiens
aatggctcagccctgggaactggagaggggtgaggttggggagagaggaggctggagcagcgctggtgacactgaacagtgtccagcaggaggtccatagcaacagtgtccataggcagagt

SEQ ID NO: 40011 - DNA, 122 bp, Homo sapiens
gcgagccagctgagaagcggctttgccgggtgtccactagcggttcgccagccctctgtgcgcccgcagagtgacgcagaggccgacacagtcccctccccactcgcccctggggcgccgcc

SEQ ID NO: 40012 - DNA, 122 bp, Homo sapiens
cgagctgatcaccatcctccccttccctgcagcccaccggttcccaggacgacgctcaaacgtcagtcctaggccacccacctagggcactgagtttcagagggagactcgggcccctacct

SEQ ID NO: 40013 - DNA, 122 bp, Homo sapiens
ccaggcaagggcttggctaaaaggtgcactccagggttggaggagccttcagcctgggttcgacttctgactcagctgtatgaacctgggggaccccctccctggcttgggtctttccacat

SEQ ID NO: 40014 - DNA, 122 bp, Homo sapiens
tgccaccaaatgcctgtctgcattcacgtcattgatgaaatttctcttcaccgtacagctcgttcacttcagtaaatctatagttgcttattatgagtaaggcctttggggaatgcagagat

SEQ ID NO: 40015 - DNA, 122 bp, Homo sapiens
aataaactatgaagagtttaggaaatagattatgaatgcctgaacaagggtaggcatattcgtgatggagagatagggacagattgcagaaagcattagataaagacaaattgatgtctgct

SEQ ID NO: 40016 - DNA, 122 bp, Homo sapiens
gttctagtgaaattatcacatctttctatgtgtgtattagacattcgtcttcatttctttcgcctatttgtctttttctttttcttttctaagcactctttagatattctggacatcctttg

SEQ ID NO: 40017 - DNA, 122 bp, Homo sapiens
gcccagggaggacgcgctccgcccccttccaatccggccaatgggcgcccgggcagcgcgcggtttgcctccgcctccgccagggaaacttggaggaggagaaaagtttgtacagagggtgg

SEQ ID NO: 40018 - DNA, 122 bp, Homo sapiens
tccttgatcagcaccatcttcccggaaccccctcacagctgccgccgataccaccgccgccgccgccgctaccgcctctcacagcgcctgcgcggccccgcctccctgcccccccgagccac

SEQ ID NO: 40019 - DNA, 122 bp, Homo sapiens
caggcggagcgctgagggaggctcccgccggccgaacagcggggagacccgtgaagcaggcgcaccggccacgcgcccggagggacagggacagggaccggcaggggtgggcccgccgccaa

SEQ ID NO: 40020 - DNA, 122 bp, Homo sapiens
ttgtctgctaagcctaaattgaaaactcatcaaaatgtaatccaagagcagtttggctgccgagctgctgagaaggggctcggtgggaataaaggccccccgccacttttacacacgggcca

SEQ ID NO: 40021 - DNA, 122 bp, Homo sapiens
tatgcaactatgtgtgtgacatggggtggggactgtaagtaaacgggcccctgggtacagcgtggggcttccttcctgagcaagtgagaggcttcatcagcctcatggaaaatccaccttac

SEQ ID NO: 40022 - DNA, 122 bp, Homo sapiens
cttaccccagctgcctggctgccctcagcttcccaaagctcaaataagaggggccggcggcgcggggaagaggaggagccaggaggctcggccgctccattcactcagcagcccaagcccgg

SEQ ID NO: 40023 - DNA, 122 bp, Homo sapiens
acccaagccttgagcattcccaggcactagtaaaggtagctaggtcattgcccaaaacaccgaaagaaaccagccctagccctgagccaattcctcaaatctccccgggaccacgcctgacc

SEQ ID NO: 40024 - DNA, 122 bp, Homo sapiens
ttgtctaagagcccagatgcactcgtgtggaaattataaaggcagggccaggcaggcgggcggccaatcgccactgggctcgtcacgacagcctccttcagctccaacccggctaattaatc

SEQ ID NO: 40025 - DNA, 122 bp, Homo sapiens
tgttttccattgcttctgtttttcaaagcggttttcacagcttgagttctctccattcagcgtcacgaaagcccattcgaaatggatatcagctgacgttggcctgcacgcgtttgccttcc

SEQ ID NO: 40026 - DNA, 122 bp, Homo sapiens
agcaaagggattaggcttttctagcaacaccagaaaggatttctatgccgagcgggggtgcgggggcttatgcctgtaatcctaggactttgggaggccgaggtgggtggatcacgaggtca

SEQ ID NO: 40027 - DNA, 122 bp, Homo sapiens
ggcaggtggagccgggagggcccagctgagaattcagggttgggggctcagagggcactgcggctaggagcccgtcaaagcctgtcgcccaccggggcgagggcaggtgggagcgcctggcc

SEQ ID NO: 40028 - DNA, 122 bp, Homo sapiens
gcagtatttatgcccacttggggaggtggtcatggccaccctgttatctcctgtagaggacggcacacggctgctggagtcactgcagtatccacccaaaccactcctcccacaggcctgcc

SEQ ID NO: 40029 - DNA, 122 bp, Homo sapiens
agaagtgtttttttaatgaagaattttatcctaaaatattttccaaatttacttatccaacgaaagtaatttaagcattgtagcaagtaactagaatctgcagaatgagaacaactttctct

SEQ ID NO: 40030 - DNA, 122 bp, Homo sapiens
taagccactttctccgttctttcattgagaactccggggatcaaagaagaacgccagctgcggtggaccgctgaggaatggccggagtccgggcgcgagcgccgcttcccctcgccctcctc

SEQ ID NO: 40031 - DNA, 122 bp, Homo sapiens
gagactaccactcccataaggtcttggggctttcttgcctagaactcccagaagcccatgcgacacttccgctggatgcgcctacggctccggggtcccgcttggcctacaactcccagaaa

SEQ ID NO: 40032 - DNA, 122 bp, Homo sapiens
aaaaaattgctcatcatatctacaccctgaggcgcagcataatcttttctttctagatttcgaatattctgccattcaggctttttgtaggacactcaactacccactttttgggagaggga

SEQ ID NO: 40033 - DNA, 122 bp, Homo sapiens
tggctgctgggtgtgcagcaggagaaggaggatggtcagccttggagcatctctcaattacgggacagtccctctttggaagcaggctcctgtgctttcctgtgttaataaacagtaataat

SEQ ID NO: 40034 - DNA, 122 bp, Homo sapiens
gtgctgatgccagcgtggatccgagccaggcctcaggggactggcgttcagacctcgggccgctcgcatctctaacaatttgagccctactttaaggtgtggccacggtccccacccactct

SEQ ID NO: 40035 - DNA, 122 bp, Homo sapiens
gctccaggaacctctgcttcatgacatccgcaaatctgtggattggagagagaaaggctacgtgactcctgtgaaggatcaggtaagacagtgtcagattcagacctcccatctccccagga

SEQ ID NO: 40036 - DNA, 122 bp, Homo sapiens
agaccgcagacggcctgtatgaacagtcaaaccacagacggcctgtacccacagtcaaaccgcagacggcctgtacccacagtcaaaccgcagacggcctgtacccacagtcagaccgcaga

SEQ ID NO: 40037 - DNA, 122 bp, Homo sapiens
ggctcctgccccccgacccggaaacagttctctgtgtttccggcctggctgagtttcctccgcctttgcttaccctcttggctagtctagcggccaaggcttcccgctttcggggaaggcct

SEQ ID NO: 40038 - DNA, 122 bp, Homo sapiens
tctgcaggttcctgggaggagctcttctcaaatcctgaagattgctaggctcttggcgaacgactcatctcttgaagacctagagtggtggattacaggcattgaaaagcttttggtggctt

SEQ ID NO: 40039 - DNA, 122 bp, Homo sapiens
agcggaagagccggctggcgggtgcagcgggagaatgctgggacgggcagggcaggtccccggccacttgcaggcctactgtctgtccaagctcccctccaggctgggcctagggttctgga

SEQ ID NO: 40040 - DNA, 122 bp, Homo sapiens
aatctcctctggtggcttgggtctccctcgcattgccctgagctggcagaacaaacaaagcgttaagatctccgaggctcctgggtggtgctggcaggatcctgcccgggaggagcactgtc

SEQ ID NO: 40041 - DNA, 122 bp, Homo sapiens
tgggttattctcgttctcccttccccacactgtcgcagaggaggaagacgtcttggtcgccgttaagagctaaaacgaacgccaaggctctaagtggccctggggtccaggctcgccggagg

SEQ ID NO: 40042 - DNA, 122 bp, Homo sapiens
ctctcttggggaacgctttctggggcagggcggggacccgggggcgatggggccttcaaccgacgggcaaacacacacagacacaccccggctgtcctccagctgcgatgcggctcgctgcg

SEQ ID NO: 40043 - DNA, 122 bp, Homo sapiens
gacccaggtaagctgctttggaaggcagagaaccgccggtacctgctttaacgttagcgtcgctgggggtaagcgggaagcagccatgtccaccagaggtccgccggagcctcagcgcgcag

SEQ ID NO: 40044 - DNA, 122 bp, Homo sapiens
cccttttttgcagtctcaggacgggcgctttggagccggccccaggcagcgtgtgtcggtcgcctagtctggagaactagtcctcgactcacggtgagggaatggaccgacacgggtattgt

SEQ ID NO: 40045 - DNA, 122 bp, Homo sapiens
aatcgactttttagcttctgtgcacaacacagacaacaacaagaagctggactgaggccccgactgcagcctgcattctgcacacagcatctgctcccatcccccaagtctgacgcagccac

SEQ ID NO: 40046 - DNA, 122 bp, Homo sapiens
ccatatgcccaaggtcctcagtaggctgcttaactcatttaactcatcatcacgtagcatcgtgttgagagaatggtgatatctggagtgggttgtacatgcagaagttcagtaggatgagc

SEQ ID NO: 40047 - DNA, 122 bp, Homo sapiens
gacgcgcatggtgttggtggtggtgctggtgtttgcgggatgttggctgcccttcttcaccgtcaacatcgtcaacctggccgtggcgctgccccaggagcccgcctccgccggcctctact

SEQ ID NO: 40048 - DNA, 122 bp, Homo sapiens
gcttctttgtaaactgcctggtcagtggtggcagcacagatggaccgacgtggacctcgacgcgaatggcgggctctgggcgctgacccggtggcggcgtagctcaccgaacacccaggggg

SEQ ID NO: 40049 - DNA, 122 bp, Homo sapiens
gaatataagtgtgaggaaactacccaaagatagtgaaagaaccaccaaaaagactgagagcgaacaccaccaagtaggtcctgtttccaccagctggagtattcagaggggttttgcctcaa

SEQ ID NO: 40050 - DNA, 122 bp, Homo sapiens
aagggctggggctgagccgggtttccaggacaaagggggaaagggcccctgtctttcctccggggtccctttgtcaaggtctcatccatacatgccccatgctcccaccctatctgccctca

SEQ ID NO: 40051 - DNA, 122 bp, Homo sapiens
tggttctacatctaaatctttagctagatttaccaattctcatatagcacgtaagaaatccgggctatgaaacaaaaggaaataagcacattcacctttcctgctatccctcatttcctcca

SEQ ID NO: 40052 - DNA, 122 bp, Homo sapiens
gcgcttccccacaagcccccgcggcctcgccccgccccctttagcctgggcttgagcgcgcgcagaagtcagcttcgtgacttccttctcaggatggaaccagcttggtggcttgagggtat

SEQ ID NO: 40053 - DNA, 122 bp, Homo sapiens
cgccccagctgccagttcgttttcttcctgtggattctgccgcagccaggacgccttgctcggtccgttttctttccgtggattccgccggggccaggacgccttgctcggtctgttttctt

SEQ ID NO: 40054 - DNA, 122 bp, Homo sapiens
tctcatccctggggacgtatagcacagcagcagcagacaaacctgggttcagaacaagtccggcttctgccttttattggctgtctgactgtaggaagttacttcctcttattgcaccttag

SEQ ID NO: 40055 - DNA, 122 bp, Homo sapiens
agtcgacaccgggtggccttccacaaggcaaacctggggggcagccccgtttagaaggcccggctgccctcttcagtcacccagcgcctcgccagaccccaggggacattggggcttgagac

SEQ ID NO: 40056 - DNA, 122 bp, Homo sapiens
cgtcctcctcccctgcagttcttgcaaacggcagcagcagcctctggctctcactccctccgctttttctggggcttttcctggcaggggtttggtgagatcacagctcccagtgaccagag

SEQ ID NO: 40057 - DNA, 122 bp, Homo sapiens
ggacactggctagtgggagctgcggccgcatagctcccggagccgtgagtggccatgtcccgcaggccactgctgtgtggacataagaacccgctttgtccgcgggactttacgaggccacc

SEQ ID NO: 40058 - DNA, 122 bp, Homo sapiens
tcttttcctcccccatccttctcctagctccgcgcccctcccagccttcccgcccttagccgggaaaggacgctgagatgacatcaccacagagacccgcggcctccccgcccccggccccg

SEQ ID NO: 40059 - DNA, 122 bp, Homo sapiens
tgagcccgccttgtccccagtgctgctgcggtgctacacctgcaagtccctgcccagggacgagcgctgcaacctgacgcagaactgctcacatggccagacctgcacaaccctcattgccc

SEQ ID NO: 40060 - DNA, 122 bp, Homo sapiens
ggacccctgtgctccacatccccgaggcagccaactgtgccacctctgctctcgcatggccggccaggacctgttctcaggcccaaagcctccgtcccggcctcaacctcgctccccatcac

SEQ ID NO: 40061 - DNA, 122 bp, Homo sapiens
aagatttaattctatcaaatcttgtattacctcagatcattttaaatagcaagccaataacgagctttgaaggctattttaccattcctgttcacaaaaggttctcatggtgcctgacaggt

SEQ ID NO: 40062 - DNA, 122 bp, Homo sapiens
cgcattctcggggcccgaggctcagccgctcgcggtggagaaagcaggccgcggaggaggcgggcgcccaggcctgcccggacaggaagtgggcccagctttcccactcctcgctccgctcc

SEQ ID NO: 40063 - DNA, 122 bp, Homo sapiens
agagacggggttttgccaagttggccaggctggtctggaactcctgagatccgcccacctcgtcctctcaaagtgctgggattacaggcctgagccactgcgcctggcctaaagtaattgtc

SEQ ID NO: 40064 - DNA, 122 bp, Homo sapiens
tgcaacctgcagattttgccgtgcccagggcacaagtttttcagggctcctgggcacccccgcgaccgtcatctcacttccccggcagcttcctcgccccgaccgcagtgttcccagcgcgg

SEQ ID NO: 40065 - DNA, 122 bp, Homo sapiens
atgttatgagagtccagacaaaaatgcttcaaggcctggagtaaagaggcctaaactgtacggttggattattgtcctaatagtctctactatgggctgaattatctgtccctaagattcac

SEQ ID NO: 40066 - DNA, 122 bp, Homo sapiens
ctcccagggcgacccctgcaggtggaggcggcagggcctgcgggaggcaccctccccaatcgcctgggaacacgcagggaggcaatgggtcccccagtaagacccaaaggcaggacgtgcag

SEQ ID NO: 40067 - DNA, 122 bp, Homo sapiens
tatagcctcctcaactccactccgggacagaattatatcaagaggatgtctgtgaatagccggtagcagcaaacatctgactgaaagcttagctgtgtcttacagcttccagtcggggatgt

SEQ ID NO: 40068 - DNA, 122 bp, Homo sapiens
cctcacccatgctgctcttcatttcttctacagaaactgaactagacaaccttggctactcgtctatatactcaattgagtaatttaggttcaggatcacaactaatttagattcataatca

SEQ ID NO: 40069 - DNA, 122 bp, Homo sapiens
agaaggagttcggggaggcacagggtaggagcggtgagagggccgtggagtcccgcccctcgccgccgcggttggcgggagcgtgtcgtgacgtcacacagggcctctcgaagtgggcttgt

SEQ ID NO: 40070 - DNA, 122 bp, Homo sapiens
ctctccctcctcctcttcctcttctcgcacagggggctcctccatggccacccagacccccgccgacctcggagctgctgtcttggagtctcccaaaggttagacttcctcccggcacccaa

SEQ ID NO: 40071 - DNA, 122 bp, Homo sapiens
tggacctgccgggaccaggcccgcatgggctgccgcagccgcgccatcacccagggccggcgggtcatggtcatgcgcaggcactgccacccaccggacctgggcggcctggaggccctgcg

SEQ ID NO: 40072 - DNA, 122 bp, Homo sapiens
agcaaccgagaagctcacagctcaatgcttcaaccctttagaaagggttgattcctctcccgctctacttgtcccatgtgggatgaacagaggggatctacccaccctggggacacagcaac

SEQ ID NO: 40073 - DNA, 122 bp, Homo sapiens
aaagtgcaccaggcacatgcgccaggagaactcatacagccggcggcactggtgggcgtccgagagcagcatcatgcccaggcagttggaggggaaaaggttcttctccaggaactcggcgg

SEQ ID NO: 40074 - DNA, 122 bp, Homo sapiens
catcaggattcatttgcataatattttctgacggcttctgattggctgaagccagaggggcggtggtggggtgattccaagggcccagagctctggccggcggaccttttccttctggagtt

SEQ ID NO: 40075 - DNA, 122 bp, Homo sapiens
tgaaaacagggtcaattacgagaatttagtgtgtatccaatgataaaaataattgcagggcgctagttgagggtgtcagagagaaactcagaggagtagaatccctgggtgtcctgaaaacc

SEQ ID NO: 40076 - DNA, 122 bp, Homo sapiens
atcagcatggggatgacagatccagagatggtagaagtccatgccagctccaaagaggaacgaaacagctggattcagatcattcaggacacaatcaacaccctgtaagttaaccaccaggc

SEQ ID NO: 40077 - DNA, 122 bp, Homo sapiens
acctcgtgatttgcccgcctcagcctcccaaagtgctaggattacaggcgtaagccaccgcgcctggccttaggagttcttaacctaggtcaatagactccagttaagacgtctgtgaactt

SEQ ID NO: 40078 - DNA, 122 bp, Homo sapiens
gggagaagtttctggagcaccaccctctgtgcatatgtggaacaagtaatttggttcagacgaaacagaattatgtggagtcctcggcaggtgggttgagaactacgcaggtaggactcact

SEQ ID NO: 40079 - DNA, 122 bp, Homo sapiens
ttgggggccgggtggatcaaaaggaaaaaaagagagaaagaagatgagaaaccaggccctcgggctcagctctgacccaccactgcccaccatgggcttgaggtgctccagccccattggtc

SEQ ID NO: 40080 - DNA, 122 bp, Homo sapiens
gcgctgatgttcttttgtcttctccgtccgcaagcggggctaatgtgaagcacaggcagccgtcgctaggcccaagcactcgttagttgaaggctgggggtatgggggagggtgcagaaaaa

SEQ ID NO: 40081 - DNA, 122 bp, Homo sapiens
tggtcggttcgtctcccatttgccatccaggcctcacacccacactcgagcccacccggccggccagctttagaggaggggaggagcagggcgagttcacattattccttttccatcggaag

SEQ ID NO: 40082 - DNA, 122 bp, Homo sapiens
ggggaaggcagccgggactggcagcgggcgggctgctgaggggccaacccctggtggcggcggtgttgagccggtggctagcgagaagtcggccggcagtggggccgcctccttttcttcct

SEQ ID NO: 40083 - DNA, 122 bp, Homo sapiens
gtactgcctgcttccatgcacaaattagttttgtacatttgcttctttgcatcattgtgccgtaacaataaaaggattggttggttgtcccaggttaattttgctctggtctgtagagtgct

SEQ ID NO: 40084 - DNA, 122 bp, Homo sapiens
ccatgtggctggaaggaaactgatcgcaattcattttcaccaccatttctgagggcccaccgtatgctgctcttggagccactgctctcctggctgggtttccaaagcaccccaatctcaga

SEQ ID NO: 40085 - DNA, 122 bp, Homo sapiens
agggagttctgttttgaattgtcaagtttgagacaccgaaatggggaagttaagtggagacgtcaaaagatggtgtgaatttggagctcgtgggaaaggtcacagccagagataatagcgtg

SEQ ID NO: 40086 - DNA, 122 bp, Homo sapiens
ccagtcagcaactgcatttctcccctccaatgtcctctccatgacttatctctgaagtttcgagccaatgtttaaaatgtacactatttacaaatgaagtgtccaaatgccatattcccagc

SEQ ID NO: 40087 - DNA, 122 bp, Homo sapiens
ggaggctcacggagcgtcggcggaaggcacacaggatgttaaagctttacaacggcctctcggaaggggaggcggtgagactcctcgcggggaccgaccccctggaccccactgatctgaac

SEQ ID NO: 40088 - DNA, 122 bp, Homo sapiens
ggtctcaccattccagctccactaatggtccccagatgaacctgaggatagtagactgtccggagagctaatcttaaagactgcaaccgtgtcttaatgacttctagtggacaagtgaaaat

SEQ ID NO: 40089 - DNA, 122 bp, Homo sapiens
cagcttgagctcaggtgtatcttttctaagtatctgaatatgcttgctgctcaccaggctcgatttcagcttcggttctctttctgtcttgcttgcataggctttccaccccttgtgaattt

SEQ ID NO: 40090 - DNA, 122 bp, Homo sapiens
cttcagatcacctgatgtgcctggcaggatgtggctcagcctgggagaaatcatcccttgcgctgccccgcccggcccctccttacccctaggccacccgcctgacgacatccttgggaaag

SEQ ID NO: 40091 - DNA, 122 bp, Homo sapiens
tgcccagtaaatgattcctgagagtgtgtgtgcgtgtgtgtgtgtgtgtgtgcccgcgcgcgtgtgttgtagctctgtcaatccttggattagaaccaatgattgcagcttgtaggagggct

SEQ ID NO: 40092 - DNA, 122 bp, Homo sapiens
gctgagaagaagcttgttccagacgggactgactctgttaggctgcagaggccataggcccggcttctgcaccagcttgctcactcctccaggctggaggctggacctggagggctggggct

SEQ ID NO: 40093 - DNA, 122 bp, Homo sapiens
aaaaaaaaaattaaggccacaacacaaacgaaaaaatatatacacacatcactgtagtttcgttcaagagttcttaagtgggtctaagctaaggttttcatcttaccatggtctattcttct

SEQ ID NO: 40094 - DNA, 122 bp, Homo sapiens
aacagatccgtgctaggaggccctggctcagtccttccaccaaacacctcggcccagccgcggctgtacggctcccaggctcccagtgtttcctccacgctttcaaacctcagcgctgaggt

SEQ ID NO: 40095 - DNA, 122 bp, Homo sapiens
ccgcctcgggaaagctgcgcgttctccggccgcttgcgcttggccgaagctgctgggtcccgctgtgcttcccccgggcatgcgatggggataattcccacgcctcgctcaaagccatcccg

SEQ ID NO: 40096 - DNA, 122 bp, Homo sapiens
ggctctgaaccaaagcagatggccgggtcctctgtgtgctggacacagctgctgtgtctccggattatttttggcccttggaggaagccctgggagatttaaatgaccatataagacaacaa

SEQ ID NO: 40097 - DNA, 122 bp, Homo sapiens
gtgggactttatggaaatattgaaaataactgcggtaccattgtcagtcccttctcacctcgggccggacgtcgctagtggacgcgccggccccgagtcccttcccgcggccgccagacaga

SEQ ID NO: 40098 - DNA, 122 bp, Homo sapiens
taggcgcgcagaccgggaagcggcaagaagatttggccacgagctggggtcttcctggaacggagagaaagcacggaacccgcaccgggcttctctggcatcggcagtctacgtgctcctcg

SEQ ID NO: 40099 - DNA, 122 bp, Homo sapiens
cgcggccgggggctgagccgggggaggcggagtgcgaggcagccgggcgctgcaggtcggcgcggcgcggggcggcgcggggcggggcggggcggtgcagccggcgagggagcccggaactc

SEQ ID NO: 40100 - DNA, 122 bp, Homo sapiens
tcggctgaggagcctggcgtctaggggcaatgtctgaggggactggggtcctgagggggccggcggagccgaggaagggaagggcgggcgacccaggagcacagccccggctggaggcacag

SEQ ID NO: 40101 - DNA, 122 bp, Homo sapiens
ttgcataaaataatggtggctttactgtggatggcatctaacatttggtgaaaaagggcacgttagctgagcctcctccagttgcaaatgatggaaaagcaacattaagtgcttttttgttc

SEQ ID NO: 40102 - DNA, 122 bp, Homo sapiens
ggcggcgggagcgcgcggcccgggagtgtggctgcagtgcgccgggacaccagggctccgcgctccgcactcaagaggctcccgcgtcccaacccctcgcgcccgcgcgttcgcggatccag

SEQ ID NO: 40103 - DNA, 122 bp, Homo sapiens
atggtgagccccagagggaaggaaggggagggggctgcgagaggaggcgaagagggaaggcgactcaccctgttcttggttcaaagagctgggtgtgtggagacagaagaagtggaactgac

SEQ ID NO: 40104 - DNA, 122 bp, Homo sapiens
gaaatcgattcttgctggagattttcctttaagaagcctccagacaagtgagctggggcacggctaatcttcatctgtgttgggttcttggagtggattgaaaagtgctgatagagatattg

SEQ ID NO: 40105 - DNA, 122 bp, Homo sapiens
gcggcggggggccgcgggcaggtgctgctggtgggcgagctgtgggagcgcgaacagagccgcgcgctgctgcgggacttcgcacgggcggtgttcccgccggagccaggcgcggccaagcc

SEQ ID NO: 40106 - DNA, 122 bp, Homo sapiens
cccctccccccgcccccaggtctaaggcagatctccagggtcttaaagggtacctggcagcgctgggctcctctggacagtttccaactgaggttaagcccccgcatccggccactcggagt

SEQ ID NO: 40107 - DNA, 122 bp, Homo sapiens
tggcggtggctgaggcggctgggcctagggtgcagcgggcgcgtctgcggctggtgttggcgcatctctaggtagggccgggcccgagggcacccgcgggtcttccgggccgctcccggcct

SEQ ID NO: 40108 - DNA, 122 bp, Homo sapiens
cgggcccacctgatgctgcccggctcccgcttgggctggctgcgggcgaggcggggccgccgccctgtcctcccagtgggtggggccaggcctctcacctgggctgaaccctcagccggccc

SEQ ID NO: 40109 - DNA, 122 bp, Homo sapiens
ctgagctgatggtctatatatactcaggcctccagttgggggaagcccttggtggccaatcggggcttccctatctattgcgtcacacctcccccgtgtgtgacgtcaaaggcaatcccagc

SEQ ID NO: 40110 - DNA, 122 bp, Homo sapiens
gcctccgcccgggcctggccagcgccctgctcgctttgccctcggggcgtgtggagcccccggcacgctggcttctctctgggaggccacccagatggccggcccctaccccgtccgtccac

SEQ ID NO: 40111 - DNA, 122 bp, Homo sapiens
ttttctttctttcttccccccaccccagttgttgggtgttgtttctctctttttgtttttcggtgtttttgcctcccctcctcctcttcgctttccctccctccctcccctccctccccctg

SEQ ID NO: 40112 - DNA, 122 bp, Homo sapiens
gcagcaagatgggcttgaggaacaaagcaacactgtcagtgaatcgctgaactgtcattgcgctttgactgtgtgacattctgttccgtaggaaagcctgaggagtctcgtgtctctagcgt

SEQ ID NO: 40113 - DNA, 122 bp, Homo sapiens
cactggtgggaagggggcggactgaggctgcgtcacctgatgctgcgtcacctgatccagcgtccggagcgccttacagccattttcggtactggtgccatcacaactgctgatcgtttctg

SEQ ID NO: 40114 - DNA, 122 bp, Homo sapiens
ccgagttcggcggaaggttgctgctcccggggctggcaccgcgggcgccgggcccgccaccgcctcctcccagacagccatttttacccgcggagtaggcggcccggtccccagagcgggct

SEQ ID NO: 40115 - DNA, 122 bp, Homo sapiens
aggccggctgggtcccgcagtgggagacagggcagggtgggctcatcctccggatcaccgcggggacactttcagtcgggaaggcgtccccgtcccacggccccatctggccagcccgctgg

SEQ ID NO: 40116 - DNA, 122 bp, Homo sapiens
aaaatccatctgcatcttgcattaacccacccgcccagtgacggtgactccaggccaagtcgcagaagaagaccaggcgtgaggggtgagacctgtgagcccatctgcacctgcaccctccc

SEQ ID NO: 40117 - DNA, 122 bp, Homo sapiens
gaccaccaacctatgttcagtgtacaacctcctgagacctgggaggatccccttgaactccgccttagacctatacattcagaaattcgggcggtgagactcagacatctgcattgtaacca

SEQ ID NO: 40118 - DNA, 122 bp, Homo sapiens
acctgaggtcctcacccgtaccttgctggcactctggacactattcacgccaatcattttcgaaggtcaactaaggaaggggtttagagaaataaaaaggcactttccaaccgttccaaggc

SEQ ID NO: 40119 - DNA, 122 bp, Homo sapiens
tcatttaccactttaatgaaattatctggcaactttattgtggtgggtggggatcaatgacggtgtaatgaggcaattagcaaattctgatagttccatctactccatgtgaaagtctcttg

SEQ ID NO: 40120 - DNA, 122 bp, Homo sapiens
agtgatccgcctgccgtggcctctcaaagtactgggattacaggagtgagccaccgcgcccggcatcattgcttatcttttagactgagatagtacagctgattctaaacagcacccagaga

SEQ ID NO: 40121 - DNA, 122 bp, Homo sapiens
gataaagtaggacagatgctagactggcaaaagcagcaactttcttccactgtctcaactcggatcacaagggaagaaggaaagataggatcaaggatgaaggagaaaagtagaagctgttg

SEQ ID NO: 40122 - DNA, 122 bp, Homo sapiens
catgcgcagaaggcttagacacgaaatgtcatttcagcaatgtgcctagagaagctctgacgccgccttggaagtaagtcgttgctgcctgacctttgggcgtctgggacggatgcctatac

SEQ ID NO: 40123 - DNA, 122 bp, Homo sapiens
tccgtctcctgggggctgaagttgggcttgcgtgtcttggtgcgggagtgggggcccggccgcaggggtgtggagcccggcccggcacccagcagcagggctgccgcggccggctcggggct

SEQ ID NO: 40124 - DNA, 122 bp, Homo sapiens
ctgtgccattaagaggagcatgtaatccaatgagttgcctaatctaaacctcagtttgctcgtgtgtcaaatggggacaacgttacttacctcataagtttgttattagtagattagatgac

SEQ ID NO: 40125 - DNA, 122 bp, Homo sapiens
gattaacaaactgcatttcgtctgcaaccttaattcccctttgcatgtgaaacatgtctccgcttccattcattaagacttggaccttgttgggagtctatttttctacttagcacactcac

SEQ ID NO: 40126 - DNA, 122 bp, Homo sapiens
ccccttcctgacttttcggttccccaaacccgaggctggacctacctttaatcagatccacgatgcgcagctcgaagggaatgtcgttcttcttggcaaagatgtaaacagcgcggcagggc

SEQ ID NO: 40127 - DNA, 122 bp, Homo sapiens
aaatctgtgctctgccctgcccagttgggtcaccggagacagctgccttgctctgtgtctcggcattctcatctgcagctgggtataacggtacccgcctctctggatttcaagcctgttgt

SEQ ID NO: 40128 - DNA, 122 bp, Homo sapiens
gaggtcaaaggcatcgcaggcgaaggatcccagggagaggccagggccgtttatcagcgccggccatcgcctcaccaaacaccaggggctgggtgcagcccggctgttgcccctggggcggg

SEQ ID NO: 40129 - DNA, 122 bp, Homo sapiens
cacaggtgggactcctccaagcctgcccggtggcccacggagggtgtgaatgcctgtgcgcgtgcgtgtgtgtctccaccgacacaatcgcacagtgaaagtcaaacagttcgttctatatc

SEQ ID NO: 40130 - DNA, 122 bp, Homo sapiens
taatttgtgtctcggatccttccccttcccctcctcctcagtgttatttcgaagcaaatccgattacaacgtctatggattaaatcttgtttaaagacattagagaatgcattgtagatttt

SEQ ID NO: 40131 - DNA, 122 bp, Homo sapiens
tctgacctaaccaactccatcttgcttctaacctccaagctgtccttgttcattcctgagcgtaggctgaactaaccttgggaaggaatgagtttatagtttaacttcaaaacaaaaatagc

SEQ ID NO: 40132 - DNA, 122 bp, Homo sapiens
agaaggccccggcaagattctggggactcagtcactccaggctgtggggtctggagtggtcgggctgtgagagcgaaagaggctagttcttcggggctttgactccaggggcagaagagcag

SEQ ID NO: 40133 - DNA, 122 bp, Homo sapiens
tctctcccaggagccatgaatatcctgatgctgaccttcattatctgtgggttgctaactcgggtgaccaaaggtaatggaaccctataaagcagagatgatgactaggatgagttgttgcc

SEQ ID NO: 40134 - DNA, 122 bp, Homo sapiens
ggtcttgacggtttcccgcatcccgaggaaatacgggcgtccgagccggtggccgagctccggcaagggcgggaaccttcaggattaaatagacagggtctggctctgtcgcccaggctgga

SEQ ID NO: 40135 - DNA, 122 bp, Homo sapiens
ctgtggctgtggggaggaggagggagtgcttggggttgctcgtatatcctagaacccgcacgtttcctgagcttttgttatgtatacacggaggcggagggtgtcacttactgtacttgacg

SEQ ID NO: 40136 - DNA, 122 bp, Homo sapiens
cccacacacccactcagcacacgcgcacgcagcctttaaagcgcacgccccccgcggcgccgcggcgttcgcaagtccccctcgcgcaccccgcattgccctcagcctccccggcagccaac

SEQ ID NO: 40137 - DNA, 122 bp, Homo sapiens
ggctttccatgttagcctcaccttgccgcacacaccctctcctgctgtgctctaccacaccgtcttaaggggtgaagagaggcaattgactcaatcttgtatgtatacactcttgcaaaacc

SEQ ID NO: 40138 - DNA, 122 bp, Homo sapiens
aagacttggccagcaactaaggccagcaactggaaaatgggtgtggtgtcaggtttcagacgcccccatagttgtcttcacgtcctttaatatgtgttggcatccctcaagccctgccagtt

SEQ ID NO: 40139 - DNA, 122 bp, Homo sapiens
gggacaactggaggcgatgcacggcggcgtggcccgcagggtggtgggaccggacccttccgtcaacacctgcgtgagtcagagccttgccagaaatctgtgcctggtcttggtccagtgca

SEQ ID NO: 40140 - DNA, 122 bp, Homo sapiens
cccagcccagaactcagggagatggatttgaaggtccctcccatctccttgctcggtgtccggggatcatgacactttctctgctgcaaactctgctgtcttgatgtattggtcattactgc

SEQ ID NO: 40141 - DNA, 122 bp, Homo sapiens
ttttcggcctcatggatccaagacccgaggttattttcagtcacaactttctccacaccccgtacccccaaaagtgtacctcagctcaggcgggaaagggcactttgacccgccgtgcgcga

SEQ ID NO: 40142 - DNA, 122 bp, Homo sapiens
ctgcggaagcaggtcaccgggagggggcacccattcctagaggcaggagccccaagttctcgggggtggggtggttcctgactggcgcggtgtgacccgggccagtctcgttctctctgggc

SEQ ID NO: 40143 - DNA, 122 bp, Homo sapiens
agatatctcactttacatccctttactacctgactcaatttatagtgtaattgttttcaccgtttcctctacaaaaatgtagaaatgtatcagacagtgtcaaacattttgtgtcaaacctc

SEQ ID NO: 40144 - DNA, 122 bp, Homo sapiens
aggagaaacagacaggaaacctgggagcctcgcggggctgggctgggctgtcagagcctgcgcgatccgtcctcccttcccctcctatacggcttgggcgaccttgctcccgagggcgcatc

SEQ ID NO: 40145 - DNA, 122 bp, Homo sapiens
cacagcaaagctttggagtaaatgaactgaccctcccaaggcagtgcctcttctttcattcggagcagagtcctccacctcacccaaagaacatatgggaaaattatagacacgaaaagact

SEQ ID NO: 40146 - DNA, 122 bp, Homo sapiens
ccagtgggcacccagcacctccaacccctccacagcccccaacccagcctctgtcggaggcgaattctcagagtgagggttccctgtcacttgagagaaggttccctgtgacgtgaccttgg

SEQ ID NO: 40147 - DNA, 122 bp, Homo sapiens
tgaggtgccctaggctttggatagacgttggagaatggctgtccctcggactgagtccgtcgcaaccccctctgttttactgaggaaactgaagccacagaaaaagatgtttgctgatgggt

SEQ ID NO: 40148 - DNA, 122 bp, Homo sapiens
cttgagggatcttctcttaccaagtgctttcacataaatgatctcattaaatcttcctatcgctgtgcttggtaagtagtgttcggtgtcgaattaatgaccatgcccctttcccacaaaga

SEQ ID NO: 40149 - DNA, 122 bp, Homo sapiens
aaagggaagtcactggagggttctgggttcttcttgacctcccagaagcataaaggtacccgattcacagaagatacggggcagatgcaatagctttcttcaaacatccaatccagggtgct

SEQ ID NO: 40150 - DNA, 122 bp, Homo sapiens
accccagccatgacgtgcccaggtggggagacaggctggggctgcctgagaatggatcctcgtgagtgggttagcagtccagaccagcagaacctcaggatgtgtgcctggatccagccaca

SEQ ID NO: 40151 - DNA, 122 bp, Homo sapiens
ctgccactcaaccccacatttacttacatctttaccaccgcgtctattcctctctcaccccgcccccatggcccaagtctttagcctggcattcacgtaccctcactggcaatcttggggaa

SEQ ID NO: 40152 - DNA, 122 bp, Homo sapiens
ggcagaaggggcggggcgataccaagacggagacaatggggcggggcgatgccctggaggcgggattgcctgtgggagagccacccttcaggccatgcagaccccaggtgaaatctgcacag

SEQ ID NO: 40153 - DNA, 122 bp, Homo sapiens
acggaaaaatcaataaaatcaatggcaaactcctgcgctggggagctgggatgagaagcgcggaacagcacctgctctagagaggaaagggaggcctctgaggatgatgctgtgaccatggc

SEQ ID NO: 40154 - DNA, 122 bp, Homo sapiens
acagagctgacgctggttaatcccacaccagcctggagccagggactcgtctttgatttccgagaagccggcgtcccctggggtgtctcccatgacgcaccttatcaccgtcggggtgatct

SEQ ID NO: 40155 - DNA, 122 bp, Homo sapiens
agagtggcatgtctcaaaagatactgcatcaaggtccaggagacctggatgcagagtccacgctgctggtcaccgctgggtgaccctgggcgtgtcactttctctgtctctacttcccatct

SEQ ID NO: 40156 - DNA, 122 bp, Homo sapiens
aatggtcttgagacaaagggcgcccgcctttccagcgattctaacacctaccctcttacccgtgctcccctgcgcattgcctcctgggaaatgtggtttctaagaggcagagctctgcgact

SEQ ID NO: 40157 - DNA, 122 bp, Homo sapiens
ggcaccatcgtggtcatgctcaccatagcagtcacaggatgagcgtccatcgtgccctggcgcctccttccaccatctcccaggactgtgctgggggcctccggggaggagctgctcagaga

SEQ ID NO: 40158 - DNA, 122 bp, Homo sapiens
ttatggaaattaggcttattttaattgaaatatataaataaaagactggaaagatgccatcgaaatgttaaccatggttaccttgtgggaggagggatgggattattgtcgcgttggtgttt

SEQ ID NO: 40159 - DNA, 122 bp, Homo sapiens
ggccgccgccccgctggcctcgccttattagcaagttctctggggagccgcggtagggcccggagccggcgagtgctcccgggaactctgcctgcgcggcggcagcgaccggaggccaggcc

SEQ ID NO: 40160 - DNA, 122 bp, Homo sapiens
cactgggagaggccagaatcttccggaacagccagcccttacccatctctccctctgtgccgagaactgccctgaaatactgtggtattaattaactcgtttaacactaacaatctcatgag

SEQ ID NO: 40161 - DNA, 122 bp, Homo sapiens
accggataaagaggtgtgcatggcacacagcagcccccaccttggccacagtgagttcaccgggccttgggttcagcagatgagccattctctccaggacaatcatggatatttagaaacag

SEQ ID NO: 40162 - DNA, 122 bp, Homo sapiens
ccccgaagtagtagccggtgggcaggcgcactcccgtgatgtcaatgcagttcttccactcgttcttgtcctccaggtcggtcatcacctgcagggcccagcacgctaagcacctcgcagga

SEQ ID NO: 40163 - DNA, 122 bp, Homo sapiens
gtgggctccagatgtcatctctctgcagcttatctggggaaagccagcattgtctaaaaacgtttaaaacgaggcctctaggaggttcctggcagcgttacagtgatctcagccacccccat

SEQ ID NO: 40164 - DNA, 122 bp, Homo sapiens
gaggaagtgaagaaggtcatcgtaatgagcagcagattcggttgccgttcgaagcacaggcgttagggtatcagaacataagtaagtgattggaatcgggccattttttaaagtagcaagaa

SEQ ID NO: 40165 - DNA, 122 bp, Homo sapiens
acaggaacgcgcatctgcttagcaggcgctgagcccttgaggaggcctaaaatgaatgaacgcggctgtgcctcctgagcaggctcacagttgtgggtgggggacagaagggtgtccatgcc

SEQ ID NO: 40166 - DNA, 122 bp, Homo sapiens
agcgacggccgctccatggcggggtgcggtggcagcggcaagggcgcgagtgagccgtgtcgggccggccggcgccttaaacccgccgccccgcccggcctgtccgcgggaaccacaccccg

SEQ ID NO: 40167 - DNA, 122 bp, Homo sapiens
cacgcgattcaacaatgcaacagtccctttcttgtttgtttggaaaggttgtacccgcctcgaatgctagcagcaatcacgaaggagccactaactgtggcatttcttcacaacatttcccc

SEQ ID NO: 40168 - DNA, 122 bp, Homo sapiens
caagactctctccccagggaagaatggggtcgtcaaagacgtttttgcctttgggggtgccgtggagaaccccgagtacttgacaccccagggaggagctgcccctcagccccaccctcctc

SEQ ID NO: 40169 - DNA, 122 bp, Homo sapiens
gcatgagccactgcgcccggccattattgaccatcttagtgagacctccagcacctagtacgggatctggcacacaggaagcactaattgactacttgctcttagactacatgtattttcag

SEQ ID NO: 40170 - DNA, 122 bp, Homo sapiens
acgaccccaccttcccctccctcggtgccgaggtgcaagaggcggttgaattcaggagcgcggcgcagggcgggcttttcccggctgtcccctaggggtccgccccctcctcccgcaccgcc

SEQ ID NO: 40171 - DNA, 122 bp, Homo sapiens
ttgggggcaaaggtaaggggtcgcagttgaatgccacccgaactcatccagatgccgctgcgttcaagctctcccagcacccgcggccgaagtaaataacaattctcttaatgctaaggcag

SEQ ID NO: 40172 - DNA, 122 bp, Homo sapiens
tttaattggccacctaaaaacccaaactgaatggtatatgagccaagtgtaaactgaaaacgttatggtgaaatttccatgttaatatttcttttttcttattaagaacaacgtaacttggg

SEQ ID NO: 40173 - DNA, 122 bp, Homo sapiens
gtgtatctgggaaccctggggtttacctctctgaggacacctgaggttccgagcctgtagcggacttagagactattaagtgcagggtccgaaccatcatcgagtctaaactttgtgtttaa

SEQ ID NO: 40174 - DNA, 122 bp, Homo sapiens
cagagaactactttcctgcctctaactgtctgcctgtctaaatccattcatcattcatcacgcacttactgagtgcctacctgggaacgcgggggatagcagagagcaagagagagctaggc

SEQ ID NO: 40175 - DNA, 122 bp, Homo sapiens
aaatgtcttttctctccacttgggcaaaaaaatcatccatatttttacacaattaaactacgcccctaccacccctgccctaaaagactaccaattaaggccatcattactcaacataaaac

SEQ ID NO: 40176 - DNA, 122 bp, Homo sapiens
ctacagccaatgtgagaaaattattttcctgtttaataatgaactatcttttttttcccccgccgagatgaagtcttgctctgttgcccaggctggagtgcagtgtcacgatcttggttcac

SEQ ID NO: 40177 - DNA, 122 bp, Homo sapiens
agtctaaaaaaggcatttcctgacgctggcgagtgactcagtgtcaccgtgactcagccgcgcccggttgcccacgaggcgggagggggaggcagatgctgcgggcggcgcggggagccgag

SEQ ID NO: 40178 - DNA, 122 bp, Homo sapiens
cgaaccccagctgggtttacggggtcgctcggtggtccgtttctacagccctcggccctgcgctctggccacttggcttgtttttgtttcactgttccccggagtctctgcctggggagtga

SEQ ID NO: 40179 - DNA, 122 bp, Homo sapiens
tcattgtctacatccaccacatttttacctctctccaggtgtagatatccaggttgtctccgaccccatgatgtcaaaaataattcccaataatggacctttatgaaaatctctttaggata

SEQ ID NO: 40180 - DNA, 122 bp, Homo sapiens
tagtcaaaggacatcatttttcaattcacagaaagctgccattttcctgcttcaggtttccgcgaactccacggcaggaggaaagccgagctcccttaagagcatccgccttggaagcacca

SEQ ID NO: 40181 - DNA, 122 bp, Homo sapiens
ttatatgcattttaggccacattccacaaccaaaaggaaattattattagcatggataaccgaaggtggactgggcatggagggaacaattgctcccttgcaaatattcttccctatctctc

SEQ ID NO: 40182 - DNA, 122 bp, Homo sapiens
aacctcccttcctggaggaatacaacatgaatcccaagtttcaagaccagaacgttccctcgcctcttggaacctgggaactttcccctgacacaccagggttagggttaaggggctttgcc

SEQ ID NO: 40183 - DNA, 122 bp, Homo sapiens
tggagggaatcctggcgctttgggcggaggagtgctctgggtggggcccacctcctccagcgcggccggcgttgccgctttaaggcggccgcggcgcgagcaggtctatggtaatgagccgc

SEQ ID NO: 40184 - DNA, 122 bp, Homo sapiens
tctgttcatctttcaactatacagtggaaagcctactcaaatgttcaatttaccccataacgcaccttcctgcctgcttaaacaaatgtatttagggataaatgtttttaatattattctag

SEQ ID NO: 40185 - DNA, 122 bp, Homo sapiens
ccacctaccctgctgggcttgcccgagaggctctgagtgtgtgaaggggaagacaattatcgctaggctggagaatagaaagagcaccatcaggtgagaaagagaagaaaaaaagagagggg

SEQ ID NO: 40186 - DNA, 122 bp, Homo sapiens
agtcagatagaactacaggatttaaaacaagctccaatccactgcctcacctctttccaccgtcaagttccaagccttagagacaaccaattccaacttttttagctgtttcttctgtattt

SEQ ID NO: 40187 - DNA, 122 bp, Homo sapiens
gtctaagggtgcccctcaaaaaaagagagtgctgggtgcactattgtccccgcactccggcgattgcctctgtggggatattttggtcgcctcctcagcctgcgggaagaatgtacgagtcg

SEQ ID NO: 40188 - DNA, 122 bp, Homo sapiens
aggcaggaggcggggcgcagcgcgggggcaggaggcgggccagggtcagggcagaggctgcggccgcgcgtccccattggccgggacgcagtgagccgcccggagctcggcgcgggcggggc

SEQ ID NO: 40189 - DNA, 122 bp, Homo sapiens
gctggaaccaatggacataggccaaaggtgtcatccataggggaaattctctttctctgacgtactcagcaccctcagccctgattgaaaggctttccaactgattccgtcaggcccaccta

SEQ ID NO: 40190 - DNA, 122 bp, Homo sapiens
cctgagcaaggcaagccaaggcagccgacaggcgctccactatcccattagagagagctgcgggaatcccttggagggcagaagctcaggagtgctgggcactagggaaaactggcaggctc

SEQ ID NO: 40191 - DNA, 122 bp, Homo sapiens
caaaaacgggaacagaccgcccttgaggacaggcgctgctggagccaagagactcacagtcggtcacctgatttgcatttatattgagaaatcacagctggagggtaccctggcagatgggt

SEQ ID NO: 40192 - DNA, 122 bp, Homo sapiens
cgggcggggccagcatagaggaagtagcgctctcggccaatacacagatcgcttggcaaacgagcattttcccgcgcctatcgtgaaagcgcgagaacacaggggattatcgcgaggttccg

SEQ ID NO: 40193 - DNA, 122 bp, Homo sapiens
gcactggccgccgggcttgcaggggcaggcacggtgcgcgcccagacttttctgggaaagcgtgcgcgaacctgctgcctggcagctcggtggctgggagcccagccctagctcacaaacgg

SEQ ID NO: 40194 - DNA, 122 bp, Homo sapiens
gtcttctaataggcagcctgagaattcttcctgttcattggccatcggtcatggagaaggcgggctcagtggacgaacggctttctgggagctggggaatgcttgcgtagcgtagtttccca

SEQ ID NO: 40195 - DNA, 122 bp, Homo sapiens
ttcgtttgtttattttaatacatcaattataatagatcaataaagtgcttgttgtaagtacggctaagttcagcagcaggtttgtgtaaaccagggctccctcaaaatgagcatagtaccca

SEQ ID NO: 40196 - DNA, 122 bp, Homo sapiens
accggtggggagagtgctcaaacccgcgtactcccttccctccctcttctcttccccagccgggggcaccctcatcccaggctgactgacgtccctggcacccaaatgtcgcggggagtgcg

SEQ ID NO: 40197 - DNA, 122 bp, Homo sapiens
tgtcacctcgccctcccaaccatggggtcacggggctcccgcccctccactgtctgcgggcggcctccagaggttactctcaaacccaccagctccaggggacccgcctgtgctaacactaa

SEQ ID NO: 40198 - DNA, 122 bp, Homo sapiens
cagaagcagagaatgactgtttcaggtccaaaagggaccttggagacacggggaccaagtcgcagagaaggaaataacttgttcaaaagaacctactggggtgtgtgtactgatgacgatcc

SEQ ID NO: 40199 - DNA, 122 bp, Homo sapiens
ggccggcgcccgggacaccccgccgccctccctgccgccccagggacgagcccagcggtgcggagaagtgggaggctggagcctgctgaggtcatttcctgtgcctctccgcgagctgcctg

SEQ ID NO: 40200 - DNA, 122 bp, Homo sapiens
tcactctgtcgcacaggctgcagtgcagtggcgcgatttctgctcactgcaaccttcgcccgcggggttcaagcgattctcctgactcagcctcccaaatagttgggcctacaggcgcccgc

SEQ ID NO: 40201 - DNA, 122 bp, Homo sapiens
ggcggtcaggcgccgggcggtccccaagctcggccgttctccaaacggccggaggaggggcgaagcccgtggtgaagccccgcgtcccatcccctgacctagggtgcagttaccccagagta

SEQ ID NO: 40202 - DNA, 122 bp, Homo sapiens
cgcctttgtcagggtgattaatagcggggggactgtcgttaattcactgcctaatgaccgcggcccgcgcgctccgagtaatcgggtgatgtatgtggactgtgcacacctcgtggcagagg

SEQ ID NO: 40203 - DNA, 122 bp, Homo sapiens
tacaagataccttcttaatattattgcttctttgcacttaaaacaagtttgtccaacccacggccctcatgaggcccagaatggctttgaatgtggcccaacacaaatttgtaaactttctt

SEQ ID NO: 40204 - DNA, 122 bp, Homo sapiens
agttcgattttatgccggatttagcccttattactatttcaagggtgcttcgggctagtgcgggcgggagcattcagggatgccaaggggaagactttcccaagtcaccgtcttcttctctg

SEQ ID NO: 40205 - DNA, 122 bp, Homo sapiens
ccggccgtgcgtgctgcgcaagcacgtagccggcctctgcggaactgggcgttgcggccccgcctccatccacacccaggccacgcccccaggggagctccgcccctcgcccggctcagctc

SEQ ID NO: 40206 - DNA, 122 bp, Homo sapiens
agaaactctggagttggggtccagcaatgttaacaagctctaggggatgattctgctctgcgtcaaactttgagaactggagctctaaaactatgaccacaggcaccatgaagaacatgttt

SEQ ID NO: 40207 - DNA, 122 bp, Homo sapiens
aggggagctagacagtgccccccgtgggcggcccgcgggctgcggaaagcatctccaaggcggagctgtagttcgaaattgaagacccttgctgtattttccataaatcagcctgtgcttcc

SEQ ID NO: 40208 - DNA, 122 bp, Homo sapiens
gtgccttggtttcctcatcgtaaagtgaacagaaggcaccgagcctgcacccaaggcccccgagcagctctggcagttggagcaacacccggaagcttcacggaacaaagaattctgcgact

SEQ ID NO: 40209 - DNA, 122 bp, Homo sapiens
gtgacctcaggtaggttacatacctcccaataaagcacttaaaactgttccttggctgggcgctgtggctcacgcctgtaaatcctagcactttgggaggccgaggcaggcagatcacgagg

SEQ ID NO: 40210 - DNA, 122 bp, Homo sapiens
ctgggcttcttctgagaacagattcttgttttccgtctgattcagatgtgaaacttttcccgcagcctcccctctcacccagttccggtaggctgggtctctgcctccccactctcttcttc

SEQ ID NO: 40211 - DNA, 122 bp, Homo sapiens
ttactgcaccgaagcccagtcatcagaagatttcaacttctaccaatttggggtgacatccgcctaactaatcttgcctccaaaaagccaattccaaaagcacatgttgcaagggagttggg

SEQ ID NO: 40212 - DNA, 122 bp, Homo sapiens
ttccccacccatcagtcatttcctctccacttctcaagtccttgcactctgctggacccccgctccttgctgttactgcagctcctccagcccagccccttgccaaggtatgatctgtggat

SEQ ID NO: 40213 - DNA, 122 bp, Homo sapiens
cggccgaggcgcggcggagggcgacgggccgcgcggggcgcgccatgctggcggtggccgcgctctacgcgctctgctggggtccgcaccacgcgctcatcctgtgcttctggtacggccgc

SEQ ID NO: 40214 - DNA, 122 bp, Homo sapiens
ccatcttgcgcagtcagagtccctgaatgccttaacccggaattctgctcaaggagcatgcgcagagcgtgggacgcgcgtgcaaccatttctgaagagggcaaaacacccgaacttcgtct

SEQ ID NO: 40215 - DNA, 122 bp, Homo sapiens
ttcctgagcttccatttctactccagccactgagtgtgtccttgggcaggggccaccctccggccccttggtaagccttgcaacctggggttcgacctcagagacacagacacagagcttta

SEQ ID NO: 40216 - DNA, 122 bp, Homo sapiens
acggggcagggggctcacctggaagcccaggcagcggccatagaagcatcccttatgcagcgtgacatactcccggaggaagtcggcggtgagcccctcgtcgccctcaaagaagagtaccc

SEQ ID NO: 40217 - DNA, 122 bp, Homo sapiens
cacgcagagcctggcccgggccaggtcctggggtgctgagcatgggtggggcctgagagacggctcagggaccatcctgggagggccgggcggaggggcagcaactggggctcaggctcagg

SEQ ID NO: 40218 - DNA, 122 bp, Homo sapiens
ggggaggtgatagcggcgctgtgggcaagagcttttgccaaaggagaatggagaaaaagacggaagcacccaggccgactggactcaccgacgccccacacaagtgcctcgatctgcatctc

SEQ ID NO: 40219 - DNA, 122 bp, Homo sapiens
aatgaaggcactggccccatgatctgacgacatcatcgcctccccaaatagctgcatggccgaattggaagtgacgcattcttagtggactcctaatggccagccctgaggacagaagacag

SEQ ID NO: 40220 - DNA, 122 bp, Homo sapiens
gcccgctcttccctgtcctggggccaccgacccggagccgcttcctaaacctcccagaggcgaatgactcaacgcggggaggagtttgccaaactcccggctgagccctccccccgcctgcc

SEQ ID NO: 40221 - DNA, 122 bp, Homo sapiens
ccgcctccgtgggctcctgtgccgcccaagcctccccaacgagcgccgccccctgctgcacggcgcccatctatgaaggtggagctctcgtggcctaattacttccctaaagccctacctct

SEQ ID NO: 40222 - DNA, 122 bp, Homo sapiens
aatcaggacaccaccacagggaccacgtgtgtagacccaggccccctcacctgggagtcacgtttattgaaaaagtaaaaagtgtcacagtaaaaaattcacctggggacaaagccaggcct

SEQ ID NO: 40223 - DNA, 122 bp, Homo sapiens
attttctgcagttttactgtattgctcttaaaatgcaggcagcaaagcacggcacgccgccgcatcaccgggcctgacctccgctgcatgtgcacagcccgacggctgctccctggcgatgc

SEQ ID NO: 40224 - DNA, 122 bp, Homo sapiens
gatgcaaactgtcccctgtgctggcacagtgctttgtttacacccgaagtggggccttcccgtccgtgtttcctgggtcctgaggtggggccttcccgtccgtgtttcctgggtcctgaggc

SEQ ID NO: 40225 - DNA, 122 bp, Homo sapiens
aggaagcgcggatccttcagttctgggcgttttcaccaggtggcactcagaacaccctcacgtgacaagcgtcccacccggaagcgaaatctccccttctacagagttcctccggcgcttcc

SEQ ID NO: 40226 - DNA, 122 bp, Homo sapiens
ggtgtgagctactgtacctggccttaagtgtattttcaatttacaatggttctatgaggacgtggccccacagtaagttgaggagcactgggtatgtatgaataaaatggcatgacaggcct

SEQ ID NO: 40227 - DNA, 122 bp, Homo sapiens
atagcaaaccaacctcagatttcaattttgtcaaggatgatacaagaactagtagtgtctcggtgactgtggtctactcagagctccatcacagctaccctgagcccaaggcagtcaggtgt

SEQ ID NO: 40228 - DNA, 122 bp, Homo sapiens
ttggactggaaggtttctggggtcactccagtgaggctggggttctagtcccaatctcaccgtggcaccccaaaggcccagaaacccggaccatcacctctctttccccggggccaacggag

SEQ ID NO: 40229 - DNA, 122 bp, Homo sapiens
cgctcctgcacgagcaaccagcgcgacagctcgtccccgccccgtaatctcccggctattcggggcccttcgccgagatttctcccggaccagccccgggattggctcctgccgaacttcgc

SEQ ID NO: 40230 - DNA, 122 bp, Homo sapiens
gggtgggcgcatgagggccgaggagaggcagggactccccggaggaggtttgggaggaagcgactccaagtctgagggaagagctccagtgcgccagggccagcccactagcgaggaggagg

SEQ ID NO: 40231 - DNA, 122 bp, Homo sapiens
cgaggcggacccgctggtgggctggtccctgccacagccgtggagggcggacgtgacctacgcggccatggtggtgaaggtgggccggcccaacgccctgcgcgccccccggccaccttcct

SEQ ID NO: 40232 - DNA, 122 bp, Homo sapiens
ctttggacctgagccgtaaaacagcacacacagccccgatcaggcagagtggctgggacacggggcctccgggagggggccagcacccccaggctgggtctccccatggccacagtggagct

SEQ ID NO: 40233 - DNA, 122 bp, Homo sapiens
cccaaggcattgcgctgtctatcttcaccctgagcccgactgtgtctctcttgtttgtagcgtcccccaaccgctctcctctccgttttaaactctggaatgggaaaaagcctccttacaga

SEQ ID NO: 40234 - DNA, 122 bp, Homo sapiens
tcctgcccctgtacactttccccattggctggggtcaggccatacaatctaaagtaatcccggcgggctaaacatttgaaatttttttagataaggtgggcacgtaagggagagagaggaaa

SEQ ID NO: 40235 - DNA, 122 bp, Homo sapiens
gagggctggctggccggggtaagttgctctggacgtgctggcggggagcagtcctggtggcgggatggcgggggcacttctgggtcccagggtgcacgggatccgggcagtgctcagggtgg

SEQ ID NO: 40236 - DNA, 122 bp, Homo sapiens
atcctcgagatctgaagagaatcgaggtcccccacacgcgcactcacagttgccccgaagcgttgtcccctgactcacaagagacagcgaatcgctgccagcgcagcgatgcctagggagcg

SEQ ID NO: 40237 - DNA, 122 bp, Homo sapiens
taaaacttgctggcatcggggaggcttcagaccctaagaccccattgagggcaccccagacgcaaagacccccatggagggaggccacagacccagagcccctcagaggggcccagacagag

SEQ ID NO: 40238 - DNA, 122 bp, Homo sapiens
agaccagctaaggaaatagaaagataatcagcatctgaaagaaggggtttctgaggatgtcgacattcagctccaaaagaagcaggctgtctcccagaaaataaggcagccctgcacagact

SEQ ID NO: 40239 - DNA, 122 bp, Homo sapiens
agagaaagtaacacgttggcccattgtgtgtctgagcggcgctctgcctgcagctatctccgtgtcaatggcatcctttgatagtcgcagtggaccgggtcacacccctttaatctgacttg

SEQ ID NO: 40240 - DNA, 122 bp, Homo sapiens
cgaagcgcagccgccgctccagcgcccccacccctactcctcgtctctcacgctccgcgccgccgccacgcgccgcctcacattccccgggccccgccgccgcctcttcacacttccatcag

SEQ ID NO: 40241 - DNA, 122 bp, Homo sapiens
ctctccctgcgcgcctgggattttccagggctcaattggagcactggcgagccgcctccccgcccccagcctcccctgccccggctgcccccgagtcctgtttcagggatcctagccctctc

SEQ ID NO: 40242 - DNA, 122 bp, Homo sapiens
ttgtctagggccgggtgggctgagcacctcctgctgcccggcctacgctccccggccagccgcgccgctcacgccccaacttgggcccgcgccccccagcccccgcccaggcccgcgccccc

SEQ ID NO: 40243 - DNA, 122 bp, Homo sapiens
cgtgggctcaagagtaggactggcaagttctgcgaagtggagcaggcctctgcagctcggcgccccgggcctcgccaggacccctccctgccggggccttctgtagagggggttgaattggg

SEQ ID NO: 40244 - DNA, 122 bp, Homo sapiens
ggagctagccttcccctaagagctgcctggaaagctgtatttgctgcacgtggaaatctccgttattttccagcacccaacagtagcgtaatgggagtaacggacttaacctcatttctctt

SEQ ID NO: 40245 - DNA, 122 bp, Homo sapiens
ggaggtggccgagagaggtgcacctggcagcggctttgcagggccacctgcctccgagggcgcagagaggagcaacccgcgccggccttcacgaacgtactggcggtcactgctcggggagg

SEQ ID NO: 40246 - DNA, 122 bp, Homo sapiens
ccggtatgcccgaccgcgcatgcgcacctctgacagctcgtcactgcgcgtgcgcacaaccgacaggtggccaaccgttctcagcgcgcatgtgcatggctcacgtgtcagaaacatcgatg

SEQ ID NO: 40247 - DNA, 122 bp, Homo sapiens
ttgtaagactttaaaatctgagtgtgaacaaccttgactgtcgcctgctctctgggcccacgtcactgaaagctaagaaaacagctccactcaatggactaacatcaccgagaacctccttc

SEQ ID NO: 40248 - DNA, 122 bp, Homo sapiens
tcccgaaggtggttaaccagccataccggaaccacgaaacacacagggtcctgggcaacacggaggactaacagtaacaccgccacgccggcagcaaagctcattttggtccccgccccgtt

SEQ ID NO: 40249 - DNA, 122 bp, Homo sapiens
cgggaatgacgggaatgacgagcatgccttagcaatttggaggagttagttatctgataccgtaaaggacactggctttgacatagaaagaactttgcacaggcttgtcgttcgcctgggga

SEQ ID NO: 40250 - DNA, 122 bp, Homo sapiens
caaaggtcagcgactgctcgagggcatgggtgtccctggagcaggtgtccagaatgcgggcgcccagcgtgatgttaggcagcaggtccgggtcgttgttgatgcgatccagggcgaacagc

SEQ ID NO: 40251 - DNA, 122 bp, Homo sapiens
ataaagggacgctgttgttattaagaggatcagtaagtgcaagaaaacgaccatgtgtcacggaggtttgtttgtctaggcgcttctgtagtagtggcattctggttgtacagtcgtatacg

SEQ ID NO: 40252 - DNA, 122 bp, Homo sapiens
gcgccggggcggggctcgggacggccgggctgggagctggagcccacagcgggaagcggccgccgcccgggcctcgcagggctaggcgaggcgagggggggcggggccgggcgctacgggaa

SEQ ID NO: 40253 - DNA, 122 bp, Homo sapiens
cccgtccccaaggcggctcgtcaccgctgcgaggccaatgggctgggccgcgcggccgcgcgcactcgcacccgctgcccccgaggccctcctgcactctccccggcgccgctctccggccc

SEQ ID NO: 40254 - DNA, 122 bp, Homo sapiens
agggcaagcagtgagttcagatctaggcacatggccactaggaatggttcttcactgccacgtgggcagccaacagccagtagctagagaccagcctcggtcttcggcctgcgggttctgca

SEQ ID NO: 40255 - DNA, 122 bp, Homo sapiens
ggacaaaaagaccataaactgaaacttctatttcagtatagtggatcttctcagtggtctcgtgagcagaggttttatcatcacaatggaccaatgactcctgtggctgttttccattcttc

SEQ ID NO: 40256 - DNA, 122 bp, Homo sapiens
ccagggatttcccaccagctgaatcagacacagttgctgtcctcagggagcttacagtcacgggtcaataggatactgcagctaggatagcagtccacacagggccagggcggggcactaag

SEQ ID NO: 40257 - DNA, 122 bp, Homo sapiens
aaaagtttgagctgatcactgactattttaattaaataaatgcaatttggtaaaagtagtcgtttagtgtgagatcatatttgtgttactgaccagctagagcttgaggattttgtcttctt

SEQ ID NO: 40258 - DNA, 122 bp, Homo sapiens
gcccgcgctcatgggggggctcacttacgagagctatggtcgccgtcgccatcttgcgtccgtcgcggcctccgcgcgcgcctcccactcttgctccttccgctgtctcgcgcgatctgggt

SEQ ID NO: 40259 - DNA, 122 bp, Homo sapiens
cctgtgtgacattcctggcatgctacttagcaccaccactctgtctccattgcaaggaagcgtatcggaatgcaagtgagtcagagtgatattattataggggataaccttaaatccccata

SEQ ID NO: 40260 - DNA, 122 bp, Homo sapiens
ccccatcgtggggcagctgcggctgagggctgtggctttggcagctgcgacggggagcggcggagaccgcctctgctcccgcctggggtaagggggcgttttgggagccgggccccgcgcgc

SEQ ID NO: 40261 - DNA, 122 bp, Homo sapiens
gatgcccgcagtgctgttgtagcggctgtccatattgggaggaggcgccttggacttgtccggcgcccacaaccacagctcgggcggactgagggctagctcccgtcaggcggggatggggg

SEQ ID NO: 40262 - DNA, 122 bp, Homo sapiens
tttggctaaaatgccatgtttaaccagtcagcatccacatctttaaggtttgcttgtacccggtataatctcgtttcttgaaaaccgagtaagtgaaaaattggaggtgagggcataataga

SEQ ID NO: 40263 - DNA, 122 bp, Homo sapiens
ttaatatactaagaagacagttattataaaagggtatctgaacccacctacattattgaacgtctcttaaatttacttagccaatttctaagtctcaattacttagactttataggcaccta

SEQ ID NO: 40264 - DNA, 122 bp, Homo sapiens
acgacggcagcgcggcgggaggttcgattgacccggtcttggcgggtcggtgagtcttggcggctgttaacgcgcgctttgggaacaggaaggttgagagagaggtgctggggtctgcgtct

SEQ ID NO: 40265 - DNA, 122 bp, Homo sapiens
caggacataaaacaggaacgtgtaggagcttcctgttgaaaatgggactgatttatgttgcgccaccctaccttccagtggagtaatctgagccagcagagaagaaacttccctgctggttg

SEQ ID NO: 40266 - DNA, 122 bp, Homo sapiens
agaaaggacgcatcacagttttcagatcttaatgtggccgaggttttacaactcccgacccggcgcagaaaggaaatcccaccatgttccccggagtcgagaaaacggtgaacagctttcgg

SEQ ID NO: 40267 - DNA, 122 bp, Homo sapiens
aggccgctcgcctgatgcctacagtgggggccacgacagttctggccagagcaactgctacggaggaggaggccgctacgaggagtaccgaggccgcttgctcgatgccaacagtggaggcc

SEQ ID NO: 40268 - DNA, 122 bp, Homo sapiens
ggggagcaggtcacgacccctccccatcccccacggacggcgcgggtcccctcgaatcttcgggtcccagattcaccccaaggctgcggaacccgcccagaccctagaccggggagagtctc

SEQ ID NO: 40269 - DNA, 122 bp, Homo sapiens
cccttcaggctccggcttcctgtggtgggcagcacctgtggtgaggcagcccccacatctcggcccctcttcggcactccccgcagggctcccagggtgccgccgagaggctgcagctctac

SEQ ID NO: 40270 - DNA, 122 bp, Homo sapiens
gcgatctccgtgaaggggttgctgtcccgccggtgcaccagggggctggcctgtcggtgccggctgcctccgccaggcccacttgtagctgtggaacttggagagtggccaagcaagtggtc

SEQ ID NO: 40271 - DNA, 122 bp, Homo sapiens
ggttggcgtgtgtgaccctgagctctgggtcagggcaagctcatgcatggagcaggatcacggcaggttcctggagatcaaacggcaaaggctgtaaaccaggaagccaggtcttgcctggg

SEQ ID NO: 40272 - DNA, 122 bp, Homo sapiens
atatttattgcctacttgtcctgtgtcataagttacctggatcttaactgttctatggagcgtgccttgtaagtatgtaaacgtagagttacaatatattgtagtatttcctttctgtgaat

SEQ ID NO: 40273 - DNA, 122 bp, Homo sapiens
tggggagtgcatccagtgagcggcaggcaggtacaagcttcccatgacagatagtcaccccgttccgcaatcacgggagcctcggaaccctcgctttcacctccccatcccctcaactgtgg

SEQ ID NO: 40274 - DNA, 122 bp, Homo sapiens
ggatgtagtactgcctggagtagctaacactgaggtctggggaagtcaccacaaagctcccggaacctggattttgtacaaatacacacacggaaaagtaaacagttcatggtgagctcaaa

SEQ ID NO: 40275 - DNA, 122 bp, Homo sapiens
gtccagcctcctgatgtacatgccagtgctctttcccccaagccatgtgtctcctggtcacgccctttgtccttgctgtcctctactattctcttctggaagactcacgatgagagagccga

SEQ ID NO: 40276 - DNA, 122 bp, Homo sapiens
acacgtaggctaattgcaaggaccttaaaatcgcaaataaaaaggcgcctgtaggtcgggcgcggtggcccacacctgtaatcccagcactttaggaggcgggcggatcacctgagaccagc

SEQ ID NO: 40277 - DNA, 122 bp, Homo sapiens
ttcattttctaattggggaatccgttgagggcgcagctcggccttaaaaacctgtacttgcgattctaagaccagcgcgggttttccgtgccccaccttgtctgccggtggagactgagcag

SEQ ID NO: 40278 - DNA, 122 bp, Homo sapiens
ggggcagaagcctggcagaggcgctcctcacttcccggacggttggcggccaagcggaggcgctcctcacttcccagatggggcagcagccaggcaaaggcgctcctcacttcccagacggt

SEQ ID NO: 40279 - DNA, 122 bp, Homo sapiens
aggccacccccatcaagtccctcaggtctaggtttggcaggtttggcaaaaacacagcaacgctcggttaaatctgaatttcgggtaagtatatcctgggcctcatttggaagagacttaga

SEQ ID NO: 40280 - DNA, 122 bp, Homo sapiens
ctcgagggccagacggccctatggtccccagtttcctccgtagatcacacagggaggcagcgaggcagggtgcaaggatgttaggggtggaaggggtgacaccgggagcaaagactgctacc

SEQ ID NO: 40281 - DNA, 122 bp, Homo sapiens
tgaaccagggagtggcctcaccagacatcgaatctgccagagtgtggatcttgaacgtcccgtcctctgcagccgtggagatgcgtgtctgttgcttttatgccgctcaggccatggcgttt

SEQ ID NO: 40282 - DNA, 122 bp, Homo sapiens
gagtgaagagactttccatggccttggagaaaaataacggaacgtttaccaccgtgctggcgtgggcgtgttagaagcctcaggaggtggctggcgggaagtgggatgagcgagggaatgaa

SEQ ID NO: 40283 - DNA, 122 bp, Homo sapiens
gacctcaaactcaagagctttgcagagagcaggctctggcaagcgggcgtggggactgctcgcagagcactgtagagagcaggcacactgaccgtgacttcatcccgggcttgacctccacc

SEQ ID NO: 40284 - DNA, 122 bp, Homo sapiens
accccgggccagccctcccgccctcacgcggcccgtgcgcaaagcggaccgggccggcgacgcgaatctccgccccgccccatctgacagcaaattttcccattggtcgagagacccggcgc

SEQ ID NO: 40285 - DNA, 122 bp, Homo sapiens
gggatggcggccgggaagaggcgctcctcacttcctagatggtatggcgccgggcagagacgctcctcactttccagactgggcagccaagcagaggggctcctcacgtcccagacgatggg

SEQ ID NO: 40286 - DNA, 122 bp, Homo sapiens
aattccatcatggtaggaacgcggtaggacctgcctcagccaactcgcgcagcatctacgcgggccaccagcagtgctccactaaagctcacctcctgtcctcagtactccgtcccgcaggc

SEQ ID NO: 40287 - DNA, 122 bp, Homo sapiens
aggcaattaagttgctcagccaatctgagctatctcacctgggaggatagtccctgccagcggccacagacaatggcttggctgactcaggtacaaagggcctctggtgcagacatctctgt

SEQ ID NO: 40288 - DNA, 122 bp, Homo sapiens
gtaggtaggatccacactggtatctccaatgctgggaatgggagactcatgctgtagttgcgtaggtgcaatgggagctgggagggagaaaggagagagcaacagggaagaggggagctgtt

SEQ ID NO: 40289 - DNA, 122 bp, Homo sapiens
tcttcaggcaaccagccgcctcaggagctggggcttggggagctgctggaggagttctcccggactcagtaccgggccaaggatggcagcgggaccggcggctctaaggtgagattggaggt

SEQ ID NO: 40290 - DNA, 122 bp, Homo sapiens
aggaactacacaaagtttacactcagaaagcccctccgcatgtctaccctgaatctttctcgctgcagtttaaatcacagatgcttctatgattgctttagtggatgtggattgaccaagtc

SEQ ID NO: 40291 - DNA, 122 bp, Homo sapiens
agaagagttggtagacaggtgtgttctggacttactaaacaggcttagaaatgcattttccggctgggcgcagtggctcacgcctgtaatcccagcactttgggaggctgaggcgggcggag

SEQ ID NO: 40292 - DNA, 122 bp, Homo sapiens
cgttggcgacggtcttctgcaaacgacagagcgcaagccttgcccctggaattctagagccgccgcaaagataggaactcaaaacgacccgagccccggagccgcagcccctcgggacggtc

SEQ ID NO: 40293 - DNA, 122 bp, Homo sapiens
tggaggaactgtgtagtcttgctgcctttgcctggggctctgatgtcttctctccacctgcgctctccggggagctggggttttggcaaccaccccgcttcaatttttattggtttccacta

SEQ ID NO: 40294 - DNA, 122 bp, Homo sapiens
ccgccgtggccccgccctcacgctctgtaccggagtggggctcgtcttccacctccccggcgccccagctttgcttccgtcccgctcgcccccaggcccggtgcgcacgcgtacctggctcg

SEQ ID NO: 40295 - DNA, 122 bp, Homo sapiens
acagagtttagactgtctttgcttcatcatctgaaggtaaaattttccagatacggcagacggctttcagagtacaataaacagggaatgagaactatttacatggaagtttctttctcatg

SEQ ID NO: 40296 - DNA, 122 bp, Homo sapiens
gttcaccagctattagcctctatcgtagagtctgcttttagtccaggacctcttttggatcgagcatctagtatattttgatgttttagcaaaacttccattttaacatcctgttgcaatta

SEQ ID NO: 40297 - DNA, 122 bp, Homo sapiens
ctacggaagtccttgacaaaaaggaaacactgagacagatgggctgagaagaagagctgtcgagtccctgattgggaaaggaaaaattaaaaaccctagatctctggtacacataagtctgg

SEQ ID NO: 40298 - DNA, 122 bp, Homo sapiens
ccatttttgtatttcaaatcctactcatctatcaaggtctaggccaaaatttacctcttccggaaagatcccccctggattcccaatagctctaccctaaataaatctacaaatcactcctc

SEQ ID NO: 40299 - DNA, 122 bp, Homo sapiens
gaaggggcatgtgctagataggggaccctacaagctgtctacaatgctacacagcacttacggtacttgtctatgtgtttagattctcgaatatttttgcaatcataaattacttcactgag

SEQ ID NO: 40300 - DNA, 122 bp, Homo sapiens
gactcttcacatctccctaattaaattgtctggtttaatcctctccttgagccctctcctcggcctctgtcctccccagccttgcatccattccatgcccaccttccatgctggggatgact

SEQ ID NO: 40301 - DNA, 122 bp, Homo sapiens
ccccgaaaacgctctaaacgctggcggaagtcacgcagagatgggctagacgctcaaccccggtctcttccccgaaaccgcggtgctcccacttcctgcagtccgaggttccgactcgacgc

SEQ ID NO: 40302 - DNA, 122 bp, Homo sapiens
tccggccacgcctctgccgactgcggcaacgcgagggacagctggtctccggggttgcagcgtaacgccctccttcccggcctcatctttcctgactgcataacgggcatacagtgggttcc

SEQ ID NO: 40303 - DNA, 122 bp, Homo sapiens
cggccgagggcaggctggcgggacgcgccggcggcggggaagttggttattgcgaagtgccgtggctgccggcgggcgctgcgggactctctgcaatgggacccgagcagctctagagggag

SEQ ID NO: 40304 - DNA, 122 bp, Homo sapiens
gctggagcgaaggccgggccccgctggcccactttggggtaaaacgggttcctggcatctcgcgggcgcggtcgttcgccccgcatctggtcaggacttcgccccccggtagatggcttggg

SEQ ID NO: 40305 - DNA, 122 bp, Homo sapiens
gaatcctcggtggctaaaatggtgccccgcgcagctgaggtgctcagttgcggactggatcgatctcctcatcccccacactctgcctggccgccgaggcgacttaatgggtgtgcggcctg

SEQ ID NO: 40306 - DNA, 122 bp, Homo sapiens
cctgtaagtggaaatagggggtgccaccttccgatgaaaacccggatcccgtactgtcaacggagggcccttgaattcacatccctcagcccgctagaaagcccctgaaaccacgtggcctt

SEQ ID NO: 40307 - DNA, 122 bp, Homo sapiens
accgaggtttaggcgttagttggtccgctttgacccgaggaagagcatggagcagaagaccgccctgcgttatcccccggctgggccgcggggcacctgtgcgctcccgctgcgccttgggc

SEQ ID NO: 40308 - DNA, 122 bp, Homo sapiens
gttttcagcaagactcagtccaatgcgggctcctcttcccacaccgagctgctgcccacacggcactcagcagccccagcttcagggccagactgacagggtggagtcctgccggggcctcg

SEQ ID NO: 40309 - DNA, 122 bp, Homo sapiens
cagacaacatcctgcccctcgtcatctgcagcgggatctccaaccagccgctggaattcacgttccagaaaagagagctgcctcagatggtcagtcccagccagctcgccgcaccacagcct

SEQ ID NO: 40310 - DNA, 122 bp, Homo sapiens
tgtggccctagtggcaccaaagtttacctggcaggctggtggcacgagagaacataatgtcgggaaaagcactcagggcggaggaagagattggaggtccagagatgctgaggagtgagaag

SEQ ID NO: 40311 - DNA, 122 bp, Homo sapiens
ctgcggacgagaaatctgtctgcttgcagccctggggtgtgcgcccagccccgcgcccaccggcccagccctcaccttgaccaaaagcaggaagagcagcgaggccgccaggccacgggctg

SEQ ID NO: 40312 - DNA, 122 bp, Homo sapiens
ctgggaacaccccacttgaactctaagcttctccccaaccctgttgcagattcaaactggcgacaggaaaacaatgccccccatgtctcgtcttcagaatgtgcacctggccacctcccagg

SEQ ID NO: 40313 - DNA, 122 bp, Homo sapiens
gaatcaagcaattaaccagtcacttggcctttttgcagaaatccacaaaacgtgtagactcgcttaattccatctcctcctggcctcttcacacggaaattggctgctcgggcgaatgttgt

SEQ ID NO: 40314 - DNA, 122 bp, Homo sapiens
gagctcagaaataaactcacgcatatatagtccattcatttttgacaaaggtgcaaagaccgtttggtggagaaaggaagggtttagattcacaaatacttattttctactaacagtgctgg

SEQ ID NO: 40315 - DNA, 122 bp, Homo sapiens
aagcaggtgataggacactcctttgtaaattaagcctctaatctttctttatgctcatgccgatttgagagaaacctgggaatttccttttcccccattaagctattacacaacttaatgct

SEQ ID NO: 40316 - DNA, 122 bp, Homo sapiens
agcaggggcaaggagcagatggcattaaggaagaatgaagtttttgaaggttgggatggacgaaaaggtgtttctcatggagagggatgctttagcaaaggctcaaacattggggcatattt

SEQ ID NO: 40317 - DNA, 122 bp, Homo sapiens
attccttctgcttaagaaattagcatttcaaaaatatgccactttcccctgaactccaagcgtgtctaataatgcgagaagcagattgtcttccctcgtttccttaatttgtttcatctaaa

SEQ ID NO: 40318 - DNA, 122 bp, Homo sapiens
tccggactggtgccctcctcactcccacctgcatctggggcccatactggttggctcccgcggtgccatgtctgcagtgtgccccccagccccggtggctgggcagagctgcatcatccttg

SEQ ID NO: 40319 - DNA, 122 bp, Homo sapiens
gtgccactctcagccttcgaagcaaaaccagctgagaccagcacctgccagatctgaatgcgcagctccaagttctggggggtgggggtgggggtgagccaaggaggtctggcttctctagg

SEQ ID NO: 40320 - DNA, 122 bp, Homo sapiens
cacacacacacacacacactgtccatgcagacaaaatcatgaatcatctccatggctgaacgttttagcgttcagtaatattctcagaggcccaaggttttcagccaaatcccaggtctgtg

SEQ ID NO: 40321 - DNA, 122 bp, Homo sapiens
tgttccccaaatgatcgtggcagtcctgtgacaaaagtgaagcccactccccaacacacacgtgtatggccccccgacccctcactgcaaacccccacagaaatgctgcccatcctacctgt

SEQ ID NO: 40322 - DNA, 122 bp, Homo sapiens
tcgtatacaccttcaggagaaccacctcaggctgacaggcagtgcggagggccccaagagcgccttagggttgcctgctccagagagcgggactcctgcgctgcagccgggatactgggcgc

SEQ ID NO: 40323 - DNA, 122 bp, Homo sapiens
acagccaaataatactttggtaaagtcatcctgaaactatttcttctatccggccaaactcgggcacttggacagaagcaccagagacatcacagagaaaagagatgcaatgggaataacac

SEQ ID NO: 40324 - DNA, 122 bp, Homo sapiens
ctggagatttttgtcctcgtatccaaattctctccctttctgtcagtctctggaaggactcgatgctcaaagaaaaacacttctcatcctgaaccagtggcaaagggaagaaaaccaacacg

SEQ ID NO: 40325 - DNA, 122 bp, Homo sapiens
catcggcaggagaatgggcgagcaggagcccaacaaaacaggctgcgaagacgatgcctgcgagcagctgccctgtgccctcaccacacagagcagacagagcaaacagcacaggctgagtg

SEQ ID NO: 40326 - DNA, 122 bp, Homo sapiens
agggacccgaactcccaaacaaactacacctgcaagcgtttggtgtttagactttctccccgatgtataaggtgcaggctgctcgtcgatacttcctcctccaccctcacggtgcacacccg

SEQ ID NO: 40327 - DNA, 122 bp, Homo sapiens
ccgctcccgggccctcggggcatcctgtctccattcgcagcccagtgccctccactcccacggcctcgggtacagcttccacagggaaatcacccacatctgtgtctctcgcctcgttccca

SEQ ID NO: 40328 - DNA, 122 bp, Homo sapiens
atcaggaaaataaggagccggtaggagggagtggagatcctcctcgcggagagctcgccgcggcgcagggctcccagctccccgcagctgcctccccgaacactcaccctcccggttccgag

SEQ ID NO: 40329 - DNA, 122 bp, Homo sapiens
caatcattatctttaaatagtcatatcttttccagcgatcggccccttccccccgagcctcgccgctccgagcagagtcactctaatccctcgtccaccatttatcgagccatcagagatgg

SEQ ID NO: 40330 - DNA, 122 bp, Homo sapiens
agagtgctgcaagggacagcctcccaacggtgtccctcctcccgcctcctccctggcacacgagggaccgaggcctgctcaatgcacaatgcagcctttgatatcccggctacagcaggagg

SEQ ID NO: 40331 - DNA, 122 bp, Homo sapiens
ctcacaggcccctgatcacacctggtgacacctggaaagtgtcccaactcaggagtgaggcgggcaagggggctgagtgctggagtgtggccatgggaccagcacatggcatctgtgtggca

SEQ ID NO: 40332 - DNA, 122 bp, Homo sapiens
ctcgagcggggatgagaagcgtggcgagtgcgttcgcggctgctttgacctggtgggcgccgcctccggcactgcaccgaggcggggcgccagcgcccaggttgctgggctggccttggcgc

SEQ ID NO: 40333 - DNA, 122 bp, Homo sapiens
aaagtggcctgagtctgtcaggttatccttgactcccagagttgggcacagggcctgacacgccacaagctgtcaatacgtgcctgttcagtgaatgacaggtgtgggactgtgcaccccca

SEQ ID NO: 40334 - DNA, 122 bp, Homo sapiens
gtgacaatctagggtagcagcacatgccgggagagctcactgaaggagcagagaggcctgcgcggctggagcagacctgtctggggagagttcagagagaccagccagctggagaggggttt

SEQ ID NO: 40335 - DNA, 122 bp, Homo sapiens
gggagagggacgggctaggagccaagcggaaggaccccgtgttcaaggcccttcaagggacgggacaggcgaggaatctctttgagtcttttgaattgttttatcagtcaggcctgggaagt

SEQ ID NO: 40336 - DNA, 122 bp, Homo sapiens
tcacaaacaagtaaaataattcctgtcaccgtggtgccttgctaaggaatatgagatcatcgctgtaaagtacacgcagctagacctttagagaaactactttcagcatagtctgctttctg

SEQ ID NO: 40337 - DNA, 122 bp, Homo sapiens
gtcaatcaggccagcccaggccgcaccacggtctcctagttgacagttcgaggggcctcgcgggccgcttgcttcgtcagcttacagggatcccgcacgccaggtgagcccacacactgagc

SEQ ID NO: 40338 - DNA, 122 bp, Homo sapiens
tgccttactcatgatgctgagtaagctttgtagtaacaaaaagagacccacttacatcctcggaataggaaatagattagtctcccctgcagtgctgctgcttccttcactgtccacgctat

SEQ ID NO: 40339 - DNA, 122 bp, Homo sapiens
tggagatgtgccacggcacctctttctagttcttaggactgaaaatggagctgggttggccgagtgttagtggccccaagcttcactgatttaatatgcctttaaattctgattataaaagt

SEQ ID NO: 40340 - DNA, 122 bp, Homo sapiens
gctcatgccccccttgaaggcgtccatggaggtggggaccgcggcgggcgctccaggggccggggctgggcgcgccccgccgccctggctgcgacctgcggggacaagagcgcagcgcctaa

SEQ ID NO: 40341 - DNA, 122 bp, Homo sapiens
gctacacggtcggggcgggcctagtaggcgcttcaggcttaggggcggaacagcgcgggccgcgcgggcgtaggcggggtatctggaggaggcgcagggaacctggagagggtccagccctc

SEQ ID NO: 40342 - DNA, 122 bp, Homo sapiens
ttggctccctgccttttctctattatacttcaggtatttgctagcctcccagcttatccacgagcccaagatggtagaggctaagtaatcccctgcctctaccagagccttcagcacctagg

SEQ ID NO: 40343 - DNA, 122 bp, Homo sapiens
ggcagtgggcatgtgcacttggctctgacacagccactcatgcaacaccctgtgcaatctcggcctgggcctgtgtgtcctgccctcattcctcacgggtgactgtctcccctgagccactc

SEQ ID NO: 40344 - DNA, 122 bp, Homo sapiens
ggttttagagacttacccaacaccttcctgccctcaggagttcaccagagggaagagcaacgcaatccagacttcacccgggaatagttgtgtggctttggccgagatgtttctcctccctg

SEQ ID NO: 40345 - DNA, 122 bp, Homo sapiens
cggcgcgctgctttctaggcaggcactgaagctacggcagccacgcaaataggtatcagccgttaaagcttggctacaggcaaggggggggcaataggcccctggcgctgtggggccccgca

SEQ ID NO: 40346 - DNA, 122 bp, Homo sapiens
ttaggccagtgctctcatggaaccaaggaggcttatggagccttgctctcacctctcagccggcaagttggagagctgtcctagcagggcgagtccagcaagggatgctgctgctgctcagt

SEQ ID NO: 40347 - DNA, 122 bp, Homo sapiens
tccacagggctgaggctgggggtcctgacaggggcatggggcaccccagcctggcgtccccggttctctgggaggggccgcaggggcaggccagagcacagcgcctggaggctagacatgtg

SEQ ID NO: 40348 - DNA, 122 bp, Homo sapiens
tgggggctggacatttgtcacgaccgtagaaggtgccacacagacggggagccctcgtgccgaccgtgggcttcagctaatggcgacgcgtccatatggcccctcagtgcggcagacgcccc

SEQ ID NO: 40349 - DNA, 122 bp, Homo sapiens
tgcttcctcctccccagtccatgccacctcctcctgcgtgccggcaaggtgggcagcactcgggaagcccccgtctggctgtgattcttgcagggcgattggagcaatacagccctgtctgg

SEQ ID NO: 40350 - DNA, 122 bp, Homo sapiens
ttgaaaatatttcccctgggcgcggtggctcacgcctgtcatcccagcactttgggaggccgaggcgggcagatcactaggtgaagagttcgagaccagcctgaccaacatggtgaaaaccc

SEQ ID NO: 40351 - DNA, 122 bp, Homo sapiens
agagccaggaccactagttccgtcaaatccggggcgggccattcaaacagctaagggaggcgtctcctagtgtgccttttcctgagtcatctctgcacgtgtttgcccccttttttcttcgc

SEQ ID NO: 40352 - DNA, 122 bp, Homo sapiens
taacgtatgtgaagccctcagcacagtgtctggcataataaaataggagctgttcctctccgttggaatagtagggcaggacttgtgcaacactgtgatgggaaaacaaagataaaggcaga

SEQ ID NO: 40353 - DNA, 122 bp, Homo sapiens
cagatgtgtgcgcagcaggccgaccttgccaggctgtgcttctggggctgcaggctgcaccgtggccgggttaggttagaacgtgcattttcccagggcatcagcagctgacccttgatgtt

SEQ ID NO: 40354 - DNA, 122 bp, Homo sapiens
acacgtataccaaacaacagagtgcattctctccagctctgcagctcggggttccagggtcgggggtcccacaaggtgggaaggagaagcaggccttatcacgaagggctttgtaggacagg

SEQ ID NO: 40355 - DNA, 122 bp, Homo sapiens
tccacagactcctgttgagacctttcgcgggtgttcccctggcagaaagctcacggctttcgtgcagcatcaatctactgcggcactaccggctgcggcgggggacagacattgtacggggg

SEQ ID NO: 40356 - DNA, 122 bp, Homo sapiens
gccgcctcggcgcttgcagaacccagaagtgaacagcaggcgacccggaaggtttgcgcgcggctccgcagcgagccagagccggagcccgagcccggagcctgtgccggagccccagcccg

SEQ ID NO: 40357 - DNA, 122 bp, Homo sapiens
gctgtgagggcccctcccagtgcgggacccctcctgcgctaagaggaagcagaagtgggccgggcacagggcgggctcacacgtgctgataggtgtcataccccagaatgggtagcttgtcc

SEQ ID NO: 40358 - DNA, 122 bp, Homo sapiens
ctggagctcccagagccaagacagggaacatgaagggccatgatatggaaagggccatggcgaggggtgggaagtggcatttgcagctgagccctccatggtgttttacatgggccagctcc

SEQ ID NO: 40359 - DNA, 122 bp, Homo sapiens
tccaggcccacgggggccgggtgagccgctgaagcctctctctcccggcctcactttacccgactgccatgtgatagaggaggggcgggaactgcttaggttcctctcagacctccggtatt

SEQ ID NO: 40360 - DNA, 122 bp, Homo sapiens
gttattactgcatttcagaagtggagttgcatgaaaagattaaccccttttttaaattcccggggtctaaagggtaacagtatgagttagaagcatggaagctggaggcttagggtcagggg

SEQ ID NO: 40361 - DNA, 122 bp, Homo sapiens
atttaagaagtgtcctttttaacactggttaggttgagagtgagggtcgaagcaggcagacggttagcaggagagaataagtcgtgaaccaccatagaaatggggctgatagagagctattg

SEQ ID NO: 40362 - DNA, 122 bp, Homo sapiens
tacaaaccctttttggatggagccctacagtaaagaataactctttgctgtttggcattccggcttttccctttccttgccgatccccacacaaaatacaaaccttaagaaagagaacttat

SEQ ID NO: 40363 - DNA, 122 bp, Homo sapiens
gacaggccagacgttggtaacacatcgccaaccagggcaggcgccatgagtagacgtgaacgagcccagggccagcccaggctctgaccgtgggtgtgcgtcggggagggggtggggaggag

SEQ ID NO: 40364 - DNA, 122 bp, Homo sapiens
acttcctaatgaccacaaagtattctggtagcagagacctggcattggttcaaatcaggtcgttttgctcttaaggccatgttcgttccaccaaacataaaaacccaaaccatctgggttct

SEQ ID NO: 40365 - DNA, 122 bp, Homo sapiens
gcgcttagaggcccgggaatctgtgggtcttttaggcggagaggggcgaaggaggttattcgttttggggaaggtcatggaaacagcaaaggctcagaggtggtgcctaaagtggctggaga

SEQ ID NO: 40366 - DNA, 122 bp, Homo sapiens
gtttgccgccatgtgcagcgcctgcggcctccaaggtaagcggcacttgatgggcctcggcgtcccctcctcccttcacttctgctctcctggagcccctcgctggggcccctcctcctggg

SEQ ID NO: 40367 - DNA, 122 bp, Homo sapiens
agagcgagatgttttctttcgactgtttcatctacttagaattaatagcatttctcctcccgcctcccggcccccgccccccgctccccgggtggtgaacgcctgaagagggaggcgtggtc

SEQ ID NO: 40368 - DNA, 122 bp, Homo sapiens
tcgagatcgcttagccgcgctttaaaaaggtttgcatcagctgtgagtccatctgacaagcgaggaaactaaggctgagaagtgggaggcgttgccatctgcaggcccaggcaacctgctac

SEQ ID NO: 40369 - DNA, 122 bp, Homo sapiens
tacacttcacaaacgcactagtgcccactgtctttatctggaaggggttgagtaggttggcggggggcaacgctggtgtctacacagccaagagggaacattcacgcacacagaatctatga

SEQ ID NO: 40370 - DNA, 122 bp, Homo sapiens
gcacatgggggtccagcaggtacagagaaggtgctgatctgtatgcatctccatcactcccgatccctcaccttcacctgacacaagcaggctcaacagagagactggggcaatgtttatca

SEQ ID NO: 40371 - DNA, 122 bp, Homo sapiens
aggggccgcggacagtgaggggtcagcatcaggcccctcagccttggcaggtgttgggggcgctggcagctgcaaacgcgcgggctggcgctgcttacggctgtgtgcagcaccggggtgcc

SEQ ID NO: 40372 - DNA, 122 bp, Homo sapiens
ctgaggtcgtggggtccttatctcactttgtgggatcatgtgacatgcgtgtgggtggctcggacctgggtacagctgtggcttgggtgatgcttatgcagaggtgacgtcgttggcactgg

SEQ ID NO: 40373 - DNA, 122 bp, Homo sapiens
tggctgcgacgacactaaggtggagaccgggatgtagcgaggactcccagagttgggagacgttgtacgcttactgggacctaaatcccgcacgagttcccacccaagtgccgccgccccag

SEQ ID NO: 40374 - DNA, 122 bp, Homo sapiens
aggagtggctcaggagcccctgaaagtgtccagcagctacctcagtgacacccagagcagcgagagtcatgtttccagcgtgcagcacccgaggccagaggagggcagccatgccagcctga

SEQ ID NO: 40375 - DNA, 122 bp, Homo sapiens
caagcagtctcctggagtccctcaacttaatctcggccgattctcagacctcctcaccctcgcagcccattgccctggactggctcatggtgtcacccctcccgcagtgagatgaagaccaa

SEQ ID NO: 40376 - DNA, 122 bp, Homo sapiens
ctgctgagcagtggcaaagagcatctctgctggcctgtcaaatcgtgaggtgattctggccgaacttgtctctgcagacagtttcaagatggatatgagagtcaggatacctgtgactccac

SEQ ID NO: 40377 - DNA, 122 bp, Homo sapiens
ggcttttctgaggtcggtggtccccaggcatgaagacttgaacatttttagactgactcccgggcctctgagaaaacaatgtggagagatactgctaacaactggagaaataaaatctctct

SEQ ID NO: 40378 - DNA, 122 bp, Homo sapiens
gctggacagatgaggggctgaaggcaggccgaggtcccagagaaccagtggagctgggatcgcaacgcgtctctgctccgtccagagcactctggtttttttccacagataacctgagttgc

SEQ ID NO: 40379 - DNA, 122 bp, Homo sapiens
cgctccctggcctaccttgcacaagaagtcgacatcgtagaaggcggacagaagtgtggtcgacatgtttctggatcccgcagtggccggagcggcaggccgggaggtcgggaggagccctt

SEQ ID NO: 40380 - DNA, 122 bp, Homo sapiens
atgaaaactgaggcagcagcctggttgtggggcatctggagcagggtgcctgtactttggcgaaaggcaggcaggcctccttatggaatactgtgtagcagaagggctctcataaaactgtt

SEQ ID NO: 40381 - DNA, 122 bp, Homo sapiens
gggtgctgagaccccaccttaggacctgagagattgaactgtgtaagcgccattcagctgcgagtgcattcttggactgccttgtgagcatccccggtctgggcaggaccctctccttccca

SEQ ID NO: 40382 - DNA, 122 bp, Homo sapiens
gttaatgctgagggaaagtggcagatctggactgggagggcccctctgtggtccccagcccgcggttgctggggtgacggcccccgcacggagcatgcccaggaagggcctctgctgtgtca

SEQ ID NO: 40383 - DNA, 122 bp, Homo sapiens
ctgcagcggccccgtttgcagggcagggacccgggtgctgccccaccctcagcgttccagcggagaaactgaagtccgaacctgaacctcgggaatctgtctgcacctgtctaggtgggatg

SEQ ID NO: 40384 - DNA, 122 bp, Homo sapiens
acctccactcagggccgactaggggactggcggagggtgcacgctgatggatttactcaccgggtgcttggagctccagcagctggctggagcccgcgatgacgtcacggactcgggtcaca

SEQ ID NO: 40385 - DNA, 122 bp, Homo sapiens
ttattcagcaaccttactaaacccatttttcacttagtcgttcatctgtagatgcccgcccgcccgcctgcctgcctgcccgcccacccgcccgcctgcccgcccgcctgcccgcctgcccg

SEQ ID NO: 40386 - DNA, 122 bp, Homo sapiens
ctggactggacgaagagcagcttccccgccctgcggacggtgcacaggtctggcccccgccgtcctcctgagccacctccctgaccctaggtcgtcggcggcgtctgtccttcccacaccca

SEQ ID NO: 40387 - DNA, 122 bp, Homo sapiens
cctggctgagctggtcagaatcacttgggacgaaacttacacagccagtcctatcagattcggagaaggcaggaatctgtatttttagcaaggtctccaggggattctgacacagataaatc

SEQ ID NO: 40388 - DNA, 122 bp, Homo sapiens
tggcggggttgctttgtcctgcgcgacagcaggagttgtgggcggccgctgcaaggcccgcgctggccccgtctcccttcgcaggtgtcgaaccaggagtcacctccgcatctgcgcagcag

SEQ ID NO: 40389 - DNA, 122 bp, Homo sapiens
tgtagtgcgagaggaactagagaggcatgtaaagcaagcttgaggcagcagcgcctttgccgcaaagcatccctttcccctcagctttagcaatttaggaagaactgaggttctcaggggag

SEQ ID NO: 40390 - DNA, 122 bp, Homo sapiens
taaccctgacaactcatagattaggatcagaaatctagacctgaacccagggtagcccttcggtcaaactgccacataagtgattaattactaaccaggaaagtgccaaaaatacagttcct

SEQ ID NO: 40391 - DNA, 122 bp, Homo sapiens
ccgcccagagacggccacgtggctccgagctccgccaatcagcgcggggaccgcccccggcgtctgccttcttaaaggggccgcgccctcgaaggacggtcattcttcttttattttttatt

SEQ ID NO: 40392 - DNA, 122 bp, Homo sapiens
gaggcctcggaaggtgggggccctcctgaacagagtgagcacaggccctgctgatgcgcccgggtcctgccaatgatcccttttccatgtgcagcgcctctcagaggggaagcagcggggcc

SEQ ID NO: 40393 - DNA, 122 bp, Homo sapiens
aacagcgaatttgcaaaggaacgttgtaaacgactgtctctttctcttttgtgcattaaacggactgggagaaagctttgggaaggataaaaacccagggtccacatcagatgacaacctaa

SEQ ID NO: 40394 - DNA, 122 bp, Homo sapiens
gtcaaagaaaggggcaacagatggcacctggaaaatcggatcactcccacccgaatactgcgattttccgacgggcttaaaaaatggcacaccatgagattatatcctgcatctggctcgga

SEQ ID NO: 40395 - DNA, 122 bp, Homo sapiens
ggtacgctgcgccatcatcccctccgacatgctgcacatcagcaccaactgccgcacggccgagaagatggcgctcacgctgctggactacctcttccaccgcgaggtgcaggctgtgtcca

SEQ ID NO: 40396 - DNA, 122 bp, Homo sapiens
actggtgtccttatacaaagaggagaagagactcagaaacagagacacacagggaagatgcgaagatggaggcagagtctcaagtgatgtttgtacaggaccaggaacaccaaggatggcca

SEQ ID NO: 40397 - DNA, 122 bp, Homo sapiens
tccccgccgtcggggacgccgacggcagcctccatgttgctggtcctgctgcaggccaggcgcggcgagggctagccccacatggccaggccgccggctgctcgacgccccggcctggggca

SEQ ID NO: 40398 - DNA, 122 bp, Homo sapiens
aggccatgctgcaaacccagacttttcaggctgcatctcagatataccgaagtgtgtacccgctacgcacagtgcggtgatgcctggccacctccagcctccagcggggacctcctgcccag

SEQ ID NO: 40399 - DNA, 122 bp, Homo sapiens
agcacacctgttttgcctctaattcctaggtggtctggcatggaagaaggccagaggctgcgatggatcatctttgtcttgggagattcctggagatggtggggagcccctgggcacgtgca

SEQ ID NO: 40400 - DNA, 122 bp, Homo sapiens
cagcggcggcagcggctgcaggcctggccgattgtgaggagacagcggtacctcctgggccgcgcacccgacccttccaggggtcccggctcgcgccgcggccgcgcgaggcgcgctcgagc

SEQ ID NO: 40401 - DNA, 122 bp, Homo sapiens
ccatcctcaggtggaggcttctctgttgaggggcctcggagaccgccccccagccctcagcggaccatgctggctgggagctccgccctggggcttctgctctgctcaggtagggggagtcc

SEQ ID NO: 40402 - DNA, 122 bp, Homo sapiens
actattaactagcaacctatgaggactcagggagaagacccttaggtcaccttagcccaccgttccaccgtgaaaataactgcactgtggctctcccattgtggtgcttaagtgctcccaag

SEQ ID NO: 40403 - DNA, 122 bp, Homo sapiens
ggacagaccggcccgccgggagcccggggcggggggtggaggggattgcggtgatggaagcgggggagaaccgggttcccaaattaccggtttccctttagacagccgccgtctgttgtcgc

SEQ ID NO: 40404 - DNA, 122 bp, Homo sapiens
tctctccagatgcctttggataatttctgcttgctaaagaggcggggccttagtcctcatcggccgatggtttggagactgaatcaactatctgtaagtttgggctccacttcctgcccagt

SEQ ID NO: 40405 - DNA, 122 bp, Homo sapiens
ggagctatttctcggtgatacctagaagggtggctagacagaggccctcccaaagagcggcgggtaggacccagactgaggttgcggagcgtgttgccggcagtgctgctctggactgtact

SEQ ID NO: 40406 - DNA, 122 bp, Homo sapiens
ctgtcacttcatctctccatttccctaaagtaaactcatatgggcagccacagacacacgcgaacacatgcatacacacctatgcctcagtgacacatgttagtgagtgctggccatgtgct

SEQ ID NO: 40407 - DNA, 122 bp, Homo sapiens
ggtggctgtgtcttagccctcacttaaccatgagtagtaagatgagggcctactggagagcgagagcaggactgtgtttgggcagggagtgaggggccctggggtggccaggaagacagatg

SEQ ID NO: 40408 - DNA, 122 bp, Homo sapiens
tcaggctggggccactctctgcagctgcctcccggctctggcagctccaggtctggctcacgttgcccaggcgacgcccctgcctgtgctcctgccggcctctgccccgcatcccacaggtg

SEQ ID NO: 40409 - DNA, 122 bp, Homo sapiens
cccgttggggctctgggcatccttggcgaagtggactttgtaatgtttgtgcatggcagccgggcagctgggtgctgggggcctgctcctgaggcaggagggagcacacaggcttggcgtag

SEQ ID NO: 40410 - DNA, 122 bp, Homo sapiens
gacctcctgcgcccccgccggagcctgcgacggagacagttgtcacctcgaggccgccgccgccacagtcagctgacagccgccgcgccccgcccccggcaccgccccactgcgcaggcgcc

SEQ ID NO: 40411 - DNA, 122 bp, Homo sapiens
gttgcgttcttgtccagcccaagactgtggcacaatgattccccagaggtagacagtgaacgctgtctctggtctgccctgttaggctaatctgcccatccgcccgccctcccgccggctcc

SEQ ID NO: 40412 - DNA, 122 bp, Homo sapiens
ctgacagaggaaagaaagagggcactaaatctcctctcatcatagtaatgatgaagcccgcggcgtcccggccccatcccaatgccctcgacgacaacaaagtgctctattgtgatctatca

SEQ ID NO: 40413 - DNA, 122 bp, Homo sapiens
tgttttgggcaggaggcgggctgggggcttgcgggacctgtgggcgctgcggggacgcggcgtcgatgctcaagaaaccagaaactcggcttgaggagttgctgcttttttgtcggaaggtc

SEQ ID NO: 40414 - DNA, 122 bp, Homo sapiens
tgagtattggtcccagtctccccatcagccccagggtgcttgttgagtgatttcgcacggcgcacgatggcgtaacggtcagcaggaatgagtgtcacaaaggagggatggaagggaatagc

SEQ ID NO: 40415 - DNA, 122 bp, Homo sapiens
aattcgttcagtcctgaggttagtattattgaaaaggtttaattttgttctcatctctgccgctgtctgtagtgacctatagagaaccactgtgatcacctcctgtatgtatgcaaatctga

SEQ ID NO: 40416 - DNA, 122 bp, Homo sapiens
ccgcggaccaactctcgcgacagccagctcaaagcaggcaagaaccggaaggggcggggacgttccccgtgagccttcgcggtgctggctgctcatctgcatacggaagttcggcacattat

SEQ ID NO: 40417 - DNA, 122 bp, Homo sapiens
tttcgttttcttgttggtgtggcgccggggcacgctgctaagtagcgcccgtctaagtggcgtggccagtttcctttccggcgctgacaggcgccagtttgcttgttagcaggatcgaaggg

SEQ ID NO: 40418 - DNA, 122 bp, Homo sapiens
ttacacaggtttcttatgaattacatctccctgatgatttggctgtcctcaacacttcctcgtttggcagaattcaggagtggaatttctccagacacggtcggttcctgtggccccgctgc

SEQ ID NO: 40419 - DNA, 122 bp, Homo sapiens
cccaaccccccccaacctcccaaccgcccccacctgccaccccacacccttcccacctgacgtcaagcctgaagctcagccgctaagccggaagctggcgccagaagatgccggttccgcca

SEQ ID NO: 40420 - DNA, 122 bp, Homo sapiens
ggaggcgaaagagcttgggaggagaggacgcgggacgtgcacgcccttcctccattggaacggcgagaggtcgactctggctatcctcaggttctacctcaaacgtggagaggcgcggaacg

SEQ ID NO: 40421 - DNA, 122 bp, Homo sapiens
tatgctaacgagctctcggtttcccagtgaatggtagggcacaagcctggactggcagagcgggctagggaagaagaggaaatgagaggacctcgaggttcaaccgagtgtctgaatggaaa

SEQ ID NO: 40422 - DNA, 122 bp, Homo sapiens
gggcagacaaactatgcagcatccaaggctggagtgattgggctgacccagaccgcagcccgggagcttggacggttggtcagatgcttgagggtgctggggagcacctggggggtctgagg

SEQ ID NO: 40423 - DNA, 122 bp, Homo sapiens
gagagagacagaggggcccgtcctggtcctggggggccacagctctatgcagactctggacgccctacctgcctggcctgcatttgccgccctagggctctcaggccccagcagtggggtcc

SEQ ID NO: 40424 - DNA, 122 bp, Homo sapiens
cactgctttatctccctcatagtttagcctaccacagaggcctcaataaatgtatttgcccgaattggtcttaatttcttagtcacgatggcttcccattacaacaaaccacaactctatca

SEQ ID NO: 40425 - DNA, 122 bp, Homo sapiens
acagcttcaatgctgcacctctgtgtgtgctggagcacagcttcaatccacctctgtgtgcgccggagcacagcgtcaatccacctctgtgtgcgccggagcacggcttcaatccacctctg

SEQ ID NO: 40426 - DNA, 122 bp, Homo sapiens
ctcccctgtcccccaattacctatgaggcagcttcgacctgtgtcccaggcagagaagaacgctgccgtcaggaggccggggacagctgagtcttgcctcacaggggcatttctgtggggag

SEQ ID NO: 40427 - DNA, 122 bp, Homo sapiens
tggggacagattggaggggccaccggctgccccccagaagctgtttcgtgttgatgctgccggggccggctgtggtacctgtgtctgtgtctcggccagatcggcacacatcttccgcgttc

SEQ ID NO: 40428 - DNA, 122 bp, Homo sapiens
tggtggtctccctgctctgctgtctggcgcctcgtccaggaggaggcgctgtaggacaagcgtctcgccggctgcggcgggccggggagggcgggagcggagggatcggtacccgctcctcc

SEQ ID NO: 40429 - DNA, 122 bp, Homo sapiens
cgcccgcccagcctgcaggcgcagcgcaaggagaagtcccggaacgcggcgcgctcgcggcgcgggaaggagaacctggagttcttcgagctggccaagcttctcccgctgcccggcgccat

SEQ ID NO: 40430 - DNA, 122 bp, Homo sapiens
tggccctggtgcgggatgccagttgccccgtttgtgacgctgcgcaacattgtatcactgcgtttgcacctacctgctgggaaatcctgcagacagatggaatggtggcttcgacacacgca

SEQ ID NO: 40431 - DNA, 122 bp, Homo sapiens
ccccagccccaccccaggccctcgggtagcgccaaggcccagtctcccactcggaggccccggcccagccccggtgcctgggaaagccgcctgttttgttcccagatgccacccccccacac

SEQ ID NO: 40432 - DNA, 122 bp, Homo sapiens
cccgccccctgccccgccctggcggccggcccccgccgtattcctccgagccgcgggacgcgcgattctgccctggcgccctggcacccccgcacccgcttcaggtcgcccccggtaccccc

SEQ ID NO: 40433 - DNA, 122 bp, Homo sapiens
attgggccccttccttgcagtggggtgctcctggtcccttgcctgcacacaaacacataacgaccctgcagaccagatgttccagggcaggcctaatttaaagtctgatgccttttgacctc

SEQ ID NO: 40434 - DNA, 122 bp, Homo sapiens
gggctgcccacccacagccagaatccacaggatcccaccgagaaggagagccaggtgtgccgagaccatcctaagggtccgatgtgacagcaagcaagtgaaataaacaatgatttgctttt

SEQ ID NO: 40435 - DNA, 122 bp, Homo sapiens
taggatcagagaaactaccgggggcgggggggaggtgcagggacgcttttatttctgtggcgccaagagtgaagcagggtttgccgtttcctacaggggcagtgcgtttgcgtttcaaattc

SEQ ID NO: 40436 - DNA, 122 bp, Homo sapiens
tgtcccggaggtgagaggcgagggcaggctgggagacaacaactttcgcagcgacttggccggggctggcgccctgcgcgttcccgggccgtgcgctcgctctgagacccgctccccgccac

SEQ ID NO: 40437 - DNA, 122 bp, Homo sapiens
ctacatcgctgaactcctctaacagaaccacaagactgacaagcgaaaagctttgggacccgagggaaagaaatctatactatatttatcacataatttcctaaattctaatagattcccaa

SEQ ID NO: 40438 - DNA, 122 bp, Homo sapiens
ggctaggacccacctgctgcaggtactggttaatggtaatgtgcgccatgggagcgccgccgaacggagagcgccaccccctacgcctcaagcgggccagctggcgtcacttccggccctcg

SEQ ID NO: 40439 - DNA, 122 bp, Homo sapiens
agctcccacccgtatgcatgaccccggcatggagcatttttcacccacgctcgctctccccgcctgtccgtccaaatttcattgctgccaaaggaccaaaaaaggctgcctgtctgccaaga

SEQ ID NO: 40440 - DNA, 122 bp, Homo sapiens
gggaattcccctgaccccttgtgcttccccggggaggcgatgcctcaccctgcttcggctcgggctcaatgcacggcacacactgtcctgcacccactgtctgacaatccccagtgagatgc

SEQ ID NO: 40441 - DNA, 122 bp, Homo sapiens
gaaaacagcaggattaactgagaatctgcttagggaacagccagatccccctgccccagccgtcttcccactctataaaaaacatggcagtgactccagacctatcactatatgccaggtta

SEQ ID NO: 40442 - DNA, 122 bp, Homo sapiens
atcgctatcagccacgcctctaaaacccggaagtaacctccccggtagtcccacgtgtagcggagaaacagtagttaggatggctgaaggggatactcaccggctgaaggccgactgtgatt

SEQ ID NO: 40443 - DNA, 122 bp, Homo sapiens
aagtaactatttttgcctaggttttttccgaaatacattcttttagacagaaggggtgggcgggctgctggaaacggaacaggacagagaaccgcagggaaaagcctctaccgggattttga

SEQ ID NO: 40444 - DNA, 122 bp, Homo sapiens
tgaagagcgcacgtgcacattgtctaccgcgggagaggccgcctctgtcagtgagttgagcggggcgagcctagaggggccgtagcagttgcagcgccccctggagtcgtggaggtgaccct

SEQ ID NO: 40445 - DNA, 122 bp, Homo sapiens
gaagcagctatagattcagtgattacaactcctgggtaactcttcccttcagccctccggcgcttgtcatatttggaaatcaccttttataggttgctataaagccataaaacagtttaaag

SEQ ID NO: 40446 - DNA, 122 bp, Homo sapiens
cgacacttgggctgggcagtgtctctgatgcctcccagcgccagcgactgctcttattcccgccgctgtgggtcgggaaagttccgccagtgcacagcaaccaatgggcggaggggtccttt

SEQ ID NO: 40447 - DNA, 122 bp, Homo sapiens
ggcgccccaaggcatgcaggggccctctttgctgtgcaagtctggtaagtggcactggtacgtccggatgccccaaagagcggctttgtccaggtaagtccagagctcagggcaagaggaag

SEQ ID NO: 40448 - DNA, 122 bp, Homo sapiens
ggggctcgggggctcggcggccgcggctcgggattttccaggctgcggaggtgaagctgacggatctccgagccccgccccgccccaccccgcagggtcctagcgcccgcccccgccggccc

SEQ ID NO: 40449 - DNA, 122 bp, Homo sapiens
atttgatctcgagcttccgaactccaaacgcctgggcaagaattcagcaaagcgcagcaccgctcacccgcacttcccccagctagcggttgctgtttcttggaagacgcgtttatccgccc

SEQ ID NO: 40450 - DNA, 122 bp, Homo sapiens
caaacttggcctttgtcaaaatcacctgaagggctgactaaaaccactttctgtgccccacgcttagagtttctgactcagtgagtatggggtagtgcctgggaatttgcatttccaataga

SEQ ID NO: 40451 - DNA, 122 bp, Homo sapiens
cctttgcacaaactgaaccacgcagcgcagcctctgctactgcacacaataacaggagttcggtcaaggcccaaaaggaaagttccagaagtgagcgcagacctttggacctcagtctgtac

SEQ ID NO: 40452 - DNA, 122 bp, Homo sapiens
cctctagctttgacgccctcaaaattctgttagtaaagcctgagggctcccagaaagcgacgatggtgctgtgctggcagaccgaatgttttttaaaacacaaagcttgcagtcctgctgct

SEQ ID NO: 40453 - DNA, 122 bp, Homo sapiens
ccttagctgcctccccacagggcagggctcgggacctgcagcgggccatgcctgagcttccgccgtggactcctgcgcctccggagcctccccgaccagcgccgccccctgctccacggcgc

SEQ ID NO: 40454 - DNA, 122 bp, Homo sapiens
gaccgaggtggacctctgctactcgcggccctgtggcccccacgggcgctgccgcagccgcgagggcggctacacctgcctctgtcgtgatggctacacgggtgagccaagggaggggactc

SEQ ID NO: 40455 - DNA, 122 bp, Homo sapiens
cgcgctaagcgtaaggcggcgttctcaatgcttagcagtgcattgggatcgcctggtgaacgggaacgatactgacggccagcgcccccactcccaattcgactggtctaaagtggggccca

SEQ ID NO: 40456 - DNA, 122 bp, Homo sapiens
cctgagaaccaagagggctgatgctataaatcccagtccagggcaggagaacatggatgtcgcagcacagcagtcaggcaaagagagagaattctcccttcctcagctttttgttcccgtca

SEQ ID NO: 40457 - DNA, 122 bp, Homo sapiens
gagagcgggaggggaaaaccctttggatcgtgggctctgacccagacgcgtctccatgcccgctctgcagcctcgcggtggcagctgagctgcacgtagctggaggaggctgcaggaacaga

SEQ ID NO: 40458 - DNA, 122 bp, Homo sapiens
tatcacctcctcttcccctttcttccccttcccaagcccttctgctcctttatcacttctcgttttggccttctgtgttgtgcctagcacagaatcaggtgtcccatacgagctcaataaat

SEQ ID NO: 40459 - DNA, 122 bp, Homo sapiens
gtgcagggcgaggagctgctgcgctctgtggcccacttccagcgccagatgctcaagaagcgagaggagcagggccggctgctacctacaggggctgggctggagcccaaatctgcccaaga

SEQ ID NO: 40460 - DNA, 122 bp, Homo sapiens
ctcaggtgatctgcccgcctcggcctcccaaggtgctgggattacaggcgtgagtcaccgcgcccagctttcatggctaaatttctgaagtaaaagctataggatctttgtgtgtgtgtata

SEQ ID NO: 40461 - DNA, 122 bp, Homo sapiens
ctttggccaccaggcctctgacctgcaccaggagacactgggaggtttagtccccaaacccgcacagagcaggactgcagcctgaggaaagagcaaggatttcaggagagaggcctgcgaca

SEQ ID NO: 40462 - DNA, 122 bp, Homo sapiens
gagtacagaggggtgtggtgtcctctgcgagatcctcttaaaaagctggctacgcgcaggcggtttctgtgcacggagccgtagctgtcggagcggttagttcgatttcgagctcgaggttt

SEQ ID NO: 40463 - DNA, 122 bp, Homo sapiens
attacctagcatagcttgatttagccattccacaatgtacacatatatcaaaacattatgcggtacaacgtaagtaataaacaatttttagttgtcaattaaaacaacagccaaaaagaaat

SEQ ID NO: 40464 - DNA, 122 bp, Homo sapiens
aggacaggggcaggccgagttgtggcgcgtgtgtgtttgtgtgtgctcgcctccgggttgcgcgctttcagggctttggatgccggggattttgaggacccattcaaagctccgagggggcg

SEQ ID NO: 40465 - DNA, 122 bp, Homo sapiens
gccactgagctccagcggccgaatggacaggcccccagcagggaggcgctgtgcgagacccgcccctctgtccgtggacacaggtctccaaccctccgacgctctccctgatttctgcatca

SEQ ID NO: 40466 - DNA, 122 bp, Homo sapiens
ttactgttgcaaagcattgtgttttttgagcttttgagccgtagtgtcctttctcttctccgtctggtgaacactattcattcagtctatcttacatgctgcttcctctctgagctcacgag

SEQ ID NO: 40467 - DNA, 122 bp, Homo sapiens
tgttaatcctagttggttggggacaggctttatttatccttggaaattgggacttctccccgatcttgagtgggcaggattgggctcacccccggagttagtaaattttgtcttcttcatct

SEQ ID NO: 40468 - DNA, 122 bp, Homo sapiens
gcacaaaacattactgaggtctaagccatatgactttgcctgcaattcttcactagctctcgtctggggccattaacttattttgaaaagtttccaagaaattcagtagatttcccttcctg

SEQ ID NO: 40469 - DNA, 122 bp, Homo sapiens
ccggcggcctaggcagcgtttccagccccgagaactttgttctttttgtcccgccccctgcgcccaaccgcctgcgccgccttccggcccgagttctggagactcaacatgaagctaccggc

SEQ ID NO: 40470 - DNA, 122 bp, Homo sapiens
ttctctctccaaatcgagggcctctgtccttccccatgagtcagacatccaggtttccgccgttctgtgctgttcacctgtcagctgtctaacccggtaccactgattcgtgtgccgcctac

SEQ ID NO: 40471 - DNA, 122 bp, Homo sapiens
caaatacaggacggttcctgaaatgtgtctctgagcgttcttaactgtgtgtaaggtaagcgaggaaagtgtctaagacagaggccaagaacacctgtcacagggtacccgcctagagtgtc

SEQ ID NO: 40472 - DNA, 122 bp, Homo sapiens
ccatgaccaatcagtgaccagagactgggcaaaatgataaatcctaatgcaggtagaatgcggccagaaggaggaacacatttaaagagcagttccagaaaggcaaggtagggctcaggagc

SEQ ID NO: 40473 - DNA, 122 bp, Homo sapiens
catgctttccccaaaagtaagggaatcttagttctccgggtgagttcccactgccatgtgcggttgatccacctctacctacaagttctgggtgacatgctggacaagtttaagggaagtaa

SEQ ID NO: 40474 - DNA, 122 bp, Homo sapiens
agttctgagccccggagtccgggacccgcccctgcccacgcctgggcccaaccctacaggcgccgcctttccggccctggcccagcgagtcccagccccactgctcaccccctgcaggatcc

SEQ ID NO: 40475 - DNA, 122 bp, Homo sapiens
ccgttgtcgcgacatgcaccgtgggtgtgaaccaggtatgccagaatcgcctgggccacgcgtagggtctcctgggaaagtgctttcttccgtggggggacccatgcctccctcctctgccg

SEQ ID NO: 40476 - DNA, 122 bp, Homo sapiens
cctggacccacggcccctgcggccggccgccctcccgcctaccaagtgccgcgatcgcgacgggcaggtggtggccctgcccagcgacttcttcctgcgcatcgacagccaccgtgaggatg

SEQ ID NO: 40477 - DNA, 122 bp, Homo sapiens
ctgccttccgggtccacaagtccggtcacccagccacccggagtctgggcaaaggcctcacgaggcaccccaaggctgggttcatgggatcccacccagcctgctacaaggtgctggggcag

SEQ ID NO: 40478 - DNA, 122 bp, Homo sapiens
cgcaccaaccgaccacctctgtccctctcctggatgatccagaacataaagcttcctgaccgggaaaacagaaaggctgtggctgtggggaccataacggatgacgtacgggttcaggaggt

SEQ ID NO: 40479 - DNA, 122 bp, Homo sapiens
cacctgtcacctggtgggggggcagcggcaggccctggttggtgcagctctgtgctgggccgaagaccgagagtattttagcccataggaggggtccactctggcctgctggacacaggctg

SEQ ID NO: 40480 - DNA, 122 bp, Homo sapiens
cctcccctaccactgccttcttcttcagggtcctgagatttacagggttggagtgttttgcggtttagggaatgagacaggaccttggatatctgctccaggctgtcaattaacctaaaatt

SEQ ID NO: 40481 - DNA, 122 bp, Homo sapiens
gatggtgctgcctgtgaggccctccggccctcacgttgccctgttgtaaaggaggcggggcgccctgcctggtgggcacagccctgttggccagatgcaaaccccggcagtaaacccctaga

SEQ ID NO: 40482 - DNA, 122 bp, Homo sapiens
tccccagatcagaagtggcactgcctgggccccctacacacagaggggacactcaggacacggttcgctaggccactgacacaaacgtccgcggtgtgggctgagcacaccctgcagtctaa

SEQ ID NO: 40483 - DNA, 122 bp, Homo sapiens
ccaggaggctcagaggcccaggctcccggcccgaagtgcccttgcctacaaggtggggggcgaacggctcgtgagtcactgggcactggccggaagccccttggccctgactcgagccccct

SEQ ID NO: 40484 - DNA, 122 bp, Homo sapiens
cgctgcgtccggccctctggcgtgcgccccgggttcgatgggagtccgactgacttctctcgggctgccggtggcttgtacaaggctggaaacctgtccgctaccagactcctcgaccccgc

SEQ ID NO: 40485 - DNA, 122 bp, Homo sapiens
agctaggactgtgcaacaccagtctccgctctcggagtcggcacgggggctggtgggtggcgggatgaactcggggaaggcgacaggctggaaacgcagctcctcgactttgcagcgcacca

SEQ ID NO: 40486 - DNA, 122 bp, Homo sapiens
tatagctttaaaatatttttctcaattgttagcataacattttttcatttttaattattacgggtacataataggtgtatatatgtatgggtgacatgtgatgttttgatacatgcatacaa

SEQ ID NO: 40487 - DNA, 122 bp, Homo sapiens
ggaggtcggcgcgggaggctcagatggctggaggcggcgggcacgcacactgcggggctccgaggggcacaggtcagtttcctgaggcgggtcgggacccaggcgtgagactggagtctgcc

SEQ ID NO: 40488 - DNA, 122 bp, Homo sapiens
ataatatagggaatgttgcttatacattggaggatttcttaattctggtttggaggtttgcgtgttgactcataaaagtaactgtgatgcaatacttactcactataggactatctataaaa

SEQ ID NO: 40489 - DNA, 122 bp, Homo sapiens
catgcacattttgctcaacaattacctgttttgtgcctcgtcgtaaactaccgcatcttccgtaaaatgtccaaatgttaccgagggtagaattagacctcggggcccaatttcctgccaca

SEQ ID NO: 40490 - DNA, 122 bp, Homo sapiens
gagaaccatctcctacacgggtcctggctcctgtcgtccctatgctggcaggacggaacccgttgccggctcccagggccacctcacaaagggccttcattccaagcctgcgtcagcacctg

SEQ ID NO: 40491 - DNA, 122 bp, Homo sapiens
agtggggaggccggatggtgccgatggcgggaagtgaggcggcggacagcggtgacgaggcgttgccagatgagagcgcgccgcccaagatggggtgcaccgggtgcacggagttggccgcg

SEQ ID NO: 40492 - DNA, 122 bp, Homo sapiens
cctcagcctcccaaagtgctgggattacagtcatgagccactgcgcccggcctggaagaacgccatcttgacagagtgttcccagtatctcaaaaaggctaagtatgttacagggttttaga

SEQ ID NO: 40493 - DNA, 122 bp, Homo sapiens
gacctttccaggctttagtttcgacatcaataagatgaattaatagctgggcatggctcgcgtctgtaatcctagtactttgggaggccgacgtgggtgtatttgcctgagctcaggagttc

SEQ ID NO: 40494 - DNA, 122 bp, Homo sapiens
cgggctctccgcccaaacctggcgtagccgaagccggagaggatcgtccttgtcggggaacggagcttttccctggaaatggaggttggcgcaaggttcctgcaacagccgggcctgggctc

SEQ ID NO: 40495 - DNA, 122 bp, Homo sapiens
ggttgttctccttgagagatggtgttggggtgctgattcagacaccactcattatgggggcgcaggaataatgctgcccacagcccctgactcagcccagcaggtcagtcctgggacctcgg

SEQ ID NO: 40496 - DNA, 122 bp, Homo sapiens
gtcagcaatgatgtctggcatggcactgctgtggccacagtgtttatcaacccctggtgacgggtggttctgcgccattggacactcacaggcagtggctgaggtggggatgacagtcccgc

SEQ ID NO: 40497 - DNA, 122 bp, Homo sapiens
agaggcgtggtcaaggcggggccagaaggcggacgcgtgcacggagcggtaaagcgcaggcgcaaagcttcggtgacgtcagagaggcgcgctcccagctcggagccgactcgcagacgcgc

SEQ ID NO: 40498 - DNA, 122 bp, Homo sapiens
agcaccgatcgctcactgcagaactgttcccgctgctagggcacggctgagcgcgggcaccgcgtctctcctcgactcgcaccgcctatgcgccccagcctagccaggaatactgccctccc

SEQ ID NO: 40499 - DNA, 122 bp, Homo sapiens
caggccagcagcaccaacatcacttgaggccactcagccagaaactctgcagtggggcctcgcaatctgttttaacaaaccttccaggtgactctggtgcagaatggtggcaagaactcaaa

SEQ ID NO: 40500 - DNA, 122 bp, Homo sapiens
ggcaggtgtcccttggtagcctacgggctgtcttatgtcagctgcttaactagggcgtgccggggaagtaaatgatctcactgacactttgctccacatataaaataagtcacttaccccag

SEQ ID NO: 40501 - DNA, 122 bp, Homo sapiens
aacagccggcgttgctgtagcgcgtctgggaattacaccgggggactggccggcccgcttcgtgcctgcgggaagtcgggccgggggactcttcggaaactccgagcctcagagaaatgtga

SEQ ID NO: 40502 - DNA, 122 bp, Homo sapiens
aaagccccctgcttctagcactatgcaatgttgtctccattgtctttagtctagtccacccgaactaaggaaaaaaatactttgagcttttcacaaaacttgtgtaaaagcaggtacatttg

SEQ ID NO: 40503 - DNA, 122 bp, Homo sapiens
ggctccatggcggttaccatttcatttgctgtgctttatctgctgtgccttgtttctccccggccctaggcggaaggtgctctaccagcgtgcacccaggaatatccaccgccatgtgatcc

SEQ ID NO: 40504 - DNA, 122 bp, Homo sapiens
gggagcgcacgcggttttcttaagtccaaatctacaaagtgcttcctgggcggtgtcaaccgctccaccaggacccacaagcccaaaaagagaaactgacagcttttgagacggccatgccc

SEQ ID NO: 40505 - DNA, 122 bp, Homo sapiens
aatatacctcaagattatttacttagccaactagggcatttcctgaatattatctaagtacggaaatgagctagcaaagaaattccaattacttccaaagagggaaggataaaagcaaatag

SEQ ID NO: 40506 - DNA, 122 bp, Homo sapiens
gattatcttcagaaacactgacccctggccctgagcactgaaagagcggttagggtgatgcggctggccacggcatcgcccactagcagtgagtgctgcgcccccaccacgcccccaccctg

SEQ ID NO: 40507 - DNA, 122 bp, Homo sapiens
gagtgcgggcgtgcatggtgtgggatcgtgtgagtgaagatatgtgtggtgtggggtggacgggttagctttcagattgaatggaagcaggaacaagtggaaagctgttgaaattttccagg

SEQ ID NO: 40508 - DNA, 122 bp, Homo sapiens
caacctggtcacatgtaaaatggtgataataaccctgcactgcttacttctcaggatcgtcgtgaaggcctcataaaataatatgtggacagtgccttgaaaagcagcaaccccatgtaaat

SEQ ID NO: 40509 - DNA, 122 bp, Homo sapiens
acaggcgcgggcagctggtgccagggtgcagccggcggtgcaccaatagccccaggttggcgttggagggcgcactggcgccacccccggggaagaccacggaggaggaagaagcagacgaa

SEQ ID NO: 40510 - DNA, 122 bp, Homo sapiens
ttctgggccttcccagacaaaagccagagacccggagcctctttctgagaaggaaccgggcgtccccaagatttcctctagccgagtcccctgggtcccccgaggaccgggacagctctggt

SEQ ID NO: 40511 - DNA, 122 bp, Homo sapiens
aacgctgagggcttgtgctgggaggcggcagtggtggcctcaaccatctccccgtccgcccgcatggcaaccacgacgactatttcctctggtcaggcatttccaacctcctcctgttatta

SEQ ID NO: 40512 - DNA, 122 bp, Homo sapiens
gaagaagaggagactgagaagagccagcaatttctggctaaagccctgcgtactgagcagcgtcaggtgtgtgtcaaagaaccatatcaataaacaaaatgtagatgggagcagtcaggagg

SEQ ID NO: 40513 - DNA, 122 bp, Homo sapiens
atgcagtaatacatttagagaccatgagttaccccacgctaaattagactcaaactaatgcgttttcatgttttcatttttaaatggcttttctgtctctctgtcaggcatcatgtatgcct

SEQ ID NO: 40514 - DNA, 122 bp, Homo sapiens
cggcctctgcaggcccaaatcgtcccgaagtcggcctctccaggcccagcttgggcctcccggcggcctctgcaggcccaagtcatcctcaaatcggcctggaattgggcctggaagagcag

SEQ ID NO: 40515 - DNA, 122 bp, Homo sapiens
ctgtgggcactcagggacagaggcagggcagaggcgcttctctcttcgtccaccacaccgcgtcaaccctcccaaatccacgggttgtcccatcctttggatcaactgcgtcacccgccgag

SEQ ID NO: 40516 - DNA, 122 bp, Homo sapiens
cctcacgtgtgaggggaactggggaagtcgagtcagcccgctggggttcctgattctctgcggttctgggaagagcttgcagtggaaggcctcccagccatttcctcttctcccccaactgt

SEQ ID NO: 40517 - DNA, 122 bp, Homo sapiens
gcggagtttcaagtgacggagccacccctgggtctgttaccccagggaccaggctcagatcgtcaggtccgcccaccccaaacccagtctggggccgaagaagcccgggaagcccgtgtctg

SEQ ID NO: 40518 - DNA, 122 bp, Homo sapiens
tttgataacagctagcactatcatgagttactacctcattgttactttctaaaccaggcccgcttcacgagttagagttgagctcccctgtagccaggactatgctgtagatatcagtatga

SEQ ID NO: 40519 - DNA, 122 bp, Homo sapiens
ccccgagacccgctggcagaactttccatactattggctgcgaaacctgccactcatatgcgactccacctctcctaccggcacaggaaaggggtttcctcccgctgagcggcgggcgcagc

SEQ ID NO: 40520 - DNA, 122 bp, Homo sapiens
ctttcccttctactccagtccttacaagtgacatcttctgttcctgcatgctaaaatgcccgtgacttctctaatgcagctctctgccttggtgcctttgcgtatccatctctactgaggaa

SEQ ID NO: 40521 - DNA, 122 bp, Homo sapiens
atggcccacccctctgagacttcccctctgaagggtgcttctgaaaattccaaacgagatcgccttaacccagaatttcctgggactccttaccctgagccttccaagctacctcatacggt

SEQ ID NO: 40522 - DNA, 122 bp, Homo sapiens
ggtggtggtgagcatacaggcacattcgtacactactctttccattttgattttattttacgaaaagttgcaagtacaccaccctttagaggcacttactaccaccatccccccctcaaact

SEQ ID NO: 40523 - DNA, 122 bp, Homo sapiens
gccctagagcggagggtgaccttggggaaatgttagtgaggtccggccacgtgctgcaggcggggcgggcgctccgggcgcggggggtgcgcgggtcctgcccactacgcgcccgcgggcct

SEQ ID NO: 40524 - DNA, 122 bp, Homo sapiens
tgactgcagcactgggacattacagtaatgtgcccattcaaatcaagtggatgcaaagatcgctatagcagcttttagccacggaacatttagccttcaataatagcatttcgggtccttca

SEQ ID NO: 40525 - DNA, 122 bp, Homo sapiens
tttccgtttctgtttaggcacatttgtcacggcaaagcctggagctgcacttatcagaaacgtctaaaaattcagaagctgattgcttttaaaagtagcagaactaaaacaaaaacctaaac

SEQ ID NO: 40526 - DNA, 122 bp, Homo sapiens
cctgaaagactggccctctcaaatcacatgcagggatgagcaatcactattctgctgggacgggggtcataaacaagaacagcctgttcagaggcaggcttagggcaagactgggtacccag

SEQ ID NO: 40527 - DNA, 122 bp, Homo sapiens
ctttcctcagctcctctgaccctgagacccttgaagatttcgggccatcgttttgtggagcgctcctcaagccgggctgatattttttcacgattagattgaggggatacccgtttggcagg

SEQ ID NO: 40528 - DNA, 122 bp, Homo sapiens
gtcagactctgggtcagagcgctaagtttcaaggaggcggcgctaaacaggccctctagccgggagcctgtcgcgacccgagcgaccgtgggtcgaccccgatccggaagtgacgcaacggc

SEQ ID NO: 40529 - DNA, 122 bp, Homo sapiens
tccccttggcccaccgccccctcccccgaactgctcctcacgggtatctacctctatatacgacctttaacctcaagtgaaagaaaacaggaccctgggacctgcagccgctggggagttta

SEQ ID NO: 40530 - DNA, 122 bp, Homo sapiens
ttccccaatctgactgaagattacaaagtgtggcaacgcgcggtgctgacttaggcagggcgggaggggcgggcctgtctcagcctgtggcgatttggtggcatctggcaaaagccactctc

SEQ ID NO: 40531 - DNA, 122 bp, Homo sapiens
cctgcaccgctggaggacagcaaaaggaaaatacctgagtctcagtaatcacacgggcagcgacaggaggaggaaccgcggacaactggagcctgggctggatcctcactagctccggtcaa

SEQ ID NO: 40532 - DNA, 122 bp, Homo sapiens
gtttgggatatttgaagacatgatgactttactgtaataattattatctattaccttgatcgtcttcttcaaagttagagtggtctagggaagctagggacaagtttttattaactttgtta

SEQ ID NO: 40533 - DNA, 122 bp, Homo sapiens
acccagcctgtcccactggctcctcccagcacaggcacctatgtggcatgtggtgatgtacgctgcgtgccatgagtccatgtcctatgcctcacaaatgctgtggttcactgcactgttca

SEQ ID NO: 40534 - DNA, 122 bp, Homo sapiens
cagaacggagttgtgtgtgagcttttggtgtctggcttctccagtgtccgtccatgtggccgctcgctcaggccttcctctctctgcctggccgggtaatgttccgttgtccagtggaggcc

SEQ ID NO: 40535 - DNA, 122 bp, Homo sapiens
cggtgcgtcaggcaggggccgggaggggcccgtggcttcgctgcccgtgttgttctccagcgctgctgcttcccccagccggagctgggtcacctcgtggggcaggggagccagaaagttgg

SEQ ID NO: 40536 - DNA, 122 bp, Homo sapiens
agccagtgatgggaaagcactttaggtaaggggtgtgggccggtgagggctgatccccagcgatgctgacaacatgactgcctttacagattgagtctggattcttccacgagagtgacgtc

SEQ ID NO: 40537 - DNA, 122 bp, Homo sapiens
gagaagaagttgaaaatatacaactttttgctgatactggagaaatcgttgctaagggcacgtacagtcaaatggattcagaagttgagggtaatgggaggtggatgcttataggcagagtc

SEQ ID NO: 40538 - DNA, 122 bp, Homo sapiens
catgaagcccacgggaaaaacagaacaaatgtcacaaggatcagagaaatccctgaaactcgagggaggtgtcaaagttggaaatcctgaatgggaagggcactgtcaaatctctcccctac

SEQ ID NO: 40539 - DNA, 122 bp, Homo sapiens
ggtcgtctccagtagaaaaaccgaggctcacggttttaagcccagaactgatcgtgaagccggtccattaagctctgggtggataatgcacgctctctgcgactcccgcctgccggagcagg

SEQ ID NO: 40540 - DNA, 122 bp, Homo sapiens
acgagattgcctctgaaattgataggtatgtaaattagtagggatttggagaatgtgtaacgtcgccattttcggtttcaatttttgctactacaagccgcctgtcttcacaatgaaactgt

SEQ ID NO: 40541 - DNA, 122 bp, Homo sapiens
tgggttgaagtattgctttatttttcaagaatttccatgggaggtactcggagggaaaaacgggaggtggtcagacttgagtacagacagaaaaggcctatcttaagagtagtgagatacag

SEQ ID NO: 40542 - DNA, 122 bp, Homo sapiens
tatttctgggccctgagtgtgtgcagagctctgtggtggggtaacggggcgatctgggggcggtgcgtgaaaggcctggtctctccctcttctgcaggaggtcaaggtggaatgggaatggg

SEQ ID NO: 40543 - DNA, 122 bp, Homo sapiens
tgtgtagaggggaagtggagcggccgagccttctcgtgccacaagtctgtgcgccaaactcgtctggggacagaacacacgatgaccatcacagtctgtcacggccaaacatcagcaatata

SEQ ID NO: 40544 - DNA, 122 bp, Homo sapiens
ctcttggactcaagcgttcctctcactccagcctccctagtagctgggaccacaggcacacgccatgatacctggttaagttttaatttttaaacttcttgtagagatgggggtctcagtgc

SEQ ID NO: 40545 - DNA, 122 bp, Homo sapiens
atcatccaggtctgggctcagaagtcgcctccttagagaggccctccgggattgcccatccgcctgtgcccacgctttgtcccgttcctctatttttatttcctttcccgctcgcatccctc

SEQ ID NO: 40546 - DNA, 122 bp, Homo sapiens
caacacggctgggttcaaattgtggctctgcacttaactagtcaaggggctttgggaagtcgcttcgcctgttccatttcagtttcccacctgacaaatggagttcactgtgcctgacacac

SEQ ID NO: 40547 - DNA, 122 bp, Homo sapiens
aggcgacactgagacagtcgcccatgtattcattcagcccgccaggcaacagacaggtgccgagcacctcttctccgcgaggccctgttttgggcactggagacacacggatgcaaagacat

SEQ ID NO: 40548 - DNA, 122 bp, Homo sapiens
tagagatgatccgagctggacagaggcggagaggagggaataaatgagagggatgtagggcgcagaatcaacaggatgcggagagcaggtagcagctgagaaggacaaggaagaaggctggg

SEQ ID NO: 40549 - DNA, 122 bp, Homo sapiens
aaaaccatacttaagctcatgggtggtacaaaaataagtaggttggatttggtctgtagccgtagtttgtctaatacatagatagctgtccagtacatagatagctgtttgtcctgaccagt

SEQ ID NO: 40550 - DNA, 122 bp, Homo sapiens
ttccactgagtcacttgtggctaaaacgtgaagtggcgatccagacgctgatacctgtggcgcatcacattttcctggatatggaaaatggagggtccctgggagagaaacgaagattcagg

SEQ ID NO: 40551 - DNA, 122 bp, Homo sapiens
gatcttatttctttcttctttctttggcctctttttggtgtgttttatttctcatttacacgaagaatatagctatctgctatagagctaatggctttgatggcaaaaacatattggctatg

SEQ ID NO: 40552 - DNA, 122 bp, Homo sapiens
tgtgaaaagtgacttggtactttataatggggcacacagatgttaagtgcccattatccccgcctttgccttcagctaaaccactgacaaaggtgaacagactgcatttccttgaaatataa

SEQ ID NO: 40553 - DNA, 122 bp, Homo sapiens
ccggagacctttggagttaagaggcggcggaagcgagggcctgtggagtcggatcctcttcggggtgagccaggtaaccatggcaaccccgggggtggggcctcgcttccggtagccgagag

SEQ ID NO: 40554 - DNA, 122 bp, Homo sapiens
gcgccctgcgactccttcagtccccggcctgggggcagagcctgctggagaggagtcatccgtccccgagccatcatcgaccccaccggaccccgcgcggggccggccgactccctcccacc

SEQ ID NO: 40555 - DNA, 122 bp, Homo sapiens
gcggcagctgatctaatcctgtatccacatctgtttcagaccaagagcctctccacgtcgcgcaggcgctgcagaaagtgaagatcgaggtgaacgagagtggcacggtggcctcctcatcc

SEQ ID NO: 40556 - DNA, 122 bp, Homo sapiens
tgctctctggtgaaagtgccgccatcttttgagtgttaccgcttgagaagactcaacctgcggagaagataccattttgattgggtgagggggcgggtagcaggatggccctagaccctgcc

SEQ ID NO: 40557 - DNA, 122 bp, Homo sapiens
ccctgaccccagcccccgcaaggccccttctgtgtacacttgactgaattttatgggcctcgtggatatgcatgggcttatctccagacatcataaattaaccacagctgatctcatccaga

SEQ ID NO: 40558 - DNA, 122 bp, Homo sapiens
gatgagcgcttcaaacggcggcagttgctgcggctgcaggccacagagcgcaccatggtacgggaaaaggagaacaatcccagcggcaaaaaggagctgtctgaagttgagaaagccaagat

SEQ ID NO: 40559 - DNA, 122 bp, Homo sapiens
tgtgaggagcccctctgcccggctgcccagtctgggaagtgaggagcgcctcttcctggccgccatcccgtctaggaagtgagcgtctctacccagccacccatcgtctgagatgtggggag

SEQ ID NO: 40560 - DNA, 122 bp, Homo sapiens
gctccgccggaacccccactttttgagctggggtaaagactactggggtgtcttctaagacgccgattttgagggagattcaccatcgggcaggtggcagggggttctgttggggcagccgg

SEQ ID NO: 40561 - DNA, 122 bp, Homo sapiens
gccttagggaggatggagctggaggtcttaagtcccagggtggaacgcccgcgggcaggtcgcagggccaggcgggcttccctctccctccctggctctggctgccccgcccgtcggagcag

SEQ ID NO: 40562 - DNA, 122 bp, Homo sapiens
cctgattccacctaaccagtagcagctggtcctcagatctggactggaacctgatccaggcgcttagcctgagtctaatctctcatcaactgataaagattgtggtaggggagagaggtctg

SEQ ID NO: 40563 - DNA, 122 bp, Homo sapiens
tgcagctgggtggctgttcggtgcagggggccggtgaggaacacggtggggagcagcctgcgagggcgccgggctttcagcactcactatacctgctgtttggtttggccaggatggcctgg

SEQ ID NO: 40564 - DNA, 122 bp, Homo sapiens
gtggattccggcgaggaggtatcttcctccctggaagcagcagaacaaatttcagggactcgggagtccaaggcctcattccaaaaacactgagagattgggtactgggcgcacagtatgtc

SEQ ID NO: 40565 - DNA, 122 bp, Homo sapiens
ccatccctggggatccttaacccttgctctcagggccctacctggtgacctcactgggggcgtgtggttatggaggggttttctcccttgggggacagccaccaggcagggcagagccacat

SEQ ID NO: 40566 - DNA, 122 bp, Homo sapiens
aggaataagtgaatagctattcatccttagaccctgtccaaacagagcaacagtcatatacgccaccatagataaagagatccagagaactctcaaaccctttttccataattggaaattat

SEQ ID NO: 40567 - DNA, 122 bp, Homo sapiens
cagtgacttccaggtcctcagggccaagtaccgagagagcccgctggtctccgcctggtccgaggagctgatctctaagctggctaatgacatcgaggccaccgctgtgcgagccgtgcggc

SEQ ID NO: 40568 - DNA, 122 bp, Homo sapiens
atctagaaatgatgacttacttgttctaactcctgtaagtgtatggcaggaatgcctcctcggcaagaaaaagcctcacggctgaagctttcaaattcatgaacactatgggtcttctgccc

SEQ ID NO: 40569 - DNA, 122 bp, Homo sapiens
aactgtgtctcttccccgaagcctgtactgggattatagtggttcttaaataatggagaccggagaccagaggaagcatatttggagcttgataaacacagagatacatggcccttacacct

SEQ ID NO: 40570 - DNA, 122 bp, Homo sapiens
cttgaagaccttcctttcagttcttttgggtgtatgctcagaagtggaattgcagctgggcgcggtggctcatgcctgtaatcccagcactttgagaggccgaggtgggcggattacctgag

SEQ ID NO: 40571 - DNA, 122 bp, Homo sapiens
gaactggcctttaatcatccacatgtaggactgttctggcagcgggggttgggggggaaccgtgttaattactcacacgatgtgctgactcaaagcctttgtcattaaacctgtactaaata

SEQ ID NO: 40572 - DNA, 122 bp, Homo sapiens
ggggctttggccaccatgaggtcaataagagctgccttccaggccaggcgcagtggcttacgcctgtaatcccagcactttgggaggctgaggcaggagaatcacttgagtctaggcgttca

SEQ ID NO: 40573 - DNA, 122 bp, Homo sapiens
tgtaaacgtgggtcttttggggtgcagaaacaggtcatctagttcggagaaaccaccaagcgccccccaagttccacatcaagggattccccctcccaacattcctggctagtcctatgagc

SEQ ID NO: 40574 - DNA, 122 bp, Homo sapiens
agactcggatcgaaagctgcacctcactagtatttaggaagatggaaggctgattctgtgcggggaagtgcgcggaaaactcttaagtcccctactcaccaacctgtgccaggaggcgtgac

SEQ ID NO: 40575 - DNA, 122 bp, Homo sapiens
tggtgacagagcaagaccctgtgtgaaaaaaacccaaaccccaaaccaaaaaaacacaaccggggcatgaaaaagtgcttggcccagagcagtgccccaaagcatctcctaagaaaggggct

SEQ ID NO: 40576 - DNA, 122 bp, Homo sapiens
ccactgctcttcctcaaccatctgcaaactcctctgtttgaggcaagattatcaacaagtcggttcttcgggaggtagcctggttgcatctctttcagacaagctgtgcctagcagcatcac

SEQ ID NO: 40577 - DNA, 122 bp, Homo sapiens
agatgaattgttgcagggtagcaaatacaactgattcctgctaagcagcaagttgactgacgaaaacagaaaaacatgggtcatctcaacgggagagcagtctaatggccttggggctccgc

SEQ ID NO: 40578 - DNA, 122 bp, Homo sapiens
attgagctaccattgaccttaatggatgtcagtcttcacttgtcgctttttttccttcctcgcctccttgccccgccctatccctgtaggcgcgttctcccgcgacatcaaatggcagcatg

SEQ ID NO: 40579 - DNA, 122 bp, Homo sapiens
gggattacaggcgtgagccactgcgcccagctgatttcttgtctctaaaaggtactgctacggcttaacacgagcaggatttaaaaaatagtagcatttgccaggttcgtgcctggtcatta

SEQ ID NO: 40580 - DNA, 122 bp, Homo sapiens
tggggagatttagtttgttgactcaggagcacctccaacgacagctagtggcagaggacccgggagctgggaggttcggaacgcggggcgagctggggaggagggagaggcgccgacccagc

SEQ ID NO: 40581 - DNA, 122 bp, Homo sapiens
gtcatgtcagtgtaggggaactactccatcatagcattctggacaccttgcatgtatctacgtaggtcatgtaagcaaaggcttgaagaacagctaatctgagatttagaagaatgcttttt

SEQ ID NO: 40582 - DNA, 122 bp, Homo sapiens
ctagtgagctcaggaagaccctcagcatttcctgaccacattttgtaacacacagagccccgtaatctccattcatcaagactgatttttccacagctctggttctgaagaggtcgggtggg

SEQ ID NO: 40583 - DNA, 122 bp, Homo sapiens
agtgccatcttagatctgggcactctgggtgccggtgcgggtgtcgtcttgggtgggagccgggcactgtgggtgcaggtgccatctcggagctggatgctgtgggtgcgggtgccgtattg

SEQ ID NO: 40584 - DNA, 122 bp, Homo sapiens
ggccccccggatgctggaaacagcccaccgctttgcggggacatcggcaggtgctgtgatcgccgccctggccatctgcgggattgaaatgggtgaggcctgtgttctgggtcccctgggaa

SEQ ID NO: 40585 - DNA, 122 bp, Homo sapiens
gcgcgatttcattttcccaagttttcagctgggatgtgaaacaggagggagcagggttaccgccacacaccactgaggttgcagggatcgcaagctcttgccttcagtttctgtcaagtaac

SEQ ID NO: 40586 - DNA, 122 bp, Homo sapiens
ttagtaaattgaagatattagtcgtactcatacacagagtcccaaaccatgtgcacaaaccgacattttaattataaccaaccttacgcgaataaccgtttggcttgggtaaaagtgaaaaa

SEQ ID NO: 40587 - DNA, 122 bp, Homo sapiens
cccctgcttccccggcattgtccgaggcctggcggaagagaggcttcccagtgcttcccgcggcctgggaatgtacagtgaagtcaccagcctgcgaaagaaaaggcctctgtctcccgggt

SEQ ID NO: 40588 - DNA, 122 bp, Homo sapiens
tgaggtagtttttccacagacattgcccgccttcctcacgtgttcgttaaaagttctccacgtgtggaaacagccatttgctctccatcaggtgctggcgggtcctcagccctgaaaagaca

SEQ ID NO: 40589 - DNA, 122 bp, Homo sapiens
gcaatgttgacctttctaaactatgcttaacagagcacaacccaatagcaaagataatcacgacatgcttctccctctctaattctgctgagtcacttgcagcctacccggattccctattg

SEQ ID NO: 40590 - DNA, 122 bp, Homo sapiens
tccacctctttaaagagggctgggacagagtcacgaaaaacatagaagctggtgttaccccgcaaatgctcagaaggcagtcaacattttgaggtgggggtttagaggtgttgtagacaggt

SEQ ID NO: 40591 - DNA, 122 bp, Homo sapiens
cagcacagacctgggagccagcaagtccacacagtctggcatttacaagtgaaacaggtgcgacctgcagctactgccgttgggacaccaggcaaggggttagaatggagattgggaaaggg

SEQ ID NO: 40592 - DNA, 122 bp, Homo sapiens
cttgactgctccaggactcgagggatcctcggtgccaggatgctgggtcaagcgctccgccgggacagaggactcataccagggaaatggagcccagcctcgtgataaactacgacccaagc

SEQ ID NO: 40593 - DNA, 122 bp, Homo sapiens
tcgcggccactttcctgtctgaagaccgcatgttgccgggctgtgcttacggctcgcgggcgcactctactgacaagcggtgggcggcctcacagactctcccaggcccgcgtggggcacca

SEQ ID NO: 40594 - DNA, 122 bp, Homo sapiens
tgaccttgtgatcaacccacctcggcctcccaaagtgctgagattacaggcgtgagccaccgcacccggccatagttgagctttattaagtgttgcatcttgggaggcccaaagcaggagga

SEQ ID NO: 40595 - DNA, 122 bp, Homo sapiens
gcagccaggatgagcctttaaaatgaaatctggctgaggccaggcaccatggctcgctcgcgcctgtaatcccaacactttgggaggccaagttgggtagatcacttgaggtcaggagttca

SEQ ID NO: 40596 - DNA, 122 bp, Homo sapiens
tgagtgaggggctgagccaggaatggagccccagcctctgaactccagcctctacttggccgggcagccgtccagtgcagtaaacccaggccaaggtaaacccgtacacttggatttctggg

SEQ ID NO: 40597 - DNA, 122 bp, Homo sapiens
ggtgtgggagcaggctggggcaaggggagctggccaggcctatggccttgattcctgtgacgcaacagaatgtagagtctaaacttgcatgagatgcatgaagccactcagagaagaaagtt

SEQ ID NO: 40598 - DNA, 122 bp, Homo sapiens
tttacacattgattccggccttcttagacctactggtcaatgcgtgcgagtggggggctgcgaacggacttggacttaagagttcagggggtctgtaccctgggggtccccaaggctcctgg

SEQ ID NO: 40599 - DNA, 122 bp, Homo sapiens
tctgtgatcggtggcttcataaaacgccttctaatgaaagtaacacacagcacaggagggcggccctgggcgcggggctgcgtccccgagaaatgcttgttactgtggaatgagggacagag

SEQ ID NO: 40600 - DNA, 122 bp, Homo sapiens
ctccagctgctcccgcagctcctcggcctggcgcaggcagcgctgcgaggcccgctcatccgactgcagcagctccgcctcgtgcaggctcttgagcctccgcacttcctgcttgtgccttg

SEQ ID NO: 40601 - DNA, 122 bp, Homo sapiens
gcagcctgggctttggaggggaccagccccggtgggccgcggggatccccaggcaggcagcgtcccctggtgttcgcggcagggactgcggggcggggtggaagccgggggcaaggacccgc

SEQ ID NO: 40602 - DNA, 122 bp, Homo sapiens
gtcggtgagcgctttttacctttcccagagatggatgcagagcgtgtgcgggctgctaaacgggggggagtgggcgggagttttctgtgtcgggtcctggattctcctgcctttgaattgtg

SEQ ID NO: 40603 - DNA, 122 bp, Homo sapiens
gagatttcttagaggtacacttgggaaattaagtgatcaccccaggctgacaagcatgcacgcctcagtcttcttaagaaactcatgtgtgtgctggtgaaattggagaccacagtttcaca

SEQ ID NO: 40604 - DNA, 122 bp, Homo sapiens
cccatcccccagcagtcaccacccctggcaccaggcccgaagcagctccatgggcagagccgtctttccctggaggccgtctctatttgggcagtgagaatctcctccatccagcatccctc

SEQ ID NO: 40605 - DNA, 122 bp, Homo sapiens
gaactcacctgggagcgcgtacaaaatgcagaagcctggccccaccaaccctaacgcatccgaatagcgaagtaggtccctgaaacctgctaatgacgttcaaggacattcaacgtgagacc

SEQ ID NO: 40606 - DNA, 122 bp, Homo sapiens
gtctctcttcttaccaagctagactgggttgccttttctaactattccagccctacagggcgaggggccataatggagtatcccgcccctttagaccccaggcgctcaccggcaggtgcaag

SEQ ID NO: 40607 - DNA, 122 bp, Homo sapiens
acacccgccggcggttcttgcgcagaatgcaagccaggtactccttgccctcggcactctcgtgccagtttgggacaaccaccgaaccgggcacgggaggtctggccatggctgggcaccgc

SEQ ID NO: 40608 - DNA, 122 bp, Homo sapiens
aggcctggcgactgataagtccgggcagcaccctaagagttggcacccgcccctctgccccgcaccccagggctttgcttcgcgccctccgcccggaccctggcccttctcttcttcgtctg

SEQ ID NO: 40609 - DNA, 122 bp, Homo sapiens
aacagaaaaacctcaacttaaatagtgctgagctgcaacttgttttccgcggcttgtagtcgaggaggagcccacgaggctttagctgctgcaagatccaagcgcgctcccgcccagcggtg

SEQ ID NO: 40610 - DNA, 122 bp, Homo sapiens
aggtcatttccatttcttatcacgaataaagggtattttgtctgatgaatatcttgtcctcgtccccggaccacccttttgagaacagttgacctaaggtaaccacaggactcctggcccag

SEQ ID NO: 40611 - DNA, 122 bp, Homo sapiens
ccccatcggcccctgactgcgaagcccgggaccagcctcgggcgggagccgccgtccgcccgctcacccaggagcttcccagtccagcaccccaaacggccaggagtaacaaggaaagttcg

SEQ ID NO: 40612 - DNA, 122 bp, Homo sapiens
cctcgcccacttgcagcctctccaccgaacctcctccctcactcagcccgaggcgctgggcgctcgctcgctcgctggacctaccccgcctccagccctcgccccgccccaccgagcaagag

SEQ ID NO: 40613 - DNA, 122 bp, Homo sapiens
ggcacattaagtgtgtgcaacgcacggggctctccgcggctaaccctggagccccctgcccgggacgacctggtttctccaccctggggcacgaacatccccgtttgcaatccctcccgacc

SEQ ID NO: 40614 - DNA, 122 bp, Homo sapiens
tgagctgtggggtcgggggcaggggctgtgcattcaggcccggacatgggtactggccagcgtggccagaccttggccctcacagcagccctgcctggggcccattcccgggggcaggggcg

SEQ ID NO: 40615 - DNA, 122 bp, Homo sapiens
tcggatccctgtgacctcctgctgctgaccaggatcccattctcaagtctcctggacactcggatccctgtgacctcctgctgctgaccaggatcccaagtgacctgccacagacgccacag

SEQ ID NO: 40616 - DNA, 122 bp, Homo sapiens
gggagaggcgcgggtgggaaccctggctgtgcgtggtgcttgtgggccagcacgagtttccggtgggtgtgggctcggtgggccccacactgggagcagccggcaggccccaccggtcccgg

SEQ ID NO: 40617 - DNA, 122 bp, Homo sapiens
ccagcacacaagggccccaggagtggcttgctgggggccagtcaggcatccttggcagagcgttcctgtgaacggtctcagacacaggaggggcagaaattgaagaaggaggcgaggaggag

SEQ ID NO: 40618 - DNA, 122 bp, Homo sapiens
agcaagcttttgaggcagctgcttggggcacctggagcatgtgtttattcactcaacaaacgtttattaccccaaaacctcctttatcccaggctctgcgctacgcaacggaggcaaactag

SEQ ID NO: 40619 - DNA, 122 bp, Homo sapiens
tgccgcctcatgtacccgccgcacaagttcgtggtgcactcgcacaaggccctggagaaccggacctgccactggggcttcgactcggccaactggcgggcctacatcctgctgagccagga

SEQ ID NO: 40620 - DNA, 122 bp, Homo sapiens
cagcctccttctggttgagtgtctttatttcttgcagcttttccctaaacttctgggcttcgccctcctcgttggcaaagcttcgaactgtaggcatggccgacagagcctcaatggccacc

SEQ ID NO: 40621 - DNA, 122 bp, Homo sapiens
gtcaccctcatgactatttatccagcatctgctgcatgctcagcctcatcccaggggctgcggggacacaaataggtaagagagttcttaccttcaaagagttccctggtaaacagacattg

SEQ ID NO: 40622 - DNA, 122 bp, Homo sapiens
ctggggccgagagttatgtcgaagtttgtgaggttaacctgcacccagtgacagtcatggcgaaatttgtgaggttaactcgcacccagtaacgctgttccaatgcaaggtgtgtatttggt

SEQ ID NO: 40623 - DNA, 122 bp, Homo sapiens
caggaaggcaagacggtggatgccggagcctcgggcagggaagggggggaggtagggacacgtcacctgtccttcagccacccggttacccgggatgttggttctgggaggaggaaagtccc

SEQ ID NO: 40624 - DNA, 122 bp, Homo sapiens
attaggagttccaggtgtaataggccttgttgctgggcctacccagccctgttcctctgccgtcaagttctctccagccatcaaccagtcatctttacctctctcaggccaaagacaaaagg

SEQ ID NO: 40625 - DNA, 122 bp, Homo sapiens
ggggcagccacctcggggatgggtgactcaacctctcttcccggctggcttcctcactgccgtggagactcaggtgtgtgagggctcgtccaggctgcagctggacagagtggcagaggcgg

SEQ ID NO: 40626 - DNA, 122 bp, Homo sapiens
ggcttgtgagtagccccctccctcgggcctgggcctgggcctgagccgtcacctccgaggcggcctgtctctgcccaagtcgagtgaatgggccaggctggggtgtttgttggcccgggagg

SEQ ID NO: 40627 - DNA, 122 bp, Homo sapiens
tttttctatcatctgatgtttatcatccacattatctatcatctacctatccatcatctacgtatcatctatcgatctgtcatgtacctatcatctatcatcttcctatcgatcatctatct

SEQ ID NO: 40628 - DNA, 122 bp, Homo sapiens
gggaaggaggagctgccgagtctgtgcttctcgcccggggctgctgtgcaggcagacgcacgctatgtcatgggccaggccggacacttcagtcttggtgctttctgcacgtgtactgtatt

SEQ ID NO: 40629 - DNA, 122 bp, Homo sapiens
gtggggggaacggggcgggggggggaagcgggggcagacagaggacagctctgatgccctcgccctccctagtggacaagaccgtctacatggtgggcagctatggcccgagcgcccaggag

SEQ ID NO: 40630 - DNA, 122 bp, Homo sapiens
gtgtgtgttgggaggcgggggtccctctcctttggcttggggctccggagttgccactgccgccggcgctggtaaggtaggaactgcggggtgcgttgacgttttgctgggcaggttccccc

SEQ ID NO: 40631 - DNA, 122 bp, Homo sapiens
tataatgagtcacttgattttttggtttgctaatgaggatcttctcttgtccaaatccctcggccaaccatgtttgtttaactttttggttgggctatatgtatctttcgaactgtaggtta

SEQ ID NO: 40632 - DNA, 122 bp, Homo sapiens
ccgactcctgctttcctcttcaaactccggctgtggcccctttaaacaggttcggcgacacgtggcgggggttctgtggcagtagcggtggtggccggagcgggcatgtagtagagggcgtt

SEQ ID NO: 40633 - DNA, 122 bp, Homo sapiens
tggagaagcgagacggaggcttccagcaggcttggagggcgcggtggttgtaggccagcccgtggctttctgggaaatgtagtttagctcccctggtccttgtgtttccgcactccgcatcg

SEQ ID NO: 40634 - DNA, 122 bp, Homo sapiens
attccctgaggagtggacagtagaggacaaggtgctgttggaacaggcctttggcttccacgacaagtgtggatccaacagacgctgcccgacaagttgatttccagcctggtgaaatatca

SEQ ID NO: 40635 - DNA, 122 bp, Homo sapiens
ggaggccggaccctggacctttccgggtctgaggccgagccctgtgatgaggggagccaccgcctggactccagccggggtggcgtaaagcccaggacctccagtaccccatgggttctggt

SEQ ID NO: 40636 - DNA, 122 bp, Homo sapiens
atttgtactcagtaacaaaaatcattttctttttttttttttttttctgttgtggaaaagcgtgaatttgttattaagcatttgattttctgtgtccttaagtacttcctgaagatgaagca

SEQ ID NO: 40637 - DNA, 122 bp, Homo sapiens
cttgtgcaagatctcgtctttcccttgaactgcagaaaagagaggatcaggcatgtcaggcgctgcccacaggaactgggctcctggggattaagcaatagtcaggactggggtctggaggc

SEQ ID NO: 40638 - DNA, 122 bp, Homo sapiens
agaagagaaaaaggtcagtagacaaagagtcaaggatattctccttgggactcctgaattcggaccagagagtagggaaactggggaggtagggggcgttgagggtgggatgaggtggtggc

SEQ ID NO: 40639 - DNA, 122 bp, Homo sapiens
cctttccaagtccttgcctggactgcccctggcgagcgcagcgccggtgcttggtctgtgcgcagaaggtttgaggcccggacctctgagaacctctggtctcccaacagtcccctctttcc

SEQ ID NO: 40640 - DNA, 122 bp, Homo sapiens
agtcccgcgcggagtcctggattccagccgctcgcagtgactcggtactcgggatagtgccgggggccgcagccctgtcccgctgccgccgccggatgccccgagtcggccgtcacgcaccc

SEQ ID NO: 40641 - DNA, 122 bp, Homo sapiens
ggaagagctcattccccacagggatctggtggcacgggccaaaagtggagcgaccctgcgcgcagcctttaggggcgcaggctttgagaacccgggttctattccgggctctgccatttaag

SEQ ID NO: 40642 - DNA, 122 bp, Homo sapiens
gcccaagccgaggggggtgaggcgcctgcctccttggttggccaaactgtgattttcacccgtgcggtcggaaaactttcatccactcctggggccttcccggtgctgaggggaggcaccgg

SEQ ID NO: 40643 - DNA, 122 bp, Homo sapiens
cgggggtcgcaaccagagcctcacctcgggcccgggtccggccgggcgcggagcccgcggcgcctgtttctccgagcctcgcagctgccgccgctcacttccgggtttcgggcgccatcttg

SEQ ID NO: 40644 - DNA, 122 bp, Homo sapiens
tcatcctcttcctctgcctcctccagagtcagttcaaactggaatctgtcaggcccgtcccgctcggggttggtgaggtctgagggacttcgggggatcttgctctggtaccactctcgatt

SEQ ID NO: 40645 - DNA, 122 bp, Homo sapiens
gccctacaaagtcgttgacccccataattcaggaacattgcttgtcatcccgggacccaccgcaaggccgagcggagaggaagacagaaccctcgcgtggtccacggcagaacacgagtggc

SEQ ID NO: 40646 - DNA, 122 bp, Homo sapiens
cgtctgagccgagtcctgacccatgactggggtttctttcttccccctgatgggtctcggcgtggctgaggttttgctttgctgtctgcatttatggagatttttataatggaaaatttcaa

SEQ ID NO: 40647 - DNA, 122 bp, Homo sapiens
tgctgttgcttgctttgagttaatttgccaaaataggatcttttcttcagagattttccacgttcaccatcaccatcggatcctttcccacttcctgagcctttgccccccccagagttctt

SEQ ID NO: 40648 - DNA, 122 bp, Homo sapiens
aacaacttccagggctttatccaggtgttctaaagccacagcaccaaaaagaattctcttcggcaaaggcagcaggactcaacaggaagcagacgtttgcgttccgttacttgaggaaaacc

SEQ ID NO: 40649 - DNA, 122 bp, Homo sapiens
aatggcagtcaggatctgaatcctgctctgttgggatccaaagctggcgacacagcctagcggcccctgcagaggagaagaggagcaatgctcctctcctgcaaaggagatgcccaagcgat

SEQ ID NO: 40650 - DNA, 122 bp, Homo sapiens
aaagtgaagcaggaaggcagcagcagctcagagcaatgcggtggtcaggaaaggctccaacgacttcgggccagagagggacgggtttgcggggtgaagaaaggggtgatgggcttcagtgc

SEQ ID NO: 40651 - DNA, 122 bp, Homo sapiens
ccttgctctagaaagcagagcggtgccgtcctcagaatgacggactaaccatggccaacacggctgctcacctgctgtgtcccagatctgtgccaaggatttacaccaattatctcacttgg

SEQ ID NO: 40652 - DNA, 122 bp, Homo sapiens
caggggatatagaagacctgggcagctccccaggaccaagccctctcgcctagggctccccggggagttaggccgaaccctgctgtgcccttcactctgcagccctcgtggggatcatcaca

SEQ ID NO: 40653 - DNA, 122 bp, Homo sapiens
tttgctagttttatttgttctatgagttgatcttccatatcattagccagttcctgaatacgtcgagctatggtgtcattggaaagtggtacctgagctaccttctttgctgcagattcacc

SEQ ID NO: 40654 - DNA, 122 bp, Homo sapiens
gggccccctgcgctaatctgccctggcagcagcgagctggcacgccctgggtgcatcatccggtgtgctctggtgcccaaggtcggaataccctcactggtggcttggacacacccctgagc

SEQ ID NO: 40655 - DNA, 122 bp, Homo sapiens
gaaagaatttgtctcctggacactgaataaccccaggcagctgattcttcccacatcacccgtgcccctgccaccagggatgagttggggatggagcagcacccttgcctggcccttccttt

SEQ ID NO: 40656 - DNA, 122 bp, Homo sapiens
atctgcccgcacccccaatccccaacaactgatgtgtccttatctccctgccccctaccgcgcccccgtagcataattgtatgccacatatgggcacaccatcacatatggctaaaatggga

SEQ ID NO: 40657 - DNA, 122 bp, Homo sapiens
actctagcaggagggagggaaatcaaagtacctgtggtgaactcagcaggcttcttgaagcgggtcaggaagatgtggcagaggatgtacagtgttgcaaacagaagtgttgatatctgtag

SEQ ID NO: 40658 - DNA, 122 bp, Homo sapiens
gggcgcctctgagcctctgcctggggtgggggcgggccaggtcctctgccaactcaaagacgaggcggggcgccagcgctggaggcgtggctgtgcctgagagccgttggaggagggagccc

SEQ ID NO: 40659 - DNA, 122 bp, Homo sapiens
ggtgtggtcttctcgcgtgaattgatggcgtcatcgaagcgacggcccggaaggaagtcgcgtgctgaggggtgtgacggttttcttgctcgtgggctcggacgagtacggagcgcctgcag

SEQ ID NO: 40660 - DNA, 122 bp, Homo sapiens
gggtggagggaccaaaaggctacagagggcaaggtagggcggggatccctggtgcagacccgcagccccactggccctagggaaggagaaaccagattcccgaaccctagctggggtcagga

SEQ ID NO: 40661 - DNA, 122 bp, Homo sapiens
gcagcagaggtgtacgcagcatccggtaggaccagcgaggagaggctgctatgagggagtcggggtgctgaggacaaagtgcctgcaggctgcacaccaaggcacagatgccgacctacctg

SEQ ID NO: 40662 - DNA, 122 bp, Homo sapiens
tttttccacagccaccaccaagactgagcacctaacactctctcctgtattggggccttccgatttggctgcctacctccacagtttctctgccacaccattccccctgcaaggccctgctt

SEQ ID NO: 40663 - DNA, 122 bp, Homo sapiens
gatcagttcccagtgacgcccgtgagcacgctgtgtgcagaggccagggaaacggcgcggcggctgctgacccactacgtgaaggtgcagggcctggtcatatcacagatgctgcgcaagag

SEQ ID NO: 40664 - DNA, 122 bp, Homo sapiens
caagttccagagtcagacagccctggacttacataaagtttcagtctcagcttcctcatacgtaaaaggcattaggttgaaccatatcaaactgccactcttttttggggcgggtgtggcag

SEQ ID NO: 40665 - DNA, 122 bp, Homo sapiens
tgggatttcagccagctacgtgggaactggtcagccacaccctccggagcctgttgagctcggaaggggaggtagaattttctgaggcagtgtctagggtcagaaactagacatcttcccca

SEQ ID NO: 40666 - DNA, 122 bp, Homo sapiens
ctccttcctgtcaccagcgttccaagtcagatccctcgcggctcgtccggagcccctccccgcattcttgccacagagctggaaacgacgcccctgctggctgcctgtctcaagctgcacgg

SEQ ID NO: 40667 - DNA, 122 bp, Homo sapiens
aagccctgatcctcagggacttcctggggtgggaatgtgggcctgtgagagtgggaagcccgccaggaagttcccagaacctgggatcctggtttccagtgcttgctggggccaccctcact

SEQ ID NO: 40668 - DNA, 122 bp, Homo sapiens
agcagcagcccaggtcagcactgtggagaggtaccaaaaggtcattagggccaggcgtggcggctcacacctgtaatcctagcactttgcgaggtggaggcaggagtatctcttgagcccag

SEQ ID NO: 40669 - DNA, 122 bp, Homo sapiens
tgagggcggagaacccacagggagtgcgacccctttgcacgctgtgagtgggcaactgtccgagggactcgagccgatcgaagggtgaggaccagctcgcctgggggtggacggcctggaaa

SEQ ID NO: 40670 - DNA, 122 bp, Homo sapiens
ctgcgcaagtcggagtccaagagcagcctggccagccaacgcagcaagcagagctcctttcgcagcgaggcgggcatgagcaccgtcagctccacggccagcgacatccactccaccatcag

SEQ ID NO: 40671 - DNA, 122 bp, Homo sapiens
aagatcatgctgataaccttctgacatcagtggagtttagtttcttggccatttacaggccgctaaacagaaagtgtgattcaggcattctttccctgtctgttgagaagcaacacatactg

SEQ ID NO: 40672 - DNA, 122 bp, Homo sapiens
cagggttgtctacgtccagctgtaaatcccctggttttaatgcagggtgcctgtgtctctcggaaaaggtccccacaagtgaaaacagggccacagggtggcatgggcggaccgcaagttgt

SEQ ID NO: 40673 - DNA, 122 bp, Homo sapiens
aaaggaccggcaggcagctcccagtgcatactaacatttttaatgtataagattttattacggttcagtttcaagtaatgaaacattcccatgttaatttcttccttgacccacgaattaaa

SEQ ID NO: 40674 - DNA, 122 bp, Homo sapiens
aagggcggcctgtgattcaggcctgaggatgtggaggtgtcttgggctgggctgctttcacgccagcagaactccagggccaactccagggccttctccaggcggcagagcggaccctagga

SEQ ID NO: 40675 - DNA, 122 bp, Homo sapiens
tccaggttcccgatgaagtccccgcaggtcatgcgcttcccgatgttctaaggaagggaacggaggcctgtgagtttggagggcccttggcctcccaggtcctgcatgtctggccaggggtt

SEQ ID NO: 40676 - DNA, 122 bp, Homo sapiens
cctgctgccctgaggcctctgcaagcaagggctcttgcctccggggagcacgcccaggaccgtggcaggggctcccaaaggccggggacaggcctgagcaagcggagagcccccccgcctgc

SEQ ID NO: 40677 - DNA, 122 bp, Homo sapiens
tagtcccgcccatcttccagctgagcgtaccgggaggctcccattggactggagctgctacggaggcgggactttccctttttcttgaaccccattgggttaagtccagtccgagacaagcg

SEQ ID NO: 40678 - DNA, 122 bp, Homo sapiens
caaagcaaaacaaacaaacaaaaacaaattttaagaacacaacaaaaaagatttgacttccgaatagaatgttttctttaagaggcatgaaaagcaactattgttgtgttacagtgttaaaa

SEQ ID NO: 40679 - DNA, 122 bp, Homo sapiens
tgcgccccacgcgtcccaacagtggtgcatcttaaggcaccacaaaaacgtactgtgatacgccgctttgggcttcactggtccctggcgcccccaggcaagccaccgccttccccgctccc

SEQ ID NO: 40680 - DNA, 122 bp, Homo sapiens
cccgtctctcgtcccaagccccacagggtcccctcgccgcaggatgccccccgattgtcgcgcccgggcctcctacctgcacgtcgtctccagactccacaccggaaagagagagtgggagg

SEQ ID NO: 40681 - DNA, 122 bp, Homo sapiens
gacggcccgcccgctgccgggcaccgactccccaccctccggagcccgaaactgcccgggcgtggctcctcgccccaggagttccggggcattgaaccctgaaggtctgctccgagtcggtc

SEQ ID NO: 40682 - DNA, 122 bp, Homo sapiens
caggccgggccaccgtgcagaacgcgcgcggatctcacaccccaccatgcggaacgcgcgcgggtcacacaccgcaccgtacggaacacaggcggatcatgattcgttctcccctgctcctg

SEQ ID NO: 40683 - DNA, 122 bp, Homo sapiens
gggtgcccgctgttgcccccccacagatggtgccggctggctcgttcgcctggagacgagcgggcagactccaaggggtaggccttttttgtgctttgggcactaaacaaggaatgagcaga

SEQ ID NO: 40684 - DNA, 122 bp, Homo sapiens
ttttgttttctttctgtttggattaacatattctccatcactgtgtaacttcatccaatacgtattgaatacctactatgtgtctggcaccacttcagacagtaaggatatggatatgaatt

SEQ ID NO: 40685 - DNA, 122 bp, Homo sapiens
taagttaaaaactcagttccacagttgcatttgccctttttcaagtgctcaagagctacacgtgactaatggctactataatgggcaacacagagaacattttcatcactgcaaaaaggtct

SEQ ID NO: 40686 - DNA, 122 bp, Homo sapiens
cacttgtgtctgtttgtctggccagttgagcacgatgattccagccacgagagaagagaacgctgggctgagaggttagctgttggaataaggtttggttaactttggaattatacaatcag

SEQ ID NO: 40687 - DNA, 122 bp, Homo sapiens
tggcccccctctctttggttttcatctctcttctcccagccccattttttcctactctttcgtttccttgttgctgtgtgtcctggctcttttctctttctgtgtttgtctctctgcgtctc

SEQ ID NO: 40688 - DNA, 122 bp, Homo sapiens
gggcctggtgggaggaaccaagaagaaccagtgcagagcctggagtcacacctgccttcccgtcacaggggagaagctgggacacgtggagcaggaatgcgggaagcagagttgagctgcga

SEQ ID NO: 40689 - DNA, 122 bp, Homo sapiens
aagctgagttccccagggactgtgtcttccaccttccccgcagccacaggaaggtaatcacggataatcagcctgagaaagaggatatgagagttttttgaagtctacaaacctgttatttg

SEQ ID NO: 40690 - DNA, 122 bp, Homo sapiens
gtaaatatgcatgacatgcaaatttgcctctaaaaaaacaatgtgggtgctcacatgagccgggatgccagggtgctctggaaaatgtagtgttgtgcaaacacttgggtttctatgaccac

SEQ ID NO: 40691 - DNA, 122 bp, Homo sapiens
caacaacagtagggttttactctccctactatcaatatattggctgtgctggaggtgaggcgccccccttcctcctgcagccagagagctgcatccctgggaagaacctgctcttacatgac

SEQ ID NO: 40692 - DNA, 122 bp, Homo sapiens
acaagccagacactgttctaagtgcttagcaatatcactcatttaattgtcataacaacccggagagatagggactactcttttacagatgaggtaactgaggcacagagaagttaagtaat

SEQ ID NO: 40693 - DNA, 122 bp, Homo sapiens
atctctgttccagaacctcaggcagcacccagctttgaccagctgggccccaaggctgagcgcaggcctccagcatccgtgtcacctggggagcggcctgccccagggggcacagcgatacc

SEQ ID NO: 40694 - DNA, 122 bp, Homo sapiens
cttaaaaagtcattgtgttcagtctttatggatcctctaaattccagctgctcagcctcccggagctaaatgagatcacttaaaggtcgactgttggggcctccaaggtcgcctcggagact

SEQ ID NO: 40695 - DNA, 122 bp, Homo sapiens
tgcttcaagttgttcggacaaagtcgagagtctctccgatggcagcagccacatagcaggcgatttgcccagtgatgaagatgaaggagaagatgaaaaattgaacatcctgcccagcaaaa

SEQ ID NO: 40696 - DNA, 122 bp, Homo sapiens
atactgtttgggatagcttctctgacataactgacatattataaattcctccctatgactcgcagaagccattttctgcaatggccaaactttgtcacaccccatcccccttatagcaaata

SEQ ID NO: 40697 - DNA, 122 bp, Homo sapiens
tgagaaaacgcagtttttttcgttgtcccatagtatgggctccgtgggctagggccgggtcggaagcagctctggtggaagagaagcctttgcaaaatgtgcttccaccctggaaagcgtcg

SEQ ID NO: 40698 - DNA, 122 bp, Homo sapiens
cattttcaggctgcgaaatgttcgtctaagcccattttcatttggcaaaaccagccctaacgtttgagcaaactgaagtccacaaaaaaactcccagctgtgtagcagcctgccctcagggc

SEQ ID NO: 40699 - DNA, 122 bp, Homo sapiens
agaaaacaaacaagaaacactgtctgtgacaaacaaagcacatctgtgagctgaattgggcgtattgctgccagtttctaacgtctgatcaaactaaagagacatgaatgcttgctgggtca

SEQ ID NO: 40700 - DNA, 122 bp, Homo sapiens
gggtgccacccggaggtgtcctgttggttgcgctgattagagccgtcgccccctctcgggcggctggtcctcttattaggcggcagtgcaggtggcagtgtggacagcacaccgcagagaca

SEQ ID NO: 40701 - DNA, 122 bp, Homo sapiens
atgcaagaaagaaattgtttttattgcattgaggacttttccagaagcctggtggacccacgtctccctccagccccaaaggcagtgcaagcctctactgatcccccacttcaaggtgggtc

SEQ ID NO: 40702 - DNA, 122 bp, Homo sapiens
cctccatcacatgatttcttgactgcagtactgcagtagcttccttgctagacttgcctgcggtcttgccactctccaaaccactcctcccagggcagccagagtaaccttttaaaaatgga

SEQ ID NO: 40703 - DNA, 122 bp, Homo sapiens
aagagtggaaggtagccagtgttccagatattggggactgttgggggtgatgatggataacgatgctgaatgtagactccacactcactgctgagctctagaggccctagggaggaatccag

SEQ ID NO: 40704 - DNA, 122 bp, Homo sapiens
agtgggtggagggtaagaacttcagggctcatgtagtgtgtgtgtccacaaaacgtgttgcgttgtgctggacacagagatgtgctggcctgattccccttaagatgccacagctgctagga

SEQ ID NO: 40705 - DNA, 122 bp, Homo sapiens
ctttggttgatattaggaagtatttttaaaaaattggggaggtcgtttcccttgcagctccgccaccatctgctgcgtggactgagtcagcgtgaggtaaatttgcagcttcgcgctcctct

SEQ ID NO: 40706 - DNA, 122 bp, Homo sapiens
cctttctttatggacggaaagtcaacaatgcccaaatatttctttgcaatcagcatttagcgggataaaagagcaatgattcggatctacatttaagatatgtagactctctgttcaggcat

SEQ ID NO: 40707 - DNA, 122 bp, Homo sapiens
gttggaagttgtttgatgttttgctttttttaacctcctggtgtccatctgggcagaagccgagtgactgcccacaggagggccctgtttggctctgatgacctcctagagggacttttggg

SEQ ID NO: 40708 - DNA, 122 bp, Homo sapiens
gctctccgcgggtgaggcaaggaaaccgaggagacgcccgagccgggtcaccacaaggtccgcctggacccccggccgtcacggacggtcctctggatgcagatggtccagggatctggggg

SEQ ID NO: 40709 - DNA, 122 bp, Homo sapiens
aggatgtcacatacaaaaaatgtggaggacagttgggtgataggaatgcattcagcaggccgtgatgcaaagacttgcttcatgaagttggaggggcagaggtagagagcttgcatttcaga

SEQ ID NO: 40710 - DNA, 122 bp, Homo sapiens
ggggatggaggccgagtcagtctgctggtcactggaggccaggatgctgcctaacacagccgtcccgctccgggcctcaccaccagggcggctctccccactcccggcctgctgcccacaca

SEQ ID NO: 40711 - DNA, 122 bp, Homo sapiens
atgggcacagagatcttacctaatttcacaattttacccctagaagaatttatgacaaaccgaaaaatatgcctcatttgtctttctgtcaatttaacaaggttagtttaattaatccagaa

SEQ ID NO: 40712 - DNA, 122 bp, Homo sapiens
tccagcactgggccgcgcgcgtgattgatcggtgctgatagcaccgcaaaataattacggcgaattttctgatgtgtgattttatcccaagttcatgcttcagagaggtaatcggagaatga

SEQ ID NO: 40713 - DNA, 122 bp, Homo sapiens
cctgtgacttcctggagcctggcccacagaggagggttcaggacggacgctttccttccccgccctagggaagagggagggacgcgggcgctggcgtggaggttgggggagcctgagaggct

SEQ ID NO: 40714 - DNA, 122 bp, Homo sapiens
acagctgcgggaagctcaccccgcagtccgcgcagatgaactgcaactccggattgggctcggggacgccctcagccactttgacctccaaaatttcactgctgccaagaagggacccatct

SEQ ID NO: 40715 - DNA, 122 bp, Homo sapiens
gagaaggctctacagggaaggggtctttgcagcctggatggccatcccacattcctttaacggaggtctctaggcctcagagagaacccagagttagaaaggaggccagacggtccttgctg

SEQ ID NO: 40716 - DNA, 122 bp, Homo sapiens
aagccagtcagctgagccgccggggcctccagaagccagtgagctgagccatcggagcctcgacaagccagtgagctgagccgccggagcctccagaagccagtcagctgagccgccggagc

SEQ ID NO: 40717 - DNA, 122 bp, Homo sapiens
agctcggtgctgctcccttatcaacctcgcgcagcccggaggcattgtgggatgcctacccgggaatccccgcaccccacattactatagaaactagctgtcgtcggagaggtcacccctct

SEQ ID NO: 40718 - DNA, 122 bp, Homo sapiens
ccagcctttccggctgtgtctcagaggccctgcccaagcctggcaggtgggaggtggcagcgaccttggggaagggtgggggtggaatccagaacaggtctgggcagggcacggggccaagg

SEQ ID NO: 40719 - DNA, 122 bp, Homo sapiens
gaggaattccgtatctctcctttttactctgggcttggctgcctgatgtgcaactggatacgacaaaagctttagacttccccggtccccattgttttcactccttcctctagcctgttcca

SEQ ID NO: 40720 - DNA, 122 bp, Homo sapiens
ccaaggggtggagctgggaacattcctcataaagcgagtcgtcaaggagttgcaggtaagcgacacgcagggagccccggtcacgcttggcttccgtgtggtcaggtcagcgaacctcgtgg

SEQ ID NO: 40721 - DNA, 122 bp, Homo sapiens
ttgctgatgtgtgaggacgcgtggatttcctttccttgctttgcctggcgaggctgccctcgcatcccgacgtgtttaacacaggacaccagcttctccaccgggaggaagccttgcgttct

SEQ ID NO: 40722 - DNA, 122 bp, Homo sapiens
gtcgagggaaacactctacagctcaggtggaggttccgcagacacacccgcagctgtgcccgtaggttccggccgggcccggtgagccacgctcacttccggtccgctctaggattccaggt

SEQ ID NO: 40723 - DNA, 122 bp, Homo sapiens
tgaagggggcaggcgcctggtcagggtcacttcccgctggacagatggggaaactgaggccggggtctgtaggaggctttggtcctatccactcctcaacgcacttccctaaagccaactcc

SEQ ID NO: 40724 - DNA, 122 bp, Homo sapiens
agacaggaggatcgcttgagcccaggagtttgaatccagcctgggcaacatagcaaacctcgtcaagaaacaaagaaaaaaaagaaggaaggagggagggagagaggaaagaagggaggcag

SEQ ID NO: 40725 - DNA, 122 bp, Homo sapiens
ccggacaatgagagtgtccgcctcctgagccaataaagctgtactggttttgaatcgcggcgcgtttcccgccgctggggtcaggggtcgaggttcgggtcgtggggcggagggaagagcgg

SEQ ID NO: 40726 - DNA, 122 bp, Homo sapiens
ctggagctggatatgtagaaccaaaaatatgccaccactcaaaaatcttcatcatactaacgagaaaagatgggagtagaggtactagccaggtacaatttcagctcagcaaggctctgaga

SEQ ID NO: 40727 - DNA, 122 bp, Homo sapiens
cccgccccgccccgccagccctctcctcccccttcgcccacctcgacccctaagggtgggcgagatgggtcccttccagcaacggattccccaagatggacatcgcggtggcgtgctgggag

SEQ ID NO: 40728 - DNA, 122 bp, Homo sapiens
gttggagcggccacagcaggtcttgccgcactggggacagcgacaaggtctctcgccagtcgctgtggacccgccagtgctggaggagggatgcgctctgagtaaaacccctcccgcaggcc

SEQ ID NO: 40729 - DNA, 122 bp, Homo sapiens
taacccactggtgcagggtgtgccggggtatgataacaagagctgccttcagccactttccgaagaagatggtgagaaatagtgagataatgtctgggaagcacttgaactgctgagaagca

SEQ ID NO: 40730 - DNA, 122 bp, Homo sapiens
ctcagctgatccgcccgccttggcctcccaaagtgctgggatgacaggcgtgagccaccgcgcccggctccagtatttctttacagcagtgtgagaactgactcacagaaaggccaaatgaa

SEQ ID NO: 40731 - DNA, 122 bp, Homo sapiens
gcttcgaaggcgacccgcccaccatcctgcccttcccagaacctgagaccgtctggggggcggaagccaaatgaacccctattgggcacctctgtgatgccaggagcgaactggtgagccca

SEQ ID NO: 40732 - DNA, 122 bp, Homo sapiens
gggcgggggaaggagcatctcaggaaaggggtccccggactctggggctctcagcacctgcggtcgcaaaccaacctcatgccctgactttaccaggcgtcgggactctgacttaaccgggg

SEQ ID NO: 40733 - DNA, 122 bp, Homo sapiens
cgctccggcacttccggcaggccagggcacttccgggaccggggaactgtgggatcacggcggactgagactggcggcgttcctgtcacgtcaggtgtctcccgggcaacgcagtatcccgg

SEQ ID NO: 40734 - DNA, 122 bp, Homo sapiens
ggcctgacggccgggtccctgcttcggtgcccggagccccggctgcgcctgcccgggagccgtcagcttcctgggtaggcagtgcccgagtaactggggctttgagcctgcccgcctgcctc

SEQ ID NO: 40735 - DNA, 122 bp, Homo sapiens
tattgggtaggaaaagtctcagtgtatggcacacctcttagaaagccctcgtcaggccagcggggtttcccacagcgtatttgctcaatatttcaatatggatcctgctttgggacagaatg

SEQ ID NO: 40736 - DNA, 122 bp, Homo sapiens
tcataaattaggtcacattctccctggaggaaatccaaggaggcaaagtagtcgggtggccgtgagggtgcagtgtcacaggtaaggctggtccgaggacagctcccacctctttatgggag

SEQ ID NO: 40737 - DNA, 122 bp, Homo sapiens
tgcagattctgaaaatgttaagaaccatggtaatgaatgaaaaaaatatatgtacatatacgcacaaaaattatgcatgcgcacatgcacatttggtcaacaagaataccgtagagaggatg

SEQ ID NO: 40738 - DNA, 122 bp, Homo sapiens
ctccatctcgctctgttctccaagacgcccaccgcctccccttcaccgccggcggtcaaacgccctagccagtcccgcgagggcggaagtctcccacctgcgcctcgtacggtaggaagtgc

SEQ ID NO: 40739 - DNA, 122 bp, Homo sapiens
agaatccgcctgattttaaaatcctaatgcctggatactgccaatctcctactcctactccggtgttatgtaggtaacatttctgttttttttttttgagatggagtctcgctctgtcaccc

SEQ ID NO: 40740 - DNA, 122 bp, Homo sapiens
tccgtggtgtgggtaaatggtatacataaacattaaaccttaaccaaagaagaactttaccgccaccaaaacagaaacaaccccaaacagccaaaaacagtccttaaaaatgagaggaacat

SEQ ID NO: 40741 - DNA, 122 bp, Homo sapiens
gacccggcgtgcccatgtgtcaggtgggcgaggactacggggagccggcgcctgaggagccgcccccggcgccgcggcccaggtaagagctggcggccggacccgccaggccgcccctcgcc

SEQ ID NO: 40742 - DNA, 122 bp, Homo sapiens
tgtccgccagattccgaagcccttgctccttttcccattgtgtcactctttggaaagaaacgtcttagaacctaagtgcattctccctagccaagttaaggaaaactgggggccctgtgcgc

SEQ ID NO: 40743 - DNA, 122 bp, Homo sapiens
gcggcggggcgcgggggagccggggcgcggtgggaactcggggcgcggggggcccgggcgcgctcacctttgctgtgcttcaggtagctgacagccatctccaggatgtcggccttctccag

SEQ ID NO: 40744 - DNA, 122 bp, Homo sapiens
tgaacttccggcctcaggacgcaggcgcgggccgctcatttcgctctttccggcggtgctcgcaagcgaggcagccatgtcttatcccgctgatgattatgagtctgaggtaaggtggccgt

SEQ ID NO: 40745 - DNA, 122 bp, Homo sapiens
ccagagggaggaaaatggctttcagatggttgtgtagctggttttaacagccttcagcagcgacactggcagcctccgacctctcagaccgagtaagccaagcgaagcctgtaggcgcacgc

SEQ ID NO: 40746 - DNA, 122 bp, Homo sapiens
actgtctccctgtagagcgaggctccctcctgcgggagtggcgagatacttgggcattctcgggcaggcttcctggtgaggggggagtctccctcatttttggtgtttccacccacagccct

SEQ ID NO: 40747 - DNA, 122 bp, Homo sapiens
ggccgccgcagacagagctacccggagcaaccgttcaggggtgaggccggaagtcccatccgacctcgcgggcagccagcgctaggccgattcgaactcgaccttgttttggcgttgctagg

SEQ ID NO: 40748 - DNA, 122 bp, Homo sapiens
gaatttgaaaactagactagaggaaggaacagtgggttcaggatagcagaagtcttggaccgtagtatgatgtattgaagcaaactggtctttgaatgcagcccgatcagggccctaatcct

SEQ ID NO: 40749 - DNA, 122 bp, Homo sapiens
gggcaaagggcagaatgcaagtggtctttggtaaccaagagaagctcgtgactgaaagtccgcaaagaaacagatacctcatctctataaccataaggaactgtattctgcccactaacctg

SEQ ID NO: 40750 - DNA, 122 bp, Homo sapiens
cctcagtcagcctctggtgtgtcctgccctgttggcttggaagcccctgcccacggtccccgtcgtctcgcactgggtgggcatcagtgcctgaaggctgcccacctcccccgtgctggctc

SEQ ID NO: 40751 - DNA, 122 bp, Homo sapiens
gggcggcgcccggctccggggaataatgagtgtctgtcaggccgtccccgggtgactgggcggggcggggcggaggcggcgcgggaggcgggggtggcgggggaagggcgcagggcggggtg

SEQ ID NO: 40752 - DNA, 122 bp, Homo sapiens
tcttgaggtcaaagttcaaactcattacatggcctaaggctttttggggtatgatcccaacgaatttctccatctgtctcccatcctgctccctgcctccctatcttcttccagttcctcta

SEQ ID NO: 40753 - DNA, 122 bp, Homo sapiens
ccataggatgtagggctgtcaagtgatgcccaaaagatcttgtttctggatttacccaaccgttccaggaggcaaaacggcttcctcgggaccctctctctgtcatctacactctcgtctct

SEQ ID NO: 40754 - DNA, 122 bp, Homo sapiens
gccgctgctttcgccgctgctgcttctgctggttgggggtgagtgcgctccgggcccgagcgcgggagggcgggcggcggcgtgggcgcggtgctggacagctccccgggccgccaacaaag

SEQ ID NO: 40755 - DNA, 122 bp, Homo sapiens
ccagagggcaatagggcattggcagcctcgtccccagagcacggaagaggatctggaagccgtttccattggggagctgggaagaaactggggaacctggtgtagaccattatacaaaagac

SEQ ID NO: 40756 - DNA, 122 bp, Homo sapiens
taacactttagcctctgctaatcacttgctggtatcagatgagcctcttcccctccctggcgtgttttgtggttttatgtgttaacttcagagatgcactgacatgcgtcagtgaaaaagga

SEQ ID NO: 40757 - DNA, 122 bp, Homo sapiens
tttttggaagtttgtgtcttagctttcctctgttgtgacttttactgctccttctgctctcgatacagacaccataaaatttaccgttcatccaagaacacttttgagagtaaaaaatggaa

SEQ ID NO: 40758 - DNA, 122 bp, Homo sapiens
gaaatgttttctttagactaatttagcagaagagatgaataaagtcaaacaactgttttacggtagaagcacttcaaagtagtgcttgagagctctgaagtttgaatgatctagctttgaat

SEQ ID NO: 40759 - DNA, 122 bp, Homo sapiens
agaggtggaggttgcagtgagccgagatggcaccactgcactccatcctgggcgacagaacgagactccatcagaaagaaaagaaaggaaggaaaaaaagaagggaagggaaagggacagga

SEQ ID NO: 40760 - DNA, 122 bp, Homo sapiens
gtggcgctgctcaccacacacaagtgttataggaggagtctggcccttgagtaccgggtacgcaggggtgcctcaaccacactccgtccacggactctccgttattttaggaggtgagtgta

SEQ ID NO: 40761 - DNA, 122 bp, Homo sapiens
cggactttgggcctccttttctcatctgtaaactgggggtgatggcaatggcgccttcctcgtgaacagctgcaaggatttaagtaaggatgctgtgcaggactggacggggttagggtagg

SEQ ID NO: 40762 - DNA, 122 bp, Homo sapiens
cacagtcacggagagactggcaatcggcatagcgatagtccacgtcacggagatggtggtcgccatggagatggataccgccatccagaaagcagcagccgtcatactgatggccatcggca

SEQ ID NO: 40763 - DNA, 122 bp, Homo sapiens
ggcgcgctggcataattatgggcgagggtgcgcgggggcgggcgggcggctttaccttgccgccagcgctattaatgatgaggctccctctttttcttctctagaaggggtgcctttggttt

SEQ ID NO: 40764 - DNA, 122 bp, Homo sapiens
aatgttttcaaatatgagagatttttatattcctatctggtatcttataggagatgcttgcgccaggaggacttcctggaatgtaatcctgtgggagttcccaaccataaaacttcaagaac

SEQ ID NO: 40765 - DNA, 122 bp, Homo sapiens
agcagctggagtgaatcagaggggcagccacatctgcacatcctgtggggcaatcgctcacgcgcgggtgacggcgccagcaggccggctggggccgggggcgcttggggaccgcggggcgg

SEQ ID NO: 40766 - DNA, 122 bp, Homo sapiens
gctcctcggccctgagttctccaatctcaggaaatgagggaacttagcctgctgggaagacggtggggatggactccaggctgaaacgtcagggtgaaacttccagaactgagaagccacag

SEQ ID NO: 40767 - DNA, 122 bp, Homo sapiens
acaaaacgtaagaagcataagatactactaaataacactgtttggctactttcataaacacgtgttccctgcaaggattctataaattaacgtaatcatcaagagccagctttgaaacacaa

SEQ ID NO: 40768 - DNA, 122 bp, Homo sapiens
tcttggcccaagattgtgaggggtgagaaaccagggggattatgagtggagagctgatgccgtgaaaaagcactggactccgagccaagaagctgaggttcaaactctggcaccgcatgatc

SEQ ID NO: 40769 - DNA, 122 bp, Homo sapiens
aaaggatcccagagctcgcgggacgccccttaatccagcgccaaaggatcccagagctcgcgggacgccccttaatccagagccaaaggatcctagagcccgcgggacgccccttaatcccg

SEQ ID NO: 40770 - DNA, 122 bp, Homo sapiens
aaattgggaggaactattggtgaagactgtggctccaatgtctataaaaaagtagatgaccgtgatggttaattttatgtcaacttagctaggccatagaaacactactttagatgcttcta

SEQ ID NO: 40771 - DNA, 122 bp, Homo sapiens
gctcagcacacgagatcatgttgtgattacaaaagactcctctgggctcccagccaggaacgtcgggccgccacccccacccttccactctcagagggcgaggaccagggcactggcagctg

SEQ ID NO: 40772 - DNA, 122 bp, Homo sapiens
gcctgccggggagggggcatgacgcccagctgcatgcagctggggggccccagaggcctccggtccaccagagcccggcagaagttattgttcatggtgccgcgtggagctggacccagagc

SEQ ID NO: 40773 - DNA, 122 bp, Homo sapiens
tcgtgcagcccataaaagggggacacagagtagccgaaactgctcttgggggagggggcacgtcccagccttccgtgtgatgctggggtcagcgtggcccctcggctgccagagctcacgaa

SEQ ID NO: 40774 - DNA, 122 bp, Homo sapiens
cagagggggcggggcggggcctggagcggccgggctgggggcggggcctggcccagaggacgccttgtgcagccgggcaggggtcggggcctggagccgcggacctctggagccgccgggca

SEQ ID NO: 40775 - DNA, 122 bp, Homo sapiens
aactaatatcaccctggaaaaaatctctgtcatccctcaaaatgggatatctgatgtaatcgaaactgccagcttggctgatgacaaattccaaggggatgaaaatgaaatgagagaaagac

SEQ ID NO: 40776 - DNA, 122 bp, Homo sapiens
tttagcgtgtctgcttccagatggggaggcccagtccctgtggaagtgactgctctcccgcggcccagcctcgggaccctcccgtcagccctctccattcacgctaaactgcgctgttcctc

SEQ ID NO: 40777 - DNA, 122 bp, Homo sapiens
agaacctcgagcccgccttctctgtctctggattttagatatttcatctgagtgtaatcacgcagcgtttgttctttggtgagtggcttccttcacggagcataaggtcctcaagactcacc

SEQ ID NO: 40778 - DNA, 122 bp, Homo sapiens
agggggaaatcctgcccgcctcgggataaggctgcgcagccaggctaccggcctcggacccgcgccagtcgggagagagaggaaggcccccagtatcccagtcccccgccaagagcaccgcc

SEQ ID NO: 40779 - DNA, 122 bp, Homo sapiens
ttccccaccggaggtcgaaggctgtaaacgcggcgggtggaaccttgtgtgggcggaacgcgagtgcagcggtgggaggcttccgggggagctgcacgggcgacgggtcggcggagacagaa

SEQ ID NO: 40780 - DNA, 122 bp, Homo sapiens
ggggagcctccttggaaagccctgtgacctattcccagggacccagcagtgggctcccagcgggccctgctctggcgtcggggttgcagataccgcccaggaggaggcgagcgaggcctccg

SEQ ID NO: 40781 - DNA, 122 bp, Homo sapiens
ctcattacgcataaagcaagagtcgctgggcaccaagtgagggtctatggcgctcttccacgttgcagctcagaggcctttcattacatctgaattctgggattcgctttggagaagaggtt

SEQ ID NO: 40782 - DNA, 122 bp, Homo sapiens
tgggcacatagtcgtcccactcggcctggtaacacgtgccggccaccgggaccccgagcgcgtactttttacggggggacgccaccttgaatttgccacggtggtctccggagcggttgctg

SEQ ID NO: 40783 - DNA, 122 bp, Homo sapiens
agtttactggcttagcagggtggggtgttgccaccactatcttggagtcccatgagaattcgcttcaggagattcctttgcagagaatgggctactgggctctgaaggttgactacaggcta

SEQ ID NO: 40784 - DNA, 122 bp, Homo sapiens
agctattgaaggatagaaacataaaaccgacaaatagaagggaggggccgattattaaatcgtatacccatactgagatttcagtgcctgtttgaggaccagcaaaccatgattgtcaagtt

SEQ ID NO: 40785 - DNA, 122 bp, Homo sapiens
agcgtcctggagtggttacgaaggacttgcagtcatcccctgtgtgactggcccttttcacgggaatactaatgcttttgattgttttccttctgtgatggtggggaagagaatgaggcagt

SEQ ID NO: 40786 - DNA, 122 bp, Homo sapiens
caaactgcttggcctcttgcacttgcaaatgtcttcttgaacttaaactgggttttgcaccggctcctgacactttctttcagggtctggtaggtggaaagcgcacttctaccaggagggga

SEQ ID NO: 40787 - DNA, 122 bp, Homo sapiens
tcggaggctgtgtgctcactttgcaaaacagcagaaatttatagcccaagtaattgatcacggcgcttctgcctccctccatctctctcgggctcctaattcccttctcccgctcttctctt

SEQ ID NO: 40788 - DNA, 122 bp, Homo sapiens
gggcccagccccgaagatgctgggccacgagctttgccgtgtctgtggggacaaggcctccggcttccactacaacgtgctcagctgcgaaggctgcaagggcttcttccggcgcagtgtgg

SEQ ID NO: 40789 - DNA, 122 bp, Homo sapiens
ccgctcagatcctgcgcagtcttctccgcttactttcaagaattcggagaatttggataccgccctgggctcccaccgcgcgccaggcggaacagcgaggtcacagagtgcgcgatgcagcc

SEQ ID NO: 40790 - DNA, 122 bp, Homo sapiens
tttacttatatgtgataagttccctttgtagaaagagactatatttaatcataaatatatcgtcataggtacaaggataaaatttaagaagagaggactacagatcactttaacgctaaagg

SEQ ID NO: 40791 - DNA, 122 bp, Homo sapiens
attccaatgcaagctgcggagtgtttggattcctttcatcttcacgaagatacgattacacggctcgacgaggtgccacggttcgcgatgtcagggccgcagtttgcgatgctgtgaatctt

SEQ ID NO: 40792 - DNA, 122 bp, Homo sapiens
cacattcacaggcacccacacccttggctccagcctcaaaagtgtctctgtgtttttctgcgggactgtggggacactgccacctccagaggcctgaccccctcctgtcactctcactcttt

SEQ ID NO: 40793 - DNA, 122 bp, Homo sapiens
ttaagcaaagaccaactaactttggaggagagatctgctctgccattcacaccagctcaacgctggggtcaggggaccaaggctttcatctgggctttctctcaaacttgccataagatctc

SEQ ID NO: 40794 - DNA, 122 bp, Homo sapiens
taagaaatgtaagggcttaaatgcaattagttttctcctactagaaatgacattagtaatcgagttctgaaaatgcaattatgtattcaatataggatgttaccacttgaatactgaatttt

SEQ ID NO: 40795 - DNA, 122 bp, Homo sapiens
cctggctgcgcgctcccgctctgcctcgcgattctccggaatcgtacctcttcgtgggctcgcgccagcgctgtgagcgcacaattagtttaaactatggccccgccccctcgcgctgccct

SEQ ID NO: 40796 - DNA, 122 bp, Homo sapiens
aaatgaacaaatttctggtacatacaaactaccagaactgacttgggaataaatacagcacgaattcataatccaaactaaggcctaggaccatttaaaaaatttacatcaatcctcgaatg

SEQ ID NO: 40797 - DNA, 122 bp, Homo sapiens
aggtggaggttgacccaggctgcgcccgggtggaagaagttagactgcaggagggaccagcgggcattggcgtgaacccctcagtcgcccctccagagtgtgaaattgcctctttgcccgac

SEQ ID NO: 40798 - DNA, 122 bp, Homo sapiens
cgtgggcagagagcggcgctttacccggagctaacgctgtgaccaccagcgcctctcacccggcagcgcctaacctgcagaaaaccggcgcgagtaatgggtacctcacatacgaaggttaa

SEQ ID NO: 40799 - DNA, 122 bp, Homo sapiens
gggtccataaaagggaccgccatcccggtgctcggagcaggcgtagccccagggttactccgggtaggaccaggaagtccctacggcctcctgggtcccggcaccccccttctcactccggc

SEQ ID NO: 40800 - DNA, 122 bp, Homo sapiens
gtctcacatatggagaagtacaacctgttttcatagcagtccacaatttatatttatctgcgctccaatatacttttcttcaacctcatcctatttattttaaatctcacctatcttgaaac

SEQ ID NO: 40801 - DNA, 122 bp, Homo sapiens
ctggaacgtggaggagagggctcgcaggaggaagggtggggcttgggaaggaaaaaggcgcggctcggaggagaaaccggctgctcacaatccgcgaagccagaagttacccggctcgtgga

SEQ ID NO: 40802 - DNA, 122 bp, Homo sapiens
gttttaagatcaaacagccataagtggtttataataaaaaagagtgtttgacttcataaacgaggctcacatgttactttaataaataatttaaattagcaaaagggagacatctggatttt

SEQ ID NO: 40803 - DNA, 122 bp, Homo sapiens
cagggacgccctgcctgggctgctccgggctgcctgtggagggctgactgcaggaggggccgcgggctggtacctgtgtccgagtccttctgctccccattggcgcccgcggtgaagggcag

SEQ ID NO: 40804 - DNA, 122 bp, Homo sapiens
attagagaggattgttttaggtcaccctttcctgaagacaaaacaatccctttggtttctcgattagaaagcccaacagattgagtgacaaggaaaagtttttgatcttgctattacagtca

SEQ ID NO: 40805 - DNA, 122 bp, Homo sapiens
gcggaaagggttagttaggagcccagaggctgatctgtgggcgcccggcgagagaggccccgccccgccctggaggccctggcagctccgggctgagagcagttccggtgccaaaacccttc

SEQ ID NO: 40806 - DNA, 122 bp, Homo sapiens
tcccccattacccaatcccagccacttccttcaccacctccggtcctactcattttgcttcggctagtgaaatctaggcttctctgttgaaagtcccccgctacttacctcagagtggtttc

SEQ ID NO: 40807 - DNA, 122 bp, Homo sapiens
ggcggcggcggcggcagcgcttaggccgtagcgctccaggccagacggggccgccagcaccgcaggcttgctggaaccatcaacgtggttgagctgttgttgctgctgctgctgctgctgct

SEQ ID NO: 40808 - DNA, 122 bp, Homo sapiens
ttagctttaggaacaacaatagcatgagccacccacttattgaggactagaatttctaaacggtaattaaacattttaaataaagaacagtttgatggttaaggagacacccagacattatc

SEQ ID NO: 40809 - DNA, 122 bp, Homo sapiens
gcttcgtgtttagcgacaggtataaattccggacatggcggcagctgtggctgtggctggcggaggccgagcaggtaacggatcccgggctgaggggctgggccgggagggacgggcccgcc

SEQ ID NO: 40810 - DNA, 122 bp, Homo sapiens
gtggcagagataatgttgtcatggaggtggctgtgttgtaaagaccctcacattcagtaccgaggatgctagatgctaaatattatcccatgagcaatggggaatatataggactgtaagca

SEQ ID NO: 40811 - DNA, 122 bp, Homo sapiens
ccagtttaagggaaagataccttaagtttttgggatgttggggtcaagtttcttgggaaacgcttacctgggtatatccagaattaagttaaatatgagagtcccagagaaaggtctgggcg

SEQ ID NO: 40812 - DNA, 122 bp, Homo sapiens
tctatcccccagtgtgaactggagccaggcaggccgtgacatgccatgaatagatggccacgcacatctaaggacacactcttcccaacgaggggacgccgcacgggtttcagtcaggcgca

SEQ ID NO: 40813 - DNA, 122 bp, Homo sapiens
ggtgcctactgcctcgctaggaatggccgcggaggaggactggtcacgtggcgtggcttccggcctctggcgcgttcctattcgggaaggttttaaatgcggagtcatctcttgatttgtca

SEQ ID NO: 40814 - DNA, 122 bp, Homo sapiens
cctgtgggaccaccggcaccacctgctccaaggccatcaagctcttcgtggaggtgagaacggccccagctgtgagcacccccgaccctgcagccaacgagccggcccccagggaagcttcg

SEQ ID NO: 40815 - DNA, 122 bp, Homo sapiens
aagcatcacaggctgtccttgatctcaggacctctttctactgctgctctcacaagataccgtgtaacatttcactacagagtaatccaacagaagccctctaaagaatattgcaacttaag

SEQ ID NO: 40816 - DNA, 122 bp, Homo sapiens
tcaaagcacccctgcttgcccacaagccagccttcatactgagcccagctctgattttcccggtggagagagctgagctgaacttgcagctgactgggtgatgtgtctcagaaacaggaggg

SEQ ID NO: 40817 - DNA, 122 bp, Homo sapiens
cgcttccacagcgatgctggctactgatttcggacacctccttgccatgggatgtgagtccggagagggacaggaggggcaggtccgggttgggcagtgaggagggtgtgacgccgcgaagt

SEQ ID NO: 40818 - DNA, 122 bp, Homo sapiens
aggcttagaggaattaaataattcattcgaggacaccaaaccagccaataaactgcagagcgggtatttgactccagggactagactttcctatattatgctgccataacacactaataagt

SEQ ID NO: 40819 - DNA, 122 bp, Homo sapiens
aaaattttaaaataaaagaaaattgcttttagatcccaggtttgtaaccccttatcatctcgttctaggaggtaacaaggagttactaacttgggatctaaaagcaatcctaaggcttgagg

SEQ ID NO: 40820 - DNA, 122 bp, Homo sapiens
aggttttccctaggctcctataccatcttgcatatttgggatatcccaagacatccatgacgcttggctctctaggacattgaaatctggttagggaagtaaaatatgaaagcaatggagaa

SEQ ID NO: 40821 - DNA, 122 bp, Homo sapiens
acgccctccccaccaaatgctacttggctccaagtggggtactgatgggcactgaaaaaccgatgggcagtgagggctatcagaggggcaactacaagtacagtagcactaggcttgagtgt

SEQ ID NO: 40822 - DNA, 122 bp, Homo sapiens
tctccctttctttctctctctctctctccctctctctctcccccctctctttttttttctcggggtacaggcttgtttttcaaaggacagttgaattgcacgtcagaaacagggagaccgag

SEQ ID NO: 40823 - DNA, 122 bp, Homo sapiens
ctgtaaatacactccactttggggacccatctctgtactgcaatttcatgaaggctaacacgtacaagtcaaaagtttttcaaaacagtggtctcctaagaatgctcttgcatgcacctgtg

SEQ ID NO: 40824 - DNA, 122 bp, Homo sapiens
gtgcctcttctgccctttgccagccttctccccaccttaaaaaaatagcctttttcacagcgcggtgctggtacaaaaacagacacagagaccaatggaacaaaatagagagcccagaaaca

SEQ ID NO: 40825 - DNA, 122 bp, Homo sapiens
aatgcccagcccccccccttatttgcatttgccctgagttccactaggcttgctgggatacgtagtttatttgtattttgttttctgcgtacgagagtaaatttaaagagataaaacgtttc

SEQ ID NO: 40826 - DNA, 122 bp, Homo sapiens
tcaccttctggtatcagtagcttggggcattgccatttaaattcatgattacagtattcccgttacaccatatgttaaaatacatagactggacatcatcctgtgggtaatgctatattttc

SEQ ID NO: 40827 - DNA, 122 bp, Homo sapiens
tggcaagcggcttgctgacctgccggatgcccaagtatagcagcttcgccatagggaacgcgcccaccaccatcttggcggtctcacagggcacgcgcaaccttgctgactgggcggggcgc

SEQ ID NO: 40828 - DNA, 122 bp, Homo sapiens
ataagccagggtcggaaactttccagacaaacctagatagctctactaggagggagtcaacgacctattgtgtcaattagatcccagcctggacaagggcatgactattgctgtttggggac

SEQ ID NO: 40829 - DNA, 122 bp, Homo sapiens
ccccccaacatccgccacctcaccgaagcgcccggcaccttagcctcctctccaggaaagcggacgccttttccgacctggcacaccgcggattccgggacccccaacaaaggcgccttgga

SEQ ID NO: 40830 - DNA, 122 bp, Homo sapiens
ctcctgggcatccaccatgatgctgtcatcttcctggccgagcagctccccggagcccagcgttgccagcactataagttccgttaccaccagcagggagagggccaggaggagccgcccct

SEQ ID NO: 40831 - DNA, 122 bp, Homo sapiens
gacgtcagtcgtccttgtcattctcgttgaagtcatcatcctcctcgtcgtcctccccgacgtaggacaccggggtctccaccctggagccgctgtactgagacctcttggagcttgtggcc

SEQ ID NO: 40832 - DNA, 122 bp, Homo sapiens
agggcagccgcaggaggggcaggctgggaggtgctgccacagcctttcacttgggcaggacgtcagaggactcggacaccagcttcccatcgcgggtctcgatcttcctcacaaccacggcc

SEQ ID NO: 40833 - DNA, 122 bp, Homo sapiens
cttacaaagaagatgtggagcagagctgaaaaccaacccaggagaatgtgtgtctttgaacgaaatcatctccaaatgccctgggaagtgcttgcaggctttgtttgtgctgccccagaagg

SEQ ID NO: 40834 - DNA, 122 bp, Homo sapiens
gccggggaccgtgtggacggcaggctttgtgctcacctacaagctgggtgagtgaggcctcgagccaggcaacagcagttggggcttccgggacagctccaggtgtgtccccaggggcttgc

SEQ ID NO: 40835 - DNA, 122 bp, Homo sapiens
tgttcctgtacggttcatactggagcactaggattacattctggcatagcatcaaaggaacggtccccgaagtggacagcagaaaaatgaaaatatgccgcgagaaaggagcaaagggccta

SEQ ID NO: 40836 - DNA, 122 bp, Homo sapiens
cttccttgctgtcacagccaccgcccctggggtttccacagcctagttgtaagccttctgcgtagccaccagtcatcccacccatctggctctccttccttttgacgccactacaaatgacc

SEQ ID NO: 40837 - DNA, 122 bp, Homo sapiens
ttgcccaggctggtgtcgaactcctgagctcaagaaatttgccggcctcatcgtgagccacgcacccagccagcagacaatgtttgtttgtttgtttttgaggcagtgtcttgctatgttgc

SEQ ID NO: 40838 - DNA, 122 bp, Homo sapiens
caaaggcttagcgcaggcgcaaattctgcggaccccagagccagagacccaggagtgtggcgtgtgggaagggtagggccagatgctccggccacctcaacctaccgcgaagacgcggggca

SEQ ID NO: 40839 - DNA, 122 bp, Homo sapiens
gcggcaagaccagctcttcattgttgcgtatggcttctggggtgacggaacactggctcccggagcgggtgtccatctgcaggacacagaaggggaggacctgcgccatcagctccggggag

SEQ ID NO: 40840 - DNA, 122 bp, Homo sapiens
tggcagactcagggctttagacgggtcggggtcatatctctgctggttgcatttggccggcgagcggccagcggacaggaacagatgacgaggacagctaatgtgccacattcacttgcagg

SEQ ID NO: 40841 - DNA, 122 bp, Homo sapiens
ccagcgtgcccttttcctcacgggaattaggagggaagcaccaagatgtggggtcctccacgagtcctagagagaaatccagagagtgtatgggttcaccagtcagtgtgatgacgcacttc

SEQ ID NO: 40842 - DNA, 122 bp, Homo sapiens
cagagcacgaaggacagtacccaggcagcagcaatcatgaggcctgccatcttggtggtgcgccgggcagggtaggtgagaggcttggtgacgcagaagtagcggtcaaagctgatgatgag

SEQ ID NO: 40843 - DNA, 122 bp, Homo sapiens
aacgtttcctgcaaaatgtgcttatcaagagccctgcgcaaataacatttttgtggacagcgctgggcatttaaaagaggcacaagacaaatgggttttccgaacaataaaataatagtagt

SEQ ID NO: 40844 - DNA, 122 bp, Homo sapiens
cgaactcctggggaaagtcgttcagctcccggaggcgcttctcaatctgcaggcgcccaccgtagcgggtgaccccgtacaccacggtcatcactgtctgcttcaccaccttgcgggtgatg

SEQ ID NO: 40845 - DNA, 122 bp, Homo sapiens
gggctcgaaaagggggcgtgagcggcgaggcatattgggaattgtagttttctggacccacgggacgggcaggagctggagctccgtgccgcctgtactcccgccttcatttcccatcgtgc

SEQ ID NO: 40846 - DNA, 122 bp, Homo sapiens
gagacggccacctagagcattgggcggggcagagccctgagggccgctggccaattggcgcgctcgtctgaatggcgtttggcgcggagcagtgacggctgcgataatagcgaggcagcagt

SEQ ID NO: 40847 - DNA, 122 bp, Homo sapiens
aatacatacttcctgtgccataccaatcagttacactcaaagctttcttggaccccgttccgtaggcaataacgtgcgtccgcctcagcgcgagattaggagttcaaacaatggtgacttcc

SEQ ID NO: 40848 - DNA, 122 bp, Homo sapiens
atcgctacaagactagatgccgagttcgaactactgcctggacggcagcgcccgagcgcccgcaaaaataagcccccgtgccatttccggtactagcaaatcctcctgtatgtccccactgg

SEQ ID NO: 40849 - DNA, 122 bp, Homo sapiens
gggctcgggggcggggccggcggagggggcgtgtcttctgggggcggggcctgccgagtccgcggcgttccccggctgcagccgggagggggccgaggagtgactgagccccgggctgtgca

SEQ ID NO: 40850 - DNA, 122 bp, Homo sapiens
aggggacggaccatttagatgacaaatgggcttcagggcgctgtcagaacttccaggcggcggggactattaacggtcacatggaggccgccgcatctgtgatggcagagcgggtcggtggg

SEQ ID NO: 40851 - DNA, 122 bp, Homo sapiens
ttccaaccaggcgccggggcatgggtcacgcgatctgggagccggctttgtgtgcccacgcggtccaggaagcataaaggggtgattatgacccaggccgggcagcaaacaggctgtgtcac

SEQ ID NO: 40852 - DNA, 122 bp, Homo sapiens
cttcccagaggcacagtctgattctgcccggagtaagacattgacgggagctgggggcttcgtgctggggctcatcatctgtggagtgggcatcttcatgcacaggaggagcaagaaaggtg

SEQ ID NO: 40853 - DNA, 122 bp, Homo sapiens
gagagggcctggaaccctgactctgcccagatgtgctgtgggaccttgggcaaaagcccgcgttcttgtgatattcccgacccaaacccaagcgaggggagtagagggcaggcaggaggctc

SEQ ID NO: 40854 - DNA, 122 bp, Homo sapiens
gttgaccagagaagtcacgagtcagccaaagcttacctgcccaagtttatacagtgtggacgtagcacctcttgatggggactttctgaaaacacatgtgggactggaaatactaatttagc

SEQ ID NO: 40855 - DNA, 122 bp, Homo sapiens
ccactacatacctattaggaaggccaaaattctaaacactgacaccaaatgctggcaagacgtggcttgctatggactgaatgttgtgttccttcccaaattcttatgttgtaatcctaatc

SEQ ID NO: 40856 - DNA, 122 bp, Homo sapiens
tgccctgtctggttgttgatgatgatgtcgatgccgaagagtgacacgcccagtgcctgccgcagggcccgggagagctcccggatgacctcgtcgctcggccgctcgaacacgccctcgat

SEQ ID NO: 40857 - DNA, 122 bp, Homo sapiens
gcacaaaacctaaaatatttactatctcgtcctttacagaatgtttgccaatctatggtccggagtccaaggctgtccatttttcaaagaacacaaagtgacatgagactgtcccatgtgca

SEQ ID NO: 40858 - DNA, 122 bp, Homo sapiens
ctgatccctggccaaggtgcgggatccacccaggatgaatccaggtgaggagccgggagccgtgcgcttaacggcgggatttgggaacccgcttctgacacgggcagcgggaccgggacgcc

SEQ ID NO: 40859 - DNA, 122 bp, Homo sapiens
agtttctggtctcgtttccgccactgtgttttctcgggccgggagaagcagtcccagggacgcgacaggggcagaaggagccctgcgtggggaattgagaagggtgcggcgcggtcagaaag

SEQ ID NO: 40860 - DNA, 122 bp, Homo sapiens
tcctcatatccctagttggggtccctagtactcagtcctctgaacctgaagacaaagagacggaggaaagtaccaggagcacccccactccagcctcccatgcacacttgtgcacacgcatg

SEQ ID NO: 40861 - DNA, 122 bp, Homo sapiens
ccgcagtcccggcctgtgtaccccggccaacacatgcagcggccactctcacagcggccccggccacgacagtccccaggacagctgcgcacaccgcagtcctcgccgctgtagcccgcatt

SEQ ID NO: 40862 - DNA, 122 bp, Homo sapiens
ggcgcgtggtgggaaccgcgtggaaccgaagggctcccacgggaacaagggcatcactgacggtacggcctctcgggtctattgacccttctctgcctccccggtccggactcatacaactt

SEQ ID NO: 40863 - DNA, 122 bp, Homo sapiens
gtgggggcctgtctgtgtggctgtgtccggttgtcgtgtgtctcactgttgcgttgtacacgggacagtttacctttctgaagtccaggactccagggctgggaggccggctggccctgctg

SEQ ID NO: 40864 - DNA, 122 bp, Homo sapiens
cttgggagaacaaagactgccccgtcctcagcctccctgctctctgaattattatctaaacggaaacacagacactctctgggcagcacctcagcctgtctctgggcacacacacaaagatg

SEQ ID NO: 40865 - DNA, 122 bp, Homo sapiens
tttataggcgcggacctcggcctcgcacaccacagctccagctctgagacacaagcgacccgcacccccccaccgcccagccccagcctccagactggctgagatcacagtgtgcgccaccc

SEQ ID NO: 40866 - DNA, 122 bp, Homo sapiens
aaggtttgctaatgctgctcccgtcggcagaggcctccagcacggagggccagcgagcgccgaccacccccagccccagccccaggccccaggccccaggccccaggccccaggccccgagc

SEQ ID NO: 40867 - DNA, 122 bp, Homo sapiens
gacggggaccgggtcgcgccgacctgaccggcgggagcccaggcactcacgtggcgggagcgccgggggcttcagcacggagacacatcccgtctgcccctggactcccgcgagccccgcgg

SEQ ID NO: 40868 - DNA, 122 bp, Homo sapiens
gaagaaggaatggttgaagaactagggttattttgcccagggaatcaaagcttgggggtgcggtgggaaatgctgcttgtcttgaaatacagaattttgatagatcttttccacttggccta

SEQ ID NO: 40869 - DNA, 122 bp, Homo sapiens
tccgggtccccctcacctcctctgtctgtcttggtggcctcacgccgtgggctgtgatgccggctacgctgcttgggtggccaagggtctgagctgcaagacgcccagcctgggtctctccc

SEQ ID NO: 40870 - DNA, 122 bp, Homo sapiens
ctccgacagcgactctcttgtatttgagcctcttccccctctcagaatagtcgagagtgacgaagaagaggagacgatgaaccaaggcgatgacggcccctccggtaaaaatgctgcctctt

SEQ ID NO: 40871 - DNA, 122 bp, Homo sapiens
gggcagttccctggcaccaagagaagctgcggaaacgtcgggaaaaggcattcgcgcaatcgagcactgctctctcgaccttgcattctccctctaaagcagctatctaacgaatgcgcctt

SEQ ID NO: 40872 - DNA, 122 bp, Homo sapiens
cagaagggttcgcagccgctggctctcgctgcagttcatggctttcggggagtgacacggcggctccaggacgctgctgacctttccccctgggcgaggggaagcgagctagcgagcgggcc

SEQ ID NO: 40873 - DNA, 122 bp, Homo sapiens
gggctccccagcggccggcgcagcacgtagcgcacgtgtagggtccgctccccaccccctcgccgcctctgacaacttttcagggctccaggtgtccgtgagcctcccttccgccctggcct

SEQ ID NO: 40874 - DNA, 122 bp, Homo sapiens
gctggcggaaggcagtgccgggccggctcactgctctgtcggtaggaaggttcttgggttcggacggcagcaggttcctgaggccagggaagtacagggtcggggtaagaagccagaggcat

SEQ ID NO: 40875 - DNA, 122 bp, Homo sapiens
ctcaagcaatcctcccacttcagtcttctgagtagctaggactacagacatgagccaccacgccctggagggaaatcttttaaatgtagatccatatattcttgtagtggatataggtgacc

SEQ ID NO: 40876 - DNA, 122 bp, Homo sapiens
gtacgcagcgccaatggttctcagcctcaccttggcctgatcctgagcgtccttcctcctcgcccagatcaccaccagcacgtagaccacacacaggcagcccacggtggtcacgaccacag

SEQ ID NO: 40877 - DNA, 122 bp, Homo sapiens
ttttcctcggtgggggcttagcgcactggaggagcggcgggcttcagacaggtaaagttccgactggagagcgtgtttctcgcaggagtcaggtggggaaccgggctcctagggcctggtca

SEQ ID NO: 40878 - DNA, 122 bp, Homo sapiens
agactgaataactgggtgattcagactttcctacatctgtgacttgattcctgaaaggagcgctggaacagatgtcaaactataatcagagtgagcaattaaaaccaagtaatcttagaacc

SEQ ID NO: 40879 - DNA, 122 bp, Homo sapiens
tcttaacatttaaaggggagtgttgtgtgctgtacacgaagagatcgacccagctaagaacgacttctagacctgggagtgtggggaacatagggaaggataagttttttgggagtgttaca

SEQ ID NO: 40880 - DNA, 122 bp, Homo sapiens
ttgggttcgatgtatatgtagcccgggcatggggcagggcttcttaacatttggacaccacgcagcacaaaggcccagagagggaaagagactggctggaagaggcagagccgcgcgggtgc

SEQ ID NO: 40881 - DNA, 122 bp, Homo sapiens
cgaactacttgcagaagggcgaacgtctgctgctgaaggtggagagggagtaccaatgtacgaggctttatagaaatggccgtttggtaaagggcagtgactctggagctttttctctaggg

SEQ ID NO: 40882 - DNA, 122 bp, Homo sapiens
tttaaagagttttaaatcagcagtaaatcacagtttctaaagctgtagcactgattgcagcgaaccctccagactgggcatcacgcgtgcccgtcaggagcagcagccgctgagactgtgat

SEQ ID NO: 40883 - DNA, 122 bp, Homo sapiens
gtttagcactctgccttgaaaataaactgcaactgatgaatattttggtgatcaattatacggggaattcttacagagcctgttttttgtttaaagatcttggaatttctggaaaagattgg

SEQ ID NO: 40884 - DNA, 122 bp, Homo sapiens
gactgtgtccatcacttcctgtccaggtggacactgtagcgcaggcttcccattgatggacgggaacctgatctccctgtgcttttactgccatgctcatcacgcactggggatcatcagcc

SEQ ID NO: 40885 - DNA, 122 bp, Homo sapiens
gtagggggacccgctgggctacagtgtctcaggggagtcagaatctttggtttctggatgcggggccacttttctgggccttcgaaggccattattagatgactgcctccccaaactcccca

SEQ ID NO: 40886 - DNA, 122 bp, Homo sapiens
cgcggttgggggaactttctccctcccggtcaagcctcgggaattgaagggccggggaggcggggcccgatcgaaaagctggaaagtcacttttgttttcaccattatttcacttaatgggt

SEQ ID NO: 40887 - DNA, 122 bp, Homo sapiens
aagacaagtttgacaagttttataacccaagtttgactactgtagcagctagcaatccatcgtgatcttaactatacttgtgtttgcattcatattactggaaagtggtaaagaaccaaaaa

SEQ ID NO: 40888 - DNA, 122 bp, Homo sapiens
ccctcattgtccaaaatctaatacttaaattgaacttgttaaataatatttttgtccaggcgtgaggcttacacctggaatcccaatagtttgggaggcaaaggcaagtggattgcttgagc

SEQ ID NO: 40889 - DNA, 122 bp, Homo sapiens
ggacccggcggaccggggggcggggcggacaggcctgggcggagcgggaggcggaggcgccgcgtaggcccgggaggccgggccggccgggctgcgagcgcctgccccatgcgccgccgcct

SEQ ID NO: 40890 - DNA, 122 bp, Homo sapiens
tttagacctttaattctagcactttgaattcgagcaggtcagcgtcttctctcgccacgacggtccccattccaccccctctttctttcacctgacttattctttcgtgtaaagatatgttt

SEQ ID NO: 40891 - DNA, 122 bp, Homo sapiens
cttcagcaccaacctcattctttagaaagagtttgggggaggcttcatagattgaacacccgtccctgtagcacttgatcatagcaagacaaaatgtaaaacagcagatgaggccatggtgt

SEQ ID NO: 40892 - DNA, 122 bp, Homo sapiens
gccgggggggcgttgcctggccggctggttgcgtagcaacggcaggcggtgcgtgacgtgcgcagccgcgttccgtcctgaggcgcgcccgccccggggtaagctcgcgccgccgcgtcagc

SEQ ID NO: 40893 - DNA, 122 bp, Homo sapiens
agaggattccagattcttgcaggggactggaggaggctcggctgaaaggagtcagggctgcgagggtaggggacagattcgagtagtttctccatttcacagcaataattactgccccccac

SEQ ID NO: 40894 - DNA, 122 bp, Homo sapiens
tcgggaagggatcgggaggcccgggctgcccacaggaggcccacgcagacggcagctggccgccctccaaggatggagcttccagtaggctgcaggcctctctgtccagctcagatgtgcgc

SEQ ID NO: 40895 - DNA, 122 bp, Homo sapiens
gtatgtgaatggtggataaggagaatttgggagacaacaacatgtcttcggagcaggtggcgagatttcacagaagaggcaatttccatggactgtcacatactgtctttttaaactcagta

SEQ ID NO: 40896 - DNA, 122 bp, Homo sapiens
cagagcagcaggcacaacgctgcatccctgagtttcctcttcaagtcacgtgaacacaaccgttgctcttatttatgaaccaggaacacaggtgtcagggagggtcaatgcacggtcaattg

SEQ ID NO: 40897 - DNA, 122 bp, Homo sapiens
tgctgataggaagatcagagacccagttcctgcaccaaggctaggatccacagaaaaccacgaggaaatgtgatttcaaaacagtgatgagttagggtggcccaggacggtgagggccagca

SEQ ID NO: 40898 - DNA, 122 bp, Homo sapiens
cagggagggtgggatgcatggcaaagtgaggctgcttgctgttcatggacatcatcgtggcggcttggcatgtatatccacaaacactccgaaagtccgcgggaaagtgcgtacgccggctc

SEQ ID NO: 40899 - DNA, 122 bp, Homo sapiens
cgaagccacccagatggagctgggctgagcaggtggctgagccgtggggccatgctgggacgtccactccccacagcctggcctggccccacatgagactgaccccctaagagacccccagt

SEQ ID NO: 40900 - DNA, 122 bp, Homo sapiens
taatcctccactgagtcttcccttggggtaactgttgcccaactgcagcatctgaagtgtcggttagcacgttgggatggtgaccacatgcatagtgcgtttactgaagttgtgctcatgct

SEQ ID NO: 40901 - DNA, 122 bp, Homo sapiens
gcagccttcacaactccgggacgcgagacaccagaaacctgactctgacttcaggccaggcgaacacactttgcgcatttctctccggagctgtgtaagtcacagcggagatttcctctctg

SEQ ID NO: 40902 - DNA, 122 bp, Homo sapiens
caaataattcggctgcgagtcaaaagggaatttcaggaatgaggaataacactcttcttgcgctcctgtaaagcaagtgatggaagctctgaaagtttgcctgctctcaagtgggaagttag

SEQ ID NO: 40903 - DNA, 122 bp, Homo sapiens
gccttcaccccaccctccgccaggatccagtttcaaagtcacctgaaagccatttccttccgcgcctgccccgcctctcccctcccagtagatcacctggagcttgcatttgcccagagcag

SEQ ID NO: 40904 - DNA, 122 bp, Homo sapiens
aaatttggttttgggaatcatgttggttttcacccttgagcggcgttccctccccagtgccgcatgctgcttaaggactgttactttcttggggagggaagtatcaaatggaaacggtgtgt

SEQ ID NO: 40905 - DNA, 122 bp, Homo sapiens
ccgatctcctgctttcatttagcaccccctccccctaccccccctcgcagccacacaccccgggctcacacctccctgcagaccccgcaccccgaccccggcttgcccacctgaggaaaggg

SEQ ID NO: 40906 - DNA, 122 bp, Homo sapiens
gtgggagcgccaaggccgcaggtaatccagggttgggggtctccggcgtgtctttcgggtcgcgtcccgcctgggtgccccggggattcccatgcagaaatggagggtgcccccagcagagg

SEQ ID NO: 40907 - DNA, 122 bp, Homo sapiens
ctgaccttctcaaagttaggtttccttgtctgtgatctgagcagacccgccagcaccatccggaggtcaaaggcgaaggcgggctcagaaccactgttactttcatcagtgataggatgagc

SEQ ID NO: 40908 - DNA, 122 bp, Homo sapiens
ccccaggaagcagccaatcggaataggcaagcttccggcgggaagtgagccagggcttggcgcggcggccgtggttgcggcgcgggaagtttggatcctggttccgtccgctaggagtctgc

SEQ ID NO: 40909 - DNA, 122 bp, Homo sapiens
agcctcaggaagcagaaggggcgcggaaagatgcgattgacgtcgcaagcgaaccaatgacgagcgagctgtggcaggcctccagccaatgggcagtgaggcctgacgcggggggcggacgc

SEQ ID NO: 40910 - DNA, 122 bp, Homo sapiens
agcaacaccgaagggagacgacttcgctgtagctcagagtctttttccattcttcacccacgcgcggggcagtcgcgcggcgcggtcgcgcggcgggtaggaactaccatcccagcatcctc

SEQ ID NO: 40911 - DNA, 122 bp, Homo sapiens
tttggtgtcactcaacatgatcttccatcctttctatttttggttaattggtagatgcttcgtcagatttaggtttgattctttttggcaaaactttataggtagcagtgtattcctccatc

SEQ ID NO: 40912 - DNA, 122 bp, Homo sapiens
ttgaggggaaacatgcgtttgccttggatcgtttgaaattctgagtttgggatccccgcccgcccgcctgcctcttccgccccgcgggttttttccttttttccttttgctttttttccttt

SEQ ID NO: 40913 - DNA, 122 bp, Homo sapiens
gttaagcagctggagtataggatagtatttgattttcaagatcacccaaagctgcactatcgtcccaaagctgaccaagtagaataaaaagaaaaaaaaaaaaaaacaacccatgcgcaaag

SEQ ID NO: 40914 - DNA, 122 bp, Homo sapiens
cgaggaagtcctgaaatgtctccaaagagctttggtttctgcctttccactcttcttgatcgtgacagccctctgaggaacgttggctagagactttgatttccattttactgaggaagcta

SEQ ID NO: 40915 - DNA, 122 bp, Homo sapiens
ccgcagcctggtagaacttgttcaggaggtcgtggcgcttgcacttcctgtacagctgctcggcgtcctcctgaggaatgaggatgggcaggtgtcgtgcagcctccacacacccacgtctc

SEQ ID NO: 40916 - DNA, 122 bp, Homo sapiens
agccccctctaagaaggctctggaaagagcagccagggcaccggatctcactgccatgagcggttgtctttgtgcactaacagaactcatcatggggcttactcgccaggagggccttggca

SEQ ID NO: 40917 - DNA, 122 bp, Homo sapiens
cctcaaggactgtgtgggagtccccggggtctgtgaggcccgcaggaggcaaggagaggccgagacccccagggagcgcccaggcctgaacccctcctgcgccgctgaccctgcagatgctg

SEQ ID NO: 40918 - DNA, 122 bp, Homo sapiens
gggatccagtaagatttttctcacgctgtctgtccagcttgagtggcgcgaatgcgcacgcgccaattgcgcctgcgaggaagaagtcacgtggcagccggaaagcgtggcggctgctgcta

SEQ ID NO: 40919 - DNA, 122 bp, Homo sapiens
tttatagggtaaggctcaacactttctgtttgaagcaagcttccaggtgattcttgtgcacgctgaaatttgaggatccttgatccaaaagccttgtcctaaattgtttcatggatatagtc

SEQ ID NO: 40920 - DNA, 122 bp, Homo sapiens
aaggctggtgacttgtgggccattcatctacaaccaagtcctgatggagcaagaggcccacgcctaggggatgcaagaacaacccgtttcttaaatgttaccagtcccagccaatcttacgg

SEQ ID NO: 40921 - DNA, 122 bp, Homo sapiens
actcctggactcctgcgcttggggcaccacgcactgatctgagtggaaccccagccagcccgaacaatgctgggagggcactggggctctcggtcagcagggccccactcatccagggagtc

SEQ ID NO: 40922 - DNA, 122 bp, Homo sapiens
cttaaagatggtcataaggactcaacatgctgagtttgaaaattaaattctttggtgcggcgattatatactcagaaacctgggtgttggcttctcaagacttctttgcaactcattgctta

SEQ ID NO: 40923 - DNA, 122 bp, Homo sapiens
gattcttcggcgccttaaacctggggttccggaagctgtagcccccgtttcaaaatccgccggaagcgcctgacccccagaagtcgcgctctgccctgacctgccggagagcgggggccgcg

SEQ ID NO: 40924 - DNA, 122 bp, Homo sapiens
aagaactcaggctgcgggtgtctcttgaggacagcgctgggctcaggctgtgagaacttgcggggtggcccccggcgctccggctgcagcagcttcctggggagtgagttgaactcgggctc

SEQ ID NO: 40925 - DNA, 122 bp, Homo sapiens
cccgacctgagtgcggcagggcccagaggctgtgctggccacgtgcacccggctggattccgcgggcgccgaactgggagtgtggagccgggtctcccactaccctgttccgccggccgagg

SEQ ID NO: 40926 - DNA, 122 bp, Homo sapiens
ccgccgcctcctcccgcgcgagcctcccgcgggcagggactatatttcctccggcgcgcgcgcctggatctcgttgggcctcggcaaagttgtgcctcggcacgatgctaattcggcagtgc

SEQ ID NO: 40927 - DNA, 122 bp, Homo sapiens
atttctcttttgtgccccacgactgggttcttgaatgtaaaactctcagaaaggtcagggcggagcctgttttatgccccgaggagtatcttgcccacccgtaaatgctgacagacagctgc

SEQ ID NO: 40928 - DNA, 122 bp, Homo sapiens
acaggctgaagaactgaaactggccacccagctgaccggaccggtcatgcccgtccggaacgtaagtgaacacttactcaaatccaggcttcagacgagatcagtgggtgaacacgtgggta

SEQ ID NO: 40929 - DNA, 122 bp, Homo sapiens
ccctcagggcagcctctgtgtttctaactaaaagcctcctaccaggggcaagaccaagttcgggcgcttccccgcatggagaaacgctggccccacggcgcccggccccgacgcgctggccc

SEQ ID NO: 40930 - DNA, 122 bp, Homo sapiens
tagggaaactttacttatgtaatgattgtcacaaagtcttcagttacactacaaccattgcgaatcattggagaatccataatgaagagagatcatactagtttaataaatttggcaaattt

SEQ ID NO: 40931 - DNA, 122 bp, Homo sapiens
cagcaaagtgcaaaacattgcgggcagggtgtgagccggcggcgcccagttattccgaagcgcccatgccggagggggcgggtgccgatcgccggcgcctccagtgctggaatctgcgtagt

SEQ ID NO: 40932 - DNA, 122 bp, Homo sapiens
ccagccccgcctccctccgccacacacaaccccgctctagcctcgcctcccaatgacgtccgaaccctgctttctgggagcctagcaacagaagcgacctccgggattggtgtctggaagaa

SEQ ID NO: 40933 - DNA, 122 bp, Homo sapiens
caaagccagtcacacctctggaggcttcgacagtagtagaagagagaaggcatgacctaacgacctctcagcagaggagagaaggctcagagactctgagactacccagaccccctggaatc

SEQ ID NO: 40934 - DNA, 122 bp, Homo sapiens
acaagcgccgcgagaagcagcagcagcgccagcggaggcaacaggaggctcatcgggacccggccgcagatgatgcgcaagctggaggcgaacctccgagtcgctgcgccacgtctgggccc

SEQ ID NO: 40935 - DNA, 122 bp, Homo sapiens
tcattgatggaaatggtgggggatggtgggggcaccaacaagtaacgcccttaaagtgagcgggaatttgagggcagtttgacgtcatggtgaatttcacctctcagtccggcctggttttg

SEQ ID NO: 40936 - DNA, 122 bp, Homo sapiens
atgttgatagagacatccagctactctgtcagtcctcgggctggttcccccggcccacagcgaagtggaaaggtccacaaggacaggatttgtccacagactccaggacaaacagagacatg

SEQ ID NO: 40937 - DNA, 122 bp, Homo sapiens
gtgagagttgcgggcccaggaacgatgtgtggattcccagagcccagaatacaaggcaggcgcataatacatatttgctgaataaaagaatgaagaacaagaggtcacgttacaaaatttta

SEQ ID NO: 40938 - DNA, 122 bp, Homo sapiens
taatggagatctggcctgccacagtgggagcagagcttgcccagtgcgccgggacgactgcgggctccatccattccgctcccagggcggttgtcggccaggaccgtgagctgtcaggtccc

SEQ ID NO: 40939 - DNA, 122 bp, Homo sapiens
gcgcccttggggaccctgggggcgggggtgggtggggtggggcctcccagcccgggcaggcgcgagggccgggggtcgtttgacttgggtgtccccgagccccgctgccttcacgtctgccc

SEQ ID NO: 40940 - DNA, 122 bp, Homo sapiens
ggaaggggacgccccagcgcagggtaccccccaccaagcctgagcctagccttggtgaggcgaagagagggtggcctctctccagggcctttacgcctcgcccgtccccagggttcgtggat

SEQ ID NO: 40941 - DNA, 122 bp, Homo sapiens
tagctgctcttgccggaagtgtggctagcttagcgtgcaaagacgccgcgttgtgacctacgtgggcggagtcagccgtgcagacctagaacttagcgccggaagtgtgtctgcgtaaaact

SEQ ID NO: 40942 - DNA, 122 bp, Homo sapiens
ttagccaactttctgcattgagacatccttgccagggatcctgtcagttatgcgaagatgcggcacgagataattcctcttgctgtgatggttcgtcctcaatgacaggtcccttatagtat

SEQ ID NO: 40943 - DNA, 122 bp, Homo sapiens
cagccttccttctttgttagatacctagcatttacagccatctctaggcagatgtgtggtcgttcagtaagaagagaacacatgttttgtgtgctcactccaatgggtgtctggcttataaa

SEQ ID NO: 40944 - DNA, 122 bp, Homo sapiens
gtccctggggcacccgggcacatttggacgtgtttggcagggagagtcctggcccagccccggcacgtagggccgcgcttccacgggccgccgccaggagacgcgcgaggctgtagatgcgg

SEQ ID NO: 40945 - DNA, 122 bp, Homo sapiens
attatgccacgcggaggtccccccgcagcagcactatgagtggtgcctgtatgacgcctgcgggtaaggagaggccaacctggagtggggtagaggtgggggtgccgggactgaatgcttcc

SEQ ID NO: 40946 - DNA, 122 bp, Homo sapiens
gatcaagtccctgccttttttctttttttgggaattttttaaagagacagggtcttgctccgtcacccaggctagagtgcagaggtaccatcatagctgactgtcacctcaaattcctggac

SEQ ID NO: 40947 - DNA, 122 bp, Homo sapiens
gaagtatagggctgagacccgggtaaacgcagggtgtgcatgcatgcatgcgtatgcacgcggtctgaatttctatggaagtgcccctgactatgcggacaggtgagtcacctgtgtgcacc

SEQ ID NO: 40948 - DNA, 122 bp, Homo sapiens
cgctaaccaacctcccgacccctccggccgccatcgctttccggctcagccgcgctgggacggagtcctcggccactgtgccctaaccatggtagaggaacggggacaggccggggcaagcc

SEQ ID NO: 40949 - DNA, 122 bp, Homo sapiens
agtttccttccacccacagagtattcaggtgttaatcaccagctctcttttccctatgtgcgcagcaactccaaggaatttgacaacctttgccttctgcttttactcgctgacctcaccac

SEQ ID NO: 40950 - DNA, 122 bp, Homo sapiens
tgttattgaataaaagctgtaggggttgtaactgactaatcaggctatcaagaataatatcgaagttatttcatttttggggggtgcaagtaggcttagtatttaactgttcatatatgggt

SEQ ID NO: 40951 - DNA, 122 bp, Homo sapiens
agcccagtaaccccacttttgtgtgtcctcccaggccccgatcgaaaagcctgggagggccgccgaactacccccggagggaggagccagtccgaacccaaggcgccaccgccgcagaagcg

SEQ ID NO: 40952 - DNA, 122 bp, Homo sapiens
acaagccaggattgtccaagagctggggctggcatcttgcctggagaagggccagttctacgcttccttttttcccctcatccagctgtaagatgaatggaaactaaacataccagagtgct

SEQ ID NO: 40953 - DNA, 122 bp, Homo sapiens
aaatcctccccatgccagttgaacctggggccaatgtgaagctgcttttatttactgggacgtgatgttgtcttcatagccatctgctcaccagcatgcggcagaggcttgtgaacactgca

SEQ ID NO: 40954 - DNA, 122 bp, Homo sapiens
gtagtgcgctcaatagtttcctggtgaagtttattttaaaatccgcaccgaagaggaagacgaggaccgtcacactcggccttccctaaattccaggaccctccgcccgatgcaaactagat

SEQ ID NO: 40955 - DNA, 122 bp, Homo sapiens
tgtagttcgcggccttccccggcgcaccagacaatgcccgacgcggccccgctggagaaacgccttccttggctttgcagaaacaccgcttgctattaatacagcaacgaatacagctttaa

SEQ ID NO: 40956 - DNA, 122 bp, Homo sapiens
cccagccactccaggtccgcagctcggagctccggcagccaggtggggactgaacaccaacgccgcggggaggcgtcgcacatgcgcgctcctaggcggagccccgcctcccacgccctgga

SEQ ID NO: 40957 - DNA, 122 bp, Homo sapiens
tgctgagggctggtctgtcggctctggaaatcctgtcatactgtcacttttggattccgccgtttccgtcccaacggaaaactggggctcctggattcccctgacccgagttgtaaccaccg

SEQ ID NO: 40958 - DNA, 122 bp, Homo sapiens
tcctcccccgtcctatttccacctgccctaaaccaggcctgttgttgggagagggagccgcgggcctctggctttctggggcttctgatgcatcaggaccctgaggagcccggcacacacag

SEQ ID NO: 40959 - DNA, 122 bp, Homo sapiens
cttgatcatctgcaaagacccttgtgagatgatgatatttatcaattggttttcctccaccgtgcctgcctcataattcccgtagaccttgttatttctctccaaactgtgagagaagacgt

SEQ ID NO: 40960 - DNA, 122 bp, Homo sapiens
cgcagaactcggccgagtgcaccggggtctcctggcctctgcgcgcagctggtcctgcagcgtcaggacccgaacgaccccgaggccccaggggctgggccctccagcagccccgcagcagc

SEQ ID NO: 40961 - DNA, 122 bp, Homo sapiens
ctcttccaggcagtgggaggtttgttcttttgctgtttgcaatggctgttgctgctattccgtttttggatccatactgtatgagctgtaatactcactgcgaaggtctgcagcttcactcc

SEQ ID NO: 40962 - DNA, 122 bp, Homo sapiens
ttaagcgcagcctcgcactccccccaccccacgcaggggcgggccttggggaaccgcgggcgcccactggccgccgcgcgccgctcccctccagctcgcctgcgcctctcactgactctctc

SEQ ID NO: 40963 - DNA, 122 bp, Homo sapiens
atcttggaggcctccagaaccgacctgaatcacgcacaacacggtgaatccaagctgaagcgggcagctccccgctacccccagagcacacgagactggctccgctgccgggtctggcctga

SEQ ID NO: 40964 - DNA, 122 bp, Homo sapiens
cagaaaaaaggtcaagtcagttgttgcttaactgcagcctggctgatgtgttcttttgaccggaaagataggggttggggtgtgatgtggtgggacctggtccagacaggataaagtgccgg

SEQ ID NO: 40965 - DNA, 122 bp, Homo sapiens
aggcaggcggggccgggatccagcccctggggggacgaacggggagactgaggcgggaggcggggccggccacgatccctacacccagaaatctagctccgggaaggagggacacctaggcg

SEQ ID NO: 40966 - DNA, 122 bp, Homo sapiens
tactattaaaaaggatctttttaacagatctcctggcgagtattttaaaacaggactctgcgctagatcagctcgcccgtcggcagctgtcagcgaccagccgacaagctgagattcccctt

SEQ ID NO: 40967 - DNA, 122 bp, Homo sapiens
agcttcaggttttctctggtattttctgagcacgcctctagccctagtcatgcatctagccgtctggatttcctggtacacaaggaagactttcaaagcccttattccctccaagtatttcc

SEQ ID NO: 40968 - DNA, 122 bp, Homo sapiens
ttaggagctactgaaaaagtccatgtgagaaattctttaagatagtcttgttcaacatttcgagtacagaagaggaaaattatatacagagaggttaatagacttaccccttagactcatag

SEQ ID NO: 40969 - DNA, 122 bp, Homo sapiens
ctgctgtcttgctccatctgagaccagagccaagatctgcccaggactggaatgctttcccgagtggcttgagttggagcctgggactaggaggtaactgagaaggaggatgcttttgtgtc

SEQ ID NO: 40970 - DNA, 122 bp, Homo sapiens
catgaaccccgggcaggcgagtgggaggcggacaggggagcggttcttccggcccccacccgtggcgatcccagcctccaggttcccggcagtcgccccgcctcgcccgtcacaaccctgcc

SEQ ID NO: 40971 - DNA, 122 bp, Homo sapiens
gcagctaggagtggattagtgacttagactgtaccaatgaaacacactctcatgagccttcgataaaaaagccagaaatgagtgaaagaaagtcatgcacatggcatctacgttgctggcac

SEQ ID NO: 40972 - DNA, 122 bp, Homo sapiens
cagccacgcggaaagagcaatgaggagcacgtgtgtggggaggaaggcgggttctggccccgttccttccgcagcagctccggcctggcgggttctgacggaattctgcagcggctccagcc

SEQ ID NO: 40973 - DNA, 122 bp, Homo sapiens
gccgttccctctaggatgcaggagcaagagatgtgcgcggaaaggtccccaggacgaggacgaagcctcaggcttctcaaaataaatggcgcacttggccttggagggaaaggaggaggcct

SEQ ID NO: 40974 - DNA, 122 bp, Homo sapiens
tgcttgaggcagaaaaggaagtctctaaaacaacccaaatggttccccagggagctttcccgtgagtgtacactttaaaggtcaggcacataaagttaaatgagcaatagataactaaaaat

SEQ ID NO: 40975 - DNA, 122 bp, Homo sapiens
aaaagcattttagatgtcataagaatggatcagcgctctcgtgataaagggctaagaaagcgtgagaagacagatgacaaaaaataatagcggagttctagggtcctttgctttctttttct

SEQ ID NO: 40976 - DNA, 122 bp, Homo sapiens
gccaccggcaggtgtctctttcctggcttgggaacctattgtgagttcaccaaatggaggcgcgaggaggagggggcgggcaggggaggggcgccgagagccggagcgggcaccgccccctg

SEQ ID NO: 40977 - DNA, 122 bp, Homo sapiens
atggcagcaaccgcccgtctggagccgcggttgggaagacgtcgtctgcagcaagggaggcgtggtggggctgtgcctctgtggagctggtgaggccgggaacaggcaggccccccgcccct

SEQ ID NO: 40978 - DNA, 122 bp, Homo sapiens
gttccagttcaagaccggcagtaacctgcatctaatccagtttggaatccaacacctcagcgacatcactgcaaatccctcctgccgggagaacataatccactcaaggcatggccaggctg

SEQ ID NO: 40979 - DNA, 122 bp, Homo sapiens
ccatgccagcaacacctgccccaggaatctggactatttcattttcttcactccttgtgacgcagagcataaaccagccctttggcaacagctgccaaattatcatttttagggaagcagtg

SEQ ID NO: 40980 - DNA, 122 bp, Homo sapiens
gaaatgattgttgtggacgcggttttgggggcgggtatccgggcctctctcccttggctgcgtgttagggagaaagtggcagtaaagattcatgttcttgtatcgtttccagggtggggagg

SEQ ID NO: 40981 - DNA, 122 bp, Homo sapiens
aagtcatttttaaaaatccttttcaatcaaactgatcatgtatcttggtaaaagcccttccgcatgggctcggggatttcagagtgctgggtcctggccccatgagtaagggatcacccgct

SEQ ID NO: 40982 - DNA, 122 bp, Homo sapiens
agcctggatgagtattcacccttacttctctgaaacacaaaaaggtgactatatcccttacgtgtcttctggatcatagggtgttcatgagcattaagtgagatcatagatgcttctcaatt

SEQ ID NO: 40983 - DNA, 122 bp, Homo sapiens
aggctgaggcgagacgatcgcttgagccagggaggtcaaggctgcagtgagccaagctcgcgccactgcactccagcccgggcgacagagtgagaccctgtctcaaaaaaaaaaaaaacacc

SEQ ID NO: 40984 - DNA, 122 bp, Homo sapiens
ggtaaatccggggcaagtgactgaaatgaaagaatccaatcagattccagctccaagggccgctaattgtagtaactggcttccagccaccccgctctcgtcccaactcctactcacagatg

SEQ ID NO: 40985 - DNA, 122 bp, Homo sapiens
ctgatctgtccctggcttgtgtgtcaccatatgccgctcgagctgggtgcggtaggcaaacgtgtagctacagagagggcaggaaaagttctcttcattcttctcgtggcggtacttgatgt

SEQ ID NO: 40986 - DNA, 122 bp, Homo sapiens
ttcccggaccctgggctgggggtggcacgtgggcaccggccccgggaggcggaggcggtgcgcgcttacctgtcgccggtgctgctgcggcggggggtgtggaggaggcgcctctgggcagc

SEQ ID NO: 40987 - DNA, 122 bp, Homo sapiens
catgcccgatttgaaaaattcacaagctctgtcaagcaataattacctagagctgctgagcgtttgacccaagggccaagcagtctgctaggagtttaagaagagctggggggaataaaatc

SEQ ID NO: 40988 - DNA, 122 bp, Homo sapiens
aggcggggcttctgggtcttcctggagtgcgcatacatgggccagcggccacaagaattacgatttaccccatcgtcctctgagctttggggatgatggatgaataaatagaggcacagaca

SEQ ID NO: 40989 - DNA, 122 bp, Homo sapiens
catacagtcacacacacacagacacacttacacacatattcatactcacataatcacatgcgttgactagcagtcacacacacacacaaagcaccatgctcgcacactgtcatacacagtca

SEQ ID NO: 40990 - DNA, 122 bp, Homo sapiens
tacatttatctgcattttacggaaggcaaccgaggttcatagagatagtgatttggccagcgtcacaggcccagtaaaagggattgaaaatccaggtccgtccgaccctaaagcagggaact

SEQ ID NO: 40991 - DNA, 122 bp, Homo sapiens
cacataaggtcctaaaacatcaacgcctcctttctaacaaggcacatgcttccagctgctcgggctgctcggtcacaggcaggggcctgggtgtcgtgtcacacaggtctgcgatccgatcc

SEQ ID NO: 40992 - DNA, 122 bp, Homo sapiens
ctctggggcacacaggccagaatgggcctcccgtctccttccaaagtggtgcagcccaaccgccaaaggccacaggtcacctagctggcagcatcctggcgccccctgcccccccagccccc

SEQ ID NO: 40993 - DNA, 122 bp, Homo sapiens
acccgggtctgtggggctcctgggcctgcaggcgccgcctcctactcctgctggggcccccgtctcctgggcctgcagcaacccagggctgtgttgtgtctccaggcaacggtgaggtgtcc

SEQ ID NO: 40994 - DNA, 122 bp, Homo sapiens
gggcggctcctccttgggcgaggctggacagcagtggccctcggcaggtgtcttgcaaaacgccatttcaggacaatttggagaaggaacacaagtcctgcccctggctgaagcctggctta

SEQ ID NO: 40995 - DNA, 122 bp, Homo sapiens
tctccctgggacaactgccaacagagtgtcgtaggcgcggccctggcaggcagggaggcgcgtccctcaccgctggcccagaggttgcactcagtgccctgtcgccggactaggacgaggat

SEQ ID NO: 40996 - DNA, 122 bp, Homo sapiens
taaattatgcaacttcaaagcctgccctgttttgcagtgtattccatccttgaggagtcccgtggtctcagggtctgaatgcttggaggagacttacctccgtgaacgtttccttctctgca

SEQ ID NO: 40997 - DNA, 122 bp, Homo sapiens
caagaccctgtctccaaaaaaaacaaataaatataacaaaattcctctggtagccgggtgcggtggctcacgcctgtaatctcagcactttgggaggctgaggcaggtggatcacttgaagt

SEQ ID NO: 40998 - DNA, 122 bp, Homo sapiens
gacgaaaaaggggaaggggtgctgggcctggcgggcaaactaaggctgcggaccgttgggcggttccgcggggcgttgtccggagagctgcgaggccggggttcccagggttcacgccacac

SEQ ID NO: 40999 - DNA, 122 bp, Homo sapiens
gcgccccctgctgcccgcggccggagccgttcgccacacccccgtgtttatgtcggtccacgggggttgcctgtccctttaattggcatgtaccaagtccttccaggtcacatttcctccct

SEQ ID NO: 41000 - DNA, 122 bp, Homo sapiens
gtttcccttactcgaacgctaaagtgcaaagctgctggtgacgctgccttctcccacctccgcactccactgtccttgcaaactttggacagaggaaaggtgggcacggggcgcgaaactac

SEQ ID NO: 41001 - DNA, 122 bp, Homo sapiens
agcagggggagacattagcacgtgggtacgtcctctggggtccgaccagcgagagtgggtcggacctggaaggtctgagctatgggatcgagccaagttataagcaaagaggcaaggcgggg

SEQ ID NO: 41002 - DNA, 122 bp, Homo sapiens
ttacagttctctacgcaaaacgcatgcgcgaaagatccgggaagtgtgatcggaaaggggcggagcatcagggagagtctcgcggacataggcggttcggcgcggaaagcgggaggtggagg

SEQ ID NO: 41003 - DNA, 122 bp, Homo sapiens
gcgggcgcctcgctctgctgactgacccgggagagtcgctgctgccagatgccagtggcccgcaggagctcctgcactggccggcgccgccccacccttcctttgggaaagggagaaagctc

SEQ ID NO: 41004 - DNA, 122 bp, Homo sapiens
gagaactgtgtgttcgcactgggacagatgggcaaactgagcgtcatgcgggttggtaaccggctccctcagcggcaggacaggagcgcggcctgcagactccgggcccagggccaccggcc

SEQ ID NO: 41005 - DNA, 122 bp, Homo sapiens
gatgacattctccttttaaacactcctccaaggcatctctttgagatggcttccccagcccgtcatctcctaggtagaagaggcaaacacatgggtcacttgccctgctcctcattccaggg

SEQ ID NO: 41006 - DNA, 122 bp, Homo sapiens
caggcaaggccgtgacccaaatggaggcttttaaacccgagctcagaggtaagaagcccacggccagcacctcccggccctctgcgccctggccgcctcctccgcaccaccctcccggccgg

SEQ ID NO: 41007 - DNA, 122 bp, Homo sapiens
tttgctctgaaaagttagaaaaactaaattagaaggcttaattgctacctacctgcagcacgtgatatgatatttggttttcaagcattttccttttaatgagcaagtatttgatgaatgct

SEQ ID NO: 41008 - DNA, 122 bp, Homo sapiens
tggccgtagaggcagcggcagcggcacaaaatggctttgagacgagagtgaagagactcccgcaaccttggccgtttccccggatccaggggcccgacgcgctccacctgggcgccgccatc

SEQ ID NO: 41009 - DNA, 122 bp, Homo sapiens
cgataggacctctagggagacttggggtccgagttgggccgagccccctgggaggcgggccgttctttgctagccgctgtcagggcaccctgccctcgccctgtgaaatgtggaacgtttcc

SEQ ID NO: 41010 - DNA, 122 bp, Homo sapiens
tcttcaccccaccaggccccgcatttcctgtctcctgccacggttccttgtcgcgaccggcgagtcctcccaggtcttcgaaaggccgttttgtccggaggctgtggacccggaggcccggg

SEQ ID NO: 41011 - DNA, 122 bp, Homo sapiens
gcaacacgacattgcccaagctggtcctctggatctcaggcactgtggtttcctcaagctcgtgctgataggcccaggcggtatacaggcggaagcacttccctgcagccacccgacctgcc

SEQ ID NO: 41012 - DNA, 122 bp, Homo sapiens
gtccgtgtttccttggttctgaagtgggaccttcccgtccgtgtttcctgggtcctgaggcggggccttcccgtccgtgtttcctgggtcctgaggcggggccttcccgtccgtgtttcctg

SEQ ID NO: 41013 - DNA, 122 bp, Homo sapiens
ggcacaggaagtctcgatgggaactaaggccacttcctgggcgctctaggaagcttctctcggtggttgtctccgaattaacccattagctaccctgtccttacctccacgcaagggaaggc

SEQ ID NO: 41014 - DNA, 122 bp, Homo sapiens
ccaaaagccagatacaaaatatccttctctaagccaactccaccaaccagctccccagcccgggtggaacaatgaaactgtgaggcttaccagcctggcaaaggtcagccggagagctacct

SEQ ID NO: 41015 - DNA, 122 bp, Homo sapiens
gccccgctctgagtggcagggagctctgtcatccctgccaacttctctattcttcactgacgacagggggcattccagaagggaaccaaagtgagaccaggccaaacaacctcacaaatgtc

SEQ ID NO: 41016 - DNA, 122 bp, Homo sapiens
gtcggtggagaggagcgctaggttccacagcggggcgccaggtttatcaagtatgcaagacgtctacttaatttgaatttcagattaaaaaactaatcatgtttttaacagccttattaaga

SEQ ID NO: 41017 - DNA, 122 bp, Homo sapiens
acgaagaggaaacggcggcggcgcccgggagtcgttgaagccctccgcgctgggggccgccgggaaccattctccccaagcccagaggcaggacttcgcagcaggatggggtggagagcccg

SEQ ID NO: 41018 - DNA, 122 bp, Homo sapiens
ggaatgagaagcaggagaagactgtccgctgagcaacatagaaaccgtcatgagcccaagcgagtctctgagcagcaagggacacaggtcccacaggccaccatacctcttctactttcatt

SEQ ID NO: 41019 - DNA, 122 bp, Homo sapiens
cgccaccctccgcctccgcgcggcggctcctttccggctgcatccggggggtcgaggcgtcgcacctggaaatcgcagcctgtgactttgtaaaaaagtgaatggggaagaaaaggcgctga

SEQ ID NO: 41020 - DNA, 122 bp, Homo sapiens
tgcacccgctcccgataaagtacaaatttttacttctcatctctggaaaaaagtccacaccggccgtctacacccgcgcctgggggagaaagcagggaagaaacggggggtgcatgagaaac

SEQ ID NO: 41021 - DNA, 122 bp, Homo sapiens
atccaacttctcccactttctccaaacaaaaggttttttataggtttttcaaacccagatcgcatcaaggttgattcactaagactctttggtctcttttagcctcaaaacactacccaacc

SEQ ID NO: 41022 - DNA, 122 bp, Homo sapiens
ttctgaaggtggctgaggctgtggtgtgcccgtggacagtgacccgtgaagaaacggcagcggcgatggagaggttgaacccgaaggtaaaacgggcttaccatacactggggaagacacaa

SEQ ID NO: 41023 - DNA, 122 bp, Homo sapiens
caccgagggccgagaaagagctcaagaaaggacaaggaaggtgagaagagccccgccctccgcaaataccaagaccaagggacgccgagcgccgcctctcattgatgctgaggcctccaata

SEQ ID NO: 41024 - DNA, 122 bp, Homo sapiens
gcctgcagcgaagttccctgcgcggcgcacggctgcggcaaaagcttcgaggatgcctgtcgggccacccaactctccctgggctgtggcctgaggctctaagagggcacagaagctgccca

SEQ ID NO: 41025 - DNA, 122 bp, Homo sapiens
caagagaggcttcagcgatttcgagaacagtgatgcaatgtggagagacgcggcaggcagcggcagaatctaattgcatttgagaagcatctccacaatttgtagtggccttctcacaggga

SEQ ID NO: 41026 - DNA, 122 bp, Homo sapiens
attgtagagtttagttccttgtgtactgagcacttcccatcactttcagagggtccaggccgtccccgtttaccgcaccctctcagggggccccaggaatacaaaaggtggagggagggttc

SEQ ID NO: 41027 - DNA, 122 bp, Homo sapiens
cgtctgcccttctttctggtaacaggctgctgggggatccagtgagaggtaatcaaaacccgtctctgcagggccatcaatacccctgggctagtaaagaagaaaggtctcagcctccattg

SEQ ID NO: 41028 - DNA, 122 bp, Homo sapiens
acagaacaaactggggagagatgaacaacaagccggcccacccgctgctgcaggaactcacgtttctgagagccttgcccttagtccgcgtagtgggagggaagccttgcaggttcctgaga

SEQ ID NO: 41029 - DNA, 122 bp, Homo sapiens
tagactcacagtcaatccctgcctaaacagccagctgatgaaaaccatatttttctattgcgtgtgtaagtacttccattggaagtaacaccatctatcactttttcaattctacatggcaa

SEQ ID NO: 41030 - DNA, 122 bp, Homo sapiens
ttccaaatatcagagtctacacagtaaaactacatcatcacagtaacccattctcatccccgtcctcttttatagatagcgatttataaggttgcttccggcacctatatgatagaaactat

SEQ ID NO: 41031 - DNA, 122 bp, Homo sapiens
agaatagagaggaaaattattgaggaaatgtacttgcctgtgagggtgaagctggcatttcgaggtagaaggggactagccttttttgatatctaatagtttagcattatacgtaatggact

SEQ ID NO: 41032 - DNA, 122 bp, Homo sapiens
ccgagaggcgggtaggctttgaacgcgccgcgccgcgggccgtgctgcgagcccggcacacgcctctcgccccagctcgcgctggggcttggcctctaggctcttcgcgatgacccgcgaaa

SEQ ID NO: 41033 - DNA, 122 bp, Homo sapiens
agggagtcatcccagacaaccaagaggaaaagagggaaagggagaaagagacaagagacccgccatcgtggacaatcaggacctagccaccgatcaagcccagcaggctccacgcggcaccc

SEQ ID NO: 41034 - DNA, 122 bp, Homo sapiens
ctcagcgacagtgacctccaacaccttttatttagtgctgcaatacaccgtgtggtttgacggcacgcggaacatatcacgtgccaagccaacaccttaagagggtgggaagctttgaaacc

SEQ ID NO: 41035 - DNA, 122 bp, Homo sapiens
ggcgtgccatcacgagggtgcaccgtcacgaggttgcactatcacgagggtgcaccatcacgagggtgtgtcttcacgagggtgcactgtcacgagggtgcactgtcacgagggtgcactat

SEQ ID NO: 41036 - DNA, 122 bp, Homo sapiens
cgggaacggctgggaaggtctccacagggaccaccacatgggcaaggctggtgtccgcgccgagggatcggcgatcccaggtccggggaaactccgcgagcgacgcgctcgcccgcggcctt

SEQ ID NO: 41037 - DNA, 122 bp, Homo sapiens
tggcgggcgaggggtgggtgggtgcccgccagcccctggcactgtgccccggcccgtgcccgtgccaggagcgtcgctgactcagccggaagagccttatctggcccctgcgccaccgcctg

SEQ ID NO: 41038 - DNA, 122 bp, Homo sapiens
cggcttcactcctgaagtgagcgagaccacaaacccaccagaaggaagaaactccggacacgtcctaacatcagaaggaacaaactctgggcacactatctttaagaactgtaacactcacc

SEQ ID NO: 41039 - DNA, 122 bp, Homo sapiens
ccaaggacagcagcgatagggggccacccagaggaggccagaatcccagcagccaaagtccgggtggtggcggacgggagcccggagcgtgtgggtccctgtccttgggaccctaggggtct

SEQ ID NO: 41040 - DNA, 122 bp, Homo sapiens
ggccgcgggcgagatgatttgctgcagatgacatcagccccgggccaacggctggaagagcggaggcagccaccgcgtgaggatgtgccgggtggtcctttcctcctcctcttcctcctcct

SEQ ID NO: 41041 - DNA, 122 bp, Homo sapiens
aactttgtccttttccttttacactcggaagtaatgaggcaaagtgacaggctatgggagcgggtaaaaaagcagctcagagttgccagaagaaaagggaagtgaaaaagccggaaactgga

SEQ ID NO: 41042 - DNA, 122 bp, Homo sapiens
ggttaccgtgccccattgtgtcttgggctcaagtcagccttcatagtgacccctgctggtcgaaacaattttcgagatgattatcaggagtatttccccacaggggggccgtagggctcagt

SEQ ID NO: 41043 - DNA, 122 bp, Homo sapiens
atagatttctttgcatctgtccattgtatttctctgaggctaatttacagcactttgtcacgttaggtattttttttccccagtgctgctactctccaactggatttctcaccgcctctatt

SEQ ID NO: 41044 - DNA, 122 bp, Homo sapiens
tcagattttttaaacaggagcaggacagctgttggtgtgagttcaacttgccataacacacgtgactttcttgttttggatttactgctcagctgaccgggacactctaaacatagcagttg

SEQ ID NO: 41045 - DNA, 122 bp, Homo sapiens
ccaggcacagttgggattggcagtaaggcaaggaaagcctgccccagatttcagagccagcgctggggaatctccctgtcctctccgccaccccctcccgcgcccgagacctgagacacctt

SEQ ID NO: 41046 - DNA, 122 bp, Homo sapiens
gcacaaccagctcccgaggcacagtctccgggaatcgagtcaggttcacagtcagctgggcgcactttttgtagaagaggtgcagggatagcagggccatgcaggcaccctggtcctggaag

SEQ ID NO: 41047 - DNA, 122 bp, Homo sapiens
cttgtactgcacggtgaaggagtcgaagcggccctgggggacggtccaggagaggctcagcgagtcaggggaggatcctgtcactgtcaactcccccaggagcggctcctcaggggcctccg

SEQ ID NO: 41048 - DNA, 122 bp, Homo sapiens
acttcctcttattcagaccccaaaaatgctttcagccacttatatccatcatgctaacatcgtattaacatgaagggaagtgtaaggaagaaaatcagagtggaaaggaattgtagtcaaac

SEQ ID NO: 41049 - DNA, 122 bp, Homo sapiens
tggtaacttttatgacagtaatgtagttgtaatattaaaactcttcctttttgaaattatcgtaaatttgtcttaatatgttttgtttacttgtgtgtgtgttgtgtttatattttgctaca

SEQ ID NO: 41050 - DNA, 122 bp, Homo sapiens
aaccaacccacctccagctcaaatgtctgccttgctccactcacctgcctgtgtggactccgttcagctcaactgagtctgaggggctcttgtcctctttaaatatatgaaggctgtcacca

SEQ ID NO: 41051 - DNA, 122 bp, Homo sapiens
tctcacaggtgcagtgtgttcgggtgcaagtgaagattacgactgatgcttaaaaacaaacgtaaaattccaggtggtgttgttatggggcgcagcattaggacaatctgagtggtttcagt

SEQ ID NO: 41052 - DNA, 122 bp, Homo sapiens
ccacaaacagcacttaacaattcagtgataaggcacctgccaccgtggagaacctcggggcggggatgtttagactgcatgcgctcaggttgcctggcagctctgtgtgtggagatgccatt

SEQ ID NO: 41053 - DNA, 122 bp, Homo sapiens
caaatctgcgatctaacctagaatccgcgatccagcccggtccaccacagccttcagcagcgacactcagtctctgacctctccgacagagtgagcctcgaaagcccttgagtgcgcgcctg

SEQ ID NO: 41054 - DNA, 122 bp, Homo sapiens
gtgaggggaagcttcgcaggcgtgcacggagcagtgagatcactggcgttataaatatcccggtgccagcgcggagatccgctcgggtggcctctctcttcccctctccccttctcttcccc

SEQ ID NO: 41055 - DNA, 122 bp, Homo sapiens
ttataaaccaagaatttgagccacttaagctaaatcacaccattagtaaatgacagaatacggccttcaatctaggacttctgaccccccaggcaggccagtgtatttccagctaggcaata

SEQ ID NO: 41056 - DNA, 122 bp, Homo sapiens
gggagactccctttcccggtccactaagtagcaggtgtttttccttgacactaaggctaccgctagactagacttcccagacgctggcgtcaccgctagaccaaggaaccctctggtggccc

SEQ ID NO: 41057 - DNA, 122 bp, Homo sapiens
gggctcagggctggccagagacagagggaaaccctaggactggatgtgccaagatcctgacgtcactccagaatgctggagcctgtggcaggggatgggaacagatgcctgggggaagaggg

SEQ ID NO: 41058 - DNA, 122 bp, Homo sapiens
agatctgagaaggcgcctggtgtggccttgcgggttctctgttccttttaaggcccaggtcgctgtcccatgtgaacattcggccaggtgggcggctgccttggccggctgaccacaaggag

SEQ ID NO: 41059 - DNA, 122 bp, Homo sapiens
gatcgaccccttaaaaattcatctcgggttcccgtccccccacaacctgagcgtctaacgcgggaggaggagcaagtgaggttataaattgctgagtgtactgggatcttagcacaaagctc

SEQ ID NO: 41060 - DNA, 122 bp, Homo sapiens
gccccgactcaaggaaaaagccacgctgcagccctgccagtctgcaagcagagacaagcccgccacccgaggaccttttgccgcctgcgtagccgcttttcaaacgcccgggcggccgcagc

SEQ ID NO: 41061 - DNA, 122 bp, Homo sapiens
tcaagtgaggcgagtgggcggccggggctgcagctggtgctggccattgaggagcttctgcgcgacagtgcgatcggttgcaccttctgcgacaggtgccggccggttggcgcgcagcgcct

SEQ ID NO: 41062 - DNA, 122 bp, Homo sapiens
gagaagagcgcgatttcctccggggctgcccagttatctctggagtcgcagaactgctctcgggagaacgcgttctctaccccaaccccgtgctcctcaacccacccacctacttcctctag

SEQ ID NO: 41063 - DNA, 122 bp, Homo sapiens
gcaaatacttgcaaaatgcctgggtgccaacaaaggaatttggcagagaacctgtatcagcggcagcggcgcatcaaaaaagaatgtctaccttacaaggtgaaagaaatggggggtccaaa

SEQ ID NO: 41064 - DNA, 122 bp, Homo sapiens
ttgatgaccattagaggccacagcaccaatcaggagagcagcttacaggcatgaagtccgcgggcacttcccaccaacattggaaagcaacacattcatgggatcaggattcattctgctgt

SEQ ID NO: 41065 - DNA, 122 bp, Homo sapiens
atggagtttccccatgcatgtttgtgtcctgttgagacgtgttctaagtccactggtctccgtgcgtgatgtgcccaggaagtgtcctattgtcttactgatcttgtatgttcatttgagaa

SEQ ID NO: 41066 - DNA, 122 bp, Homo sapiens
cggagtcccgcggggaccaggaggttccttctcgctccgggagagggcgctcctgcccggcgtttgtagcggcggcttcctggctgcttcccagcgtggatttgcacccggtcgatttcctg

SEQ ID NO: 41067 - DNA, 122 bp, Homo sapiens
agccgaaccaaagctcccaccaaagttcaacacgcccccaaagccagcgcctgattggcccgccctgcccacaagctgaggcagcctcaccttctgattggctgttatgctccctgttcggt

SEQ ID NO: 41068 - DNA, 122 bp, Homo sapiens
cctggagagaggatataggcgtcgctaaagctccaggctgcccagagcctagagtcgggacgcctgcaggggcacgggagcggagaggaggattctgagggccagtcggagggggacagggg

SEQ ID NO: 41069 - DNA, 122 bp, Homo sapiens
gtctgtgtgaacattaaaaaacaaaggttccttgggttcatttagtctttaagcaaacatcgattgaggcctgtgtgtgtggcaggtactgcagatgcaaagttttccaccttcatggagct

SEQ ID NO: 41070 - DNA, 122 bp, Homo sapiens
atggtgaactggaaacctagaaacgggcctctccaacttcgaagttcccagagtcgggggcgccgggcgcgggcgcggcgggcaggctggggtggggggcgggcagctatgtcgtcaggaac

SEQ ID NO: 41071 - DNA, 122 bp, Homo sapiens
aaatcacgccccccgtgctgattggtttcatccattttattgtcaaggaaattaacagcccgaaagggttccccaggtccgcgccctcccccctggggcccccggggaaacgcggcagcaag

SEQ ID NO: 41072 - DNA, 122 bp, Homo sapiens
aatgatccattggccacaggcccaggcagctggcagctcctgggacagaatgtagcagggcgatgtcacagaagctgggggcatctagaaccctggtgactcctggtctccatgtcatctgc

SEQ ID NO: 41073 - DNA, 122 bp, Homo sapiens
agcgaagaggttgaggggtgcgggcgccgtggagggggcgcggctctggggggcggcccccgcctgcgcccaccctctccccctccgcaggccgcgcacacccacctcgcagcagtcggcgg

SEQ ID NO: 41074 - DNA, 122 bp, Homo sapiens
tttaagtagggtggtcaaggaggtctaacacacaagataagggttaaataaaaggccaaacgtaggagaggtgggagccaaagagctacccagaagaagagcattctagataaaggctcagt

SEQ ID NO: 41075 - DNA, 122 bp, Homo sapiens
gcccaggactttgaagcagggacagggtcctcctggctactgaaaggaatcgagttaacgcgccctagtggcaggtggcgaatggccggagatccggcctcccagtggtgtccaccgccacg

SEQ ID NO: 41076 - DNA, 122 bp, Homo sapiens
ttaattcccctgtggcaaacttctcaacgcaaacacatgcgaggcaggaagcgtctacagcgctcccgttcctgcgcacgcaggcccgtatgcatgtctgttcatacgcatgtgagcgcctg

SEQ ID NO: 41077 - DNA, 122 bp, Homo sapiens
gctcccgctgaaaccagcccttccctgtgtctctccagagtggagggatatcctgtggggcggggagctggacagagggagaggcgccccctcccaggcacacaagttggggataaagccct

SEQ ID NO: 41078 - DNA, 122 bp, Homo sapiens
gggaggcaggtactctcaccccattttacagctggagttcccacccagtgagcagccaaacgggatttgaaccaggcagtttctcagcagagccttgcttgaagctaggcatctaaagctgc

SEQ ID NO: 41079 - DNA, 122 bp, Homo sapiens
ggcacctgacgcaaggcgcagccaaggactattacacctctggctgctcggacgcatcttcgcactgcgccccctcgctctttaaacctgggagacttgtaattgtgtacctgtttgcattg

SEQ ID NO: 41080 - DNA, 122 bp, Homo sapiens
tccctagtagtattttttcccctcatgcctgtttgcactgtgcagaattcttagagaacacggctttgcaaatgttctgcggcagtctcaggatagcacggtatgtcagcagatatgggtcc

SEQ ID NO: 41081 - DNA, 122 bp, Homo sapiens
cccaatagagccctgctctactgacccttcaatgtgcccgtgtgcctaaatattcctggtcgtgtgaaaagaacccaggtattagctgaactaaggagcacaattctgcaacattttggcac

SEQ ID NO: 41082 - DNA, 122 bp, Homo sapiens
agtgaatgcgtgtaggtggaaaaaggttccggggaatgcttgcatcgttctgcatccgagcgtccaacagagaaaagatcctgtttccagacaatacctgcatttggtttttctccagctga

SEQ ID NO: 41083 - DNA, 122 bp, Homo sapiens
attacttctactgtttctgatgatgatgatgaccatgacaacagtggttgaggctcatctcgtgcaaggctgtgtgctttgttcttgttgtttgttttgtttttgagacagggtcttgctct

SEQ ID NO: 41084 - DNA, 122 bp, Homo sapiens
cctcagtggtcttcttggcaaggtatcgcttccgcgggggtggcggcgggctctgttcagcggtcttgaaccttctttgaagagctttagatccttgtgccaagtgcagaaggaaatggggg

SEQ ID NO: 41085 - DNA, 122 bp, Homo sapiens
ccaccgtcatcaccttcctttcatgctctcttccccaggtaattatgtggtgacagatcacggctcgtgcgtccgagcctgtggggccgacagctatgagatggaggaagacggcgtccgca

SEQ ID NO: 41086 - DNA, 122 bp, Homo sapiens
gacttgggtttgggtagtatttttaatctaggttctacttacaggagtgtgttcactttgcgaaaattcattgagttatacacctatgatttgtgccattttctgggtgttattggtgttta

SEQ ID NO: 41087 - DNA, 122 bp, Homo sapiens
ctgcacccgacccggcgaagcgctgtcccgcttcgcaccccccactgctccaggtacgtgcggcggcctcctcgggagaccccgccactttcctggagcgtagcctgccaccccccgtccgg

SEQ ID NO: 41088 - DNA, 122 bp, Homo sapiens
cgtgtggtacctctggggtcgctgggcccgagcccctgtattaccagaactcagctcccacgcacatcgtggcacggtcttgagattgtgcgcagagcacagccctaccatctttcgcgcga

SEQ ID NO: 41089 - DNA, 122 bp, Homo sapiens
caccgtcacctgccaggccagcgggacaggtgggcagagccagctccttggcccattctgcgtcatgacataccaggggcagggaggactctgggactgtctcccaaatgggggtggcgcca

SEQ ID NO: 41090 - DNA, 122 bp, Homo sapiens
attttaaacctctccgtgataaaactaccggattaacacttcactcacccaccagttaaacgtctcgcaactagggctgtctggtgctcagactgtattcaggtaccctatggtagggaagg

SEQ ID NO: 41091 - DNA, 122 bp, Homo sapiens
ctggcctctacgccatcccgagctggttcggccgcatgagacatgacgcccggccccgggcgagccctgccaggccggtcgggcctcggcccggtccccctaacaaaataagagtcccccct

SEQ ID NO: 41092 - DNA, 122 bp, Homo sapiens
ctttctgttcatcccacgtcctgcctcagttcctaaagcataggtgagaagcaaagccagcggttctcctgagaacccatcatttgttctctagtgacctgattcattccttgtgactctca

SEQ ID NO: 41093 - DNA, 122 bp, Homo sapiens
ggcagcgggcgaggagggggcggcgggtggcgacccgcaggaggccaagccccaggaggccgctgtcgcgccagagaagccgcccgccagcgacgagaccaaggccgccgaggagcccagca

SEQ ID NO: 41094 - DNA, 122 bp, Homo sapiens
tttggggactacattattaccaaaccttggctttgggagattatacaggtccgaggaactcgtgtctactgcagacgaatgcaattaccccaccttcctccatacagaattgttaggaaatg

SEQ ID NO: 41095 - DNA, 122 bp, Homo sapiens
tcagcaaggccaagtgcctcggccagggcggtggggtcagcgctgagcgggtcaagagcccgcgccgggggccatccccctgcgctttctatcgagttaaacggaccccacaatatctcctt

SEQ ID NO: 41096 - DNA, 122 bp, Homo sapiens
aatagtcggagtcaaattattcgccatggagacgctgtcagtcactggtaacccgagcctcggcgggccgggcggctccccccggccggctccgctgacagatcgccccgctccgcgcagaa

SEQ ID NO: 41097 - DNA, 122 bp, Homo sapiens
tccgtgtgatccccaatacctttgccgtcttctgtaccaagtcagccacaaacgcaggcccgttatctgagccgatccgtaagggcagtccaaatgtaggaatcagatctggaggaagcaca

SEQ ID NO: 41098 - DNA, 122 bp, Homo sapiens
ctgaggtcagtctctcccaagaaggcctctccagagagccgggtgctgggccatctccctcggacagcgactgttttatcgtctccatcgatggtccgtaaagacactcagtcaaaaggctg

SEQ ID NO: 41099 - DNA, 122 bp, Homo sapiens
catcgctctgctgaaaactctccagtggttcatacttaaaataaaacctgaagtccttaccgaggtatacaaggccctactgaatgtgcccgtgacttctaacttcctctcctgctcaccca

SEQ ID NO: 41100 - DNA, 122 bp, Homo sapiens
atacacacctcctttcctacctgaacgccgtgagagccaatccgcgggcagctctaatgtcgcgtgactaggaaacaggccccgcccccccagacccgtcaaaacaattgcctcgagcggca

SEQ ID NO: 41101 - DNA, 122 bp, Homo sapiens
tgcctgcagaggagaggctgagactttgtcttccttcagggcaatgatctggggcaaccacgttgggtgtctgggcagtttcctgacttcctttgggtcctgatgttttctgtctgagctgt

SEQ ID NO: 41102 - DNA, 122 bp, Homo sapiens
gtggtggtcgagaccccagcccgctgctactggagacagcacctctcgcgcccgggcgggcggcctcgtctctgcacccctaggcggcgctgcgctcctcaacacccggccggctccgcttt

SEQ ID NO: 41103 - DNA, 122 bp, Homo sapiens
ggaagctgtgtgtgcttaggtcgtggtggccccggtggtggtgggctccgggcgggctcgcgtcatcctgcccccgctgcgatgcatccgcggcgcccggacggatttgatggcttgggcta

SEQ ID NO: 41104 - DNA, 122 bp, Homo sapiens
gagccgcgctgtacttaggggctgcctccccttctgctccccgagacctggcgtggagaccgccaccaggagctccgaacacgcaggcccaaattggaataggagatggattttgataaaag

SEQ ID NO: 41105 - DNA, 122 bp, Homo sapiens
tcttcatcccctcttccccccgaccttctccctcttgtcccttgcccaggcctgtcccaccggtcacccctagcaagggacagagcatggctgggagccttgagcagcagccctgctccacc

SEQ ID NO: 41106 - DNA, 122 bp, Homo sapiens
taccaaggctagcagcagagtgagctcaccgggaggcaaggtgccctgattctgagctgccggactaagatgttctggactctgagctgccggagggtaagcccctcagccctgagctcact

SEQ ID NO: 41107 - DNA, 122 bp, Homo sapiens
tgggtgccgcgccggagttgggagggatgctctcagcctgcgagcccgggtcggggcgggcgcgcgggtccggctgcgcgggcggcgctgctgccgctgctcaggaccgacgccgcttcccg

SEQ ID NO: 41108 - DNA, 122 bp, Homo sapiens
ttactataaaagtagagaaaagaagatactgttttaaaaatatatggtatagcactgttacgtgaattgatttcttaccttttggagccgcatgatgtcgctgtctaccatgaagttatagc

SEQ ID NO: 41109 - DNA, 122 bp, Homo sapiens
gccccgagccgtctcccagcctcagacggctctgcgggctgcatctgtgcagcctggcagcggcggcgctgcgctgtgacattttcacagcccttcttgcagaggcatgtgtgctagggatg

SEQ ID NO: 41110 - DNA, 122 bp, Homo sapiens
ccctggccgacagcttgattgcaacttcatgaaacacccaaagccagaaacatccagatacgcttgctgctcccagactcgtgacccacaggaaaggtatctgtcttctttcctctgtctct

SEQ ID NO: 41111 - DNA, 122 bp, Homo sapiens
caatagaataagcttcatggagaccaagagtttatctattattgattccccagcatctagcgtagtgcctaacatgttgatgctcaataaatcattgatgaagaaagaaaagaaagacaggt

SEQ ID NO: 41112 - DNA, 122 bp, Homo sapiens
accggggctttaaacagaccgggccactcccatcgaatttggaaagcggttaaaagaggtcgtgccgcattctgcgccgcgtccctcttccttcagtcccgccgagtgtccccgaccagagg

SEQ ID NO: 41113 - DNA, 122 bp, Homo sapiens
tcccggtaccttttaatcagatccatttctgcctgatccctcttgtgaaggagcaagttccggctgttgtcaaagatatcttcaatctggtctggccagaggaacagagtgctgttcaattt

SEQ ID NO: 41114 - DNA, 122 bp, Homo sapiens
caccggaagaacacgtcggcaggagcaggcgcctagcacaaccggaaaaggaagtgcctccggcgcaagtggcattgagggacttgtagtcctgcgatttcgggtgtagagggagcaggggc

SEQ ID NO: 41115 - DNA, 122 bp, Homo sapiens
tccccggagacagaagtagagccggaccgccggaaaccgtagatccggggaggtcggggccgcggtgaactccagttcaccaggacaggaagtgacagcggaacgccggaaaccgcagatcc

SEQ ID NO: 41116 - DNA, 122 bp, Homo sapiens
ctcgcttccacttctccagggggcgctgcaaagattttggtcgccaaagatatcacggtgcgcgcgtctggaagcatttccgctctggagcattttcgttccgccgggtgccagcgttcctg

SEQ ID NO: 41117 - DNA, 122 bp, Homo sapiens
gaacggactttgcggggcgaggcgctgccccggggtcccacctcccgggggaggggacctcgcagaccccacaggaaggcccaggcgccgggaaacagtctctcccacacaacagagaggcg

SEQ ID NO: 41118 - DNA, 122 bp, Homo sapiens
atgaagtaaaaactttggcttccctgatgacatacaagtgtgcagtggttggtaagtgatcgcctttcttgctacctaatgagaactctggggaaatatgtttactcacatggttactgtta

SEQ ID NO: 41119 - DNA, 122 bp, Homo sapiens
gtcaaaatcagcattcatgcactgtcttagattgtaggtgtgcacagagcgataaaaaatcggagtcgcctgacatgcacagccccgcctggggctgaacaaaggcccagctctgccttccc

SEQ ID NO: 41120 - DNA, 122 bp, Homo sapiens
ggcagcacagtccaaccctgaagccccgggccatgtcacctccaagggagcgaccactggcgtggccagagcacccaggcccttgccatccctggtcggagggtggcgctgaccccagatag

SEQ ID NO: 41121 - DNA, 122 bp, Homo sapiens
cgtgtaagtgttcgatgtgtatttctgtcaaccacacctgaaaggccgtgtgcaacaccacgtgcccaggtgcggaagctcagagacttgacgtaggcgggaatttgccgtgatagcattta

SEQ ID NO: 41122 - DNA, 122 bp, Homo sapiens
ggggaaacgtttggcagtgcgacagtaggaagtgacgttacttccctttttccggtccgccggattatgaatgacggccggcgcgagtattttccacataaggtggctgtcgtttttctcct

SEQ ID NO: 41123 - DNA, 122 bp, Homo sapiens
aattattgcatttccctcgcagttccattaggatgtaccaattgttaggccgtcagctgccgatcgcgcgcccggcgaggatgcagaggattggggggaggtggtgacttgcattttattta

SEQ ID NO: 41124 - DNA, 122 bp, Homo sapiens
aaccgtcaatccaccaacacaaacattaacaaaactcagagcaactcatgatgaaacagtcgttctctttttaggacaggccaaggttaatacagaaaggtaaatgattcggattagtttcc

SEQ ID NO: 41125 - DNA, 122 bp, Homo sapiens
cgctttctttttaatcccctgcatcggatcactggcgtgccctaccatgtcagacgcagccgtggacaccagctccgaaatcaccaccaaggacttaaaggagaagaaggaagttgtggaag

SEQ ID NO: 41126 - DNA, 122 bp, Homo sapiens
cacctgagcttgtcagagttgcatgcggacttcaggtggggctgctggtcgctcccaggacgtggtaccttaactctgttcacatgtctttccctcaaattggttccctacttataatttgc

SEQ ID NO: 41127 - DNA, 122 bp, Homo sapiens
tatctgctttccagtttgccttaccaaaaagaaaaaaaggcaggaatcatcctggtctctcgttagagactaaacttttggcttagtacctgggttcagaaagcttgatgacagtggtgcat

SEQ ID NO: 41128 - DNA, 122 bp, Homo sapiens
ccatgggaggcagcatagtgtctgcgacttgaggaggcaatcaggagtcactaaagaaagcgtggtcagtgggagaacacacagataccccactgcctcatgtcattttccttctctagtcc

SEQ ID NO: 41129 - DNA, 122 bp, Homo sapiens
ggcattggaagagcgggaagcagaaagtgcctgcacgggaagctgcaagggcaaaggtcccgatgccgggaagatcttggagggtttgtgacacggaagggctggtgtggctggatttagtg

SEQ ID NO: 41130 - DNA, 122 bp, Homo sapiens
agagtcacccccttccctctctgtcccggaatggtgccgctgggggaccccgggtacctccgattcgggcgttgaaagcgacccccacaccacagaagccattgttggccatcgcggccacc

SEQ ID NO: 41131 - DNA, 122 bp, Homo sapiens
cgcgtcttgccctgattgttctgggctgggattggattactgggactgcccagggtcccgcgccaggaaacaccaccttggactacagggaagagactgatctccctcctcctgccggcccc

SEQ ID NO: 41132 - DNA, 122 bp, Homo sapiens
cctatgacagcatctaccacatgtatcgtaataccttattgaattatctgttccccaccccgccgtctagactacaagcaacatgagagcccaaatcccatcttccaattttttggtgattc

SEQ ID NO: 41133 - DNA, 122 bp, Homo sapiens
gcgggctgcagtgtctgtcactttagcgaccgcaataacacttctcccacagggactccgcggtgcccagctctccagcctggggattctcatcacacagtgattccaaaagaaatgatcta

SEQ ID NO: 41134 - DNA, 122 bp, Homo sapiens
tccctgcggggaagagatgacgttacttttaataatatcgtaaggggtgtaccccctctgcgagattcttcgtaatatcccaatggggaggagatgatgttactcgtaaaaatatcgtgggg

SEQ ID NO: 41135 - DNA, 122 bp, Homo sapiens
cttccccactccttgtctctgccctctccctcccacagagcaatgttctgtgatggtgcccgagatgcgtggactgagcccagaccgcaggctgcccgagcccgccccctgcccggctgcgg

SEQ ID NO: 41136 - DNA, 122 bp, Homo sapiens
tttacccaccctgttcaaaacagcctaacatcattcttaagtgtttattaattagttgtccgtctatctttgacccagcagtttaatattaatccacagttagttttattttgggggcacac

SEQ ID NO: 41137 - DNA, 122 bp, Homo sapiens
ctctgcttagctggaggtgggcacggtgctcgacctgcctggagggaccccagtgtgtgccgggaggccgcagggcatggcgtggggggccttccaggaccctgctccggacgctgcccgcc

SEQ ID NO: 41138 - DNA, 122 bp, Homo sapiens
acctgagaagcattattagaattcctgagcattaaaatccaacagatgcatttttcatgacgttaaaaaaaactccactttctggtagtagcccatgtcttatgctacgaaaatgaatgaga

SEQ ID NO: 41139 - DNA, 122 bp, Homo sapiens
gccccaattcgcaccgctggccgaccacagcagtaaccctgccgcccttgcacctcgttccgtagcgggtccatcttgtacactgactggagctggttccgaagcctcatcgcgatcgcaat

SEQ ID NO: 41140 - DNA, 122 bp, Homo sapiens
ggagagtgggcaccggccgggggcaggcaggtccggcccctgggggtcagagtgcagcgccggtttgaggcagttcggccacttagctgcgactcgaagtgaatgagtcacttcccctcctc

SEQ ID NO: 41141 - DNA, 122 bp, Homo sapiens
tttatggaaaggtcaggggaggtcaggagagttatgccaggagccagggtcaatcgtccccgggcgacaggggttctcccacgtgaaccgacgtcccgggctccgggcgaggcgcagggctc

SEQ ID NO: 41142 - DNA, 122 bp, Homo sapiens
accttttcatggtctttccctgcacagtcacttcagcggcggcgtcgctggggctgaggccgggtgactgcggctaggcatgcggatttagttccccgcctgtcatctttgtggctccttgt

SEQ ID NO: 41143 - DNA, 122 bp, Homo sapiens
gaaaggaagtgtgcctccagggctagtgacattaacatctcctgcaatagaagatcttgtcgatagaagaccccatcatgttagacaccaggtaaatagataggagaagtgaaaaacaggtg

SEQ ID NO: 41144 - DNA, 122 bp, Homo sapiens
atttttcccgatggtatttagctgccaaagtggatgaaatccttaacatgaagactttctcgccaagaggaggaagatatgaatcaaggaacctcatcacccaagcctcaacaccctatgga

SEQ ID NO: 41145 - DNA, 122 bp, Homo sapiens
gaaggtgtaaggggtggaaggagtctgacaatatgaagggcaaacagtggtcccagctcccgctcagggagccccagagaaggaagctgggggatgaggagcagaagaggggagaaatgagc

SEQ ID NO: 41146 - DNA, 122 bp, Homo sapiens
tcgatttttgtcccttcccaccacccttttcacctgcttgatggtgcagggtggggaggacgggcaggacactgcaaacagcttttagctgggtgaagatgaaggagaactttcttgcttat

SEQ ID NO: 41147 - DNA, 122 bp, Homo sapiens
tggccaaaataacctatcatgccagtcccccgcatcatggtttgtctaatccgtaggaagcgaccccgctgattttcctttaggtctaggtaatatttcctattgtccctctcgatatagtc

SEQ ID NO: 41148 - DNA, 122 bp, Homo sapiens
acagatatgagtacggtgccgtccgctgcaggcccctgtctaaaagtggccgaaggaccccgtttcctctgactgcaggcccaggctgagttccgcatttatttttgtatttatagggcaag

SEQ ID NO: 41149 - DNA, 122 bp, Homo sapiens
gctgctggatcaggctcaggatctccagcactgcgggagcaaagcgggaggtcagcagtgcgcgggggggaggagggcgatgccggacgcggggttgggggtgcttaggaaggggagagaga

SEQ ID NO: 41150 - DNA, 122 bp, Homo sapiens
accacctattccacaaaaacctattgaaataaaatattaaaaattaaaaagaaacagtcacgggaatggttttacactgaacaagcactttcaacaaaggcttggagctttgagtccttttt

SEQ ID NO: 41151 - DNA, 122 bp, Homo sapiens
ccgctgagcaggaggcagctcctttggcaccccaccccaccacagtgccgaggtaagtgtcgcgcagggccggggagggaacagcagcaggaagaggggacctacggagcgcacagcagcac

SEQ ID NO: 41152 - DNA, 122 bp, Homo sapiens
agcacagcgggacgctggaagccccactgccttaggaggccgttctcgggagggccgccccgtttagaagatgggaaaggtgcagaaaaagaagaccaatagacgatgtccccactcgcaca

SEQ ID NO: 41153 - DNA, 122 bp, Homo sapiens
gttcagcgcgtcgccttccttgtcagtcggttcagcgtgtcaccttgtcagtcggttcagcgcgtcgccttccttgtcagtcagttcagcatgtcgccttccttgtcagtcagttcagcgcg

SEQ ID NO: 41154 - DNA, 122 bp, Homo sapiens
gtccttgtcctccttcggggggctacagcggcatcctgtctgggtccaacggattgcttgcgggcaacgagaagctcaccatgcataacctcaacaactgcctggcctcctacctggacaag

SEQ ID NO: 41155 - DNA, 122 bp, Homo sapiens
agtagcacagtgaacatagagcatacagacaactttctagacagacagcaagaaacaaaacgtgtgggggcccatcctgctctcctgctttctgtggagtgacacatcagttgtctttgggg

SEQ ID NO: 41156 - DNA, 122 bp, Homo sapiens
cggggaaaatgcccccgcgggtaaacagccccgtcagggcaggggctctgtgagttcattcgcttgttcactagaacattccttggctgaagtatttactgacgctaacatcacaacaaaga

SEQ ID NO: 41157 - DNA, 122 bp, Homo sapiens
ctggagccccgagtcacgtggctgcgggcggagatgagcggggcgtgggacgtgctgcggcgtcctagctggcttacagggcggcggcggggtgtgtgtcctctgttaagagtgctactcgc

SEQ ID NO: 41158 - DNA, 122 bp, Homo sapiens
gccggggagggcggggcggcggacgcggctgagatcactgcctgggccttaaaggggccgcgccccgaaccccagcccgccgccccgaaccccagcccgccgccccgcgggttggggcgcga

SEQ ID NO: 41159 - DNA, 122 bp, Homo sapiens
aatgcagggtgtttgtaaacagcagcacaatttacaccggaaattagggccctttctcaccgaggagagtacagcaaaatctgctcatctctttcaatgaatattctccatgactagtgctg

SEQ ID NO: 41160 - DNA, 122 bp, Homo sapiens
caattcttatgcttgttttccaaacttttgttgtgatacaagtatttaaagttgaggcctcgtctatttaaaaagagcccacaggtctgttgaccccagagccttcagaagagggacctagt

SEQ ID NO: 41161 - DNA, 122 bp, Homo sapiens
ggaggcagagattgcagtaagccaagactgcaccactgcattctagcccaggcaacggagcgagactccgtctcaaaaaagtccaaacacactaggggttaaataagctgcttctctttcca

SEQ ID NO: 41162 - DNA, 122 bp, Homo sapiens
ctggtagtaagcttgggaggtaggagttggcgagtagtagcgaggagacgaaggcaagtccgccatacctcctgaactactgggtttcaagggtgcccaagagctggtgggagagagaaggt

SEQ ID NO: 41163 - DNA, 122 bp, Homo sapiens
gccaggacaccccctgggatcacactgagcttgccacatccccaaggcggccgaaccctccgcaaccaccagcccaggtcagtctcagcccccagagagcccccaccaaggcaaccctgggc

SEQ ID NO: 41164 - DNA, 122 bp, Homo sapiens
agccacctggctaggcaacccacaaggcctctacattcaatttcataagtgaaatgaggacgctatgaaagctgtccacatccagcccaattgtaagaatgagaaaatgtgtatgttatttt

SEQ ID NO: 41165 - DNA, 122 bp, Homo sapiens
acgcggcggccacagctggggccggtggctccggaacggtaagggcaggaagcgcgggctcggagccgagagagtttgggtatcctgcaactttcccctcgactgagcaacaagataatgcc

SEQ ID NO: 41166 - DNA, 122 bp, Homo sapiens
caccttgagatgcatctagcgactgctcccagcatgtaggagcagttgtaaaatcacagccgtaacagtgcctgctctccagtgtctgaaaacaaatgtttttctggtcttcacttttttga

SEQ ID NO: 41167 - DNA, 122 bp, Homo sapiens
gcaccgcggacacgccgggccggggcctgcgccgccctcacctgccctggcctaggcggtcgctgtcccctgcccgtagccaggcccgctccggccaggccctccacctccaccccgcccca

SEQ ID NO: 41168 - DNA, 122 bp, Homo sapiens
cccaggcttacagctggtctctgggaaagaatgccctccaggccttgaaaagagagctcccggcctgttcaagctctcactgaaacacagcagaggtcagcggcccgtgatgcatgggcccg

SEQ ID NO: 41169 - DNA, 122 bp, Homo sapiens
gagctcccagcgaatgcaagggaaatctcgcacgccccaagccccaggtccccccaggcgcgtctctggtctccaaagtctcgttggtctttcagacgtctcccagacgttcgccccgccag

SEQ ID NO: 41170 - DNA, 122 bp, Homo sapiens
gggggcgcgggctcacctggcggtaatgcagcgtgagcggccgcaggtagggtgaggcggcgcagcggcccacggacgccccctcgatgcgctccatggcggcgcccggacaggcgggggcc

SEQ ID NO: 41171 - DNA, 122 bp, Homo sapiens
actgaaggccattgaacaggggaagcacatgactaacatcaaagaagttctcttgacatgcggagtgtagatgggaaccaaaagatataggggacagggagcccaggagagaggctgttgaa

SEQ ID NO: 41172 - DNA, 122 bp, Homo sapiens
agatagtgggaggaatgggagtcgggggcggggggcggctgcgtcagcgaatggtgtggacggcgcataaacgtggatgtagcgaatgataaggcagtgaatgaatgtcagtggtgggcagc

SEQ ID NO: 41173 - DNA, 122 bp, Homo sapiens
cgtagcaggtggaaggagggagggagccgcaggcgcagacccacccgccatgaagccccccgcaggtaccgactaccccgctcgccggacccgggcgtcccctgcaccctcgctcctcccgg

SEQ ID NO: 41174 - DNA, 122 bp, Homo sapiens
gcaagatggagttggttaagttaaatctctttcattgtctcagtcataattttgcaaaggcggtttcaggttcccttcatagacacagagcagttgtcctgtctgaagtttacctctctgct

SEQ ID NO: 41175 - DNA, 122 bp, Homo sapiens
atctgcccgcctcggcctcccaaagtgctgggattgcaggcatgagccaccacacccggccggatttgggactttaatctgagtgcttggtagaagctattcaggtttttttcagcagggtt

SEQ ID NO: 41176 - DNA, 122 bp, Homo sapiens
ggggagggcgggacctgcagagccagctcctttccagtagccgcgaccccctgccgccagcgtgacacacaagtctttaaaaggctctctgctcaggggagagaactttctgactccaagtt

SEQ ID NO: 41177 - DNA, 122 bp, Homo sapiens
ctacgggggttgaaggcctctctggagagcgtcgattgagcagacaggcccagagctggacgatctctccctaaaatgccaatggcctcggaagacaaaacccaaggggggtcagtggcccc

SEQ ID NO: 41178 - DNA, 122 bp, Homo sapiens
cgccaggtcggcgcggccccacagcccgtcggtgagcagagccagcgcgtcgtcctgcagcgccccgtgcaggtcgaagtcctccaccaggatctgccagagcaccgcgcgcagcgaggggt

SEQ ID NO: 41179 - DNA, 122 bp, Homo sapiens
ccgcggccccgcgaggagagtaccgggccggctcggctgccgcgcgaggagcgcggtcggcggcctggtctgcggctgagatacacagagcgacagagacatttattgttatttgttttttg

SEQ ID NO: 41180 - DNA, 122 bp, Homo sapiens
tacggcgggtgcgcacgccccggggcgctcggcaggacgacagtctgcacagcccgaaggcggaaacgagcatcaactgcacaaagtcctggggtcctggagcatcccctccgcgtccttcc

SEQ ID NO: 41181 - DNA, 122 bp, Homo sapiens
actaataatgagggggcggggcatggagctttatccaatcaggggcgctggagtggaaaccgtccaatcaggagtgaagccggagagcaggggcggcttccgggatttggcgggggccttcg

SEQ ID NO: 41182 - DNA, 122 bp, Homo sapiens
gaccggctctggactcagacctggctgggtttgaatcctggcttgatcacttcctgcctgcgtgaccttaagaacgttattcactctgcttatcctcgattttctgtctgcaaaatgggcgt

SEQ ID NO: 41183 - DNA, 122 bp, Homo sapiens
ctctaccagtcagcaggacgtgggtggggccagataagaataaaagcaggctgccagagccggcagtggcaaccagcccgggtccctttccacactgtggaatctttgttctttcactcttt

SEQ ID NO: 41184 - DNA, 122 bp, Homo sapiens
tcacgtgggctgtcgctgtgtctggcactgggctgtgagctctggaagggcaggaggaggcgtgttcctttacatgcccccataggactgggcgctgggttttatctgtaggagatgccgaa

SEQ ID NO: 41185 - DNA, 122 bp, Homo sapiens
tcaggttgcccagacagctttacagcagcaagtacaaaggtcctgaggctggaaagtgctcggactgtttgaggaggagcataggcaaatatggctaaagcacaggaacaaatgggaaagtg

SEQ ID NO: 41186 - DNA, 122 bp, Homo sapiens
ggctggggcagtgacgccggtaacggggagcactttaatgctggtcattatcgctgagaacgccttcctccccaggaactagggtcctggagggacgggagggcttgctgtctgactgctgt

SEQ ID NO: 41187 - DNA, 122 bp, Homo sapiens
ctctcaaaaaactacatattcatctctagtttgataatgcaaaatgtgggtgcaaatcttcgtaaggcctcactgccagctttgtatgatgcaaatgcaaattgctatgctgctgctctaca

SEQ ID NO: 41188 - DNA, 122 bp, Homo sapiens
aggctgacttggggcggcgcggctgtactttcactgcctccgggcaggcgtcattcggggcggggcgaatcagatccaatgtgcaactgcaaattccaccacaggttggtgacaataaataa

SEQ ID NO: 41189 - DNA, 122 bp, Homo sapiens
aaccctactgtgaacctgactatagttcagtttgttaattcaatcattcaaaatatgcatcgaacagttattatatgccagggtttatggccttgggaatacagtggaaaattgaaagagtc

SEQ ID NO: 41190 - DNA, 122 bp, Homo sapiens
aaaggaattaatcttctcaccctggcgagttttcctgaaactacttatccttagcgtcagcgctgtaagaggtggagccgctcagtcccgcgggtggctgcagacagaaggtgggcgagtcc

SEQ ID NO: 41191 - DNA, 122 bp, Homo sapiens
tgggggggcggtgcgttcgctggatccatgggagcggagtgcgcgcgcattatttttgctcgtcggctgggagccgggcgtcgggtcgctgggagtttgcctcttgtggcagcatcctgctt

SEQ ID NO: 41192 - DNA, 122 bp, Homo sapiens
tctgagcactctggatgggcaggctctctgataggccggttctctgataggccagtcttccggtcactcactctagtcctgcccagtgaccttgaaataaattgcagcgcaaaatagcagag

SEQ ID NO: 41193 - DNA, 122 bp, Homo sapiens
gaagttgacatctccactattttgcatggtcgtcctttgagcaccacgaagccgtttttgcgcaaggccgagcactgcatagggtaagtgctggaagccccggcatctccagtagtgaaatc

SEQ ID NO: 41194 - DNA, 122 bp, Homo sapiens
ggggccagccaagtacttggtctgctcaaaggttttctccagggcaaagatctggtgccccgtgaaggtgggccgggtgtgcttcttcttgtgtatgctgtcactcagggggtctggggctg

SEQ ID NO: 41195 - DNA, 122 bp, Homo sapiens
gtgcgtgggcccagacatacttccatggaggagaaagtgaccactgtatgctacaggaagcgtggctaattaggcttcctcagctggatggcaagctcccgggggtcttttttgtctcgcat

SEQ ID NO: 41196 - DNA, 122 bp, Homo sapiens
ttgctgtttcctgtcaaaaccaaaacagaaataaagtacaatccacatgttatccacattcggttcccttatttcttgagaggaccctgcagggttgtagctcctcaatgaacaagcagatc

SEQ ID NO: 41197 - DNA, 122 bp, Homo sapiens
gtgtggatgctgctgtggacgtctgcgtcgtcctcctgtggatgctgctgtggacgtctgcgtcgtcctcgtgtggatgctgctgtggacgtctgcgtagtctcgtgtggatgctgctgtgg

SEQ ID NO: 41198 - DNA, 122 bp, Homo sapiens
gaagaggaggacggcttccgaggaagggccaggcggccccacgagcagacaccgtcagggcgcactgccacccaacgggcatacgagacgcaccgggacaggccagctgggccacacggatg

SEQ ID NO: 41199 - DNA, 122 bp, Homo sapiens
gcacctgggagaaatccacagcttaggcaggtggtctaggcagtgtcacacccccagtggcggaggctccctgggacacgctgggtaagacagcgggggtccgggagtcaagtgtcgggtga

SEQ ID NO: 41200 - DNA, 122 bp, Homo sapiens
ggggggcgccgggtgccgcagtaacggctgctgctcggccaggcggtaactgatgggcgccgccggcggcagcgacacggcgtgcgccgagttgggggacgtgatctcgaaagttggcacct

SEQ ID NO: 41201 - DNA, 122 bp, Homo sapiens
tgccttacaggcatcttaagctttgtattcccaacttgattcttctcaatcaaaactgttcgctccagtatttcccacctcagtgctcagccccaaacctgggagtcatctttgcttctctt

SEQ ID NO: 41202 - DNA, 122 bp, Homo sapiens
ctggtggctctgcgggtggcgctgcgggaggcccgtgctacgctgcgggtcagtgagggccgtgcgcggggtctacaggaggccgcccgagctcgggagctggagctggaagcctgttccca

SEQ ID NO: 41203 - DNA, 122 bp, Homo sapiens
tggagggccatccctggggcctagcctgctgttgtccacctctgggccgtcctgcgcccccggccttgctctccggccactgcagcccccgagtacccctgaagctgctccttaaggtgctg

SEQ ID NO: 41204 - DNA, 122 bp, Homo sapiens
cgggagcggcccctcccactttcccggtccgcggcgttacttacaaggctgcaacttgaccgggtgcaacttcctagcgagcctccgccccgcccctcgtgacgccgcctgcaggcgggccc

SEQ ID NO: 41205 - DNA, 122 bp, Homo sapiens
gtaaggttgcccaatgagagcaagacggtgggaccttgcgacagtctgcggatgcttccgcgtgggcccggcgagcgcgggtatccgcggatgctgagggcgggaaaggcgaggacaagctg

SEQ ID NO: 41206 - DNA, 122 bp, Homo sapiens
tccccctgctctggacacagcccgagtctcacaggctctaggggcatgatatggtcctggcgtggcttccgaggcctcaaccttagtgtacaaaacagcacacggggccctgaggccaggag

SEQ ID NO: 41207 - DNA, 122 bp, Homo sapiens
ttcactggccctatatcccaaggagccctgagttgccactataccgtagactcctctctccgtctggtggctctttccttccccttttttagatatataccttcaacttgaacctttttgtt

SEQ ID NO: 41208 - DNA, 122 bp, Homo sapiens
acccctgattgattttggtggggatttatcttcccagctgaggaaccacatggcagaaaacgctggggaggttatatagctactattatgggtttggtgcgcgttcctaggggtcttctcct

SEQ ID NO: 41209 - DNA, 122 bp, Homo sapiens
aggtgggtgcacagcgggttctcagagggtgctcctgagccccctggagctccgggtactcggccggccggcggccactcggcagcgctgcgggctgccgggaactgttctccgctcggggt

SEQ ID NO: 41210 - DNA, 122 bp, Homo sapiens
aaagaaaaaaaaaaagagtacctctggacaagtgccttgagattcaattaaaatgttcatcgtactgtgatgcaattgttggaataaaagaaacccattccaattacaaataattttacact

SEQ ID NO: 41211 - DNA, 122 bp, Homo sapiens
ctgcaggctccacagagttggagaaatgaagacagaaatgctaagatttgttgattgactcgtccaaggttacaaggcaacaaggcccagaccagagcccaaggctgtttttattaaacact

SEQ ID NO: 41212 - DNA, 122 bp, Homo sapiens
ggctcttgattgagatagaagcccatcctacatgaagcaattcctcattaagagttctctcgtcctttatccttgttggaaacatcaggcaaagtcactcttggtcttaaagtacttttaca

SEQ ID NO: 41213 - DNA, 122 bp, Homo sapiens
ctgctctgtgtcagaggctgtgtgaggcgccagggatacagcaaggatgtgtccctccgtcgtggagctcacagtgtatatgctgagaatggccttcacaaatgttggtatccttttggcaa

SEQ ID NO: 41214 - DNA, 122 bp, Homo sapiens
ctactgcagtgttcagggcacacactccagaatcagggaattggattcagatcctagccccgccatggactcagagtgatccccattttatagatgagaaaactaagttcacagaggccggg

SEQ ID NO: 41215 - DNA, 122 bp, Homo sapiens
aaggagagcttttaaaaaaaatatgtggtggtgatggtggagtgcgtgtgcgtgtatgcgcgcaggctgaggactgccacacttcccaaggtgctagctctatagatcatctattatataaa

SEQ ID NO: 41216 - DNA, 122 bp, Homo sapiens
aggacggcagggagtccttagcacaaactgccagcagcagcgaggaggagccccgccgagcgccgagaggcatatgtgcgcaccacatgccacaaacacaagctccgagtcctaaacgaatc

SEQ ID NO: 41217 - DNA, 122 bp, Homo sapiens
gcaccgcgggccgcctgcaggcgcagtgtgctgcaccggacgggtggctgctcccaggcgcgtgctggctgtggtttgctttctcaatgctggtgtcctggggagctgacgtcccccagctc

SEQ ID NO: 41218 - DNA, 122 bp, Homo sapiens
tttcacctttgtcccatccgaagagcacaaggatggaaagcctattttagagtggcaaggcggcatcctttaaccctccgcgccgtacaccaccctttgtgttgtgcactgtttgagacagg

SEQ ID NO: 41219 - DNA, 122 bp, Homo sapiens
gcagctcgctgccctgttccagaactcagaatttgagaggcgagagttcggtaagccgtgcgaccagacgaccgaggacgcgcgcagagaaacccccgccgtccgaggagaggcgtcctggg

SEQ ID NO: 41220 - DNA, 122 bp, Homo sapiens
gggctacctcccagacaccctggcctctccacaggcagctatccatgatgctgatgctggcgcagtcaaacccgcagctgttcgcgcttatgggcacccgggcaggcatcgccagggagctg

SEQ ID NO: 41221 - DNA, 122 bp, Homo sapiens
atttagactttctgaggtactcccacaattactgcttctctttgagggcacaatagccctcgaagtccctgagaaccttgggggtctgagaccaagatcacagtggctgacttgtgaggata

SEQ ID NO: 41222 - DNA, 122 bp, Homo sapiens
aggccagatggagcatagagctgttgcctgggttcaaaaaaaaaaaaaaaacctaaaaaacgatttaacctttccgagccttggtttccttatgcctagaatggaggtgttacagtgaaaag

SEQ ID NO: 41223 - DNA, 122 bp, Homo sapiens
ctggccgctccgaggagtcttcgcgccccgctgccccacgctgagggcatcgaaatccagcgtcttgctctcgaaggcgccctccacgttgcagaacatgccgccgtatttctgccgcggga

SEQ ID NO: 41224 - DNA, 122 bp, Homo sapiens
ctgtgactgcccgcttgtcctgcctgcacgtctgctctagcccttggtcggcgagggctccgtggatcagatacctgggagcagcagtctgccctgtactgatctcttttgccacatttact

SEQ ID NO: 41225 - DNA, 122 bp, Homo sapiens
gagccacacgggacgctcgggctgcgagcacaggtgcgggatgctgacggggaagctgtgcgagactcagttcccagggcttttgcctaggctggcagtgcggccgcctctgcctggcatgt

SEQ ID NO: 41226 - DNA, 122 bp, Homo sapiens
gggacaagggcaagaggttactgctctgggcgctgtgtcctaagggctgcctcttgtctgcggagaatggagggtgccgggggtcaagcccggactctgtcagggtacccgagtcttagcca

SEQ ID NO: 41227 - DNA, 122 bp, Homo sapiens
tgggttgagggggaagagtgggaagtcttgccacgaaatcccttaagttggggtgtttgtcgtgggtggttttgttctttggcagagttttttttaaaactagcatgaactcgagattccct

SEQ ID NO: 41228 - DNA, 122 bp, Homo sapiens
cagacttggcccctagcagtgcagaactacaagtcccagggatcctagcgaccgtccgtccgtagtcaagttgccggtggaattggcccaggatgacagctggagaatggagtcaggtacgg

SEQ ID NO: 41229 - DNA, 122 bp, Homo sapiens
atagtgagtgataaatgaataatcggcattattgtcaaagtttgcaacattattccccctcgggacaggacaaggtctggcctcagagggccagtcccagctgcccagcttttaggagctct

SEQ ID NO: 41230 - DNA, 122 bp, Homo sapiens
gggcggctggacagcaatatgcggggcgacttccgcccccggcgtcccctcatccagcctcgcccgtcctgtgacgtcagtgcctggcccccacgcgtcccagtgccgcagcgcagcggggg

SEQ ID NO: 41231 - DNA, 122 bp, Homo sapiens
aaagtttcaaaacctggacaattactcaacagcattttcctctgaaagacattttgtagacgtttcccatgattatctcctattccggatggcccatcaaatcacattctaaacaggcattc

SEQ ID NO: 41232 - DNA, 122 bp, Homo sapiens
ccagaacccaagttctcctaatcatctttcaagatccctttccctcaaccacagatgagccgtgcctatttctccttcaaatgactccctatggcttctagttggtagtcttttatttacca

SEQ ID NO: 41233 - DNA, 122 bp, Homo sapiens
ccagatcattttctaaaattcgagttcatttgttcatttaacagagaatgaataaagaagcggggggtagttttattctgtgtggctctggaaggcagagccaacaagtttaaaaatatgtg

SEQ ID NO: 41234 - DNA, 122 bp, Homo sapiens
cgggacgaggggctggctgggtctgagcctggagaaacacaagggtcagcccccagtgggcgcagaggtggcccaggagggcccgcggacggtgctgcgctgcgctcagcctccgggccgct

SEQ ID NO: 41235 - DNA, 122 bp, Homo sapiens
gttcacggtccggcgtgggttccaaaaaccgcctttggtgaaacaaggcgccctcagagccgccccgcatcggggtgtgcctgggcctggtccccgcaggtggctctcggggccggttctcg

SEQ ID NO: 41236 - DNA, 122 bp, Homo sapiens
tacacagaggtgatgtgttcgtattgcacgtagacgtgtgtataacaggacctccttccccgcgccccgccaccccgacacacacaggagctgcctaaagtatccttgccttgcagattgga

SEQ ID NO: 41237 - DNA, 122 bp, Homo sapiens
cttccggggtgggggggccctgccagcgactttggggaccccgagcaagaagggcctattcgaaagggcccgaccgccgcgttggcttggggatcctgaagccctgcagaattttaatccac

SEQ ID NO: 41238 - DNA, 122 bp, Homo sapiens
accacagcccaggagctggtgactttgagcagggagggcagggcacagcctggctgcccccgccccctgtgcggcccgagggcatgagggcacctgcctcacctgcgtgtggctccaccccc

SEQ ID NO: 41239 - DNA, 122 bp, Homo sapiens
gagagtagagcctagttttgaactcttactctcttgatgacacggctgctcagagggaagcgtggccagaagaacatgttggagttccttgctcatatccctgtgaatatggccacatgtgg

SEQ ID NO: 41240 - DNA, 122 bp, Homo sapiens
ccgagaacaacagcggtaggaaatcattggagttctcaaattgctccccccacccccacccgcctcgagtttatttaagtgacatcaagggattagagcgaagtcggtcagtagagcactgc

SEQ ID NO: 41241 - DNA, 122 bp, Homo sapiens
gaggggatggggccggtggtgagaagcccagagggtaattggggaagtgagggtttcagccggaggagtctctctcatgccagacggtgtgcttagccgatccacaattctacagcagcaat

SEQ ID NO: 41242 - DNA, 122 bp, Homo sapiens
gtgtaaacaggcgtccaatcaaggacctgcggtgtgggtgggggctggtgccctgcggtgcgcgcgcacacaggcgtgcccttggattcacgtgcgccagttttcccactttctacggggtg

SEQ ID NO: 41243 - DNA, 122 bp, Homo sapiens
cagaacctgtgccatccagatgggagcagtaagggtgtagggcaaagttagtgagctgcccggtgcacgaggacttccatgataatcagggctgaaccaggaaggcaggtcaaggccagggt

SEQ ID NO: 41244 - DNA, 122 bp, Homo sapiens
caagaccaggtcagccccacaggctagggggcttgaggacttggggctgatgtctagggacgtccacgaggtggagcagcccaggaggcctgggtgggaggaggaggcggtggcggggaggg

SEQ ID NO: 41245 - DNA, 122 bp, Homo sapiens
gggggtccggcccgccccggcgcgcccccccgcctctgacctctccgccccgccgcgcggcgccgtgccagcttgccagcttatctggccccagagctccccggggcgcggggggagcgggc

SEQ ID NO: 41246 - DNA, 122 bp, Homo sapiens
acctccgggcgaccaggggcctggggacttcgtgcctgggccagggtctctttcctttcgcgggcacagtgaggagactgcgaggtgaggtgcgtccgggtggatcccgggctgcggcgact

SEQ ID NO: 41247 - DNA, 122 bp, Homo sapiens
caagccaggagcactactgtcctatgggttaggagaggcccgggggagtgggtgccagaccggggcagcatcacctcctacccagctagcccgaaagctggtgaaccgtgtgcaccctcccc

SEQ ID NO: 41248 - DNA, 122 bp, Homo sapiens
gccccgcccctccccgccccgccccggccctcgggccaccccgcccgcctgagccccgcgcgccccgggccataccctccccaagcccagccgtccgggcccgcaccgtcgcgtccgcgctc

SEQ ID NO: 41249 - DNA, 122 bp, Homo sapiens
gatttcatgccatttcctgacccggcgctgtaacttggcctctgagccttggccacagaacgcagaggccgtggcatctggccgcagctgggctgcagtgcgtgcgcgcctggcctggtggt

SEQ ID NO: 41250 - DNA, 122 bp, Homo sapiens
agccaatgagaggcctgccctgggatttttcttcctcgagccaagggaggaggtctttctcgtctctggctgagagactggaaagaaggaggccagtggccatttgcagccctggaaaggca

SEQ ID NO: 41251 - DNA, 122 bp, Homo sapiens
gagaaataagaatacagttattccgtcttgaggacagccctggcattgcacgaccagtcgcggccagactgtgccagtctgccgcacaggcagcacccttcctgtgaaggctaggcccgggg

SEQ ID NO: 41252 - DNA, 122 bp, Homo sapiens
gagaggctgaacaaggagccagggagacccacctgaccttgggcagccttgggacacctacggcctcagttttccctctgccaagtaggtgctaatgtgagaggggctgagaaaccggcacc

SEQ ID NO: 41253 - DNA, 122 bp, Homo sapiens
tgtgtggtagtggtctctgcattacctccccacagtagcttgccacggagatgatgatgacgatggaggcacggtcagccgccactcccgcctgtctcccccggcgccctgcgagcttggag

SEQ ID NO: 41254 - DNA, 122 bp, Homo sapiens
agcccagcccagcccatgccccgcacccgtaggctctgggggcccgctccccagcagacccgctccctgcaagacccacgggcgtcgccctgctgagaaactggtcccacacctacgtggac

SEQ ID NO: 41255 - DNA, 122 bp, Homo sapiens
gaggggtgcaggggcttccaagtccccaggctggctttttctaagcgcccatccactgtgcgcgggacttggtgcctgaagagtgaaaaaccctatccaaactctcttcacctcccctgttc

SEQ ID NO: 41256 - DNA, 122 bp, Homo sapiens
tctaaaattattctccagaaaccaagtatctggagcaaacagaatgtaggcgtttcaaatcgagctgagaaggatgctgaacagaagattgaagaacagaagactttagacaaagcaaggta

SEQ ID NO: 41257 - DNA, 122 bp, Homo sapiens
agaatgaaagaaacagcaaacacagggagctggttgcagctcatcaagaccgtcccattacgttcccgagtcagtccacaggcacctattgttgacattaggacttttcatttactcaagct

SEQ ID NO: 41258 - DNA, 122 bp, Homo sapiens
gcccagtgcagataagggccaggctgcctggccgcgcctgataaggagcctggctgaccccggaggaaaccagcgggcggggacctagcagcgcgggcctcccggccccgcccccagccggc

SEQ ID NO: 41259 - DNA, 122 bp, Homo sapiens
tgctgagcagcgtgatggtgcaggctgtctgggtcagtgccgagggagcgagtcttccttcggcggttgtaatcagaagtagcttccaaggctgggtgctgccaggaggagctggggtgggt

SEQ ID NO: 41260 - DNA, 122 bp, Homo sapiens
gcccgcacgggggcgaaggtgggctggaaatggggcccagggctgggactgggaaagcaacggcgcgggcaggctcagcgccgcgtctccctcggcaaatccacccaaccaaaggcaccgcg

SEQ ID NO: 41261 - DNA, 122 bp, Homo sapiens
acacccatttccatcccaggaccacataccttaattttgacatatcggtctgactggtgccggatgaacttcttggttctctttttgacgatcttgggcttcacaaggggtctgagggcggc

SEQ ID NO: 41262 - DNA, 122 bp, Homo sapiens
gtaaacgggggctttttaagtttttcaaagcaagctttccggaagggaagctataggccacgttttagcgacagacagctggaaagacagagctggcaagatggtagggctgaataagatag

SEQ ID NO: 41263 - DNA, 122 bp, Homo sapiens
ccgtcgcagctcgaaccgtttttaaatttccctctctggagctgtccagctcagagcatgcgcagtagccgtgcggggggcttttccccaagggtcagttacagggcagggtcaaggggatt

SEQ ID NO: 41264 - DNA, 122 bp, Homo sapiens
gtgcaggggccgctctgtgcagcggctggttcagggacgtggctggggtgtggtcacctccggggttaagagcaaccgccgggcagaggctcagctccacacgcctcactcctatttccaaa

SEQ ID NO: 41265 - DNA, 122 bp, Homo sapiens
cagaagcatgttcagaatacacagcagagatttatataccttttgaaaaatagctcctggcgtgctgcagagccctgggagagatgtgttgcttggcgctgagatatcacacaggtgacatc

SEQ ID NO: 41266 - DNA, 122 bp, Homo sapiens
agcgctgggtctctggggctccgtgtgagacccaggtggagcccctgaggccgcggtggccgcatgacgacgggaacgccctcggcggacaggcggaggcctccgatccacgcccgcccaag

SEQ ID NO: 41267 - DNA, 122 bp, Homo sapiens
gagaaagctttttaaaaaacgcaaaccacaaacctctgccatttgtcagcttgaagtctacggaactgcaagcaaaataaagattggtgaaactttgcttctgactgacccctacagtccca

SEQ ID NO: 41268 - DNA, 122 bp, Homo sapiens
aattttcccaagggcctttcttaatctagaccatgccaccatcatctctcacctgctctacgctagtttccttctaaatgaaatctcaggttcagtcttttaccatccttaggcagttttac

SEQ ID NO: 41269 - DNA, 122 bp, Homo sapiens
agctgttcaaacctggtaagaaattcaagacggcgacagcagagccctaatgaaaccaagcgcgcggtggccgcgaagccgcgcccgggcctcccgcacccgcgccctcctccccgcggctg

SEQ ID NO: 41270 - DNA, 122 bp, Homo sapiens
cttgggatgtcttttcttctgtaggaaagaaaatggggtgtggtgtgtggggagacagaacgattaaacagggaagagattgaaaatagaagctcttgaatggatcctaaccattctgtttt

SEQ ID NO: 41271 - DNA, 122 bp, Homo sapiens
tcattgatgggatgcagactgccacgcagacgttgattgaggacgttggccaaatgcatccggctgcacccgtgctttaggtcctctctaccttaagaaagggagccacgttagctcaggag

SEQ ID NO: 41272 - DNA, 122 bp, Homo sapiens
atgtcaggtgaccttaagcaaatcactttccctctttgagcctcagtttcagctataaaacgatagtatgcatggttctttagtgcaggacttaaatgtagtaaatgccacttagttactat

SEQ ID NO: 41273 - DNA, 122 bp, Homo sapiens
cccagatcagtgactgaatgtctaacaggctcccaatacattttccatgttttcctcactcgagcctttttaaaatccagtgatctggaaggaaccattggttactccaggctgtactgagg

SEQ ID NO: 41274 - DNA, 122 bp, Homo sapiens
gaccttgtgatccgcctgcctcggcctcccaaagtgctgggattacagggcgtgagccaccgcgcccggccataaaacatatttaaatgggaaaatgtttatcttgaaaggagaactctgaa

SEQ ID NO: 41275 - DNA, 122 bp, Homo sapiens
catgtagtaacaattttaatatctgcttaaaatgcttcatcaaatttggctatttttttccgcaaaggagtgattatttgaaattctaaaatagttttgctttgtgtctgtatacaaatgtg

SEQ ID NO: 41276 - DNA, 122 bp, Homo sapiens
catggaacgccgcctttattaacacagcacaggcacgtcccaccagcgtgcaacaccgtgcggcgtggaactgccatctctaggcatgaacctccgctttgcaggcttgtttccttgtttgt

SEQ ID NO: 41277 - DNA, 122 bp, Homo sapiens
tggcataactgacacctatgaatcagtatcagaaactgaatatgctaagaaactcagttccgagctgtgacctctacaacggaagaataataggttggttacccgaggcggaatctggaact

SEQ ID NO: 41278 - DNA, 122 bp, Homo sapiens
tcagaaatggaccctttgccccagtgggaacctggccaaagaaaatagctcctgcaatggcgtgaacctgggaggcggagtttgcagtgagccgagatcgcgccattgctctccagcctggc

SEQ ID NO: 41279 - DNA, 122 bp, Homo sapiens
ccttgcctcaaagtggcaagggccagctgaacttaattcacactgcaaaccaccacgtttcgacagccatccccatattttcacagctcaaatcttcctttctttttcggtcggcttctctg

SEQ ID NO: 41280 - DNA, 122 bp, Homo sapiens
accctctgtgcggggccgctggaggatgcggtgaccattccctgtggacacaccttctgccggctctgcctccccgcgctctcccagatgggggcccaatcctcgggcaagatcctgctctg

SEQ ID NO: 41281 - DNA, 122 bp, Homo sapiens
ccgacccgaggcgtcagagatgggcggtcgttaggcgcagtggcggcccccggatgtttgcgatgggacggcgggctcggaacgtgtggacgtgggctttggaggtgcgagccccattgggc

SEQ ID NO: 41282 - DNA, 122 bp, Homo sapiens
attaaaatagagtctctgtacagccaagggctctgggccctggcttgccccatgtctctgcgcctccctggccaaacccaaaaataaatatagtgttattgttctgcagggcatagaggcag

SEQ ID NO: 41283 - DNA, 122 bp, Homo sapiens
ctgcagactcccggcgctgccgccgccacccagcgtagtctccggctgggcacagcgttccgcccttctcgcggccccgggcgcccacccatccgtcatggcccaggcctgggccaaacagc

SEQ ID NO: 41284 - DNA, 122 bp, Homo sapiens
aagtgatcctcccagcctcaacctcctaagtagctgggatcacaggtgcgtgacactatgcgtggctcaaattctttttactttgaaggccctgctagaaacttgctgctgctctaattcac

SEQ ID NO: 41285 - DNA, 122 bp, Homo sapiens
tgtgggtgggattgggtctggggtcgggcctcgatttcagcctgccatctttgttactcacgttccctgaccacagacctaatccccatccctgggtggccatgtagtaagtgcccacctct

SEQ ID NO: 41286 - DNA, 122 bp, Homo sapiens
ggcgttacgctccgggcgagggtcccaccatccccaagcaggggccagtgcttgcagccccgatttcctaagagcctcggatgctacatcatcaccagaaacctttaggcgcaaaacacacc

SEQ ID NO: 41287 - DNA, 122 bp, Homo sapiens
ctgaaggacaagagtgcaggggtgcaagcaggtggagggcagctagagccagcctggcaccgctctcagtgttggggtagcaggtttggagtaacagagattggagggtgggccagcaaaag

SEQ ID NO: 41288 - DNA, 122 bp, Homo sapiens
acccctgggcaggataggaccctccaactccaacaccagtgtcctgcagggcgcaagtcccgcaaaaagaaatccaaggccacacagctgagtcctgaggacagagtggaggtatggctgcc

SEQ ID NO: 41289 - DNA, 122 bp, Homo sapiens
gacaccccgagtactgggtagggctgttgtttgtctaacttgtgggcgcaaacctttgcgcgattccattctcctcccacttcttgttagttgctgttttgcctcctaacgcgtagggtccg

SEQ ID NO: 41290 - DNA, 122 bp, Homo sapiens
acattggcatggcacatagttgacttaggacagtcggaaagggttggtggttctatgtctcgcagctcacttcatagctgtttgcatgtaaacctggtgatggtgttgagatggtgttgact

SEQ ID NO: 41291 - DNA, 122 bp, Homo sapiens
gggctggagccaacccctttcacacgggagattgtgcaatgacagagcagctccgcttcccggctccatttcaagcagccctggagggttttcagcactcactgctggaagaagcagcactt

SEQ ID NO: 41292 - DNA, 122 bp, Homo sapiens
tttattttaagatgtatgcatattaatcaatttaccatcactggggcatggcagtgtgggcggggagaattattcacattctcctaaaatgacagcagcagagagccttctgcctcagtggc

SEQ ID NO: 41293 - DNA, 122 bp, Homo sapiens
aaaccaaacccaaacatcccgtaataaaaactcttgtgacgacttccctgtttaggggcacgccgggtttcctacttcacttcctaaatgtcaggccctacagtgggcgagccaaggtctcc

SEQ ID NO: 41294 - DNA, 122 bp, Homo sapiens
cctgcctgcctcacccccgccgctgcgcagccagaggccggggattaggccagacaccagcggctcgccaagagctccatttgtgaccgttccctccgtaggcaacccggtggtccccactc

SEQ ID NO: 41295 - DNA, 122 bp, Homo sapiens
aagttactctcaatcaaaaccaggcaatgattaaactggcaacataaaaaggagggagcacgagtcatggaggcgggaagtggtgcacctgcagacttgctctgctccatcactttttccaa

SEQ ID NO: 41296 - DNA, 122 bp, Homo sapiens
caaaggtggcccagagtgccaagcggcggagccgagctttgagaagcacctttctgcttgcgctgggcagcgggctgcgtgtgactggccacctggcctcggctgggagcgcactggtggcg

SEQ ID NO: 41297 - DNA, 122 bp, Homo sapiens
aacctaagttccctgacttccgctacagtacttctccattcacacacaccatcatctcagcggaaggattggagctccagagcagagaagggcctaaggtcatgtctccaaactccttcact

SEQ ID NO: 41298 - DNA, 122 bp, Homo sapiens
aatgggctgaaagggatcgttaaactagtctgcaagagaacataaacccttcatgaaaaccgggggtgcaaacctttcagacaaggcaatacgaggatttaaagcaatcagcttcacttttc

SEQ ID NO: 41299 - DNA, 122 bp, Homo sapiens
tggcatttagtactccatcttgctacattctaggcgagaaatttttagttatttaagccacgttcctgaaagtctactctagccttatgtggtttgaactcactgttaactctgcatagcta

SEQ ID NO: 41300 - DNA, 122 bp, Homo sapiens
acacttgccggtggtcaaatagctcagcccaccacctgtttttatatggtttgcaagctacgaatggcctttatttttgaagtggttaaaaaaaaaatccaaagaagcataatattttgtga

SEQ ID NO: 41301 - DNA, 122 bp, Homo sapiens
ctatcacatccttgtttagcaatgatcatccttttgcattacaaactagaaaagcaactccgtaagactaacaaactctcttcaaccaagtaaaggagactccttgtggaggggagcccctg

SEQ ID NO: 41302 - DNA, 122 bp, Homo sapiens
ttttaagacccacatcttgtaaatgtgagatttttatcagtcagcacagatgacttaaagcgttccatttctccgcgatccaattttattaggatttactctcatttgtgctccgcttctct

SEQ ID NO: 41303 - DNA, 122 bp, Homo sapiens
ctcatggagaccagttctactctgagagagttttccaatctggctgtaaattggggttagcgagggcagcctctatcctgctaagaaacaaagccagccttttatagagccaagaagctggc

SEQ ID NO: 41304 - DNA, 122 bp, Homo sapiens
acgtgtctttgtgccctgcttgaccccgtgctgggaccttctacgagagccacggtgacacgtacagcagatttccgggacacggcagttgtgaaaataaaagaacgaaagaatgaacaaaa

SEQ ID NO: 41305 - DNA, 122 bp, Homo sapiens
cggggagcagatgcaccccaaggcaggactttctcccatctgctgtccggtccttgccaccgtggccccagcgcctcacaccgcacaccgcccggcacctgctcttcctagctggttttctc

SEQ ID NO: 41306 - DNA, 122 bp, Homo sapiens
ctgggcgccggaggtaacaagaagaaccaacttcctgctgtcatggaactttaccttctacgtgaaagagagggcacaccatttaaaaaccaaataatgatgtagactatgcaaatcgtttg

SEQ ID NO: 41307 - DNA, 122 bp, Homo sapiens
aaccaaacaaaaaagcaaaacaaaacaaaaacccttcctcctaccagcagagagcgctagcgccatgcgcggcataagcgccaaaatgctcgggtcttctgtgggttctaaccgccgagagc

SEQ ID NO: 41308 - DNA, 122 bp, Homo sapiens
aatttctagctagatgaaggcagagaaagaaaatatttgatttcttaggctttatggaagcgataggaatggcaatagtggtttggaatggagactgcacgcaccagtcaacagggtgtgtc

SEQ ID NO: 41309 - DNA, 122 bp, Homo sapiens
caaacgtaagcggcttgtcgcagaaaccaaggggtccacgaaacgcgctaggctagaaggcgggaaggagagattactgacagccgtgccagccaataaaatagaaatgtgagaaaggttct

SEQ ID NO: 41310 - DNA, 122 bp, Homo sapiens
ggatcttcctggtcacgggcaccctcctggcacatggtgcttcagtgtgatcgggccctgcggccactaagcctttcctcctggtctttgcggaggtttcacttggaaaaggcggccagcgc

SEQ ID NO: 41311 - DNA, 122 bp, Homo sapiens
accccgttcacaggcccggcccacgagaggccaatggggagcagccaggaggagggactccggtgtcagccaagccagccagaccacgacgcagatggacactgtgggccggacctggaggg

SEQ ID NO: 41312 - DNA, 122 bp, Homo sapiens
agccatgtaaatttactactatcccttcctttgctggatatagaagtcctaccttcaagacgttgtgaaaggttgggcaggtccaagagaagggggaccacattaagggagctgattccaaa

SEQ ID NO: 41313 - DNA, 122 bp, Homo sapiens
tcagaggaagaagtggggtcccctctcccattctgtgagcaagtgccagttccagtgattcgtactttcatgtccgaggtcagttttcaaacacattaaagtacatcggtgcccagagtcca

SEQ ID NO: 41314 - DNA, 122 bp, Homo sapiens
gctggagcgcatcccacggcatcttccagaaactccagggagcagcgctgggacgtgactcgcttcctgcaagatgacaatggagcctcaaaacaggccaccagcccgggtgccgcctttgt

SEQ ID NO: 41315 - DNA, 122 bp, Homo sapiens
cagagaattcacaccggagagagaccctttgaatgcaatgagtgtgggaaagcctttattcggagttcaaagctcattcagcatcagaggatccatactggggagaggccttacgtatgcaa

SEQ ID NO: 41316 - DNA, 122 bp, Homo sapiens
tctgtcatcaggggcttgaggtgcatgtcgggtggctggctgaccacccagtgggcatagcggctcagcgtccagcaggcgatggagcggaccaaggccttcttatccgacaggcactggat

SEQ ID NO: 41317 - DNA, 122 bp, Homo sapiens
ccccatccccctactgcccttgtccttggggggccactgtcccctctgacctcgggtgtacggctgcttcctgtatgaccagaaggagactctgcccttttggttggtggttttcgagagtt

SEQ ID NO: 41318 - DNA, 122 bp, Homo sapiens
gtcccctgagtcctccagcaagacgtgtaaagggaattgcctccggaacacttctggaatcgcaggaagcctgtattcaagtcaaagctcttacaagtgctattattgggaaccgctgatca

SEQ ID NO: 41319 - DNA, 122 bp, Homo sapiens
gaaaaccagaaccaccccataaggcaaaactgctaacagcataggccttttgggaaggaacgtttgggtcaccccaccagacagtgaaccacgaccagcagaggtgcttgcagagggcaaag

SEQ ID NO: 41320 - DNA, 122 bp, Homo sapiens
gcatttaaaaattctccttcacccttcaccttgttggagctactttctgctttgagatggcgaacaggtccatctgcttagagatggtccctaagcattgaggggagtggtatccctttccc

SEQ ID NO: 41321 - DNA, 122 bp, Homo sapiens
accttctcccgggaaagctcttcagagtatgaggcactgtcttcctactgacatgccatgcgactttaataggctcttttattttccttttcccccatcaagacaaagaacggagagtaaaa

SEQ ID NO: 41322 - DNA, 122 bp, Homo sapiens
tgaggttcacccacctcaggctctcaaaggtctaggatgacagacgtgagccaccacgcccggcctaaaatccattttaatggggtgagatgaaaactcactttgattttaatttgtgtttc

SEQ ID NO: 41323 - DNA, 122 bp, Homo sapiens
gatcggggactgtcctaagacgggcggggcgcgctgcgctagggactgtcataaaaggggcgggacgcgccgcggtcgggatgacgtgagctgggggcgctcgtcgctgcagccggcggcta

SEQ ID NO: 41324 - DNA, 122 bp, Homo sapiens
tcatcccttcaccctgctccagggacccctgtgtggtgggaactggtggacacttccttccgggccccccagcagcttggagcacagggccgctccctcctccacccacttgcttcactttg

SEQ ID NO: 41325 - DNA, 122 bp, Homo sapiens
ctgtggtagaaattcctcttagactgtgccctccatggaggagcagccttccagggggcccggcctgggtcctccctctgcccagctctagagatcgagacctgcaccctccctccctctcc

SEQ ID NO: 41326 - DNA, 122 bp, Homo sapiens
gactctcacgctcaagcgccccggcttgaggccgggaccccctatttcccggttatgggacggccccttgagggacagcctctacgagccctggatttataccccgagcctgccttcctccg

SEQ ID NO: 41327 - DNA, 122 bp, Homo sapiens
acctgccgtgtccgacagctgcactggaagaggggcgtgtgtctcccagccgggcggaaccgagaccgcttcgtccccggcggggaacttcatttcccacaagcctgtgcgcgagactccat

SEQ ID NO: 41328 - DNA, 122 bp, Homo sapiens
gtggatgagcttgagctcatagtccggcaggatgtccctgcggctattcacgtcctccagcgccatctccaccgcgggctggcaggcctggccccctggccagcccccgctcatgggaaaca

SEQ ID NO: 41329 - DNA, 122 bp, Homo sapiens
gaggccgaggctggcggatcactcgtggttaggagatggcgaccagcccggccaacacagcgaatccccgtctccaccaaaaaaatacgaaaaccagtcaggcgtggtggtgggcgcctgca

SEQ ID NO: 41330 - DNA, 122 bp, Homo sapiens
cccctgcgatattcttcgggatattcagtggtggagaggataatattactctctgtatcacggggggtgtacaccacactgacatattgttacccccagcgatatgaggagtagtagcaacc

SEQ ID NO: 41331 - DNA, 122 bp, Homo sapiens
acccagatacccctaggaaaaatcactccggcctgcaacttgcatccttcgatgaaacctcgattttcaccatcaggttataatgatcggttaggtgcctgcttcttaccctgtaaggtgaa

SEQ ID NO: 41332 - DNA, 122 bp, Homo sapiens
gattaaatggattaatgcatgatgagcacttagattcttgcttggaatagaataagctttcggtgagtgcaatctgttattattagtaacatcatcaggcattttcttacgtgcttgctata

SEQ ID NO: 41333 - DNA, 122 bp, Homo sapiens
aactttgaagctaaagaaggtaaacctttccattattgcattacatgttgtggaatctctcgagtgcaaagactgtctagttatttatcaggctatttctactgatgaactgcttcaggtgg

SEQ ID NO: 41334 - DNA, 122 bp, Homo sapiens
caggacaaccactgaagtaaacaccatatcgtcactttccaactgtggaaactgagcttacgagacattaagtagcctggactagagttgctacctacctagtgactgggaaaaccccaatt

SEQ ID NO: 41335 - DNA, 122 bp, Homo sapiens
cttcctggagccaaaacctacgcaggctcctttcctccgagctggttgctaggtgatctccgaaggctgtccgaagtctcgcgagggcggacccgttgcctgatgacgagagttgggagtgt

SEQ ID NO: 41336 - DNA, 122 bp, Homo sapiens
cgcgagtgctgcgcttgcgcagagcgagagcacgccgcctcttgggctgtatctggtacccggttccaggtccctacttcctgcccgtgactcaagccaccggggccatgtagcgccacgtc

SEQ ID NO: 41337 - DNA, 122 bp, Homo sapiens
tcattttggaatctaattgcaagattttccacactatgcagctataatcaaatgtgtgtgcggctgcaggtatacattgacaaaacagaactaaaaaaattataaatttattttttaaatta

SEQ ID NO: 41338 - DNA, 122 bp, Homo sapiens
ccgtggacaacagccctccctggacatggaaagcatcatcgctgaggtcaaggcgtagtacgaggtgatcgccaaccgcagcctggctgaggctgagagcatggaccaggtcaagtatgagg

SEQ ID NO: 41339 - DNA, 122 bp, Homo sapiens
agattctggcttaagactcttgtgggtctgtctgtttctctctctctcttttccttgaaacggtctcactttgtgacctacgctggagtgcagtggcatgatcacagctcactgcagcccga

SEQ ID NO: 41340 - DNA, 122 bp, Homo sapiens
tgcacacaatcactgcccaatgcaagaatgcaccactgcatccaatgcttggaaattgtccgtgaagatgcctttgagtagctgtctatttgaggatttgtggctaattcctccccatttgt

SEQ ID NO: 41341 - DNA, 122 bp, Homo sapiens
cgggcaggcgaggcacccgagtgttctgggaaaagtcgaagaagaaaagctggtcctcgtcgtaggcctcagagagtcccacactgggactcccatcctggcagtacactgtgtgcaggaat

SEQ ID NO: 41342 - DNA, 122 bp, Homo sapiens
ccgccctgtccacggaaaccgtcacccaaacttggagctgtgcaggggatccggccaccccgtctgtcctgtccgcggaaaccgtcgcctgagcttgctccacgttccagaccggggcagcg

SEQ ID NO: 41343 - DNA, 122 bp, Homo sapiens
agcctggtgggatcagcaggaccatgacctgagcctgcctgccaggcacagaacctcaggcgcacccaggcagacccacgatggggtgcactcagccccgtatcattcatgctgcaggtcag

SEQ ID NO: 41344 - DNA, 122 bp, Homo sapiens
tctgcaccccctttcccgcccccgaccagcgagttctctccatccctgcctgagaatcgccgtgctgtgtacgaggtactcctcattaggtgggtagcactcaaggttgcctgtctgcacgt

SEQ ID NO: 41345 - DNA, 122 bp, Homo sapiens
gaagagccttctggacattctgacagacccctcgaagcggtgagctttgcccacagcccacggagggtccacaagggcacagatagcccagccatggatgggcacttggtgatgatgtgggt

SEQ ID NO: 41346 - DNA, 122 bp, Homo sapiens
aaatacagcgagggcttacttcaattgacttttatcttcaaagccataacaaatgttacccgcatgtttttggtgggtctccttggcatccagtctgggaggatgggagggaggaggaaaga

SEQ ID NO: 41347 - DNA, 122 bp, Homo sapiens
tactttctgggtgggtccatggagaggtcaatgatgtttccaaaaggagagaaggccccacggagaagggtgggtgtcatgtcttctccatatacatagagagtattccctttcctaggggc

SEQ ID NO: 41348 - DNA, 122 bp, Homo sapiens
ccagccgcgagaaccccgcacgcccggcaagatgctgtcctggcggctgcagacgggccccgagaaggccgagctccaggagctcaacgcccggctctatgactacgtgtgtcgggtgcggg

SEQ ID NO: 41349 - DNA, 122 bp, Homo sapiens
cggggctggcggaggcctcctgtacacgcacacgcacgcacatgcgcacgcacacgcacgcgcacagacgctgcctggattttgctttgggttccgtcttctcactgcggaccctggattga

SEQ ID NO: 41350 - DNA, 122 bp, Homo sapiens
agctctataagaacagggactgtctcaatcttcttccagactgagtacgtagccgacattcggcaaatagtggtggaatgaatgaattgtgaaatatatggaaatctccagtaaagcatttg

SEQ ID NO: 41351 - DNA, 122 bp, Homo sapiens
gcagcaggaccaagacaggggcgagaggccttgggtgccgtcttggctcactccatcactcggtcacgctggctgggccaaggcagaggcagtgggtgtcagagacagctcttccagctaga

SEQ ID NO: 41352 - DNA, 122 bp, Homo sapiens
aatcaccaacgccggggattggtaggtagcctgaaaaatctaattcagagaaggatgctccgcgcgcagacatggcttatccccgtgctactgcatgagccacacctaggccggccccggac

SEQ ID NO: 41353 - DNA, 122 bp, Homo sapiens
aagggctccccagaggcaggtcacctgtaccctaagaggaaacagcagaatgttgccgtccgcggcaggagatcgcactcggcccctggaagtggacctcagtgggtggcctgccctgacag

SEQ ID NO: 41354 - DNA, 122 bp, Homo sapiens
ggcgtcttgcctggaggtctcccagatggggaatccaagccctaaaaaggcataataactcggagctgtgtttccaccccgaccccgccccccgctccccgcagagtactgagccggaaagg

SEQ ID NO: 41355 - DNA, 122 bp, Homo sapiens
gcttgcgcaggggaggaacacgcagtccggaaaaacgccggggattctgggtcgcgcagccgtggagctacctcaaggcggaactggggagtccagggcttcggcagcctgaacacccggtg

SEQ ID NO: 41356 - DNA, 122 bp, Homo sapiens
agaggcctcggtgatttcccgacctctcctgtgaagcctgattcggaactcttccagctgcgaagaacttggccgattctaaggcacatcagggctgcctggaaccctaacacctgcctagg

SEQ ID NO: 41357 - DNA, 122 bp, Homo sapiens
tcagagcatggctactgctctctgcgagtgggtcctgctgagggatcctctgtggattatcggattaacgttcaatgcgtccacaccagaggctgagctagcaaagccggacatctctattt

SEQ ID NO: 41358 - DNA, 122 bp, Homo sapiens
tccccggccactgcttgagccgctgagagggtggcgacgtcggggccatggggctgggcccggtctttctgcttctggctggcatcttcccttttgcacctccgggagctgctgctggtgag

SEQ ID NO: 41359 - DNA, 122 bp, Homo sapiens
tctctccatcactgactactgactgactgctgcttttttatttgccctccaggcacctgccgaaactttggaaaacaagatctaccctaaacttccaagtggccaggagcagttaaggcagg

SEQ ID NO: 41360 - DNA, 122 bp, Homo sapiens
cacacataaaaacacaggcttctgaaagcactaagaatcaggcatccacacatacacacacgcacgcacgcacacacacacgcgcacacacaccccacagggcattacctgccttcccccaa

SEQ ID NO: 41361 - DNA, 122 bp, Homo sapiens
caagggtggctcggggcagcagtcctcagctgtggctagtcttctcccatctgcctcgggcgactggtgtctgcggcggtcgggagcgccgcccgggctgcgagtgacgcggggatactgcg

SEQ ID NO: 41362 - DNA, 122 bp, Homo sapiens
ttaaccaaaggttaaaagaatctgagacagttcaagaactgttctgctttgctttctatgcggttttgtgaactcttgctttgttataaaacaaattcactttcaagtcttttgaccaaatt

SEQ ID NO: 41363 - DNA, 122 bp, Homo sapiens
tagactgagcatgaaatttgtgaaaggtaagcacaaatccgaagcaaacctatctaagaacgcagtatgattaacacagctgtagttcacaaaaactacaattatcctgtttcaatgcagga

SEQ ID NO: 41364 - DNA, 122 bp, Homo sapiens
gggctcgggacctgcagcccgccatgcctgagcctcccacccactccatgggctcctgtgcggtcggagcctccccgacgagcaccaccccctgctccacagcgcccagtcccattgagggc

SEQ ID NO: 41365 - DNA, 122 bp, Homo sapiens
actgatccgcagtcgcgctcttgccgctgcccagctgagcagcgtgcaccacctctgcgtcgccctaccccgccctgcctgggtctccaggaaggttggagcggaacccgcgctgctctggt

SEQ ID NO: 41366 - DNA, 122 bp, Homo sapiens
tcacccctctccacgcctctcgggttttccccttggctcagggtttcctgtttcagttctcggcgttctccagcagcaggtgctggtttgccaacctcggctccagaggcggcgacggagga

SEQ ID NO: 41367 - DNA, 122 bp, Homo sapiens
tgggaactgcggttgcctaaggctcggtttgctcttcagcactccggtcccccaacaccgcgtcaggcggcgcccagcctcccggggactcgcagacgctcactccccagaccacagcgaca

SEQ ID NO: 41368 - DNA, 122 bp, Homo sapiens
tggtatgaggggtggaccagtagcttcctcgcaaccaccaaggccggagtgtcagccctccgactttaacatggtagagcctgggatccacagacttgggaggggaatggagacgcagtctg

SEQ ID NO: 41369 - DNA, 122 bp, Homo sapiens
attcagatgttggtgcctctgcccctctggtgcccccgatccccacaaggggccgcgaggcgggcaggtcacagcaggttgaagtcccctttgtgctgttccagccactggtccagcgtcag

SEQ ID NO: 41370 - DNA, 122 bp, Homo sapiens
aagtaccaggcaagctggatgcattcccggaagcaccagtgagagacttcagggcaaactcgatgttccttctggaaaatcccatctccatgagctgcaccacgatcggcagagcgggaacg

SEQ ID NO: 41371 - DNA, 122 bp, Homo sapiens
ccaggcttcccagcacgcttggcaccgagggcggtgccccgccgggttactggggacacacggcagggggacccgtgtcttggctcagccagggactctcaaatgaccccacgcaagctccg

SEQ ID NO: 41372 - DNA, 122 bp, Homo sapiens
ggagataacttggaggttcgccctctggaactcctgaggatgacctccatcatttgaagtcggaaacccggcccccaaactgcgctctaagtcctcctgtgactctgggggtgacctttcca

SEQ ID NO: 41373 - DNA, 122 bp, Homo sapiens
cctgctctacattgaccccttccctatacttctgtttgtaggggctgggaggccagggcccggattggaccccatagggccaaatggtctgtgagcctaacccgttagatttgctcactgga

SEQ ID NO: 41374 - DNA, 122 bp, Homo sapiens
tagcagagtcccccggatgttgacgctccctccagctcttctggaccgtgttctggaggccggctttgaactctttggcatatggtcagggcagcgctgtcctttcacactgtggattttca

SEQ ID NO: 41375 - DNA, 122 bp, Homo sapiens
agaaggtgtaccgcagtagacttctgcatccagacaaatccagtggctcatgtgtacagccgaataaatccggccaacatttactgtgtgctatagtacagctactgtgctaaggctttaca

SEQ ID NO: 41376 - DNA, 122 bp, Homo sapiens
gagggaggcacgcagttgtggaatttgttccccttttagcatgctgaccagccctggcaacggagctcaaggcatctatgtgccactgctcaacagtgagtgacgtcatgggcacggccagg

SEQ ID NO: 41377 - DNA, 122 bp, Homo sapiens
ccacgccccagcggctgggcagggcccccgcacctggtcccggcgagtggagcgatcgtccgccctctgccgcgtcctcctgggggatggagaacctgtttgccaggctgccgccggagcgc

SEQ ID NO: 41378 - DNA, 122 bp, Homo sapiens
ctaaacatcaagatacagctcagaacacttcaataacaagatttggtctacttaggcatccggcttgacagctaaacactttagaccacaaagttaacatcatgttacatacgtcttacagt

SEQ ID NO: 41379 - DNA, 122 bp, Homo sapiens
cgttgctcctgcctggctgcaaagcaaacagcgatagagcttcaagtctccctctgccagcgctcccgcccagccctagggcgcacccggcgctcccctcctggaaagtccctcccaacgcc

SEQ ID NO: 41380 - DNA, 122 bp, Homo sapiens
gcccgggtcggaggcgtgacccacagcctcagtgggattctcggttggaccatcagggaccggtgaaacgcgcagctctggccgagggcggcccaggtccttggaagaccttgctgccctcc

SEQ ID NO: 41381 - DNA, 122 bp, Homo sapiens
aagaggttgtcttggcgtagtcagcggctttctagctccgacgtctggttcaaaaacggccgccagctccatcagccgatgccccaggcctgaggtctggctgcccgcaggcaccacctacg

SEQ ID NO: 41382 - DNA, 122 bp, Homo sapiens
gaaggcatcctgaagttccagctactctagccccagtcacgtgtgaagacgccattcccacgtgggaacacaggactgagggtagagcagctagagaaccttgggatgctgaaggcctcgcc

SEQ ID NO: 41383 - DNA, 122 bp, Homo sapiens
cgctgcagaactcagagcagggagcccatctgtccagagagagagcaggagccagcggagcgaccctcacctgatgcctggggttccttggaagctaagatgccgcgtgtgtgtttacggaa

SEQ ID NO: 41384 - DNA, 122 bp, Homo sapiens
tttattcatgtccccacctcaattgaaaattttcagagaaggaatacagcatctatttcacgatgccataaatatagcaagatattaaataaatgttgaaaaattgaccactgactgtacct

SEQ ID NO: 41385 - DNA, 122 bp, Homo sapiens
ggtgagtgcctggccaagctgggggtcatggaaattcatcctttcccccacaagaaaagacgtgagtcactgtcttcactgttcacatgagaaagtcacaagacccagagaaattaggcaaa

SEQ ID NO: 41386 - DNA, 122 bp, Homo sapiens
ccactggggacactttgtccctagacaccctttctggtggcgtgaacgcactctagtccacgttccccactcccaggatgccgggaccgtgtggcgcaggcttaggagggagggaggtccac

SEQ ID NO: 41387 - DNA, 122 bp, Homo sapiens
aaaggacagaaatgttatccttgaggtgcagagacagccaataacaaatgccttccctaccgaaactccctgatgaattgagcctggcggagaatgtattattgaacattaccatagatcag

SEQ ID NO: 41388 - DNA, 122 bp, Homo sapiens
agcctgaccgcctcagtgcagaccctctaagatgcaagccttccccaggtaagacagttccgcagggtgcttctgtgggctggctttctgagcagccatctcaaagtatgcgaaagaaatag

SEQ ID NO: 41389 - DNA, 122 bp, Homo sapiens
acaggaccgcggagagcccagctttgaggccaggcctgaagggataacccacacagggaacgttttcctatcagagaataatggagcacaaaataattcagaaagcgaatgggcaggaccac

SEQ ID NO: 41390 - DNA, 122 bp, Homo sapiens
atgaccatactaagacttttctcacaagtaaatgtataatggggtatgttacaatatgagcgttttgttaaataagagtactaattagaagcaattcagtagactggggtaagtaaggtcaa

SEQ ID NO: 41391 - DNA, 122 bp, Homo sapiens
ctgcagcagcatcaccaaaatgtggccatactggaatccctgaggcggagcagctggacccgagggctcactgattgtgcggttgggagcgggcgtctcgcaggcttgcagagatcagcttt

SEQ ID NO: 41392 - DNA, 122 bp, Homo sapiens
ctgccaccaccggccaggccgcggcttggcaacccgtgaacaggaggcagggctgcagggcgtgagggatgatgacaaggaagccggaggagcagcggcggcagcggagagtccatcttgga

SEQ ID NO: 41393 - DNA, 122 bp, Homo sapiens
ggatgcgctgttaacacgtgtacggtaatgggctccctcacggcctcctccccggccacccgctcccagcctgacggatggcccgagccatccatctacattatgtcatgggcggtgagcct

SEQ ID NO: 41394 - DNA, 122 bp, Homo sapiens
gaaggactagaagatgttggcaagtctgcattctgagaagccaacagcaatatttggtgacgaatctgttcgatcaattgcagctggtggatctgctgctgctgcagagctaggagttgttc

SEQ ID NO: 41395 - DNA, 122 bp, Homo sapiens
cagaaagaaattttgtttgcagttaaccgtttagggatgtcccttgagcttttggggtcacgaatgcaccggctcttgcctttaggagtgatttggtgtaaagatttattacttggtaacca

SEQ ID NO: 41396 - DNA, 122 bp, Homo sapiens
ggaggggcggcggcgggtgcggcagcctagcgcctccgcgggggcgggggggcgctccgacggccgggattataattccattttgattgcttggggtctttgttgtctgaaattgcctttag

SEQ ID NO: 41397 - DNA, 122 bp, Homo sapiens
tgagccactgtgcccggcctgtccctactaaaaatacaaaacattagctgggcgtggtggcgggtgcccataatcccagctacttgggaggcggaggcaggagaatcgcttgaacccgggag

SEQ ID NO: 41398 - DNA, 122 bp, Homo sapiens
gtaacaccctattcacgaaaacaggcggtgggctggacttggctcatagccacaggctggcgagccctgcagctactgagcacagggtgcatgtgccaggctgacctctgtccagagagtca

SEQ ID NO: 41399 - DNA, 122 bp, Homo sapiens
gagccatggggaggaatctgtgtgagacacaggctgacctgggtggcctctgaggcccttcggtgagtttctgtgaacctgactttgagtcttctgtggctagtaggaaagaagtgagacgg

SEQ ID NO: 41400 - DNA, 122 bp, Homo sapiens
gcaggcggtctggggggcagtccgagagcagcagctgcactgcgccggccccgggggtgtcgtgggcggggagccgcagggtgctgcgcccggcctcggcgaaacgcgtgaagaggcgcgcg

SEQ ID NO: 41401 - DNA, 122 bp, Homo sapiens
ggaccgtgcgtgatgtaacccagatctgccagatgtgggagccagcatgagtcacaatgccgggccgttcattaagaaatgctttctgggtcatctgggtgcagggcactgctgcttccctg

SEQ ID NO: 41402 - DNA, 122 bp, Homo sapiens
ttcattttttcagtcccagacactcccatagaccctacagaatcctacatcctgcaggatcgactatctcatggctcaagatgaggctgtgactgtctggggccagaagtgaccagttccca

SEQ ID NO: 41403 - DNA, 122 bp, Homo sapiens
ttacctcttgcgctagaacacccctcttgagcctgtggaaggtcaggttgccaggggatacgaataaaccagctgccttctttgtgtctctgctaaacagtagctggctcccctgtcactag

SEQ ID NO: 41404 - DNA, 122 bp, Homo sapiens
atggcggccctccagtttgtcagtttgcagttctctgatactctgtccggggaccctgaacggcgctggctgaaaaccaagggttcacagcccaaatctggggttgagaaagagcaggatgt

SEQ ID NO: 41405 - DNA, 122 bp, Homo sapiens
tcacctgggaagctggtttcccccaaaggaactcttgtctgtccgttgttgcagagccagcgcatgagaccaagtgtgagtatcaggcagtgcagccttcattcagtggccatggaattgga

SEQ ID NO: 41406 - DNA, 122 bp, Homo sapiens
gtcagctgggctgggcgtggtcctgcgaggaggtgggcggggcgcactgtggggcggggccggtggggacgtgggcggggcgcattgaggggaggggcctgcggggaggtggggtgggccca

SEQ ID NO: 41407 - DNA, 122 bp, Homo sapiens
gattcctaccagggcaaaggctttgtcatgtcccgggccatgtatgtgtgagctgccatgcgcctggcgtctcacatctcacctgttgatcccttagctttcttgccaaggatctagtgccc

SEQ ID NO: 41408 - DNA, 122 bp, Homo sapiens
ctgaggaaacgaagagtagggtcatttcccatcttgccgtcgaaagtttatcccatttcccgggtgtgcaggaagagatggcgcgagggcaggaaggtgtgaaactggggttctgcgggaga

SEQ ID NO: 41409 - DNA, 122 bp, Homo sapiens
aggtggagctcaggcggtcatgtgagcagtggggagcagctgtaaatacaggtgaagcttcgttggctcacttgctggactgccactcacctcctgctgtgtgtctgggttcctaacaggcc

SEQ ID NO: 41410 - DNA, 122 bp, Homo sapiens
cgtctcagcggcttgcgttgagtttccggatacacagcctgtgccccgggatggaggtgtcgggagcagtcttgatccatggcagtgttggtgctgagcagtcaggagttcacccaggctcc

SEQ ID NO: 41411 - DNA, 122 bp, Homo sapiens
ttcgctcgcgtcgacgtggcctgaacggcacccccggaccttccgccctggcgccgagcccgggggtggtgggacccacagccctccaccagcttgcttaataaagctgctctctgaccctc

SEQ ID NO: 41412 - DNA, 122 bp, Homo sapiens
gccccggagttcagcacctcggacagagcccgagccccgccgcccgaggcgcacagtgagcgtggaacagcccggctccctagcccccggccaacgctgctctcagttcagggcagctacgt

SEQ ID NO: 41413 - DNA, 122 bp, Homo sapiens
cttcccgtctaaccccccccccgctgtcgtcccagcctgttgcttaagccgcgcggtgtgcggtgtgcgcggcccctgccttagcaacgacgctagtaactgcctggctcctccctctggtg

SEQ ID NO: 41414 - DNA, 122 bp, Homo sapiens
ccctctctccatagctgtccactgccaaggagatcatccagcactttaagggctgccctgcggacctagtggtgtgtgacggggctcctgatggtaaatagcaacagaaagtgggaggccag

SEQ ID NO: 41415 - DNA, 122 bp, Homo sapiens
gagggaggcggggccgcgcctgacccagtccagcaccctggcctgccagcctcgccgcttcgccactcaccacaaaaagacccagctgcaagaggaagaataagtggctccctccgcctagc

SEQ ID NO: 41416 - DNA, 122 bp, Homo sapiens
ttcaccctggatcctagaagaactaacagttcaagggcatcatggtctttagagatctgccggagaagggggcctggaaaagacgaggagggcaggcccagtcccagccctgccacaaccta

SEQ ID NO: 41417 - DNA, 122 bp, Homo sapiens
cacccggcctccgaggggcccagcctgggacccgcccgcgcgcccgggacgcccctacctcggcctcgtctgtccgaaagtagaagaggaaattcaccaccagcttcaccagccgccgcttc

SEQ ID NO: 41418 - DNA, 122 bp, Homo sapiens
ggcctcacaggggacagctctgtagctcgttcacaccccagagctcccaggatcagtctgcggctggcttcagccccaccgcttcctcacctggcttcttcctggccgttcccgcttccctt

SEQ ID NO: 41419 - DNA, 122 bp, Homo sapiens
ccgaacgtgcgattattagaaggctattaccagaagcaaggggatgtgctcagggtgaggcgcaggcaaggaaaagacatttccaaacaacccaaacagcttgcgactggggacaaaccatt

SEQ ID NO: 41420 - DNA, 122 bp, Homo sapiens
tggccagggggttctgacctcctcagggtcgccaggcccaagccccctcctggctctgtccgcctagaaggaagaggcattgcctaaacctggagacagtgctggatgcccaggtgcactgc

SEQ ID NO: 41421 - DNA, 122 bp, Homo sapiens
tggtctcccagggcacatctgtctctggaacggccctcatcccactctgcctcactcacacgattcctattagcctcttaactcagcgtggtcttcgggagcacacccttcaacccaaaagc

SEQ ID NO: 41422 - DNA, 122 bp, Homo sapiens
aaataaaatccctgagtttgtattccagtaaagcccaaacctaggagggatccaggaaagcgatgagtgtggctgtcaaggtgcttccatctgtcagagtcacacattccaaagcagcagaa

SEQ ID NO: 41423 - DNA, 122 bp, Homo sapiens
tctttttttaaaaaaatggtatttctttatctaggaatgcttctgttgaaattgctacggcgcatggtaccgtcacaaaactcttttattattctgcctgagtaagagaggaaatgaacaaa

SEQ ID NO: 41424 - DNA, 122 bp, Homo sapiens
actcaaaggaggggagggaggagggtgggatgttgggaggttgcttggtggttaaatgtgcgttgctccagtgatagatgctctgaaggtcctgatttcaccacagtgcaatgtatcaatga

SEQ ID NO: 41425 - DNA, 122 bp, Homo sapiens
gtctgttgaattacaactagtgcagttccttatgtcaataaattcactgaacgctcgatgcggaagccatatttctgaacgagagaagaccaaaatttgtcatttaattaattaagggatta

SEQ ID NO: 41426 - DNA, 122 bp, Homo sapiens
catttcattctgagtttcttaaagtggttgcctgagaaacagtgatatcctgcaggcagccgggccactgggcatgtgctgttccaggcatcatcccagctgcctcctccttctgcctttgc

SEQ ID NO: 41427 - DNA, 122 bp, Homo sapiens
gcgcattcacttaggtgcgggagccctgaggttcagcctgactttcccgactccgccgggcgcttggtgggctcctgggcttctgggctcacccttacacctgtgtactaaagggctgctac

SEQ ID NO: 41428 - DNA, 122 bp, Homo sapiens
taagagaggtatgtttaagaggtatgcgagcacaaagaagcaggggcactcagcataatacgggggtctgaaaaaggctactggaagagataatgtcttagctaaacttggagggatgatga

SEQ ID NO: 41429 - DNA, 122 bp, Homo sapiens
ccgcccgccgcccggcagtcgagagcaccctgtgcccagactggccgactcattctcccccgaattttgtttagagctggcaagggggacttagctcgcgccccaagacctgggcttgcagc

SEQ ID NO: 41430 - DNA, 122 bp, Homo sapiens
tcgaggaactgagtaatttgcccacgttcaacaagttggtgcaaaatgaagagtggctcccgtatttcagactttaaggccgacgatcttccatctgtgctctgggggcaagatgggaggtc

SEQ ID NO: 41431 - DNA, 122 bp, Homo sapiens
aacttccccaggtctgccttgatctgctttaaatcagagagggagaaggggacatgtacccgggttgggccaaatacccctcccgctatagcttgaaggggacataaccaatagcccggggt

SEQ ID NO: 41432 - DNA, 122 bp, Homo sapiens
gaccatccacactcaaatatgtgcgtgtccacacttaaatatgtgcatgtccacactgaccgtccacactcaaatatgcgcgtgtccacactcaaatatgcgcgtgtccacactcaaatatg

SEQ ID NO: 41433 - DNA, 122 bp, Homo sapiens
gacgggctgccagcggcgggcggcgcggctcctctcctgggcgcggggtctgtgggtccgcgggtccgtctgtctggggcagccctcggtcccgcctagccctggagccaggggatagggca

SEQ ID NO: 41434 - DNA, 122 bp, Homo sapiens
aggcctgcgggccagcaggcagctctgagtggggaagccctggcctcagcaggtccaggccgcacaggaatgtgggtccagcgtggcccagtcttccaaatgttcaagataagctagaaatc

SEQ ID NO: 41435 - DNA, 122 bp, Homo sapiens
ggctgtgcgccctaccccagctaggccccttccccgcagaggatgtgtttctgttgtcctcgcgggaccaccggaccccgctgctctatgccgtcttctccacgtccaggtgaggggcagga

SEQ ID NO: 41436 - DNA, 122 bp, Homo sapiens
gaagcatatgtgcttaacagctgggcttccagggtgcctgtgcttgactggcaatagtgacgctgaacttcctggcagcctaggcaaaaaggagggctcaatggattccacagttcacgtgt

SEQ ID NO: 41437 - DNA, 122 bp, Homo sapiens
agttatttggtctgtcaatccatttcattcctgcagtcttccgccccgccctcttgagctcgcccctgataggctggcgcgtccgtcacttcaaaaaggtccgcattccttccgcctttctc

SEQ ID NO: 41438 - DNA, 122 bp, Homo sapiens
gaccaacaaacgccggctctactttccccagagcctaactttgtccaacaaacttcctagcgtgtcctcaccggggtgggggaggcccaggcgccccgggaggaacagcaccccgaggacgc

SEQ ID NO: 41439 - DNA, 122 bp, Homo sapiens
attaggctgccgcaggctgggaggcttggcggcgtcattccagtttctgcagcgaggtggcgctccaaggtacggcagcgcgcccgggttttcgccaccgagcgcatccgccgccgcgtcca

SEQ ID NO: 41440 - DNA, 122 bp, Homo sapiens
tctcggggaccttcagcctctgctgcagtcctcgaaaatccccagttcccttcaaggcatcgtccggtcccctgttaggctcttggcccccggaggggtggccgggggccctccctgtagca

SEQ ID NO: 41441 - DNA, 122 bp, Homo sapiens
tctctgtgggatgcagaggttcagtgctctcaacaacaagggccaagaaatccaagtgtccgggcccctgctccctccaagggtcaaggtaaagaaagcagcaagcactgtggtgagaagaa

SEQ ID NO: 41442 - DNA, 122 bp, Homo sapiens
taaataaataaaggtgtttctttctgtatgtgtcctttggaaataaggcaagatcacccacgtcataactttttcaaagtttgaatggacttcaacatctgcctcacctgtaagattttgaa

SEQ ID NO: 41443 - DNA, 122 bp, Homo sapiens
aattccacagtaagtgaaaataatacatataaatccagccacaaatatggatgagtcactcgttttggctgaatcagctgtgtgtatacagttgcctaaaagctcacaccttccagatggca

SEQ ID NO: 41444 - DNA, 122 bp, Homo sapiens
tcaagacaacggactcaaggggttaccgggaggcggatccgccaagtgtttggccacgcccggatccaccagaagtttctgagaccaagattcttgcgaatgtgagagtaggaggtgttctt

SEQ ID NO: 41445 - DNA, 122 bp, Homo sapiens
cctgagacccctataactgcagccccatcctgggatctgagcatgtcagagcccccggggcgatggaggctgtccaggtcatggtaacgtctagcacgatgcagacagataagggctctcga

SEQ ID NO: 41446 - DNA, 122 bp, Homo sapiens
ggggttaagggggtcccgtgggcctccaatgacccctgaaccccgtgcctttagttttaccggctggaagccccaagtttagaaaccttgagtgcctaagaagacggacccggagctggggc

SEQ ID NO: 41447 - DNA, 122 bp, Homo sapiens
ttccctagagagaaccacaattagcagtttgatgtgtctcctctcagatctattcctgtgcgtttacatgcacatatatcttgtccaaactacgtatgtagtttgagtgtgtgttctttaaa

SEQ ID NO: 41448 - DNA, 122 bp, Homo sapiens
tggggcgcggggcgcatgtccttggcgtgatgggctactgttgcgcgttgtgggtgctgccggggcgcgcctagctcctggcagggcgggagctgagtgagagggtagagggtgtgcacttt

SEQ ID NO: 41449 - DNA, 122 bp, Homo sapiens
acagagcaagactctgtctccaaaagaaaaaaaaaaaagctagaatggagatgtagttcacgggctttaggacgtagcagaatcaactctaccagagaagaggaaggggcaggcaaggaagg

SEQ ID NO: 41450 - DNA, 122 bp, Homo sapiens
ggccggagcggtctggcactggtttctctctgtctcacctccccagagattggacacacacgtgcacacagttctgatatcgtggtttctggcacgtgacatggtacccgtgttgctctgtg

SEQ ID NO: 41451 - DNA, 122 bp, Homo sapiens
tgccagaggagccaggaggagtgagaagcgccctagacccgcggcctcaagcgccatgcacgtcaaggggaagtgactccggagttgtgccaggaagaacaccaagaacgagctgtgcgttt

SEQ ID NO: 41452 - DNA, 122 bp, Homo sapiens
taactttccacggcggagcagcgggaggtggttgtgggggcttgacccaccgccagagcgcggcaggtgccgcacctcccctttaccttctcctacgtgggatgcatgcagcctggctcacg

SEQ ID NO: 41453 - DNA, 122 bp, Homo sapiens
ggcctgcgagaggcccgccggcccagcagagggcgcccaccaatctgcacgcgggcccagcgagttatcttgatttcggccaagctttctgactgctccaaaaaacgaagaaaaagattcag

SEQ ID NO: 41454 - DNA, 122 bp, Homo sapiens
taggttccctggcacagctcggcctggagaggcagcctgggggcccaaactcatctagggcgcgcccggagcttccccggcctctcttggcccatcgcgaacgagctcccctccccgactgg

SEQ ID NO: 41455 - DNA, 122 bp, Homo sapiens
aaataggaggtccatagctgctgatgctgctcacctctcccccagagtggccccagggcacgacctctgtggctggtggtttggaggtctatttattattttttgagacagtctcactgtgt

SEQ ID NO: 41456 - DNA, 122 bp, Homo sapiens
gggagccatggaagcttttcagcaggtgatgaggtcagtttgtgatttagagaactccctcgagtctctacactttccctggatctccaggtccctgtgcccggatgtggtctgtggaatgt

SEQ ID NO: 41457 - DNA, 122 bp, Homo sapiens
acccactgcacccatacatacagagcttttcccattaccaactctcccaccagagtggcacgtttgttacaacttatgaatctgcatttacacattattatcaaagtccctagttaacatta

SEQ ID NO: 41458 - DNA, 122 bp, Homo sapiens
ccagaggaagccaattcagctaacttcaagggtgtccccacatggcagcacacataaatgcgccaaagggaaaatgaaagggaacggcccaagtattcttttctcgacaacaaacgttgcaa

SEQ ID NO: 41459 - DNA, 122 bp, Homo sapiens
gtctccccactattccgaaaagtggcttcgctcgccctgaataaacaatcccgagcacctcgacaccatgtaccagattcaaaaggaaaacaaaaaaagcttagtcgtgtgcagcactagtt

SEQ ID NO: 41460 - DNA, 122 bp, Homo sapiens
tctcgtgggtggaaagcaggggtactgctccatatcctgcagtgcacacgacagcccccacgacaaagattatccagccccagtgtcagtagggctgaggttgggaaactgtggattagggg

SEQ ID NO: 41461 - DNA, 122 bp, Homo sapiens
gtgtgactattcatagatacaatgagaaatgctttaaactctgaagacaggatacctcaccgaagaagccacactgatccaagatgggaggttttaaaaactctacagtgggaacttcacat

SEQ ID NO: 41462 - DNA, 122 bp, Homo sapiens
cccaaacaacacactgcccatgcacaccagcattcaggcagaacaccacccccagaccaacgccaaaacccacacgcaccgagcttgcaaggaaaggaaaatacgtaaagaatcccttctct

SEQ ID NO: 41463 - DNA, 122 bp, Homo sapiens
ttccgggtcgcggccttccggcgaacgcggttaccgtggaaaccgcggccatggcggcaccgcggcaaatccccagccacatagtgcgcctcaagcccagctgctctacagactcgtcgttc

SEQ ID NO: 41464 - DNA, 122 bp, Homo sapiens
aaatatttgctgagcaactatatactgtgcccagcatttgggcagatgttggggagagagcggtggagaggcaagcctgctgcctgcccgccggaagttacactccagtggcatgataggaa

SEQ ID NO: 41465 - DNA, 122 bp, Homo sapiens
ctttctggaccaatcagctaactttagtacttgtttaaaacatcatttaatcttgactttcgtggttcaatgcttagctacctttggtttttcctgcttttgagtattttccaccttcccac

SEQ ID NO: 41466 - DNA, 122 bp, Homo sapiens
aaggaaagggtcctttggagaacggcacctgccagctgggctccaggagggatcccagggcggaggaaggtccttagaggcccagagccctgaggccacacacatcagagtcacaataaaaa

SEQ ID NO: 41467 - DNA, 122 bp, Homo sapiens
ggaggccccgccggctgggtcccaccgcccccacgcacctgcgttttggtgactcgatgccgcgccagcttcaccaccgcgaagttgcctttgcccagggtccgctcgatgtcgtaaaaacc

SEQ ID NO: 41468 - DNA, 122 bp, Homo sapiens
agtgtgagtgttggtgtgtggtgatgctggcggtggggtctatgggccacaacttcaacccgcctgggctgtttccaccccgtgcacagtatcgcctggtcggcttgggcctgacgcctctt

SEQ ID NO: 41469 - DNA, 122 bp, Homo sapiens
cgccagggaggaggcgactgcagccctcgctacgtgagctcgatcacaccagcgccccggcgactgcgcaggcgccaagcccgtgcctccctgctgcccccacccgtggccggcccgtggag

SEQ ID NO: 41470 - DNA, 122 bp, Homo sapiens
tggagaatgtggacagacattcagactcaaggaagagcaagggaggtggattgaccccttcgtattggagacccagtgagataatatcaaagttgcattccccacttcgatgacattctcct

SEQ ID NO: 41471 - DNA, 122 bp, Homo sapiens
acttctgggaacagcctggatacgaaaccttcacacgtcagtgtcttttggacattttctcgtcagtacagccctgttgaatgttctcacggtggggaggtacgtgtttaaaatgcggggaa

SEQ ID NO: 41472 - DNA, 122 bp, Homo sapiens
cgtttaaaaactgtacttgagctacagtatgttttggacaaattgggagatgatgaagtgcggactgacctgaaacaaggtttgaatggagtgccaatattgtccgaagaggagttgtcatt

SEQ ID NO: 41473 - DNA, 122 bp, Homo sapiens
ttatatttcatcaccactgtaacttaccacaacagatcttggcattgctggcttaaacaccgaacagaattccaataaccttttctcatagtatttgcagagtgtcatttcttcatgaggct

SEQ ID NO: 41474 - DNA, 122 bp, Homo sapiens
ctcaaaagtatttgataccaagtagtccttctcaggtatccacacctggcagccttgtttcgggccagcaggttgttccaccagccagcatcctggacaactgttctctcttgggtggcaac

SEQ ID NO: 41475 - DNA, 122 bp, Homo sapiens
aagcgggcgccgtcctacgacccccgcgcgctttcaggaccactcgggcacgtggcaggtcgcttgcacgcccgcggactatccctgtgacaggaaaaggtacgggccatttggcaaactaa

SEQ ID NO: 41476 - DNA, 122 bp, Homo sapiens
cccactttcttcctaaaaaccctgcagcttggctgacagtgggacctgcctccctactcccgcctgcaggagctcagaagcctcagctcaagaggagcccttgccagagacgtgggaccagg

SEQ ID NO: 41477 - DNA, 122 bp, Homo sapiens
tgaccctccaccccacctcgtagggctgggcctctaggtccgtgagggactcgtcggcgacgtccagcatcccctgatagtagttgagatacttggcggtcagctcgtgcttcgggttcctc

SEQ ID NO: 41478 - DNA, 122 bp, Homo sapiens
tggttgggagagagttaggcaattgccaggccaactacattttggagtagctcggcctcccgagccctaagcagcgatttctcctctggttcaaaggggcgggcagcattccccttctaaaa

SEQ ID NO: 41479 - DNA, 122 bp, Homo sapiens
gtccatgaaggaggtggacgagcagatgctggccatccagagcaagaacagcagctacttcgtggagtggatccccaacaacgtgaaggtggccgtgtgtgacatcccgccccgcggcctca

SEQ ID NO: 41480 - DNA, 122 bp, Homo sapiens
ttgtaagccctcattgcataccaggcactggtctagaccctgcaacagaaaacagtctcccgaggcttgttgggcttctatgctagttgtaagcataccccacactggggatgatggcgccc

SEQ ID NO: 41481 - DNA, 122 bp, Homo sapiens
ttgtccgtctaggggctgctccaacctgccacggtgctggtggtcctgctgtgcacctggcggcgggggcggcaggacccgacacctgctttacgtgatacttcctctcaggttacagacgc

SEQ ID NO: 41482 - DNA, 122 bp, Homo sapiens
ttgatctgaaggttgggttgcttggaggagtttctgaattatggctgcctattccactgccggctttttataagtctgggccaattcctctatttgtggcgagcaacatttttatcttgtta

SEQ ID NO: 41483 - DNA, 122 bp, Homo sapiens
gggacgtcgggaggtgttggggtgagaaatagaggggactctttgctggagacagggaggcgtcttcagtcgaggttagcatcttcgtcctcatcaggcagctcttctagccttgcctgctc

SEQ ID NO: 41484 - DNA, 122 bp, Homo sapiens
ccctgcaggtggggcagaaggtcagggggtgccacggcccacgacgcccccaggtactcgcggcccagcgcaaatgccactggggtgtgtgtggctgttctctgctgtatagtttccctcct

SEQ ID NO: 41485 - DNA, 122 bp, Homo sapiens
gcgccgtgggctccgcggggtggctttgttggggcagcagcaggcaggatttatttccggcgttgtttatgcgcagcacgtctggaacagggcccttggtgattaaaacgcctcgggacaga

SEQ ID NO: 41486 - DNA, 122 bp, Homo sapiens
tgagctgaatcaatccatcttcatatccacttcctccaatctaaaggaatagctgaaggacgcagctaatggatgagcttaccagcaaaatacattacatgagaaatatgctaatgtaggct

SEQ ID NO: 41487 - DNA, 122 bp, Homo sapiens
ggcacccgagcagtgtgacgttcatcatgtcgaagaagcccaaagaaaacagttcccagacgctcatatactgcgttgccagcgcgaacgaggacgagttctggtggtgcaccttgtggaag

SEQ ID NO: 41488 - DNA, 122 bp, Homo sapiens
gccaatgaaaaccctgcccaattcctttctcgccttacagagactctccaaaaatacacgcgtgtcgatcccgcctcccgggaaggaactattgttctttacatccattttatttcccaatc

SEQ ID NO: 41489 - DNA, 122 bp, Homo sapiens
cctttcatcctccgtgggttccgggttttcctcctgggacagggactcctggctcgggcacgggccctccacagcggcagcctcgccttcccgcagagcaggcccacagggggtcctctcct

SEQ ID NO: 41490 - DNA, 122 bp, Homo sapiens
ccgcccacgttgcgggcacggccacgcaggcccctcccctcccgaggcccaaccaagacccgcccactatgtgggcatggctcacccaggccccgcccctgagccacatcaggcctcgccca

SEQ ID NO: 41491 - DNA, 122 bp, Homo sapiens
agcctcggaagacacgcttttcccgcggctggcgttcagcctggagccggggagacaccgcgcagcagatgtggctcgaccccctgctccgcgcctgcagcttgcagtgattttccgtagct

SEQ ID NO: 41492 - DNA, 122 bp, Homo sapiens
tctccttcctcccacagcaccctgtagtaaaattcaaacaaagctttctgctgaaaccttcgcatggctttcattgctctgacagaaaccaaagccacccccgcggcccttcctggtctggt

SEQ ID NO: 41493 - DNA, 122 bp, Homo sapiens
cttcttttcttcgcgtttgcgagggagggggtagaagcaccggaggtgggtggttgggagcgggtccctaggcggttccgcgcggtttttagtagccaagactgtatccctttctgcggcaa

SEQ ID NO: 41494 - DNA, 122 bp, Homo sapiens
tggctgagcccgggagccgctgtctgccaatcgggtggtgaaaggcagacaaatctaccccgccaccagcaaaaacggcgcgtaacccttgcggcgccggccgaaccgcgccagagctggcg

SEQ ID NO: 41495 - DNA, 122 bp, Homo sapiens
ggtagctcaggatggaggcgctcttgttgccagcgctaaggtggtggtcacagtacaggacgtgaatgacaatgcccccgaagtgatcctcacctctctgaccagttcgatctctgaagact

SEQ ID NO: 41496 - DNA, 122 bp, Homo sapiens
agtgccagacagttggcgcaggtcagtgggtgcctgcaccgtgcgcgagcctaagcagggcgaggcattgcctcacttgggaagcgcaaggggtcagccagttccctttttgagtcaaagaa

SEQ ID NO: 41497 - DNA, 122 bp, Homo sapiens
atctaggctcactgcagcctccacctcccgggttcaagcgattttcctgcctcagcatcccgagtagctgagattacaggcggccgtcaacacgccgggctaaattttttgtatttttagta

SEQ ID NO: 41498 - DNA, 122 bp, Homo sapiens
agtgtttccctctattcctggcagcaccctctgccacacctcccaggaggaagcccgccccgtgaatttcctgaaatgcctcttgctttcacacaggctactgcgccacccagattcactga

SEQ ID NO: 41499 - DNA, 122 bp, Homo sapiens
gaataatcccaacatctttctcctttcctgacagatgtgactctcatagtcttgggttctcgcttgtctgggagtcaagaaacttgactttaccaccaactagcaagttactccacttctct

SEQ ID NO: 41500 - DNA, 122 bp, Homo sapiens
ccagtctcaggtatgtctttattagtagcatgagaacagactaatacatatagtttcctccgcatcccaaggatgtgcacgttaggttcatttgtgtgtctacgtggtctcagtgtgggtgt

SEQ ID NO: 41501 - DNA, 122 bp, Homo sapiens
cttccccactcccaccgctaacttggggatcagtgactctcccattgctgactagcagggcgaggcatttttattttctgcgaaacgcgatgagggcggggatgctatgatattgaggctgg

SEQ ID NO: 41502 - DNA, 122 bp, Homo sapiens
tgtagccataggatataagaataaggatgagaggtgtgaggacaattataatgcctaaagcgaaaacagacatttcaactgttgtggtgtctacacaagctatcttgaccagagctggcaac

SEQ ID NO: 41503 - DNA, 122 bp, Homo sapiens
cttctcgtcttaggagggtggccagtgtgctcagctcttgcgaaggtcgctgatgcccagcgaaggacattcccacatgtgcacgcacgcagagtaacccgcgcacactcacacaccccagt

SEQ ID NO: 41504 - DNA, 122 bp, Homo sapiens
ctaggagcctggggggcttcatcgagagggtcccggaagggcccagtggtcagatttcagcggtgcacctgggcctcaggcgatggatgaggtgcacctgggcctcacccatcgcctgagtg

SEQ ID NO: 41505 - DNA, 122 bp, Homo sapiens
gggtttcccaggtaaagcttaaagttataaatgagcaaggcaacatggaaaatttgagatcgctcctttaggatgaagatgagaatatttgtggtagtagcaggaaatgaaacaaaagagca

SEQ ID NO: 41506 - DNA, 122 bp, Homo sapiens
ctgatcagaagcttccgtgagggagccacacagaactcaccgagtccctcctggcagaggcggccgtcctctgttgcttccagggacgtggccctcttcccgacctcggtcgcctgagcgcg

SEQ ID NO: 41507 - DNA, 122 bp, Homo sapiens
caatggcaaagtggagatcaagtcaaatcccattcattcattcattcactcattcattcccgaagctttaattctttgctctagggtgtgtcaggagagcagagggaatgagggccttgaac

SEQ ID NO: 41508 - DNA, 122 bp, Homo sapiens
tggaatagtttagggctgactccacggtcccactgctattcaaagtctggttcatccctacgagaggaagatgtaccaatgtgaaattctgtgttgctgggaccacgggggacccctgggtg

SEQ ID NO: 41509 - DNA, 122 bp, Homo sapiens
agtccaggtgggagagggcctatgactcggccgagtccagatgcgagaggggctatgactcggccgagtccaggtgggagaggggctatgactcggccgagtccaggtgcgagaggggctat

SEQ ID NO: 41510 - DNA, 122 bp, Homo sapiens
ccataaaatattaattttcgcagctttcttatattttagaactaacaatggaaatttgttcgggtctaaagtatttcagaggtccttgaaaacccatgcctacatacctgatggaaaaagca

SEQ ID NO: 41511 - DNA, 122 bp, Homo sapiens
cattggggatcagtcccattaaaactttacacccaagtgtcctggttaacttgaagcagccgagatgggcacacacgggtctttgcctccccctccttccctagcaggctccccatgcggga

SEQ ID NO: 41512 - DNA, 122 bp, Homo sapiens
gcaggagacaggaagacctgatgctcagaccccgaggagaaactgctgagccgggaagtccgccttcagcagaagtccctgctcctggctcccaagctggcctggttgagggtcatcaggtc

SEQ ID NO: 41513 - DNA, 122 bp, Homo sapiens
atggcatggaaagtgttagcttttcaggagtggcagctctgtagatcaggaagtactctacgggaaaagggtatgtggagagcagttttcaacactgatgggactgccttgttttacaggga

SEQ ID NO: 41514 - DNA, 122 bp, Homo sapiens
cttgagagaacctagcattcaatctgagagcttggcactcgcctcatgttcagggcgtgacgatgtatctcttgcatctgtctgatgcggtccttctgccacatcaggttttgaggcatagg

SEQ ID NO: 41515 - DNA, 122 bp, Homo sapiens
cacagtgaaacagacactgcagcattcagtttgtaaaacagatattccttttgtttgccacgagttgacactgaaaggaaatgtaagagttacacctatatctttagttaatccttaatttt

SEQ ID NO: 41516 - DNA, 122 bp, Homo sapiens
cacgacgggccggaggacactgtgccccgtgaaataagccagtcagaaaaagacagctcccgcaggtccactcgcaagagggccctggagccgtcaggtcccctgaggcagatggcaacgag

SEQ ID NO: 41517 - DNA, 122 bp, Homo sapiens
ggtgttaggaccactcggaagacctgcctgtcggacgcctgactgtggttcccggggggccggagctccaggagcctgtaccatctttatctgaaggggaggagagaaggaaaggagaaggc

SEQ ID NO: 41518 - DNA, 122 bp, Homo sapiens
gggtcttgctgtgttgccaagggtagactacaatgtcatgatcatggctcgctgtaatctcgaactcctggatttcaaagtggtcctctcgcctttgtctcccaaatagctagaactacagg

SEQ ID NO: 41519 - DNA, 122 bp, Homo sapiens
ttgctgctgcgtctaaaccgtcctgagctcacagctgagcccaggaaagggcttggggtgcgcgccagccggcagccaccaggctccccatcccacagtgtggggtcatgcttcccgcccag

SEQ ID NO: 41520 - DNA, 122 bp, Homo sapiens
caccctgacgaggagtggttttcaggcaaggaacttatcacaggagtgagtagtggcacacggtgagtagtgctagctgtcttgtcgttagggtgaggccggtgggagttgtggtttgggga

SEQ ID NO: 41521 - DNA, 122 bp, Homo sapiens
ccgccgcgcccgcctacaaggccctgagggagactgcggagggtgagtgcgcggtgggctcggctgaccgttggccctgcggccggcgccctaggctacctcccttcgcctccccgcgcctc

SEQ ID NO: 41522 - DNA, 122 bp, Homo sapiens
ggtcggccgtcgcccctcggctaccggcgggatccagaaaccgggagtcaccaccaataccgttctcaactttacttccagctggtcactactgtgtcgggagattctaccttcttttccga

SEQ ID NO: 41523 - DNA, 122 bp, Homo sapiens
gcagtgccagcggcggcgcggcagggggcgcggttacccgtggtttttcgcgttggacgacgggctctgagggccaagttcttgtcacgaatttagtttgtttcagagcggcaggactcgta

SEQ ID NO: 41524 - DNA, 122 bp, Homo sapiens
aattatctttaaattctgtttctacctcctagataggtcttagatcaatcttttccactacgtccatgactttaggtcaagccactaccatctctcacccaaattactgtcatagactccca

SEQ ID NO: 41525 - DNA, 122 bp, Homo sapiens
agcatgaccaccccctctgcaaaacacaaacaccagcacaggagggacctttatgaacaccggatgagtctgatggtcacgtggccacatgcacccttggctagatcaccatccaggccaca

SEQ ID NO: 41526 - DNA, 122 bp, Homo sapiens
ctgggaggcaggcaggcccagcacgctgtagacagagatgtccttcgtggagccataggccgcactgattttgatgaagcactgaaacacagggcaggcatagggggagagtgaggccagcc

SEQ ID NO: 41527 - DNA, 122 bp, Homo sapiens
aactccaggtctttggcatatatatatcttaaagtatttcttgaatttccttgtaattcgcgccaagagaaagggacttttgccatggctgccagcttggaagaggatggcctgattacatt

SEQ ID NO: 41528 - DNA, 122 bp, Homo sapiens
tggatgtggtatttcctttttttcttaggtggattaagagctgttttgtcgggccggacgcgacaaaacagggatcacgcctgtaatcccagcactttgggaggccgaggcgggcggatcac

SEQ ID NO: 41529 - DNA, 122 bp, Homo sapiens
gtcagcacactgggaaaccgggccagcgtggggctccctgccttctggactcctgaaggtcgtggatggatggaaggcacacagcccgtgccggctgatgggacgagggtcaggcatcctgt

SEQ ID NO: 41530 - DNA, 122 bp, Homo sapiens
acttggttcccacctccaccttcttagtctgcctgccctgctttccatcttcttggaattcgccttgctgccgccccgcgcccacccccgcgcccacccctgcccctgcaccgtcccatgcc

SEQ ID NO: 41531 - DNA, 122 bp, Homo sapiens
actcagagaggcgggaagaacgcacttaaaagtgacgagcttcctaacctcctccagttccgaagtttccccgtgagctcatcgctactgcccactgaatgcttcgttttgcaaacagaaac

SEQ ID NO: 41532 - DNA, 122 bp, Homo sapiens
gaggcgaccgtcggggatgctcacagttggacagtttggtcccgaggcatgctgggataccgcgggccggtctccatagtaactggccgacattcgcgcaggccttcggcctgcagggaagg

SEQ ID NO: 41533 - DNA, 122 bp, Homo sapiens
gggccaaggggaggggcgtatgcaaatatgtttatgttaaaattcgggttttgctttccccggatcaaggaaaaagtgttctcccgggcgcctggcgtgcaaggactcgggctccagggggc

SEQ ID NO: 41534 - DNA, 122 bp, Homo sapiens
ggtctcatgtgggagcaggaagggacggaaaagatgccagtgtcccctcctgtcctggcccgtccagcccgtccccggggctggctgcaaagctcacagctgcccctcacacctgaactcca

SEQ ID NO: 41535 - DNA, 122 bp, Homo sapiens
ggtatcagagagagggggccttggaattctagccccgttatctccccatcagggcaccttcgttttcccctccacacccttccttcctctgggggacgcatgtccgtttgcgggccgaggcc

SEQ ID NO: 41536 - DNA, 122 bp, Homo sapiens
tatggaggcagcggtagcccagtgtctgagtggttgccgggtctccatggagaagcggctcgccagtgtcccaggctgctgagctctcgccgcccgagaccccgcggcgcggccgcagggcc

SEQ ID NO: 41537 - DNA, 122 bp, Homo sapiens
ggctatgctggtgctcatggccgtgctgtacgtccacatgctggcccgggcctgccagcacgcccagggcatcgcccggctccacaagaggcagcgcccggtccaccagggctttggcctta

SEQ ID NO: 41538 - DNA, 122 bp, Homo sapiens
gggtcggagtccgggcccactacctgggctggcggtggacctggctgactcatttcggtccggggagctcactttgaggggagttggagtccgcctagccacttaggcctggactcagggtt

SEQ ID NO: 41539 - DNA, 122 bp, Homo sapiens
taaaaacgagagtgttatttctttatttgtgggaaattacggtatctattttcttccaaacgtaataataattcttagaaaatagggactcctttttgcggaataatccatagggggcgagg

SEQ ID NO: 41540 - DNA, 122 bp, Homo sapiens
cggacgttaacgcaggagccagggccgcttcttctgaggtcccctgggaagttccacgcgcggaaccagccccttccagggtgtgagccctggtatgggactcgcttccatgaacacatccg

SEQ ID NO: 41541 - DNA, 122 bp, Homo sapiens
gaggtgcctgctctgcagcccacggcgggcactcgtgttctgacgccaaggtgcttgcaacgtcctgtgagcccgtgccactccgccaccgcgggacgccattgctacaccacctgtgtgtc

SEQ ID NO: 41542 - DNA, 122 bp, Homo sapiens
caatgctgctcccactcctgcggaggttcccagagcaggtccgagtctccctctttcacacgccgcacctccgtgggctgcttcggctcctcatccctgagcgcttcaacgagaccatcggc

SEQ ID NO: 41543 - DNA, 122 bp, Homo sapiens
gctgtaagacgcacggtgtgttttcatgccccgccctgtgcttctgccctcaccatgagacgaacatggtcctcgggagcttcgaatgagacgtggaacatctgtcccaggcacagtcctgc

SEQ ID NO: 41544 - DNA, 122 bp, Homo sapiens
agggaagaccatatgaacacagcaagaaagtggccatctgcaagccaaggagaaaggcctcgggagaaagcaaacctgctgacaccttgatgtccgatgtctggcctccagcactgtaagaa

SEQ ID NO: 41545 - DNA, 122 bp, Homo sapiens
gggcaggagggagaaggaggagccagcggaaggacggtgtgcgggccggccagccctggacgaaagaagagggcccctccaggccagtctgggcaccctgggatagcggctgcaggtaggca

SEQ ID NO: 41546 - DNA, 122 bp, Homo sapiens
tcgtggaggagggaagaagccacgaaggcaactgtcactccagtgggaggcctgccaaagcggaccactggaggcagcagtgtggggtcaatggggacctcagggagaggggagacagcagg

SEQ ID NO: 41547 - DNA, 122 bp, Homo sapiens
ggctcacaccctccctgctgaaagcccttccagtacatccagtggttttcttcccacttccggggttaattgtgaggctggcattttctgtctgggtcatttgtacccctagattcagcccc

SEQ ID NO: 41548 - DNA, 122 bp, Homo sapiens
ctctgctggctctggcgcctgggactctaatccccctcaagcctctgggctgggcaggcacgagcaagtataagccgttccctggcgtgtgcaggcagctctgggagggacacggttggaac

SEQ ID NO: 41549 - DNA, 122 bp, Homo sapiens
taaaggggtggagagaagacagtttttttcaagcttgattgggcaaaactcatgtcactccggggacgtacaacctatgaatagtcggctgccgctcaaagagaacgaagaggcggggctag

SEQ ID NO: 41550 - DNA, 122 bp, Homo sapiens
gaaggagagaagccagtgtttcttttggagcccagcgagtgagaaactgggggcagaacccgaggccatgcctacctccagaggaaccagtcaagaggaggaggggtggtcagagaggtgtc

SEQ ID NO: 41551 - DNA, 122 bp, Homo sapiens
tgcgtccagggttcaagcgattcccctgcctcagcctcctgtattagctgggactacaggcgcacaccaccacgcgcagctaatttttttgtattttagtagagaaggtttcacgatgttgg

SEQ ID NO: 41552 - DNA, 122 bp, Homo sapiens
tgctctgggacagatgggcaagctccgctcttggggccggaagcgtgtagcgtctccacccgggctccaatccccagcctcgcactcagcaccaggcagagttcagcctcccgccgcaagct

SEQ ID NO: 41553 - DNA, 122 bp, Homo sapiens
accagccagctcctgttggagacagattgggagtccattttgcagatctgcgacctgatccgccaaggggacacacagtgagttagcggggcctgtgccctgatgcggaggagcagccgtgc

SEQ ID NO: 41554 - DNA, 122 bp, Homo sapiens
cccagggcatccccggtttggcctcaatctttgaatcgtgtgaagcgatcggaaggagctcggccgtcgcctcaagtgggccgccttccggtgggctcccttcctgtgggccgcttgcatgc

SEQ ID NO: 41555 - DNA, 122 bp, Homo sapiens
ctgcagcgaaagcaacccagatggacgcgggaactgacgcaccggcacagaggatcagcgcgccctcaagccgactcccgggccggcccctcgctgccctcccgcaacctcctccctcccag

SEQ ID NO: 41556 - DNA, 122 bp, Homo sapiens
ttgtagttaggggaatagaaagaaccaagttggacattacgcatggaagaaaagcaaacccgccttttggtaaacggtgtctggcattccagcagaatcttggtttgcatccttaccaggaa

SEQ ID NO: 41557 - DNA, 122 bp, Homo sapiens
ttaccgtggtggggagaaagcgcaggtacctcctagatactctctctcccaccccacctccggcggccaacggccaagcaaacctccagccaagatttggggtatgtgggcagggctccggc

SEQ ID NO: 41558 - DNA, 122 bp, Homo sapiens
cattatagatttatcccttctttcatctcatgctacaaaagcagttcttgtatttttacccgacttgtgattttctactgggaatgtttgtttgtgatggttagcagggtgctgagagggaa

SEQ ID NO: 41559 - DNA, 122 bp, Homo sapiens
atgaccccaaaaaccaaaatttccacgggcggccaatgggcgcagggcgcggtgtatgcccgctcctcctcctgttttcttcgaattcgttcttcgaggtcagccctacgcccaaggatgat

SEQ ID NO: 41560 - DNA, 122 bp, Homo sapiens
ctcgctgctgcagctcatccaggagcaggtgcgtcggggggtggtctggggagctggcaccgcccccaatgcggccctcctgccgctgagctgagcttgtgcgggaccgagctccccgaaag

SEQ ID NO: 41561 - DNA, 122 bp, Homo sapiens
tatttatgctccatgggaggtggtaacctgtggggatcagcacactcagcaagcggtccccgcgcattagaggtgaatcagacacttgaacatctgtccacttcatggaagacgtttcatct

SEQ ID NO: 41562 - DNA, 122 bp, Homo sapiens
gcgacagcttccacccgcctcaggcagtatcagccgcgccgcagtcggaggaaatagacgcggggcctgaggctcctggacttgaggtattaggctggtgcagaagtaattgcggcggccgg

SEQ ID NO: 41563 - DNA, 122 bp, Homo sapiens
ctcgccaagccgttgccttggagaccgaggttagcctgaatctctgcaggggcctcgcgccgaaggctggggtgggagagcgcatgcgtgcctggggccttagccagaggtcgggcagggcc

SEQ ID NO: 41564 - DNA, 122 bp, Homo sapiens
cagtacctggcaattgtgaagcagccctgccctgtggccggagcctggattggcccctctcgaacccagacaccccactagtctgctagttttgctagagtgtctcgtgattcattcaaatc

SEQ ID NO: 41565 - DNA, 122 bp, Homo sapiens
atctgaataaataactcttaatccccaactcccaagtcagtttctgtgccacaaaggccccgcccctgcccttccctgacacgcccctccaatgaggccttgttccgcctggccacgcccgt

SEQ ID NO: 41566 - DNA, 122 bp, Homo sapiens
gtccccgggttctcgtcctaggagcccgtttaaatgaacaaatgccgtttctcccttctgcgctctcagaggcgacctggcagggaaggaaaactttagggttcccccttctcgtggcctga

SEQ ID NO: 41567 - DNA, 122 bp, Homo sapiens
ctcccacagaggtgggcccggtggtttggtccggcctggcctactggaccagcctgtgctcggtcggccacggctctgctgggctcctggcgccgcctcctcccagcccgccgcgggctgcg

SEQ ID NO: 41568 - DNA, 122 bp, Homo sapiens
tggagacgcagaagaattcattcactcactcattcactcattcactcattcattcccaggcggagagacggtggccacggagcaggcaaagggaccagctgtggggccgggaccggagcttc

SEQ ID NO: 41569 - DNA, 122 bp, Homo sapiens
ggctggcagcggggatctgtgtctccaaggaaagtttgccccgagcccttcccggcccggcgtagggttctccggaaaccatcactcacatctagcacttggaggcctccagggacagcggt

SEQ ID NO: 41570 - DNA, 122 bp, Homo sapiens
aggcctcgcgctgccgcaccgccccgaatctgacttccaggcacgggcacgcggtgcagtcgggcaggcttcagaagagcccccagctctcccagaggtggccttaggtcactctcaaaaag

SEQ ID NO: 41571 - DNA, 122 bp, Homo sapiens
gacgcgcggtgcggagggagagagacgggcgccaaggagaggcttccgagggggtccccgcggctggagagaggccctgcctgtgtggatagcgccccattacccccagctccacccctccg

SEQ ID NO: 41572 - DNA, 122 bp, Homo sapiens
ctcaagcaattctcctgcctcagccttcagagtagctgggactacaggaccatgccaccacggctggctggtagttgagccttttgatgcaaagtttcctcatctgtaaactaggaattacc

SEQ ID NO: 41573 - DNA, 122 bp, Homo sapiens
agcgtgtctgagaagaaacggtgaagaaatccaccctggctgtctgtcgggcagccccggcgaggagttgagtccccttaccgctgcgaatgagctgtcctccaccccacgtcggagacctc

SEQ ID NO: 41574 - DNA, 122 bp, Homo sapiens
tggtggcctccccagcgcattgtgagatcccggacaccctcgggcatccacccggctgagcgggccctgcccaggatgtggacaaagccccagataacacacacaaagttttctggaggctc

SEQ ID NO: 41575 - DNA, 122 bp, Homo sapiens
gaccccttctttcaaacagatccttttgtctttgtcttcatttctgccttcgttctccttcgtttggtccagaagcaaccgtgacaagtggtgcccgaccagggacctgaacgaggaaggtc

SEQ ID NO: 41576 - DNA, 122 bp, Homo sapiens
ccagacggcggtgctcggccgtgcccggtccctgccctccccattctccgctccccaccgcgcccagctgcgccgacgcccccgtccgcccccacaccacccctgccttcacgtcctacctg

SEQ ID NO: 41577 - DNA, 122 bp, Homo sapiens
gtcgccggtttcagtggtggccccactggaagccgagttcaggagcggctaagcggtcgccggggaaagcaccggggcttcccagggtcccctccgagttcccactccgcacctccgagggc

SEQ ID NO: 41578 - DNA, 122 bp, Homo sapiens
tccagcccaaacaaacgctccacgggactccgtgcacggctgcaccgccagggcttcaggcgcacagcacaatctggggacgcaggactcttggtgccacagtccccgcctcgccctggagc

SEQ ID NO: 41579 - DNA, 122 bp, Homo sapiens
agaaatatgccacccagatattattcaaaacctcacatgtggtaggaaataagttggtttcgcagtaccaatttttttcccccaccagtaatgacaacttgccttacttgtaaagaaagccc

SEQ ID NO: 41580 - DNA, 122 bp, Homo sapiens
agatagcgaattggaggaggcacaagggatagtggatagcaggaagatggtagtgcagaccgggtcaaagatgaatatttgcatgtagggcagtgattgagggcatggaggtgagttgtttt

SEQ ID NO: 41581 - DNA, 122 bp, Homo sapiens
agtcaaaacactaatgagttgtccatgaagccaactgctaagaacgcgctcaactatacgcgacatgaagacactatgcacgaagccttacttggcgagtctgaatttctattaactaaggg

SEQ ID NO: 41582 - DNA, 122 bp, Homo sapiens
gtttcaggtttctggcgaggccggtgttcggctggcggctagctgggactagcggaacggcggagtctcgattggcagtgcctggacaggcgcaagggccggcgcgggctccgggcgctccc

SEQ ID NO: 41583 - DNA, 122 bp, Homo sapiens
gcaggagggaactatggtggcggcggcacaggaggcagcagcagtggcgggaagcggagccgcgatcgggggctgaaccgagtctggaggcaccaaaaggggcagcgccgagtcggaggggg

SEQ ID NO: 41584 - DNA, 122 bp, Homo sapiens
acctcaagtgatccacccgcctcggcctcccagagtgctgagattacaggcgtgagccgccgcacccggccgcaatctgtcttaacaaacactctaggggattctgatgctcaccaaagtgt

SEQ ID NO: 41585 - DNA, 122 bp, Homo sapiens
gcaggaatgatgcagctggggcaaacactcaaagaagaaagacagcacaagcccgtggtccggtttcattaatcctttgaactcggtcctgagtaattgctgtctgcctgctctgtggcaga

SEQ ID NO: 41586 - DNA, 122 bp, Homo sapiens
ttaagatcccaggagctgcggtgaggagtgaggctgaggggcccctttcatctgatgcagcgactccgctttcctccggcggctctgtctatggctgagctctttgatcctttgagagatgg

SEQ ID NO: 41587 - DNA, 122 bp, Homo sapiens
tggctacagaaaaaaaaaatccaacatctttacattcaaatcccaaagatataaacctgacgtctaaattaatacgtgcttagtgcaaaactgggcaattattccacatttgcaagacagta

SEQ ID NO: 41588 - DNA, 122 bp, Homo sapiens
tgcccaggcacatgcagcagcagtggggctgcaggcaggcccccagggtaggaagcaaggcgggtgggaggcagggcctggcctctgggcagttttgtagccgggcccctcaggccctcaca

SEQ ID NO: 41589 - DNA, 122 bp, Homo sapiens
cccctgcgtctcacccaccgcacccgccgtgcgggatccctgtgtctcacccgccgcacccggctcatgggagttgggagcagctgtgcctgttaagcaccagtatttaaaacagcacacca

SEQ ID NO: 41590 - DNA, 122 bp, Homo sapiens
gttcatctcactggtcccttgcttgtgagtcatttagttattcaacaaattccagcaggacggcaaccttcaggatgtaagcccggatctgttctgtttacccacagctctccagcactggc

SEQ ID NO: 41591 - DNA, 122 bp, Homo sapiens
cactgtatgaagcgtctgtgtttgaatctgctgctctgggatcagctgttctgcaagtgacggctctggacaaagacaaaggagaaaatgcagaactcatatataccatagaagcaggtgag

SEQ ID NO: 41592 - DNA, 122 bp, Homo sapiens
tcggcgctaactcaacagtgcatgtgcccctgggtgtgggggacagggttctggggccagcgatctggaaagaggcacgttctgaatttgtgttgttgctcgtccaaacattgcacactcgc

SEQ ID NO: 41593 - DNA, 122 bp, Homo sapiens
tgtgctcttttccgacaggatcagcaacgctaccacgaagacattttcgggctcacgctgcgcacccaggaggtgacaagccgcatacgcacccagagcttttccttgcaggagcgtcagtt

SEQ ID NO: 41594 - DNA, 122 bp, Homo sapiens
aaggccgtagtgactggctaattcagaccgaatggctgcgcggtgatggatgcggatttacggcctccttggctgcggcgcgctgggcctgattatcactataaacaggcgtccgcggaggg

SEQ ID NO: 41595 - DNA, 122 bp, Homo sapiens
tgctagcaggaacagcaatgaatgtccgggtgaaggctcgcaaagaatcccgggactttccgtccactgcaataagaacagcaacaacaccttagggtcactagtgctttatgtttacaaac

SEQ ID NO: 41596 - DNA, 122 bp, Homo sapiens
ccagggccttccgggtctcaggcttcgggacctggggagccaccctgtttggtgaccactcgtcctcggccttttcaacacaagggctttggagttgtgatgggctgttatcgggtgattcc

SEQ ID NO: 41597 - DNA, 122 bp, Homo sapiens
tccccttcatatatacatctatcctattagttctgtccctctagagaacgctgactaagacggggggcagtgagattctttagatatcttttacatccgtggttctcaaacttcaacatgca

SEQ ID NO: 41598 - DNA, 122 bp, Homo sapiens
gcaaaagaacaaacactccccactatggaagacgacccgaggtggttgccaatactggctcgggcagccagcttttattctcttatctggccccacccacatcctgctgattggtagagccg

SEQ ID NO: 41599 - DNA, 122 bp, Homo sapiens
tgccgcgctggcctcggtgggacagctgcacctggcctggcatgagggcctggaccagtgcgacccgggctggctggccgacggcagcgtgcgctacccgatccagacgccgcgccggcgct

SEQ ID NO: 41600 - DNA, 122 bp, Homo sapiens
tcactgctgtgtatcagttactaggtgtgggtttccttttgcaccagcttgtctgccttccgagtgatgaaacgaagctttccccaaggagagaacccaacattatttcctcctgcctggtc

SEQ ID NO: 41601 - DNA, 122 bp, Homo sapiens
tgaaatttatacatttacctctttgaactcagaaagtatcagaggactgcaacataaaaccgccccatacaagagggccccggcctcgaagacaagggtcttgccccacgctcgcctccctc

SEQ ID NO: 41602 - DNA, 122 bp, Homo sapiens
ctccccgcccccttgcaggagggaggcgccctggagtctcccctccagcgagaggggctgcgcgggccgggccgggccgggctgggctggagcagcggcggccgcgggagccgagcttgcag

SEQ ID NO: 41603 - DNA, 122 bp, Homo sapiens
ggcggggtcccggggagggggcttctcggaaactcgcctacccgagcggattgggagaagcgctctcccacctagcaagcgctttacatcagagcttccagaggatgaagggagggggaaat

SEQ ID NO: 41604 - DNA, 122 bp, Homo sapiens
agtttatgtttgactttgatggtgatgagattttccatgtggatatggcaaagaaggagacggtctggcggcttgaagaatttggacgatttgccagctttgaggctcaaggtgcattggcc

SEQ ID NO: 41605 - DNA, 122 bp, Homo sapiens
tggaacctacacatagatcattggaggagataagaaagacaaaaaatagatccaagtaaacgtgagaatttagcacgataaagagagcagaatcaattagtggaaataaggtgaattattca

SEQ ID NO: 41606 - DNA, 122 bp, Homo sapiens
tccggcttacccagggcaacctgacaccagagggagcatcaggaggctgaccaagagccccgccaggttcaccagcgtctcctggaaaatggcagagggagaaggagttggaaggtgcccct

SEQ ID NO: 41607 - DNA, 122 bp, Homo sapiens
cattctcccaaaacccagcacttgtataaaaatgatagctaggccgggcgaggtgcttcacgcttgtaatcccagcactttgggaggccgaggcgggcggatcacctgaggtcgggagtttg

SEQ ID NO: 41608 - DNA, 122 bp, Homo sapiens
tggggcggtgccctagcccgagccgccccgtccgcccgcgcgtcccgccccgcgggctcccggtggctgcttcccgtccgctgtcctctgctgccagtcccctgccccgggcaaagcccatc

SEQ ID NO: 41609 - DNA, 122 bp, Homo sapiens
gccgactcgagtttcttgaggtcctcggactggggggaggccgcctgggactcggagatccgctgggtggacgcggaggacgagccagcggagctacccggccccaacttccttcacacaca

SEQ ID NO: 41610 - DNA, 122 bp, Homo sapiens
ctcgagtgtcgggcaaatgccagggcagtccctggccctgtgtgatgggatgcagactctcgggtcctgtccaaggattgccaattatgcgtccaaccctcctcagatctctctaaaggaaa

SEQ ID NO: 41611 - DNA, 122 bp, Homo sapiens
tcccctcttcagactctatggctaatgacagagcttttcagatttggtggaaatgctctccggggcggggagcagacggggaaggctgccccagctaatctccgcagccagtaccctcgaag

SEQ ID NO: 41612 - DNA, 122 bp, Homo sapiens
ctgcctgaccccacccccagcctttcagggctgctggactggggcatgagagtggggtggcgctgggctcgctgggtggcagctttggggacagcggtgcctgttggtataacagcctacag

SEQ ID NO: 41613 - DNA, 122 bp, Homo sapiens
tattttaaacaggtgagtaaagtaacatctcactgatataatttatttagctaacttctacggttgaacatatataccagcagctcttaacagaggtgattttgccccctagaggacactgg

SEQ ID NO: 41614 - DNA, 122 bp, Homo sapiens
ggtttcggaggtgagggacgggggtggcggggaggattccgtaccgtagggatcggagaccggaaactgctttctggagccgaagagagtcggaagaacaagaggttttccgtttgggttgg

SEQ ID NO: 41615 - DNA, 122 bp, Homo sapiens
gggccgtagcggccgccactctgttgcctgcccctgacgcccaccaggaaaccccgaacccgaaaccccacagaccagccggaagtccggtcccgcccgcttcctgtgcgtcagcgcggccg

SEQ ID NO: 41616 - DNA, 122 bp, Homo sapiens
gcggcggggtccacggacaccagaggaggaaccgccaaggtttttccaaaggacaagcggcgcggcggtcctcctagctcctcggcccgcgcgccacccgggaggccgaaccggccccagcc

SEQ ID NO: 41617 - DNA, 122 bp, Homo sapiens
caatgtctgtctgacccctaggtcaaaattcgcatcctactgattgaaggccttgggtctcgagccttttggttgcaggtgtggggatggtttccaggtctggaggctgccaactatgacaa

SEQ ID NO: 41618 - DNA, 122 bp, Homo sapiens
tgttctgcgattgaaaccagcaggttcctgaagcttctggactcaatttccccatctgtgcggttgtgttttgcagtgccacctctgctactgaggaatgccgagaggctttacttgctatt

SEQ ID NO: 41619 - DNA, 122 bp, Homo sapiens
agggagaattcaggtgccacagtggccattctccggtgaccggagcgtgttactcagaaacggatccgtcagaggccaatgggagctgccggccttcagggcgcgcctggtggcgccgagca

SEQ ID NO: 41620 - DNA, 122 bp, Homo sapiens
ggctgaactcacttttataacaaatccagtctcgtgataatgaaccctgtcctgtgataacgatgttaatgcattcatgagggcagatccctcatgatgtaatcactcttcaaggtcccatt

SEQ ID NO: 41621 - DNA, 122 bp, Homo sapiens
ccaagagagccagaccggggccagcagtgcagcaggagctgcaccaaggagctgccctgtcgaggagaagtctagaaactacagccaaggactggccctgaatatctcattccggaagcaat

SEQ ID NO: 41622 - DNA, 122 bp, Homo sapiens
ctgtgactggtctgatccctggggggcactcctgggatagaaacctaccccaccagtcggcggtggcaaagccctggaaactcacagacctgtcctgggcctgggcctccacaagcctccca

SEQ ID NO: 41623 - DNA, 122 bp, Homo sapiens
atacaacaaaatctgaataagcattgatctgcctttgaaaatactttgtgatttatacaacgccttgaggttagctttccaaatattgattcttgatggatagaaaaagaccagaagatgga

SEQ ID NO: 41624 - DNA, 122 bp, Homo sapiens
agttcacccctggcaagtcttgttccagttcaggatgtgtcttcatttcctaacgcagcacggcaaagctaaaagttccattcaaattgtaaaaaaagggaaggaagaaataaaataaaata

SEQ ID NO: 41625 - DNA, 122 bp, Homo sapiens
gaggcacatttcttccagcatgtgggaacttgaggggcaattctctttctgattctacagcggatgttgtgtagcgttcacccactctagggcaatagggactttctttggtgacttcccag

SEQ ID NO: 41626 - DNA, 122 bp, Homo sapiens
ggacttgatgtacccactatatattggtcccgaatgtgctgagttcagcaaatgtcttgacgctaagtcatcaccataactgcttagaaacccagaggaactcgggtgaagttaaataaata

SEQ ID NO: 41627 - DNA, 122 bp, Homo sapiens
aggtggtatcttcagcgcaggctgccactcagcccccctccagggatctggggcagaaggcgaatatcccagagtctcagagtccacaggagttactctgaagggcgaggcgcgggctgcat

SEQ ID NO: 41628 - DNA, 122 bp, Homo sapiens
tagcctccttttgccttcggtgcagcggattagctggtgccgggactgagttaatggaaacgcgggttaaatgagaaaagacgcccggattttcctgcctggatgcgcggctcggaggagga

SEQ ID NO: 41629 - DNA, 122 bp, Homo sapiens
ctgccccgcgcagcagctgaaaaaaacacactcctggggcatccttccctggcgttggttcgtggacagcaagcctcccagaactggcctaggtcgggaaggtgcagccacgcgggaatcaa

SEQ ID NO: 41630 - DNA, 122 bp, Homo sapiens
tgctattctaagcctgaaaagcatgtcctggctatagtgttatgttggtattaagcacaacgccagactgatgtgctgaacaaaagtgatcaaagtcagagtaatgttagccattgcacaag

SEQ ID NO: 41631 - DNA, 122 bp, Homo sapiens
agcaaaatatatatagtcagtggcttggagatgcttggagaaaggttggtgaaaagtgaacgtctcctggagtaacagtgacaaggaagcagagaaagacgggaagagggtgggagagccag

SEQ ID NO: 41632 - DNA, 122 bp, Homo sapiens
ggatgaagggacttttaagtttgctgaaataaactggaaatagattagcaggagagaaggcgtacaaatttattaacatgcagatgtgcacaggatccacacaaaatgggaagactcaaaga

SEQ ID NO: 41633 - DNA, 122 bp, Homo sapiens
gctctgtgtcgggacggaaacaatggggtcatttggtggactcagaaaaggaactctaaacggagggaggaaagtagcagagcctcagtgagagcagctgcccctccatcccgtcagcacct

SEQ ID NO: 41634 - DNA, 122 bp, Homo sapiens
gtatccaaattgcaagacaaggtcctctttacacttccctcttcttacagaactgtgagccgcattgcctggagttggggaaggggtgatgcaagcactcccttggccactccagctggtgt

SEQ ID NO: 41635 - DNA, 122 bp, Homo sapiens
ccctgccccacccccacttgggccccagctgcaggaggccctgtggagtgtaattcccctcgccctctctctgccctgggcccgtccggacagattaagcctttgtcacacacacccagaaa

SEQ ID NO: 41636 - DNA, 122 bp, Homo sapiens
tgacaacttgaagaagctgttccggagcttggccatgaccaagcccgaccggcagttaatcgcccaggtcatgctgtactcacagggtttccgcactgctgaagtgcttgccaacaaaatcg

SEQ ID NO: 41637 - DNA, 122 bp, Homo sapiens
cgcagcgtgcgcggcaagactgtagaaatagcccctgacactcttgcaggtttacctcagcgattcttcccgcactatacccagaggctttcttaattggccctccgagggggtcggggtgt

SEQ ID NO: 41638 - DNA, 122 bp, Homo sapiens
attttgctaattaattttggggggacacattgagcaagtccgcccaggtgcatgttcccacggtcccattccagtgggcagttgaatgcacacgtatgcatgaagggcgtgggtagtgaact

SEQ ID NO: 41639 - DNA, 122 bp, Homo sapiens
tgcaaacaaaaactcacacaagcatgaaatgtggtcatttgcccaacctgaccatgggcacggagaattattgttatactttaaatggaacataatatttaatacagataaatacctgtttg

SEQ ID NO: 41640 - DNA, 122 bp, Homo sapiens
catctggctgtccgtggtgttcgtcttccgggtgctggtatacgtggtggctgcagagcgcgtgtggggggatgagcagaaggactttgactgcaacaccaagcagcccggctgcaccaacg

SEQ ID NO: 41641 - DNA, 122 bp, Homo sapiens
ttctctgattccgtggcattctacccggtccacgcaaggcctccagttcttttaaaacctcgcgccccctccccacggccccccgggatagaatgggcaacctgattggaggggcttgagga

SEQ ID NO: 41642 - DNA, 122 bp, Homo sapiens
atgcctggctaatttttaattttttttttttttggtagagacaaagtgttgctatgttgtcgagactggtctggaactcctggaatcaagcaatcctcctgcctgggcctcccaaaattctg

SEQ ID NO: 41643 - DNA, 122 bp, Homo sapiens
cctttctctgagaggcagggctaggactggggaaaatgggaattgctgaagagcctctgccgggccctccacttggcaggacatttgtttttgagtgttggggccccaaggcctgcagtcac

SEQ ID NO: 41644 - DNA, 122 bp, Homo sapiens
ctgaagatgaaggcccaggcagcagagcccaacaggggtggcccaggtggcagggggtgccggcgcctggacgacctgccatgggacagccttctctttcaagagtcgtcctccgggggcgg

SEQ ID NO: 41645 - DNA, 122 bp, Homo sapiens
tgcggggccgaacccaggccagaggcaacccagctaccctcgcatgtggccaactctccccggcccgctgggtttggctagcccttcatctggtcaggcacattcacagagtcgcctttgtg

SEQ ID NO: 41646 - DNA, 122 bp, Homo sapiens
cctaccacttccgggcccccagccgcatcttctggccgacagtgcgaggcatacatgctgcgccacaagaccaagcgaggccatgcctccctggactgcctcaaggtgtttgacggcatccc

SEQ ID NO: 41647 - DNA, 122 bp, Homo sapiens
ggacccggggccggggctcagggacccgagagatgccgggacaggggccgggacccggagcgccgcagccccgggcgccggaggagagcagcagccgcaggcaccagagcctctcggagcgc

SEQ ID NO: 41648 - DNA, 122 bp, Homo sapiens
cgagagcaacaatctgcatcaccagaaaggcaacttctctaccctacacttgcagacttccgcgagtccgggagcactcaacgcagtcacccgcgcttccgcgtcccggactagggaaactg

SEQ ID NO: 41649 - DNA, 122 bp, Homo sapiens
gctacctaaatatccaattaatatttgaaaaggtgtttccttactaatttcatcagtaatcgggggatgaaaagcaaaaacattactacgcactctgcaaatggactcagatgtgaaagact

SEQ ID NO: 41650 - DNA, 122 bp, Homo sapiens
cggtctgtggggaagacgacagcagtgaggcggactccccgagctcctctgaggaggaaccggaggtctgcgaggacctggcaggcaatgcagcctctccctgaagccccccagaaggccga

SEQ ID NO: 41651 - DNA, 122 bp, Homo sapiens
tcctccacctgcgtctctgcttgcgccatttcctccagcctggagtgtctccgcccttcccgcctcccgtctccgagcttcttaaacacaggccttgggcctacggctctgggggtacttgg

SEQ ID NO: 41652 - DNA, 122 bp, Homo sapiens
ggtggtggacgcctgggctgggccagcccaggtccctgaggagggggccgtgacagtgaccgtgggagggtccgggggcgacaagggctctgggttccccgatggggaggggtctagccgtc

SEQ ID NO: 41653 - DNA, 122 bp, Homo sapiens
ggatgcggtggccacggctgcgtggcacccccaggccatggccaggagaccctcgggcggcgcaggtgccggaagcagcgccatccgtgctatggacgggtccccccaattggcagcggtct

SEQ ID NO: 41654 - DNA, 122 bp, Homo sapiens
aaaaaaaaaaaggatgcccctggatgaggcaccacattgatcctgtggcttcgagtatcccggtcagcaacacaaagccgcagccaaggattccagaacaggacggtttctaagacctctgg

SEQ ID NO: 41655 - DNA, 122 bp, Homo sapiens
tggtcaggctggtcgcaggtgatccacccgccttggcctcccaaagtgcatgagccaccacgcctggctgtaactagacttactagttgtaatctggttacagatttactgtaagtcatcca

SEQ ID NO: 41656 - DNA, 122 bp, Homo sapiens
atgaggagtttgcagaccatgacaacaacatcaagtgagtccacttggatgccccctgcacgaggcacgactccccctcctcgctgctgaagtcccatgggggcagctcccttagtccttgc

SEQ ID NO: 41657 - DNA, 122 bp, Homo sapiens
cgtgggggctgggaggctggagaaactgaagccacagaccaggtgccccgcaaccccgggcggggatgtctgtctcccaggcccccacaccggccgcatccgtccaagttgcggctggggtt

SEQ ID NO: 41658 - DNA, 122 bp, Homo sapiens
caggcagccccccaacattcaggtcctttttccactgaaagccatgtggcctcagagcggcgtcaccccgaagcttgtcccagccggggcctgacagcaggtaaaggctgactagcaactct

SEQ ID NO: 41659 - DNA, 122 bp, Homo sapiens
actgtaaacccctctgtcaaggtgacactctcccctgactattcaggagggagaagcaatcgccccaggacagagacggggacatcccaggagcagggtacaggctctagcaatatccatct

SEQ ID NO: 41660 - DNA, 122 bp, Homo sapiens
gaaggagcttcacactgcagcatatcatattgctttcattgctacacccacaattgggttcgaagagagtgtgctcgtgtttgcattctgtaagttcttagcttaatccctcccctatctgt

SEQ ID NO: 41661 - DNA, 122 bp, Homo sapiens
ataaggggaaggagcaactgcctgcacacccacctcattgagaagctagggctgtgcacgcgctgttagatgtcagtgataataatcacaagagcagctaacacagaggatttaccctgccc

SEQ ID NO: 41662 - DNA, 122 bp, Homo sapiens
atctccagttggatattcttaggcatcatctcatccttgccagtctctgcaaaatatggtcgacaaaaataaataccaccttcttaaataccacccagctgtccaagatggagacttcctgg

SEQ ID NO: 41663 - DNA, 122 bp, Homo sapiens
cgtgaaaaaggctattgtttaatctaccccgtccctcgctgaagctatggcaacaaattccgttggtgaattaactatgtcattgtgcactggctcaactgattatgctcctggaatgacaa

SEQ ID NO: 41664 - DNA, 122 bp, Homo sapiens
tctgtctcagcagccagcatcatacgaatctcactctcaaccaagcaggctactgcagtccgcctaaacaatccggagcagcagccaaggcagcacaagaaaacgccggtgccacggaacgc

SEQ ID NO: 41665 - DNA, 122 bp, Homo sapiens
taaaggggagacgggggaagcagctgacaggttattggaagaacaagccccctcgcccctcgaatttctcccacgggtctctgagctcagacatcctagtccgcgcaggcagcccgagccga

SEQ ID NO: 41666 - DNA, 122 bp, Homo sapiens
ggtcgtgggcagcggagagtctgggggctcagccgggtgggtcccgggttctggcctgcacgtccacccgttctccaggcctcacccgtggaaagtgcccacggctgccgctctcgccgcct

SEQ ID NO: 41667 - DNA, 122 bp, Homo sapiens
gcaggacagcagctggctaagtactcaggagttgtgctgctgcctcaagtcaaatctccacggtgccccccactatctgtgcaaccttgggcaggtccccacttgcctcagtttcttcatct

SEQ ID NO: 41668 - DNA, 122 bp, Homo sapiens
catcagtctttctagaagattccaagtgaccaaagtggcttcagcagagtaaaactttcacgaatgaccacaccagtttcagtccacacagactgccatcatgggttcattattcagcccta

SEQ ID NO: 41669 - DNA, 122 bp, Homo sapiens
cacttgtttttcctttttcttttgtaaaaagaagcctttttgcagtgtcattgttgaacccgctgggccccaagggggcatcagtgagtccaaggacccccaaagggtcaatgaaccccctt

SEQ ID NO: 41670 - DNA, 122 bp, Homo sapiens
ggcaggcagagctgggtccagcaggaaacaagggcctgagggtatcgtgctgttagcggacgcgatgctgctttccaagatggctgggcggggatctctgatcagatttcaaagccacgatt

SEQ ID NO: 41671 - DNA, 122 bp, Homo sapiens
cactcccttccccttccaattagtgtaaggcagtgcttcagttggcttcacgtttgaaatcgcttttgaaatctggctcgggaagctgccaggataaaaaaaaaatgaaagccccctggaag

SEQ ID NO: 41672 - DNA, 122 bp, Homo sapiens
tgcatgaggcaggtcccggcggccacgtagcctttgaggcccgacacggtctcctcactgcgcagagacactgtcttcatgcaggtcacatgctcccactcctgcagctcgatcctgtgggg

SEQ ID NO: 41673 - DNA, 122 bp, Homo sapiens
gcagcgccggcggggcgctagtgcgcaggctcggccggtccctccagcccgcagactgcgcgcagggagaccttccccaggttggtcttcccaggtgcctcagccggtgccttcctctgtgg

SEQ ID NO: 41674 - DNA, 122 bp, Homo sapiens
gccaccacagtactcctgcttccctttgtctggcggccccgcgggattggccagagctggcgccgagggactgcagagccacccacccccgtggctcctactgcgcacgcgtgaaaaaagcc

SEQ ID NO: 41675 - DNA, 122 bp, Homo sapiens
agaattttggactacattaaataattctctgcctcagtggttcaagttgcgtaaattatgcgtttacacttttcttcggattacttttaaaatgacaaccactatgttttgctggtctcaat

SEQ ID NO: 41676 - DNA, 122 bp, Homo sapiens
gcccacccaggaccagaaccgctgggcccggtacctgctatgcatgatgacctggagcaccgggacatcggaggcggtctgcgtcatctggtcaatccacggactccccaccctcactgagt

SEQ ID NO: 41677 - DNA, 122 bp, Homo sapiens
attccaccccgcacctgccagcctttcctggagagttgggtgcagggtccctgggattggcgaggtgactgtgaccacgcatttagaattcagttatttgctctgagccatagtcctcgctg

SEQ ID NO: 41678 - DNA, 122 bp, Homo sapiens
cacctccagatgctgtgcaggctgtgtgtgctggctgcagtgctgtgtgccgggcgtggccgtggcttttttctgagtgcagctgatgctcgcagcttctgacagggtgtccatgatcccca

SEQ ID NO: 41679 - DNA, 122 bp, Homo sapiens
tgcgaggccgaccctgcccgtcgatgtactgggtgaggcggatgtaggcgatgcacgctgcgtcctccccaatcacgtggacgtgtgggtttaggatggtggtatggataggcttgctgttc

SEQ ID NO: 41680 - DNA, 122 bp, Homo sapiens
agagagaggcctagatgttctgtgtgtgactatctgagcaatgatttaggtgggcagagccgccagcttccagactggcagacccagtttcaggagagacagtatcagagcacggtgcttgc

SEQ ID NO: 41681 - DNA, 122 bp, Homo sapiens
gtcaccaccaggcggcataacagacctctgtgtccctggtctgtaggagatgggacaatgcggggacagcgctgggagggcccgcaggcagcaggatgccagggcctcgccaggaagccatg

SEQ ID NO: 41682 - DNA, 122 bp, Homo sapiens
ttcaagcaattctcctgcctcagcctaccgagtagctgggattacaggcacccatcaccacgcccagctaatttttggtcaggctgtctcaaactcttgatctcaggtgatccacccacctt

SEQ ID NO: 41683 - DNA, 122 bp, Homo sapiens
agtctgtcacttacattacggctcaccctttgtgttgtacattctctgggttttgacaaacgtctaatgtcatgtgtccaccattacagtatcatacagaatagtgttgccaccctaaaaat

SEQ ID NO: 41684 - DNA, 122 bp, Homo sapiens
tggactcattccagcaatgttgtctgcaggccaggtctgccagatgaatccccgccccaccggcaacggattccgcagcccgtggacacactttcttccttcccgttcacgtggctatttct

SEQ ID NO: 41685 - DNA, 122 bp, Homo sapiens
caagggttctgagcttagctcttttgcctccttgcacatgcaaggaaagtagctggcaaacgttttaaggaggatatttatgaatgtttcttgaaggccttttactctagttgaatttttcc

SEQ ID NO: 41686 - DNA, 122 bp, Homo sapiens
ctcaacagccctccttggtcacctatacctccaccgggggaagagggcagagtggaagatcgtagaacagaccagaagtctggcacagtgctgtgctcacagcgggcaccaaacaagcattt

SEQ ID NO: 41687 - DNA, 122 bp, Homo sapiens
tctcttccaagagatagcagttgcatttctggattaaaacactaggaatacggcactcagcgcagtgtttgttgggggcctggtgctgcctggagggcaagtcttcacaccggacatgcaaa

SEQ ID NO: 41688 - DNA, 122 bp, Homo sapiens
cttgggataaggtgtgtggaggagcccacaggctctgcccaatcccagggagtgacgggacgtctttccgattaggggacgagaactccccgatacaaacatagcagtggcatcgcccctcc

SEQ ID NO: 41689 - DNA, 122 bp, Homo sapiens
gagaggagctcattccacgctatatttttgcagttgaaaagctgcctaatcatcgctaaccgcttcccgcataagagttctgggaagacttcagaaacaaggcaaatgaagacttttcactg

SEQ ID NO: 41690 - DNA, 122 bp, Homo sapiens
acacagccaggtttaagaatcactgaccgggtcgtaacagatttaaaggtggtccccacccgctccagttactccaaggctcaaggagaagcgctcatttggatcacgacccggggttcgcc

SEQ ID NO: 41691 - DNA, 122 bp, Homo sapiens
cagggtcgaggagggaggatctcagaagcccgcagcgcccgaggccacgggtgagggatgcgggggaggtgacggcagctggtgaccgcggctggccgagggcgggtacactgacgtgtgga

SEQ ID NO: 41692 - DNA, 122 bp, Homo sapiens
ttggaggcagagcgcatagttttggctccagttctgccctaggtaagtcattcagtgtctcgctgaatgggctgagttttgctttcctgcttctgcacttgaaatgcttattgtaaggagag

SEQ ID NO: 41693 - DNA, 122 bp, Homo sapiens
ggcggcggcggcggcggcactcacccatagtacggatgcgctgcaaactgcacatgctcgcgtctgacaggcgctcgccctgccgcccggcttaactccttgctcgcccgctcgccggcccg

SEQ ID NO: 41694 - DNA, 122 bp, Homo sapiens
actcgagcctttaagcgctcctctaggctcacatgacccagacccacagggcaaaaagtgcgtcgtcgtgtcccaacctcctggtcccagaaacctggccgcatcaagtcagcgcttcccat

SEQ ID NO: 41695 - DNA, 122 bp, Homo sapiens
cacctcgccccctcttcctgggttttaaatgaatagccttggccccgggagccctggcagcgcctcctcctcagcagtctcggccggcagatgggtttctttcctttagccagcgcagactt

SEQ ID NO: 41696 - DNA, 122 bp, Homo sapiens
ctctacttctacgtccctgtttgtgaattgggtgtggtataaccttacttacaacattgccgccagcattaaatgggtgagagtgcatagaacagtgcctgttgcctaatggtactgtgtgt

SEQ ID NO: 41697 - DNA, 122 bp, Homo sapiens
gtttctttgaggcctccgaaggttttggaggtaatgccagaaacttgctcccggctgcgccgaggggagaccagctgaccttctccaccgttgttttatcgcaccaaagccttagcatagag

SEQ ID NO: 41698 - DNA, 122 bp, Homo sapiens
gaggcctgcagcaagctcagagtcaaggccaggaaggttcctggaccaaagaactagctacgccaatcttccatggaggatttagaaagatgctgcaacaatttatcagcttccagaacaat

SEQ ID NO: 41699 - DNA, 122 bp, Homo sapiens
gtggcagaggaaaggcctggggtttgcagtcagaatggggtttgtgctgggctaggtcaccgtgtggctctgggtaagcgctgccttgctctgaaccttagccccttatctgtaaaatgagt

SEQ ID NO: 41700 - DNA, 122 bp, Homo sapiens
gtcgcctcgcagggaacagttgggtggcttccagcttatgccaggagtctcctcctcacccgcacatcgcggggctaggatgggatgtcgtggctgccaaatcctccgaggcaactcctgcc

SEQ ID NO: 41701 - DNA, 122 bp, Homo sapiens
cagaaaccacagattggtgtaaacatttttcttgccacgttttatgatatttatgctttgcgtggatcctcctggtcttatgatgacaaagtgttctgcaggcatctgctgccaagtcatct

SEQ ID NO: 41702 - DNA, 122 bp, Homo sapiens
gccggagcgttttactttaaagtaaggcaatttgctctttgtctcctaatggatggagagcgcatccgagctcccctcctcccgcgtcgcctttgacaaagtgtacaaagccagagcctctt

SEQ ID NO: 41703 - DNA, 122 bp, Homo sapiens
tggcgggcgttgaaacggtcgcgcactgacttgttctcgtcaccctgtggaaaccaaacacgggagtttcatcaggagccccagagaccgctacgggaaggcatgccagcctgggcgatgct

SEQ ID NO: 41704 - DNA, 122 bp, Homo sapiens
tcttggccatgctctggtggatggtggccaggtccttcctcttccacttgtgtgtgcgcacgtgtgtgtgcgtgcgtgtgtgtgtgcgcgctgtgggctgtccgggcctcaccagagttggc

SEQ ID NO: 41705 - DNA, 122 bp, Homo sapiens
gcggctgcgaggctgcctccctaggtgaccgcatctgggtagtaggtgttggcccagtgccggttcctgcaggagtcagattgctgggagcagtaggcagaagaattgcagagagatccgac

SEQ ID NO: 41706 - DNA, 122 bp, Homo sapiens
gcagccggggctgagggcgggtcctcagagccccccgaagtgggagggtcgggctggccgcggggccaatccaggcgcacagggagcgggggcgggggctgggccgagtggggacaggggcg

SEQ ID NO: 41707 - DNA, 122 bp, Homo sapiens
aaggatagaaagaaacaaagtcttctggaactctgggtttctgaatcctgactccttagacgggtgtaaaagatgcagaaacatatttggtaagctgcttgataagaaattgtgaggtttcc

SEQ ID NO: 41708 - DNA, 122 bp, Homo sapiens
agagccagaaccagggtcccacctagagtcctgagatctaggcttggatttcaactctgccgctgcatttcggtgaggccctgagatctctggtcttcaatttgcccttctacactgagcac

SEQ ID NO: 41709 - DNA, 122 bp, Homo sapiens
tggtgattatgaaattcatgctatgactaatccagtggctcaatctatgattatctgacacgatccaagaatccacagtgtaacaggctctatgactccattaaagaaaagtcagtttaatt

SEQ ID NO: 41710 - DNA, 122 bp, Homo sapiens
gagcgctgccccctgctccacggcgcccagtcccatcgaccacccaagggctgaggagtgcgggcccacggcgcaggactggcaggtagctccacctgcatccccggtgtgggatccactgg

SEQ ID NO: 41711 - DNA, 122 bp, Homo sapiens
tttggagggatgtgggaattaataaggacaacgtctatgacatgaccgtggagcggctaccgcgcgggggtagaaattactggagaagagaccagggatcaagaggtggaagagctggatgg

SEQ ID NO: 41712 - DNA, 122 bp, Homo sapiens
ctggtgccacctggacagtgccaggcacaagcggaggggctgtcagctgctggaggtgggcggctttggctgtgcttaagcccagttcagagcagcctgcagcagagtgcccaagtcgcgcg

SEQ ID NO: 41713 - DNA, 122 bp, Homo sapiens
acaacaggtttttccactttggggcctttgtagatgtggatgctccgcatgcttctcctccgctgcagaaggctgtggtcttctgttcatttcgtcaggaaatactctgggaactctccagg

SEQ ID NO: 41714 - DNA, 122 bp, Homo sapiens
ggctcctccgcaccacccccgggctttataataaaagtcgccgttgtttaagagccaggtcggaggcgccgctttctgggcggtgaaagccgaagcgagagcgggcaattcgctgcggcggc

SEQ ID NO: 41715 - DNA, 122 bp, Homo sapiens
tgagaaaccggctgtttttcaactttgtgaaacccaacttttgctgcagccacgaacctacgtgatcccagcggggtcggctttcatttgtctcctctgcccgaaatggatggcccccactt

SEQ ID NO: 41716 - DNA, 122 bp, Homo sapiens
tgggctcagaaaacactgctggagcttcggggtctctctcagagcctccctgctggagaccgcccggagctgcgcggagaggcgggaaatggtgctagcgcacccgggctaggagcgggtgc

SEQ ID NO: 41717 - DNA, 122 bp, Homo sapiens
ccggcagggtgacacaaggcatgtcttccttgcagtttatgggaagtccagtccctctggcgggaatccggaagaccgagttggaggttaaaggggactcctgaaaccgcgtgagccctcca

SEQ ID NO: 41718 - DNA, 122 bp, Homo sapiens
gccaggaaagtccatccttatcaaggaaagaggttttctaatcgctcaggttgagggcaccgtcagcctcattgtggatgatgccagggtaattaatctggtctttgtcaacactggatcgt

SEQ ID NO: 41719 - DNA, 122 bp, Homo sapiens
ggggagaggaacagcagagtcacagggatcctggattcaaacctgcttgcagctctaggacgtgtcaggacggcagtcagctccagacccacgtagtcaccaccaaccctgaccgtgtgaag

SEQ ID NO: 41720 - DNA, 122 bp, Homo sapiens
aaagccgagtagggttctgggccggagccgttcactgagacaggaaccctgggggagatgcgctgtctccctggcgtctcggtgcaaatgcccagagagcggctggaacccctcgaggctgg

SEQ ID NO: 41721 - DNA, 122 bp, Homo sapiens
cattgagatataatttacatataataaaacacacccattttaattgaaccatttagttttcgcaaatgtatacatctgtgtaaccaccaccacaatcatgatgtagaaccttcccaccattc

SEQ ID NO: 41722 - DNA, 122 bp, Homo sapiens
cctcaggcagccacgaggtagacgggctcaggctcgggggtgcggcaagcggcacccgggcgcggcggggcgcagctgtggggaccgcgcaggcgccacgtcagaccccgcccaccccgccg

SEQ ID NO: 41723 - DNA, 122 bp, Homo sapiens
cccaggctggggggctttggggccgtgggggccgaccctggtacctgcgtccgaccgggacgctctgcacctgcagccaggagtcatccacaggaccccgtgggtgtgctgacgatggtcgt

SEQ ID NO: 41724 - DNA, 122 bp, Homo sapiens
cctcccgccggcgcgggtcatgtggatgctgcccgcccattggctgggcccagccttggccgccggggtgcgcgtgatccagcggcctctgccctgcagccggggagggctcagatcctggg

SEQ ID NO: 41725 - DNA, 122 bp, Homo sapiens
tgcggactgccctcgcggggcacccctgcccacccgctgctggcgcccctgcagccctcccggcagcctccgtccactcccccggccagggccaagtctgccttccctggttcagaccggga

SEQ ID NO: 41726 - DNA, 122 bp, Homo sapiens
cttcaaagctctgggaagagttctggaactgcaaaactagcaaaactgcaaaattgtccccgtgagagggcagtagggggccaagcccgggtcttgtctctctgtccatcccagaatggctc

SEQ ID NO: 41727 - DNA, 122 bp, Homo sapiens
aggcgggggcacgtctggagggcgcagcggtggtgactgcagggcccgtgggtccagtggcggggagaggcagggcccgaatggtgatatgtcgcaaggagagaaggggaagtctccgctgg

SEQ ID NO: 41728 - DNA, 122 bp, Homo sapiens
gagagaacatcttgaatgaagccaggaagtcagcgggccagaggttgtacaggggctctgcggttggcgtggctgaggttgaggccacaagttactggggaagttaattgttgacaggagct

SEQ ID NO: 41729 - DNA, 122 bp, Homo sapiens
gcatgttgatgtcctccacgaatgattcatccttgatctggttgtcggcgaagaggaacacggtgctcttggtggccacaccgacctgcagtatgatcttcttaagatcttctcgccagtca

SEQ ID NO: 41730 - DNA, 122 bp, Homo sapiens
ctaggattatatgcgtgaaccaccgcgcctgaccatggaatcagtttttcaatctgtgctcgaggtgttgtgttcttaactatcttctactcctttgcaaagataatctttcttaaacatag

SEQ ID NO: 41731 - DNA, 122 bp, Homo sapiens
aaaaaaaaaaaaaaagtctctcaaaatagtgcgatccatggaggaaaatcagtccaagttcggcaagtatttgtcggtatcctgtatgagctaggccttgggtacttcaagatcaaacaaca

SEQ ID NO: 41732 - DNA, 122 bp, Homo sapiens
tctcccccgaggctggtccctccgcggggacactggccccgcccacaaagcgctgatttccgccgaggatcgctgaacccctaagcccttgacctctttgaaggggtgttgagccctctttg

SEQ ID NO: 41733 - DNA, 122 bp, Homo sapiens
tgacgtggactacataacccagcattcatcacggcaagtggatttccgggtcaagaggtccgcgctgggtacatcaccatggaagcaatcggtttggtcacgtggtgcccttggttacgccc

SEQ ID NO: 41734 - DNA, 122 bp, Homo sapiens
attataggcacatgccaccacatcaggctaatttttctatttttaagagagacgggatttcgccatgttggccaggctagtctcgacccacttacctcaaatgatctgcccacctcggcttc

SEQ ID NO: 41735 - DNA, 122 bp, Homo sapiens
gggaggaacagcagaggatgagcggtgacagtggggtgacacggtgacacagtgacacagcgggctgtgctgggaggaacggcagaggatgagtggtgatgcgtgaggagtgcatcctgcca

SEQ ID NO: 41736 - DNA, 122 bp, Homo sapiens
cacccgggagagtcccaggcgcctttacccaggttcattttcagtttaggccaaaatccccgcgggttgggcggggagggggcggggctagctgggcggggctgactgcggggaccggctag

SEQ ID NO: 41737 - DNA, 122 bp, Homo sapiens
ctttgctctctgccacacttcttgagaaatgaatggacattctagttaacgctttaaccacgggatttgactgatgttaatctctattctctagtccacccagactgtaggtaattggcctg

SEQ ID NO: 41738 - DNA, 122 bp, Homo sapiens
gcgtcgccccattaggttatttttagctgcggggaggggtggaccgagcttccatcatggcgctgtccctaggtccggacttccactccatcagtaaaggcggggagtggggagcgctggat

SEQ ID NO: 41739 - DNA, 122 bp, Homo sapiens
gaagaagtaactcatcaaaaattctgcataatatgctgtcaactcatttgtaatattgcacgtttcctacagaaataatccatctttgtgcagaatgatagaattttgaggtaagtttatta

SEQ ID NO: 41740 - DNA, 122 bp, Homo sapiens
aggggagcacagaggccaaagcagctcttgtctttacttttcagtcacacagcatgttctcgtggccactggccaaaatggcttttttttttttttttgagatggagtctcactcttgttgc

SEQ ID NO: 41741 - DNA, 122 bp, Homo sapiens
actgtgtgcaagggagagtttggcttgctgttggttgcagagttcactgaacgacaacggcgtatttccttcctaggggacaattccttgcctgtttaagctgagcgtgacttgtgtcctga

SEQ ID NO: 41742 - DNA, 122 bp, Homo sapiens
ttatgaaaagctcatggggacaatgcccccaagaaaccagcagtttgcaaatggaaaactcgttttaagaagggatgaggccaggcgtggtggctcagcctgtaatcccagcactttgggag

SEQ ID NO: 41743 - DNA, 122 bp, Homo sapiens
cgactccaagccgggttccacttcaggagaccgggaccgcgatggcagcggtagaggccccgcatggccggaagtcactccccaaagcgctgggccggcagcggtgggacccagggccggcc

SEQ ID NO: 41744 - DNA, 122 bp, Homo sapiens
ctgatgccagcgcggattctgctgtgctggaagcaagcacgttccagtaaaggcggcaagcgctcctcagcctgcatcacggtctaccaaacgacagagtagaataaaatactttaatgttg

SEQ ID NO: 41745 - DNA, 122 bp, Homo sapiens
aacttttgcaaggctacaaatcttgttaatagtgaagctaacgttcagacccaagtggttcggctctagactttgtctcagttactgaattgaactctctgtgcacttacgatgtgtcatac

SEQ ID NO: 41746 - DNA, 122 bp, Homo sapiens
tcacgccactgcactccagcctggaagacagagctagacctgggcgacagagggagactccgtttcaaaaaaaaaggcaatcagctttatcaggaaatcctaggggccagaagcggtggctc

SEQ ID NO: 41747 - DNA, 122 bp, Homo sapiens
cgggggctaactggccccaggcggaggggcttggagcagagacggcagccccatccttcccgcagcaccagcctgagccacagtggggcccatggccccagctggctgggtcgcccctcctc

SEQ ID NO: 41748 - DNA, 122 bp, Homo sapiens
caaaaacaaacaaaaagaccactccgttaaagcaagctttaaaacgagatcccacctgggcgtggtggctcatgcctgtaatcccagcactttgggaggctgaggcgggtggatcacctgaa

SEQ ID NO: 41749 - DNA, 122 bp, Homo sapiens
aaaaaagacataataaagccagattatagaatctttcccctaatggaataaacttaaaatcgctgttaaaagaaaaaaaagtcaaaaatgttaccagagaccaaccaagttaaagagaacat

SEQ ID NO: 41750 - DNA, 122 bp, Homo sapiens
tggttttctttagaaagctgcttggttcctcttctctcaaaggatttggaaggtcttccccgcacaatcaaaggagcagtttgagacacaggggcgacagctggggacagcattagagggac

SEQ ID NO: 41751 - DNA, 122 bp, Homo sapiens
acgctgcagcggagcagagcctctaggcatgccctcatctagagcagctgctgcggaatccggggagcctgcagcactagccgtgcgattccgggcgaggtttttaaactctcacctgtttt

SEQ ID NO: 41752 - DNA, 122 bp, Homo sapiens
tggctgctggaaggggaagagaagcagctggggttaggtgggaggaactaagtttagagacgctaaaagtgtatgtagcaggagtcacctgatcaggttgaactgcagcaggaacaaggaag

SEQ ID NO: 41753 - DNA, 122 bp, Homo sapiens
tttacgggatgggagccttctccggatcttttgttcttctgcacctcttgtagctactgccggtgcaaggttgtagatgttattccccaggagcctgggcttgggggctgagctgggctgaa

SEQ ID NO: 41754 - DNA, 122 bp, Homo sapiens
gcggccagccggctggggtgctgactctcagctctcttgtttttgtgcctgccaggcactcgcaggcttctgggaagaagactgtgtgggaggatgaagccaaattgggctgcagtttgaaa

SEQ ID NO: 41755 - DNA, 122 bp, Homo sapiens
gtgcgtggtcttggatgccatcctgctcatctccagcatttcctctcacctccgtgttctcggggagtgcgtggtgtcagatcccatcctgctcatctccagcatttcctctcacctctgtg

SEQ ID NO: 41756 - DNA, 122 bp, Homo sapiens
cctgccaagccccttttacgtcccggcggtcgcgaggaggtcccccgggcgcgaagaagacgccagcccaccccagccgccggggagatcgcccaggccgcgctcagccccgcccctggctc

SEQ ID NO: 41757 - DNA, 122 bp, Homo sapiens
agagatgtggtccatcttcaagggaacgtcagctctgggagcctccttctctgagcctatcgtgttgcttttgttttctagtttctgcatctaactctccctgtctagacctggcttccact

SEQ ID NO: 41758 - DNA, 122 bp, Homo sapiens
taagcttctagggcaaggctgggacatagcaaattctcaataaataagtgccagctcccgcgctcagcaggctccgagttttattcgatgcgctcggcgctcttggtcgagcgggattcccc

SEQ ID NO: 41759 - DNA, 122 bp, Homo sapiens
agtcgaagtttgtgaactggcaggtggacggggagtatcggggctctgactcaccgcagccgtcaccctggggatcccagacgtcctcgtgggttcaagaattctcgaagcccactacctcc

SEQ ID NO: 41760 - DNA, 122 bp, Homo sapiens
gaagttgagggtgctgcagttgggcctgaagtcttcagagctgggagtgtccactggggccggagcaaggtccccaggctgcagccagaccttctcccctccatctgcctcccccatggtgg

SEQ ID NO: 41761 - DNA, 122 bp, Homo sapiens
ggtgatccgcctgccttggcctcccaaagtgctgggattacagatgtgaaccaccatgcccggcctgagcactttttacttgcacagcactaccaaatgcttctccgggctcattgtgagtg

SEQ ID NO: 41762 - DNA, 122 bp, Homo sapiens
acccggcaaagtcatgttgaaaaaacactcttcacgttcgctcggcctggtgaccagggtcggggaccacgacaaccgggggttgggaggctgcgtaattacaacccagggtggtttggatt

SEQ ID NO: 41763 - DNA, 122 bp, Homo sapiens
ggggtggttaggggagaaaggctgcctttgcccagggatgcaggcatcagctgacctgaccgggtcaccgagacccctaggggaaaggctgtgcggtagaatatttgtgaagcacggcgtgt

SEQ ID NO: 41764 - DNA, 122 bp, Homo sapiens
cactgcactccagcctgggtgacagagtgagactccgtgtaaaaaaaaaaaaaagaaaaacggaaaaacaaatactataatggtatcccccaagccagacaggcgggtcttgcagacggagg

SEQ ID NO: 41765 - DNA, 122 bp, Homo sapiens
cctgactctccatttccccatctgagtggatttggacctaatagggcactggagctggttcgaatcctgactggactacttggcaactttatgtctgggagcaagttacttaacctccccaa

SEQ ID NO: 41766 - DNA, 122 bp, Homo sapiens
ttttctctcttgtccttgccactaccataatacgtaaaggaagaaattccctctcactgccgatgagctacacgaagaaatggaaaaaatccctgctcctcaaggggtatggaagttggggg

SEQ ID NO: 41767 - DNA, 122 bp, Homo sapiens
aactgggagcactgtgggaatttttgcctgcctaggctcctgtgggagcagctgttcaggcgggggagggggcaatgtccagcaggagcagggccatcgcattgagctggaagggcactggg

SEQ ID NO: 41768 - DNA, 122 bp, Homo sapiens
gacccccggtggggacacaggatcgcggtgagatacctgggagtcacgggtgctcgcagacgcagctgaccccagaggcacaggtaccgacacaggtccacacctggaagccggtgcacagt

SEQ ID NO: 41769 - DNA, 122 bp, Homo sapiens
gcagacattcagtatttattgaatgaatgaattccagtcagtcttggctttttgacacctcggcctcctactctcctatctcttcagacacatggtgacagatcaatgctatgatgcccctc

SEQ ID NO: 41770 - DNA, 122 bp, Homo sapiens
ccgctccggttctgccccgccctcctcttgccgttccctcacgctggcctcggcgcggcccgttgttatgacgacatggtcgtaaatccgccatcttcctgcggcgcgttgcgacatggagg

SEQ ID NO: 41771 - DNA, 122 bp, Homo sapiens
ctcgccgcgccgcgaaggttgccccggcccccgcagagccgccaattgctggactgcagccgcgagctggagtctccacccacaggaaaaattcctggcccgcccctccctcgctccctcgc

SEQ ID NO: 41772 - DNA, 122 bp, Homo sapiens
ccccacccggtcaccgccggggtcacgcggcccctcgtgctgcggccctacccctggggccgccccctgaccccgaccgcccctcgggcccccacccccgccggcgtcagcatcctggggtg

SEQ ID NO: 41773 - DNA, 122 bp, Homo sapiens
ccatcagagtagccttttccaagggactcactggcattgctgtgcagtctgtaactgctgcggttccagaggtgcagagaagtgtgcatcccacggtgggtggagttcaccatgctggcagg

SEQ ID NO: 41774 - DNA, 122 bp, Homo sapiens
aacatacacagggacgctgtaaacaggggcgcgggccggagagcgggtgtgcaaagtgggcgcagggccctggggccgcgccccttgctctgccggctcgactcttgcacggcgggcggtga

SEQ ID NO: 41775 - DNA, 122 bp, Homo sapiens
ttcctttaacaagcatttattgagtgcctactgtgggcttacaatgcagggcttgggatccggggctccattgagctaggtgacagggtggctgccttgtcacagctcatagtgcagaggtg

SEQ ID NO: 41776 - DNA, 122 bp, Homo sapiens
tttgtgatgagtcatggcatgctgttataaagctattaaaatgactcataattgtaaacacgagtaaagtaaggagcactggcttttgcaatgtctcctgtctccagcatctgttagatata

SEQ ID NO: 41777 - DNA, 122 bp, Homo sapiens
tgcctccgagatgtgtgccaggagccacctcttgttcaaggttgagaagtaattctgccccgggactctggttcaggaccatggagagcatcctataagggagcggtcctctcccaaaataa

SEQ ID NO: 41778 - DNA, 122 bp, Homo sapiens
tggagaaggaggaagagggccaggctgctggtagtggctggctctattgtattggcggagcggcagcgatcagccggagacatgcaggggagccatcttgccacttacccagcagcctgtgt

SEQ ID NO: 41779 - DNA, 122 bp, Homo sapiens
tgcgaagctgggcttggatgaagtggatctgcggagttgatagttgtatttacacgcgtccggagctgcgccccgaggtgggggcgggggctcccttcttttcccctccccttaggtcgagt

SEQ ID NO: 41780 - DNA, 122 bp, Homo sapiens
gaaaagatgctgactcctgagattggtgcaacacggatttatggagggcctggaatgtgtcggaagctgtggtgggaatagaaagagcaataagacaagattcctgactgggaggagtttag

SEQ ID NO: 41781 - DNA, 122 bp, Homo sapiens
tttatgtggagcgtggtacgggaggcacacgtgctgctggcttgtcggcacacaggtgggcgggtggatgtgagtgggcgcggcttggcagtagctcccattttacatgtcagttgctcctg

SEQ ID NO: 41782 - DNA, 122 bp, Homo sapiens
caggggaaagcacaggttatctcaagaacgcagccagataggaggctggggagacttggacgggccaccttctgcttcagtaacttggccccaagctttcaggaggtctctgcttagaggag

SEQ ID NO: 41783 - DNA, 122 bp, Homo sapiens
gcgacctgcagaccccgccgccgcgctcgggcccgtctcccacgcccccgccgccccgcgcgcccaactccgccggccgccccgccccgccccgcgcgctccagacccccggggcggctgcc

SEQ ID NO: 41784 - DNA, 122 bp, Homo sapiens
tttagttgagtccaagctgagggcaacagtggatctcactttcatcacacaggatgacgacggagtccctgaatcagccctgctgccaccaaggagggggagggttggtggtgaggtttaca

SEQ ID NO: 41785 - DNA, 122 bp, Homo sapiens
tcggattgcggtcatcgggggcgagcggagtctgcaagaggtccgaggagtagcgggtgccgagggaaggagcgcggcggggcgggtgagggatcccggggctccgttccaggacacccagg

SEQ ID NO: 41786 - DNA, 122 bp, Homo sapiens
gagattacgtgcggacggagctcgagacccgggggaccagggtttcccttcgcctatggccgatcagtcttgtctgtctgcgagctgcccagagtagggaaggtgctccgggagggttctcg

SEQ ID NO: 41787 - DNA, 122 bp, Homo sapiens
agctgccagggaaaccaaccgtgtgattagaaggttggaatgtttagcccgaccgcccgccgacctccagctggggagaggagctggggatggagttaatcaccaatgcccagtgatttact

SEQ ID NO: 41788 - DNA, 122 bp, Homo sapiens
ttgttccacccttccctaccatagtacatctgtgagcggcacttccagaaggttctgaaccggagtctattcacaggcctgcgctccatcacccactttggccgtcccccctttgagccctt

SEQ ID NO: 41789 - DNA, 122 bp, Homo sapiens
cccgctgcgtgaacggatggtcttgcgaatctagccaagggcacacagcgagcctctactcgggcattaggcaggctgtaacgactgagtgctgcacgggcagcgtccttttgcttgtgttt

SEQ ID NO: 41790 - DNA, 122 bp, Homo sapiens
ggccgtctagtcaatctgtcatcagtttcgattctcaacttttagagttctcctttatgacgttgggaaactgaagttggatagtgtttgaccccaaaggaggcaacttgcccagtaggttg

SEQ ID NO: 41791 - DNA, 122 bp, Homo sapiens
tttaatttttcaaactatacagagtccctcattttcagctgctccacatctaagtgttctcgtgttttcttagcggcagcactgaacttcagagtcaatcaagtccaatttttaggatgcct

SEQ ID NO: 41792 - DNA, 122 bp, Homo sapiens
cggaggcttggcggggctgtcccccgggccggactcagagacggacttctgggaaagcaccgttgccaggagctgcaacccagaaaccccggcttgtcacctgctcccagccctggccaccc

SEQ ID NO: 41793 - DNA, 122 bp, Homo sapiens
tgtgcaggaggggctgctctgtgggtctatgcattcgtgtgaatgcaagggcgagagtgtcgcgtgtaagtgttccaatgtaacagctatttatctggtgtgtattgatggtttgtgcttgt

SEQ ID NO: 41794 - DNA, 122 bp, Homo sapiens
cccttaacaagaaataaagtgtcctttgcaaatgcatcccttgtgtaatttgtaggtcaccgcgccatgggaacacgctaccatgggaagggagctgtgagacgcgcagggaggctccagac

SEQ ID NO: 41795 - DNA, 122 bp, Homo sapiens
tctaagcgggcagccatccaccggcgtctacctaccgaagccatttctgctttttaccagcgacgctggaacagtgttattgtgggatatgttcagtgttgaacaggctcccagggcacggc

SEQ ID NO: 41796 - DNA, 122 bp, Homo sapiens
tgctgaccatcttttaccaggtattggaggatgcttagcaaaatcctttgaccaaaggctcgacattcacagattctagacgttcctatgaaaatacctacttatttccactggactgaact

SEQ ID NO: 41797 - DNA, 122 bp, Homo sapiens
gtggcagccccgccacaccccccaaggccaagggcacaggcagcgtggtcttccccgccccgcccgactacttcctgccgccacagccaccaatgccgcccctggagtacccagagctcccg

SEQ ID NO: 41798 - DNA, 122 bp, Homo sapiens
tggcctcaggcgctggcttcacggcaaagagatcggagagaagctgctcttccccagactcgatgtaggcggagaggtcaatggaggcctcatgctcacacatgtcccctagctccccgggc

SEQ ID NO: 41799 - DNA, 122 bp, Homo sapiens
ttgggttccaaaagttctcagagtcaagaataagtggaagtaggggaagagagccaatcccgggatcatgggctggcaggaagggcctttgtccctgattcccttggtcccttgtggtccta

SEQ ID NO: 41800 - DNA, 122 bp, Homo sapiens
atgtacctagggtcacacagcgaatgcgtggcagagccggaaacccagggggcctggctccgaacccccatgcctcagaggatctcaagcaccttcttgtatctttctgttcaaggggaaac

SEQ ID NO: 41801 - DNA, 122 bp, Homo sapiens
gtctccgacaccaccgagcgtagctccgagtccttgccctggtccttcttctgcttggtgcgccggttctggaaccagaccttcacctgcgcgccggggtgcggggagagttggagagaggg

SEQ ID NO: 41802 - DNA, 122 bp, Homo sapiens
ttttttctccatattgatcttcattgactaatacagtgatggtattcagaaatattgttgcgttaaatactggttctttttgcttgacagcagtatctgttgggaactacatttagaaagct

SEQ ID NO: 41803 - DNA, 122 bp, Homo sapiens
aaattatatctcgataataaaacaccatgcaaaagcctctttctactgaaagaatcatctcgtccccaacacacacgtctcttactctttggaacatctagccagtggtcctcaaacctagc

SEQ ID NO: 41804 - DNA, 122 bp, Homo sapiens
tgtcctcaaggatgaacagcttctaaagggatttggcatcacctattttacatgtagtggcgcttcccctttaaccatttacagtgttcaatcaaggtgaagagcctgattcactaaagctg

SEQ ID NO: 41805 - DNA, 122 bp, Homo sapiens
aacacgagtgtggaatgtagccttactcacctctattcccatcgctcaaagaatccaaaccgcctagcacacagtaggcccccaggaaggacagggaccactgagctcccggaggaggcgag

SEQ ID NO: 41806 - DNA, 122 bp, Homo sapiens
gtcacgtcatgaggtgagagattccgggaaggggcagcaagaggagaaagaagcgaagggcgccccaaggtaatgtgtgccctacacagggctcctagccataagcacttatgcaagtgcgg

SEQ ID NO: 41807 - DNA, 122 bp, Homo sapiens
gggggctgggctaaccttaggtagggatcaggcttgggatgggtaggggccagactcccgcgttggtacactcttccagtgagaagaggcagcgtggtgagataggagaaatagctggaccc

SEQ ID NO: 41808 - DNA, 122 bp, Homo sapiens
cgaaactccatctcaaaaaaaaaaagaacagaactccttgattttcctgacatcgatcgacggcagctggatgctgtgttgaagacaaaggcaacctggcggagtggaaacagcatggtttc

SEQ ID NO: 41809 - DNA, 122 bp, Homo sapiens
gccagacaacccatatgcagcctgggagctccatctttagtgattgccggggaggacgcgcgtggagccctcagccgcagcctggggtagacagccccactctgcctgtcttcagccggatg

SEQ ID NO: 41810 - DNA, 122 bp, Homo sapiens
gggaggctgccccagccggggtccgcgctgcagcgtctttgcaggtctcccagcagcaggcgacagagccacaagcacagctctcagtccagggaaggacccagcagccaatcgcagcgccg

SEQ ID NO: 41811 - DNA, 122 bp, Homo sapiens
ttccaacagcctgccggcatcgcaacactcccaagtcagggtctatgacccggctcccgccgaatgccagcccccaactccagggctctccatctcaatggagtggctaggaaacaggacct

SEQ ID NO: 41812 - DNA, 122 bp, Homo sapiens
gtcggtccccgggaagggccgacactggggcggcggaggaggcagcggcggtggtggcaccgggtagaaggcgccagcgccgcctccgccgcgggaggcctccgcggaggctcggggctgca

SEQ ID NO: 41813 - DNA, 122 bp, Homo sapiens
gctgctgggacccggtgcgcgatagacaggcacataccccaggggcctgcaacaaatgaccgtcccgctccgggctctgttacctggacctctcttagttggttcctcctttgcctctagtt

SEQ ID NO: 41814 - DNA, 122 bp, Homo sapiens
ccaagcagtgggcagagtgggggccctggggacagtcccagcctcccagcttctgggggccgccagcctgtgaggttccttggcttgcagaagcaccacctggtctcggcccctacgttccc

SEQ ID NO: 41815 - DNA, 122 bp, Homo sapiens
cgcaaacgtagcaagagaggttgctttaagaagcgggaatcttcagcgtcacgtgaccgccggtctctacagtctgttcacactggccaatcaagagccaggaagcctcctggagggccgga

SEQ ID NO: 41816 - DNA, 122 bp, Homo sapiens
gtttcaccgtgttagccaggatggtctcgatctcctgacctcgtgatctgcccacctcagcggatcattttatataaaattatctaagagaggtccaatgggtgttacctgacaaaagttat

SEQ ID NO: 41817 - DNA, 122 bp, Homo sapiens
ttctcaactacaatttcctttttctggttgctcatgattcaactgggggagcttttaaaccgtggttctcaaactttaatgtgcatcagaactacccaaagggcttgttaaatctgggtagc

SEQ ID NO: 41818 - DNA, 122 bp, Homo sapiens
ccgtgacgccgacagccaccccggacgcctccgaccctccggccgggagatgcggatagacggacgaggcagccaattagagcccggccagacaccgcgacccctccccccacccgccccac

SEQ ID NO: 41819 - DNA, 122 bp, Homo sapiens
gaataggagccctgcaaccgggcagaacgtgaacatcaccctgcagagcgtgggccctgtcgtcgggggaaaccagcagatcacactggccccactgccgctccccagccccacctctccag

SEQ ID NO: 41820 - DNA, 122 bp, Homo sapiens
ttcatcattcattcattcacctaactttcattaaatagctgcaccatcccaggccctgtgcggagcatcgggaatacaaagatgagataaaacattgtccctgcccccgggggctcacatgc

SEQ ID NO: 41821 - DNA, 122 bp, Homo sapiens
gcggctgctgcgcgcgtccccgcccagcccagcccagccccgagcacgaccccagccccacgcacgaccctagccccgcgagtcccgcaccgactcgctcccgccccatttcgcctccgcgg

SEQ ID NO: 41822 - DNA, 122 bp, Homo sapiens
agaaagttactgctttatcccccactgtaaactatactaccacgacccgggatccttgttcgactcctagccaaggggttcccactgcgtttctgttgggttatcccaaacctgtgatagga

SEQ ID NO: 41823 - DNA, 122 bp, Homo sapiens
gatatgtagacagactttctacttaaccgcctcctgtccctgtgggccggttccccgggacgccggttcatggctttgggggaattcatcccaaatcgaacattcagctccccgcctagcct

SEQ ID NO: 41824 - DNA, 122 bp, Homo sapiens
taggggctgcctccccttctgctccccgagacctggcgtggagaccgccaccaggagctccgaacacgcaggcccaaattggaataggagatggattttgataaaagaggttaaataacagg

SEQ ID NO: 41825 - DNA, 122 bp, Homo sapiens
ggaggaagcgcggcggggcgggggcgggggtgtgtcgggttttataacccgcagggcggccgcggcgcaggagaaggggcagagccgagcaccgcgcaccgcgtcatgggggccgcctcggg

SEQ ID NO: 41826 - DNA, 122 bp, Homo sapiens
tttacgacccaaaacggggacacaaatgcccctgagagagcagcggtatactgggatagacgaggatggtcacgtggtagagaggcatgtttttgggtaccagcacttcacctgcgtcgacc

SEQ ID NO: 41827 - DNA, 122 bp, Homo sapiens
agtaaaatccttgtggggcatggaactgcgtgcccaggaccatctcattcccgactgtagcgggaactccacaatgacctggagcatgggagatggtgcagatgctggagttcagctccagc

SEQ ID NO: 41828 - DNA, 122 bp, Homo sapiens
gcttgctacaatttctattgacagctaccgtgcacccccttagaagaaacgaatgagcaacgaaacgtctatccagcactgaggaaggaggcccggggcgaacgtattggactgggaaatta

SEQ ID NO: 41829 - DNA, 122 bp, Homo sapiens
gctctggtcgcccagcgccgctccgagaagccggcagcagagtacccgcggtcgcgccctcgctgcttaacaaaggccgccccgctcggcccgccccctcatgaatagttaacaaacctcca

SEQ ID NO: 41830 - DNA, 122 bp, Homo sapiens
ggccgtgtctgcatccccaatttgaagtcccagtgcgactgggcaagtacagaccctgcacgtccttggacgagagggactggatattgcgacgcctgggccgcagaaaaggactccaccag

SEQ ID NO: 41831 - DNA, 122 bp, Homo sapiens
caaggctggaatttatcactcatcttagacttgtccctccctgtgcccctgatgttcaatcggtagcccttctatatgtcctctccatattactacttttgccagagtccagtctatcttca

SEQ ID NO: 41832 - DNA, 122 bp, Homo sapiens
gtttcccagtttccctttctggaaaccaccactgctagcagtttcttgcgtattcttccacgtaggctaagcagaaattgtgtgtttgtgtccttccctttttaaaacacaaatgatagcat

SEQ ID NO: 41833 - DNA, 122 bp, Homo sapiens
gtggcagagggagcagggccctaagggaaactgacgcctgtgcagcacgaaccccactcgcgtcctgtctgcctggactgccgccgtggggacttctgcagcccccgcccctggcggagggg

SEQ ID NO: 41834 - DNA, 122 bp, Homo sapiens
ggggtcggatcccgggaggcagggccggcggctcctttgggaccgcgctggctccctaggcgagtcctttctgcctgggggacgaatgctgatctagaaaagaagccaatcaaagtcaacag

SEQ ID NO: 41835 - DNA, 122 bp, Homo sapiens
gttcaaatgaaagatactctgataatatcgacaaggcttcaaattcaaacaagttccatgcgcaagtctgattaagtcatccttattaaacgcagaacaatgaggacagtgtcatggcggga

SEQ ID NO: 41836 - DNA, 122 bp, Homo sapiens
cgtagagggccctcgaggagctcggtgctggggctgcagctcttgtgtgaggccgtcgtgcgttgcagttaattgttgcacctgtatttctggtcgagaagctgtactgctaagatgcgtgc

SEQ ID NO: 41837 - DNA, 122 bp, Homo sapiens
aaccacatcgtgaaattctcatcatcgtacgtaagtcccagaggaaaacactcagagccccggctcttcatagggactgaggggccgagtccagcatacgattcccctgcggttaccaaggt

SEQ ID NO: 41838 - DNA, 122 bp, Homo sapiens
aatcaggtagtctctttatgtcattgcttgttctctggttataaatgtagctcacctcatcggaggtgggggcattctgaaccatcttcagtgtagagggctgcttggttctagaatccttt

SEQ ID NO: 41839 - DNA, 122 bp, Homo sapiens
tatgctgctctcggggtggagctctttgggaagctgggtgagtgactcccagagcaggcccgtggtgggggtgcagcagggctgcaggaggaactgggggggcgggggaggcctgagacccc

SEQ ID NO: 41840 - DNA, 122 bp, Homo sapiens
tgggaaaaagataaaatgggtggggggagaggtgcgagggggcaggatgtagaacttatgcggtgtagaacttttaagaaatactaccgctcgtgtagttttcttagctacataaggcttaa

SEQ ID NO: 41841 - DNA, 122 bp, Homo sapiens
cggttcctggaagggacccattgcttggtggcaccagcttgaaggctgcaaaagtgaacccggtgcctctcgtgggagaggggaacgccttccgctcgacaaagaccctggcccacattcca

SEQ ID NO: 41842 - DNA, 122 bp, Homo sapiens
tcactccacggtgactggcactgatggggccctgcgagcatctctgtgaagtcacatgaacgggcacctcactccacggtgactggcactgatggggccctgcgagcatctctgtgaagcca

SEQ ID NO: 41843 - DNA, 122 bp, Homo sapiens
cacacgctgccacacactctcgcacggaagtgggaactacactcatcagagaaccacatgcgctcacatggaagtggggaccagacatcgggtacttacagccatagagatgggaacaacag

SEQ ID NO: 41844 - DNA, 122 bp, Homo sapiens
ccgcccccaccacgctgacagtctcaattccaaccccttggatgtgaggaagtgtctttgcgcctgaacgcgcccagcacggcgaggccaccagtgactcccagcggccgcacagggcgctg

SEQ ID NO: 41845 - DNA, 122 bp, Homo sapiens
tcgcggcgagcggacggggtcgagtcagtgcgttcgcgcgaggtgagagcgggcagggcgcgtgtgcgcggtaccttggcttgggcccgggagaagatggaactgcgcgggggtcggggagg

SEQ ID NO: 41846 - DNA, 122 bp, Homo sapiens
cagctctgctacccacccatatgtgcccagaacaggaaagatacgtgtttcttactcctccgggactcctaggtgaagctgagaccaggctcttcttgagtcctctcagctatggtgcaacc

SEQ ID NO: 41847 - DNA, 122 bp, Homo sapiens
accatcaacggcggcaaatgacactctcggaatcttgactccaatctgatgcctggtccccggagccgcagagaggcgcaggccagccaggctgggggcgctggggagggtatgtgcagtaa

SEQ ID NO: 41848 - DNA, 122 bp, Homo sapiens
ctccgcccgcagctccgtctgcacgagggacgagcaaaggctggttggcgtcgcaggctacgacccccagcggcccgcgccctcgcggcccggccccttcccttccgtcccgccaggggccg

SEQ ID NO: 41849 - DNA, 122 bp, Homo sapiens
atggtgtgcacctgtggtcctagctacttgggaggctgaggcaggagaaccccttgaacccggagagtggaggttacattgagccgagatcacgccactgcactccagaccgggagagagag

SEQ ID NO: 41850 - DNA, 122 bp, Homo sapiens
gggggagaggaggaagactgtgtccagggcatgagccttctggcattgtgggttcccccacgctccagcgccggaggggacccaggcggcaccagcgcgttaggctgcccccgggagcagtg

SEQ ID NO: 41851 - DNA, 122 bp, Homo sapiens
gctggtgctgctgaacccgcgcggcggcaagggcaaggccttgcagctcttccggagtcacgtgcagccccttttggctgaggctgaaatctccttcacgctgatgctcactggtgagtacc

SEQ ID NO: 41852 - DNA, 122 bp, Homo sapiens
ccccgaccagcatagaccacgagctgcaaggggtctgagacagtaaggcctgaagttcaccgaactcagtttcaaatacctgtggtccccccaagaagggagacacgctcttcctctcgggt

SEQ ID NO: 41853 - DNA, 122 bp, Homo sapiens
aattctaatgaaaaaaaaaaaaaatccgtgcgactaacaaaatataaggttggagcaacccgtcttggaggagtaggaaggcttccattctgtacctaacaggacaggccaagtatctgatg

SEQ ID NO: 41854 - DNA, 122 bp, Homo sapiens
gggccgggctggggccagataatgacgcccgctgctctccgcggtcccccaccctcaccccggccccccacccgcagccggccacactggagcagctcccagcacagccttacgcgcccgac

SEQ ID NO: 41855 - DNA, 122 bp, Homo sapiens
tgacctcatggtctacccgcctgggcctcccaaagtgctgggattacaggtgtgagccaccgcgcccagccagtattaatctttctagagcaagtggctatatttatgaagacaaaggacag

SEQ ID NO: 41856 - DNA, 122 bp, Homo sapiens
attcatgacgctggaaggtcatgtccttacatgtttggtcaaattgggtgtcggtttaagcgctgtgcatatgagctcaaatgaagggtcttctgaggctcacttcgatcatgtttggagat

SEQ ID NO: 41857 - DNA, 122 bp, Homo sapiens
ggggcaggccagctcagcagagcctggggccagagggccagacagccacagagctcctggcgtgggcaaggctggccaaggatggcgacgcccaggggcctgggggccctgctcctgctcct

SEQ ID NO: 41858 - DNA, 122 bp, Homo sapiens
gcaggagccagcgccccccaacacccctggggtcctccgcctggaccgtccaagagaaggcgcctggttctgcagctcagtgaagtgcctgcccccagagtccctgatttcctggcagcagg

SEQ ID NO: 41859 - DNA, 122 bp, Homo sapiens
ggcaacacctcacccctggtcctactatctctggtcaaagaaatgtgcgcggtcatctagcgtcagcaaatcatcttgtatctacagatctgcctcagctcctttgctcagtaagaacttgt

SEQ ID NO: 41860 - DNA, 122 bp, Homo sapiens
taaattgttttggctggaagcctgttacaaagcattaacgtggcatagaaagaacaagcacgtgcaggtaggactctcataaatattagagttattcaaaattatgttttccagtcatttat

SEQ ID NO: 41861 - DNA, 122 bp, Homo sapiens
ttaagaacattttcttgcatctcgcattttggaagaactccaaaaaaaatttaaaactctcggctgtgcgcagcggctcaagcctgtaatcccagtgagaggccaaggcgggcggatcacaa

SEQ ID NO: 41862 - DNA, 122 bp, Homo sapiens
cgggctgcagtgggggctactgtgggcatcaggggccgtgggcagggcctggggtggggacgcatcagggagacaggggaagaggaagtgcctttggtcctggggaaggttggcttgtcttg

SEQ ID NO: 41863 - DNA, 122 bp, Homo sapiens
tgactaagctggtggccctgggctggctgtgtccacacacgtgaggtcactcatcaagcgcgccccctccccgctacttcctgcctccggtgttcaaccgacttctgtatctggtaggtgct

SEQ ID NO: 41864 - DNA, 122 bp, Homo sapiens
ggttccacggggggcaggtgcgctcctcgagagtgcggaccctctaggtggggtgcaggacgcagctccccttttgcaaaccgcactccttccctggagggaacgaccacccctgcagttgc

SEQ ID NO: 41865 - DNA, 122 bp, Homo sapiens
gcgctcctttcggctacgagatgaggggcacgcagacggacgcgcccctcggtgagtgtgcgtgtatcagtgcatgattcctttactccgcccacagggtctgggcatccgtcattacctac

SEQ ID NO: 41866 - DNA, 122 bp, Homo sapiens
gggcggtgacggtgtgggaggtggtctcactcttgggaaaactgctgggcaccgtcgtcgcgctgaaggtggttctgtacctgctccgagtgtgcttagcgatggcctggaaatccggcggc

SEQ ID NO: 41867 - DNA, 122 bp, Homo sapiens
gctgccttctcccgccgttttgctgagctcttcctgcagcactttgaagccgaggtggcccgggcctctggctccctgtcgccacccatcctggctcccctgagccctggtgcggagatttc

SEQ ID NO: 41868 - DNA, 122 bp, Homo sapiens
ccccattacctgcggctggggactgggaactttccgcggcattgtccccagccagcgcctcgggacctgcggggctgttctcgctctcacactcacactcaccccggccgctcgggcgagag

SEQ ID NO: 41869 - DNA, 122 bp, Homo sapiens
aagccggtaaagataagacttgcatacaagtaaccatgccatgaggcagatgcagaggaacgtgataactgatgtttaatttgcgaccggcggacaggagagagagagaagggaacctggaa

SEQ ID NO: 41870 - DNA, 122 bp, Homo sapiens
gcaggcaaaagaatattgcttagctgctttgctacagaaatgacaactcttgggcaggggcgcggtggctcacgcctgtaatcctaccactttgggaggccgaggccagtggatcacctgag

SEQ ID NO: 41871 - DNA, 122 bp, Homo sapiens
atgttagttgcagcccacaagggtctagggtctttcccatgactagaatacaggagtccacggtgggaatgtgtaccactgggggtcacttacttaccctttccccacactggacaaccttt

SEQ ID NO: 41872 - DNA, 122 bp, Homo sapiens
agctcaggggcagcaagagccatcagaaatggggagggcacgtggcgcttgagtggccatcgctgtggagagcccccacactgcggctgttctcagcactcagggaagagacacggcactcg

SEQ ID NO: 41873 - DNA, 122 bp, Homo sapiens
ggagcgcgcgtaacggcaagccaagccaggcaaccttctaggggaagctttcatgggaagcgcgcgcgcgcgcgcgcacacacacacacacacacacacacacacacacacccctatttctg

SEQ ID NO: 41874 - DNA, 122 bp, Homo sapiens
actacaggcctgggcacttgctatccatggggacaaaatgtcaccactggcagcaaatagcgagaaaaagtgcagcgcagtagggaaacagcgcgtccgcgggcgcgacaccacagtttggg

SEQ ID NO: 41875 - DNA, 122 bp, Homo sapiens
gccgagggccgggcaggggcaggggcctgggccgggctcggctctgccgggctgcggtggcgatgcggctgcggcacagggtaggatggagggatgcgggagccgagcgcgggggagggggg

SEQ ID NO: 41876 - DNA, 122 bp, Homo sapiens
aggtacttgatgcccatctccagagccctgtgagcacaggccatggtggtctcatggtcacgcgctgcatgggcgaagtgggtcagccgcgtcagggtctgcagctccaccagggggtccga

SEQ ID NO: 41877 - DNA, 122 bp, Homo sapiens
cagacagatacataggggaggttaaggccgtggacagacagtgcagggaagctcgggccacgggacagacagaccgaggggagactccgatcctgaggcaggcagacggcgggtggtgagtc

SEQ ID NO: 41878 - DNA, 122 bp, Homo sapiens
ccggtggtggttgtttgtgaccgagactctgccccaggagggaagcggctttgaggaaaccgatgcttcctgcctggccctcagtgccttggagaactgggaggagaccagaggcgagaaac

SEQ ID NO: 41879 - DNA, 122 bp, Homo sapiens
cagcggcagccgagccaggaagttatcaggcagcctcgaccaccaccagatttgactccgcgagctcttttgagggaaaacctggtaaaacgtcaaggtgtctaactgacctcgcctttatc

SEQ ID NO: 41880 - DNA, 122 bp, Homo sapiens
ttcagagcagtcagtgcgttgaagagaatcctcgccacctggtctgcctcctgcatctcccgccggctactctttgcttatgaaggccccagccttcccaccttccctgtgcccactgaccc

SEQ ID NO: 41881 - DNA, 122 bp, Homo sapiens
caattttcttgccctctggagtccaccaggaataaagctagcccagcctgagggatgcaccgatgtatctaatcctctgcccctagggagtgggggacgcttctccatttcttcctgagcct

SEQ ID NO: 41882 - DNA, 122 bp, Homo sapiens
acaaaacccaaaaagcctaggtggggggtggggaggggggtcccggcccagggcaggcaccgccctgagccatgagccatgagccatgagcctgtctcccagctgcccagccctacagtcag

SEQ ID NO: 41883 - DNA, 122 bp, Homo sapiens
cgctcgggcttgccttcggctgtggcttggcggtagctttccagccaggagccgggtccgcgctgccaagtgaagctggggaggggggcggggaggcggggcggggagagcgccgcgggggg

SEQ ID NO: 41884 - DNA, 122 bp, Homo sapiens
tcggtctccatattccactcatttttgtctcaacattttgtggtattttatcacaaaatacgcccggcaaagcaaagatcccgttcagtctctttaaacacggctatcttttctcaggaggc

SEQ ID NO: 41885 - DNA, 122 bp, Homo sapiens
tgtccccacaacctgggaagcctggggcagggcctcaggggactcctggtgttagtcctccgagcccgggtggacgtgtcgctctgtccctgcgggaggattcggggcccctttgacaggcc

SEQ ID NO: 41886 - DNA, 122 bp, Homo sapiens
ccgcccgcccgccactgtgcagaagctctcccgcttccctctggcccgacaggtactgggcgcatcccccacctcacatgtgacagcctgactccagcaggcagaaccaagtctcccacttt

SEQ ID NO: 41887 - DNA, 122 bp, Homo sapiens
caataaggcattcaaaactctctagaatcctgtttctgtctgccactaagccctatttctcgccatttcaaccttgttctcgtgttgcaccaaacttcttcttgcttcctaaaaacaacatt

SEQ ID NO: 41888 - DNA, 122 bp, Homo sapiens
ttctttgactcggaaagggaactccctgaccccttgcgcttcccaggtgaggcaatgcctcgccctgcttcggctcgcgcacgttgcacacacacactggcctgcgcccactgtctggcact

SEQ ID NO: 41889 - DNA, 122 bp, Homo sapiens
ggcgcccccccacccgagcccgggctgctgggcggccgccgccgctgcgcccgccgcactcgcgcctgcctgacatcagcactcgcgcccgcagcccggctctggccaatgaataatgcatg

SEQ ID NO: 41890 - DNA, 122 bp, Homo sapiens
ctaacatcaactctctcttttaatagtaaacgttctgcctgcttagtagttatgtttttccgcatacacctatttcccttggatgtttattattatggtattgcatgtttgttgatggcaga

SEQ ID NO: 41891 - DNA, 122 bp, Homo sapiens
cgtccccggagccccaagctgggtctggaagaccagggcatttgcatggcatccagggaccggctgcctagcagggattttgcgtgtaccgcggcggggccgggggctgggggttggggggt

SEQ ID NO: 41892 - DNA, 122 bp, Homo sapiens
ccccacatctcagatgatggggggcggggtagaggcactccccacatctcagatgatgggcggccgggcagagacgctcctcacttcctagataggatggcggccgggaagaggcgctcctc

SEQ ID NO: 41893 - DNA, 122 bp, Homo sapiens
agcactttttggttttcagcttctttgcatgctgtctaaaatgccttcttgactcttcttcgtctcctaaccaattcctcacatcccctcctcccatcattttatgtaggaagcctcctctg

SEQ ID NO: 41894 - DNA, 122 bp, Homo sapiens
aagcccaggcccgcgggttagctccagccgctgggcttgacaggggtcagggaggcgggccggccccacagccaagtcacagctccagggcctggtcgcacctgagcagcgcggcctcgggc

SEQ ID NO: 41895 - DNA, 122 bp, Homo sapiens
tctgcggccgtatagggacagcatagatgggccccaggaagaactttagagtggggggcacgtaggggcttggggtgtcatagagtgcctcttgaggtgacgacacggagtagctagagggg

SEQ ID NO: 41896 - DNA, 122 bp, Homo sapiens
tggcaacatgcctcagccatcgggtagggctgctgtcacctgcagcccaagtgttcctcccgctcccgtgtggctctacgcacgtcctccctgtcagggctgctgccacccccagcaccaca

SEQ ID NO: 41897 - DNA, 122 bp, Homo sapiens
cccagccccacctccaagcctgctgttacagctcatcaaagagcactgcagggacagtagcgtcaccacctggaccccacctcccaccaccggacgctacagccagagcccacctcccatgt

SEQ ID NO: 41898 - DNA, 122 bp, Homo sapiens
attacaggtgcctgccaccatgcccagctaatttttgtatttttagtagaggcagggtttcgccttgtttgccaggctggtcttgaactgacatcaggtgatccgccctcctcagcctcctc

SEQ ID NO: 41899 - DNA, 122 bp, Homo sapiens
tctaggcggctggggcgtgtgagatgcagtagcggggcagaaggattcacttggtagtcccggagccccaagtttgagtgtaaaaaaaggggaaagcccttgagctgggcgctcagtaggct

SEQ ID NO: 41900 - DNA, 122 bp, Homo sapiens
agtggctttcttttccgtgctaacctttggtacttggagagtggttatccctgtcctgttcgttttgctcatgtcgaatcgtacagggtcatccactttttcagtatcaagagcgcagactc

SEQ ID NO: 41901 - DNA, 122 bp, Homo sapiens
ggatctataactaagataaaaataaaaccaccacatggtatatcggtactaagatgaaaacgacagcagatcaagggcatgagagagtatgtgttggcaatttaagatctgacagccagaga

SEQ ID NO: 41902 - DNA, 122 bp, Homo sapiens
acaaccccaggaagagcggcctcttcttacctgggtggcagccacgtgattagaaaacagcgcgcaccatgtgacagtagaagaaggaccacctgcgcctccagagccagccaatcccgacc

SEQ ID NO: 41903 - DNA, 122 bp, Homo sapiens
tacctacatagtctccaaggagagtcaggaggatgtgtacagggcccaggaaagccccagcggtaggaattaatagtcactttaccaagggtcacgatagtgtcagagtaggtaccaagtgt

SEQ ID NO: 41904 - DNA, 122 bp, Homo sapiens
aagatgctcttgtctcacaggccgtgaggaacagctttggcatgtgctgaagaagaggaccgcaaaggaactggatgagacagcataaggcagcctctataaacctttttggttcctgtatt

SEQ ID NO: 41905 - DNA, 122 bp, Homo sapiens
tggcgtggacaggtcgctgccgcctcggactacaccagagatctcagctatgagcctggacgcccgccccgccctcccgaggccccgccccgccccccgaggccccgccccggcgcggcgcg

SEQ ID NO: 41906 - DNA, 122 bp, Homo sapiens
cttccgatccctgaggccagggaggctcagaagcccagggctccactcagccgcagagcccgcgagctgcactccccaccctcagaaggaaggcgctctcggccggccccagagcagtgacg

SEQ ID NO: 41907 - DNA, 122 bp, Homo sapiens
gtaagaggcggatcggcggcggctgggctgtagagatcttaatcaacaggtccctgggagcgcggcgggggaggggcgggcggccgggctccccttcccccacacgctgcgcaaactccggc

SEQ ID NO: 41908 - DNA, 122 bp, Homo sapiens
gcctgcctgccggctcggcccctcggagcaattctgggccaggagtggggacccggaccccgcccctgatgcagccccacccccgcgtccgggccttgcaccactgactgtcccggccggcc

SEQ ID NO: 41909 - DNA, 122 bp, Homo sapiens
ggggagcgtaggcgcttctcgccaagatagaagcgttcagactacaactcccagcagccacgaggagccctagggcttgatgggaacgggaaaccttctaacctttcacgtcccggctccgc

SEQ ID NO: 41910 - DNA, 122 bp, Homo sapiens
ccttcccgcaccccacccgcctccggccccgcctggcccacccctggaccgcccccgccccgccccgcccctacccgctcctccggcgcagccggcgcttacctcgcttcagtcccgcgacc

SEQ ID NO: 41911 - DNA, 122 bp, Homo sapiens
cggcgtgcgagtctcattgttgtggggggggcccgtcggggcatgagggcgagagcacggcggggggggcggccagacagagcgagcgaggaggaggaggaggaggacgcggaggaggagga

SEQ ID NO: 41912 - DNA, 122 bp, Homo sapiens
gactcggcaggggcccagacaagggccctgcaaccttgttctgcagaaaatcatcattagcgcccctgagtcttaacaatcgaggcgctgccgataccacggatacctttattgctccctgg

SEQ ID NO: 41913 - DNA, 122 bp, Homo sapiens
ttaaatttttttactttcctactccattctgctaatatttctattaccatgtaaaagacacgagacaggtgaatataaagaaatacttatatacatccacgcacaagaatgattcaaataga

SEQ ID NO: 41914 - DNA, 122 bp, Homo sapiens
gtatcaaaggatgtttgcatgtgaatgtgggttatgttctttcccaccttgtagcatattcgatgaaagttgagttaactgatagctaaaaatctgttttaacagcatgtaaaaagttattt

SEQ ID NO: 41915 - DNA, 122 bp, Homo sapiens
aatccgggcacggggtgggcgccgggccctggggtcctcagggactgggcctcagcccgccggtggttccaccctaggcttccccaagtcggtcaagagccgggagcagctgtcggagtacc

SEQ ID NO: 41916 - DNA, 122 bp, Homo sapiens
gataacagatttctgtatcctggctattatctttctctagttatgggttcataacatgttcgggagagaatctgggattttcttgtgcttcgtagattttcacacatctgatgctcattaag

SEQ ID NO: 41917 - DNA, 122 bp, Homo sapiens
gcacagacaatgttccaggagcgcttctgtactcaggatacagcaatgaaggtgcagtcacgaactaaactcattgcccttgtgaagcttacatgctagtaggtataataatcagctataat

SEQ ID NO: 41918 - DNA, 122 bp, Homo sapiens
acacttttgaagatagctttacaaccgtgggaaaactcaccgggcttttttcgttgaccccgccatttctaagttgctatattgctgcaaggagctggcaaagccatgctcttcctctcccc

SEQ ID NO: 41919 - DNA, 122 bp, Homo sapiens
ccagctcgttcatttatatagtctttgtggccgccttagtacagacagaaaggcctgaaacgcctgagatattgcctatgtggtccctgacagacaacgtttgcaaccctgctctttaggat

SEQ ID NO: 41920 - DNA, 122 bp, Homo sapiens
cactcagcccttccccggccctcccctctggaccccattgccggcgtctcattccggccccgtgtgctttttggtccgtagacgatcctcctccaagacaaacagcggaaaatctactgcgt

SEQ ID NO: 41921 - DNA, 122 bp, Homo sapiens
cgagcagggaccgcgcagctccgtgtccccgcagtgggagggcggcgggcaggggccgggcgagttaggccgcaagcatctgctggggccgtcgcagcaccatcccacagaccgccactgaa

SEQ ID NO: 41922 - DNA, 122 bp, Homo sapiens
gggcagtggagatgggaacaggagcggggctcagaccatgaaaacattggagaatcttagcgggactttggcctgatccatacagatatcgtagttgcttagatatgcttattgttttcatc

SEQ ID NO: 41923 - DNA, 122 bp, Homo sapiens
ttcctggaaatggaatcacacagtatgaactcttttgtgtttggcttctctctcccaacacgatgtttttgagtcatcaggttgttgcctgtaccaggttaaataggatatcactaacagcg

SEQ ID NO: 41924 - DNA, 122 bp, Homo sapiens
ggaaccgaagtcgcaaaatgtcacgcaatgctccgccccctggaggacccgctctagaggcggaggtatccgtgctgtccagtatccgtggctataattggtcggacacgctggggaaatac

SEQ ID NO: 41925 - DNA, 122 bp, Homo sapiens
attctccgtgtgacctctacaccccaggtcaggtcaggatgtgatttgcttctccagggccgtgactcactagatccacctcccactggtgcctggtggcccccgacagccctggccctgtc

SEQ ID NO: 41926 - DNA, 122 bp, Homo sapiens
aaatgagtcccacacctagtaatggttttgctcctccagtctgtcctcttaaaaatgggtcgtgaaggactaatgcttttaaaacactataaaacaaggtctgtaatggctctgatgcctca

SEQ ID NO: 41927 - DNA, 122 bp, Homo sapiens
gagtcagtgcacagagttagaggcaggcagaaagaaaggagacctccccaacctcggccccgcccttccctggcccaggcaacaaagcagcgaggagccacgtgtggaaaagcagtgcagat

SEQ ID NO: 41928 - DNA, 122 bp, Homo sapiens
actgtccattgtgacatgtggacattctcaaggtcacataagcagctatatgatgctaagcgatggggaattatcttgctgcttggtggggggtgggagacggtggaggatgatggaaaagc

SEQ ID NO: 41929 - DNA, 122 bp, Homo sapiens
gggaggagccaacatggccgaataggaacagctccggtctacagctcccagcgtgagcgtcgcagaagacgggtgatttctgcatttccatctgaggtaccgggttcatctcactagggagt

SEQ ID NO: 41930 - DNA, 122 bp, Homo sapiens
cagcacctacaattaaggtgctggcacacagtaaataatatttacccaaaatttgtcaaacgaatgaacaaaagcactgtaaatttttcctaggtaagaagtccccatcaatcccacttcta

SEQ ID NO: 41931 - DNA, 122 bp, Homo sapiens
gaaataaagagggaggataaggttccaaactgcaaaaatcagggccaagtctagaaaaagcgacaaagggctttagtggttttggagatccatctcagaattcaaggaggcctctccttttg

SEQ ID NO: 41932 - DNA, 122 bp, Homo sapiens
agtttgcactgacttccattttctccctggcttccttccggtgtcagatgagagtccccgcgctcctcccggacagccctcagggtcctcggctatcatatatgggggagggggtggaggtg

SEQ ID NO: 41933 - DNA, 122 bp, Homo sapiens
gccgtgtgactccctcaggagcaggagggagtgtatcccatgcttatttgtggaacccttcgtcagagggcaccatcgatctgtcctctgccacgtttagtggacgagcacactcgcacacc

SEQ ID NO: 41934 - DNA, 122 bp, Homo sapiens
aaatagtgatagtgcaagtggtgccgaactaacgataaatttggaaaacagcggcccacgcgcagagcccgtcccaattctggcagcctttggatttggcttccacgttttccagatttccc

SEQ ID NO: 41935 - DNA, 122 bp, Homo sapiens
cgccttgccccctttgaagtcttatatcttgcctgggcgctccaaaacattacataaaaacggtgagagcaggggcattcgcatccagctcgactttcataggaatgcgtctggcgtttcaa

SEQ ID NO: 41936 - DNA, 122 bp, Homo sapiens
agaaagtcaggttgaaacaggaaaaccaccagactctaatctcagccctttaacgacatacgcattggagcgcaagttaggaaaatgagcttttgttttcatggaaatcattctgattacag

SEQ ID NO: 41937 - DNA, 122 bp, Homo sapiens
tactgcgagcagcatacaaacctgctttggctgcacttcactgctcatggcataaggccacgaagaggccaataaaggctggagctcaggagcatcaacccagattcaaggcttcctctctg

SEQ ID NO: 41938 - DNA, 122 bp, Homo sapiens
acacacacacccttgccagccacacgctatcagctggaagtggggagggcgcggggagggcgtgggggagccagcagcccgcccgccctcccgcccccagacgaggactccccagcaccggg

SEQ ID NO: 41939 - DNA, 122 bp, Homo sapiens
agatttagaatgcacattagcatattaaatgttctgaaaagtcctgtaattataaaaagccgcttaactgtgttgaaacagggtgtccaaaatttattgtctgtggagtccttttcttcata

SEQ ID NO: 41940 - DNA, 122 bp, Homo sapiens
caaactcctgacctcaggtgatctgcccgctttgacctcttaaagtgctgggattacaggcgagagccaccgtacccagccaaaagctacaattttttaaaagcacatattgccaggccagg

SEQ ID NO: 41941 - DNA, 122 bp, Homo sapiens
tagggggaaggcctggtctgatgacacaagtcagctgggaccagacaagcatgcccgggacgttccctcccttgacaagtacgccgaggagcgatgggaggtaagcacttgggagtgtgtgt

SEQ ID NO: 41942 - DNA, 122 bp, Homo sapiens
acggctgctactttcttgcaatgaaaacttgacattggcttgaatggaagtttgtctatccgtaagacttttcatgtggaaaatggtcctctggaacttagggcaggatactgggctgcatt

SEQ ID NO: 41943 - DNA, 122 bp, Homo sapiens
agcctgggcattgaggccagataaacctagttcaaatctctactctgccaactgacctctcgaactttgttttccttatctgtgaaattgcaattgtagtgagatttaaatggattattgtg

SEQ ID NO: 41944 - DNA, 122 bp, Homo sapiens
gctccagcgccagccccgcctcccgcccgcccctgtcggcccctcgcgccgcctccgctgcggcccgtcccctagctcccgcccgcccgagaacccagccccaggctgggccccaggaggcg

SEQ ID NO: 41945 - DNA, 122 bp, Homo sapiens
ctggctgccctggactctggcagccacgcgggctggcagtttaagcccatggacagtgcccgaacgctgtggtagctgttccctcagagcgacaggtactgacccaccggtcccccatcccg

SEQ ID NO: 41946 - DNA, 122 bp, Homo sapiens
ggacacggacacacagtgcagcactgttggtcgcagggaaaacggtaaacaacctgaatacgcattcacagggaacggatcagcaattatggtaagtaatgtgacggtggaaagaagtaaac

SEQ ID NO: 41947 - DNA, 122 bp, Homo sapiens
ccaggaattcacgaccagcctggtcaacatagtgagaccccatctaacccaccccacccccgtcacacacacagcaccaacaacaaaataaaattagcagagtgtggtggggcgtgactttg

SEQ ID NO: 41948 - DNA, 122 bp, Homo sapiens
gaggcccggccactccccttttccacccccccttggctcatttccggccgccgccgctaccgctagcctgtaaggaggattcggcagagggaagaaacaacagccgccatcttgtttgtgtg

SEQ ID NO: 41949 - DNA, 122 bp, Homo sapiens
aggcacgtgccactgtggccagcctctgactcatttaaaccatgtttctcagcctcaacacgactgacatttgggacagggtaacacattgtgagatgtttagcagcctcctcccagatgcc

SEQ ID NO: 41950 - DNA, 122 bp, Homo sapiens
attactttaggaagggttgatggctgggattggacacaaaagaaacctcttcatactcagcgatctctatcttgagctgggtgttggttacacagatgggttcactttgtaaaaatccatct

SEQ ID NO: 41951 - DNA, 122 bp, Homo sapiens
atctaactgcattgacttcatttggagcagaggcgagaccacagatactgtgaggggcagcgcctgaggtggctttagagccagtattcccttcctctgggtccccagggagaggtgtggca

SEQ ID NO: 41952 - DNA, 122 bp, Homo sapiens
agagttgctggtgggagcctgtatgtccaggcacctgggatgagtgagttccctgcaggacggatggagcactaaggctctgcgccacagagtaagaacaggcacaggtgtctgtgggaccc

SEQ ID NO: 41953 - DNA, 122 bp, Homo sapiens
tccacgtggggccatgaccaagcactccaaacactgcagcgggcgctgcccctcttccagcgacacagtgggagcagcccagccatccagtgactttttgtggacatggcccagcccctcaa

SEQ ID NO: 41954 - DNA, 122 bp, Homo sapiens
ttgccgggagccgaggaacaatggatggccagcagcctccagtcactgagaggctggagccgggcctccctcggccttcagaaggaaccaaccatgctgacaccttgatcttggcctccagc

SEQ ID NO: 41955 - DNA, 122 bp, Homo sapiens
gggcgcgtccgatgcagatgttggctcaaattccatcttaacctataaactcagttctagcgaatacttcgggctagatgtgaaaataaacagtgatgacaataaacaaattgggctcttat

SEQ ID NO: 41956 - DNA, 122 bp, Homo sapiens
cattgtttttgacctgtttgcctattcctcagtctgtcacaccaacatgaccagtcctgccgattgaaactttctggacacaagcttcagtctctggaagattcttgggtgtccttctccct

SEQ ID NO: 41957 - DNA, 122 bp, Homo sapiens
ctgagggaaaaagactctcccttcgggtggcccagcggatttttaatcacatttatctgtcgcaaggaccctgcaccaatcccttttaaggctgcctcaagtcacctaggaagttgcagcag

SEQ ID NO: 41958 - DNA, 122 bp, Homo sapiens
agggcggggcggggcggggcgcacagagccagaggggcttgcgagcggcggctgagggaccgcggggagggggcgccgagcggctccagcgcagagactctcactgcacgccggagggcgcc

SEQ ID NO: 41959 - DNA, 122 bp, Homo sapiens
tggccgcgcccgggggtcccccggtctcattcctgggggagcgctggccttggccttccgcggagacttcatccaggtgggcagcgcctacgagcaacataaaatccgccggcccgacagct

SEQ ID NO: 41960 - DNA, 122 bp, Homo sapiens
agcctgccggcctggtgtgtctcgggccgtaggtggcgacgtgggcgaaggatcagcgtccgcgcgggccgggggcgcagccatggcgctcggaggcctctttgcgggcctggccgggcggc

SEQ ID NO: 41961 - DNA, 122 bp, Homo sapiens
aacagcgcaggctcccagggaccgcgcccggtgcccacctggtcacagcggagtagctggcggccactgggaggatcctgtgcaccagctccctgatggacaggtccaggttggggtccacg

SEQ ID NO: 41962 - DNA, 122 bp, Homo sapiens
tggtggcccacttgttgaagacaaaatcgctttccctttccatcttaaaggttcgtgtaacgtgtgaaaatattgaaagcaatggaaatgggagtgtaattgtttagtacctggtaaatcag

SEQ ID NO: 41963 - DNA, 122 bp, Homo sapiens
ggctcctcagaactcttgagtccattgggaagggcttctacagctctgggttctaagctccgggaggataatctggccccaagaatcctgcccccaggatcctctgcccaccctcccccata

SEQ ID NO: 41964 - DNA, 122 bp, Homo sapiens
cagcaccacgtccccgtcccggtgtcttcgccggctccctcgctcccgttcgctcttcaccgccttcattctgtgattttggctgggcgaaagaaaacagatcagttgagctcctctagctg

SEQ ID NO: 41965 - DNA, 122 bp, Homo sapiens
tcccccaaagctgactcattcctgcttccttgccaatctctttcatccttcagctgaggacgatgacatgaatgaggacacagtagagaggattgttcgctgcatcatccagaatgaaggtg

SEQ ID NO: 41966 - DNA, 122 bp, Homo sapiens
cttcctgaggtgagaaagaagcaaaggtaccggctgctggggtcagggctgtctcacacgcgtggctctaggcaggagcacaaattgaaccactggggaaagtaggactccagcagaaacga

SEQ ID NO: 41967 - DNA, 122 bp, Homo sapiens
aggaacgcggcggtgtgccccggaagcggaagtagattctcctatagaaaggctggactacgcggagtggtgacgtttcctcattgggcggaaggttcgctggcactccgttggtcttccag

SEQ ID NO: 41968 - DNA, 122 bp, Homo sapiens
ttggcagtataagttccaatgcaaagtctcacaatagctgtgctctccctccctcacacacgcagattctctctctgtaccatgtggctgctgtcaggagatgggggaggggtggtgtcagc

SEQ ID NO: 41969 - DNA, 122 bp, Homo sapiens
ccatttagtgatgagcaacctaggccaatcctaagcctggactgagtcccggggctgagccgcatgtggtgggggcatctgcacacactgctttgtcaggccagattgtgaggctgagtaac

SEQ ID NO: 41970 - DNA, 122 bp, Homo sapiens
gaggtccacatgaggtcagagaaaagcgcaacacccagaccgtgcatccgggagagccagcgtgaggccccgaggccacgcgggcagacccaccgcggacgcaggggacgcaggggacgtct

SEQ ID NO: 41971 - DNA, 122 bp, Homo sapiens
ttgaggaaagcacctctgatgagcagatagctggaggctgttcccacagtcatgtctcagcgaagaagtcggagttcagcagccatcagaaccaaggtatgtgtggtgatcttcggaatgcc

SEQ ID NO: 41972 - DNA, 122 bp, Homo sapiens
atagtctctcgctttttacacaaaaagcagaaacctgcccagtgtcatccggcaaacccacgacgggcaaggtctccccgcgcaggtcaggtggccgcagggtgagggccagggcaacccgg

SEQ ID NO: 41973 - DNA, 122 bp, Homo sapiens
agagaaatggggctgcctcagaccgacccccgctccccgctgaggaaattacgggtttctcgatgctctctactacagaaaggcagctggactctggcgcctaccgataacccacctaagct

SEQ ID NO: 41974 - DNA, 122 bp, Homo sapiens
cacgcacgtgtctctgctgaataccccgcgtgaatgtgcccctgctgtgtacccggagtgcgtacgtccctgctgtgtaccctgtgtggacgtgccctgctgtctacccggcgtgcgtgtgt

SEQ ID NO: 41975 - DNA, 122 bp, Homo sapiens
catatatcttagtgccttctcagtcactaaaacccaggacatcagctggtgtgctgctttcgtgggtgcactactttgtaaatattctgtgcttatttcttgccttgtgtctattctgtcct

SEQ ID NO: 41976 - DNA, 122 bp, Homo sapiens
cggggagctgcccctcacaagcatggcgtcagctgaaaatgaagcctgtgctgtgcggagcgtcgcctgcccctcacaagcatggcgtctgcagaaggtgctgtgcggccgctgcggggcgg

SEQ ID NO: 41977 - DNA, 122 bp, Homo sapiens
tcccatgacaagtgaggtttctgccgcctgggagagtgtcacgtgtggggaatgacacaacgcccacgcctagagcgggctgagtcaaggatcccggtgtgctcatctaacgtccgcaaatg

SEQ ID NO: 41978 - DNA, 122 bp, Homo sapiens
ggtgctcaaacctgagcggccgactacaaatcccagagtgcctcgcgggcgccgtctccacggcacttgggtttcagggccatggaatcgcaagcccttttcgcactgcattatgggatctg

SEQ ID NO: 41979 - DNA, 122 bp, Homo sapiens
gtggtggcgagggcagcggcagcctttaaatactggctgtggtctcccgcgtgcccactgcgttcttggtcacccagggcaacagccaattggggtcgaaatcgtcctccctgtgtgcaagg

SEQ ID NO: 41980 - DNA, 122 bp, Homo sapiens
ctactccttgtaagttctctcaacgccaaaaaatagagactgcatgttgactgcaaaaatcgatgacttctcaggctgattaaccgtcatataacttttttttttttttgctttttagaatt

SEQ ID NO: 41981 - DNA, 122 bp, Homo sapiens
tcactgctctggcctcggcgcctggaaaccgcgtgtccatcaaaacgtgaaggtgaacctcgtaagtttatgcaaactggacaggagggagagcagaggcagagatcaccgtgtccactcga

SEQ ID NO: 41982 - DNA, 122 bp, Homo sapiens
tgaactcgttttccgtcgttttggggattggcgattgtcctgaggcgtgttactggaagtcgagagctgtgatgaatggttccacaaggatgggacatcttttgggcctgacacctgggggc

SEQ ID NO: 41983 - DNA, 122 bp, Homo sapiens
caggtagaacgcgaggcatgggagaagagactccagcggccgggaaggcccagaaccacgcgcgagtcccgcaggcgtctccgagtcccccgcccccaaggcccgcactgcgcgcccctgga

SEQ ID NO: 41984 - DNA, 122 bp, Homo sapiens
caaaggaaggactttggaaaggaatcaggagagagaagtaaatggggttaagagggagagcggggggaaaaaatactgtactttgaaatggtgtagttctgtctgctcaccaggggagggag

SEQ ID NO: 41985 - DNA, 122 bp, Homo sapiens
ctggccacctggtgccctgccggggtattccaaatctgggcagcagaagccggccgccgccgccttcatctggaaaggcttaagccttctccgggtggggaagaagtcagaaggccgcctgt

SEQ ID NO: 41986 - DNA, 122 bp, Homo sapiens
ggatgatggtcctggggactcgggctgcgtggaagggtcggcaggtgggctctgtggagacgtggtcagatgaggtttcgggttgagtatgctctcggtggatgaatcacctctgccacacg

SEQ ID NO: 41987 - DNA, 122 bp, Homo sapiens
aaaccctgttgcccacagaacgcccatgacaccagctgggtggagctgccgccgagtccacgccccgtctggctgggacctggagctcccctcaagctgcagatccactctgcaccacaagg

SEQ ID NO: 41988 - DNA, 122 bp, Homo sapiens
gattttttttcgtccctctgcctggggcactctggtgccttccatggtgtcagcggagcacggctggagtcatgactcccaaacagcgagaagggagggccctgcctcagtgagcccttttt

SEQ ID NO: 41989 - DNA, 122 bp, Homo sapiens
gtcgaggggtgcacctgtgggctgcccaccgtggaacggcatggcaaggtcctgagaccccgagctgtcgctattgggagtgggcagaatgttgttccacaggggttggaagtagtgaccat

SEQ ID NO: 41990 - DNA, 122 bp, Homo sapiens
agggaaaaacacctttatgtggggaactaactgcttttcctgctgggcagttctcctgagcgctaaccccaacccccatgttccagtgcagagtaagtggaggtgctgtggctgcaagctca

SEQ ID NO: 41991 - DNA, 122 bp, Homo sapiens
ggagacagctgtgggcactgtgtgcccagccccggccttcccagcagagtctgtgtgcatcgtgtcccaagtaaaaacaattcagttaccagaatggggtagttccttcacttgctaaaata

SEQ ID NO: 41992 - DNA, 122 bp, Homo sapiens
ggagagcgagggatgcttggagagggggtgagaagtggctttagtcaaggttaccagggacgtcagctctcatggtggtgacatttgagttgcaccatgaataaccaggagatagcattgca

SEQ ID NO: 41993 - DNA, 122 bp, Homo sapiens
tccggtagggccggcagtgtagatttccccaggggcgggggtgggatctgagcaatcactcgccctcccccctcccaggggcggggagggggtgatttagggaggactccacggggcccaaa

SEQ ID NO: 41994 - DNA, 122 bp, Homo sapiens
gtgggggcccggggcagggcggaagcggggtctgaggaggtcggataagtccatgcgattcgatatgtgtcattattattcgatatggaggacagagcccgggaagctgggctggaagaatt

SEQ ID NO: 41995 - DNA, 122 bp, Homo sapiens
tgggagcctggccccagcccgaaccccgtgctggccttgcctgctgaaatatttacctcccggctcctctgacaggcagagctgtctccttaagcaaaggttattggactgcgaatgttatg

SEQ ID NO: 41996 - DNA, 122 bp, Homo sapiens
ccgcgccggtgcccacgcgtcccgggcttcaggggagcacctgggaagcgctgggggtcgcgtgcccttggccggaggcctggtcacccgcaggccctgccatcctcggcttggccgctgct

SEQ ID NO: 41997 - DNA, 122 bp, Homo sapiens
aaataggctatccaccagagcttaaattaggtgggaccttataagatcagagagcccaggcggtaccatttatttcttttatgatttatgtcatcttcagctctgagagacaaggccaggaa

SEQ ID NO: 41998 - DNA, 122 bp, Homo sapiens
cgcgggcaggaggcccagcaggtattgcacggggagcagcaggtggggaggacccgcgggcgcagggtctgcctagagcccttggagcccccggccaggcggtccccggtgggcgccccggc

SEQ ID NO: 41999 - DNA, 122 bp, Homo sapiens
ttggggaacgttagggagattggcgcgcggaccactgggtgagcgcccaggaacgccggacgcgcgccttcacgcccgggtgcctggcggcgttttagaaaagctgtatttgaaaagcaacc

SEQ ID NO: 42000 - DNA, 122 bp, Homo sapiens
gaccaccattaattcctctttgtggagcaacttttctccaaggattttaaaagaaatgaccgcatggccattgtgaatcaaataggtttgaaatgcaatgcattaggaggaaacatttatgt

SEQ ID NO: 42001 - DNA, 122 bp, Homo sapiens
aggggcccgaggacccgcttcctagctgagcgtcaggacggggggcggactctcaggagccgcgcggcgcccgcagaggagaggaagcgccggagacccccctgctcccacccggcctccct

SEQ ID NO: 42002 - DNA, 122 bp, Homo sapiens
ggagaggcgggcgctctgtgggcgacgaggcggggcggatccctggggggagctttaagccgactctactggagaagcagtctaccctagagggaggatgggcagttttcctgcgggggagg

SEQ ID NO: 42003 - DNA, 122 bp, Homo sapiens
taaaggaagcgttagtggatacgctcaccgggatcctatccccagtacaggaggtgcgggcggctgctgaagaacagattaaggtgctggaggtgacggagggtgagtgaggcgggaccgtc

SEQ ID NO: 42004 - DNA, 122 bp, Homo sapiens
ctgcagcattctccctcctcctccctaccccgcctcctctctttcagatcagagcttcggcgatggaaaagcagctgtcggtcctggccgtgtaaccaccccagatttgccagacacacgct

SEQ ID NO: 42005 - DNA, 122 bp, Homo sapiens
tatcccaatttcacagacgaggacgatcaagtcgttaatttgtcaaaggtcacccgcaggcgacaggcggggacagggtctgggaaaacccgctaggcaccgaggcccagagggcgtcgggc

SEQ ID NO: 42006 - DNA, 122 bp, Homo sapiens
gacactcagtcattcaacagacatctgtcaagcacctgctgtatgctggagctgtgggtacgtcagcaattagaggaagagggcaggggtacaggagttcctgaccaccccaggccagcacg

SEQ ID NO: 42007 - DNA, 122 bp, Homo sapiens
ctttgctgtcccaaaagttccactctggaaatgagcccccccgcagcattgtgacatcaccgtgcactagccaatggctgcctgcctaagctgggtccctggtctcctgggactactagccc

SEQ ID NO: 42008 - DNA, 122 bp, Homo sapiens
atgctttaaaaccggttagaagtacacaatttcatcctttagtaatattagtcatggccacgctctaaaggcggggtgaaacctacttgcctggaggaaaaggacggggtagaaaaacaaag

SEQ ID NO: 42009 - DNA, 122 bp, Homo sapiens
gcagcaggcgtgcagtttcccggctctccgcgcggccggggaaggtcagcgccgtaatggcgttcttggcgtcgggaccctacctgacccatcagcaaaaggtgttgcggctttataagcgg

SEQ ID NO: 42010 - DNA, 122 bp, Homo sapiens
ggacgcccgcccgccaccaccgccaggggacccgcggagagccccgccccgcgcccgccgcggctcagccgtttcacatgctgattggctgtggtgggggccaatcagcgcccaaccgcccc

SEQ ID NO: 42011 - DNA, 122 bp, Homo sapiens
acggcggccacgtgacaggggggtcacgcgcagggtcgtaggggaccgcctggggatccccggacggctgcgaggaatgagcggttggctcgggctggtttcctccctccaccgcctgcttg

SEQ ID NO: 42012 - DNA, 122 bp, Homo sapiens
gatgcaaaggcaggccatgttggacgccagtgagcccctatacgtgagaagctaaatcaccgcagcagattaagagcctcccccaaataaaacctggataatccccacaccaagagttaatc

SEQ ID NO: 42013 - DNA, 122 bp, Homo sapiens
cgactccccttcctcacaaccccaaatcgaagacctccctcttttggagagccgattggacgactggtcccagcgctttccttaggctgtccgtctactggttccagattcgttccatccgt

SEQ ID NO: 42014 - DNA, 122 bp, Homo sapiens
gcaggaagggacggccagcatgcagcgccacgattcggtcagcaggtggcgcgcgagcaccgcgtttaaccagtttctaggtgcgcgtgctttgctgtcttttgttaccattttgtttgttg

SEQ ID NO: 42015 - DNA, 122 bp, Homo sapiens
acgaaaagcattcttatgttagccatcgttgagttcctgccatgcaccaaatcacaaacacgtcaggcagtaggcattctttagtttacccgggagggaactgaagctcagaggggttgagt

SEQ ID NO: 42016 - DNA, 122 bp, Homo sapiens
aggtgaccaacctacatacacttgtaccggattctctagaatgtgtcttcaggaattccccggggctcttcctgtggtgctgagagtggctctgccaccatcacagcaaacaggaggcttaa

SEQ ID NO: 42017 - DNA, 122 bp, Homo sapiens
ctgcccactttctctctaagtcctggttctatcaaccagagcttgctaggatgatggacacgtctagggaatgtctactcattatttgctcaagcaacattgaaccactgtaagtgcttctg

SEQ ID NO: 42018 - DNA, 122 bp, Homo sapiens
agtgatccacctgcctcggcctcccaaagtgctgggattacaggcgtgagccaccacgcccggcctaaaaaagtttgaaaaaggtgaaggagtgagtcctgcaggtatctggggacaacatt

SEQ ID NO: 42019 - DNA, 122 bp, Homo sapiens
aaagttttaaattttcccattcgtgtcatagtttgggtaccctactcctcagacccggggcgagccttcggctgtgactcagcacataaaaaaccagaacgccggaagtattttcctacacc

SEQ ID NO: 42020 - DNA, 122 bp, Homo sapiens
atttttagtagagacatggtttcaccttgttggtcaggatggccttttaactcctgacctcgtgataggcccgcctcgacctctcaaagtgctgggattacaagcgtgagccaccacgcctg

SEQ ID NO: 42021 - DNA, 122 bp, Homo sapiens
caccccccacccccccgaagcgggccagagaggtgtcctccgtgggtcaggaagggtcgacgccccctccttccctcagccgcctccctgcagcatccggcgcccccatccccctgcccgcc

SEQ ID NO: 42022 - DNA, 122 bp, Homo sapiens
cacatatctaaaaacacatgtcaccagcagagttaatcacctgttggacacacaatgcgccgcacaccccagatctggagccgcctccaggtctgcagagcctggcggggtcacaggcatcc

SEQ ID NO: 42023 - DNA, 122 bp, Homo sapiens
ttctacactttgcagaagcctacctgtggctacctgtaccgccgggacactgaccacacccgcaagcgctttgatgtgcctcctgccaacttggtcttgtggcgctcctaggcctgagccaa

SEQ ID NO: 42024 - DNA, 122 bp, Homo sapiens
aagacatttagcttttcagaaagcatggagctgcagggtgttacgtttccagataggactcgaaacctcttgcataaatcagctcattacagaggccatgaaaaacattttctgtatcagtc

SEQ ID NO: 42025 - DNA, 122 bp, Homo sapiens
acactctcctttttgttcctggcagtgctggtgttgctcattttgtccatgaggcggcaccggaaacaaccatacatcatcgacgacgaggaaaacatccacgagaacatcgtccgctacga

SEQ ID NO: 42026 - DNA, 122 bp, Homo sapiens
ggctaaggaggaacgccccgcctgtatgctgggtgggcgggaggatgactctgaggctctcggattggctgggaagcctctctctggctgagcgaacggtgggtgctgcgcatgctcatcta

SEQ ID NO: 42027 - DNA, 122 bp, Homo sapiens
taatagccagggggtagaggatgacattatggaaaatagcgcagtgggtgtacatcccttcggtcatgttgttccgaatatcctgtgtgggagcggatgttacgactcccaaaatcgcagtg

SEQ ID NO: 42028 - DNA, 122 bp, Homo sapiens
cgaagtgatcaaagttaacatcagcagtaataagacattcacttcatgcacctcttgatacgatgcctgaggaccaaccctcccttctgctgtaatcttacgaaaatacataacttcaatat

SEQ ID NO: 42029 - DNA, 122 bp, Homo sapiens
accgcttgcccctgggaacgtcgctccggacgggcgtcatctgccacgtgtgataggagccgtctggccaagtggaaaaatctaggctaagcgcagagcacaaccctggcagggtcaagtcc

SEQ ID NO: 42030 - DNA, 122 bp, Homo sapiens
cccgctgtttatcaccgcagattacggttgcaccgtaaaaggagaggttctgttccgtcgcgggatttcgccatggtaagacgtctgcgtcctagctccggatttatctgcctccatccttt

SEQ ID NO: 42031 - DNA, 122 bp, Homo sapiens
gaggcgcggcccggcagctcccgcatgcgcagtgcgctcggtgtcagacggcccggatcccggttaccggcccctcgctcgctgctcgccagcccagactcggccctggcagtggcggctgg

SEQ ID NO: 42032 - DNA, 122 bp, Homo sapiens
gcagcaggccaggagagagcggagctggttggaggagggccagcctccccacctagagaccgtcggtgaccttcctcatgtgatgcgtcccttggtgtggcccccagccgctagtggtgaac

SEQ ID NO: 42033 - DNA, 122 bp, Homo sapiens
ccagacccaataagggagtctggctgctattcccagttccacgacaatcagtggggactccgtaagttgattaacttgtttgtatatgttactttatctaaaaatatactcaggttgacaaa

SEQ ID NO: 42034 - DNA, 122 bp, Homo sapiens
ggagtgcatgtgcacagcacagcctgaggccacagccccgagttccggaaggtgtgggcacggcccccacgcaggagctgggcgggcctcgccactcagtaccagaggcctgccagcaggag

SEQ ID NO: 42035 - DNA, 122 bp, Homo sapiens
cccctgcctcctgcacaactccctcccccaaagctcaaaacagctcctggagcaggcccacgtgctgcccaagttgcccaagttgagtccttgttgccactcaacaggaccactggttacca

SEQ ID NO: 42036 - DNA, 122 bp, Homo sapiens
tgtgtcagggatagctggagggcctctcacatcccacaagctcaaatagcttgtggtcctcgtggatttgcgttttctccaaccaccaccgaacccatttctcccgccgagagcgccacacc

SEQ ID NO: 42037 - DNA, 122 bp, Homo sapiens
cctgccgctgcagcagagccgggctggggcgcagagccagtggcagaggagcggcggcggcggcggctgcgtcctgggcggcgtctgcgcggctgcggccccactggcggctgcggctactc

SEQ ID NO: 42038 - DNA, 122 bp, Homo sapiens
ctcctccaggcctccgttctgtcatgcaggatgagagcagaggttcttaaaccagctctgcggaccatgtgggcccacagaggggcttaaagagggtgtccacataccctctaaaattacgt

SEQ ID NO: 42039 - DNA, 122 bp, Homo sapiens
ctaagctgaggagtttggccttcgctccaggtgcggggactcgtggaaggatttgattcgcgcttgagaaagatcgctccgctcctgtaaggaagagagcgtgtaggggctgcaaccagaga

SEQ ID NO: 42040 - DNA, 122 bp, Homo sapiens
aggaccggaagcctgttgggggcggggggcggggggtggggtggggtgtgtgtgtgtccgcgtaagctcagaggttcgcgatttctttgggggcgatgaaaatgtcctgtaattgtgacgat

SEQ ID NO: 42041 - DNA, 122 bp, Homo sapiens
tcatccagacaggtccgcagtaataacaaccaaagacacatattctcaggcaatgataaccgcaccacgactccatggagacaccagtgttttaagatattgtcaattccagatatgtgtaa

SEQ ID NO: 42042 - DNA, 122 bp, Homo sapiens
ttgtacagagaacaagcttggctttttctcccaacgccgaggatgctgttgatgctgccacgtaatagcataattttgggtgtcctcaaggacagaacttccactttgaataatggaagtta

SEQ ID NO: 42043 - DNA, 122 bp, Homo sapiens
aaacagcacttaatgtcagtagcttcaggctgtttttcaattttacagtaaattttttaccgaaacaaatttaggtagctattttgtccatgggcttttgtagtggaaagatgatgtgagta

SEQ ID NO: 42044 - DNA, 122 bp, Homo sapiens
ccgcggtagcgcagcatttcctaacttttccacgagggaacctctccgccctggccgcgccggcaagttgtgctgaaaaaataaagtgaagtcagattcctgagggtccgcagtatcccatt

SEQ ID NO: 42045 - DNA, 122 bp, Homo sapiens
gcaaacaggaagctttctttgtgctagatttgtaaagcagaggttgaaactgggctaccacgggtccagagaagtgttcccagctcttgttctcttgcctgtgaagtgtactatgagagcct

SEQ ID NO: 42046 - DNA, 122 bp, Homo sapiens
atcaatggaaaatatgaagactgagtcatacttacacttacacgttcatgcgcatggtgtcgctcttcactgagaacgtttccgcgaagaaagccgccgtttctttcttcctgcagaaaata

SEQ ID NO: 42047 - DNA, 122 bp, Homo sapiens
aaagacctgccggcttggcgcagggtgaagtgggagttgtagtcttaccgggccggactgcgcagcctttttccgggcacactgggagttgtggtttatcgcctctggactaatggctgtat

SEQ ID NO: 42048 - DNA, 122 bp, Homo sapiens
gatccaacagtgctctgtgcagcctggaagcatgagtgatccttgggcctcacacaaaagcgagataattggctctcaatgaagagatgtaaacatccatcataatggcactgtgctgaaac

SEQ ID NO: 42049 - DNA, 122 bp, Homo sapiens
caggcagaaaaaagacgcagaaacattggaataacgctccacacgcactgcttgattctgcgctagaaaccctgttatctccgaactgttggtgttattctgagtcacagcaccagctcttt

SEQ ID NO: 42050 - DNA, 122 bp, Homo sapiens
aggataggtattaggtaaggcttatcagctgcctgtccgctttgtgcccccagggtggtccgtgccgccaggtaggcctttctcagccatcactgaaagcaagctctggaaatcagtagccc

SEQ ID NO: 42051 - DNA, 122 bp, Homo sapiens
gtttaggatgaagaatacagaatggaaaatgaaggattaggatgaaacctgggactccttcgagcattgtccagggaaaggagaatagtctgaaagggaaacagatggaccaataggagaag

SEQ ID NO: 42052 - DNA, 122 bp, Homo sapiens
cctcactgggacaagacacaggtgctgaattacatcacaaagcgtaacctccctgcagggcgtggactcagaggggcaagagagaccgcagaccaggacccacagagacccttgactgggcc

SEQ ID NO: 42053 - DNA, 122 bp, Homo sapiens
gtttcacctataacctcattatatgttcattaacttactaaatcacacacccaccagtgccgtgatagtccgggaacacccaaattggtgtaaaaatgggtggtaccacagttccaggaaat

SEQ ID NO: 42054 - DNA, 122 bp, Homo sapiens
ccaccaccaccaccaccaggagggatctgcacagtggtgaagccacggagacccaaagcacgcccagaacccagcctccacacgaggcttacagctctctcgccccgctccctcctccccgg

SEQ ID NO: 42055 - DNA, 122 bp, Homo sapiens
cagggatcactacaccaggtatggtcacctttgtactctctatcctcaaaccaagactttcggaaaggctttcagtgcaattctagacagacagagaaatccttcaatggattatatctacc

SEQ ID NO: 42056 - DNA, 122 bp, Homo sapiens
aggcctctccgcgggtggctccctccaccctgccgccccgcctcgcggctgggagttgcccgggagctgtgaattcactagaccagcattcacccagggcctgcgggggctgtgaaaggatg

SEQ ID NO: 42057 - DNA, 122 bp, Homo sapiens
aatctggggcgcagaaggacagagattcaggcctgcctttcctctccctgaaagagcctgcgctggccctgggcagagagaaggatgagaagtgaggctgagtgaggtggggtctgcaggga

SEQ ID NO: 42058 - DNA, 122 bp, Homo sapiens
gagagagattaataactggtggttcttagtctggcgcgagcgggtgctcgtgtcactcaccgggggaacttaaacgccgcttgctgagtcccaccctagcgcatagaatcataaccgcgggg

SEQ ID NO: 42059 - DNA, 122 bp, Homo sapiens
tattccagcaaaaatgcaactctcttattgcattgtgtaatcttattattatgctcacttcggaggaatagggaagtccttaccttgtttcgtcttgcaatactagaatttccttgaaagca

SEQ ID NO: 42060 - DNA, 122 bp, Homo sapiens
cctttctcactgaacttacataacttacagtaatagactccggcaaaatgcaactgactccgtttttttcacatgcaaatcctgcaggtgccaatttttcagactgctttgctatgaagggc

SEQ ID NO: 42061 - DNA, 122 bp, Homo sapiens
gaatcctcaagatgacctctgatgtaggcattaatattcccattttacagatgagagaaccgccccagagagtgaaagtcacttgccccaaatcatacagagaaccaataatttgaacccag

SEQ ID NO: 42062 - DNA, 122 bp, Homo sapiens
tacggaggccaagagaagaaagagtttcaagatggtggaaccggaaacagtgccagatgccgccaagagaacagggaaaatgagaactgggaagagactgctagatttggggagcagatgat

SEQ ID NO: 42063 - DNA, 122 bp, Homo sapiens
tcatattgtgtgtgggtactggtccctgcatttattaaacacaacaggctggatgtcatccggctaaacccaagccacctaatattatcacagccatcaatccttctcctaacagaatagtc

SEQ ID NO: 42064 - DNA, 122 bp, Homo sapiens
agcaaatggaccagtacagacagcatctttggagttggggacatggaaaaggaggaactgcgtggaccctgtctgtggtggtagtagcaaatgcagtggtgttttcccagggccaagtctgc

SEQ ID NO: 42065 - DNA, 122 bp, Homo sapiens
ctgctctggagatggggacagcgtgcttgtattgggtttgagccaagtctgagccacgtccgtctgctcggggctggccggctgtgctgtaactctggtcagcactggttgttactctccta

SEQ ID NO: 42066 - DNA, 122 bp, Homo sapiens
aacgagcatgatggggaagtggccactacccggaccctcttgcctatgccccacatttaccgtttgcctgggtttagagacactgcccttttccaagagccagaggccccaaatggaaactt

SEQ ID NO: 42067 - DNA, 122 bp, Homo sapiens
ctctcagagggagaggcgtgggtgggaaccgaggctgcgcacagtgcttgcgggccagaacgagttccaggtgggcgcgggcttggcggaccccgcactcggagcggctggcctgcgctgct

SEQ ID NO: 42068 - DNA, 122 bp, Homo sapiens
attcagaaaaaaaattcagaatggtgtcccactcaaagcttgcggtgggtggggggtgggcgtctaaagccggtcaatctacctcaaaggggtgatcatgggtttcaacttcagaatgtgaa

SEQ ID NO: 42069 - DNA, 122 bp, Homo sapiens
aggagagtttggtcactgcctggatataaggggtgaggtcctcgaaggttggagccatgtcgcccatattaggtgctttcaataagtgaagaatgaacccacaaactgacctatgtgtagat

SEQ ID NO: 42070 - DNA, 122 bp, Homo sapiens
cacctcagctcctcctgtctcaggccccacttggtggggagccgccgcaggcggggagcccgggcttgcccctgcgggcagtcaccgctgccctgtgccccgaaaccaccctccccgccccc

SEQ ID NO: 42071 - DNA, 122 bp, Homo sapiens
gttcccaaattccattacgtcattcttgcaccacaggggttttaacagctctcttgccctcgcttctgggagcctcaagcatgcgtgtcacagactgattctgcaattcctgtgaaacctgt

SEQ ID NO: 42072 - DNA, 122 bp, Homo sapiens
accgggggggtgatgtaatgcactctaaatagaatgtattgtaatctttgctcagtccaacgtggtcccttcacccgggctccgctcttgccttctccacacttgtttggtaagttcctaaa

SEQ ID NO: 42073 - DNA, 122 bp, Homo sapiens
agtatctatgatgcacttgaaaggaacgagcgatgccagatgcggaggaaccaggcagggcgcattctgtcagtggcgccaggcggtgtagctccagctctcagataacccaggctttggga

SEQ ID NO: 42074 - DNA, 122 bp, Homo sapiens
ttttcccttggcgtcttcaggttgtcttggctaaaattagcagctggatgaggggcattgcggttttaaacaggctcctcaggagatgctgtagggcgcttgtgcttttttttatgggcacc

SEQ ID NO: 42075 - DNA, 122 bp, Homo sapiens
acactagggcaggtgggtgtgagagacagggcgccgcggctccagggaccgaggctgccccgacaaacctgttgcttgggtttgggtttgggtttgtttgcatttcaactttcggaataaaa

SEQ ID NO: 42076 - DNA, 122 bp, Homo sapiens
caggctggagtgcagtggtgcgatctcggctcactgcaacctccgcctcctgggttcaagcgattctcctgcctcggcctcccgagtaactgggactgcaagcacctgccaccatgcccggt

SEQ ID NO: 42077 - DNA, 122 bp, Homo sapiens
ctgggtgcgggtccccgggagcggggagttcgccggggagcgattgtccttgggcgtgttcgtgctgtggggtggggggaggagtggcgggtgggcttggtagggggtggggagagatctgg

SEQ ID NO: 42078 - DNA, 122 bp, Homo sapiens
gcttctcacaattccgagccctcgggtggtttgtgggagcacactctgcattcgaaaccacgcgcacctggccttagagagcgggaactcggatgcgaaggcatgcagaatctccttttcaa

SEQ ID NO: 42079 - DNA, 122 bp, Homo sapiens
ctggggtctgcggagtttggcgagtagtgcgggtgtgtgcccgcctggatgagggtaaggcgatcagcctctgagtgggcaaggggacgtctgattactgcccaggcttcgcctgggggtcc

SEQ ID NO: 42080 - DNA, 122 bp, Homo sapiens
tgacccactcccgtgacccctgaatagagtcacgtgacctggtttccctgttctgggtcccgcagcttcctgagctgacctgcgggcaaactctgcctcagcagccccccaactacgtggca

SEQ ID NO: 42081 - DNA, 122 bp, Homo sapiens
tttctgtttgtaaaaggaaatgtaaaccgttgaatgggctccccacaggactaacgtaaacgaccagattacacttgagaagtggagattttgagtgcagagaggaggctgtaggcgaatca

SEQ ID NO: 42082 - DNA, 122 bp, Homo sapiens
aagcaggcgtggacctcgaggatctcattgcagacccgcggagaaccggagctaaggggccggccgagacgggccgggaggatgctggagacgccagaagagggcgccctcacttccacctg

SEQ ID NO: 42083 - DNA, 122 bp, Homo sapiens
ggctaggcggtggcattgcaccccctgtggcaatgagggtggctgaagggctcggcttgtcggtggggcagcgagagccgggtgcacgcgccggggaggtagccaacagccgttgggacgcg

SEQ ID NO: 42084 - DNA, 122 bp, Homo sapiens
atcaaagcattccttttaaaatgaaagttggctcctgttactgctctgctcaaaacccttcgatggcttcccatgccacgcagtgtgaaagccagagtccttatgatggccttcaaaaccgc

SEQ ID NO: 42085 - DNA, 122 bp, Homo sapiens
ggcagacataccagcgccatgccctgggcctggtagttaaagatccacccctgacctaaccggttatgttgtctatagattccagggattgtaaaaatccctgtcctgttctgttttgttct

SEQ ID NO: 42086 - DNA, 122 bp, Homo sapiens
ctcaggcttggacctccctgtgctcttgaagaagctcttgctgcaaggtggaggtggggccggggctggaatctttcccaatgcccagctggaggctctgtcttatgggtggtgtttggtct

SEQ ID NO: 42087 - DNA, 122 bp, Homo sapiens
tcagccgccgccccagccgagccccagccaccaacgccaccagcgccatcctccgttccgcgcctcagcagcctctgggcgccgccatcttgcgtgacccttaacaccagtcctcgccggaa

SEQ ID NO: 42088 - DNA, 122 bp, Homo sapiens
caattgcctggagatagcggcggattggacagtccaggtcgctgagtcaagctaaagcaccgttgttttgactcactctttgtgacgtaggtctttctcaccagtcaagaaaatacaatccg

SEQ ID NO: 42089 - DNA, 122 bp, Homo sapiens
tgcagcagacacggggcaaggcaggcgctctcactgcacgaaaggcaggggatggactcacggtgtgagcgttgttgatcttctttacttcccattggccttccccggtgtaagtcagcagg

SEQ ID NO: 42090 - DNA, 122 bp, Homo sapiens
acatatggctgcagagctgacccaggcctcactacagagggcgctcaggtccctaccaggcgaggagaggacccagaggacggggatccgcatggatccttcccgcctcaccctggccctgg

SEQ ID NO: 42091 - DNA, 122 bp, Homo sapiens
gcgccctccgctggctatggcaccatgtgtcagccctgcctcgagacaggacactgtcctcggggtgtccacagcctcccactgggcctgctcccacagctcctcaacagcctgcctaagcc

SEQ ID NO: 42092 - DNA, 122 bp, Homo sapiens
ccctcggtcccgccgtgtgagcagctggtggagtggagctcagcgcggacgccggagctgcggccgccccctctgcaggtgcctgtgaggaggcgcccgggccgcaaccgctttccgagatc

SEQ ID NO: 42093 - DNA, 122 bp, Homo sapiens
gcccttagcttgagttactccagattgctttattccccttactgcgcatgtgtcaggggacggaattttgcattgcaggcatgtctgcaagggcaagtcacctgtgtagcctttcttatcta

SEQ ID NO: 42094 - DNA, 122 bp, Homo sapiens
tgccagagtccaacttctggattccttggggcaaatggccatgccttctgtgtgccatctcggtggggatggtggtggtaggggtagttctaggtgctcctctccctctgtgagaatagagg

SEQ ID NO: 42095 - DNA, 122 bp, Homo sapiens
cctagaagttcctgaattctaaccacgactgggaagagaggtagtgtgaaggaagcccggcgttgcccggcagctgcaaccattacgccccctgagatcgctaagagcagggatctagaggg

SEQ ID NO: 42096 - DNA, 122 bp, Homo sapiens
aaaatgtttgaatggggacttaatttaaacagttctctcctgtgcttccatttcaagttccggaatattatttgaaagggcaggaagccttcctctcagtgcgggttagcgcgtctccccgc

SEQ ID NO: 42097 - DNA, 122 bp, Homo sapiens
cctcctgtgttggaggaggttaggcttacaggaacctggccaagcctgtgcttggagtcccgggtgtcccagctaagctcaggggcccccacctgtacccttcctcccttgccccctgcact

SEQ ID NO: 42098 - DNA, 122 bp, Homo sapiens
aacccaggtggctctgtcaccacctgatcctggccccaattctaggcaaaagggcagagccgatgggactgtggagggggccacccactcctggtggcctgggtgggctcagcccactggag

SEQ ID NO: 42099 - DNA, 122 bp, Homo sapiens
caagtgagagtaatgacgtgagctaatccaatttgaagtataaacaaagaaatttcttcacgcaaagagactgacttattttgtttcagaactaaataccacgcagtagaggttaggtcagg

SEQ ID NO: 42100 - DNA, 122 bp, Homo sapiens
tctctctattctcttcctctctctctctctgcagtagtaacaacctgatcccgcttcccccgcccgcctattgatatgctcctcacattcgcctgcacacagcgcgtgcggcccctccgagg

SEQ ID NO: 42101 - DNA, 122 bp, Homo sapiens
acacacacacacacacacacacacacaacacacacacttcttggctttgcaaaaggattgcgtggggcctgagactgcgtcccatcctcactagcaagcctggcgtgccggggagcgagaaa

SEQ ID NO: 42102 - DNA, 122 bp, Homo sapiens
agcacagctcttatgtgcaaagcccctgtaggtgctggagggattcactgatggccttggcggaggtggcagtgggcatgtgcacttggctctgacacagccactcatgcaacaccctgtgc

SEQ ID NO: 42103 - DNA, 122 bp, Homo sapiens
tctcgtcgtagatgatctgcaccaggctgcggtgcttcgactcgatgggcggcggtgacacgggcttctcaggctcgggcggcttggcagcctcctcctccagctgttgctgtggggagagg

SEQ ID NO: 42104 - DNA, 122 bp, Homo sapiens
cttgcggtctccaccaggggcaagaaatacggggtaagttgtgacggtacgacgcggagacgcgttaccagacccatctcggcggaggtccccctttccccgggatcgtgcggccccggccc

SEQ ID NO: 42105 - DNA, 122 bp, Homo sapiens
gactgtgctccacattaagtcagccatgttacgagctgcactctgtcgtaactcctgatccgagagcttgcataaatacctgaaatgattcagaaatagaaaatacacaaaaattcataaag

SEQ ID NO: 42106 - DNA, 122 bp, Homo sapiens
atcataggatcctcttcgttgtcctcctccgtttcttccagagcccggtgttgtttccagcgcattgcatagggcttgctccgagctgccttcttgtctgcttcaccgtgctccattttggc

SEQ ID NO: 42107 - DNA, 122 bp, Homo sapiens
cggacgaacgccccctgcagcccgcaacaaaggcactagggaggaagcgtgcgaaggagacgtccacacagcacgtccgctcagctttcccagggcccaggagaagaaagaagggagaaaag

SEQ ID NO: 42108 - DNA, 122 bp, Homo sapiens
cgtttcccgtagatacaggtcggcagtgctgacgctgctctgccggaagctgaaactgagcgattaggtgagcagctgtctgcggatgggagctgctttctcactgttccaggagaggctac

SEQ ID NO: 42109 - DNA, 122 bp, Homo sapiens
ctgctattggaccatcaatctggaactcatgacagatgccatcagaaaataatctgcagacgtgagcacttcatgagggagcagattcaccaagtgtcctgcctgccaagggcctgaggata

SEQ ID NO: 42110 - DNA, 122 bp, Homo sapiens
tcattaggtcaccagtgaggaatgcccaggctgattaaacatcattccagcttctctactcgctgccccgggtcccggggagaaaacagagcttccatggcctggtggtgaccaagacaagg

SEQ ID NO: 42111 - DNA, 122 bp, Homo sapiens
tacactgttcccgtccataaacgaatgcctggtcactctggaatggactgagagacctgtcgtccggcttgcttagggagctggaggtatcgagtaaagaaacactggtgatggacattttt

SEQ ID NO: 42112 - DNA, 122 bp, Homo sapiens
agaccgccaggcactggacaatgtgcaagacaatcagcccagagtctgtggctcagcctgcggggagccttgtgaggctgcctgctcaccttcccgctatggctttcctgtcccctttccct

SEQ ID NO: 42113 - DNA, 122 bp, Homo sapiens
aggataatgaaagcgtaaaggaaaaatagggggaggaggagctcagcttattgttggatgcggcgggagatgggtagagtcagtcagtcgagactcccccagacctggaactggtgctccca

SEQ ID NO: 42114 - DNA, 122 bp, Homo sapiens
gacccagttgcacaacaaaagggtagactcacattggagttgaggcagctaatgcaggaacggactccattgtggccccttcaagggatatgggaggggcagttagtgcctccctggggcag

SEQ ID NO: 42115 - DNA, 122 bp, Homo sapiens
tgggaaaataaggacaaggaatccaaaagaaattaacaggtgactcaactttaaaacagccgctgattcaaaacaatcctacactgcttattatacatatatacacacacatatacatacat

SEQ ID NO: 42116 - DNA, 122 bp, Homo sapiens
tctccacaacaagctgaaattttaatatttgctaccccacagtatgttctttctcttaaacggaaagaatagacagttgtgataggcaaaaagccagtaaggaatttctattttgtaagctc

SEQ ID NO: 42117 - DNA, 122 bp, Homo sapiens
acagttagggcaggcaggccccctgcgtcatgcaataatgccttccacaatacctcatgacgctggggatggaggtagagacagcaccttactgaccaggggttagtgttctggtgttgggg

SEQ ID NO: 42118 - DNA, 122 bp, Homo sapiens
cgccgtgacgcgggggccccgcgcgccactcctgggcgcgtcccggggggaagacgccaccgccctggagtctcaggggtcctcgccccatcccggtccaggccgtttgtgtatctttgtaa

SEQ ID NO: 42119 - DNA, 122 bp, Homo sapiens
tgatgcacagcctgggcatgctgctgctttcacaaccaggggaggtgtcaacaaggcacacgcccaagactaggtttgtagctttggcacttccataatatccaaccaatgacattgaacct

SEQ ID NO: 42120 - DNA, 122 bp, Homo sapiens
gggctgcgggccgcgacgccgctgctgtgtacacccgtatcccggagaccgtaagccccgcgcccattggctctgcgctttggcccgctcccttctgagccgagcagattggtggaaggtct

SEQ ID NO: 42121 - DNA, 122 bp, Homo sapiens
ctggggagaggggttccgtttcgggtcacggtcctgccttgtatgagggcaggcgcaaagcgctgcaatcccggggcttcgctggggctggagggagggggtggggagaaacattatgaaac

SEQ ID NO: 42122 - DNA, 122 bp, Homo sapiens
agtaacagtggatgaggtagttataattacccaaaggaaaatgaagataaagggttctggcgattactcataggggagattatttccagttgaaggatcagggaagattttgagggaggtgg

SEQ ID NO: 42123 - DNA, 122 bp, Homo sapiens
aagcagtaaattgccaaggttcttggggttcctcaaagagggcactggcgttcagatcaccggtctatcatacacaagattatacgctggtttacagaacgttttcctgcctccagtgcaag

SEQ ID NO: 42124 - DNA, 122 bp, Homo sapiens
gatggggaaaggaggtctcagttttctacagctgggaatttcagagccagcacctcactgcggggtagactgaagagggtcataaagagcctctgggggaggaacacctctcccttacatct

SEQ ID NO: 42125 - DNA, 122 bp, Homo sapiens
ctgctataaaagcgctgcaatccttacccgggccccgggaagcgctgagaagctgtttagcgccagtagatgtgggcccagcagctcctagctcctcaaacccctcatcacccgagggctca

SEQ ID NO: 42126 - DNA, 122 bp, Homo sapiens
gcgcagaccaccgtgccaggacagcccgctcgggagtcgggcctggaagcaggcggacagcgtcacctccccgcagccgccggctgggacccgcggccagcctttacccaggctcgcccggt

SEQ ID NO: 42127 - DNA, 122 bp, Homo sapiens
aacaaaaggcggcgagggaggtaccgtgcagagcctgctgggccttctgtcccatggccccgcacaccggactcacccagcctccagccgctcctgtgcctttctgcctaataaatatctgt

SEQ ID NO: 42128 - DNA, 122 bp, Homo sapiens
agcgcctcccctgcttttggctccgcaagtgcccacttgagtcgggagaggtcctcgggccgccccaactgcccgccccacctggcagtccgtccccgcccccgtcctcgcggtgaggcgct

SEQ ID NO: 42129 - DNA, 122 bp, Homo sapiens
agagccaggagtttagcctgaaatcctagcttcctggttaagagctgaaatgccttcgcacggcgtgcaatgggtgaaccccaccgcctgctttctaacgggtccaagccgcgggcaggggc

SEQ ID NO: 42130 - DNA, 122 bp, Homo sapiens
gacacacacagccggaaggaagccctcatgaggcgacttgagagccagcgacctccctcgcggccgcatagcccaaactctgtccctgatagggcaccgagggtcctgggggggcatacggc

SEQ ID NO: 42131 - DNA, 122 bp, Homo sapiens
gatttcgcaatttgtttataacggttgattgaagttcatgaaagcgcgctggatggggcgcgggggattgaaataagtgagcgccctagtgtcctgcctgcggatgatcatgaatctgttgg

SEQ ID NO: 42132 - DNA, 122 bp, Homo sapiens
tgccttcctcccctgggggcttctggagactccactccccccacctccctgcaggacaaccgcaatggggtccccgtcccaaagttgacaaagcagatggtcagggccatgggcctgaggtc

SEQ ID NO: 42133 - DNA, 122 bp, Homo sapiens
gatcctggaagtccacagaggggaaactgaggcccggaggagagaagggactccccgcttcgtcaccttgctgggcaggataagagtcaaggtctctagtgcgggaacacttataaatgtta

SEQ ID NO: 42134 - DNA, 122 bp, Homo sapiens
tgagaaggattcggcggcaactctgggccaaagaggtggcctgacagtctgggagggctccgcactcaccggactccaggattcctgcgcgcagaaatccaggcccccagcctcgctagggc

SEQ ID NO: 42135 - DNA, 122 bp, Homo sapiens
aaccccagcagtgacctgtcccacggaggccaaggaaagtcctccttccctgcatgtgaacgtgaccttgtctgtcaagtaacgagggggatttgtagacaaccctgttcttccccattccc

SEQ ID NO: 42136 - DNA, 122 bp, Homo sapiens
ctcttttaggcagagggcgcccagaggcatgaaatccctaaggggatatttagcagaactcgcagaactgccactggagtgtcagccgacagaggttacaccttgtaactccctggtttttt

SEQ ID NO: 42137 - DNA, 122 bp, Homo sapiens
gtaagattgttaggttttgaagggaaggtgagggtgaaagaaagacacacagagaagggacggctcaaacagcaacacaggaatattgcagacacctgtggaagtgggagacccgcttaatg

SEQ ID NO: 42138 - DNA, 122 bp, Homo sapiens
ccccagccctcttcctcacccatgtggggtgcagccctggctttctgtgcttcctgagcacgggtatgtgtgggccgagggcagaaggcccagcttgcctgtcatctggagagacgtgtgtg

SEQ ID NO: 42139 - DNA, 122 bp, Homo sapiens
tgagagggggagagcgagactccgagcgtgcgggcgaggaagctgggcggggggccgagacgggggccgggacgacggctggggcgccggggtcgccagctcctcgcccacctccctccctg

SEQ ID NO: 42140 - DNA, 122 bp, Homo sapiens
cagggaaatggagaagtgcggcttggggggcgaagtcccctctagaatgtcccctggggccgggcgtggtggctcaggcctgtaatcccaccactttgggacgccgaggcgggctgatcacg

SEQ ID NO: 42141 - DNA, 122 bp, Homo sapiens
gtttacaagactctattagtaatgacacagacaccaatggttggagacgtcgaggcgcagcgcgcactctacgcacaacccctcgaaacataatttgcattttaaaagataaaggggaggga

SEQ ID NO: 42142 - DNA, 122 bp, Homo sapiens
gtattttgccctgcatttcccttgtgtttactatccagtcttcctgtttatcatttttgtcgacaacatgaaattctattgagagactgtctgaacatattgtaatgtagatgttcaggttt

SEQ ID NO: 42143 - DNA, 122 bp, Homo sapiens
cccagccagtcgaggccccgggtggccgcccgacgagtcggtgctggactggcgcgagtgcgagcccgaatcaggctccttaaagaaagactccggcaggatcttcttccgccacgagctag

SEQ ID NO: 42144 - DNA, 122 bp, Homo sapiens
gtaggagcgactgtgaaaataaattttttaaaaattcattttgtgtggagtgtgtgcgtgcgctttcctacagcagcctgggaggaagaacaatggaaacagggttgaattatctttctcaa

SEQ ID NO: 42145 - DNA, 122 bp, Homo sapiens
ctgagctctgagagagcctcagagtttaaatagttgaactccaccctgcagctgctgccgcgaagttaactctaagagctgcagtcaccaagagcgaagaataaagcagcaaagacagaaac

SEQ ID NO: 42146 - DNA, 122 bp, Homo sapiens
gatagggttaaatatgatccgaatccctctttcctggctcctgggacagtctaggaataacgggcacctgcgacccgctgtaaggttgcgaggtcactccaggcttgcccgagcctctgctc

SEQ ID NO: 42147 - DNA, 122 bp, Homo sapiens
ccagagccccagaggcccctgctcatggtggagatagcccctccccaggggtgtgccctgcggctggagcaacaggtgggccagcctgtgcaggtgccccacaacctcccctctcaacgctc

SEQ ID NO: 42148 - DNA, 122 bp, Homo sapiens
gccgcccgcggggctgggacccgatgcggttagagccgcggagcctggaagagccccgagcgtgagtagagcgcggactggccggtagcgggtgcggtgggaatggggaccgggtgggtgcc

SEQ ID NO: 42149 - DNA, 122 bp, Homo sapiens
acaataacaagagtggccagtacatacagcttgtgacaggcactcttctgggcccttttacgtatttcagctcatcgctgctatcctcattttctatgtgaagaaagagaggcacagagaaa

SEQ ID NO: 42150 - DNA, 122 bp, Homo sapiens
aatgaaaggaaacagcctttccaagtgaaagccagacacgtctttctgcttctcatagtacgggaatcaagcatccctcccatagaagtgggagaacaatgtctccatgttgttggctgtaa

SEQ ID NO: 42151 - DNA, 122 bp, Homo sapiens
cttccattcccaggctgggaaaggctgaagaggctgacggctggaggggagggggcggggcggtggcggatctggcttccttttggagttaattagggaaaacagagaaatgtcagcggaat

SEQ ID NO: 42152 - DNA, 122 bp, Homo sapiens
gccaggtgcccgcccgctcgccctcgcagggcgccgcccggctcgttggcggccgcggcgcggcgcgccccatgcccgtgtgtggccatgtcctatccgcagggctacttgtaccagccgtc

SEQ ID NO: 42153 - DNA, 122 bp, Homo sapiens
cggtgggaggggccgcgctcacagacagcacaggggcccccaggctccagcctcagagcccggctgctcacctctgatggacagaaaagggtccctgtctcaggaaggtagaggctgccacc

SEQ ID NO: 42154 - DNA, 122 bp, Homo sapiens
tctcgctctttcctttggccttttgttatttctgagggctacagatcctggaactgcagccgtgatgggaagaacaggacacagggtgcccagcaggaaatgccaggcactgaatggaaggt

SEQ ID NO: 42155 - DNA, 122 bp, Homo sapiens
tgaaaaccagcccagccctgaccctgcagctctgggagaggagccccagcactgggattccgaggctttctattcggtgatcagcactgaacacagaggactcaccatggagtttgagctca

SEQ ID NO: 42156 - DNA, 122 bp, Homo sapiens
gcctgcggcctcccgagtccaaagctccggcctctccgccgcttcggcaggcccagctcccgcctgccagtggcctcctcaggcccagggggctcattcctcacaacggcctttcccggccc

SEQ ID NO: 42157 - DNA, 122 bp, Homo sapiens
gcctctgccacgtcaagaggaggggacggggcgtgagggcaggaagggggcaggaaggggcgggcgcagagttaccagggcaggccaccggacccctgagcttgcttaataaccggaggatt

SEQ ID NO: 42158 - DNA, 122 bp, Homo sapiens
atattttccggtgctgatatgtttccagactccagcgcaacctggggtgctctccagacccgtgcaggggccgcctggggtacacggaaggaagttgagtcctagtgcaaaatgcaggcgga

SEQ ID NO: 42159 - DNA, 122 bp, Homo sapiens
cctctctgtctgtgcggtggccccgagtccagctctgctgctgagggccatgcgtgtggacgccgagggcatgggtgcctactcctgtctgtgcgcccgagtccagctctgctgctgagggc

SEQ ID NO: 42160 - DNA, 122 bp, Homo sapiens
gagccccgcctgcccgcgggaggcgggggcaggaggctgtggacagggacccagacttgccgacctgtacgactctggccatggggaacagccactgtgtccctcaggcccccaggaggctc

SEQ ID NO: 42161 - DNA, 122 bp, Homo sapiens
aattagcttctagattagtgcaacgcaaagcaaagttccagcaggcattttaaagacacccgaccacagccctattctcggcacgtgatggaagaaggggcgtccctgaatgacaggctgat

SEQ ID NO: 42162 - DNA, 122 bp, Homo sapiens
gtgccaggagaccaggtggtaccttgggcgtcgtccccgctggaggtgggtttgggcggtcgtggtgggagtggagtgattccagatgcttctgcaggtggattagatgctgctggagttgg

SEQ ID NO: 42163 - DNA, 122 bp, Homo sapiens
tcctgcttgtccttgtgcttgagatcggttccgcaggagctgggatcaccatcggggccgcggtggtgatggtgcttgtgccgctccttgtggcccttatgcttgggcccggccgcgctcac

SEQ ID NO: 42164 - DNA, 122 bp, Homo sapiens
ccagagcaatcgctgttggctgtgtcttctgtgagtgagcccccgggctcttttggctgccggcggtgtgactttggacacattctccaacttttctccgccttgatttcctcatctgtaaa

SEQ ID NO: 42165 - DNA, 122 bp, Homo sapiens
tttcttttcccttctgccgtcaacctcggagtagcttcgctcccagaaggcctcaaagcgcgaccaaagagcgtgacagagcgctttacgacagttgctttgaggcagtaccggaggagaaa

SEQ ID NO: 42166 - DNA, 122 bp, Homo sapiens
caaagtcatcaatgtgcacacttaaaatgtatgcactgtattgtattcctgctataccttcgcttaaaaaagaaaaaaaaggttgaatgtgagttcgggcgtgagaaaacagcagcgcgcat

SEQ ID NO: 42167 - DNA, 122 bp, Homo sapiens
atttggtttttaatagacatttaaaacagtcacatatactcatctatactgttgattccccgaaagtcaaattgagagtgaggagcagaggatacaaagggaaatcacaggtaattaaagaa

SEQ ID NO: 42168 - DNA, 122 bp, Homo sapiens
ccactacacaaatgatagaaacagggccatttcacaagatgtgtggcaggggctgagaagcgctgggctgcagtttataacagtgctttcacagtcacagtctctaatcctcccagctctgt

SEQ ID NO: 42169 - DNA, 122 bp, Homo sapiens
cacctgataaggagcttgtaatgattcaaggagttgatgtttaactcagagtctaacacacgataagccagggcactggtaactagcaattgctattattagaaggctctctcattcccatc

SEQ ID NO: 42170 - DNA, 122 bp, Homo sapiens
agtgagaagggggaaccgctggtctgcacatcggtgtggtgaccagcagagacgcaatgtcgagccacagaagccaggcacaagagagaacgtcctgcgcggttccatctatgccaacatcg

SEQ ID NO: 42171 - DNA, 122 bp, Homo sapiens
ctatgatgtttacacaatgatgaaacaacacatttctgagaatgtatccccatcgttaagcgacaaatgactgtatgtggatggcaagtaagttcatgaaacaatgctcaacatcgctagtt

SEQ ID NO: 42172 - DNA, 122 bp, Homo sapiens
cgcccccacaacctctgtatctctgacaggtccgcggtgaaactccgcgatccgctccggcgctctttacaaataaggggaggagggccctgtccccgcctccgtagcacgtggtgacccat

SEQ ID NO: 42173 - DNA, 122 bp, Homo sapiens
cctctttacctgcaaagttgcaatcttcgggctgaagtgatgggatccgaggactgacggcgcgggtgccgtgcggggtgagagcacgcccggcaaattccaatggaattcccttagtcgct

SEQ ID NO: 42174 - DNA, 122 bp, Homo sapiens
agccaaaccatatcagagtgattgactatacattgttaagctacagggtgtggattacagcgtccagtgtggcattattaggttaatccatagctattaatacctgtggcaatagtaagagg

SEQ ID NO: 42175 - DNA, 122 bp, Homo sapiens
tgaccccgctgcgctgtccagcagcggcggcctctgcggcgtgggcagaggtaacttggccgtgtgcaagcccgtcacctgagggcaggtggccccaccagggaagctgctggcttctgctg

SEQ ID NO: 42176 - DNA, 122 bp, Homo sapiens
actccctttgaccttttctgcctggcagatgggaaactgcctgactgcagatctcctcttcgtttgcaactctgtaacttcaccctgtcttctgattgcttttcgtaaccaatcagatgttt

SEQ ID NO: 42177 - DNA, 122 bp, Homo sapiens
acaccctgctgttctgggtctgccgttaagattttgggttgctgaagagttggcggggcccgcctcttcccctgcccccacctggagaattctgggggaactgttggccagagcctccaggt

SEQ ID NO: 42178 - DNA, 122 bp, Homo sapiens
tctgcggtgataaaaccgagcgaaatctcagcagcccaggcagccacaggcgggggagtgcggaggtcacacagatactaacttgtaatctgccgtccacattgctggctgtggaaggtgca

SEQ ID NO: 42179 - DNA, 122 bp, Homo sapiens
cacaactcagcacacatttcttcactgatggtataaaaagacttcatggtggctttcactcgcccctcaaaatgtcctcacttttgtcttctcacccattctgctttgtgcccatcctactt

SEQ ID NO: 42180 - DNA, 122 bp, Homo sapiens
acaaaagtattaaggacacagtctgtgcagtgtgtcacttggtcaactggaaagcagtgacgacttttcttatacttgccagggtggaattcttctcagtgtattggtgtgaggttctctcc

SEQ ID NO: 42181 - DNA, 122 bp, Homo sapiens
gatttgaacagcagggcggcatcggtccacaggcgtgtgccggctacctgggcatgagtgcgctctcgccctgcgtcacagacctgtcccagtactacatcaaaaccctacttttcctgaga

SEQ ID NO: 42182 - DNA, 122 bp, Homo sapiens
gattgggggttgggggactgacactgaggtcagctctgtatggattctccagcctgggaacgggtggcaggcagggcatcagagtcagaggacaggaggggtggggggagagggaggagcag

SEQ ID NO: 42183 - DNA, 122 bp, Homo sapiens
agttcagcaactgtggaagcatcacaagccaccacaagtcacagcagtgatttgcacccccggggtgggactggagcagacactcccagggagcagaacttcctgcaggaacctacgcaaca

SEQ ID NO: 42184 - DNA, 122 bp, Homo sapiens
gctaagggattttcctccctggagcctcccttcctctccctgtgttctaatcctcatttccgggaggtcattttaattagcaggctgtcatggtgactcagcctgctgtttccacagacagg

SEQ ID NO: 42185 - DNA, 122 bp, Homo sapiens
cctggggtctccgaagcccatttttagcgtccagaggtgtgctttcgccatctccttctgcggtggctgcttgcagggcgcattcccattgctgctgtctctgttcctaaggaagatcaaag

SEQ ID NO: 42186 - DNA, 122 bp, Homo sapiens
gaggggggggaaatggaggctcggggcggttgaggcgagctccggggcggggggccggggcggggaagggggggtgcggggtggggagacgaggcgggcccggccgggccagggggggccga

SEQ ID NO: 42187 - DNA, 122 bp, Homo sapiens
accctccacggttctgtggcccctggggcccatgtgcctggctccttcctcctggctctgcggtgtttccacctgagaccctcccggtctcagcctgtgctgccagggaggagcctccacag

SEQ ID NO: 42188 - DNA, 122 bp, Homo sapiens
gtcgctcctttgcttttaggcggctcagctcacaaggggcgtctccgctttaaagagccgcggagacgccgggaaaacacttgatttagtgaaaaagcgcgagcggccctcgtgaaggctta

SEQ ID NO: 42189 - DNA, 122 bp, Homo sapiens
cagacattaatttggggcaggtattcttcttcccaagaactggaaaaactgaaacggagacgtgtcacaatgagttgtgaaaagcagggagaagatgaggtctccacactgagaaccgtaag

SEQ ID NO: 42190 - DNA, 122 bp, Homo sapiens
gcgctgccataaaagagaaagacaatggccaggtgggaggcacatgtagagaaggcttttcgtcttccctctgaggactggatcctcaagatggtggagattatgcaaatgtaggaaagtac

SEQ ID NO: 42191 - DNA, 122 bp, Homo sapiens
cctccctgcaaggggataaccacagcccccccacacccagggatcctgggagattaacttcgaggatacagcagggcacgcagcctggtacacgctcggggaagaatgtcagcaaaccttcc

SEQ ID NO: 42192 - DNA, 122 bp, Homo sapiens
tctcccctcaccagccaggcacaggcaccaatgggaggtgcctgggctccacaggcccgtcggggccagagggtcgccggtagcgtcaaccaagtgcacgacagcccacgggtggctaggcg

SEQ ID NO: 42193 - DNA, 122 bp, Homo sapiens
aagaaaagagcctgtgcctctgtaggaaagtaacaacgacttaacttctggaaatgacttcgcagcttagagcccagcagtgcctattttggattaaactgtgtattaattaagctcaaacg

SEQ ID NO: 42194 - DNA, 122 bp, Homo sapiens
cggggctgggctccaaggcgcaaggcggcctgacaccaggtacccggctcccggttcctccgacgttctctggcgttcccgggccctgaccagttcctccatctcagaagtcttaatggcct

SEQ ID NO: 42195 - DNA, 122 bp, Homo sapiens
tgactggccctgacacccttactccctagtaaactttccacatgcaaacgtgtctcaaagcgggcttcctgggaaagtgaatttgcaatgatgtgaaaccttgaaaaagtaagatacaaacg

SEQ ID NO: 42196 - DNA, 122 bp, Homo sapiens
taaatattaagcgcaagaaaaaagggagcgcagcgccgttcccacttgttagattgaaggcgcctctccagaggggggaaggctccaaattgctaattagcgcctgtgaaaaggcctagctc

SEQ ID NO: 42197 - DNA, 122 bp, Homo sapiens
gtaattccatggactgcactatgagcatcttaccaggtttgtttcattgaagaggagcaccgctggtgtgtcatcttgatgttagaagcagcacaaacatttggtttcaatatgatccagat

SEQ ID NO: 42198 - DNA, 122 bp, Homo sapiens
acatggtgagtattgtgtaagtttgatattactagtgtaacttttctatgtcctcggccccggttgctctgagctagctgattggaaagccctaaccctcgaactccgggctttctgggaac

SEQ ID NO: 42199 - DNA, 122 bp, Homo sapiens
agggatacttttgagagcgtcagtgctgcatgccgggatttgtagtctgagggcccgcctcgcattctgggcggggattcatgctccttttcagggcgcccgctcctccccttggtattgcc

SEQ ID NO: 42200 - DNA, 122 bp, Homo sapiens
gccgcgagcctcggcctctgtctcctccccttccagccctcacctccacgcgggaccgctcgcgccagtcaactccgcgcacgttgcccctgcttggcagccaataaaagggggctgaggaa

SEQ ID NO: 42201 - DNA, 122 bp, Homo sapiens
tagatgaagagctatcttctttcactttggtattatgtttgacactctcctcttaagccccgtcaagggtaagtgtgtgtctttgtatctgaagttgtcacatatacaaactttacagtcta

SEQ ID NO: 42202 - DNA, 122 bp, Homo sapiens
acaataatagccctttgccaaaacaaaccctctttttccctgggaactagactgcctttgcgggactaacgaattagctacaagattagaaagtatggtttaggggtcactgttgtaaaacc

SEQ ID NO: 42203 - DNA, 122 bp, Homo sapiens
ctcagccgccattttcaaatccccggatgacggcggtggcggctgcagtccgctgacaggcgctttctgcctggcagaggctggcgggcatcgtgcccgtccctgccggtctcccgggcacc

SEQ ID NO: 42204 - DNA, 122 bp, Homo sapiens
atcaaaatgaactcttaggaaactggtaaattggtaaggccaagtaattaattaaaggagcgtagtgtcatttaaataggagtgaaatcccaaaactaagaaaacaaaaatgactaatattt

SEQ ID NO: 42205 - DNA, 122 bp, Homo sapiens
ataaatggcattcaaatggggccaagaggccctctattagctcagcgtgcagggcactggcgctgcgttaaagccccatcccacagcctgaagatttaaacagaaccactttccccatttgc

SEQ ID NO: 42206 - DNA, 122 bp, Homo sapiens
gtggcagttggagctgccgcttggcctgctgcctgggacgcggccccttgtcccgcagaacgtcagccaagcgctttccgtgcaggctgataacagggtggtgccgtgcttcccttgggccg

SEQ ID NO: 42207 - DNA, 122 bp, Homo sapiens
aacaattcttactatactgctactaaccttcacatctctcaacaccctcaacggcccccacgctggtgctgctagtcctcatcctcaaacaccttcctgggggcttaaagccggtccacaga

SEQ ID NO: 42208 - DNA, 122 bp, Homo sapiens
cgctccttttggagcttggaggtggctctgaaaagagcctttgggttcggggcgccgggacgcacctcacttggagctggtgtacttggtgacagccttagtgccctcggacacggcgtgct

SEQ ID NO: 42209 - DNA, 122 bp, Homo sapiens
tggtgcaaataatagcttacctcatggagtagctgtgaagattaagtaagacaatgcttgcgcagtctgaagcatagcttttaccactaagaaaacaatagcaatatttacaaatgaatcag

SEQ ID NO: 42210 - DNA, 122 bp, Homo sapiens
gggttcgcctgggccgcaggggggagcgcaagtcttccacactggagagtgcaggggtgtcgccagcctgagtgtttgagcgcaaggcgggaacgaggggactgcgagcgcggaaccaagat

SEQ ID NO: 42211 - DNA, 122 bp, Homo sapiens
tcgtggaagtaggtgcttgttaccattgagtggagagtgcagcaagtgcaggtcgtcctccggtgtcagagccgtgatttgtagacaatgccgccctgtcagctcagtgctggttcagcagc

SEQ ID NO: 42212 - DNA, 122 bp, Homo sapiens
tggtgagcggcatgaggcccatgatggagagcggcgggctgctgggcggcggccggggggcgccccgcgcccagccccaggccccgggcgccagaggcagcagcagcggcagcagcagtagc

SEQ ID NO: 42213 - DNA, 122 bp, Homo sapiens
ctttttaactctgataagaaaagtttaccatctattctctctgaagcctgctgcctggagcggcatctgcattagaatggccagagtggtggtgctcaagcctgtaatcctagcactttggg

SEQ ID NO: 42214 - DNA, 122 bp, Homo sapiens
agacaggaagatcatctgagctcaagagtttgagaccaccttgggcaacgtggtgaaacccggtctctactaaaaatacaaaaaattagctgggtatggtggcacacactgtaatcccagct

SEQ ID NO: 42215 - DNA, 122 bp, Homo sapiens
caatgagagaaaagggacgtgaatctttaagtgattaagtgaatctttaagtaaatctgtcgtactagcgtttcaggcggctcaaacaccacacgctcccgactacggcggaatggagagaa

SEQ ID NO: 42216 - DNA, 122 bp, Homo sapiens
actaatgggagttgcactgttaggatgactagggaatgccttatccccttcatctgttagcggggcgggagttgctattaaaaatgccatatttatttattattcctgatatttaaaacctg

SEQ ID NO: 42217 - DNA, 122 bp, Homo sapiens
ccaggtggaaggaaacaggctgcgggcctgggccaggcggggcctgacagaagtaaaggccgggagggggagcggaagacggccagaaggacccctgcgccctctcctccgcgccgcccgcc

SEQ ID NO: 42218 - DNA, 122 bp, Homo sapiens
ggacaaacccgacagatatagacacactcaggggcacagacacacacccgggcacagagtcggacacacctggggctcaggtagacacacctcacatacccagggaacaaacggacacacac

SEQ ID NO: 42219 - DNA, 122 bp, Homo sapiens
atttgctaggtgctaggttagatgctgggatataaagatggctaagatgtggtctctgtccggaagaaattctcataaggtcagaagtgacttgggtctagagtggtagttctgaattcaca

SEQ ID NO: 42220 - DNA, 122 bp, Homo sapiens
gcagaatgaactgcaagcgccaaggcccagaggccaaaaaaaaaaaaaaaaaaatagaagcgcatgttttgattgaggaagcaagagcagcttagtatgcctagaacctaactggagacggg

SEQ ID NO: 42221 - DNA, 122 bp, Homo sapiens
ttttggcctttagtctgaaaaagtgttgattgaaagtgtacaacagagagcgggtgcaagcggccgagggccatggagccgccaataaaaaagaatgtccttaaataaagttcacagagtaa

SEQ ID NO: 42222 - DNA, 122 bp, Homo sapiens
gcagttgtcaggattaaatgtggtaataacacaaagcacttggcattgagcctgacacatcgtagatgctcaatatcgttggatgaaaaagttcaggaggagaagctccaaataggcttatg

SEQ ID NO: 42223 - DNA, 122 bp, Homo sapiens
ttgaaagagaaaatacctgatttcattttctgttctgttgtagtaggagggttagtctttcgataacaggtctgaaatagcatgatacctggaaaccatgattactggaaactgtaaatatt

SEQ ID NO: 42224 - DNA, 122 bp, Homo sapiens
ttgttaatacgcagatgcctgggcctcactcccagggtttttaagtcagaaggtctggggcgaggcccaagcatttacatttctaataagctcccaggtgatgctggtccagggaccacact

SEQ ID NO: 42225 - DNA, 122 bp, Homo sapiens
ggtgcttcggcattgttctgctctcttgacctttggctccctggcctccagcagtctctgcgtgttcccagctctgctctgctcaccacatgtgttagagagcacaggaccaccaggggctc

SEQ ID NO: 42226 - DNA, 122 bp, Homo sapiens
agccactgcacctggcctggtatatatcttttcaaagagaggtctgtctagtgtgcctcacgcaacatctatttaggtgtacaaatgggtctctcaaatgtcagtgctctacttacagcaca

SEQ ID NO: 42227 - DNA, 122 bp, Homo sapiens
gccatgcaatgccttctcaaggcccagcacttcgcccgatccctgggagggatggacagtcgtgcgccccatagaggtttgggtcaacagcctgcatataggaccgtggtcccataagattt

SEQ ID NO: 42228 - DNA, 122 bp, Homo sapiens
aaagtacctgtgagctgctcacaatccctcgctcacagagaggccacggaactttgtcagcgcaccagggcagtagcgggatgggtgtcaaggccgtgcacacccacgaggccgtaggaagc

SEQ ID NO: 42229 - DNA, 122 bp, Homo sapiens
acctctggggaggtcgaggcggagggtgcagcggggggcttggagcagggctccagagggcgctccctccctcgcccaggttcaccccagggccagcctcggcgccggggcccgcgggctgc

SEQ ID NO: 42230 - DNA, 122 bp, Homo sapiens
gtcgctgcgccgccggcccggcgtcagcggcgtcaagtccctgcgcggtcacggtcgcttcgacgcacgcaggatccctccgctgggacaagtagtgccctgagactcccgaggctctgcat

SEQ ID NO: 42231 - DNA, 122 bp, Homo sapiens
cagctttcaatgagcaagtggacaagttctttcctcttattgaagtgaacaaggtatggccgtgctgactttagaactgacaccgcctgggggtggagtgcggatgaaaagacgctggccca

SEQ ID NO: 42232 - DNA, 122 bp, Homo sapiens
agagaatgatttatggcacacagaatcaacagcaaaaatgagggcggctgaaagggccaacgatcctttacagccagccctttgcagatgccagaggggtttaactccacttttggaaaaag

SEQ ID NO: 42233 - DNA, 122 bp, Homo sapiens
ttgcttctctctgtccgggccctacttctctccctgctcatctttttccctgagcttctccgtgcactttgcaggaattccagggaacctgaaagaagggtttccagggcctcatgtctgcg

SEQ ID NO: 42234 - DNA, 122 bp, Homo sapiens
tggggagctggtcctagctcagcgctcccggaggtggagcttctgcaggctgggtgctgccgggcctacgggcacccaccccctggctcagtgccctgggtattctgactcagtaggtctgg

SEQ ID NO: 42235 - DNA, 122 bp, Homo sapiens
cagctgctgggggctgccgtgtgggagaggccgagaggaaggccagggtgtagccaggggcggaggaagcttccagacctgctgtctataaaattgaggaaggcagaggtgttcttcctgct

SEQ ID NO: 42236 - DNA, 122 bp, Homo sapiens
ctccctccctggtggaggtcacctaggtggttcagtcaaagcccccagtggtggacaggccgagagcaaagaggcttctcttggtccctgtcactcctccctcctacactctcctttccccc

SEQ ID NO: 42237 - DNA, 122 bp, Homo sapiens
gtggtcaggagcgtcatggtagaatataaccccagaggcccaaggtgcagtttgaagaaacggtggcggcttcccctagtggtgtggcttcagagctgctcctaggaagccatttaattccc

SEQ ID NO: 42238 - DNA, 122 bp, Homo sapiens
cagagggagactctgtctcaactcgctcactcagtgctcaatgttgcccaggcgtgatctcggctcgctgcaacctccacctcccagccgcctgccttggcctcccaaagtgccgagattgc

SEQ ID NO: 42239 - DNA, 122 bp, Homo sapiens
gacagtccccaccgggccaggaggccaggacaccagagggtttgccccagtccttccccacgtgcctcttcttccatccactccgcagccaaagattggggggttgatagggagcaaggagt

SEQ ID NO: 42240 - DNA, 122 bp, Homo sapiens
aggtggaaaatgttaaatatagttaatataaaatttcactctagaatctgctagaaatgacggaggcaaagttaatgtatatataaaaaaatccaccagtgactggtggccagtaggctttc

SEQ ID NO: 42241 - DNA, 122 bp, Homo sapiens
ttctctgggagccccgtcacagtgacgcagttggggtctggggctccgctctgtgggaagcgaatgtccacctggaaggggtgtacaacgtcagatgaggggactccaagcgaggaaaaggg

SEQ ID NO: 42242 - DNA, 122 bp, Homo sapiens
agctggtggtggcgcccagctgcacaggcggcaccatgtaactgccagataatacttgcgcgtcacagagaggtccatgttacacgcctgtcagcacaataatattaggtggtcagcttttc

SEQ ID NO: 42243 - DNA, 122 bp, Homo sapiens
agactccaccgtacacgctagaagcagccctcagtggggaaggcaggctatgacaagtgacggcagcccgtgtaggttgtggtctgtctcccgtggcagggcctgggatgggggcatctcag

SEQ ID NO: 42244 - DNA, 122 bp, Homo sapiens
gtttgcccccagggctccagtccttgtggcgctggcccttattgagagcgggatgaagtacgaggacgccatccagttcatccgccagtgagtggccgcggtggtggggtgggctgtgagcg

SEQ ID NO: 42245 - DNA, 122 bp, Homo sapiens
gcccgagcatcttctgaaccgggttctggagcggcttgctggaggggctaccagggacagcgccgcctcaggtaaggagccggtgggctcgaacacccagagcaggggctggccccggctcc

SEQ ID NO: 42246 - DNA, 122 bp, Homo sapiens
tattttatacttgaaaatgagcctgtttgttaacacgttgaaattgactgaaagactgtgcggtttgtgcaagttgtcaccaaggaggcaaagaaaggaaatctgatcaagtataataatta

SEQ ID NO: 42247 - DNA, 122 bp, Homo sapiens
tcccagctaactcaggaggatgaggtgggaggttggcttgagtccagatggcagaggttgcggtgagctgtgattgcataattcaagaagctaatgaacctcaaacagaataaactgaaaag

SEQ ID NO: 42248 - DNA, 122 bp, Homo sapiens
cgggacccgtcctggatggagctcggtcccggaggtcctcctcgtcatccacaactcccacgtcagccaactctttgtacaggtttttactggatgatcaggaatgtgccatccatgccgac

SEQ ID NO: 42249 - DNA, 122 bp, Homo sapiens
ctcaccgtcagctctgggctggcatctcagcccctcgaggtgtgaaattggatggcagcccggccgggctccccgacctgcccttctccctttcctggggacacctgagcagcgccacggtg

SEQ ID NO: 42250 - DNA, 122 bp, Homo sapiens
aggagcaaaccacccgctgatgccaggtgtgtggacacctccagccttctcagcagtgcgcgtgcctgagggcgaagaacccacccccggccgtgggagactcacttgccagaggcgctgtt

SEQ ID NO: 42251 - DNA, 122 bp, Homo sapiens
ctggatgatgcctccgacgagtacaagatcatcatgctcaaccggcgccacctcagcttccgagtcatcaaggttgggccggccccacctgccctaagccctgccccaaacccccttgggcc

SEQ ID NO: 42252 - DNA, 122 bp, Homo sapiens
ctttcaggacaagccccatggagggcatgcggtgagagttcacttaacccatcgaggtggcggatgggtatcggtttaccgctgtcttgaacttcacacagcagcatatctcctgtaatcac

SEQ ID NO: 42253 - DNA, 122 bp, Homo sapiens
ggcgggagaactagtgcatgctggctggggatggcggacgcaaagccggaggcaaggccgcgcacgcgcaaacgcgggcgcgccgccgggccgtgctagtgcgcggaagacgcatgcgctgg

SEQ ID NO: 42254 - DNA, 122 bp, Homo sapiens
gggcctgggcgttcactgagcggtgacttctgagaagaattgagacccgagcagctcaggcggtggctccgacacgtcttgccacgcaggcctctcgagtgccatcggaaccggagcggcag

SEQ ID NO: 42255 - DNA, 122 bp, Homo sapiens
aatgccttttttttttttttttttttgaaggaagggccctgtttcgtagggtacataaaccgtgagcgtaattgtattttttgcatattccaggtttgcttgtgaaggtcagagtagccgga

SEQ ID NO: 42256 - DNA, 122 bp, Homo sapiens
gtaatggggccactagtcgagggtggtaggagcggcggagactcggtaatatactggccacgcctactctgccctgccagtctcttctcacgtgtgcccctggaaggctctgccttaacgca

SEQ ID NO: 42257 - DNA, 122 bp, Homo sapiens
tgtggaggaggcattggcctgcttgtccagccctaggaggcttctgaaggggatgatggacgaggaagggtgggactcactcacccttatggctgcccgtgtgcctcctggctcagcagcca

SEQ ID NO: 42258 - DNA, 122 bp, Homo sapiens
aagaaaaccgtttcttgatcaccacttaattaacgatgctctttctccaaaggatcagcacgttcttcctctgagaacttgaaaatacaaatggaccccatgtttttttaagcattaccttt

SEQ ID NO: 42259 - DNA, 122 bp, Homo sapiens
gttattagtcatggtccccacccaatgacagtgacttgtccaccatggagatgctgactgcggtgatggagtggaaatgagccccaggccaggcacccacccagctccaccctgagcagctg

SEQ ID NO: 42260 - DNA, 122 bp, Homo sapiens
tcccagtgcccgggtacctgcaagaatcttcccaggacgggagcagtgggcactgagcagcgctgccgggagaaagatgttgcgttttgccaagcgctcacccgcgcttcaaaaccccagtc

SEQ ID NO: 42261 - DNA, 122 bp, Homo sapiens
gctgtactttttggaaggaagtcactatgcaaacccccacttcagggtggggaatcatgccgctctccttgaggaaggagtatctacctaaatatttggagttccatatgggagatgtgtct

SEQ ID NO: 42262 - DNA, 122 bp, Homo sapiens
ttcacctttaatattccatatattctacattttagtgtgtgctagaaatactgtatctcacgctgggggaatgaggacaggggtttcaaactcagagggctctgagttctctcagataaagg

SEQ ID NO: 42263 - DNA, 122 bp, Homo sapiens
gttgaatcagatttaacaatgcagtcagataaacagttgtggcagctgctgccatggcaacgtcaccgtccttaccctcccagtgcgcgccccttccccacccctcctcctcctcctgcttt

SEQ ID NO: 42264 - DNA, 122 bp, Homo sapiens
ccatccttggttgtggagccaggatgcagttatctgcatgaaaggaaatggtcagagtgacgtcccttgggcttgtgttggggcctgttgttgaacactaagcctttcaagatggtcctcct

SEQ ID NO: 42265 - DNA, 122 bp, Homo sapiens
aacacaaggcctgtggttgggggaaggttgtaactctaaaaaagacccatgtggctacagcgagggacactgggtgtaggtagagataagaagagtgatactcagttctcacatcacggcgg

SEQ ID NO: 42266 - DNA, 122 bp, Homo sapiens
gtgcaggggtggcatggggtgtgtggtgtgcccagcagtgtgagtctctggagaggtgggcgctggggagaaggagagggaaggagagacgggtatggatggaaaggcagaggaagccaggc

SEQ ID NO: 42267 - DNA, 122 bp, Homo sapiens
ttttcctttttctttggtaaatacctataagtagattggttgagtcatatggtaagtatacgtttaacttcttaggaaacttccaaactgatttccaaagtagtggtgccatcttacacctc

SEQ ID NO: 42268 - DNA, 122 bp, Homo sapiens
tccaacttgaagtgacacacacaccagggctaacctagaaggggcttctgcactcgtgctcgtatgcgagcctatggtagcctgggcttctaatcatcagctgtgtaatctctgacaaagca

SEQ ID NO: 42269 - DNA, 122 bp, Homo sapiens
cgggagcaaggaggtgatgaacgtgctggtccgggttttctagcagcccgggagacttggcgcttcccgacctgttggaagatttatgttccgactcgctccctcccccggatcccgactgg

SEQ ID NO: 42270 - DNA, 122 bp, Homo sapiens
ggttcaagcaatgctccccgctcagcctcctaaagtgctggcattacaggtgtgagccaccgccactgcacctggcctcccacagaggattttctaggagataatgtgctcttcagaaggct

SEQ ID NO: 42271 - DNA, 122 bp, Homo sapiens
cggcctccctgccacggcacgtgagctcggcccagcggttcccggggcagcagcagctcccgcctaagtactatgttgaagtggccagctagtgccgcgtccctccccgcccggggctctgt

SEQ ID NO: 42272 - DNA, 122 bp, Homo sapiens
ctgcgcctcggtccgggtgggtctaaggatgatgattgatccgccgtgcgcacgccagcgcgttcctctgtggcaggagaggggggcctgcgtgtgaccgagcgtgcgtgggaggacgcgcg

SEQ ID NO: 42273 - DNA, 122 bp, Homo sapiens
aggattacaggtgtgagccaccgcgccgggccaaggttccattcttgtctttcatgagctcgttacataaatggacccgatagatacgcagacaatggactgtagtacagagcagaatgaag

SEQ ID NO: 42274 - DNA, 122 bp, Homo sapiens
tgaggggagagaacctatgtatactacagtgaatctctcttgcccttctcccggtgggaacgcctatctttggtaaccaagtgggagggagcagcaaggagaagcagtagatgaggaggaat

SEQ ID NO: 42275 - DNA, 122 bp, Homo sapiens
ccccgcgtcggggaggtttccggcccggggcccgactgcgggtggcatttctggctaagccgttaggcgcgaattgtatgtctggtttattcgtagtggccagcaggggagggagggaggat

SEQ ID NO: 42276 - DNA, 122 bp, Homo sapiens
taccaaagagtaatttatttacatctggaacagcaaacgtttcagtcacattcatttaatcgatttgttatttcattgaaaatactctaggctgtgaaactgtgcagaggcttgcctaacat

SEQ ID NO: 42277 - DNA, 122 bp, Homo sapiens
cgttcggtccgcagattcatgccgggtagaaagtccccgaatgcggtgaatcagttccagcgttcaggaggatccaaccccaccctcgacgggcttgaggggttagcccgcctcccgcagcc

SEQ ID NO: 42278 - DNA, 122 bp, Homo sapiens
ttagatgacagagtgacgctctatatttaaaaataattttaaaaacgatctataccaaggcggcacccaagagatagcttaggtggatgtgggggaagctttagctctccaccctctgcttt

SEQ ID NO: 42279 - DNA, 122 bp, Homo sapiens
actctatgaggaggaagaaagggcagagaactagaagaccccggttctatttctggactccggcccaagttggcgctcctcactttggacacgtcactaccctccgtgcacaggacagccat

SEQ ID NO: 42280 - DNA, 122 bp, Homo sapiens
cctgcctggaaccgcagccctgctctcagaatcaaattcctgaaagtgggcaagcggaagcggaaataagccctctcccaacgccagctgactcgatttcgtctcggtcttccccagagctg

SEQ ID NO: 42281 - DNA, 122 bp, Homo sapiens
atgaaccacttgggactcggacacagggcatggacgcaggcaggaccagagggcagaacccgggaggtgctggttttgggtggagaaagggggggtcacaagaaggaactccttgaaatagc

SEQ ID NO: 42282 - DNA, 122 bp, Homo sapiens
gctgccataaaaattactacagactaggtggcttaaaacagtagaaatttattccactaccgttctggaggctggaagtccaaaatcaaggtgttggcagggctctgctccctccagaggct

SEQ ID NO: 42283 - DNA, 122 bp, Homo sapiens
gaaagtggtcttctccaaaactagcaggaagcgaatgcccagtaccagagtgcgctgcaccggcagctctccatccctccatcccaccgtgcccggggtcctgccttcttacctgcaattcc

SEQ ID NO: 42284 - DNA, 122 bp, Homo sapiens
catagagcagcttcatagggaggatctctgcggtggacccggctctctcttcttattacccgttgcaaaggcctctttcttgttctaacctgggggtttgtggggttgggggacagggggat

SEQ ID NO: 42285 - DNA, 122 bp, Homo sapiens
ctgtctcactagcgtcttcaacgccagggtcggtgtgaggacaggtaagctcacagtgcgcgtgctctccagaggggaaggtccctactgaagatagctgtgctcaaatgagctccattaca

SEQ ID NO: 42286 - DNA, 122 bp, Homo sapiens
tttgtattggaagaccaagtagacacaattgagctggccagtagctgcaatagatgccaccgttaattacctgggcaagatccttgttggagtcctcctcttttgctgccccactcagagga

SEQ ID NO: 42287 - DNA, 122 bp, Homo sapiens
cctgcagggcgtcctgggctggaaccccaaataccggcacccgtcgggaggcagcaacggcgccacgtgcagcacgcaggtttccatgctgacccgcgtcagcccaggtgcccgccgctcct

SEQ ID NO: 42288 - DNA, 122 bp, Homo sapiens
tacacatctatcagccggagataagcaacccttccagctgcttcattaaaacaaaacactcgaggaaaggccctgccctccagtgcaggaacttggccccattacttccattctctttctgg

SEQ ID NO: 42289 - DNA, 122 bp, Homo sapiens
gcacctgacacccaggcagccccagccacagggcagacattgggggactagtgggtggggcgaccagagcaggaggggcagggcaggccgcccctctacctatgacacctgagaaaatgcca

SEQ ID NO: 42290 - DNA, 122 bp, Homo sapiens
cttagcttgtaaaatgcagaaagtcacggatggttacatggttaagatttaataatcactcgtcatagtaattagagaagtacctgttgttgatttttacatattatgaataaacacactca

SEQ ID NO: 42291 - DNA, 122 bp, Homo sapiens
ggctatgtgctcaaggacggcgcccggccggatgttacggagagcgagagcggtgagtgccgtggggtggccccctgagggggaccagggtgccaaggatggggggctggcgggaaggggtc

SEQ ID NO: 42292 - DNA, 122 bp, Homo sapiens
tcgttctacccccacagtaccctttacttaatttacatgtggcttttttcagactgttaacgcgaggtaggagttcctgtaaccaaggctacctgtgtggttcagtctctcacaaaacccat

SEQ ID NO: 42293 - DNA, 122 bp, Homo sapiens
cccctctctttcttaaaattctgaggtctccggctcccctgccgcggcccgcgcgcctgccgcgtctgctgcctgcccgccccgctggccagcttgagccatggctctgttactgttacaga

SEQ ID NO: 42294 - DNA, 122 bp, Homo sapiens
gctctgctgtaagcccactacacgcaaggtcacgcaggatgccactctcaagccacacggcgtccagtctccgttccacccccacgggaggaacacccatcttcaagtcacagaacacggtc

SEQ ID NO: 42295 - DNA, 122 bp, Homo sapiens
ccccgtgccagtgcaggtccagcttccccacaggactgcccactgcttccaccccaacaccgccccggccctggtgtcctcccggccatagcagcttgctgctgggccttgccctgccccca

SEQ ID NO: 42296 - DNA, 122 bp, Homo sapiens
cccacacggtcagatcactaaacaaatcccagagggcccagccctggctgtccggctttccgggaccagagctctgttgggaactgctgctgcttggacaggtgtgttcccggaaagccctg

SEQ ID NO: 42297 - DNA, 122 bp, Homo sapiens
taatacataaatattggctattttaatctgttgaaaacggaaggctagtaccaagggagacggtagtaaaattatagaaggagctagtgaaaagtaaacattatgcaacatgaaaagaatac

SEQ ID NO: 42298 - DNA, 122 bp, Homo sapiens
acggtgcgcgcgtctggaagcatttccgctctggagcattttcgttccgccgggtgccagcgttcctgtgacgcgtttcctgttggccgagctgcgcacgtgcggccggaagggaagtaacg

SEQ ID NO: 42299 - DNA, 122 bp, Homo sapiens
ctagtcgctaggagaccgccagccacgcgcagcccaggttccttcctggaggcggagcagcgctgacgccacctgcgcagcccagattctaacaggtgtgtagtggaatctcattccgggtt

SEQ ID NO: 42300 - DNA, 122 bp, Homo sapiens
cggggccggcggggacggggccggcggggacggggccggcggggtcggggctgggagggacggggccggcggggacggggtcggcggggtcggggctgggagggacggggccggcggggacg

SEQ ID NO: 42301 - DNA, 122 bp, Homo sapiens
gcttacaactttaaggggtccacgtgaaagggtcgtgatacatcaaacaagagtgggaaacgtgactgggggctacaatgcttttttcatacagtgtcaggaattcacagataacacaagta

SEQ ID NO: 42302 - DNA, 122 bp, Homo sapiens
ccttgagggccaggaaatgaatgtggaagactgaatcctcaggggaccccaactctgggccgggtctggggctctgttttgaggacggggagtgggaggaggtggcagcaggagccggcgtc

SEQ ID NO: 42303 - DNA, 122 bp, Homo sapiens
ttcgcttttccctgggatcgctgggaagtgtagtcttcccatggcaggcaatccggcttccggggctggagaggggtctgggatgccctctgccgaggtggagtccgccctgcaaggccctg

SEQ ID NO: 42304 - DNA, 122 bp, Homo sapiens
taactctacaggctagccaatattaaccatcgctatctaccgctgaggaaacgaggtcatcgggtactcaaggcagagctggaagagcacatgactcctgatgctgctgatgttctgcgctg

SEQ ID NO: 42305 - DNA, 122 bp, Homo sapiens
tcgaaagcttactgagctcgtggccctgagcgcgggccggcatagatttcctcttccacccgctgcggcttttctgagcacctggaagcatcggggtgtgaagtcaaaccagacgtgggtga

SEQ ID NO: 42306 - DNA, 122 bp, Homo sapiens
cgcccctttggccccgcccctcggccgtccttccccgcccgtggccccgcccccctccggcgtccgtctgccgcctcaccgcttggccccgcccctcgccacctgcccggccaggcgcgccg

SEQ ID NO: 42307 - DNA, 122 bp, Homo sapiens
gcaggagaaggagccccgcccgcgccggccctggagtcgccggtgtcgccgccctgcccgcgggcccgccctcctggcccagcccagggccctgcgagctattttgaaagtgaccctgggct

SEQ ID NO: 42308 - DNA, 122 bp, Homo sapiens
ctcccggaagtcaacaaacagccgctacgggcaacgggggcggagcttgggaatgcaaggcgggacaggcgccgttggggaggggaacggaggccgggtggctggtaaggggcaggctcagg

SEQ ID NO: 42309 - DNA, 122 bp, Homo sapiens
cttcgctgggcccgcccaccggccgcctaggcgcgagggcggggaatgaggctgtgtctccggggatggggcggtttgcaggcactcccaagcgcctttgacaccttgatgacacctggggc

SEQ ID NO: 42310 - DNA, 122 bp, Homo sapiens
acacacacacacacacgcagcagcacagggtcgtgcactaggaacgggtgagcttcgcggcgtgcacactcggcgagactcctccaggaaagccggggagccgcgcgggatttagctctgcg

SEQ ID NO: 42311 - DNA, 122 bp, Homo sapiens
ctcgaccccagcccggcacctggaagcacctggagagggaagcttaccgccagcatgcgccgtggctccctgtagcggatgtggatggtggagccatcctgcttcaccagcagcacggggta

SEQ ID NO: 42312 - DNA, 122 bp, Homo sapiens
gcagcagcagcagccgccgcggcggcgcctgggcaacccgacccgggcaggggagcgccgcgtcaccaggctccgtggtcccggagccgcccacgcctcctctgcccggggaccagcagcac

SEQ ID NO: 42313 - DNA, 122 bp, Homo sapiens
cgcagggccccccaactgcctgcttctggatggatctgaggggccccactcccgagagggcgcagacacgtgtcctctggcaaaggggacttcttcagctgccgagggaggggaaggaggcc

SEQ ID NO: 42314 - DNA, 122 bp, Homo sapiens
tccttcccttccaatcactgatctttgttgtagattaagcccttccatttttgtcttgtacgtaactcagaccagatggtacaaaagagtccatgactgttacatcttcagtgtggaatgtt

SEQ ID NO: 42315 - DNA, 122 bp, Homo sapiens
acccttcgccgctgcgtgcgcggctctccccggaaacccggacctggccgcctcttccctcggaagatttcccagcaatctagttttcccactctgcgcttgggttccggcagcgcggagcc

SEQ ID NO: 42316 - DNA, 122 bp, Homo sapiens
gggactcagactctgaccaggggggcgggatagtaacccagaagtgcttcaggggcttaacgcaagtcagagagtaggaattataaatcagtacgtttttctatgttggggtagtagaggta

SEQ ID NO: 42317 - DNA, 122 bp, Homo sapiens
aagaagaggaggaattgttttggctttaagacaccggaacctccaaggttcctacaaaaccgtttgcagcttttgcaaaccgccttaaagtcatcagcgccccactgcggaattcaaagcta

SEQ ID NO: 42318 - DNA, 122 bp, Homo sapiens
tcccagagaaccatatgcaggacttgctgcccaggaggttaactgtggttagaaactcagcggtttccctccttgctggcctctgagagataatacaggttgtacatagatgtcacaacatc

SEQ ID NO: 42319 - DNA, 122 bp, Homo sapiens
ggctctgagacgtgcgttgctgcttgtgggtgtgagacatcctagctcctcttccccttccgtgagtccctcctttcctcgcagaccccacttgtcgtggctggctgccgccgcagctcttg

SEQ ID NO: 42320 - DNA, 122 bp, Homo sapiens
aggccaaatttaacctgaatgcgtttttttttttctttttattaagatctgagataggaacggtcatacttagtactgaaaggcagacaataaaatgggccatgaaaggggggggaaaggta

SEQ ID NO: 42321 - DNA, 122 bp, Homo sapiens
gacctcaggcaatctgcccgccttggcctcccaaagtgctgggattacagacgtgagccacggcacctggccagagctgacaattattttaacaggatgccctaacttctgtgctgaaaaca

SEQ ID NO: 42322 - DNA, 122 bp, Homo sapiens
gtaagcccaaggtccagcacacgaatcaggaaactgatggttcttgggtttgcaggaatccgcccagagaacagatgaaagtaacaggtaccaatatcaaaactgcagtgactcaccagaaa

SEQ ID NO: 42323 - DNA, 122 bp, Homo sapiens
tccgctagaacgaaatatcccccactgactacggagagctctgcagggagccgaggcccccgcccgggccaagggaaggcgctggcgccgcgggagacaagaagaggcggaggcggaaaaga

SEQ ID NO: 42324 - DNA, 122 bp, Homo sapiens
cccacctctccccgcccctcggcatccgccccgcccacctcggtcagccccgcccctcggcgggcttaccctgtccgctccgcccctcgctgggcaccaccacccgccttgccccgcccttg

SEQ ID NO: 42325 - DNA, 122 bp, Homo sapiens
cgcctctgtgtcggactccgcgcccgcctgcgtgggaggaagccaggactcccgggcgaccgggccattcctgtggtttgtgtcagttccacagcagcacgtgggcactttccaccgtcagc

SEQ ID NO: 42326 - DNA, 122 bp, Homo sapiens
ttcacacaggccaactcacccaacccgcacggccccacgaggtggctgctctatcagccccgttttacagatgtggaaatggtggcacagagaggctaagtcactggcccaacctcacacaa

SEQ ID NO: 42327 - DNA, 122 bp, Homo sapiens
cgacttgtcatttaccgcactttggataagatgctagcacgatgtcatcatgtctggcttcgaaggtgtccagcgcttggaaagtttctgaggtgcacatggtgatggggtaaggaatcccc

SEQ ID NO: 42328 - DNA, 122 bp, Homo sapiens
atcttgattccgctttaagggttatttaaacatcttagaggaccttcccagcctcacgcacgtggatttcatgaggaacttggccgctaccttctcctgtcctgcgcaatgccgccccctgc

SEQ ID NO: 42329 - DNA, 122 bp, Homo sapiens
catcaagctagagtcagtgatcctgctctgtgcatccaggttaccctgtactgttctgttcgcatagctaaaccctaaccacagatcataggcaatcactgaataaactttgtgattttttt

SEQ ID NO: 42330 - DNA, 122 bp, Homo sapiens
ctgcggggtcaggaaggctcagggcgcccgcggcctggggcgaggaggctggaagagacgcgatgagtcttaggaagagggtatcgctgctcccaccctggctcccagcccggagccctcat

SEQ ID NO: 42331 - DNA, 122 bp, Homo sapiens
atctaagcagttgcaatgatcagacttgatttacaagcatcatggatcaaccaagttacacggggttacactgttaatcatgggttcctcccttcttctgagtgaatgttaacatgcgcatt

SEQ ID NO: 42332 - DNA, 122 bp, Homo sapiens
agtcagattccgcgggagagcggcagagataccgcgatatttgggagcggccccgagacgcgcctggcgcgggtgagcagtggaagggggctgggaagctgggttctcgcggcggcgcggga

SEQ ID NO: 42333 - DNA, 122 bp, Homo sapiens
ggcgtcggaggaacctaatgtgagggtgccgaattaggccccaggtcctgtggacacagacgtgtcccggaggttagcccggtagacctccatggacccagacatgcgaaaaggctgcagga

SEQ ID NO: 42334 - DNA, 122 bp, Homo sapiens
ccctgcgtctatttttacctcctttacctttattcttgggcatggcggtggcggcgacctcgcggcgtctctgacttctttccgggtagcggcgaccgcggcggctgctgctccgaggggcg

SEQ ID NO: 42335 - DNA, 122 bp, Homo sapiens
cccctgcgagcatctgctcttgcagatcccgttggcttctagccccttccatcagagactcgcctccccaaccccaccctagacccagcctctgccttcaaaaaccaacctgggttctagct

SEQ ID NO: 42336 - DNA, 122 bp, Homo sapiens
cttagctttcgccaggagattatcttggagcccagcggccgagattgagagctctttctgcggaacctgcctccggagtcagatgagcaaggggaccgccacgtcctcaccgagctcccagc

SEQ ID NO: 42337 - DNA, 122 bp, Homo sapiens
tgcggccccgcctgccaaatgagagtgaccagtgcagggacagaatgccaggctggtggccgaccgcctgagggacaaaggcgagcattcacaagccaacagcagacccctgccccccatat

SEQ ID NO: 42338 - DNA, 122 bp, Homo sapiens
aaaaactgccctgattcacgcttcactcccagcagcttagagccattcgtccagcctttgcgtttggtctcagagccccactgtgtcttgcagcttgcaatggaactgaggatgtacaggag

SEQ ID NO: 42339 - DNA, 122 bp, Homo sapiens
ttgtccagcaccctaccaggctcgctctgcactgagcatgctcgagggcgaggtttggaccgccccctcccaccgttaccatggtcaccgacacacttagcgaacgtgttcagtgctgctgt

SEQ ID NO: 42340 - DNA, 122 bp, Homo sapiens
aactcccacatacccctgtgtactatcctatccactggggagaaaaatggtaaataagaccgtttccagagcatatgagggaaagaaacaaaaccacaacagatgagcacgccacactattc

SEQ ID NO: 42341 - DNA, 122 bp, Homo sapiens
gctgtgctgcttggagccagctgctgagtcctggagaagaatagagcaggcatgtggacgcgacaaaagctgcctggccctgtgccccaggccagcccaggacgcagcacatcctcaacata

SEQ ID NO: 42342 - DNA, 122 bp, Homo sapiens
cgagcgcacgcgccttcccgaccgaagcagaggcggatcgcgagcgcgggctgcggggtccggctcaggaccctcgctcgggagctacccctcggccgccttccagctggggagccggctgg

SEQ ID NO: 42343 - DNA, 122 bp, Homo sapiens
gtggggctgccgcgcgcccgccaccccggccactgggggctcgcaccctcgggcttgccgcggttatttttaggaagtcggaaatcaaagatggctggaggtcaggccccgaaaggttaggg

SEQ ID NO: 42344 - DNA, 122 bp, Homo sapiens
ttctccacagcgtgcgtggggaggcctccgtgaactctgaccttagctttccgtagcgcccgcgtctgccgcccccgcccccggagcgaaggaggcgggctttggccttttgccctagggag

SEQ ID NO: 42345 - DNA, 122 bp, Homo sapiens
cttcgttttcacaaacctccaaacgaatataaagatcgtagattatatagaccgtagggccgatgtatataatctattagggccgcgtcggccttgcaggcgggtctccaagtgaatgagcg

SEQ ID NO: 42346 - DNA, 122 bp, Homo sapiens
gtccggaggctggtcccaaccccggtctttctgctatagggcagtgtatacacttcctgtcgcttagttttcctggtcaaaaccctgtgctgactccacccaccccgttctttttaaagtcc

SEQ ID NO: 42347 - DNA, 122 bp, Homo sapiens
aggtccacactcgctggctcccacgcccacatggcgcgcaccccccacctctgtgctttgcgcgctggtttcagattctctgaggaggcagcacaaccccaatccagtcctcagccctagtg

SEQ ID NO: 42348 - DNA, 122 bp, Homo sapiens
tctccgcctgggtggggtggcggcggggggtctctgatctcccttggtccacacagaccccgccggggggttcgcggaaaatggaggaggcgccgcttggaaagcgggtcccgcaggggcct

SEQ ID NO: 42349 - DNA, 122 bp, Homo sapiens
cccggggattctgggccagaggctgggtctccctgtgcagcatctgccctttgtgtaaaccgggtctccggacccgccctctggatctcattccgagagcgctggcgtgggctcccctccca

SEQ ID NO: 42350 - DNA, 122 bp, Homo sapiens
ttgcagagagggaggtgctgggaagggggtttgagcgggggtgggtggaggcagaagacacgtgcagaccccaggtggctgttcacggagcaccaagccctgacagcactgccttcatccgg

SEQ ID NO: 42351 - DNA, 122 bp, Homo sapiens
gtttgcagaggaacatcttattataccaccgtttgttgatctggaagctgtttatctacccgtaaagaaggtgtttatttattgatgtgctaaatttggaatcctcagagctacaggtagtc

SEQ ID NO: 42352 - DNA, 122 bp, Homo sapiens
agattcgctgagagccgcgcagagggccccagagtccaaacaggacacccaggattgaggcgaggttaggaaacgcacagtacctgaggtcctcactttcagggctccctgagtgatgaaag

SEQ ID NO: 42353 - DNA, 122 bp, Homo sapiens
ccgcagcatcccggggtgctccaggtggaaagccccttagcacctttcctccctggccaccgtctccttccctccccacccccactttcctgctcagcctcactttgtgattcagcattttt

SEQ ID NO: 42354 - DNA, 122 bp, Homo sapiens
cagatccgctgatctagtgcttctcgaaaaaaaccttcaggcggcccatgggtgagtggtcgccaagatcccgggaagcgtttctggtagtcccgactactttcctacacggctggcctcgg

SEQ ID NO: 42355 - DNA, 122 bp, Homo sapiens
cctgggaagcagtggggtttcccactaactcccctcctgcgaatggaggaaatgggacaacgcaggaggctcaggcttcccttactgggcagggaactgggtgaagataaaggttgaaaatg

SEQ ID NO: 42356 - DNA, 122 bp, Homo sapiens
cccgtccgtccctgagcctctgtttgagggactcacgtccagctcccggcagactcagcgcgggggtcggatgccttctccgcaccatcccgcaccgccacgagctgctgtggctcacattc

SEQ ID NO: 42357 - DNA, 122 bp, Homo sapiens
gagatttttgtgctgaagcaccataaagccgaatatggaagggtggatttgaaacagacacgtttgataattgaaacaagaagcattaaaatcttgtggagcatatttagtgggtaggatgg

SEQ ID NO: 42358 - DNA, 122 bp, Homo sapiens
aacaaggcccagtacctcctgagctgcactgggtttgccgtgggactggggaacatttggcggttcccatacctgtgccagacctatggaggaggtaagcacccacctgcgtcctggggcag

SEQ ID NO: 42359 - DNA, 122 bp, Homo sapiens
agtgagtgttacagctctcacggtggcgcgtctggagttgttcgttcctcccggtgggttcgtggtctcactggcttcaggagtgaagctgcagaccttcgcggtgaatgttacagctcata

SEQ ID NO: 42360 - DNA, 122 bp, Homo sapiens
cgcgccgtcgagaagggcccgcctggcgggcggggggaggcggggccgcccgagcccaaccgagtccgaccaggtgccccctctgctcggcctagacctgagctcattaggcggcagcggac

SEQ ID NO: 42361 - DNA, 122 bp, Homo sapiens
tctgacaaaccagtcctcagggagaatgtatggattctttactcagactttctatctcctcgggattaatttacacccacttcaaaaccgaagagattcaaataagttggcaccactccctc

SEQ ID NO: 42362 - DNA, 122 bp, Homo sapiens
ccttcaggcgctgaggggaccagagagggacggacacaaggctcggcagttgcctggtaacgcccgctggaggagtcccagtgtaataaggtcccggagaagtgtcactggccctgagtggg

SEQ ID NO: 42363 - DNA, 122 bp, Homo sapiens
actgatccgggaccggaggagcgagtccagtcgcaacaaactgctgagacgcacagtctccgtgccggtggaggggcggccccacggcgagcatggtacggcggccgagcaggctctcatga

SEQ ID NO: 42364 - DNA, 122 bp, Homo sapiens
ccccctcccatgtatataaacaacgaaaaccaggagggtagcttggtattggttcccgcccgaaggtcctttcctttcacacccgacctctctagatccccgacttaaccccgattgaagaa

SEQ ID NO: 42365 - DNA, 122 bp, Homo sapiens
ctgaataacattatccaaaatatagtttagcatctctgctggcatctctgggcccggggtcggagtagggttctgaaacccaaggacacgggcaacatcttgcacggtccacccctctctag

SEQ ID NO: 42366 - DNA, 122 bp, Homo sapiens
ggcatggatgtcagggtccccatacccttcttctcgcctgtgaagggcaccaagtcatcacgctctttgacttctagtgcctgttgctccaagtactgcaaaagggcctctcggtccagtgg

SEQ ID NO: 42367 - DNA, 122 bp, Homo sapiens
agcctcgtaagaaaaggcaccggggcccctcgtgcattcagcaaagcgtgaggcccactgcgtccccggagcctggtcctgctggcgtgcagcgcgcttcctgacccgctctggttctgaga

SEQ ID NO: 42368 - DNA, 122 bp, Homo sapiens
gctgggtgtggtggcgtgtgcttatagttccagctactagggaggctgagataggagaatcgcttgagtccaggcgttccgggttacttacagtgatctgcgattgcactactgcactccag

SEQ ID NO: 42369 - DNA, 122 bp, Homo sapiens
tgatgttggccatgaggtttcacctaggccaccaaggagagttttggagtcagtgtaacgcgtccctttgtaatgagtgtttagtgagtactcacatttgtgtatgctcattgtgctaacct

SEQ ID NO: 42370 - DNA, 122 bp, Homo sapiens
ccggcgacctattggctcctgctggaggcgggactcccggttgctaggcggtaccttttccggaagtgtttgttgcgcgctgcagggcaacaccccggcgtccctggaagctgggggagcgg

SEQ ID NO: 42371 - DNA, 122 bp, Homo sapiens
tgggcatcgcaacagaccctgtcctgacatgatgctaacactaaacacagcatatcctgtcggtgcttccagaataaggaagtgttgatattcattataatatttaacacttttttagaatt

SEQ ID NO: 42372 - DNA, 122 bp, Homo sapiens
gtcagtgttggccgtgctcatgcgcagcgccagctccaggagcgcttccaggcgagggggcgtgatgtcctccaccggcttccggagctcctcctccgcgaggtccatgaagtgcacgaaga

SEQ ID NO: 42373 - DNA, 122 bp, Homo sapiens
acccagagccaacaggccctgacccacgacccagcaatgcgctccagaccacaggcgctccgtgaggccagtggctgccacccagctgagtagggagggaactgccactcggccccagcgtt

SEQ ID NO: 42374 - DNA, 122 bp, Homo sapiens
tcctccgccccgccctccggccgcgcatcaaggatctttgctcctcccgcggattcgatccgcgctcgcgcctcctgagcccgccggcctgtacctgagctcaggcccctcggtcgcctcct

SEQ ID NO: 42375 - DNA, 122 bp, Homo sapiens
tccttgagaccctgctttcgattcctttggatatatacccggaagaggattgctggataacgtggtgattccgtttaatttttggaggagccactgtacagatttccgcgcggccgcacagc

SEQ ID NO: 42376 - DNA, 122 bp, Homo sapiens
agaaagtcagctggtggggggcaggggctggaggaggggaaatgggagtgactgctaatgcgtgcaggttaattccgggggtgatgaaaatgttctggaattaaatcgtgctggtggctgca

SEQ ID NO: 42377 - DNA, 122 bp, Homo sapiens
gtgacccctggcactgttacttctgcataaaagtagtggatttaacccctacagaggcagcgccccgtatcctctgaagctgtctccagccacctaaagagacgtcttcattatggctcaac

SEQ ID NO: 42378 - DNA, 122 bp, Homo sapiens
tcataaaatgtcctccctcaggaaaatggggccctcgtcatctcctgccccttcctgctccgtgattgcaggtcctgggggagtatctaaggcttggtgttttcagagcagatgggctgtct

SEQ ID NO: 42379 - DNA, 122 bp, Homo sapiens
tctgacacacctttctaaacttcggcaaatcaaatttaccttttattagacatagagaatcgctaattgtgtgaaacaaatattgcccttcttctggataattcctataaatcatcttcttt

SEQ ID NO: 42380 - DNA, 122 bp, Homo sapiens
tgacttctaaaaattcctcctctccctctcccattttcctaatccgagaatgatggagctcgaggcaaaggaatgattccggaaatggagatatgattctcaaacctagaaatgatcggagt

SEQ ID NO: 42381 - DNA, 122 bp, Homo sapiens
agtgctgggatgaaggtgtgagccactgctcctggcctaacttatcttagtctaaccagccggtggatgtttaggttatttccattgttgtgctattctgaagaatgttgcagtggagctcc

SEQ ID NO: 42382 - DNA, 122 bp, Homo sapiens
cgggcgcggggacagttgcatcggggccgggccgggctagcaggagctgggcgcctgcagcgtggaccccgtggacactcggctcgcagccggcctgcggcgctcggggacttgcctggctc

SEQ ID NO: 42383 - DNA, 122 bp, Homo sapiens
agggctccaggtgggcccggctcgaggcctgacacggcagtctgaaaaggtgcaagcgagcggacacggcctgtgctccccgcccagcccctcagcacagccctacccagagggttcaagga

SEQ ID NO: 42384 - DNA, 122 bp, Homo sapiens
gtgagcccccgtgtaaggctgcttagagtctaagtagtagagttatttaaatgctaagttcgtaaaccaagcacttctaactctggtgtgtagggcaggtggtggagaggtgtcaggatggg

SEQ ID NO: 42385 - DNA, 122 bp, Homo sapiens
tacagtcgaaataattttctatagtcatattcccgtttatttccctaaattttttacttccgatttgttatcctttctacaacaataaatatgtattgaagatattctaagcctatagcacc

SEQ ID NO: 42386 - DNA, 122 bp, Homo sapiens
cgggctgcaagggtccaaagttcactgcagggagaggagggggcggtcagaaggggggggcgaaggtaatgaatgaagaaccagccccagccgccgtggcaactcacctcggcgctgaccag

SEQ ID NO: 42387 - DNA, 122 bp, Homo sapiens
tccctcccccatctcctgtggctggctgtagttttggaaaaatgtgagcctggctgcagccgtcctgactagggctggaggaatggctggtagccacccagcctccgtttgaaggcatctgg

SEQ ID NO: 42388 - DNA, 122 bp, Homo sapiens
ggcggctactccctggctagctagatgagtttggcgcacagggcccagggggacctctggcgtctgtcgcccgtggccaggctgccgggaggacccccccgccctccagtaccacactcgat

SEQ ID NO: 42389 - DNA, 122 bp, Homo sapiens
aaccccttagattctgctggacacacatatggcccttgagccacagagggtggtaatgcccgcggcccctgtgcgtccacagggcaggtgctggccaggcctcctccctgcttcagtcccca

SEQ ID NO: 42390 - DNA, 122 bp, Homo sapiens
tgtaatcctgggtccggaattggcgggttcttggtcccactgacttcaagaatgaagccgcggagcctcacggtgagtgttaacagttcttaaaggcagcgtatacggaatttgttccttct

SEQ ID NO: 42391 - DNA, 122 bp, Homo sapiens
aagtcacttaacctatctgtgccctgtctgtaaaaggagagtaatagaacctacctaatacggttgttttgtagcttaaataagttgcatttgtaaatcactttatacaacgtcttggactt

SEQ ID NO: 42392 - DNA, 122 bp, Homo sapiens
accaaaatcagtaaacaaaattgaactagcagtcttcagggtctgcaggttgccccacaacggtggaatataccagaaactgaggctctgctgagactggacatacgagattggcgtaaata

SEQ ID NO: 42393 - DNA, 122 bp, Homo sapiens
cctgggacagttggggctgcattcgttggcggcagcggcccaggatgttggcggctgcgacgccgccggtgagggggagcgagagggggctcctggctcggccgcccccgcttctcctgaga

SEQ ID NO: 42394 - DNA, 122 bp, Homo sapiens
tttcagccagcagtcccacagccggaacccaactgagagaacaagggcagcagttctttccgcagatccctccatgactgtctgctccagagaccatctgctcctggggttgatccacaggc

SEQ ID NO: 42395 - DNA, 122 bp, Homo sapiens
gagttccaagaatttaggcttccaaatctcggctaggccctactaacacccttaagatttcggcggtggggtggggggaggcagggttagagggtttctttcttttttccttcgtctacccg

SEQ ID NO: 42396 - DNA, 122 bp, Homo sapiens
ctgtcctctagggtacacccaccctcctctgctgatccactgagtgggaccagccagccgcgtggtgccttctttctgatggccttggaggacaacctggcaccctcagctcaggactgatg

SEQ ID NO: 42397 - DNA, 122 bp, Homo sapiens
gaagtctttctctaggcccaggcccaggccctgccctcctgagaacctcttgtcctggcccgcagtctccagccaggtctgcttggcaaggctggaggctcgctgtgtcccctgggctctct

SEQ ID NO: 42398 - DNA, 122 bp, Homo sapiens
ttaccagcggagcagcttccggttgttcacttgacttctctctgtctctgcctccagcaccggtgatccagaggcctcctaatgagtctctaaatttcatcgacacttaagtgggaatcagg

SEQ ID NO: 42399 - DNA, 122 bp, Homo sapiens
tttctttccctccttctttgcctccagctgcagcaccctgaaggcccctgtgctctgctgcgggggttgtgcttcctctgggtgaccctggccttgagctttatgacggcttcctccctcca

SEQ ID NO: 42400 - DNA, 122 bp, Homo sapiens
ctgggcggccccttccctggcagctcccgagggttgacccagagcaggtgctagaagcctcgcggcgtcttcctgcacgaagcgacccaagcagccccagtccgcaccgccttggtcagcgg

SEQ ID NO: 42401 - DNA, 122 bp, Homo sapiens
agccaggttttgaacccagttctgtttggttttaatgccagatacttaaccattgtagcacgttggcttcctcattgatctgcctagtaaacaggtatatgatatgtgtaaaatactttaca

SEQ ID NO: 42402 - DNA, 122 bp, Homo sapiens
tctgtctgtgtgacttagatcaggggtccccagcctccaggctgcagaccagtacaggtccgtggcctgttgggaactgggctgtatagcaggaggtaagccagcattacctgagctctgcc

SEQ ID NO: 42403 - DNA, 122 bp, Homo sapiens
agctaccacgtgctcttctggagccatcttgatcttgaaaggcaggctccctcccaaggccgggtgcaggccagaccccaccggtaaagcacctgcgcagcccggggccaggggtccagtga

SEQ ID NO: 42404 - DNA, 122 bp, Homo sapiens
cctgttcgcgctccacggctttctggctgccgaacatccttagggagaatttgttgaccccgggttggagcatggccccgaactggcgctgcatgaagccggcctggcccaggcgcacctcg

SEQ ID NO: 42405 - DNA, 122 bp, Homo sapiens
cccaaaaaggctactgggtctctctggctctatgatacgcaaatgaggagggaagcgaaacgttcgttcttctaagaggataactgcaaaggaaggctgggccgctgcgttttcgggaacag

SEQ ID NO: 42406 - DNA, 122 bp, Homo sapiens
cggctctcaagcagcccacggccttgctgggtgggacacattccaaacccaggaagggggcgaagggggcaaaagaaggcaggtctggggcgggccgggcccgaaccccaggcgccccagcc

SEQ ID NO: 42407 - DNA, 122 bp, Homo sapiens
tttatttttaaaaaatgtgggtcataatcctttacattgatttccttcctcacagtgcaccgcaagcactcagggaaggactccaggtttgaaggcagatgctggtcgggacccgaccaggt

SEQ ID NO: 42408 - DNA, 122 bp, Homo sapiens
ttcactccaggaaaaggagaactccagcgcggtctggctaagtgcctggccaggggcctgcgtccagggcactggaagtcctgctgtcactggcctccaggacagcaggcgcaaactcagat

SEQ ID NO: 42409 - DNA, 122 bp, Homo sapiens
tgacgtggacgcacagatgacgtggacgcacggacgacgtggatgcatggacgacgtggacgcacagatgacctggacgcacggacgacgtggacgcacggatgactcagatccccagacga

SEQ ID NO: 42410 - DNA, 122 bp, Homo sapiens
cagacttataaaagccaacaggcaaaaattacaaattacagtatgatgtgaaaaaagtaacgggctagagacagaattggggggaacttttttgatatagtggtcaaggaaagactaagaat

SEQ ID NO: 42411 - DNA, 122 bp, Homo sapiens
tccagaggccacccagctccttgggctcccgcgacggactctccttggggtacagcatcccgccttgcagtgccagcacacagcaacagcggcccaaacgccgtgcaggccacacctgtcca

SEQ ID NO: 42412 - DNA, 122 bp, Homo sapiens
cacctttcggagggatcagcgacctcttcgccctgcgggtgacagtggggcatctgcctgcgagagggggaaggagggagaacccagggccacacacaaagttctcctcatctggggacagg

SEQ ID NO: 42413 - DNA, 122 bp, Homo sapiens
aaaacgctccccgatgccgacagatggggagtcctaaaatacagcgtatggatcatgtttcgtgactagcaaaacacgccagccgggacactttgagaacccggccggttttcaggaacagg

SEQ ID NO: 42414 - DNA, 122 bp, Homo sapiens
cgctcccaacccattcttgagtgcacttggagagatgtttcctccaaccaatccagagagcgttctctccggactttccaacgattggatggcgaggataaaaccgtcgtccaatgatcctg

SEQ ID NO: 42415 - DNA, 122 bp, Homo sapiens
ctcacccccagaggaactccagagtgctgttctcagatttcacaaccttctattctcccccgcaaaccacccctgtaagagaaaggggcaaccctaaattcagaatgaaagaaagcaggcac

SEQ ID NO: 42416 - DNA, 122 bp, Homo sapiens
agaatagctactgaatctcttggtctccctaccacaagatacccttcttaaattctaaaccggtggtatttgagaatgctttagttatggcctgtttttgtaaacacagatcatcttccaag

SEQ ID NO: 42417 - DNA, 122 bp, Homo sapiens
agatccgtggagccacacggtgccgagcgcggcgctggccgtgtgctccgtgtctgtcatcgtcagccctgtccacctttggggcaggggcagctgggctggctccagtttctctccatgtc

SEQ ID NO: 42418 - DNA, 122 bp, Homo sapiens
gggaaatagagtctgttacttgtcctgggaccgcggtgggtgtccggggaggcggacttccggtgcactcctgcgcgtgtgcacctctccctgcgtgcgtgttcgcgcgtgcgtgctcgcac

SEQ ID NO: 42419 - DNA, 122 bp, Homo sapiens
taagactatgtgtgcccaaaagcacataagcatctatgttgagagtaagtttgtatcctgcgttggtctcagaaagaacgtgaatgcttaagattttgaaagtacataatattttatacttt

SEQ ID NO: 42420 - DNA, 122 bp, Homo sapiens
ggttagttagagattaaagttgaggccggttctggacaggttcacaggcccctggaagcacgtcaccaccacccatgctgctggcagccctctagggcttgggctccggacgttgtccagga

SEQ ID NO: 42421 - DNA, 122 bp, Homo sapiens
tcagggaagaacaaacacttcaaggtgcagctcgtggacaatgtctactgcattgggcagcggcgcttccacaccatggacgagctggtggaacactacaaaaaggcgcccatcttcaccag

SEQ ID NO: 42422 - DNA, 122 bp, Homo sapiens
gcccctgctgcctacagccggacgctggtgggcactgaagctgcaggtctggagggagtccgaggagcgaggctgcgtgggattactgctggtgctagggcaggcacctgccatctggacgg

SEQ ID NO: 42423 - DNA, 122 bp, Homo sapiens
ccaccgggtgcaggttcagggccaggggccgggcctcctggggattggcagggcgcccgccgcggtcccatgtgcctggggccggtccccgggcggtggccttcggccctgcgctccggcct

SEQ ID NO: 42424 - DNA, 122 bp, Homo sapiens
tattctgtaatttattccatctgtaatgttatggaatcacagatggaataaataacagaacggatacaactgaggaatgaattagaattctagaaggagaaaatctagaacaaagaaagaga

SEQ ID NO: 42425 - DNA, 122 bp, Homo sapiens
tgcaggagaggcctgcagggaacctctttcctctgtcatgcactcactcgacaaacactccgcggtacttgcccgatgctgggccccgtgctgagtgctgaggacacaggggcggccagaac

SEQ ID NO: 42426 - DNA, 122 bp, Homo sapiens
gacaaagcaattccccttctttctaacacagggtccgtaaaggagatgatccacaaggaccggctgagtggataagaagacagactggctgagcggctgaccctgccagacgacaggctgtg

SEQ ID NO: 42427 - DNA, 122 bp, Homo sapiens
aggaaagggcaggccgggtgagcagacggatcggccgactagacagccaaccagcaacaacgaactgagctcgcatactaccgcttacgcatctaaccaaccgcccatctagctaacccgag

SEQ ID NO: 42428 - DNA, 122 bp, Homo sapiens
gcagggggccttgtagttcctgttagggaatggagatttcctctaaatgcaatggtgcagcgacattggaaaggttgtacattgcaacacatagccaaagcttggagacatcagtattttta

SEQ ID NO: 42429 - DNA, 122 bp, Homo sapiens
ctgtgcgtgcacgggagtcacgatgggatgtttcccgcgtgggttactcagatgcggaaacgcacagagagccttaaggctgctgcgggtgtcacagagtgagccggcgtttcaccgagagt

SEQ ID NO: 42430 - DNA, 122 bp, Homo sapiens
cataattccgagagcgtttacaggttctctttccggcgcaaagtaaacgtaagcctaggccgccggaagcagcgggttgaagagagtgcgcatgggtgaggagggacgtagagcggaagagg

SEQ ID NO: 42431 - DNA, 122 bp, Homo sapiens
gtcgtactcaagtctctctggcccctggtaatgtgactcccttcctttatttgcatgaatcgcctggattgggtgtcaggtttttaaaacgtcaaggtttacgcctattgttgtcaaccaat

SEQ ID NO: 42432 - DNA, 122 bp, Homo sapiens
tcaaaaaatactgcagtattgctttcgtaggttaggtaccccacaaaatagactctgagacgctgagatttgcatactaaaggtttcttagtgagcacccctggaacaacagctatgaggag

SEQ ID NO: 42433 - DNA, 122 bp, Homo sapiens
ttcaggggctcttaaccccttcctccccgggcacgcggggcggctgccagtggagctccacgctggccactcgcgggctcccagctccgggtgcagtgcccgccccttgcacccctgggccc

SEQ ID NO: 42434 - DNA, 122 bp, Homo sapiens
gcgctggtcggcgcttctcctttctttgccgagtgcgaggagttggtctgaagcaggagtcgatcttccagttgtgtgcaagtgcatatacgtgtagcctagtagcccgtgtccttgttcct

SEQ ID NO: 42435 - DNA, 122 bp, Homo sapiens
tgcctccaggacgctttccctcctgtgcccaggctggattcggtctccttcctctgaattcgcacactagctggtgcctgcttctattcctgcccttggctgttacaagattttgcattagt

SEQ ID NO: 42436 - DNA, 122 bp, Homo sapiens
ccatctttcagccacccagtcctttcccaggttctcgagccaggacgtgacgtattcagacgtactgggggcggggcctcaaggggaaaagcgcctgagccgggatatcgcgagaacatccc

SEQ ID NO: 42437 - DNA, 122 bp, Homo sapiens
tcggggtgatgctggaaagaatccggcgtcatcccggggaagggatcgtgtaaggtccgacgcccagccgggctgctgcgctagggagacgcggcgtccaggcttccagccgcagctcccag

SEQ ID NO: 42438 - DNA, 122 bp, Homo sapiens
ccaccgagtgagcagctggaagcccggggttaagtgttattgacttcagagcagcagcagcgtgatcgggtttcaagctagttcccattgaattaatttttgtggatcggtgtttgaagttt

SEQ ID NO: 42439 - DNA, 122 bp, Homo sapiens
gagccccgacggccaacccgtcagctctcggctcagacgggcgggaaccacagccccgctcgctgcccattgtctgcgcccctaaccggtgcgccctggtgccacagtgcggcccggagggg

SEQ ID NO: 42440 - DNA, 122 bp, Homo sapiens
taaagaccacgccaaacctaaaacagtgtgtgtgggtgtgtgtgtgcacgtgcatgcgcacgcttgcatgagtgtggacgggcacacacatgtgtgcacgtgtatggcaatacacagaatgc

SEQ ID NO: 42441 - DNA, 122 bp, Homo sapiens
ggtgaaccacccgcctcggcctcccaaagtgctgggattacaggcgtaagccaccgcgcccggccaactcacacagaggaaaaagtgtgcaaagtcaaactgtgaggaaataaaagacggag

SEQ ID NO: 42442 - DNA, 122 bp, Homo sapiens
taaaatctgggcccccgccccgctcgggaattataatcagcagttctttggagagaacgtcgggctgattactagcccatggggttgaagaaccatttcccgaagggtttatgaaacgcagg

SEQ ID NO: 42443 - DNA, 122 bp, Homo sapiens
caagataagcatttcaatttaataacaaaattaaatctagcaccttgaaataaatattgacgacagctttataagtatgaaagtatcatttcaataggaggaaaaaatccagttcaccaaca

SEQ ID NO: 42444 - DNA, 122 bp, Homo sapiens
taatagccttgtgggttttcagtgggcaaggactggggcagctcaaccagaaggggatttcgggagtctattatgaataaatgaaaaataaaagtcctaagatcaagaactgggattgcctc

SEQ ID NO: 42445 - DNA, 122 bp, Homo sapiens
tctggatctagcccgcgtgtgggtccaggcttctctggggaccgagatagccttctcctgcgctagtaagtggatggggaagcggacgcaaagccagcacttgaatcgcgctctccgcagag

SEQ ID NO: 42446 - DNA, 122 bp, Homo sapiens
tgtgcatataccagggaggaactccagtcacaattaagggacaaacagcctcatctagttcggtccaccaccaggatcagcctaagcctgaccccacagcagcaactcctcaggaggctttt

SEQ ID NO: 42447 - DNA, 122 bp, Homo sapiens
accccaaaggtgatgggtgaatttgcacctcacctgcagcaatctcgaaaggctgaaggccgctaagtaaaggggagactagaccattctgcacagtggttctcaaacctggctgcacatta

SEQ ID NO: 42448 - DNA, 122 bp, Homo sapiens
ctagtttggacgctgcctgccaacagactttggagcattgatttccatacacgttctccacgtcaacgtctacgtataggcacgtatgaggcctacacatgtacacacactcgttctgaaca

SEQ ID NO: 42449 - DNA, 122 bp, Homo sapiens
tgcatctcctcagctgcgcagtgagccccaaacggtgcgcgcccgttccctcccccgccgcggtgcccacgtgcctggaatgctctagccggctctgccgcggctctcccctagccccccgg

SEQ ID NO: 42450 - DNA, 122 bp, Homo sapiens
tgcttaacaaacatttgtagaatgaatgaatgtacccacctcctaagaacacacacccagcgtgagggtaaatattaccatttccaaaacataaaattccagtgccttctttcagataccga

SEQ ID NO: 42451 - DNA, 122 bp, Homo sapiens
gagttctgagtcatgtttcatcaaggatttattgcaggagtactttgggaaagaaggacgcgtgctgctctgaggaactgggaccacaccctggtgcttgggaattggtggcggtggttgca

SEQ ID NO: 42452 - DNA, 122 bp, Homo sapiens
ggagatgagagggcttaggagagtgtgagaggctggaggcgagagggaggagaagcaggacgaggaatcggactccagtagcagcttatatatggagagcatgggctgggcccagtcctgga

SEQ ID NO: 42453 - DNA, 122 bp, Homo sapiens
actccagtctgagcaacagaacaagaccctgtttctaaaaaaaataaaataatgatgattcgtcatgtcttggattaacatactgatgtggttatatgcaaagcttctcagtctaaatgttt

SEQ ID NO: 42454 - DNA, 122 bp, Homo sapiens
ggggaggccactgctaggggactggcatccaggcccccttgaagcgtctcaataagtccgcgctctcctttttggtgtcttgcaggagaggcagcttccccccttgggtccaacaaacccgc

SEQ ID NO: 42455 - DNA, 122 bp, Homo sapiens
tctgtagtcagcatggccccaaaatattaactcaaaaattccagaaagaaagaagtaattcgtgcttttaaaattacacacagttctgagtagtgtgatgaaatctctcatggtctcactcc

SEQ ID NO: 42456 - DNA, 122 bp, Homo sapiens
tgccggtccttccccaatcaggtgtgggacatccagaacctgcagaaggtgaacaccatccgggcccatgacaacccggtgtgcacgctggtctcctcacacaacgtgctcttcagcggctc

SEQ ID NO: 42457 - DNA, 122 bp, Homo sapiens
gctctacacagagaacagagggagctggttgctgtgctgagggagcctgagtgaggagaccgccagccccagaagcagagggcagtcaaggtcaagagcctgtggtccagcatgcctggcct

SEQ ID NO: 42458 - DNA, 122 bp, Homo sapiens
tctgtgtgaaggtcacccttggtaagatctggtggctttgggattcattcctgggagcagcgttgggtatacacccatctgtgcacatcctctccgccaaccagcagatgcttgtcagatag

SEQ ID NO: 42459 - DNA, 122 bp, Homo sapiens
ggggcagaggggcggggagctcaacccccggcaaaacgtccccgctgcgcgtggctgccgcgagatctgcaagagcgttttccacgcttatgtacacgaaattcactcggctgcgacgacgt

SEQ ID NO: 42460 - DNA, 122 bp, Homo sapiens
ttattatgggcctaatatggggcaggcccttcccagcaactccccaatgcctcactctaacgtttgtagaggaggggcctgaggctcggaggagtggagtgacttggggaaccacacagttc

SEQ ID NO: 42461 - DNA, 122 bp, Homo sapiens
gtcggcgccagcttgctcctcgtcctctgtgcctgcgcaagacacactcaccgttagtcacgggcactgttgagggttcaggacaaaagctgctaacatctactgtgaacaggaggccctgc

SEQ ID NO: 42462 - DNA, 122 bp, Homo sapiens
ctttaagttcactgtccctttattctacaacctgctgggaagcctatccagtaaagctttcgtttcagatacggtactttttggttttaaaattttcatttggaagcataagaaacaacagc

SEQ ID NO: 42463 - DNA, 122 bp, Homo sapiens
gggggcccaggcccagtcgggtgggtgtgatttgaatgttctctgctacagctgctgcaccgggccctggtcactgctgttggtttcgctccattttactgcctcagaatccccctgtgcat

SEQ ID NO: 42464 - DNA, 122 bp, Homo sapiens
taatggacaattcaccttaggcacgtgtttattttatggtgtcaaaatcctttcatttctcgaaggtgtttactgagacctgagttagttgctaaactagctggtttaaagctaaacaagta

SEQ ID NO: 42465 - DNA, 122 bp, Homo sapiens
aattttgtgctaaagcaacagaaattcttatctctgtagaactatgtcacagggaacttacgactttttccttagagggaccagtaaggctgtgcttccaccctgcaatagtgatgatgatg

SEQ ID NO: 42466 - DNA, 122 bp, Homo sapiens
aaagctctgcgcgtgggcggggagcccggagcctcgccggggcaatgtcatctaggtgctcggcgctccactgatccggcccccgggggtgggcgggcacgtttgcctcggatggtctaaca

SEQ ID NO: 42467 - DNA, 122 bp, Homo sapiens
ctgatccctggaagatcaatacaaaaggcaacgcggcagttcgacagctgaaaatacaggcggcggcagccagccacgcctgtgggcaggggagagggagtagaatgtacttacggacccag

SEQ ID NO: 42468 - DNA, 122 bp, Homo sapiens
agcttctctcccgttctctaagcccttcccacctgctacagtacctggaaatctaggtaccgacatgcttcttaaagcactttgtaggctatgttcatgtctgagatgagtaacaagttcac

SEQ ID NO: 42469 - DNA, 122 bp, Homo sapiens
catcgcaggcgcttggcaccccacgcgaggcgggtactgagagccagctcctcttcaccccgggtctcttaggactgccatcgcaggggggtagaggtaccccatgcaaggcggggactgag

SEQ ID NO: 42470 - DNA, 122 bp, Homo sapiens
ccagcagttggcgcagttgggggcccaggcagtgggctgccggctctgaggcctggccggcggggggtcgcaagtcgatgaccaggtccgtgatgagctcgtccagctgctctaggatccgc

SEQ ID NO: 42471 - DNA, 122 bp, Homo sapiens
ttttgtattaaacgtattccgggaatatgggtcagagtcctcactcatcaggttattccacggtcaaccacactcctgggttagctacatcctctgttccttccccccttttcttttccttc

SEQ ID NO: 42472 - DNA, 122 bp, Homo sapiens
caggccccgctccaggccagccactggccccaccaagccccgcttcgcagcccgagagagcgggaataaattaagctattcttagtagggcctgaaaaggagccctttctgactactaagaa

SEQ ID NO: 42473 - DNA, 122 bp, Homo sapiens
cacgcccgccccgccccgcctggccccgcccgcctgcccgcccgccggagccggccgcggcgccgcccaaaccctggcgccggagtctcggccaccggaccagagcctgcccccggggccgc

SEQ ID NO: 42474 - DNA, 122 bp, Homo sapiens
tagttagatcacagggaacatttccaacttagttacaatcacctaattgtgtccagggaacggaggaaccgaccaacaagcaaaggtcagttccttgttcctttcacggaaaacacattctg

SEQ ID NO: 42475 - DNA, 122 bp, Homo sapiens
aagtgcatttctcagtgtagggtgcataggaaagttctgcagggtcacagattgcctctgcgctttattatagatttctcctctatttgtggcccctctttcaactctctggtatgattcat

SEQ ID NO: 42476 - DNA, 122 bp, Homo sapiens
gcattcgatgctgtttctaagctggcctcctccctggccctctgcatctcagcagagcagcggttccatctccacactgagacttgcctttgagtatcgcatcacacacctccaccggttcc

SEQ ID NO: 42477 - DNA, 122 bp, Homo sapiens
gtggaaatgccatcatccccattatcggtcgctccccgttaccccacactcgtcaccacccgtgcacctgcctccctgctgggttccctcatgataactttatgggaaccaacattcagcac

SEQ ID NO: 42478 - DNA, 122 bp, Homo sapiens
agagtggatcttattaacattttaataaagagaatctttttgcactaggctggaagtggccgccagtcccccgtgcaattccattctctggaaaagtggaatcagctggcattgcccagcgt

SEQ ID NO: 42479 - DNA, 122 bp, Homo sapiens
gaaagccacctttccaagcacagaatcttatcagtgcctaggagttcagccgacttagcacgaagagtgcgatggaagggctgcttttggcaaaccgtctcaaccccgggcgacggcgggca

SEQ ID NO: 42480 - DNA, 122 bp, Homo sapiens
aacgagacccgcaggtctgcggtgtgattacactggaggtttctaggaagccgtgctcctcgggctgagtcttagcaatgagcaggaattcatctccctggcctgggccagtgaagcggggc

SEQ ID NO: 42481 - DNA, 122 bp, Homo sapiens
ccagtctggaaagtgaggagcgtctctgcccggctgccatcccatctaggaagcgaggagcgcctcttccccgctgccttcccatctaggaagtgaggagcgtctctgcccggccgcccatc

SEQ ID NO: 42482 - DNA, 122 bp, Homo sapiens
gcgggaaatggaatgagcagagacagaggcagaaatacagagttgaaagaactctttcaacgtgtcgccagtgagtgacgactttctcagtgtgggagtaaaagaatttaccaagacagtgg

SEQ ID NO: 42483 - DNA, 122 bp, Homo sapiens
cccaggaatatgctcaaaaaggaaactcagtttctcacagtggagacacagggggatgggcggggaaacacaggcctcccttggctcagcagcttataccagggtcagctcaggggccaaat

SEQ ID NO: 42484 - DNA, 122 bp, Homo sapiens
cgtctcggatcgagcgagggcctcaaagaattgaagtgaacagctggaacattccatgaacgaggggactgttagcagtcgccactcaacactgcgggagcgggcaatggtaccagccgagg

SEQ ID NO: 42485 - DNA, 122 bp, Homo sapiens
atgctgctatttggggtggaagctgagatccacctccctcctcctgagggatggcacattcgggtgaaggcgtatttgttgactaattgacatttaaggagggcgagtctaattgactccgc

SEQ ID NO: 42486 - DNA, 122 bp, Homo sapiens
gtcaggaggcaccagaggagatgcaacagctaagtgtaacgtggcatcctggatggggtccggaacagaaataagatattaggttaaaacaactagtaaatctgaataaaatgtggatttta

SEQ ID NO: 42487 - DNA, 122 bp, Homo sapiens
gaacccaaaactgatccttgcggttccgaaagcggccttctgtggcatggagttgctgagcggagtctagttctgcgtgtgtatcctgctgggttgcacctgtttaatctttgcctttcttt

SEQ ID NO: 42488 - DNA, 122 bp, Homo sapiens
aggctgcagcatggagctggcccccctctagccacaggatcgagctggcttcagagcttccggggtctcatcctcttgcaaatttctttggtggtgaaatctatcaaaggaatctcaaaaca

SEQ ID NO: 42489 - DNA, 122 bp, Homo sapiens
ttcttcgccttgggctgcgatttctgaggcgctgctctgcctattccgagctgggccagccgggggcagggggcaggtcgcgagtcccgcgggtgggagcggagcggaagtaactagtgact

SEQ ID NO: 42490 - DNA, 122 bp, Homo sapiens
cttcgcctccacctgcctgctgagcaggttcagtgtgggcatcttccacctcatgcagatcgccgtgccctgcgccttcctgttgctgcgcctgctcgtgggcctggccctggccaccctgc

SEQ ID NO: 42491 - DNA, 122 bp, Homo sapiens
ttgggaatgtcccgcagagtggatttcgggagagtggcgcttttctctagaactctcttccggttacacctggagtaaaagcttgacactctagaaggaaaaccccagatgagcagctagga

SEQ ID NO: 42492 - DNA, 122 bp, Homo sapiens
gtttgaagggcaggagatttccctggactcccgcatgggcatcttcatcaccatgaaccccggctacgcaggccgcacggagctgcccgagtcggtgaaggcgctgttcaggcctgtggtcg

SEQ ID NO: 42493 - DNA, 122 bp, Homo sapiens
cgaccaagagaactcggcttggcgaaatggcggtgctgggaccctaagagtgacgccagccggaggagttcccaaggacaacatccattttggcggaaccaacggtgttgtcacgcagaaaa

SEQ ID NO: 42494 - DNA, 122 bp, Homo sapiens
cttgataagacgccaggggctacctatgtagattcccagggaggaactgtaggaacaaaccggtgtcaatggttaacccaggttcttggtgtctggagcttttctttcctttattattaact

SEQ ID NO: 42495 - DNA, 122 bp, Homo sapiens
cccctcacacgccctcgccccgccccgccagtacctagagcggcctagcccgggcagccccgcccctgccgtgactgtagtaggcacgcgcactttccacctcacccgatttcgacgccccc

SEQ ID NO: 42496 - DNA, 122 bp, Homo sapiens
gcatttctatttccattgggtcctgtcttctccaccttctacgtttcaaccggaaatagtcgtacccatttaaagccacgtcggtactggcctcggtcccgccccccacactgcggaaccgt

SEQ ID NO: 42497 - DNA, 122 bp, Homo sapiens
gccgccgcagcagggccgggcgctgggcgggctgctgcgctgggtgggcgccaggatgggcgagccccgggagtcgctggcccccgccgcccccgcggaccccggcccagcctcgccgcgcg

SEQ ID NO: 42498 - DNA, 122 bp, Homo sapiens
ataagaaatgctccataaacatttactgcatgagtaagaaagcatgactcagaactctgacggtttcatttcttaccatgtgaaaatttctatgaaagattgtgttttctagtcagccataa

SEQ ID NO: 42499 - DNA, 122 bp, Homo sapiens
agttctgagtgtcctgtggccagacttgttcctcgtattcactgtcccctggggatgtcacggcagaggagcccagctgtgcactcactcctgcttcatggaacttacatttaaggcggggt

SEQ ID NO: 42500 - DNA, 122 bp, Homo sapiens
gaagcgagggcctgtggagtcggatcctcttcggggtgagccaggtaaccatggcaaccccgggggtggggcctcgcttccggtagccgagagttttgttagaaccgcgtccccgccccagt

SEQ ID NO: 42501 - DNA, 122 bp, Homo sapiens
tcctcagtatcagcgctggggtggcctcctccaggaagcccttctgattctctcatgggtcgctcttcctctgcagactcccggagcacccctgctccaagtaccgcaagtggcactgagaa

SEQ ID NO: 42502 - DNA, 122 bp, Homo sapiens
caaagccaaaatcctgattacgagtaagtatttttgcctctacagctggaagcagctggccgctgagtctgggatgggaggaggctgcatgctgcaggacagcagctgggggaggggaggaa

SEQ ID NO: 42503 - DNA, 122 bp, Homo sapiens
ggtttccacatctctcttaatcatgttattccaaccttctagtttgaaaattggccttgtcgatgaaaaaatatagaagcaatacaacagcattgtcataatgattctttactgtttgcaat

SEQ ID NO: 42504 - DNA, 122 bp, Homo sapiens
ttcctcttgccctcctccttcttgctccctcccccatcccacccactctaggaagagccgcgcttcggaacgaccccgttggccatgctggcggcgacctgcaacaagatcggcaacacgag

SEQ ID NO: 42505 - DNA, 122 bp, Homo sapiens
ttccattgctcccaaacatcagttgacggcacactttttctaaagggtccttttctcccacgccaagacatccctggagctggggtctggctcggccttccctgcgcaccccctgggggcga

SEQ ID NO: 42506 - DNA, 122 bp, Homo sapiens
ccatggctccggcgccgcctcggccagtaagtaggagcatgcatgtgtagggggcacatgcgtgtcggcgcacccacccagccatccacccgcgcgcacgcacagcgcccggagcctcggca

SEQ ID NO: 42507 - DNA, 122 bp, Homo sapiens
caacaaatgcgcccataaaatctgtctttgagccctgatgaaatttcatcctctgcagaacgcctccgctctgttttattaggtgggagagagcaggagagtttccacaggattcagagaga

SEQ ID NO: 42508 - DNA, 122 bp, Homo sapiens
ctgcatctcccagtgtctggccaccacttccacctccaatatttgtagcagatgtagctccgctcttaaagaaacagcctttgcattctttccatgtgacttacaagtgagatttaaggcgg

SEQ ID NO: 42509 - DNA, 122 bp, Homo sapiens
ggtcccgcgtcgcgatcccagtggggcggggtctcagaggaatcggagggtgactcatcacgtgactcgctccggccgcagccccctcggaagctgctaggcggaagtagaagttcagaaga

SEQ ID NO: 42510 - DNA, 122 bp, Homo sapiens
acgcaccccgcgcatagcgactggtggcctggtgggggactgcgcctgcgaggccttcttcgcgcagagatatcggggttctctgaaccccagaaatgggcctggcaggggaaggaagctgc

SEQ ID NO: 42511 - DNA, 122 bp, Homo sapiens
gctgtttttagcccccaggggccagttagggtcccagtgcaagctcgacctagcttcttccgcctctccacgaggaggcgctcccgcgcacgcgcctaccacgttcctgccccctagccgcg

SEQ ID NO: 42512 - DNA, 122 bp, Homo sapiens
tgccgtctgtcacccctttctttgactaggaaagagaactccctgaccctttgcacttcccgagtgaggcaatgcctcgctgtgcttcagcttgcacatggtgcgctgcacccactgtcctg

SEQ ID NO: 42513 - DNA, 122 bp, Homo sapiens
atggataatcctttgtggggagttggaagtgtctttgcttggaaggtacaattcaagtaacgttagaaaagaaagatgttcttttttgccactaggtgtcagcattaatttaattatgatct

SEQ ID NO: 42514 - DNA, 122 bp, Homo sapiens
cgaggaggacgtagactttatcaacgagtacgtgaacctccacaatgagctgcggggcgacgtcattccccgagggtctaacttgcgcttcatggtgaggccggaaggcggtttgccgaccc

SEQ ID NO: 42515 - DNA, 122 bp, Homo sapiens
tatcaaagacccgcagcgccgcggccggtccgggataagccggtggctgcggctccaatgcggaaccggttctctagccgctaaggagccagggctgctcaccccaggccccctgaggttca

SEQ ID NO: 42516 - DNA, 122 bp, Homo sapiens
tgcctgatggataatccatcacttgcttttctagtatgaatggtctatttacgggtccagcgcccctgctggcttacgaccttttccagggcggggaggggctgtcctcatctctgtgaccc

SEQ ID NO: 42517 - DNA, 122 bp, Homo sapiens
cttaccatcaactatgattgtttgtgaaataacatcatcccacacatccaagaaactcaacgaaccccaagtatgatcaatgaaaagagatccacatggtaggtcctcaaatatgttgaatc

SEQ ID NO: 42518 - DNA, 122 bp, Homo sapiens
tcattcggcttgtcactctgttgtcttacatttctttggctcaccctctttgggttcgcacggtgggcggggccagtggtagggggtggtgagaaggtgcgggccccttcttccaattggct

SEQ ID NO: 42519 - DNA, 122 bp, Homo sapiens
gccccggccctcggaatgcaaaaggcgaaagctccctcctgggcagggccagagcgagagcgagtgaggagctcctcccggacctcgggcctagcttcggaggtatttttagctcctctctc

SEQ ID NO: 42520 - DNA, 122 bp, Homo sapiens
aattacaaacaaacaactctgctctttggttcaaatgtaaatgtgtctcttcaccagcatcgctaaggaagccttctagccggtgaggacaagacacgctcatttgaaaagttaagagtctt

SEQ ID NO: 42521 - DNA, 122 bp, Homo sapiens
tttaaacggccagctccctgcaaggaaaaaaatcttctgtggagatcagagcgctggcctcggaccgttggattgggcgagcatcttgggtaaagagaacagagctttatggctctgggccg

SEQ ID NO: 42522 - DNA, 122 bp, Homo sapiens
tgaacaatgtcatcaatgaaacttaaaagcgagaaaaaagaatatacacataatttctgacggaaaacctgtaccctgatgctgtataatgtatgttgaatgtggtcccagattatttctgt

SEQ ID NO: 42523 - DNA, 122 bp, Homo sapiens
gcttcaacaaaatagtctacttgtggaaatcttctgtgttgccctctgacccttattttacgtagaaaataaatacattttttaaaaaatatggatttatcctccagcagggtatcaaggtt

SEQ ID NO: 42524 - DNA, 122 bp, Homo sapiens
caatgttatattatgtttttcaggcatgtagttgaatttcagatgatgagttttttagtccgggttacgtccaaatttatgtaataatgaatcacaaaattagggttgattatgtttacact

SEQ ID NO: 42525 - DNA, 122 bp, Homo sapiens
gcacaggaaacattccctccattgcagagctctcccctgctgcaggtccaggtggggtcacgatgggcttgggtgtgggcgttggcaggaacacgcctgggacaggagcagaagtatgggtg

SEQ ID NO: 42526 - DNA, 122 bp, Homo sapiens
aacctggcgttggacgctggcgggtggcacgtttcttactggctgggcaggtgtttcgggcgttagcaggctccacctccgaccagcccatctccctcccatcttctgcctttccctggaga

SEQ ID NO: 42527 - DNA, 122 bp, Homo sapiens
aacgttcaaacagaggcggcatttgcttattcgagttaaaatgctttgcggaggagacagcgatcaactctattccacaaaatgagtctacaagtagggaaatgcagaatccggcttcaccg

SEQ ID NO: 42528 - DNA, 122 bp, Homo sapiens
ccctcccaagggctgggctcgaagggaggagctgctgcaggcttgagcggtctccagactcgctgggaaccaccgcaaagagggtgtgcaagagttgaggccctcacgtcttgggaaaggag

SEQ ID NO: 42529 - DNA, 122 bp, Homo sapiens
agacgtccccgatccccagcttaaatttatccaggaggacctgtgagtgggtggctgggccgaggttccactcatgggctgatgtcggctggaggatcccagccccttaagacctcagtaag

SEQ ID NO: 42530 - DNA, 122 bp, Homo sapiens
ctggtaaatataaggtttctcttccacaatccatttggaatatcatgatctttgggtctccggcccttggggtcctccccagaggactcttctgccaggcctgcagagtgcattctttgcct

SEQ ID NO: 42531 - DNA, 122 bp, Homo sapiens
taacagctcttaaggcatcgcgtctggagttgttcgttcctcctggtgggctcgtggtctcgctgggctcaggagtgaagctgcagatcttcgcggtgagtgttacagctcataaaagcagc

SEQ ID NO: 42532 - DNA, 122 bp, Homo sapiens
gccatggcgacagtctctaggcagcgtgggctgagctctccgtaggaataaagggtgggccgccgctggaccctgcgcgcgcccgccaccaactttccctccagatccgagaggggcggcgc

SEQ ID NO: 42533 - DNA, 122 bp, Homo sapiens
tcagctaagtgcctatgcatgaaggtccaaaagccttgtatgccccacagatggagagaccggatgtgaaaatctgtccatggaagaggaaaaaaaatcaataataaatggttactccaaaa

SEQ ID NO: 42534 - DNA, 122 bp, Homo sapiens
ccagacggttcactccaggctggagattgacaggtctcgggcttcactgagccaaagtggcgcccccacgtggcgacagcttaactttacacagctctccacccaaccccagctttgaaatt

SEQ ID NO: 42535 - DNA, 122 bp, Homo sapiens
gtttcttcatataatttgcgttaaggcttccttttgactttgtgggagcttggagtaaaacgcttcacagagttttcttgcgtttctgtttttcaggctcacttcatggactcactttgcgt

SEQ ID NO: 42536 - DNA, 122 bp, Homo sapiens
tgggcctggccttgttccggatggtcccaccatgagttcgcatcggtcctgcagcagacacgttaggacgctcagcaggtccactcccgtgttccggtcgtggctttaacaattcatgggga

SEQ ID NO: 42537 - DNA, 122 bp, Homo sapiens
agttatttgcatcttctccccactcttaaccctactgcatcatggcagtagggttaaaagcggggagagggtgcaaattaggtggcttgtcccagctcatgctgctagtgggaggcagaagc

SEQ ID NO: 42538 - DNA, 122 bp, Homo sapiens
caccccaataccgcgcttttccgattggcttaaaaaccggagcaccaggagactatatcccgcggctcggagggtcctacgcccacggagtctcgctgattgctaacgcagcagtctgagat

SEQ ID NO: 42539 - DNA, 122 bp, Homo sapiens
cctggaatgaaagacggtttcgtgttggacaaggacatatctgcagaaggccagttctctcgaactcgtcggacttcctggctccctgacccccagtgactcgtttttccgttttctcaggt

SEQ ID NO: 42540 - DNA, 122 bp, Homo sapiens
aaccctctttgggctcacagaagcctcgcccctcatgaatatgtagatagcactgcccaccgcgcgtactgccccgccctccactcttctccctcgcaaccgactctcccttcaaacgggaa

SEQ ID NO: 42541 - DNA, 122 bp, Homo sapiens
ctttaatggaatacaattctgaaaataatattaaacagcacccagtcattctcagaaagccgtcacacaaggaagaaaccactattttcccaaactttttgtacaggaaattataatctgta

SEQ ID NO: 42542 - DNA, 122 bp, Homo sapiens
cctgagccaggtccccgcccgcctctgtcctgccaggcgctgctgggtttgggaggaatgcgtttactctccaggaccaacgagtctgtgcaggcctgggtgtgtggatgtgtattaatata

SEQ ID NO: 42543 - DNA, 122 bp, Homo sapiens
gagcgtgcgcaataccaagaacttttcagcctccagcggggtggggcttcgattcggctccgcccacccctccaggttgtcatagtgatgccgtatccactgagactccggatcctaacagc

SEQ ID NO: 42544 - DNA, 122 bp, Homo sapiens
atatcaaggcaggtccccacgcttggggtgggcttgggaacagctctcccctagagaggccgttgggggtgaggaagcccagccgctcttaccttgagcctttgggtctaggatctgcaaaa

SEQ ID NO: 42545 - DNA, 122 bp, Homo sapiens
ccgccggccaaatccctgctcacacccctgctggtgctgagtcccggcctaatttgcatacgaggcagaaccgctttctgcaaactagacagtgaccttgaactgggccgctgcggcctctg

SEQ ID NO: 42546 - DNA, 122 bp, Homo sapiens
ctggcggccgctgcagacgaaaggcaggaaagggcaggccgggtgagcagacggatcggccgactagacagccaaccagcaacaacgaactgagctcgcatactaccgcttacgcatctaac

SEQ ID NO: 42547 - DNA, 122 bp, Homo sapiens
cagcagggaccttctcccaggtcgcccctaccgcctgcccaactcgacccccgtcgtctgcgcctgcgcccaggcgcctctcacgcaccccgggcccccaccaccctttcctgagaacgtga

SEQ ID NO: 42548 - DNA, 122 bp, Homo sapiens
atctggaccagaggaataagaagaaatcccactgcggaatgcgcgagctctgcaatggcccgcgtctttgggtaaatcgaggatgggcatatgcacacacacgtccgtgcacacatttaact

SEQ ID NO: 42549 - DNA, 122 bp, Homo sapiens
tgaggcagttggttggtatggctgcttaacagaacggtctcttttgatttaatgcgcgtgcgtgcacacacacacacacacacacacacacacacaaatacatcctaagagcttaacattat

SEQ ID NO: 42550 - DNA, 122 bp, Homo sapiens
catattccgttgatgagaactaatcatgtggccctacctatatgcacaaaagttgagaaacgtcatttagctatcttggaagagaaaacaggtttggtgagtatgtagccaggctttgtacc

SEQ ID NO: 42551 - DNA, 122 bp, Homo sapiens
cttaagccaccttcccagatgaggaaacttatctgtgttcccctccttcttctcaacagccggctgatggaacccaagccctccacaccagcagtggggccagctgcacagagcggccagaa

SEQ ID NO: 42552 - DNA, 122 bp, Homo sapiens
cttacttacaattttgttttcagctttttttccactcgatgtttagacttttttccatatcgtcgtctttgtaattttttattggttgcataatttttgaggttgatatacttaaatttctt

SEQ ID NO: 42553 - DNA, 122 bp, Homo sapiens
tggactgcctagtagaagaaagaattaactttttcttttcatgcacaacaaatggatatgcgttacaggaaggtaattaactttatataggaaatagttttgagttgacctgggaagggtct

SEQ ID NO: 42554 - DNA, 122 bp, Homo sapiens
gtgcgcgcctgtgctcatgcacgccccccctcccgctgtcagccgcgctgatgacattggcgcagaggaaagtgatgacaaatgcccgttatcagcgaacgaggccgatgacaaatgggcgg

SEQ ID NO: 42555 - DNA, 122 bp, Homo sapiens
cgagctgtcctgagcccctctgctgcagccacctgcctgtcccatacaccctgcccaccacggagtccagagggaaatcggccagcagccccaagcccgacaccaaggtgacccaggccacc

SEQ ID NO: 42556 - DNA, 122 bp, Homo sapiens
gtagggaatgttgatccgtattggtttctgcttctcgcacgttgaaggcctctaattccccgacagtcttcgtgtggttatccagcgccctgccactcccatctcaagcgactggagagcca

SEQ ID NO: 42557 - DNA, 122 bp, Homo sapiens
gttacataattcattagctcctctggatggcctgtgaagtgggttatagtatctctgtttcgtaggtgagaaaacaagattggagaggttaaatggcttacctaagttacagtgtgctggta

SEQ ID NO: 42558 - DNA, 122 bp, Homo sapiens
ctggttcccaagaaagcttgtcttttcctcctcagctgttggctgggggtaagtaggtggcggtggtcagtgggtcccgggaggaagaaaacttggtctcaaagttcactttcataactaga

SEQ ID NO: 42559 - DNA, 122 bp, Homo sapiens
tgcggccgctccttgtagccaatgaaggtgccatcattcttgaggaggaagtagcgtggccgccaggtcttgatgtactcccctacagacgtgcgggtggtgagagccacgcacactctacc

SEQ ID NO: 42560 - DNA, 122 bp, Homo sapiens
gccaggatgggacgggcctcaaaaccatgggaactacaatgggcagtggtcgttttgactcgaattccattcccctttgttctggaaatagctgcatgatttcccttaggggatccactcca

SEQ ID NO: 42561 - DNA, 122 bp, Homo sapiens
ctctcttcctccagggagatgacagtctgtctgcagtcacctttgactctgatgtggagacggtgagtgccgctgggtgtcagccgtgcgacctcgggctggttgcgctgcccttgcagact

SEQ ID NO: 42562 - DNA, 122 bp, Homo sapiens
ggccgccgcgctgagctgccggggcatggtgggcgctgggcgaggttctgcagcgtgcggcgaagtccgggcaggccccgaatcggtgccagagaaacctacctgtgccggagaaacgaaac

SEQ ID NO: 42563 - DNA, 122 bp, Homo sapiens
gggcgggcggctcggtggggtacgtaaccctctgtgctgttgtccagcagggtagaaaagcggaaggtcacagaccccgtgggagccctgaaggagaagtacctgcggccgtccccgctgct

SEQ ID NO: 42564 - DNA, 122 bp, Homo sapiens
cctctcggaggcgttggacagggagctgaggttggacgacggccgagagccgccgcgctccgcctgtgcttcgtgcaggtcctgcaggagcttcgtcgtctcatccaagttcaaatggctgt

SEQ ID NO: 42565 - DNA, 122 bp, Homo sapiens
gtacaggaccctggtatcttcagagaacagagcagtgggaagggagagctcagagggagacgggtgacaactggcccacccctatccctgcactggtagcattcttaccctccccttgctat

SEQ ID NO: 42566 - DNA, 122 bp, Homo sapiens
caaatctaacgtgccagaaatgctgggagtggtgcccagcactcttttgacaagaccttccgtgatgctgatccttccttaagtttgagaaccaatggcctagctccctgttgctgtgaagc

SEQ ID NO: 42567 - DNA, 122 bp, Homo sapiens
gaaaatgagtctctgggacagatggatcccagtctgggtcctcgcaagcgctgtgcaccccgtcgccgcgagatggcggtgttgcgcccctccagcctcctctgctctgcgcttgggcgctg

SEQ ID NO: 42568 - DNA, 122 bp, Homo sapiens
ctctaattttgtccatctatttttgaattcaattttcaaattcaaaacgcttctctcggccgggcacggtggctcacgcctgtaatcccagcactttgggaggtcgaggagggcggatcacg

SEQ ID NO: 42569 - DNA, 122 bp, Homo sapiens
aaagctgacaaatccagccccacattcctatgggaaatcatcagctggtgtgctggtaaacgttaacaactggctctctatagaagaaaaacaaaagcaaaagcccctgatctgtatagcat

SEQ ID NO: 42570 - DNA, 122 bp, Homo sapiens
tccctggggacagtgggaacctggcagtgccctcaggcagcaggcaagggtgtgaaaggccgagcccacagtggcagcagagagtgggcggggatgggtgggaagggcagagcgacagactc

SEQ ID NO: 42571 - DNA, 122 bp, Homo sapiens
gacttggtttaaatttgttcaccccaaatgtggtctttcccggatcatgaaaggatctgccgcaaaggtgaatctgagtctcctcagagtcatatgagactgaaactgcttataacatttcc

SEQ ID NO: 42572 - DNA, 122 bp, Homo sapiens
gtgggagatttgtagcccaggtaggggggtgcccttgcctaacttggtggggctagaacccgagtactgatgcaaccaagctggtttcctactgcagctgcactctggctcccacagtttct

SEQ ID NO: 42573 - DNA, 122 bp, Homo sapiens
acccggcccggccgtaccccgccggcctgccgacccgggtccgggggcccagttggcgcccggaccagctctccggtctgcgtcctgtagatgggaaaactgaggcctgagagggcgcgagg

SEQ ID NO: 42574 - DNA, 122 bp, Homo sapiens
ctgcactccagcctgagtgacagaccaagaccttgtctcttaaaaattaaaatgagaggccgggcgcagtggctcatgcctgtaatcccagcactttgggaggccgaggtgggcggatcact

SEQ ID NO: 42575 - DNA, 122 bp, Homo sapiens
cgttacaggtggggaaaactcaccactagggggcgggagcaagatgcctttgatggctgtcgtccttcagaccacgtaactgatttggaatactgtgacatattcacccttccaccctccgt

SEQ ID NO: 42576 - DNA, 122 bp, Homo sapiens
tcctatttatctatcctctcgcattacttctctgagtcagagcctcttctctctaagtcacgggaactgcccttgctacttgtgacctgccctttactcagcagtttttgttctgggaagcc

SEQ ID NO: 42577 - DNA, 122 bp, Homo sapiens
ggcatcacatctacatcattcaagaactttacgtatctatttgttttctagtatgagctgcgcaaacttccccagagagccacttattaatactccattcgccacagagaatacaagcaaag

SEQ ID NO: 42578 - DNA, 122 bp, Homo sapiens
ctcggcgtctcaggagcgctctctgccggcccgctctccccgtgcgtatgcacgtgccgccgcgtcttcgcttcgctttttgtttgtccctgaccgtgcgccgtccaagggtccattggttg

SEQ ID NO: 42579 - DNA, 122 bp, Homo sapiens
ccaaccccctaaaaaatgcaacaatcccaggcacaccttaggccgcagcctggctgtgaccgaacagacggcggccacacccccggggagaggccgggtggggaccgcagggcgcagctctc

SEQ ID NO: 42580 - DNA, 122 bp, Homo sapiens
ctgcgatggaacggccgggaccgcacacctgcccgagggaaccgccgagacctacctgcacgatagtggggttgtctcctgagcctatcagataccgggggttgctccagataaggtcagaa

SEQ ID NO: 42581 - DNA, 122 bp, Homo sapiens
atcccgtttccctgtgctggaagacgcacgccaggtggggtcgcaggttgtttctggtgccggcttaaccggcgcagcaccgaaacccgtagctgcgtgcgggaaggaaccaccgagcggaa

SEQ ID NO: 42582 - DNA, 122 bp, Homo sapiens
gcgcgccgggcagcgcttcggtggcggcggcggccgcggtggcagcgaaggcggcggcggcggcggcagtggcagtggccgctgcagccccacactccgccgccaaactggaggagcgacgg

SEQ ID NO: 42583 - DNA, 122 bp, Homo sapiens
ctgactgcaggagatgagagagggtcagttggaggtgggggtcttggaactgcaagggagcggagtgtacactggccaaaggtggaaggtgctgaccagtaactgcttggaagcaaccaccg

SEQ ID NO: 42584 - DNA, 122 bp, Homo sapiens
catcctttctggattcatctttttcagaccctgtccctgttgcccttttgcctctctccacgcctttgtgcctgacagcagatgggaagggaagtgaaactcgaattgggcctgtgtgacct

SEQ ID NO: 42585 - DNA, 122 bp, Homo sapiens
gcctgagagtcattgtacttccaagcagcagacatgtttgtgtctaccctcccaaccatgcgtctccctcccacatttcggagagaacacccacttccctgtccttagcagctgcccaagca

SEQ ID NO: 42586 - DNA, 122 bp, Homo sapiens
atttgattatctcagcatttcacatcggagacctcacagaatccagaggcagcaatagtccggcagctgcccacgactgcccgtccagcagtaagcgagtaacaaacagcaacaacaaccac

SEQ ID NO: 42587 - DNA, 122 bp, Homo sapiens
atgcctggaagcactgacttttgttgtcactttgggcccaaggcggcccttcttttcccacgctgacctctgccatttctgtaggtggtttacatagcagagtgcagggttacagctctttg

SEQ ID NO: 42588 - DNA, 122 bp, Homo sapiens
ctttggcccagtcaccgagtgaggcacagtcccaaagtcctgcaggtccgcctccagtcacggccgacccgggtctgcaactggtgcacaagcctcctgaagcgaggctgcgcgcgtcctgc

SEQ ID NO: 42589 - DNA, 122 bp, Homo sapiens
ccggcacgcccccgtgagcccgccctcgaaatcactcttaaagggtccgctcctggctcgcgactccccagttccctagcccagaaaagcggattggagcccgggaagctcattgcgattcc

SEQ ID NO: 42590 - DNA, 122 bp, Homo sapiens
ctctgctccgtccgccttcgaggagaggtcggcatctttgttccctgcccggccattgttcgtgccgcgcttctagcaacgccgggccggtaaccccctctccctccttgcgcgttccgggt

SEQ ID NO: 42591 - DNA, 122 bp, Homo sapiens
gaagagcatgcggagtccccagtgtctgaatccactgagtggtgagttccccacagccggcgctagccgtggtgtgtgtctctgtaggtggtgccggcgtgggccaacctgtgctgtgtcat

SEQ ID NO: 42592 - DNA, 122 bp, Homo sapiens
ttgatgtacaaataatttcatcgcccaggtagtaagcccagtacccgatagacagttttccgaaccccacctttctccctccctccttcctcaagcaggccccagtatctgattgttcccat

SEQ ID NO: 42593 - DNA, 122 bp, Homo sapiens
aacgtgcctcttgccctctgcaggttctcccaaccgcgggaagagaggtccggcccgcgacggagttcccaggaagaaggctggctgcaaaaacattcccttcgcagcaactacaaatacag

SEQ ID NO: 42594 - DNA, 122 bp, Homo sapiens
gctcttcgatatggtgccgcgcgctgcagagcccggctacctggtgaccaaggtagtggccgtggacgcagactcaggacacaacgcctggctgtcctaccacgtgctgcaggctagcgagc

SEQ ID NO: 42595 - DNA, 122 bp, Homo sapiens
ttctgagagcagatggtgcctttgtgggtgcagggcttttgtggaaattgtcagcctctacgggcagagtccggcatcccctccccagactgcctgctgtcaaaccacggagcagctggagc

SEQ ID NO: 42596 - DNA, 122 bp, Homo sapiens
aaacccctcaggtctgggcaaactgggaagtttgatcactgtccatatagggagagccaccgtaaggaaggttttaaagcagttcatttggctccttcttgtgtaaatttcttcagctgcat

SEQ ID NO: 42597 - DNA, 122 bp, Homo sapiens
gcggcccgggctttgagagacgggccgctcttcccggcgcggtgccttccagggaggctgcgcctgcagcaccgcagccagagccgagactccgcgcctttcaaggaggaggccccgtgcag

SEQ ID NO: 42598 - DNA, 122 bp, Homo sapiens
ggcggctggccccccgcgccaggaccacccgctcgggccgtcagacgctgccctcccgcgcgcggaccctggcggactctgcgccccagctgccccagcctacacctcacctggtgggcctc

SEQ ID NO: 42599 - DNA, 122 bp, Homo sapiens
aggtggctggcggtgagctgatttccgggttcttaaacccgggcccggggcccaaggccccgcctggtggggtctcatcctgcagtttgagaaaccgaagaaggtaggagagggaggaagcg

SEQ ID NO: 42600 - DNA, 122 bp, Homo sapiens
agcggcattggggtatcctgaggagccgcctgcaagaagcattctcctttgaactcgagtcgtctccacctgcgcttttcagagccagccctgttcctctgcaggaggcttgctcctcaccc

SEQ ID NO: 42601 - DNA, 122 bp, Homo sapiens
cagccctgcccagacccctgcggccgcttctgccgccagccgcgaccgcaccgcccccgccgctcccgctgggctctgtccattggctaccggacaccgagccccgccccacagcctccccg

SEQ ID NO: 42602 - DNA, 122 bp, Homo sapiens
ttcgtttggaagccggcagaaagagaaaaggcagggaattgcctttgtatatccgagggccgacggataattcgtgtaaacaacaatatccctcaagatgagctcttcggagcttcctaccc

SEQ ID NO: 42603 - DNA, 122 bp, Homo sapiens
aggagagccctcttagtaagattctccctcggacatttctgttctcaacgtccccaattccgcccagcctctggcagggcggggcggaggaattctagcaccttccttcagatccagcccac

SEQ ID NO: 42604 - DNA, 122 bp, Homo sapiens
gtgtccctgtactcccgattcctgtgttgatactctaaccctcaatgggactgtatttgtcgacaaggcctttaaagaggtaattaaggttaaatgagactgtaagtgtggagccctaattc

SEQ ID NO: 42605 - DNA, 122 bp, Homo sapiens
agaagtgaggtctcaggaaaactgctgctccccaaaactaaggaaacagacagggagctacggagaatcacaattttggaacagaaagagccaatgcagtaagtaggaaaacgtgaactggg

SEQ ID NO: 42606 - DNA, 122 bp, Homo sapiens
gaaaaattggaagttttaaaaatatgcatatttcttattataaaagcaatacaaactcatcgagatgtgtaaaagaaaatacagccagtgtaaaaattagcaatatttcacaaacccacaac

SEQ ID NO: 42607 - DNA, 122 bp, Homo sapiens
gagagtggtctcactcaggcatctcctcctggtccctggccgaggaggaactgtacgctgcgcgggggtctgtgtgcatctgcgcgtgtgcatgggcatttgcgggtctgtgaatatccatg

SEQ ID NO: 42608 - DNA, 122 bp, Homo sapiens
cagccgaaaccctgtgtgcgttggtgtagaaggtggaggccactccggagccacccggaccgtgttttcctttctagaggggtgaggggattctgtgtggttatttacccttaacttggagg

SEQ ID NO: 42609 - DNA, 122 bp, Homo sapiens
tcctgttggcgatagccttgggagtaagaaaatccgacttccccatggcgaccacggcagcgatcactttctggaccccagtactcagccagccggaaacggaaccgggctggcggcggtgg

SEQ ID NO: 42610 - DNA, 122 bp, Homo sapiens
cggcggcgacggcgcggatcggcaggatgttagggcagcagcagcagcaactgtactcgtcggccgcgctcctgaccggggagcggagccggctgctcacctgctacgtgcaggactacctt

SEQ ID NO: 42611 - DNA, 122 bp, Homo sapiens
cgcggccgagccaccgtgtggtgcgtaaattatagcgtccggccaaggccgcaaggggggcgccgccggtgagctggcgggtcgtgcggggaagcagcacccccgcgccgtgccagggccgg

SEQ ID NO: 42612 - DNA, 122 bp, Homo sapiens
caattttatgatgaaaagaaaccatgctggctttgttcggtcatggagatgggaaaggtccgcatattcagcaatctgttgaattcttccaggttaaaactggagctgagaaaaacctgcag

SEQ ID NO: 42613 - DNA, 122 bp, Homo sapiens
ccagcctccagcagcatggggagggccttggtcagcatctaggtgccaacagggcaagggcggggtcctggagaatgaaggctttatagggctcctcagggaggccccccagccccaaactc

SEQ ID NO: 42614 - DNA, 122 bp, Homo sapiens
gcgacgagtggcacaatcgcccaccaggaatcggctggtgccgcgggtgggcgaaggcagcgccgccggcccggagggcggcgcggagggtggcgctggcggcgtgaaaggcgtctttgtgc

SEQ ID NO: 42615 - DNA, 122 bp, Homo sapiens
gtgatttatactcaacaaatactttctgtgaatgaatcagtgaatgaaatgtagaagagacgtgcagaagggcagacagtggccgaatcctggagtctttgtatgccagcccaaatagtctg

SEQ ID NO: 42616 - DNA, 122 bp, Homo sapiens
atagttttcgctaagttcctggccgaaccacagctcccacgatgcacccaggttttagagcggtcagaggggcggcttccggtttaggacagcgcggctgcgcacggcgtgtggtcttattg

SEQ ID NO: 42617 - DNA, 122 bp, Homo sapiens
ggtagccgacgagacagtagaggtaatagaggccgtcctgcgggagcgccagcccctcggcgtccgagaactgcgtcccgctcgtcagaaacgcctgttccttcgtcgtctcccagcctagc

SEQ ID NO: 42618 - DNA, 122 bp, Homo sapiens
gcaccgcctctttcgaaagccgctgggccaccaccagtgcgtgagccttggatccctcaacgtattgcgagacgccggtgtatagcccggacctgtgccccaacatgatcgccgctcaggcc

SEQ ID NO: 42619 - DNA, 122 bp, Homo sapiens
tggtgtcacagaccgggaccgcggctctgcttccatccgcagattgacgtcttccgtggccgagcacaagtgggcagttaggcccaagcgccaggttcaggcctccaaaaaccccctgaaaa

SEQ ID NO: 42620 - DNA, 122 bp, Homo sapiens
ggggcgggccctttggccggaagggggggggccggcgcgcggggccggtcgcctaggcaacgggctcgcgtggcgtccaggcttctcagaaagcccaaaatccgggagctttgggagggtag

SEQ ID NO: 42621 - DNA, 122 bp, Homo sapiens
cgcgacgggcagcccccgcgtggctcccagactgccctatcattacctagggcagggcaccgccccctctgtcgctcgccaccaaacatttaggtgaaagctacccggcttcgcggggcacc

SEQ ID NO: 42622 - DNA, 122 bp, Homo sapiens
agggagaaaaattgtgaattacagacagaatgtggagcccctggggccactgataaagagcgttcacactcgcttgctgccttttctctactgaccccttaggggtttaaaaactacagcaa

SEQ ID NO: 42623 - DNA, 122 bp, Homo sapiens
ttagattcacttgcaattttgagactttaaaccctgctcaccctttggtcccagatacttcgaacaagaaggaggaggaggaagaagaggcagaagaggaaaaagaggaggaggaagaagaa

SEQ ID NO: 42624 - DNA, 122 bp, Homo sapiens
gccattgaaaaatgataggatttggataggcagaagaaagtgggcaaagtaatccagtgacgaaaacagcatgagcaaggcttaaaaggaaaaattagtgagtaataaagcgagcccagtgg

SEQ ID NO: 42625 - DNA, 122 bp, Homo sapiens
tggtgaaaagtatacttagttagaatttcatggccagattccagtacgggctctgccaaacgaacttggccaagtcagttaacttccttctgtatttataaccttttataaaagtagggctg

SEQ ID NO: 42626 - DNA, 122 bp, Homo sapiens
aacactgacctagactctcctgttgggccgtccctggatagcagggaaacataccactcacgggtggaaactttcacaaacctaatttctatcactattatgggtcaaagtcttacgcatat

SEQ ID NO: 42627 - DNA, 122 bp, Homo sapiens
agagctttgggggaacctgagtagctccccaaaacattctgagtgtcagataaatgtttgcggatacggctcttcaagggacgttttgcgattttgtccttgtaaaggaggtgacatcccta

SEQ ID NO: 42628 - DNA, 122 bp, Homo sapiens
actgcagaggggtccagaggatttgcagttctgaacctgcacactccagtctaggatctccgagcaagagcgtaggtgtcctgagggtcaaagaacagagagagattgtctctgggaaggca

SEQ ID NO: 42629 - DNA, 122 bp, Homo sapiens
ccagggaaaatataaatatctcaatgtctcagtgggtgtcctccccaaggtctcagtgtgcggccactccaagatcacagtgtgtggccttctccccaaggtctcagtgtgtggcctaccca

SEQ ID NO: 42630 - DNA, 122 bp, Homo sapiens
tgtcacgagggccaaaaatagcctgctcggaaggctgtcttaggaaaacagcttggtgggcggggcctggcccagctgccagcttggaggtgtttttctgcctgtaggaggctggggaatgt

SEQ ID NO: 42631 - DNA, 122 bp, Homo sapiens
ggcgcagccctgggcccgggcccagccagtcaccccgcagcccgaaacacacgcggccagcggagctgcggctggcacccttgaccagggtgcttacgccaccccacgacgtagacagcctc

SEQ ID NO: 42632 - DNA, 122 bp, Homo sapiens
cgcctgctgactggtcagaaacctcgccagtcagggagcgggggtggtgctagagagccgcgcacggtcgccgttacgtattggtgtgccgaccaatcagcgccccgcactggttccgcgct

SEQ ID NO: 42633 - DNA, 122 bp, Homo sapiens
gagctcagagacggggagaggcaggcccaagcctgccgggtgaggtcagcagagggctgtcgtatggaatctggggctcaggactctgtcccatttctctaaaccattctgcttcaacccag

SEQ ID NO: 42634 - DNA, 122 bp, Homo sapiens
ccgtgcccatgagcggggctggggcccggcgtcttggccggctgggttgggggatggtgccgtgggcacgcagctctcctccatcgggaaaccaagcctgctgcccgcctggggtgcggcgc

SEQ ID NO: 42635 - DNA, 122 bp, Homo sapiens
ctgggcggccccgaggggctggttttctggagggtcagggcacctgccctttcttccctgcgccctctccccaacttcagcagggcacaaagggccggggggcacgtagaccgcggggcgag

SEQ ID NO: 42636 - DNA, 122 bp, Homo sapiens
tacatggtttatttactcaatttgtgctgagctccacagttccttcaggccagcctcactcgcccattactctattaatgctccattactgaaattagtgctgtaattggagggggaagggc

SEQ ID NO: 42637 - DNA, 122 bp, Homo sapiens
ccattttcaagttccccgccaaaccctcccctcttggttgtacccatttctgatgatcatcgcgtgaatccatcattctattgaggggtgccaaataattttcggattctctcattcatcct

SEQ ID NO: 42638 - DNA, 122 bp, Homo sapiens
tggcggctgctgggagttctctttgttcactcactttaattctcagtcgagctctacacgcggtgctccctccccacccccagcccgggcggagtcatcagatgtcgtttccacgaatagat

SEQ ID NO: 42639 - DNA, 122 bp, Homo sapiens
agcagactaaaacattaatgagataattgatttttgtcccataacattacaaagctgattcgactaagccccagaagaaaacagccagggtgctatagtcaccttagcttagcatcttggct

SEQ ID NO: 42640 - DNA, 122 bp, Homo sapiens
ccgcgcagcaggtacggcacctcggggaaggtgcccggctcgccccagaccccagggtggcgaggccaggggcccacaggcacatcccagtgggcagcaggttggctgccaggaaaaggaaa

SEQ ID NO: 42641 - DNA, 122 bp, Homo sapiens
gcgccgcgccgggggaggttgagtcagtggcctggagggagcagggccgggggaaggcagcggcgaaggactgccccccaacccaggggactattttcccttggggattcaaagagaaaggt

SEQ ID NO: 42642 - DNA, 122 bp, Homo sapiens
agtgaaatgccttcattgccgtgccatgcatatttctgaggggaatttttttggtcgaaacgaggactcttcgattgaccagacaggcactttccaagggtgccacgtactgaggaatgcgg

SEQ ID NO: 42643 - DNA, 122 bp, Homo sapiens
attctttggctcctaccacccaagaacttatcaaggtggcagacacatggaacatgcaggcgttacctggaacaaatgaacccagactgcaaagctgtttcgcaggtccttttgcttgttgc

SEQ ID NO: 42644 - DNA, 122 bp, Homo sapiens
tctcccagctcataaaaccgaatttcttcagagaatatatctaagggcacattcacaggtcgcctcaatcggccccctgactggtagtagtacaaaatggcatcaaagctagggcggttccg

SEQ ID NO: 42645 - DNA, 122 bp, Homo sapiens
cgagtccacatggaaacgccacactctccctgaatgcaaacgtgtgccacttccctagcacgggcccagaagacggtaccgcagattgttattacaatgtaacaacgacctgctttacatca

SEQ ID NO: 42646 - DNA, 122 bp, Homo sapiens
gcggaacacgcgtgccctctagtggtcacagagtcaaacgtcaagttccatcctgcggagcgagcatgggatccggagccacagctggagctgagatcagaaaccgtagatctagccccatt

SEQ ID NO: 42647 - DNA, 122 bp, Homo sapiens
cttgcagaggccccaggtggagcaagttggcaaacaggctcctctctccccaggtatgggcgtcctcagcggcggggtccccgggtgaaggaggaagctgctggtgcatgggtgccggctgc

SEQ ID NO: 42648 - DNA, 122 bp, Homo sapiens
ccgagaactgcaagtctctctgattcacttggcagcaaaattattctaagcatcctgtcccgtacccaacccgcctgcccctcccactacacactcacactggtggtttttttgtaattctt

SEQ ID NO: 42649 - DNA, 122 bp, Homo sapiens
tctaagcatatttattataacacacaggccgaatgcttgtgaatcaggcttttcttggctcgggacaataaaacagcccagtcgttggcagggggttttaagaatgcaaatctgtgattctg

SEQ ID NO: 42650 - DNA, 122 bp, Homo sapiens
tacaaactgcaactcaattctactgataacacttagaaaataattctgttctctttaccccggcctgcataccttgaagaactgatcactaatatctcactgtcttcatcacttgcaattct

SEQ ID NO: 42651 - DNA, 122 bp, Homo sapiens
tttaaatattctgagggggaggagaggagatgtgtaatgcgactgtctataatttgaaaccggacctcactatttagcgtctcagaaaacgcggggttcattgccctggtcccccccgcctt

SEQ ID NO: 42652 - DNA, 122 bp, Homo sapiens
cttcagcaaagcgagggccggctgcaaaggcgcaggctggcagttcgggtcatttcctgccgattccccattcccctcggagcagcttggagaggaagtcggacttcttttccaggcggagc

SEQ ID NO: 42653 - DNA, 122 bp, Homo sapiens
ccagttggctccaaaagcctccgcggccatctttacgaagggcaaaaccctccgcactagcggaagcaaggggctggcagagcggtatcgcaagaaatcaaccaatcagaacaatactaccg

SEQ ID NO: 42654 - DNA, 122 bp, Homo sapiens
tgcatctttctgactcttacctccttctgtgttccaagggttctagcctggctgccagaccgaagtccccaacttttagttccatggcttcattaataaaaaagttccctagacgataaaca

SEQ ID NO: 42655 - DNA, 122 bp, Homo sapiens
agcagcagcatcctggaagcaaataaatgaattctcaggaacagcttgctctttgttcaccgtttatatgactcttgtgacactggaataatgatttcatattgtagcatgctttttcctct

SEQ ID NO: 42656 - DNA, 122 bp, Homo sapiens
ctgagctggattatactgttaggatgtaaagttccttagctacttctttaaggctcaacacgaggctgatggtcaacataaaaagcaaacaatactatgtacatatatgtaaaaagtgttat

SEQ ID NO: 42657 - DNA, 122 bp, Homo sapiens
tgctcttattcccgccgctgtgggtcgggaaagttccgccagtgcacagcaaccaatgggcggaggggtcctttgcccctgggttgcgtcaccctcatgcttccagaacctggaggatccag

SEQ ID NO: 42658 - DNA, 122 bp, Homo sapiens
ctccccactcctcgccaggggcagcttggtggctgccgagtggaggccagaagagggcttcgtggagttgaagtctcccgcggtgagcggcgggctcggggaccggggaccgccctccctgc

SEQ ID NO: 42659 - DNA, 122 bp, Homo sapiens
atggggcgccttccctttcatcctcgggattatgacaagttattaattgccaccattagccgcagcagcctgcccgagatctctgctgctctctggaggtgagaaaccgcgcatctgaatgc

SEQ ID NO: 42660 - DNA, 122 bp, Homo sapiens
cgtgggtgaaggcgcccaaggagggagggtggcacccgcggtcggccgcgttgcacaggccgcctgcgtgcgcgggttccctgccaccctggcctggatgcctggaccttcgattctgacac

SEQ ID NO: 42661 - DNA, 122 bp, Homo sapiens
tatctgagtgcctagcacagtgccccacgcagagctcaatgcatcttagctgaacaataacgaatgcagctgcacatcttcaggcccatattgagctcttctctcttttctgcctcctcctg

SEQ ID NO: 42662 - DNA, 122 bp, Homo sapiens
agaaggcctggaacgctgggataagaggttggactttgtccttttggcagcagggggccacggaagggtgttgcatgctgaagggccgtggtcagcctgttttggggagactgtacgcttca

SEQ ID NO: 42663 - DNA, 122 bp, Homo sapiens
ggcctgaggccctcctcactgccacaggagctgatggagaggctgcagggcatcgtcacgcggccgcaccacctaaggcctattcagagcagcaaggtgtgcagtggcctgggtgggccagg

SEQ ID NO: 42664 - DNA, 122 bp, Homo sapiens
gaatgcctaggcttccgggtatcagtggccccgcctcttaatccgaccggagccgtccctcgtgattcctgggtattgtagtcagtttcctgggaaagagtcgctcctagtggcagctcgct

SEQ ID NO: 42665 - DNA, 122 bp, Homo sapiens
tgctcttcccgcagggacagagcctgccaggtgctggtgactcggatcctgacaggaggtcgctctgcggaagactggcaggatcccagagcaacagactggggctcgatgccccttccccg

SEQ ID NO: 42666 - DNA, 122 bp, Homo sapiens
cttctttagcaacaacgatgcaggctgttctttgtcatttagaatttggcttcgttctcacgcttgcctgtgcaagagaatgcaaaaagaagtgaaaactacagattcccaggcctcatctc

SEQ ID NO: 42667 - DNA, 122 bp, Homo sapiens
gcttttaggttgaacaggaaacgtcaatagaattttcggttttcatgtcagtgcagatctcgcaaaataaaaataaatgtggcattggctctaagggcagggcccatacactagtccaggct

SEQ ID NO: 42668 - DNA, 122 bp, Homo sapiens
gcttcccgttttttcttgtttgaagtggaaatctcccaccttccatgagattcaatttctcgcccttcccccgctaaaatcctcctggccccatcatttcttgggtcctttccagacagtgc

SEQ ID NO: 42669 - DNA, 122 bp, Homo sapiens
gcagcaaatgggctcagggtttctgctgctggctcacttgtccatttaccccaaatgcctcgacacccaccctgtgccagggcctgggcatagcactggggatgccctccagagtgcatggc

SEQ ID NO: 42670 - DNA, 122 bp, Homo sapiens
atccctctggggaccccctggatagctcaggacggttggaaagtgtttgctggtctggggcgcccgcgagtaccgagttccaccgctgtgcgaggtgtggcgttcaggacccccgaatggga

SEQ ID NO: 42671 - DNA, 122 bp, Homo sapiens
gtttgatgaataactcagcagagcccggtcgaggggtgacttccgatggagaaatgtgttcgctactggaaccaggtgggacgaagggtgcttgacatgcaagaacctttagcctcaaagca

SEQ ID NO: 42672 - DNA, 122 bp, Homo sapiens
atcagggaaatgtcagctgtccacttaacggatgacataatgaattaagagttcgataggcggcaggcacaactaaaagccaaactcgacctaagtcttatgaaatcctacttaatgagctt

SEQ ID NO: 42673 - DNA, 122 bp, Homo sapiens
taacgggccccccggccacaccccaccgcccatcagagccgcagctcctgagaacgcatccggaggcaaggccaaagtcagccatggcacaaacatttgtgcatcaaggtcctgttgctctg

SEQ ID NO: 42674 - DNA, 122 bp, Homo sapiens
gcctccaaggctacgctcctgcctttctctattcagtagcccgtgaagagggcccttggacgtcagtctaggtgagcacgccactgtcaagtcaggggggaaagacaggaaactgcttcaca

SEQ ID NO: 42675 - DNA, 122 bp, Homo sapiens
cccgcccaggatgcagccccgttgtccatcagttttcttggagagggcatgggaaaccttcgtcagtgtgtcatctcctgcaaaggccttcgctccttcctctggggagaaagcacccttca

SEQ ID NO: 42676 - DNA, 122 bp, Homo sapiens
ggtgggcggggcttctaagacgaagccctgtgggggcttgggctttcgtgaggaccagctcgtcggggctagaaaggggggcgggacttaccagtgggcgtggcttcagcgctaagggtgga

SEQ ID NO: 42677 - DNA, 122 bp, Homo sapiens
gcagggcggcggcgctgcgggacgacggcttcgcgaggcttcggcccgcacgggtggcagcggtccccagggaggaaagacaaagatatgcgggttagaaaccaaggaaagagcgccgacgc

SEQ ID NO: 42678 - DNA, 122 bp, Homo sapiens
gccgctgggcgcgctccagctcctccgcagaggtgaacacattcttgttcaaagtcctctcgaagcggcggtgtctccgcacggagagatcggacacggtgtcctcactgccatcctcgctg

SEQ ID NO: 42679 - DNA, 122 bp, Homo sapiens
cgatctgatccaagggaccatcccctaaaagtgacttcctgccagaagtctccacccatccgtaggtattaaagggtgaacactgttcatttctaggcacagccctgcctaaacccaactgg

SEQ ID NO: 42680 - DNA, 122 bp, Homo sapiens
gctcttccctcagataactagtttagcccattacctccttcaaaccttggctcaatgtaacgttttcaatgaagcctactctgagaatcctatttaaaattgcaacgtactttgggagtcca

SEQ ID NO: 42681 - DNA, 122 bp, Homo sapiens
aagtggggtgccccaggcagggtccagtgccagccctctgtggagacagccatccggggccgaggcagccgcccaccgcagggcctgcctatctgcagccagcccagccctcacaaaggaac

SEQ ID NO: 42682 - DNA, 122 bp, Homo sapiens
atccaacaggtgagattggagattcaagagaaactgcatgtgggaaggagtgcataaagtcgactatgtttcatagcaaatcattttgtcagcacagggcacaatgaaatgccatcacagtt

SEQ ID NO: 42683 - DNA, 122 bp, Homo sapiens
gagctgtcagtgtgctctggcgacctcaccctaatgatgttctgattctgaggcagcaggcgtgtttgcagaatgaaacccggaactaaaagtgtctactgttgatcgatgccttgtttcaa

SEQ ID NO: 42684 - DNA, 122 bp, Homo sapiens
gtgtgtgagagagggaaggagagagagggaggcaggtcagagggagtcaggtgtccttggcgagagtggcagcagcctgcctggagggaccctgggatggccatttcagcacctaaggggta

SEQ ID NO: 42685 - DNA, 122 bp, Homo sapiens
ctgccacaggacaagggccgggacgaagtggaggacgcaggcagagtctccaagcctgctcgaaagccggcaaccaccctccgaggctcgaatctccgctgctctctcccgggcctgggcta

SEQ ID NO: 42686 - DNA, 122 bp, Homo sapiens
aagggaggcaaaccctccagtcatcaggctcgtctgcagagtttcttggtggcataaccacgaagcctaagggtaaaaagcatctggtgcctttttctgctgcgcacttcgcccgtgctgag

SEQ ID NO: 42687 - DNA, 122 bp, Homo sapiens
atcgcaacggggacgcttggagggctgctcggaatcggctcgctgcatggctacacctggcgtccggcacagcagtcaagaacctcggcgccggacccgcgcgcaggcgcactgacagcagg

SEQ ID NO: 42688 - DNA, 122 bp, Homo sapiens
tccaggtaattgggcagcgtgagcccgaagaacatggaaaatcccagcacgaagaggttgcgagaggagttcatgtccacaaattgcaggttggacagccccacagctgtaatcatgcctaa

SEQ ID NO: 42689 - DNA, 122 bp, Homo sapiens
atgccccgaggctctctcttggactctggccctgagttcttctgcgcgatccttcggagacgtctggaggcctgctttatgcatctctcttggacctcagtttccccacacgtgggaggagg

SEQ ID NO: 42690 - DNA, 122 bp, Homo sapiens
cctagtagccaaggagaactagagaactgtggaatttatggctaaggaatcccacccccccgcccttatttgaaagacaaggtatataaagctggtggacatttgtgagttttccaagacct

SEQ ID NO: 42691 - DNA, 122 bp, Homo sapiens
ctggataaagaaaatgtggtacatatacaccatggaatatgacacagccataaaaaggaacgagatcttgtctgttgcagggatatagatggagctggaaactgttatcttcaacaaactaa

SEQ ID NO: 42692 - DNA, 122 bp, Homo sapiens
ccaccggcaggattcaagggacgagagctctgggctgcggagagttgccctggctggccccgtcctgcagcaaagggcgggcggcgcgagtggagtgtgcggggcaggctgggcggcagagg

SEQ ID NO: 42693 - DNA, 122 bp, Homo sapiens
tatcatgtagatgcagttactgagatacacagagcctagaggctagtaaaaggcagggcccgtttgtgccatagcctccggtggaagagcgtgggagaacaatagaacccttccatgtgtac

SEQ ID NO: 42694 - DNA, 122 bp, Homo sapiens
cacggcagccacggccagctcgtgggcagtggggccagcatgcaggtagatggccagcagcgtgtgaaagagttgctggcggtggggtgggtctcggccctcggagcaccacaggcagtagt

SEQ ID NO: 42695 - DNA, 122 bp, Homo sapiens
acggtctccttcataaatgctctactttacactgttttatgaacatgcatttcattttcccgactttgtgcctttgtcttgcagctttaccctcttggaatacatgattcgtctcttttgct

SEQ ID NO: 42696 - DNA, 122 bp, Homo sapiens
aggaggcaaagaagccaggcctgttttacaacaaatattaaattacttcaataatacaaacgagaggcccggtgcggtggctcatgcctgtaatcccagtcctttgggaggctgcgggagga

SEQ ID NO: 42697 - DNA, 122 bp, Homo sapiens
cctaggctgaccggcccagacctggacgggcctcagtgcggctgtggttgtgcagagaaacggaccggggaggcggtggggggcggctgcagatgcctggacacacccacaaggtcccagtg

SEQ ID NO: 42698 - DNA, 122 bp, Homo sapiens
ctgcagcccgcccagagcgcgcagaccacccccatgccccgcccgccctcctgccacacccgcccccagcccggccccgccgcctcctcacctcgccgggaccactgcagccctggcggtag

SEQ ID NO: 42699 - DNA, 122 bp, Homo sapiens
taaagttgtgcatggcttaacaatgggggcacctcctgagaaacacattgttaggcaattcggcgtgtgttcatcagagcatatttacacaaacctcgatagtgcagcctactatccactat

SEQ ID NO: 42700 - DNA, 122 bp, Homo sapiens
tctcaaccttctcaaggtccgagggatctacctggcctttgccactctactacctgaggccgcctggctggggggaggtcgcatatcaatacatatcaacacaaccactgacgtccgaagat

SEQ ID NO: 42701 - DNA, 122 bp, Homo sapiens
cgactctgcgtggcactgaaacacgagcagacggccaaggacaacctgcagaaggagctgcgtatcgagcactcacgctgcgaggccttgctggctcaggagcggagccagctctctgagct

SEQ ID NO: 42702 - DNA, 122 bp, Homo sapiens
tcaggaggggaagtgggcaggaccccaccgtgtaggactttgtaaggaaagtggagaccacggggggtcataggcgcaggagtgatccaatctgatttgtatttgtggacagtcattctata

SEQ ID NO: 42703 - DNA, 122 bp, Homo sapiens
ggcccctcgccccctgcatcctgccttagattatgttctgaaaccctcgggtggagaaagcgctattttcatccctgcttcctgggattgctgatggccacagagcgatagagaacgacaaa

SEQ ID NO: 42704 - DNA, 122 bp, Homo sapiens
aagggaataaatggctgtatttgtgctaagagcaaaggatgcatcttcccacagcctcctcgctttactctgccattggtagcttaaagactttctttttccttgtggtctcccttttttca

SEQ ID NO: 42705 - DNA, 122 bp, Homo sapiens
aagagcttattgttttccaggcctgggcagagacagggcccccctgccccatctctccaccgtcctaggtgtgccaagagtcaattgcctcattgctgaccctgtccagctggccatggccc

SEQ ID NO: 42706 - DNA, 122 bp, Homo sapiens
aaagctgacatccgctgatcacttgcttcataccaagcactatcctaagttctttatgagcgtgatttcatttattttgttcatctcacaacagtatagttagaacatactattatcatccc

SEQ ID NO: 42707 - DNA, 122 bp, Homo sapiens
gggatcagtggggagagtcagctccttcccgagccaagcagcagctgcgtgggggagggtcgcaattatttatttttgagacagggtctcgccctcttgcctaggctggagtgcagagttac

SEQ ID NO: 42708 - DNA, 122 bp, Homo sapiens
cccggttctgttgagggcatccgaaactagacagtgcgtttcaggatctaggacagctcccgccccggccacctgtttttaaccccagctaggtcttggagagaagagacccaactattctg

SEQ ID NO: 42709 - DNA, 122 bp, Homo sapiens
ggaccctgagctgctgccctgcccagggctgcacagctggtgatgtctgcatttgtcccccggcggcaggaactttcgccatactcagcctcatgacaggctcggccgtcgagcggctggtg

SEQ ID NO: 42710 - DNA, 122 bp, Homo sapiens
ttcgactaggctgccaggcgcagcgacaccgggtcgcggtgcgagcggcgccccggctctcgccgagaggctcctgacagaaaaacgtgcgtggttgtccccacccctgggaggggttgccg

SEQ ID NO: 42711 - DNA, 122 bp, Homo sapiens
tggattccctctgtatcccttttcttgcttagttttttgtgaactgctttcttcttataccgttatttattcaatatctctcctttctcttactaattcctgtttatccaaagtagtttaag

SEQ ID NO: 42712 - DNA, 122 bp, Homo sapiens
tgtgcttcccagcagccatcgcgccgttaagggcgctggcagccacgcttccagggctaccgccttcctgaaactgggggctgtctctctgcagcaccttacctatgctcgctttgtagcct

SEQ ID NO: 42713 - DNA, 122 bp, Homo sapiens
ccacggccgggagcggaggggacagcggggatcgtgagctccggcccgggcgagcgggtgcgtctgccgcagagtcggcacctgaaggacatggaggtaaaggaccccggagggagacgcgg

SEQ ID NO: 42714 - DNA, 122 bp, Homo sapiens
tggagagcagcgggaatggcttcaggaagcggctgccgcctccgagactcaccgacctgccgtgctgccacttctacaccgaaatggctggtccgaggccgcgtctccagagctgcgtccca

SEQ ID NO: 42715 - DNA, 122 bp, Homo sapiens
gtgccctggtgctgagcgcatcgctgagaaggagcgggtgctctgtgccctggtgctgagcgcatcgctgagaaggagcgggtgctctgtgccctggtgcggctgagaaggagcgggtgctc

SEQ ID NO: 42716 - DNA, 122 bp, Homo sapiens
tcagagccgtgggagaacagatccttgctgtgaaagctcctggtctgtggtgatttatcacggcagccccgaaagacccccacaccaagtttcactctctgtccatggacctctttaatgga

SEQ ID NO: 42717 - DNA, 122 bp, Homo sapiens
ccaggctggcctcgaactcctgggctcaagctgtcctcctgctttggcttcccaaagggccgggattacaggtatgagccaccatgcttggctctcataagtttgaagactagaagtcaaaa

SEQ ID NO: 42718 - DNA, 122 bp, Homo sapiens
aaaccgagaggcctccctgggagaggccagcaagctgcagcagttcctacgggacttggacgacttccagtcctggctctctaggacccagacagcgatcgcctcggaggacatgccaaaca

SEQ ID NO: 42719 - DNA, 122 bp, Homo sapiens
ggagccgcagcgactccgactttgtgccccaaccctgtaaagggcaaaacctcatcccttcggtgtaaactttcaagagaagtggggcagcacactttaggcgtttcaccaagaggctggcg

SEQ ID NO: 42720 - DNA, 122 bp, Homo sapiens
gtctgaagaccccattcagaagtggttatggtgcaaatcccacatctccaaaaccaggaccgtcatctcttctgctactctccatttcttcctgccttctctatctccattaacattctgcc

SEQ ID NO: 42721 - DNA, 122 bp, Homo sapiens
tcagcaccccctcttctttccccggctataagaaagctagaccagggtgcgcattcttcccgtgcctaggatacttcacggtgctaaaaatagtcctgggagctgggacctgtgtatagcca

SEQ ID NO: 42722 - DNA, 122 bp, Homo sapiens
tctgtgggccccccgaaacactggggtcagcccagctctgtccctgaccttctcccttctcgcagttcccagttttcataggtggccttgtccacagccacgtctgctctgcagcgcagcct

SEQ ID NO: 42723 - DNA, 122 bp, Homo sapiens
ctggtgaagggaagactccaggccatcacagtaagtctgcatacagttataactcattaacgttgttacttagaggaaggcagaccgtggccggctgcccctgtcgctgagccctcgcaagt

SEQ ID NO: 42724 - DNA, 122 bp, Homo sapiens
agaaagtagaggaagaaagcaggaggctaagaaggatgagaggagggagaaggaaagaagcggaaagaagggaagaggtaggagctgaaaatgataccccatgtgtctgcctgaagaaactg

SEQ ID NO: 42725 - DNA, 122 bp, Homo sapiens
taacacgttttaggaaagtaccaggcttgtggagggcgacaggaaacctccccgggagatcggcctggggctcctcctgccctagagcctgacctctcactctccgtaccggcagcgacttc

SEQ ID NO: 42726 - DNA, 122 bp, Homo sapiens
ctggactgacaggagctctgagcagttcataggacaagcagggacccgccgaacctctcccgtttctgtgctttctctaaatgcagcaggtcctctctttactgcccatgcttttaaactat

SEQ ID NO: 42727 - DNA, 122 bp, Homo sapiens
gcgaacgacagccggatgcgtatgaggacgcgtgtttgcgctcactgtcactcactgtcacgcctggggtgaagcacacacgggctcttcctgtctctcgcctttgcagagactcaagttcc

SEQ ID NO: 42728 - DNA, 122 bp, Homo sapiens
ttgtttcctaaccttcctcattttgtaaacaagttggcggacgcccctgagtctaagaagcgctgataacgcgctgggggaaaagggggcattctctatgacatcccctgcttttcagactt

SEQ ID NO: 42729 - DNA, 122 bp, Homo sapiens
attgccctatagttttgtaggagagagtggagccagcccagacccgcttcgatctcctctcgcggctcctattcatcatctccgcattgtatatggcagcctcgcaggggcaggggccggcg

SEQ ID NO: 42730 - DNA, 122 bp, Homo sapiens
ggaggggagggcagggaacaaggctcgcgcggcgcccaccagcatgcgggcctactaggtcgcggcgcccaggccccgggccctgcccattcgtggagacttctatttctcattcgaggcgg

SEQ ID NO: 42731 - DNA, 122 bp, Homo sapiens
gggacatggagagcgggacgtgggggtgacgggagtgggccgttcagacgccactgagcccggcgctggtagaacccgcctctctccagctctgggagacagttggagcctcagcgctgtga

SEQ ID NO: 42732 - DNA, 122 bp, Homo sapiens
gagcggatgtcatattgtatcagggcgaacctctgaggagcgctggctgcgcttaggcaacggtgcggcaggcgccggggttttctgaaacagaaacgtttaggggtggggaaacgtgttcc

SEQ ID NO: 42733 - DNA, 122 bp, Homo sapiens
gcgggcctgtcagggcctctccgccgagggccgggggctgcatggtgctcgagccccagccggccacaccccagtgcatcgggtggctgggcttccagtttacaccgggcctaccagggagg

SEQ ID NO: 42734 - DNA, 122 bp, Homo sapiens
aatggtttcacgtggctttcaaagggaaggaagggcagtgctgacttttggtaaaatgggcgaaagggtccatgccagcaacacaatcactcaaagtccagatgagggatcagtaaatacaa

SEQ ID NO: 42735 - DNA, 122 bp, Homo sapiens
agaggagacgcgtgcaaatttagattccgctgcaggatgtggacagtgggaggggagacgcgtgcaaatttagattctgctacaggatgtggacagtcggaggggagacgcgtgcaaattta

SEQ ID NO: 42736 - DNA, 122 bp, Homo sapiens
cgcgacctagccgcggtcgtcatggcaacctggcccccccgccaggcctgccaggaaagccggcggacacgtaagccacgcccactctgggcccaacgcagtctctccgcggaggctctgaa

SEQ ID NO: 42737 - DNA, 122 bp, Homo sapiens
ggcagggcttgggccaagtgtgcgcagcgtggggtgtgtgtgctccagcggctcctgctgcggagggcggcatgaggcttgtttacctgtgtgctggcatctctggtggcccctgcaagggt

SEQ ID NO: 42738 - DNA, 122 bp, Homo sapiens
ggcactgggccgcgcggtggaggagccggcggctcgcgtggggctcgggatcttggggaccgcgacgccggggaaccctggagcccccctccccgggggacagcgggcgcagactgattgac

SEQ ID NO: 42739 - DNA, 122 bp, Homo sapiens
agccgcgccacgccacgccgcccccgcccctcgctgtcctgggtgcgcctcgggccgctgcgctcctggccagctccccccagcgcctgggaggcgacccccagtgcgcccgggttcaaagg

SEQ ID NO: 42740 - DNA, 122 bp, Homo sapiens
agccatgagcatcatcaataagtacacagaacggtgcaaagacctcaacaccttcctgcacgagcccttctccagtgtggccatcacctgccagacccccaacatagcctgcaagaatagct

SEQ ID NO: 42741 - DNA, 122 bp, Homo sapiens
cctgttgctcttttcttgcccttatattcttacaaatgtgaaactctgttcaaaagcctgcgtgccccaagtccaacgctttataaattacttcagctctgtttattatagagacactaagg

SEQ ID NO: 42742 - DNA, 122 bp, Homo sapiens
cctggttcctgcccctgcctgcttttcctcagctccacagtgggcgagtggtcctgtctgcgcctcccggggctgccttctccccgtggggtcctgtctgcgcctcccggggctgccttctc

SEQ ID NO: 42743 - DNA, 122 bp, Homo sapiens
ccactcaccattcctcggcttcccgggtgtcctggcgtcagctagggatgtcccaatactcgcaggtcacagggtggcagaggctgctgcagagccacctgggcctcccagagccaagaact

SEQ ID NO: 42744 - DNA, 122 bp, Homo sapiens
aagattccacgcttggcactgaagaatgaactgagacagctcctccggaccccacagccccgttcagccacagaccagtttcagacacgctcatctccaacaagtgcttcctggaatgtgtg

SEQ ID NO: 42745 - DNA, 122 bp, Homo sapiens
agagaaagtgcctatagctttgacagccgcttggagcatgctcagtcggtctccaggcaccgggaggcggctcccccccaccaccccccgggccggcctccaccgcagcctgtccggccccc

SEQ ID NO: 42746 - DNA, 122 bp, Homo sapiens
gaacctagaacaaagatccatccaggcaaagacaatatttaaatccaagaaaagcgggcacggtggctcacacctgtagtcccagcactttgggaggccaaagtgggaggatcgcttgagcc

SEQ ID NO: 42747 - DNA, 122 bp, Homo sapiens
tgggcatgaaagttatatcttgtgtccccagctggcagaaagccccatcccagtccctagcgccagacggaaaacgaagagaaatccaagctgtcccccaaatccgtattttgcctaagttt

SEQ ID NO: 42748 - DNA, 122 bp, Homo sapiens
cgcatcatgaggacagagtggtctcagaaactcacccaggaaataatcctttgccaagcccgtctaacccatcggaagaacttcatgaccacaaccatctctcttgatgggaaaaacacaga

SEQ ID NO: 42749 - DNA, 122 bp, Homo sapiens
gccggcccgcatttggggacttggcagccgaagacttggtgcggagacctgagaggagcccgccaagcggcggcggcggctacgagctgcgagagccttgcgggcccctaggaggccccgcg

SEQ ID NO: 42750 - DNA, 122 bp, Homo sapiens
actcctactcatgcttcaagacctctgtgaagcctccttcccttgcccagtgtgcatgcacgctctctctctctgcctcttcatatatacatatacatatatatataaaatacatgcacatg

SEQ ID NO: 42751 - DNA, 122 bp, Homo sapiens
tttcatttgggctgcagcctttgagctgtactaattgctctgagcatctgtttgtatgtccgttgcatgggatgatttaccctcctaggtttccaaatgctttggagcccctggtttattgc

SEQ ID NO: 42752 - DNA, 122 bp, Homo sapiens
cttccgacctacagacgctctgctgagcggctgggagaatccgtcgcgccagtcagggcccggcttcttccaacaacagacactttgcgagccttccagaagccttggctaagcgagaaggc

SEQ ID NO: 42753 - DNA, 122 bp, Homo sapiens
agagcccggacgccagatcgttgggctccgggcctagcagtagcggcaggctctggggtccgggctcggccaggtgcattttcctggacgtgggtggctcaggtcctggtggcatctcccga

SEQ ID NO: 42754 - DNA, 122 bp, Homo sapiens
ctgggaggccaaggcggcttcgcgttctgagaatagacagaacctctgttactctgtgaccggcaggcaccgggagatccgtagctcagacgccaggacatcccggaagctgggaaatggtg

SEQ ID NO: 42755 - DNA, 122 bp, Homo sapiens
ctagttctacgttgttcctggatggtcagttcaaactgcaatgatccacagctccagaagcggcttcttccagtcggcctaggagccaaacgcccctgcagctccatgctaccacgcagggt

SEQ ID NO: 42756 - DNA, 122 bp, Homo sapiens
ctgaggtaggggttacttcgggctgaggggattagcaaaggcttgtgaagtggctaaagccgtgacctggatatttcaggactcaaatccacccgcattggaattctctgggtgactgccca

SEQ ID NO: 42757 - DNA, 122 bp, Homo sapiens
gttttccctgagaggactccttcataggagacttctagctgtccagcactgctgtggatacgcttaatttggggatgtaatgctggcatgctcatttggtcctcacatctaagtcacagtct

SEQ ID NO: 42758 - DNA, 122 bp, Homo sapiens
agttgggggcattatgagaggagagaaaaactactacttccgtggagctgcgggggaccacggttcctgccccactacaacttcgcctctggcctcggccctcttgatgccctcggaggcag

SEQ ID NO: 42759 - DNA, 122 bp, Homo sapiens
caaccccctgcagcttcctccgacccccgtgagccccctgcctcatggctgagcatcccccggcaccttctttgtgcttgtcattgcccctagtcaggggttggggagtgcggctcgggcct

SEQ ID NO: 42760 - DNA, 122 bp, Homo sapiens
taccatccctttaggtattacgttttggtcgagtttggaaaagatctgtatgatttcacacgcagtatttgacacaggcaggtggggcacctgaggccaattaaaggccttctgggaactgt

SEQ ID NO: 42761 - DNA, 122 bp, Homo sapiens
ctggatgatagggtgatgaggtcgtttgaggccttcatccttacctctttggctctctcccggcaagggaggtgtacagccttgggctctggcagtctgctttctgcccttgatcttctggt

SEQ ID NO: 42762 - DNA, 122 bp, Homo sapiens
aaagcgctgggcttggggtgggccttctgcagagacggaaggaaagctgactttggaaggcgtcctgataccccagagctggcaaggggagtccccacctcggagcctcactgtgagtgtga

SEQ ID NO: 42763 - DNA, 122 bp, Homo sapiens
gccgtgtggaggccaagggccgcccctgaaccgcccctcccacagcgctggccgggaccccgagcctggctccaaaccctcgaggcggatctttggacagaagcagctcttccccgaacact

SEQ ID NO: 42764 - DNA, 122 bp, Homo sapiens
tgagtatgtctgggaaacacaagagtcccagaagattgagtggcctgcagatacgcattacggggtgtacatttgtattgtggagaagaaaagattttgtgccactctcttcagcctccact

SEQ ID NO: 42765 - DNA, 122 bp, Homo sapiens
ctctgtgcgggcctcacagcagcgtccaagccctggcctctcggcaccggggtacctgtccggcgtccaggaagaattaggtcatatgaacggattgaagagtagtgtatgcggaagatttg

SEQ ID NO: 42766 - DNA, 122 bp, Homo sapiens
tgtgctggacgtagcctccagtctggtggagcagcatgtttgtaaagtgaaatgtgtgggcgtggttgttctgtgctaggagctacatcaactacttcctggtggccactgactgtcctaaa

SEQ ID NO: 42767 - DNA, 122 bp, Homo sapiens
ctacagttaataagttaaataaagggcttgagtacataaatatttgtctaggaaccctaccgtatctacaacacagtaagaatctacgggaggacaaacttttaccataccacgctgagtgc

SEQ ID NO: 42768 - DNA, 122 bp, Homo sapiens
ggaaggagatgtggatttatgtcgtcttggagatcgggagcgtcctaggtgcggggttggcgagcggttccttctcccatctctctcccgagacctggacctttcttggagcctgcgttctc

SEQ ID NO: 42769 - DNA, 122 bp, Homo sapiens
gccagggcattaatgaaataaacccctgagagcccgtgggcattagtaggcttggtggtgcgaaaagatgaggaggaggaggatggtggcgacagtgatgacggtggtggttatgatgccag

SEQ ID NO: 42770 - DNA, 122 bp, Homo sapiens
ccagcttcttcagagccaggtggatcctgtttcggtcctgcctaggtgtgtgaccctgggcgaatctacctctctcagcttctgcttcccactttatgaaaatgggactgatgtcacagggt

SEQ ID NO: 42771 - DNA, 122 bp, Homo sapiens
aagaactcagatcaaaacctgttactgaaggaactggtgatattattaaggtaattattacgttgggaaatgtctaaagagaaataaaatttccctgaggattgtcagtctgctagaggcta

SEQ ID NO: 42772 - DNA, 122 bp, Homo sapiens
agtatggttcggccctcacctggttcatgcccgcattgacaaaaagcaaactggggtcgccgcggggccgcacggaagcggagggcaccagccggtggccatggcggtcccgaaagaagttc

SEQ ID NO: 42773 - DNA, 122 bp, Homo sapiens
cagggctaatagaatctcatagaatgcaaagcttgaggagaactcggtccgctctggccgcggttagatccctccgcaggcacagactgttgctggtgccagagatgctcctctcggggggc

SEQ ID NO: 42774 - DNA, 122 bp, Homo sapiens
taccagtgaaaatcgtccaaagttctcgttccacttgaggaatttgggtcccagttaggccgggtagaggaaaagaccttctcaaggaggtctctagcttcctcctccggtctattggctga

SEQ ID NO: 42775 - DNA, 122 bp, Homo sapiens
aaaccagcctggccaacacggagaaacctgtctccattaaaaatacaaaaagtagccggacgtggtgtgggcacctgtaatcccaactactcgggaggctgaggcaggagaatcgcttgaac

SEQ ID NO: 42776 - DNA, 122 bp, Homo sapiens
gtggctgcagcagcgccaggaatcgaggatggtaaaatgacccaggggaagaagaagaaacgggccgcgaaccgcagtatcatgctggccaagaagatcatcattaaggacggaggcacggt

SEQ ID NO: 42777 - DNA, 122 bp, Homo sapiens
gaccctggaaactcctccgctggcagcgcagctgttacagatgctgttctgtacctgtcacggctactgccacccagccatcctccacccaggtggctgcgctgctcagagcaggcttccca

SEQ ID NO: 42778 - DNA, 122 bp, Homo sapiens
aggtgaagtttttgggcttgccatctgcggagcctcctggcagcttgctgtggcccttgacgcctccgcgctcggcagtcagggccgagttttccttcagtacctgctccagcggcgccggc

SEQ ID NO: 42779 - DNA, 122 bp, Homo sapiens
ctagttatctgtactgaagagatgaggtcaaagagaagaaaatggggagaatgaacaaatcggagaagcaaaggagaaagaaaaaaagtagtcaccaaaagagatgcaaaaggtataaagat

SEQ ID NO: 42780 - DNA, 122 bp, Homo sapiens
aggatgaggactggccagtctgcgcctggagggcgggccggtcccgctgatcacgtgacacgatttttgaaaggtgattggctgtcaaggagagggcttgccaccgaggaaggggcgtttcc

SEQ ID NO: 42781 - DNA, 122 bp, Homo sapiens
atgtgaaattacagagcatgtttgcgtgtggctggaaaagctgctggtaggatgaatgggcgcaggagagagtggggacagctcaattttccaagctctgaggtgaaaggagccgggatcag

SEQ ID NO: 42782 - DNA, 122 bp, Homo sapiens
tcctgtcacatcccaaagccgtgcagtgcactttaggtaaattggtgcatctacacgatccgagtgtgagtgtgggtgtgtgtgagcacaccctgtgaggtgccctgagttggaataagccg

SEQ ID NO: 42783 - DNA, 122 bp, Homo sapiens
ccccttcgtcctcccattctcccccactactccccgccccgtccccctcccggcgtctgacgcgacacgccgagccttcgggatcctcctcccgaaccctacctccggctctcccgggtgac

SEQ ID NO: 42784 - DNA, 122 bp, Homo sapiens
gccattccccctcctcctttggaaattccttcctatttaggaaagataatagtcagaggccgtcacatataataactcaaaacttggatgctaaaccgtgtgcacctatggaactgggaagg

SEQ ID NO: 42785 - DNA, 122 bp, Homo sapiens
gccccggacacagcgggacgcggccggcggcctcagagtccacggagctcgcggcgaggacgacttctgcttttgttgttgttgttgttgttcacgggtggcctggctcacacttggctctg

SEQ ID NO: 42786 - DNA, 122 bp, Homo sapiens
cagccggccggccctgccagccccgggcaatgaggggcttagcacccaggccagcggcagcggagcatatactgggtcccccagcagtgccagcccaccagcgctgcactcaatttctcacc

SEQ ID NO: 42787 - DNA, 122 bp, Homo sapiens
gggggacgggttggcctggaagggcccgctctggttctgcggggcccccgggtagggtggcgggaggtaggtatggtggaagcggctggtggccggcatgcccgccacgctgaggctgctga

SEQ ID NO: 42788 - DNA, 122 bp, Homo sapiens
accttgggctgggtgacagccttctccccagtaagaaccaccatttagctacctgagacccgcacccaacaagggcagaggtcttattctgattttttaaaacctctgggcttggtggctca

SEQ ID NO: 42789 - DNA, 122 bp, Homo sapiens
taggatattattagtactgaatttatccataaactcgaagctctgctgcaaagagcctatcgtctccaagaggagtttgaagctacccttggggcatctgatcctaattcccttgctgatga

SEQ ID NO: 42790 - DNA, 122 bp, Homo sapiens
ccagggctggagttggggccgctaccaaacctgcatggcctcagacaggacaggatgccccgagccagcgggacagagacaggacacgcggtgccagcgggacggggacaagagcgagcgga

SEQ ID NO: 42791 - DNA, 122 bp, Homo sapiens
ggcacgcggaccggcacacactcgtgtgcacacatccaaccgggcacccccgcgcgcacacgcccgtgcccacgtgtgcacgctcacacccttgcacacacccaggcgcgcgctggcacact

SEQ ID NO: 42792 - DNA, 122 bp, Homo sapiens
gctgggattacaggtatctgccaccatgccctgctaatttttacatatttttagtagagccggagtttcaccatgttggctaggctggtctcgaactcctgacctcgagtgatccgcccgcc

SEQ ID NO: 42793 - DNA, 122 bp, Homo sapiens
aggaaacctgtaaacaacttgtcactcactctgtcggtctcactgttagctcgtgctttccgcaaagtggtgcgaacgtcctggcaacccgaccaaagtttcctcagctctaaactccataa

SEQ ID NO: 42794 - DNA, 122 bp, Homo sapiens
gtcatgggacatgtgtgaccaggcctaataactaccctctgtaaggttcttgtatcggttcgaaccctgcgagcgcgccgacacacaacacgaggcggtgtggagcaacatgctgttttttt

SEQ ID NO: 42795 - DNA, 122 bp, Homo sapiens
tcaggttttgtggagattttgtgtctgtgcgtgcttcagtggggaaagacaggaagagagcgagagagaatcagcagagcagaggagagagaatacataacaaacagtgtcttcattcttag

SEQ ID NO: 42796 - DNA, 122 bp, Homo sapiens
ccacctcgggggggcccccctggtcgctgggagcgccacgctgctctgttaataaacatgcgctcgctggagtcctcatcctggggctcgcggaagcgctgactcagcaccggggcagggag

SEQ ID NO: 42797 - DNA, 122 bp, Homo sapiens
ggaccagcgcctctgcgaggacagctctctgagttgcgccaggttccagctacagggccacgtcccgcagaccaggagcgctgcggctccgccctgggggaccaggtacccgcacaacccaa

SEQ ID NO: 42798 - DNA, 122 bp, Homo sapiens
agggcggagaaccgggaaaaggtcaagacctgtacgtacctctcgcgcaggctcgggttgcgttctggtaggacgtacgtgtttctgagcgcttggtggaaagatttaaatggggggaagag

SEQ ID NO: 42799 - DNA, 122 bp, Homo sapiens
agacccctgagacactatatgaacgccgcgaggaaggggctctgaatataccccagggatcgttatgagccaagagcttagtaatgcatctgtgttgtcccttttgtaaaggtagaagcgaa

SEQ ID NO: 42800 - DNA, 122 bp, Homo sapiens
gcctgcctgagagataaaatatcctttctcggatcagtttcctcacctgagaaatgggaacgggaatctccgccccttttctcccggggccctagtgcccactgaatccattaaggagctct

SEQ ID NO: 42801 - DNA, 122 bp, Homo sapiens
gcctttaacgagatcggaaagggcggccaacccagcccccagtgaggcttggagtggagacgcgcccggggccccttccttcaccgaggctcttgggacagggctcaaagctgcccctagcc

SEQ ID NO: 42802 - DNA, 122 bp, Homo sapiens
tgtccatcagagggtgaatgaataaagcaaacgtgttccatccacacaaggcatgttctccggccttgaaaggaacgaagctgtcacacaggctgcagcgtgatgggcctcggggacctggc

SEQ ID NO: 42803 - DNA, 122 bp, Homo sapiens
ggaatgaggtatctgcgttaaacttacagaaagctggttaaaatcttaacaacgtggagacgtggagattcccagtatgccagtcctaatgatcagaaagtttttagaaaacaccttgggtg

SEQ ID NO: 42804 - DNA, 122 bp, Homo sapiens
ggcctggcgccgccgttgccatagttacagacgcagccctgcgagggggcgggctctggccgcacgtcattcccggcgcgacgctcctccgcgctcccgcctcctcctggtcggagaccctc

SEQ ID NO: 42805 - DNA, 122 bp, Homo sapiens
tgccgctgcacagctgacataattaatcacttccttccaaaccttgagtcccgaaggaagcggccacactgcccggctcaccgctcaccggctggcatggtgtctcgtggagctgcaagtta

SEQ ID NO: 42806 - DNA, 122 bp, Homo sapiens
tcacagaagaaaaattaaatggcccttacccaaaacaagaaacccaaaagaggccaggtgcgggggctcatgcctgtaatcccagtactttgggaggccaaggtgagcagatcacctgaggt

SEQ ID NO: 42807 - DNA, 122 bp, Homo sapiens
ggaaataacaggtttagccaacctcactgggttattttgagacccaggtgagctactacacgtgaaagtgctttgaaaatttgtaaagttacatataaacagagaatactgttcatggcagc

SEQ ID NO: 42808 - DNA, 122 bp, Homo sapiens
aaggtgatttgacatcaaccctaaattccctcagccaggctgtaaatcagaaaacagtgacgaaaacagaagaaattataaaaggtaacatgctagccacactcaagtcacttaaagaatca

SEQ ID NO: 42809 - DNA, 122 bp, Homo sapiens
gtctcggcttagggcggaggagagggcaggggaacggcggtgcagctcccccgctgtccccgaggatttcccgcggcagccccgggctccccagtgcccctcaccatggacttgcgcggagt

SEQ ID NO: 42810 - DNA, 122 bp, Homo sapiens
tgaagccttacagttaaactcccttgggcatctgcttttctccagtcaaacaaatatgtacgatagctcacaatgaagtatttcattttccctgtggcatttcacacagaagtcttaactgt

SEQ ID NO: 42811 - DNA, 122 bp, Homo sapiens
taaaacagatgtctttgcccttgaaccctttgaagttcaaaagggggtctctccccaaatcgacgtatctcagtgtgattcaccacttcttgcatataacagtgcaaatcaaagattttttt

SEQ ID NO: 42812 - DNA, 122 bp, Homo sapiens
ccgattcctgtttgagcttggcaattcccccgatttttcgttgcgttttactttgttttacgtggaaaggcaacgaaaaccagcgcgtcgcaggctctcgggcctcgagtagggacgcattg

SEQ ID NO: 42813 - DNA, 122 bp, Homo sapiens
gaagtgtttgctcaggtaggactcgggctccctactggagttggcaggaggagcctccctcggcggcgcagcctctaccctcccgcgcacgcctttggagggggcggagggacggaggcttc

SEQ ID NO: 42814 - DNA, 122 bp, Homo sapiens
tccaaaagcagactccatgtcattcacataccgccgtggtgcacagacgtgggctgagagcggggagctacactcgggcctggagccggtgtggcctccgccaggttgtgggttgctcgacc

SEQ ID NO: 42815 - DNA, 122 bp, Homo sapiens
tcggggcgccggggctgcgactgtggccaagcacttccgggtccgccgcaatctccttagcgagggcacccttccccggctggaaccatcgcgacgtgactgctgccccctcctggctgctc

SEQ ID NO: 42816 - DNA, 122 bp, Homo sapiens
gcgtccacccaaggcggagtaagggcatgcgctggaaaggactgcggggactcgagggaccgcacccaggacacagttacgcgacaaaagagagctccggatacggcggagggcagcccgag

SEQ ID NO: 42817 - DNA, 122 bp, Homo sapiens
cgggacaatagtgccaagtcactgctgatgagaggcctgtgttcacctcctcccagccaccgcctgaagtccatttcagctactgtcgttgctgtcacacacacccgtcccagcaccactga

SEQ ID NO: 42818 - DNA, 122 bp, Homo sapiens
ggaagaggagtggtgcatttccagccgcttgcttagaccggtctgagacagggaggctcccgggggacccagggaggcctcccgctgtggaactttggggggcaggctgtccaggttctcca

SEQ ID NO: 42819 - DNA, 122 bp, Homo sapiens
cgatccccgcccctgggctggtgtcgccctgggctcctgggacgtcggggcactgtcccccgatactggcagaaaaggattgagtcctcgcttttggccctaggtctccttgagcctccaga

SEQ ID NO: 42820 - DNA, 122 bp, Homo sapiens
gatctttgcactacaccttgttgcctggcacaggtgagagtgcccagcccatagtgggtgcgcaatatctgtttctatttgaatgacccaggcaggcggttaataatgcttgtgatttcttt

SEQ ID NO: 42821 - DNA, 122 bp, Homo sapiens
tggctgtgtcaggctcgtgggccgatcactatttgctgtgtcagacctgtgggcggaggacgattagagggcagttggctgtgtcagacctgtgggtggagggccattggctgtgtcaggcc

SEQ ID NO: 42822 - DNA, 122 bp, Homo sapiens
aatcagcacgtgtacaggctcctggcgaaaactgagtagactgggaaagcccgtgctggccgggttaggactcaggcacttgccccaccagcagggaaaactcacatgcttgggggcccggc

SEQ ID NO: 42823 - DNA, 122 bp, Homo sapiens
ccaccccccatcagaaacacggaaagccaagctggcacacagctggcggcttcaggttcccggccaagttcattttgacattacaagacaaaaagcacagcatgttgcgatgggactggccg

SEQ ID NO: 42824 - DNA, 122 bp, Homo sapiens
ctgacccggcaactcggtcacgcctgtcctgggctggggacccggaacctgcgggaaggacgcctgcacagcgcggcggcctcgggggctcaatctcacaacccttcccgggcgacccaagc

SEQ ID NO: 42825 - DNA, 122 bp, Homo sapiens
ccccgcatggagccatgcacccttgttgctgtcattgccgagaccctgcatggagccatgcgcccttgttgctgtcatggccaagagtaaagttcatttcattgcctgctataaaagtagag

SEQ ID NO: 42826 - DNA, 122 bp, Homo sapiens
ttataccagtgaaatcaataattaaaagttctacttaaaaaaatataacccatgcaacatcgtgtgtccactgagcagtgataggcgcctgtgtaaggaaaagagctctcatcatatcagct

SEQ ID NO: 42827 - DNA, 122 bp, Homo sapiens
cgccggtctccgctgggttccgacaggccttgctgggaggccttgctgggagctgggggtcgaggctcacagactgcgctgaccccagcaggcacagctgggtccagggactcgggaactcg

SEQ ID NO: 42828 - DNA, 122 bp, Homo sapiens
ggctcccagggggcgccgcggtaggaacagcggttctagtgcaggccctgggtgcggggccgcgctgcaggagtgaatggactgaggggccagggctgcggggtggccgcaggaagggtggg

SEQ ID NO: 42829 - DNA, 122 bp, Homo sapiens
tgcaagggacctggaagtgatcccggtgccgctctgctcccaccagctagggagcagaggcgcgggagggaaggggcgtcccgggggtcgccagcacgctgcgggcagggctggcagccgcc

SEQ ID NO: 42830 - DNA, 122 bp, Homo sapiens
tcatttaaaatggaaattggggcgaggggttggcggctgggcgaagggagcattcaaaagcggagaatgtcactttacccgagaaattcactacgatgggccattggtttctgctcggctcg

SEQ ID NO: 42831 - DNA, 122 bp, Homo sapiens
ctgagtctggagagtctctgacatcaaaattaaaaaattgcttccttcaaggaaacttcacggatgtggatttcatgtgactctgggcatcttctttggaaaggcagtgccccattcctttc

SEQ ID NO: 42832 - DNA, 122 bp, Homo sapiens
tccggggctcagttgtcaccccctgacttcagagccaatggaagaggcccagttgtggaccgaaccacatggggctactggagcagggggaaagaagctggggacaggtagacggaactttc

SEQ ID NO: 42833 - DNA, 122 bp, Homo sapiens
ctgggggagggaaggcaggatgcggtgcgggagttaatggacctggccttggcgaaggcgcgtcctgggttggatcgaaaccctctcatccgccctgtggccggagggaccagaccattagt

SEQ ID NO: 42834 - DNA, 122 bp, Homo sapiens
ccgaaggtggtgcaggcacaggccctagaggtgccccgggcccagagactagagatgccccgggcccggagactagaggtgccccgggcccggagactagaggtgccccgggcccggagact

SEQ ID NO: 42835 - DNA, 122 bp, Homo sapiens
caggatggtcgtgtggatcggcttgctgttcttggccagcactgtggacagcaggcggggcgggggtctcgggttaccatgactgccctggtgcccgtcttccaccccaccagcctaatcct

SEQ ID NO: 42836 - DNA, 122 bp, Homo sapiens
gaagttgggggcgttatctgggcccttgggatccattcccctgggtataaagtgttggtacgtggctccaggcctggcccactcagcctcccccaggaaggcttctcaagtggagaaggttc

SEQ ID NO: 42837 - DNA, 122 bp, Homo sapiens
tggacggtttgcgaaggctgaggctgccttggggactcacaaaagaccacaggggtgattcgaagtgtaaatagggaaacaatcatcagcacacaatccggctaaagggataacatatgagt

SEQ ID NO: 42838 - DNA, 122 bp, Homo sapiens
tcggtctcccaaagtgctgggattacaagcatgagcactttatctactataaaatgctcccggcctgggatgcattttatagtagataaagtgtgccatatctgttagataaaaaaatacga

SEQ ID NO: 42839 - DNA, 122 bp, Homo sapiens
gggtgcggagaaaagtgagagtatattatggcaaacacacagatctggggagagctgctccgcaggagacagcaggccgcagcatgggcgaccgcatcttcccagctctagcttatgagaca

SEQ ID NO: 42840 - DNA, 122 bp, Homo sapiens
aatcgctgtaggatgtgtcgtgtggggctctggtctttgctcccaaacacccctttcatgcgcctctgaggccttgccaggaaccccgcagcccaaagaccctccgttccgcagcatcgttg

SEQ ID NO: 42841 - DNA, 122 bp, Homo sapiens
gccccgaagtctagaaccctgggccggccgcaaaggaaggtctgccgcgcatgcgcgccccggcgcagcctatccggagcgatccatctcgttacgtcaccaccagcctagctcggacggca

SEQ ID NO: 42842 - DNA, 122 bp, Homo sapiens
ccctgcgggagcccatccgcccaacgcggccccgcccctcccccaggctccgcccaccgccgagcccaggctcggcccttgacgaagttcgccggaaattaccgaagcccctcttttttttc

SEQ ID NO: 42843 - DNA, 122 bp, Homo sapiens
tttctccccctggcactttgcccagtgacagttgtcaatcagaggtgctgcagaccgactcgaaggcagcgttcagtgcccaggcacactgcctgctgccgttggttcctcccatggttctc

SEQ ID NO: 42844 - DNA, 122 bp, Homo sapiens
tcagaagtcaacacttagacacagagcacatgccctagtgactgtggcctccaggccaggcgatgtctatggggatcccaattattcacacacctgcccccataaataaaacacaccctccc

SEQ ID NO: 42845 - DNA, 122 bp, Homo sapiens
agttttgcctccagggaaactgaggcacaaggcagcaatgattactgagggtcctgcctccgctcctctaggtgaggagcctattccaggggctccagtctgaaagcctagaggcgaggggc

SEQ ID NO: 42846 - DNA, 122 bp, Homo sapiens
gtggggccctgctcaattgtgtgcacacacccacgtgcattcggcgaatttctgcgcgtgcgtgcccaggttacttccaggacctcgcagctctaagcggtgaatctctgcaagtgagggcc

SEQ ID NO: 42847 - DNA, 122 bp, Homo sapiens
ggaaggagtgcgttcgactcatgatgtctgccgcagacataggacgggagcaggagcaagcgttcctgggcaaacgcctgagaggctgggtctctgtccgtggtcctctactgttctcccta

SEQ ID NO: 42848 - DNA, 122 bp, Homo sapiens
ggcgtgttcgtgctctgctggttccccttcttcttcagctacagcctgtacggcatctgccgcgaggcctgccaggtgcccggcccgctcttcaagttcttcttctggatcggctactgcaa

SEQ ID NO: 42849 - DNA, 122 bp, Homo sapiens
tgtgatccgcccacctcggcctcccaaagtgctgggattacaggcatgagccaccacatccggccattattggtgttttctaaagtggtttgagcaaggctaaatttgattctgtgttctta

SEQ ID NO: 42850 - DNA, 122 bp, Homo sapiens
ccacccttgtgtcctcttctttcaccccttattcatttgggcaggtatcccaggactgcccgagtcagggctcaccatcaccactggttgacaagcactcatgaaatgcacagcgacctgag

SEQ ID NO: 42851 - DNA, 122 bp, Homo sapiens
ttaaaaagataataggatagggacgcggccatggaggccgagggctgccgctaccaatttcgggtcgcgctgctgggggacgcggcggtgggcaagacgtcgctgctgcggagctacgtggc

SEQ ID NO: 42852 - DNA, 122 bp, Homo sapiens
ctgcgtgaaccgtcccggcagccctcgccgcccctctggcgggcacccacctccctggagcggcctcgctcccctcgagcacccctgggggctggcagctcccacccctccgggggcagcct

SEQ ID NO: 42853 - DNA, 122 bp, Homo sapiens
tcctgccctctgttgttgctatctttcttcaaagctgtgatcgttgtcagccatgatgcccgactcatcacagaaaccaattgccagctgtgggtggtggaggagcagagtgttagccaaat

SEQ ID NO: 42854 - DNA, 122 bp, Homo sapiens
tataagtgtacagtgattttccaggttcctttctaacatagcttgcttaaattcacaggtcgactaatgtttcatttcatgtgcatgctaagtgaagctggttagtgatgaccataagcagg

SEQ ID NO: 42855 - DNA, 122 bp, Homo sapiens
gggggtgggcagctgcagtaaggaatacattggacaatgtctgtcaagcgtctacccttgcgtggccccatagtaagctcagtagtggggatgatgtttttgcagctgtggagccaggaagg

SEQ ID NO: 42856 - DNA, 122 bp, Homo sapiens
tggctccatccggggacacagcagttaagggtgggaaacctcaaggatgctcacccacctcggggagaggctgagtcttgttgagaagaggggtgttagggagaggggtagggggttggaca

SEQ ID NO: 42857 - DNA, 122 bp, Homo sapiens
acagctagtgttaatacagggagggctcacggaaataatggatacaaggccctctgagtgcggtgggggctgttattcttggctgttattccccaccaagacaggattcctcggttcatttc

SEQ ID NO: 42858 - DNA, 122 bp, Homo sapiens
cgccccagagagggaaggccttgacacctacgctagagagacaggctccaatgaaaagagcgagggggcggagccgggaggaatcggtccaattctcggccgggaagtctctggccgggacg

SEQ ID NO: 42859 - DNA, 122 bp, Homo sapiens
caaagtccagttattaacttgcaagtcctccttggagaactgttctgccactgtctctcccgtggcctcagggaaatgtcttaattacttattgtgtagattaaatgagaaaatatgtgtaa

SEQ ID NO: 42860 - DNA, 122 bp, Homo sapiens
ccccagctcccaccccctccggctgtcccggaggccgtgctccgtggatctcctctccctcgcctccacgtgggctccaggtagctgcacacgcattacaaacatctcgttaatcttctcgg

SEQ ID NO: 42861 - DNA, 122 bp, Homo sapiens
aaggtccctgggatccatccaaacgaccccaaccaaatctgggggccaaaacgcaaagatcgcgggagaagcccagaacggcgttgacataaaaacaaaaccacaaacaaaaccttccaaaa

SEQ ID NO: 42862 - DNA, 122 bp, Homo sapiens
gaaggccggcgccggcccgtagtcgcagggcgccgctcggccgtagccaccgcccgccggcgggtaataggaggaagtggcaaagcccttgtcctggcccggccctggcccgtagggcgcgg

SEQ ID NO: 42863 - DNA, 122 bp, Homo sapiens
ccgccggagtgcccgacgggggctacatgctttgcccagggaagccgggagaacgatgggcgcgagctttggggacgcgagggagggagcgagcgagcctgccggctaggcgaccagtccgg

SEQ ID NO: 42864 - DNA, 122 bp, Homo sapiens
cattaaagtacatcaggactattcattttaccaacatatatttactgggcacctataaaacgtatgatgataagttaggtgtgaaggtatgcaggtaaaagtaatatgagctcagcaaaaag

SEQ ID NO: 42865 - DNA, 122 bp, Homo sapiens
ctctcagccaaacattttaaggattggtagggatgctttctacttttctacacactgtagcgtgacttattgttgccactcttcctatatatcaatggtaaatgcctttgggtccttaattc

SEQ ID NO: 42866 - DNA, 122 bp, Homo sapiens
cggggacgaggagggcccagcgctcactgcctccccaacaggccttcatcgagatgaacacggaggaggctgccaacaccatggtgaactactacacctcggtgacccctgtgctgcgcggc

SEQ ID NO: 42867 - DNA, 122 bp, Homo sapiens
attctgtataaacgcagtctcatggggagctagtgccccccgctgctccggcgccccctccgctctggctttcttcactggcacaggatcctgagatgcacccctgcctccatggttatcag

SEQ ID NO: 42868 - DNA, 122 bp, Homo sapiens
tacctgccctcggtctcggtgagccagcaatgttcagcggtgtgttcatgcccaggcaagcgtagacgcactctacgcttaccagtgtgaacggtgttgcagtctagaatactcccccagct

SEQ ID NO: 42869 - DNA, 122 bp, Homo sapiens
caggagagcattgcgcctcagtttccccattcgtggggctgggttggggcttccttggtccgtgaggtggaggtactttccctgcaggggccgtggagctgctggaggggaagaggtccagg

SEQ ID NO: 42870 - DNA, 122 bp, Homo sapiens
ccaccggcactctgttgtagtagcggatgcagtccttccccaggaagtcaaattccaccacgtgttggcagccatcggcctccgggtgcagctggacgtgctccacgcggagggaacagcag

SEQ ID NO: 42871 - DNA, 122 bp, Homo sapiens
tgccccagcgggctccggcacctgcgggggcatcggttcatggtttggcggcgagctcggcgtctaagctccacccccaggccccggggcggtccggtctccgccctcacccgggtaggccc

SEQ ID NO: 42872 - DNA, 122 bp, Homo sapiens
gcaaactctaccagctgtcactggtgctctcggagagacgattaaccaaggaacccagcccgggaacagtactgacctctacttctggactcctgcctccctcttaaaaagtcccttgaact

SEQ ID NO: 42873 - DNA, 122 bp, Homo sapiens
gctcgccgccacaggccccgcctccagctcgcggccccgcgcgccggatcggcgtgcgtgcggctggagccttaagcgtttcccccgcccggcttcatccctgctggcggcccagcgtcgtt

SEQ ID NO: 42874 - DNA, 122 bp, Homo sapiens
ttgaacaacggaaatgtgtcaaatgtgtcagctcccagctcagagactgggagaccaggccgaggcgccggcagggctggttctttctgaggctgagggggagtctgtcccaggccgccctc

SEQ ID NO: 42875 - DNA, 122 bp, Homo sapiens
gccgagactcctgcacgcccggcccgaagctagcccgacaccctcagctgagtcctccgccgtcccagcattccctgcgtccctaccatcgagagcagcttccggcgtggctggtgtaggcg

SEQ ID NO: 42876 - DNA, 122 bp, Homo sapiens
tgctgagccactgccctgggcctggtgcctgggggacaaacctgtggtgccgcctgtcaccgcggcgccttctctgggattggacacccccagctatctccccggcttgacctcgcttgaag

SEQ ID NO: 42877 - DNA, 122 bp, Homo sapiens
ctaccacaaagtcacagggcaggcctgtctaaaaagccccaatgcacacagacatgcatgcgcgcaaaacagctctagaagggaaaaactttttttaacgtctctgccattttagtgtcatg

SEQ ID NO: 42878 - DNA, 122 bp, Homo sapiens
atccggcgacggaggcccggcctggccactgcctggcgttttctcataaaccagctttcacgaggtgttggctgctcagtcttgacatgaggtgaagcctcaggaaagcccggggctgttca

SEQ ID NO: 42879 - DNA, 122 bp, Homo sapiens
tcggaagtggtgggccatggctatgtcctccaggcggtagtgcggcggcggtgtgggctgcggtggcccgttgctggggctgtagcgctgggcagggttcagggtgcatggccgtttgctga

SEQ ID NO: 42880 - DNA, 122 bp, Homo sapiens
atcccttcctggagcacatccgggactcggcgaggcgtggtctcgggaggcggagtctgacgcaagccggcccagcccacctggctaaattcacagtcgcgctcgctccttccgcccgccag

SEQ ID NO: 42881 - DNA, 122 bp, Homo sapiens
agctggaagaaggcacgctgaggccctcgctgagccttctggaacattcccaccacggagcggtcatttctgcccagctctgacccccataccattcagaatctaggctaccgtcctgagac

SEQ ID NO: 42882 - DNA, 122 bp, Homo sapiens
gacttaagcacctgcctgtaggccaggactgtggctccacagcccagcttcaagcctggccgaccaggggtttggcatgaagaccccggcagggctggggctgtgctggaatccacccggaa

SEQ ID NO: 42883 - DNA, 122 bp, Homo sapiens
agtgcttggcacatggcagctgtgatcgtcattaagattctggaatatacagatgggcatcgctgctgagtacttctggctcattccccgctttactcaggccagtgcatcagcccggaagg

SEQ ID NO: 42884 - DNA, 122 bp, Homo sapiens
attgcaggtgtgagccaccaagcctggtcaggagcttattttcaaaagccaaggaatacacgtggatgaagaaaaagaaaagttctgcatccccaggagagatgctgagggtgtgatgggat

SEQ ID NO: 42885 - DNA, 122 bp, Homo sapiens
cttttgagaggttatggacactctgagtgacacccgagcccaagcctccaacagcaagtccggcagccccggggtgcaggggcgaggcccggccttgtctctgccatccacgtgtaatctgg

SEQ ID NO: 42886 - DNA, 122 bp, Homo sapiens
actaatgaggccattggaactcagtggaagagtttaaagacagccctgtgtccagggtcccgcagataagtgatttaaaacttcattatcaactcagtagccaaggattatctacatgggca

SEQ ID NO: 42887 - DNA, 122 bp, Homo sapiens
gaggacgccggagaggacgccagagagggtgccgcagcgccggcagccagggtgcacttccgcgtggcgaggttcatcatggaggcaggtgtcaagctagggatgcagtccattcccattgc

SEQ ID NO: 42888 - DNA, 122 bp, Homo sapiens
cagggatacagcaatgatcagaactggcacacacaaaaatccctgaccttctgaagctcccggggctccacatcacacaactccagcagtttccaccattcatgctaatattcttagtaaaa

SEQ ID NO: 42889 - DNA, 122 bp, Homo sapiens
cagggctcaccacccccgcgacaccgcaggcctctgtgcggagactgtgctcaggcccagcgcttgcgctggagaaaaggcggagacattcagaacccaggggattccaggctgccttctcc

SEQ ID NO: 42890 - DNA, 122 bp, Homo sapiens
gagccctcggctggagcctcagcttcgcaagtcagctaccttgggacctctaggatcttccgacatcccaaagctgtcttcccgtaccgcggagcccggaaggggctgtactttttcggcct

SEQ ID NO: 42891 - DNA, 122 bp, Homo sapiens
gggagaacacgggagcatcctgcaccgtgcatttcagccacagatcacatggcccctccgcgggcccagcccacgccctgaccgcccggcctggccaggtctccgtatctctctgccccgcc

SEQ ID NO: 42892 - DNA, 122 bp, Homo sapiens
cccaggtgcacgcgtggaccccgagcccggaggtgaagagggtctgaccctgcgatctcccgcagctgctactccaccgacacgcactggttctctggcccgcgctgcgaggtggccgtcca

SEQ ID NO: 42893 - DNA, 122 bp, Homo sapiens
attcatcctgtttttgctttaggcctgactggaattggcaatttcctatcccacttggctcgtagttaccactagaaggagctagagaatagtggatgaaccaggcctgggttttatggtac

SEQ ID NO: 42894 - DNA, 122 bp, Homo sapiens
gaaccaattcatgactgttgttactatcttatggggcaggctgtggattggaagcaggggcggtgcacataggtacgtgtaacttactggtaatgcttttaggttaggaatgaggtcaaagg

SEQ ID NO: 42895 - DNA, 122 bp, Homo sapiens
cgccataacaaccacacacagtcacatgcctcacatgatcacatgctcgagttccacatacgacacgcacacagaatcacacaacacacacagtcacatgcctcacacgatacacgcgcgca

SEQ ID NO: 42896 - DNA, 122 bp, Homo sapiens
catcttccgatcctgtgtcccgcactgggacacagagcagggattgtggtgagggtggctcgtgggtcctctcgcggagagcagggtctggcacttaccagcgcgcacgactaggacttgtt

SEQ ID NO: 42897 - DNA, 122 bp, Homo sapiens
acattatattttgatggtgctatttcacattctcaaaagcttataaagatctacacaaaacgtcactacaacagtgagctgaagccttcaccctgcccctagcactctggccttgcctggcc

SEQ ID NO: 42898 - DNA, 122 bp, Homo sapiens
gtcagggtaaccgtcaggcctgcggtcaccgcgctgcaatcccaggaggccttgcgtcagcggccattatatcaataaggaagtacaatcaccaaaccacaagccggcttcttttctaagcc

SEQ ID NO: 42899 - DNA, 122 bp, Homo sapiens
ccgtagctgcgggaaagctgctcgcctgggaagacacttacgcctgaagagactcggtcacggagccaatctggttgactttgagcaggaggcagttgcaggacttctcgttcacggccttg

SEQ ID NO: 42900 - DNA, 122 bp, Homo sapiens
aagctgaaggagggggtccggttgaactctgggtgggcgggaactggggctcctacagggcggtgatgcctacaggggacaggctccagtcaggtccgtttgcttctcattatgctgaatat

SEQ ID NO: 42901 - DNA, 122 bp, Homo sapiens
tggtgcccagggctgctgggtggtgttggactcagtttacctgagagacctggggtttgccgtatgtgcaggatggcagcttttccaggagggttaagatgtggtgcagttggtgtggtctg

SEQ ID NO: 42902 - DNA, 122 bp, Homo sapiens
atttatttatttaccctgggtatcccaagaggtagtacagtggccacaggttatagagggcggtcttgagatctgaatgaggagagctctaattctagattttataatgcctgtggcttaac

SEQ ID NO: 42903 - DNA, 122 bp, Homo sapiens
cccttagcagcccacgccacagttcattcacactaggtagcgggtgcggtacctttcccccgccccaaggagggaacttcgcgccgtaacaaggtccgaactctagcaaacaacccttcgca

SEQ ID NO: 42904 - DNA, 122 bp, Homo sapiens
gggtgggccatggctgctcttggtcccagcgatgggcattcaggtgcaggctggggtgggcgtggatgcctgctggccaccagcctgggatgccatgggacggagctcagctcagccaccgc

SEQ ID NO: 42905 - DNA, 122 bp, Homo sapiens
cgaggagtttggtgcctttcttgaagaggagtctatgaatagatcctattttgtagcatccgggaggagccggtccatctataaaaacctcgataatcgtgcctcgtttcctgctttcactg

SEQ ID NO: 42906 - DNA, 122 bp, Homo sapiens
ctgagggcagctgggtccgggaagcgcaggcccccgcctcgggaatatagttgattggcccgaggtggaccctgcagtgctaggtccaccctcctggcttggacgggcgttctaacctgccg

SEQ ID NO: 42907 - DNA, 122 bp, Homo sapiens
cgagttcatctacgccatcgtgggcatcgtctggctcactcagtactacacctcctgcaacgacctcactgccaagaatgtcaccctcggtacgtctgggtgaggcctgctggagcctcagc

SEQ ID NO: 42908 - DNA, 122 bp, Homo sapiens
ggtccacttcctgcaggtaaggagcttccacaagggcagctctgaatcatcgggagtaatcgcccaaataaagagctaaggggcccgtttctcaggagaccatcggacgcctggactgcggc

SEQ ID NO: 42909 - DNA, 122 bp, Homo sapiens
ccagcttgagctgcaaatgaccaataggacaaatgatgtcatccagaggacccaaccacccggatctgagacacagtaagcctccatcatccacccagacatacgttaggaaactgaaagag

SEQ ID NO: 42910 - DNA, 122 bp, Homo sapiens
ggcaaaggtagacgcccacacagacaagaaacgaggaacttcggcctcatcgaagccgagcgtctggacgccgaagccttgagttccagagtgttggtctgtcctgagtcccaagctggtgg

SEQ ID NO: 42911 - DNA, 122 bp, Homo sapiens
ctgtgaggggttgacgaaagctccccccaccatccatcaaaggcggacagatgacttcaccgttgtaacagacaagggcagccacttgccaattccaatgccaaaaaaagaaaccggggggg

SEQ ID NO: 42912 - DNA, 122 bp, Homo sapiens
ttgcaacaagcaggtccttcataatcatctacacaaatcgtgaaagcttttcaaatgcttcgcaatacttcggcccagagactggaaacaatcaatatgttttcattgctgtttggttgctt

SEQ ID NO: 42913 - DNA, 122 bp, Homo sapiens
tggtcgacactcggttctctctggcagcctttttccctacgtcattccctagactgggaacgctgtagacagaaagggtggcaagtgtgtgggtgaccggcgtgaggacctgggcagccctg

SEQ ID NO: 42914 - DNA, 122 bp, Homo sapiens
gctgcaaagagcaggagccggagcgggaggagcgggaggaggaggaggaggaagtggctgcggagcgctcggccaatgagtgtctggagctgtgattaaccaggcagcaacacatcatttcc

SEQ ID NO: 42915 - DNA, 122 bp, Homo sapiens
cactgagttccaggtcaccagacgcactcaggatgagggtccctgccgctgaaggtcctgcgggagctggagagatgagtcgcggaggggagcagcagctgagccggccttgggtgcgcggg

SEQ ID NO: 42916 - DNA, 122 bp, Homo sapiens
gacgcagcagggctgggcacgccaccttcacgagagtaagagagaaggaacgggcttggacgcagcagggctgggcacgccaccttcacgagagtaagagagaagcaacgggcttggacgcg

SEQ ID NO: 42917 - DNA, 122 bp, Homo sapiens
tagttgtcgattttggcgcggtggcgctgggcgatacattcagcgatccacacgatgttgcgacactcctgctccttgagcttcacgaaggcatagaagacaccaaagtggaactggttcag

SEQ ID NO: 42918 - DNA, 122 bp, Homo sapiens
cctgcgcggccgcacagcctggacgcagcgcacgcgggcaccggcctgactctcccaccccgaagcctgctcccaacctaagtccgccctgactctcccagcctgaagcctgctcgccctcg

SEQ ID NO: 42919 - DNA, 122 bp, Homo sapiens
gggttgcggagttctttttggtacactcgaccctccagccagctgttcctacccgcgccacgggctctctagccacggagttgcatgcatggcccttgtcctggggtttcgttcaccgggcg

SEQ ID NO: 42920 - DNA, 122 bp, Homo sapiens
tccaaagtgcggaatcttaaacgtgccatggcaacaggtagtggcagtaacctcaggcttcgaaagtcagagatgcctgcagatccataccatgtcacgatctgtgaaatatggggagaaga

SEQ ID NO: 42921 - DNA, 122 bp, Homo sapiens
ctcaggtgatccgccagcctcagtctcccaaagtgctgggattacaggcatgagtcaccgcgcccggcaggttttcccaaattaaaggtcaccatgaggtcaaacaagccctggctcatgca

SEQ ID NO: 42922 - DNA, 122 bp, Homo sapiens
tttgactttattaaatctaggcaaaacaagcctcacgttaaagaataacacatatatgcacgtgggtaagtgtaactagaaaaggagaagaagaggaaagttattgtgtggacagcaaaaaa

SEQ ID NO: 42923 - DNA, 122 bp, Homo sapiens
accgccgagtggacctgctgtaaaccctgtgtgcgctgtgtgtgcgcccagtgcccgcttcgtaggacaccacctcacactcacttcccgcctctctttagtggctctttagagagaaactc

SEQ ID NO: 42924 - DNA, 122 bp, Homo sapiens
gcctcacgtagatgagattctcccgaaatcgccgccgcaggttctcgatgaaggcggcctcgctggtgaagttctccagcagcacgaaatcctgcacccccacccggtcacgggcggtgagc

SEQ ID NO: 42925 - DNA, 122 bp, Homo sapiens
gggcaggcggtgccggtggaggatgcgcgaggccctcccgccacgcgcatccacgggggccgcagggtactcacagttgaagtcgggcatcttaggcaggatcatgcccgcggtggacgcgc

SEQ ID NO: 42926 - DNA, 122 bp, Homo sapiens
cgctggtccttggctctgcagcggctgtaaagagaggcgggggtggggggggggtgggaccgaaccccttcctgggagagctgggggcgcctcggccacctgaccacagagcggtttttcga

SEQ ID NO: 42927 - DNA, 122 bp, Homo sapiens
ataatatacaatgtttattcattaacattaaactcacagccaatggcactacagcactcacgcctggagcttatttaatgcttgtattttctctgtaaggcacatcacagacttcttggact

SEQ ID NO: 42928 - DNA, 122 bp, Homo sapiens
atcagagcaaaaattagggaaaaagggggtctgggatttttcaggttggctataggattccggaagtgtctaatgccacatgattgctgcagctttaggggagacattcatgcctcaaatag

SEQ ID NO: 42929 - DNA, 122 bp, Homo sapiens
cgtgcacacccctccaggttctgtgtctcgtgatccctccgacctggacagtttgtccttcgttgtaggagtgtgagtgcagctcttgggcccagatgggtaggccggtgtaggaggagagg

SEQ ID NO: 42930 - DNA, 122 bp, Homo sapiens
tagtcaccaccaccccggccatcagtggagatttcccggaaaacagtgagcatggagtgccggactctgtcagccagagctgggacgtcatctggtgtcagcccttccgtgggcactggggg

SEQ ID NO: 42931 - DNA, 122 bp, Homo sapiens
gcgtcctcagtgtcttctggtccccttccctcccgagctacttgacctctgtgggacacccggagcacccgggccctgcgtgccatctttccgagcccggggctcccctcccccgcccctgt

SEQ ID NO: 42932 - DNA, 122 bp, Homo sapiens
cgggcggggacggggcggggccaatctaggggcgtgttcggggcggagatgggggcgggccgagggcgtgccccgggcggggatgtgggaggggctggctcggggcggggccgaaggcggtg

SEQ ID NO: 42933 - DNA, 122 bp, Homo sapiens
gagtaggggatcgactgcctcccggaggctgtcccggatccccgagccacaacccgcccccgcagctcaggggtttttcagtgggccacccccgctaacacgcctcccccaaggtcttcccc

SEQ ID NO: 42934 - DNA, 122 bp, Homo sapiens
caaaggcgcctttcttcacagtttgggaacttactggtagtaaacgccactccatagaagcggtgaccggttaccatagagaccgcgtcggggtgggcggagcgtcgcttctgagctgtgcc

SEQ ID NO: 42935 - DNA, 122 bp, Homo sapiens
aagggcaagagagctttaaagtttctctttgttcttgtcaacacactcctggttggtaggcgagaacagcaactggacaaatcatttcctggtctattaaaacttcctagatctcaaattag

SEQ ID NO: 42936 - DNA, 122 bp, Homo sapiens
atggacggcgagagcgaggtggatttttctagcaacagcataacccctttgtggcggaggcggtcgattcctcagccccaccaggttctgggccggagcaagccgaggccccagtcctacca

SEQ ID NO: 42937 - DNA, 122 bp, Homo sapiens
agggcggggcgcgggggtgtcacgagcaagcgggggcggggcggcgcagggggcggggcgcgcggcctcgcggagcccgcccctccctcccagcgcgaaatctgaaacaatctcggagacgg

SEQ ID NO: 42938 - DNA, 122 bp, Homo sapiens
cgcctaccggatccgaggtgcgtggcggggcgggtgggcacgcgggagcgggggtggcagcgggcaggtgggcacccccgccgacgccgtcccgtcccccaggccgcgacggagggttctgg

SEQ ID NO: 42939 - DNA, 122 bp, Homo sapiens
aaattgtttgaaaagtgaaaagcctcttctaagtatacaagcagggagagcattaggaatcgtaaattaaaaggacacaggtcctagcagagaagcaatgaagcattggggaagagggtttc

SEQ ID NO: 42940 - DNA, 122 bp, Homo sapiens
gtcgcagcggcggccattccccgcagcctcacttccggcaactgtcagtcccggcgagtccgttccccggagtggagctacaagtcccaaagggtcttcctcagcgcgaaatcgttcccaga

SEQ ID NO: 42941 - DNA, 122 bp, Homo sapiens
ccccgcctgcagccacgactgacccacgaggcacaccagggggccgcccgagtcgccctgcgggggacgcagagtcaccgtcagagcccaccttgagttcccagagactcagttgcagccgc

SEQ ID NO: 42942 - DNA, 122 bp, Homo sapiens
tccttcctcctcctctcacccacccctctccttccctggctccagtggatttcaggctcacgtgcaggctggaggggtctcacagtcgtagccatcaaacagacactcttcagagtcacact

SEQ ID NO: 42943 - DNA, 122 bp, Homo sapiens
aatacacaggcagtttcaatacatgaagatttgcacggaagaagtgtgtggcctgtggtccggccaccagctcacaaatgactggcccaacaatgaagccagaatcaacagccttcctgtta

SEQ ID NO: 42944 - DNA, 122 bp, Homo sapiens
gaagagggaatagcatagtgggccagtgtcaaggttaaaagacccttccaggtcctgaaacgtcagtccccagccctggcctcatgtctccttgggaagacagaaggaattgtgttgtaaag

SEQ ID NO: 42945 - DNA, 122 bp, Homo sapiens
gtccgtttcctaattgaacttaagtccaccaccatggtagagactgaattagcaaaaacccgcaacagtgcgtttttcctgtcaccactatccgtcacctctctcccattttgaggtcctcg

SEQ ID NO: 42946 - DNA, 122 bp, Homo sapiens
ctcctacgtcccaatccttttcttttcgggcgcaattagtgccaggtttgcaacagacgccgggactcggccgctccagcgactctacgcttcggggggtggggtggaggagggagttgcat

SEQ ID NO: 42947 - DNA, 122 bp, Homo sapiens
ctcagcgcaggccctggtggccggagacagggcagggcaggagcttcaggccacccgcaccggcagccctcaaggctgccttgatggaatcggacccagatggactctaagcggcctcctgc

SEQ ID NO: 42948 - DNA, 122 bp, Homo sapiens
ggcagaggttggaggtcatgacccaccaacacacgccggttgaaacttgagcgcaagggacggttgagattcccggaggacacgcccctatcggccccgccccgtgcaccgcctccgtcgcc

SEQ ID NO: 42949 - DNA, 122 bp, Homo sapiens
cgctcttcctggcattagaattctgagcaaccctcctagcaggcccagctcaagccgcagcggggaggaagagttcaaaggaagctgtgccaaagatctcgaaggcttagtgggagacccag

SEQ ID NO: 42950 - DNA, 122 bp, Homo sapiens
gcccaagaccacccagctaaggagtggcggaggtggggcccaaacgcgcgatccagccctcgcgcaggcgccctggaactccccgcgcgtgttgtgacccagaattcccggggctgtggaag

SEQ ID NO: 42951 - DNA, 122 bp, Homo sapiens
ctggaaatccgggcccccccagttcttccctgcttctctttttgtggcagccgctcctcacgttcaaacagattgcaaaggtttacaggggagaaccctaacttgttccctagacgtcagtt

SEQ ID NO: 42952 - DNA, 122 bp, Homo sapiens
aagagaagtgttggcgcctcaaacttgaggatcagcttcttgggccccactccagggtgtcgcgggggtcgggttctttccgccgccccccgaaagattctcagctaaccctttccccgccg

SEQ ID NO: 42953 - DNA, 122 bp, Homo sapiens
aacgcagcgcactctgcaggcttggggagggacttgcggcggaagaggccggctcggaggcgcgtgcgcgggggctctgcgctcgctgtccggaaacgcctcgtacctgttagccacctggt

SEQ ID NO: 42954 - DNA, 122 bp, Homo sapiens
cccctgcggccgagaactgagctgcccctctctgcggccaggattcctcgtgccaagaatcgcctgccttaaagtctggggaggggcctgcggcgggcgcccagcacctacgggcgagcacc

SEQ ID NO: 42955 - DNA, 122 bp, Homo sapiens
gcctcctgggttcaagtgattctcctgcctcagcctcccgagtagctgggattacaggcgcgcgccaccacgccggctaatttatatttttagtagaggcgggcgtttcaccatattggcca

SEQ ID NO: 42956 - DNA, 122 bp, Homo sapiens
taaagttctatatgccttgatgcagcaaatattgttggaagatgcatttaaaaatatcaccgcatatttggaaagactcatattagtataagttatacaatgtgggaggtttgctacacagt

SEQ ID NO: 42957 - DNA, 122 bp, Homo sapiens
cctcttgcacatgagtcagactctgtcactactgggctgcttgcccactcagcttaaaaccgtctggcacacctcccagcaagaacatggattctatttgaagaacaggaaaatatgtcaca

SEQ ID NO: 42958 - DNA, 122 bp, Homo sapiens
gctccttcaaccagcagctgcaggacagccttgagcccagctggggatgtctgagacaggcgggtgagaagctgacaggctgaggccacacctgggggtccatgcagcctcagagaggcaaa

SEQ ID NO: 42959 - DNA, 122 bp, Homo sapiens
taaggatagaggaaaaaaatgttgataggacatggagctcctaagactttacagagccctcgtactgctcatgtccagactttgaatacatgagaaaatcacccctcctcctgtttggttaa

SEQ ID NO: 42960 - DNA, 122 bp, Homo sapiens
cccttcgcaacaccttccctgattctttgagcagacacacccatctccgtgtccttatagcgtttaataactcttctttggcatcgaccatcctgaactatgattgttcacatgtctacttc

SEQ ID NO: 42961 - DNA, 122 bp, Homo sapiens
gctgtgcgcggcgctcgcgggccagggcaagttccgggtgggcaggggctcagcaggccccgcactcggagcggccgcctggcaccgccggcctcaggcagtgacgggcttagcacacgtgc

SEQ ID NO: 42962 - DNA, 122 bp, Homo sapiens
ctcgcgatcgcctaccttggccactttgggaatccgctgcttcccggccgcggtggaggccgccatgtctgcagcagtcgacctctggacacctgtccccggcacggacgctagaaatcggc

SEQ ID NO: 42963 - DNA, 122 bp, Homo sapiens
aagggttagggtgacccgggaagagcgagggcgagtgcatcgaaagtaaggatcgggcctcgctcctctgtggaccaagccagcctccagcagggcgcctgggagcccccattctgggcgat

SEQ ID NO: 42964 - DNA, 122 bp, Homo sapiens
ggggattcattgtattacaacaacgcgtacggagcgctcgatgcctactacaagcgctgccgtgctgcccggtcctatgaggcagtggcagctgcagctgcctccgtgtataattacgcaga

SEQ ID NO: 42965 - DNA, 122 bp, Homo sapiens
gaggagtggttcaaagtgtccacctgcactagaccccattggtgtttttgcagggcagaccgtggtgtgtttgcatactggggacagccactcctggctttctatttccaagcttctttgct

SEQ ID NO: 42966 - DNA, 122 bp, Homo sapiens
acaaggcacttgtacttgacactgaaaggctttaatcaccaggggctgtggcagtgactgcgggactctattgctgagaggaggaaagcatcggaggtcaagtgactctcccaacgtcaccc

SEQ ID NO: 42967 - DNA, 122 bp, Homo sapiens
agagggtaattttctccatctctaaatcctcctgaactcactgaaaaactcattaattcccgcagaacataaattattgcttttgagctggaagttttctcttcattaggaagcttactgcc

SEQ ID NO: 42968 - DNA, 122 bp, Homo sapiens
atgaggtcggcatggccaccctgcaggtgctgcagcgtgaggttgagctccaggagctgccgctccacctcctccttgttctcctccatgatcagagacttctccatcaggatcacgcgcag

SEQ ID NO: 42969 - DNA, 122 bp, Homo sapiens
tgaatctggttttgcaactttattatcgacactgcagaatttctgggaagatgaaatgagcgaacgtgtgtgtggaagtttctacctgcagcataaatagacatggtgctttcgtcttgcgc

SEQ ID NO: 42970 - DNA, 122 bp, Homo sapiens
cacagccttgcaccagaggcgtcacgagaatcaggaaaagttctcctctcatgccgaagacgggagggaaaccagagggactggtgagccttgagtcggccacaggtgtgtggaggatcgtg

SEQ ID NO: 42971 - DNA, 122 bp, Homo sapiens
tgcacacagcatggggcaacgtggattttgccttgcggggggcttctgcattaagttcttcgttctttaaaggacagtcttcacttctaagacccacctcatcatgagtgatgctttgttat

SEQ ID NO: 42972 - DNA, 122 bp, Homo sapiens
cgtggctcccggcccgggggctgcgcgccgatgatgtcagctccggccaatcgcaggcggcgacacacagcggccccgcctggcgtgaccgagactctccatcacggcccgcaccattggct

SEQ ID NO: 42973 - DNA, 122 bp, Homo sapiens
cggagcggaggcacaccaaagccaaaggacacgcagctggcctcaaagcagaagctgcatcggggctgggaagccattcaggagcccttttctctcccctcgccctcaccctgagccctggc

SEQ ID NO: 42974 - DNA, 122 bp, Homo sapiens
agtccttgcccacctaaaatccattttgccttcgttgtcactaaagccagaactcagttgcggtcttatttttgacttaagttttagaaaatattcatgtagtttagagtggaaaagttttt

SEQ ID NO: 42975 - DNA, 122 bp, Homo sapiens
ggtgattgtgatatagggcttctctaagccttagttctctaaaaggtgatatcggactggcgatatctgagtcttgggattgttgtgtgaattggtggtttattagaaatagcatgatttta

SEQ ID NO: 42976 - DNA, 122 bp, Homo sapiens
gatgccatcaacttctgctccttttaggactgtgagttatagaactagaaagtaggaaaacgcctctcctgggtatagattaaccatccatgaaggccaatcttttccaattacaaataaag

SEQ ID NO: 42977 - DNA, 122 bp, Homo sapiens
ggctgctggggcccattcccagtcgcagcttgagagccggactctcaggatcagatgcctcgcgggcaagggaaggaaccccagcaggactgccaacgcgaggcggaaggagagaaggccca

SEQ ID NO: 42978 - DNA, 122 bp, Homo sapiens
gcttttgttttctaactgcggcggcgaagggcgagacctcaatggcttttaaacgtcctgcgccgggacagcggtttctccagcggaacctgcaggcttggttcagaggctgtcccatagag

SEQ ID NO: 42979 - DNA, 122 bp, Homo sapiens
gcccccacagcagcccggggcagggtcaccctcgcgaccggggcggtcattgccgtattccgtcctgagctgccgctcccccacgatcctcccaccaatcccgggagggccgcgacgtccct

SEQ ID NO: 42980 - DNA, 122 bp, Homo sapiens
atccttcagctgactcatgctgggcctgcaggcatctggactgcaaagtcatttttcacacgtgctcctgggaaaccacatctcttcgtactttgtacttctgctgttgttttgttttcaca

SEQ ID NO: 42981 - DNA, 122 bp, Homo sapiens
gacagggcgacctcgcccacagtgagcgccgccggcggcccgcatccccctctccgacgtcgaggtcatctcccaaacctttgaatctgggaagccttctccggctgccgtctccccgggta

SEQ ID NO: 42982 - DNA, 122 bp, Homo sapiens
tgtatccatcctcacattgggtggagtgtgtgtttgtgtgtgtgtgcgcacatgcgcgtgcgtgtgcatgtgtatgtgcatgcaagcatgtgtccaattctccacttactatctctgagtca

SEQ ID NO: 42983 - DNA, 122 bp, Homo sapiens
ttctcccattatataggtcatctcttcattctgttgactgtttcccttgccacgcagaagcgtctcagtttgatataatgccatgtgtcggccgtacactgagctccacagaaacaacgcca

SEQ ID NO: 42984 - DNA, 122 bp, Homo sapiens
tgtacacactagctactccggaaacaactgcatgctctgctgggcatctcatacaggatacggtgtctttccggggctcacacacagtccccagttcagttccaaagttggaaggaaagagg

SEQ ID NO: 42985 - DNA, 122 bp, Homo sapiens
tggggctctgcgacccgggggcaggaacagagccttgcaggcggcagcgcgtcacaaaggcggccggagcttggcatttagcttgggccagagcaaggcgcagacccggggcgcccatggag

SEQ ID NO: 42986 - DNA, 122 bp, Homo sapiens
taggagccagaaccctactgtcaagtgcgcacgcgagggatctagggtgcgtgctccttacgagaatctaactaatccctaatgatctgagatggaagagtttcatcctgaaaccagccccc

SEQ ID NO: 42987 - DNA, 122 bp, Homo sapiens
atggatgtgacttcttccacaggggatgcgggagagaagggagacaaaggcgcccccggacggcctggaagagtcggccccacgggagaaaaaggtacctgcagccctgggccggccctcag

SEQ ID NO: 42988 - DNA, 122 bp, Homo sapiens
ctgccgccgccgcctcttcgtcgcctcagcctggcgttttgttccgagagacgggagaggcgagcggagctgacagtgattttgacagtgatttaaacccgcttttgttgttgttggctttt

SEQ ID NO: 42989 - DNA, 122 bp, Homo sapiens
caagccacatgtccgccatggactgggaactccctggcccacagccctcactgattatcccgacatccctcccagggccagcagcaagcctgggccccacacaagaggtgctcggtgaatgt

SEQ ID NO: 42990 - DNA, 122 bp, Homo sapiens
gggcaggagagggccgagggcccctgcagctggaggcagctggtggcccctgcgtgctcgcggccctgctgctgcttcgtcagaaatgacacgacatacctcactgcacctcctgaccttga

SEQ ID NO: 42991 - DNA, 122 bp, Homo sapiens
gcgcgttgcgcccactgtccgcctcgcagccctcgctgccccacggaacgcccgtcccagcggcctccacacgcccggccagcagctccacaccgcttctgggacccacgcccgctgcccgg

SEQ ID NO: 42992 - DNA, 122 bp, Homo sapiens
cagcagctcattccagtaaagaaacaatttattgggcatcttccatgtgcagaacaaacacgaggcaccggaagattccagaaatgaacacgagtcgctccgggtcctcagaagaaccccac

SEQ ID NO: 42993 - DNA, 122 bp, Homo sapiens
ccccactgccttctgcaacatctcatgtacacgctgggcttctttcctgcgctgattagacggggggtgagccaatgagtgaggggtaagggtgaacctacctctgcacactgatttgtatc

SEQ ID NO: 42994 - DNA, 122 bp, Homo sapiens
aggaataccatatctagaaatacacctttgatattcatagtgtacctgagaatggtttcacgcataattttaggtaaactgccttagtcactctggttttacggatctttgcccacagttcc

SEQ ID NO: 42995 - DNA, 122 bp, Homo sapiens
gaaatccccagtggggagtgcctatgagcaaggcattcactttattttccattctggagccgctgttcagaggatatttgtctctgttgggcccagaagaaagaagttcgccccatagtaag

SEQ ID NO: 42996 - DNA, 122 bp, Homo sapiens
ttagccaggccacgtatagtaacagtagatgatgcttaatgtgccagatgctattctaaccgtattaacatattaaaaatccttacaagagccctgtgtgttaggaacagtgctttggggtc

SEQ ID NO: 42997 - DNA, 122 bp, Homo sapiens
gaatgttcataactatggctagttccatggcacagttacagaagcagcatcagaaacgatcgattggttttggcaccgctcacctggaagacaggctctagctgactaaatttctatgcatt

SEQ ID NO: 42998 - DNA, 122 bp, Homo sapiens
gctgctggagaggggacaggtcctcctgggatccatcacccctgcagaatctgcctgcagcgctgcagcccccactgcccccagagctgccctcatgccctggcaccataagctgactcggg

SEQ ID NO: 42999 - DNA, 122 bp, Homo sapiens
tgtggatgtggggccctggctttgctgctgctaagggcagattggcttgacattgccgcacgtgtggggtagacacctggctggcgctgtggagaatctggcctgctactgtttcaggcata

SEQ ID NO: 43000 - DNA, 122 bp, Homo sapiens
tctcttctaggctcaggaccctatgggattgcacaggtcgcagcccaagcgcagtacttgcgcacaggtcccagccccttccctctctgggacttgtcttctggcccctcactcctgcgatg

SEQ ID NO: 43001 - DNA, 122 bp, Homo sapiens
taaatactaccaccataccattttcacatgtaacagaattaatttctctcatctaatagccgatgaacaaatttccctgagatgtttgtattcaactgaggattcaaatacagtccagacat

SEQ ID NO: 43002 - DNA, 122 bp, Homo sapiens
tatttttagtagacagggggtttcaccatgttggccaggctggtcttgaactcctgacctcgtgatccgcccgactcggcctcctaaacttttgcaaagctgtatctctaggaattgaattg

SEQ ID NO: 43003 - DNA, 122 bp, Homo sapiens
agcccggcgtaggagctggcaccactagagaagggctcgcatagctggactgagaccccccgccctcgcctggctttggacgttcagccaagccacggcaaccccggcgaccctgggttcct

SEQ ID NO: 43004 - DNA, 122 bp, Homo sapiens
cgcagaccagggcttatagtctctcgatgcggacctgtttgaaaacatcaaaaaagtgggcggagctctaggccccacctctggagacatgctatagttgttaagtccaggaagcagtcagc

SEQ ID NO: 43005 - DNA, 122 bp, Homo sapiens
ctacctctcacccctggaaccgcctccctcccccggcttccctctccgtccgccccagcccgggcagcttcattaagggcctccgccagctctgcagctcacctgctgcagcgcccctcgcg

SEQ ID NO: 43006 - DNA, 122 bp, Homo sapiens
ctgattgctgagactcagtatttcattctgtaacattttctgaagaagactttaactcaccgaggggagttgacccttcaaaggcccttctttagcacaagccgccaagctaccttttccgc

SEQ ID NO: 43007 - DNA, 122 bp, Homo sapiens
tcccaaacatgctttactggaacttacgccctggcataagggccacaacaaaagagagagcgaattctctggcttgctgactccttggaaaaaaccggtagggatttttttattaggcaaag

SEQ ID NO: 43008 - DNA, 122 bp, Homo sapiens
gccccaggtgagacagcgggagaggaagcgagggccccaacagcgtgagccagacgcggacgcctgggctccacagagaagaaacagccggactggaggcctgcctgtccctctgtacctta

SEQ ID NO: 43009 - DNA, 122 bp, Homo sapiens
acagacaaacaacaatggcacaaaacgaatcggattctagcctgctaccaaggctaaaagcgaagggctgtggggacccagccggcaacactccccagagcccacgtgctgcgttaagggca

SEQ ID NO: 43010 - DNA, 122 bp, Homo sapiens
gttgagaagaagctctcaagcagtcttgcttgactagatatttaagttggctagtcagctcggtcagagtacattctaacaacccaacacctgtgacccagcatgctgaggggcccggcaga

SEQ ID NO: 43011 - DNA, 122 bp, Homo sapiens
ctcctcccagaaacggaaaatggcctccccttcctacagctactgcaacgacagacaatccgccccggaaggcgaggcgctaactcaacagtacttccggggcaagtgagcgcccacaaggc

SEQ ID NO: 43012 - DNA, 122 bp, Homo sapiens
ttaaagaatgacttaatcataccttgtcaatgatttaataacatgcttatgaaatgcagccgccataataacccaaaaggacaaagtttggagagcattcatgttgttgaacacatagaggt

SEQ ID NO: 43013 - DNA, 122 bp, Homo sapiens
cgctccgatgtggggaccgcagcaaccctccccacagcctgctgcattctggacggcgcccgtccctggtcgacagacggagcagtggccatgcccagtccaaggccagaagcactgggggg

SEQ ID NO: 43014 - DNA, 122 bp, Homo sapiens
ggtgtgaagtgaactgagctgggagaggcctgcacaggaccttgtacacactagctactccggaaacaactgcatgctctgctgggcatctcatacaggatacggtgtctttccggggctca

SEQ ID NO: 43015 - DNA, 122 bp, Homo sapiens
gcgggcagtctgctctctagaactggacagcgtgcacagagccacgggagggagcagccacggccagctcagattggtgtcgacagcttagtggtgtctgattttatacatgacaaaatgaa

SEQ ID NO: 43016 - DNA, 122 bp, Homo sapiens
taaagggctcaccgtgcgtccgttttatgccgtaattatgtgcacaaataattgcatggccggcgtcgcgtgagacgcgggaaggaccggggagcggcagaaccagggcttccaattcccgt

SEQ ID NO: 43017 - DNA, 122 bp, Homo sapiens
gtggacctgagtgagcgtgcagggccgcgagaggatgtgcagggggtgcaggactgtgtgcggggctggagcgagtgtgcgggccgcagaagagtgcacggtggagggagggggcgtctctg

SEQ ID NO: 43018 - DNA, 122 bp, Homo sapiens
caaggcctggctccgccccccagaagccagctaggccaaccttggccttgactttgacctcggaaaggagacctgcccaaccagctcctttggtaaatacaacttttgctccctccttttcc

SEQ ID NO: 43019 - DNA, 122 bp, Homo sapiens
tgtagtacttgcagctctatgtccaagtgacaaatctgccttccagaaatctgatttttgcggtgggggaggacaactacatagcgtggtgcttaacatgttgataaatgttcaaaagaagt

SEQ ID NO: 43020 - DNA, 122 bp, Homo sapiens
ggaggcagaagaccagacacattggtctcaagggacaggggctgagatgactcacatcagcgccattgggtccagctggacctcgaggtcctggggggccaggtggtccctgggggaaacag

SEQ ID NO: 43021 - DNA, 122 bp, Homo sapiens
ccccaaggccagacagctctacctccttagactgccatagcccctcggatgctggcccttcgtgacctagtgctctgtctttggtttgtgcagctgcctgccctgtcctgtgcagtgggaat

SEQ ID NO: 43022 - DNA, 122 bp, Homo sapiens
ggaggaagagtgctacaattaaggtaatagaaatgtcttttctttcctttccctccatgccgtctccccgcaaagaatttcctaagattttgatggattcttatagaaattgtacaagccta

SEQ ID NO: 43023 - DNA, 122 bp, Homo sapiens
ctctacccagagggagcctcggacagcagcagaaaaggcacaggctttcagagtcagacgcgtgttcaaattccaggactggcacttgccagcgtggagactcgacaaaatacggaggtttc

SEQ ID NO: 43024 - DNA, 122 bp, Homo sapiens
gtcatacttcaaaccagctccctccagtgctggagggggttcgattcctgtggtctccctcgaggctgccatgtcaggtgtttgccgctacatcagcatccccagaagtgaatccgaaagga

SEQ ID NO: 43025 - DNA, 122 bp, Homo sapiens
gtatgatactgtaatggtggatacctgtccttatacatttgtcccaacccatagattccacggcaccaagagtgaatcctaaactatggacttcaggtgataatgatgggttcatcaattat

SEQ ID NO: 43026 - DNA, 122 bp, Homo sapiens
tcagtggcattaagaacactcacattgttgtgcaggcatcaccactatccatctctgggacgctttctcatcttcccaaacagaaactctacacccttgaaacactaactccccagccccag

SEQ ID NO: 43027 - DNA, 122 bp, Homo sapiens
aaaataaggttgacagaaagatggatgtgccaaggagggggacaggttggagcaaagatccgaaggtgagagggcccactcctcatgaaaaagtttatttaaagaatatggagttagaggga

SEQ ID NO: 43028 - DNA, 122 bp, Homo sapiens
cactccagtctgggccacagagcaagactctgtctcaaaaaaagcaaaaaacaaaaaaaccggacaaaccaaccatgcagtcttcataacatgcctgggagcatgttggcacacagtagatg

SEQ ID NO: 43029 - DNA, 122 bp, Homo sapiens
catttttagttgcagtcctgacccaaccacctcacaaatgtgggctttgagtttgtattgcgagttctcagcatggaatcaagaaacacaaaaaggggctgggagcgtcaggaccaccagag

SEQ ID NO: 43030 - DNA, 122 bp, Homo sapiens
tcaaagttacggtgcaggtgactgaggacagctgttgcgagcgctgcttcttggttcccccggaatgggaggcatcacgtgcggcttccaggaggccacctcagggaggatcgtgtttccat

SEQ ID NO: 43031 - DNA, 122 bp, Homo sapiens
aaaaaatgttgtgatgattaaatgagtctgtcgtggaaggaaccgtgtcttggcaggagccgggcggacacccagacaccaacccgaagggggttgggacaaaggggagggacgcccgggaa

SEQ ID NO: 43032 - DNA, 122 bp, Homo sapiens
cggtgcaagggcctctttcaaaatgaacccactggtgtgcctagcagtcggtagaagaagcgggagggcgtccggtctgcacgcccgccgcgaggttacaatgctgaacgcatgagatggaa

SEQ ID NO: 43033 - DNA, 122 bp, Homo sapiens
cagatctatggagcctggaagcacatcccacatagaaaacatgcagtcagatggaaagaacgaatgagagctatggttgacatgaatatctggcttgctttcttttcatgtaatttgggaac

SEQ ID NO: 43034 - DNA, 122 bp, Homo sapiens
agtagcttatgagctctcgacaatattacccaacaatggtgatggcagaaaaaacattcacggtcattttagagtgcttaaaattaactgcaagacaaaagcatccatgggagtaaaatacc

SEQ ID NO: 43035 - DNA, 122 bp, Homo sapiens
cagggggtgtgcagatgacaccagctgccaggacaagccttgctgtaaggatgcaggatgcgaatgggagaggcaccaagggccgcagagaaggagccgtgctgcactgggctgccgtgaag

SEQ ID NO: 43036 - DNA, 122 bp, Homo sapiens
cctgggctatcggcatgaaagtgcagccatctgggttctggggcaggcctgggatcctgccgcaggacactgaggtccacggcgccgaagcggcagcttggggcatgtgcctggccgcccgc

SEQ ID NO: 43037 - DNA, 122 bp, Homo sapiens
ggctctactccacacaagctgtgccacatgaaggacgccctctggtgccagaattattctcgggggggcccagaaccagttactataccttgaactcatgccaatgagctgggcacactttt

SEQ ID NO: 43038 - DNA, 122 bp, Homo sapiens
tgacaaggtgaagcaagtcacgtgatcgtagaacaggggggcccttccctcttaggtagccgaagctgagagagagaaggcagcatacgtcagcgttttcttctatgcacttataagaaaga

SEQ ID NO: 43039 - DNA, 122 bp, Homo sapiens
gcccggagcgagaaaggcctgggtgaagtcaccgtatgttcgggaccttagagtatgaggcgggggagggtccgatcgcttgcaggagaggcgtgtgtttggccttgaggcgctgcacggga

SEQ ID NO: 43040 - DNA, 122 bp, Homo sapiens
atcttggcctctcctgctgaatcagagcgcgctgcttaacacgctcccgggtgactcgtacgtagtcagtgctgggaagcgctggtctacagtcatgtttctcaagcttgaatgcacatccg

SEQ ID NO: 43041 - DNA, 122 bp, Homo sapiens
tttgcctagctagaagacagggatcctatttggaaaggactgacaacttgtccagagcctcggtcttaagttccaaaattttctggggttcaaggacccccttgggatggtaaccagtggga

SEQ ID NO: 43042 - DNA, 122 bp, Homo sapiens
tctttctaccctccttttcctcttacatccctgctttgcctagaggacatctacaagaatcgtcatgtacattcttttctcctgttgttagcttttttcccctgacacttcatctatttact

SEQ ID NO: 43043 - DNA, 122 bp, Homo sapiens
ataatcagaacatctcttttagaaatctctaaataaaaaagaaatcttacgcttagagtccgtgaatggtcttgagtaaaattctgtataaaatttttgtctgtgtgcctgtgtcatccaac

SEQ ID NO: 43044 - DNA, 122 bp, Homo sapiens
gttcccgtgaatccttgcgctcacgtgaaccacctgtgttcccgtgagcctgtgcgttcccgtgaatccctgcattcccgtgaggacctgcgttctcaggagcctctgcgttctcgttagcc

SEQ ID NO: 43045 - DNA, 122 bp, Homo sapiens
cccggacacacccagccagaaggaggaggccgaccccgcgccgactccgcagatgccgctcgggacttcgttgtccctccaggcgcccgccctggggtcctccatcacccgccgtcacctgg

SEQ ID NO: 43046 - DNA, 122 bp, Homo sapiens
ccgcgaagctctcttgcaccgggctttttcgcctggtgattgatgtcccagagtcaacagcgagcgagcagccggagcggggaagcagaagccagagaggggaagaatacggcgccccctct

SEQ ID NO: 43047 - DNA, 122 bp, Homo sapiens
tgccccgcagcgggtgaaggtggtcccgccccaggccggatctggccacagggctggcggcgcgctggaaaaccgcccacgtgggaagaagccctggctgcatttccgccctggactgcgct

SEQ ID NO: 43048 - DNA, 122 bp, Homo sapiens
gagtgaagctattaaaacgtaagggaacaagcccggctagttcccctgctgacccgagggcgcgggcggtcccggcaggccccgcgacgcagccaacggccgggacgtgcgcgcatgcgcgc

SEQ ID NO: 43049 - DNA, 122 bp, Homo sapiens
cccggcctattcttattctttaaactcatataatgctcctcatttgttttattttacaagcgaggaaactgaggcccagagaaggggaagaacttgctgtgggtcggcacttgcagaactca

SEQ ID NO: 43050 - DNA, 122 bp, Homo sapiens
aagttcatgcaggcgttggggctgagctagcgagccaagagctttgacctcctctgtacacgccctctagcgggcggcagagagaagacacctcgctggcgggattaggagggcaagggagg

SEQ ID NO: 43051 - DNA, 122 bp, Homo sapiens
acatatggaaaaactgaggcccaaagagactaagtaccttctctgaggttccattcttgccgcaaaagatggtttcatcaggcattttatcaaaggcacacagggctggcctccagttgggg

SEQ ID NO: 43052 - DNA, 122 bp, Homo sapiens
aataaatgaataatttataaacctttttctttccttttttttttcatatcaccaggtgaccgatattccagagtggtatttacttcatctggaggggagacattatggaatttacctgcaat

SEQ ID NO: 43053 - DNA, 122 bp, Homo sapiens
ccccagggcgaggaagcagagcagccctagcgggcccggcattgctgcggccgcctcccgcgccggcctctcccgcggcgctgctcgctccgctgccctccgatgtcccccgccgcccccgg

SEQ ID NO: 43054 - DNA, 122 bp, Homo sapiens
acttaacaatcacttgagttctttccactttcttgttttcccccaagctcctgcaagggacgattagctctccattctggtagccatgtgacaatgttgttggactgcaggctcagatccta

SEQ ID NO: 43055 - DNA, 122 bp, Homo sapiens
ctgtgctccgcgacggcgcatgcccgcttttgcgcaggcgcggggactacggcgcaggcgcggagactattgcgcaggcaagcgcgtacgcagaagcgtgcgcgcgcccgttcaacgtccgg

SEQ ID NO: 43056 - DNA, 122 bp, Homo sapiens
ctcaccctagacctaacagatgctctcatgagcactcttcaaactcagaaatttcccttacgtcatcacgagccgaagatttctaattaaagtatgtcaagatgaagtggacttaattgaca

SEQ ID NO: 43057 - DNA, 122 bp, Homo sapiens
ggccccccgtgaatggaagagcctgggccacgcgaaggtggaccccactcagcctccagccgtgccctccacgccccagacaccgccgtcttcggaggcgactccgcggtcgtgtggacggg

SEQ ID NO: 43058 - DNA, 122 bp, Homo sapiens
acgtgatgtttaccgggggccagtcacgagtctgaccacttttcacctggggactcacttcgcccacccaacacacacagtgcacagctgaactgtgtccctctaagataagttgaagcgca

SEQ ID NO: 43059 - DNA, 122 bp, Homo sapiens
agacacacacctcacgctgcccagggagtgtcccaaagcagtgtggcgggtacctggggccgaagccagggtgaccggttctgccttggttgtgggggctgtgccaaagggtaggtgcttct

SEQ ID NO: 43060 - DNA, 122 bp, Homo sapiens
atctgggccatgagaggaagacttgcccccggccaacaagtatccgagagctggaaaggccgcgtgagcaaacagacaaaacctgcactcgcctcccttaaattgaggggaaatcctggaga

SEQ ID NO: 43061 - DNA, 122 bp, Homo sapiens
aaaggagacccaaaaaagcgggggaagggcgggcaaaggtgaagttggaccctcctccttcggcctcaggctggaagtccctgccacaaaaaccgaatgtcccttccgggaagggccccggt

SEQ ID NO: 43062 - DNA, 122 bp, Homo sapiens
aagtggcagctgagtgaggccttgaagcgcttgaagtcgtccagcaccaggttgtccacgcggtcgtggtgctgcgcgtgcttgtacatgtgcgtgcgcccgcagaacttgtagccgcagtt

SEQ ID NO: 43063 - DNA, 122 bp, Homo sapiens
tgcggcgcagggggccgtctgccgccaccaccgccgccgcggcggccagggccgggctctcgcacggcggctgcatcttgacggagcccacggccatcctcatgccctgacggcgctgcggc

SEQ ID NO: 43064 - DNA, 122 bp, Homo sapiens
accttcctaccctccccctcacactttctgtcttcaggctgggtaagggccagagagcctcgggaggaaggaaagcaaagagcctgaaactgagcgctcccttttgggcccgtgtctttttt

SEQ ID NO: 43065 - DNA, 122 bp, Homo sapiens
tgggaactgtagtccatcaacttcatggaatggcggaccctttggctcaagcagttgaaccggggaattctgggaagtggagtccagacgctctgtggagacgcgagcacttccggtgtgtg

SEQ ID NO: 43066 - DNA, 122 bp, Homo sapiens
ctttcctccctgtccattttgctgatgcactcatgttgcagactagcccagcaaccgccacgtccacacccactctgacttggcaaaggaacatttgggaaaccccctttccatatttaacc

SEQ ID NO: 43067 - DNA, 122 bp, Homo sapiens
gacatgatgtccagctaacaagaacaacagcatgcaatagtcactttatttctttgtatccgaacagatagtgtcacctcacactgcaaaacagctcctcaaaaactatcaagaaacagatg

SEQ ID NO: 43068 - DNA, 122 bp, Homo sapiens
tttttttaggacaaagcaaggagacagccacagaagagatgacactgtggtgaaattttccgagagaaaggagaagagctagtgtcacagagcaggagggtgttttaagaagaagaggcaga

SEQ ID NO: 43069 - DNA, 122 bp, Homo sapiens
aaaaagcatttcctgtgaggatgaagtgattaccccaggtcacctggccacattcctctccgggagctggtggccacaccacctggccgcccctccactagcgccgcgctccgaggtcacgc

SEQ ID NO: 43070 - DNA, 122 bp, Homo sapiens
ccggagcccgtgggaatccccctagaggcgggaggaaggccgggcgggccctggagggtacgtttgcagtggcagcagctccctatctttatggttccggcgatcagagaaggcggcccgtc

SEQ ID NO: 43071 - DNA, 122 bp, Homo sapiens
gtgtggtgcggctctgcgtccccacccaaacctcacatggaaatggagtctgcagtgtgacggtggggcctggtggggagtgactgggtagcaggggcggatttctcgtgaatggcttggcc

SEQ ID NO: 43072 - DNA, 122 bp, Homo sapiens
aagtcatgcctaggtctaacctactcttcttcccatgctcttcttctcccatgctccccacgtagcacaaaagaggctgtactgaattagacattttgctggaatgcctctcaaagatgctc

SEQ ID NO: 43073 - DNA, 122 bp, Homo sapiens
ccccgaaacgagaaagccctttcaatataccccacgtaggtttaagagtggggttgtgggcgttgccccagggcgaagggagggggcctgtcgggaagacaaaggagtcgcaggtgcgggga

SEQ ID NO: 43074 - DNA, 122 bp, Homo sapiens
taacaaaatgaaggcactcattgcagcactgcttttgatcacattgcagtattcgtgtgccgtgagtcccactgactgcagtgctgttgagccggaggctgagaaagctctagacctgatca

SEQ ID NO: 43075 - DNA, 122 bp, Homo sapiens
ttgcaagtttggagctttgtttgtatgtatatattttaaataaatttgataattaagtcacgaatgctcccagcacacttggatatatttaaattacaggcttctgatcaaatggagaaaaa

SEQ ID NO: 43076 - DNA, 122 bp, Homo sapiens
gtccggctctgcaccctctggctacctgagtggggtgctgggtagaccttcgctgttacccgggatcagaggacagagggacctgatgagcccaagagagcatggcaggcttctctcaccag

SEQ ID NO: 43077 - DNA, 122 bp, Homo sapiens
ggccaaggggcggggccagcgccggccacggggggcggggccttgaggcaggggcggggccgcggcggggggcggggacccctcggggggcgccccggaggggagctgggcgtcgcaggacc

SEQ ID NO: 43078 - DNA, 122 bp, Homo sapiens
aactgatttgagttggttactgtgagatattgtcacaggttccagacaggccataatgcacgcatgcattcacttacttattcagctcatggtacatttagaaactctaggttcatgtttaa

SEQ ID NO: 43079 - DNA, 122 bp, Homo sapiens
tcaagggcaggaagcagatgttttcacacttggaccaaggctgagggagaagaggtggtgcgacactcaaagtctcaccgttgcctctaataagaaggaggcagatccacacagggcaggag

SEQ ID NO: 43080 - DNA, 122 bp, Homo sapiens
agagcggcggccgggagaaaaactagtgaggctctgacaacccggcgtggctgtcggcgacgctgctacgggcaagactagacacaagccgggcgcggtggctcacgcctgtaatcccagca

SEQ ID NO: 43081 - DNA, 122 bp, Homo sapiens
caggccgtgtggagctggggatgtaggagtggccagtgcccggtgtccacggggtgcgagcggggacccgccatctggggaggcaaaccacagagctgctcacagggcgaagagggcatcct

SEQ ID NO: 43082 - DNA, 122 bp, Homo sapiens
gctgtaagacgatagcatgaagcaacacatcttttcaggatgaggtagcagctccagccccgggggaagggagccggggcatcactcgactgcaactactttggacgactgagcaacatgaa

SEQ ID NO: 43083 - DNA, 122 bp, Homo sapiens
agtttcccaatcaggtagtgagagtggcacgaaccagccgttctcctgagccaccccccgcgcccccggactcctcaatatcccaggtgggaacgctcaccagggacatccagcgcccgtcg

SEQ ID NO: 43084 - DNA, 122 bp, Homo sapiens
ttaagttagattccccgccccggccttctcctccacccccgccttctctccccccgcccccgcccccactgttaacactgttaaggaagctagggaagtgttgataagttttcaaaagactt

SEQ ID NO: 43085 - DNA, 122 bp, Homo sapiens
cgtggcctcgcacaggctgctcaacacctctgagctcaaattcctgctcccagggggaagcgggttatgaagatgagagggagagagagcgagctgtaagggaagcaggtgacacggggctg

SEQ ID NO: 43086 - DNA, 122 bp, Homo sapiens
tgacgggtctcagggggcctaggattggaaggaccccatcatctgggatgagggtctccacgtgttataagggaaaggaggcaggggtgaggggctcggcagcccctccctgctgcctggga

SEQ ID NO: 43087 - DNA, 122 bp, Homo sapiens
ggcaggactcccagaaacgcaggaagcgatgacgctgctcagataaaccctggcgctctgcgctggcgtcctggtcaggagctcctctgccacggacgcgcctgccgtttctgccttcgtta

SEQ ID NO: 43088 - DNA, 122 bp, Homo sapiens
tggcccgggtgctaagttccccattgcctggggccagcagggctggctggctgctctgagcgcggggcccaccaagcccacgcccacccggaactccagctggcccgcaagcgccgcacgca

SEQ ID NO: 43089 - DNA, 122 bp, Homo sapiens
actccggggaaagttttaggacttactgaaggtcagagtggaagatcagcccagagggaccgctgcagagacggagaagtgtcactaagatttaggcgagctttactgaagccccacatgtg

SEQ ID NO: 43090 - DNA, 122 bp, Homo sapiens
tccataatcatgtcatctgtcattccaaatgtcacatgcaggatgtttcgaaatgcattacgatccagtccaacaaccagaccttgcctctctactcctcccaccaagtcataaaaaagctt

SEQ ID NO: 43091 - DNA, 122 bp, Homo sapiens
ccgctcctctgagtaagcgctccttcagcgacagagctggcgcctcacgtatgcttgcggcgtaaggctacaggtgagcctggcctgagcatcagttctgttctttgcttcaagatcaccaa

SEQ ID NO: 43092 - DNA, 122 bp, Homo sapiens
ccgcctcccgggttcaagctattctcctgccgcagcctcccaggtagctgggattatagacgtgtgccaccacccacggcaaatttttgtgtttttagttgagacggggtttcgccatattg

SEQ ID NO: 43093 - DNA, 122 bp, Homo sapiens
aggaaacaaagccctctgcgggaggcttgcgcttgtctttggcccccagagttcctggggcgcgtgcccgagcgctgtaccgtcccctcagctgattggctgacaggatttccaggcctcag

SEQ ID NO: 43094 - DNA, 122 bp, Homo sapiens
ctgacattgaagttgaacaggatgggggtggggtgaacagacactgcccaaaaaatgagacgtgctaagtagcgcattctgtcctttgttaatccaggtgtgcatctactatggtagcaaaa

SEQ ID NO: 43095 - DNA, 122 bp, Homo sapiens
cggagcaggggacggcaccccttggggaggctcaggccgcagtgggagcacaccacagtgcggctcgggcatggcaggctgcaggtccccagccctgccccgcgtgaaggcagctgaggctg

SEQ ID NO: 43096 - DNA, 122 bp, Homo sapiens
taatagacaaatacacacagaataaaataacacaataatactctgttactctctgttgatcgaatcccataagaactattatattcagttataagcatcattcttaaaaaagaacactgtca

SEQ ID NO: 43097 - DNA, 122 bp, Homo sapiens
tttttcagcttctcttcctcaaagagacaaagctgttcctgaaatgaatgggcacatgtacgttgatgatgtatgttggctggccaagtgaaagagagtctcacctgcccattcaggatatg

SEQ ID NO: 43098 - DNA, 122 bp, Homo sapiens
atgtcccgtctgtaaaatgcccgacacgtggggctttcgtcagtagattccccttccccacgagccaaagtcctccagccagttggcagggagcgctcctatcttaaacactttttttttga

SEQ ID NO: 43099 - DNA, 122 bp, Homo sapiens
ggagcctgtgcaggcagcaggcagtgtcctccgtgagattggacagaggattcagtgggccgtgcctcacgctgcttctcagtaagagctgagggtgtgctctggagcctggcctgggttct

SEQ ID NO: 43100 - DNA, 122 bp, Homo sapiens
ctcctacagagcagagtggacacttacctcacccactaatttagcaagcagtgccacacacgccagtactaaaactgtggtcacaacatatataggcaatgctcagccactgctccacctca

SEQ ID NO: 43101 - DNA, 122 bp, Homo sapiens
ccggcacgggcggcgggcggcggcgcgggcgccccttggcggccgtgctcctcgatctgtcgctccagatgcttctggatggccatgcccagcacctccacctccatggcggcgccgtatac

SEQ ID NO: 43102 - DNA, 122 bp, Homo sapiens
cagcagtgcaggccgtgagtccggctgtggcccaagatacagcccgaggaccagcagatgcgagagtgaggaggcgaggcccgcgacggcggcgtcccgcatgcccaagggcagcatggcat

SEQ ID NO: 43103 - DNA, 122 bp, Homo sapiens
gtgaggcagaattgcttgagcccaggggtttgaggctgcagcagtgagcaagcattgtaccgctgtactctgtactccagcctggatgatagagtaatactctccctctctctctcaaaaga

SEQ ID NO: 43104 - DNA, 122 bp, Homo sapiens
aggggcggggccagcccgcgcctcgcctagcccgcctggctcagcaccccgagagctggccgactgccctccaggtgatttttatgcccactaaagtctgagcagcattggcctaggacaca

SEQ ID NO: 43105 - DNA, 122 bp, Homo sapiens
gcgtccctccagcaaccggcgagtgctggggcacaggccatacccccctaagctcggcatcgcctgcacctctcacaggtgctctgtccgccacagtaacgcactatggaaaggaaagttgt

SEQ ID NO: 43106 - DNA, 122 bp, Homo sapiens
gcttgtaccacatcagacagtcccctgttaaaactgttttcacggggctgtgatttgttgcgatacccttggctgcttaaaggctgctacaaaaaggcatatgattaaaattgctgttgtac

SEQ ID NO: 43107 - DNA, 122 bp, Homo sapiens
aaagaaagttgggtttggactacattcgttttcagattcaaaggtgattactaaaccaaacgggatgcatcaaaacatggcattgcttggattgtatggttttttgacatgtgccaatgtct

SEQ ID NO: 43108 - DNA, 122 bp, Homo sapiens
gaacactgcatgcatacagcgtgcgcccgcgacagtaaactaaaatctgctctaaaaactcggccttttctttgatgtgagggagaaaagaaatgaaaaatgtaaagtgcatcgaaggcaca

SEQ ID NO: 43109 - DNA, 122 bp, Homo sapiens
gaagacattaaaatcaattttaaaaagcggcagcctcgggccgtccacatgacgaggggccgcccaagccagtgtggaatcaccagggtgtcggccaccaccaggaccaccggcctaaggcc

SEQ ID NO: 43110 - DNA, 122 bp, Homo sapiens
cgtggatggggtggcagcgactcctactgctgcctcggcctcctgccagtacaggtgcatcgaatgcaaccaggaggccaaagagttgtaccgagactataaccacggtgtgctgaagataa

SEQ ID NO: 43111 - DNA, 122 bp, Homo sapiens
tttgaggcggcctgggaggggcctcgtttttaaatctctcctacacccgccccttctgcccggggatggtagtttctcagagtcaacctattggcattatgtggcaaattagtcatgccctg

SEQ ID NO: 43112 - DNA, 122 bp, Homo sapiens
cagtaggattactgcactaattcccaagagctgctgaagtatgaggctgactttgctcctcggttttgttatcagccttagttaaggtgtttgagagaaacagatacttaaaatgtgtgatt

SEQ ID NO: 43113 - DNA, 122 bp, Homo sapiens
tgaagcccgaacccacctgaggacggcagtgaggatgagcacctctagcagcctggactccgcagtggctgtgtcagcctcacccttcgtgtgcacccgcatgggagggtcggagggtgctg

SEQ ID NO: 43114 - DNA, 122 bp, Homo sapiens
tacacaactcttgatatccatcaataaagaataattcccataagcccatcatgtagtgaccgactatttttcagtgacaaaaaaaaagtctttaaaaatagaagtaaaagtctaaagtcatc

SEQ ID NO: 43115 - DNA, 122 bp, Homo sapiens
cctgctgacctcggtgctcctggatgagacacagtggcagaccccaggccagttcaaccccggccatttcctggacgcgaatgggcactttgtgaagcgggaggccttcctgcctttctctg

SEQ ID NO: 43116 - DNA, 122 bp, Homo sapiens
atctcctccccggcctggggacttgtttcaaaaccggattcccccacccctcaaacacaccgtcctaccccagtcctagcaaatccagccggctccgggggccgcatcccgggccctggggg

SEQ ID NO: 43117 - DNA, 122 bp, Homo sapiens
ccctccccaccgacatcatgctccagttcctggtgagtggagctgccgaagagcggggcccgctgcctggggcgtgcctcggaccccatttcccccttgaggattgccgaccccgccgaccc

SEQ ID NO: 43118 - DNA, 122 bp, Homo sapiens
gcagaactaggaagtggagctggaaacgagaatgtgcagctcactctccctgttcgggaacgggatgtgtgtgtatcagtgacgtccaaggcataggggagccagcgacgggtgggcctcgt

SEQ ID NO: 43119 - DNA, 122 bp, Homo sapiens
gcgccccgtcccaccttccccacacggggcatgtaatgaaggggcttgtagaagcgcactcgcccgctcccccgagggtagtcgcctttcccgcgggttgccagggtccttgtcagaaggct

SEQ ID NO: 43120 - DNA, 122 bp, Homo sapiens
ggtgatatgcctgcctcagcctctcaaagtgctgggattacaggtgtgagccactgcacccggcctctaaaagcagaattgacttgctttgctaagaaagttcaggaagcccggataattgc

SEQ ID NO: 43121 - DNA, 122 bp, Homo sapiens
cttctcgccttcctgttacagccgatctgctctgcatttggaatgcggcgtctttgcgggcgttctgagtcattcctactccgctgcaagccccgcagagaacctcgccttcttcccgaccg

SEQ ID NO: 43122 - DNA, 122 bp, Homo sapiens
cttgctgcccttcttgtggtagtgaggaagtgctcactctgccaaggctgtattagttctcgcaagaatggattagttcttgacagagtgggttgttataaaggcaggacgtccctcgtgtt

SEQ ID NO: 43123 - DNA, 122 bp, Homo sapiens
agaaaatccaaagactaagcctgaatacgaagggcgagaggtcctctcagatctctgccacgctgtaccagtcactcagcctgtgcagtgttttgaggcaggagatgaaaaattattctcta

SEQ ID NO: 43124 - DNA, 122 bp, Homo sapiens
aaccacattttagtattccgtacacagtcctttctgggcatcccaggctttgtattttcacgttggtcggccgtgaggagggtggatcttcattatctgtgcatgcatgtgcatcccttcat

SEQ ID NO: 43125 - DNA, 122 bp, Homo sapiens
ggaccagcggaccctgtggcggggggagtctcctcaccggtgagcagctgcaggcgaaaacggcggcggcggcggctgaggcggcgatgcccttgtcttctccggaggctacggcggcgacg

SEQ ID NO: 43126 - DNA, 122 bp, Homo sapiens
actcacgggcggagcggtaggatgaagatggatttcagccccccgatcttctctctctggcgctctcgctcccccttacctttcactccgacaacatggcggcccactggggactgggttgg

SEQ ID NO: 43127 - DNA, 122 bp, Homo sapiens
atgaatagcatcatgtgattattctcttcccaagactgaaaagtaaacaccaagattgtacgcaccttattcttttcattttgaataatttctaatagctggtctgtgtgcccttcttctat

SEQ ID NO: 43128 - DNA, 122 bp, Homo sapiens
tagcggttcctctggaacgtggcctctagctcttgcaactgctggcttgtgaagtgcgtacgttgccgccgctgcttcttcttcttggctgggtcgtctgcgccgccgcagcccgtgcctcc

SEQ ID NO: 43129 - DNA, 122 bp, Homo sapiens
tttaccttcacagagttgatatttaattggaccattagtagcaagtacaaatcttaagaacgttttaaatcttgccttcagagggcatctatggtagagggctttgggtagtgaaatatttg

SEQ ID NO: 43130 - DNA, 122 bp, Homo sapiens
cgcacggtccggacaggtgggatccgagttacctggccaagggggctgacgcagacacgtcgcgggacacagtgaagagtgtggtgcagagcggagggcgggagtctttggagaacaggtag

SEQ ID NO: 43131 - DNA, 122 bp, Homo sapiens
acaaccaacccctagaagccgtggagtcagaccggccagggtgggacctaggttttaactcgggttctggctacacacgctgcgcctccatacagtttgtcccaggtttggcagcaggccgg

SEQ ID NO: 43132 - DNA, 122 bp, Homo sapiens
cctcttccacgcgttcatctttgctcagctgtggacagtttattgcgagcaaagtgccgtcgctacaaatctccaaaatcagaatgaattcagcttcacggcgatactgacagcactagaat

SEQ ID NO: 43133 - DNA, 122 bp, Homo sapiens
aaatgcatcagctaatgaggtatggttgcaattttatggctgcagtgaaataatatcattcgagtgtttgctggcctgagagtaggctgactgtccagtctttgtgggacagtcctggactc

SEQ ID NO: 43134 - DNA, 122 bp, Homo sapiens
cggcggggagctggggggctaggggcggacgcccgacgtgatggcccttcccgcaggcgccgcggctctgctactgctgctgcccgccaccatgttccacctgctcctggcggcccgttcgg

SEQ ID NO: 43135 - DNA, 122 bp, Homo sapiens
tatgctaatttgtttgcttgtttttaaaaccgtacttgcacagtaaaagttccccaacaacggaagtaacccgacgttcctcacactccctaggagactgtgtgcgtgtgtgcccgcgcgtg

SEQ ID NO: 43136 - DNA, 122 bp, Homo sapiens
catatctcagatgctgtcgtggcttcaggagctccccttgcaatactgtatgaccaccaacggcagcaccttccagactttgtgaaacagctgaggaccagaactgaaacagataggttaat

SEQ ID NO: 43137 - DNA, 122 bp, Homo sapiens
aaccttgaccctgagcgaacggccttgaactttgaaacaaatgctcccatggccagatgtcgcctctccggctcctgccagcacccgcgccccagtcctgccgagccattcagacttggttt

SEQ ID NO: 43138 - DNA, 122 bp, Homo sapiens
gctccagtagagggccagggagggagagagggccttcccgaaggcactgagccccttctccgcccgccggtaggaaggaaagaaagcaaagcacatgcaaattgaccgacgataaaccacaa

SEQ ID NO: 43139 - DNA, 122 bp, Homo sapiens
gcaccttcctcctcctccgcggcccccgagaagctgggcgcgcaggcaagggaggcgcggcggcccctgcggctggtcagttcaccaggtgcctgctcccgagcgagttgccaccgaccccg

SEQ ID NO: 43140 - DNA, 122 bp, Homo sapiens
gcgccttcttcgccgtgggcccggctcggagcccccaccccaggcctcaccggcccagcgcgaggctgcctcaccggaaacacgaggccgaattccaagctattgtcctgcttcgccggggg

SEQ ID NO: 43141 - DNA, 122 bp, Homo sapiens
catccccagaaggaaaatcaaacaatcacatgatcaggatgacacacagtgtccaaagtgcgacagaactctcccaccttccctgttgagtccttgatccaagcacacagagccctcctcgg

SEQ ID NO: 43142 - DNA, 122 bp, Homo sapiens
cactgtcctcctggtctgctcccaccctctgcaagacacagcccacctgcggcccctccacgcagcacagaacctctcctgatctttgcagaaggggccccaacacctgcccctcccgcctt

SEQ ID NO: 43143 - DNA, 122 bp, Homo sapiens
cacagacacctgtagtcttcagaatctcgtgtgtggtgctgcagctgccaaggcggcaaacgttacaatcagtctgcggagagactgttccccgcgcatcacagatcttgaaataactgggt

SEQ ID NO: 43144 - DNA, 122 bp, Homo sapiens
gattcccagaccccgtagataggaatttgggcaagataaaaaaaatgagggcttagtcctcgccttctatgagaatagatatttaaactgaggctgagagatttagtgacttgtcccaggtt

SEQ ID NO: 43145 - DNA, 122 bp, Homo sapiens
ctccccagaccgcaggggctacatgggcctagatgacatcctgcttctcagctacccctgcggtgagtcccagcccactgggggcgcaggggtaaggggtgtgggcggccgcggctcctgcc

SEQ ID NO: 43146 - DNA, 122 bp, Homo sapiens
acccatgctaaggcacaagagttaagcatttggatggcaattaaaatcaacagggctgggcgtggtggctcatgcctgtaatcccagcactttggaaggccgaggtgggtggatcacctgag

SEQ ID NO: 43147 - DNA, 122 bp, Homo sapiens
ccgcttgtgggcaagtgacgcgtctggggagagtgatccagaaatgtcaactttgcttctcgtggctgcagatggtaatcaggtcagttgtctaatcaaagctctatcagacgtattattca

SEQ ID NO: 43148 - DNA, 122 bp, Homo sapiens
tcccagatggggttcttcctctgacagcaggcgacttcccaagcctcatcctttccccagcgctttggagtatactcatgtgagcctgaggacacacacacaggcaccaggcttgttgggaa

SEQ ID NO: 43149 - DNA, 122 bp, Homo sapiens
cattcctcagtgactgagttcattctggctgggctctcagaacagccagagctccagctgcgcctcttcctcctgttcttaggaatctatgtggtcacagtggtgggcaacttgagcatgat

SEQ ID NO: 43150 - DNA, 122 bp, Homo sapiens
aacaaacaggtggtatggtatttcttctctaagctcctttccttcacaaaattgagattccgtttaagcctaatacatatatacacacatacgcagtatctgggggcgcatatacaatcacg

SEQ ID NO: 43151 - DNA, 122 bp, Homo sapiens
gtttattgtccagattagtggcaaggctgtgacattgactgacaaatgtccaccaccaagcggaagcctgagtgatggaatcgtttgattgctactgaaacatcatctttaccagggactgc

SEQ ID NO: 43152 - DNA, 122 bp, Homo sapiens
tgacttcattttctaggtaagagatgccccatgctcttttattttaaaaaatgcagggcccggggccaggcacagtggctcatgcctgtaatcccagcactttgggaggtggagacgggcag

SEQ ID NO: 43153 - DNA, 122 bp, Homo sapiens
acaagcaaactgctccttcacttcagcagcaagcggtcggggccgccgcagacagagggtcgattatgcaacccccataatctcgctgcagatctgcgagggcacagatgtgtctggtttct

SEQ ID NO: 43154 - DNA, 122 bp, Homo sapiens
acagagagaagaggttgagcacacagtcctatacaaacctctcagggctggggtatgcctcgcttcaggtagatatgctacactgaacacccctgaggcagccgtgttggcaatgctcatct

SEQ ID NO: 43155 - DNA, 122 bp, Homo sapiens
caggggccgccctggaccccgtgagctttgcgcggcggccccagaccctgctccgggtcgcgtcctgggtgagtggtccctgcccgggcccccgctcccgcccctgcctcgcgaccttcagg

SEQ ID NO: 43156 - DNA, 122 bp, Homo sapiens
ctctgcccgcaaaacattgttcctgactccaccgcctatcccaaaacctataagaactgacgataatcccaccacccgctgctgactctcttttcaaactcagcccacctgcacccaggtga

SEQ ID NO: 43157 - DNA, 122 bp, Homo sapiens
gccatggagccttggcccagaacctggggtctagaaatcgtggcctctctctcctctcaccgccctctttctggtcggagtgaaccccccagagaagggagggagacggcagggcctgacgg

SEQ ID NO: 43158 - DNA, 122 bp, Homo sapiens
tcggctttgtccaggggtttggccacggacaagccgcgggagcggaggccacctgctcaccgcagggcccggaatccacatccccagcagaagcagcctgcagactccgtcctacccgtgca

SEQ ID NO: 43159 - DNA, 122 bp, Homo sapiens
cgaacgcgtctgtgattatggtacacgtatttttcagaacgcgtctgcaatcacagcgcacgtatttttcagaacgcgtctgtggtcacagcacacatattttgttccgtgcatttttcagc

SEQ ID NO: 43160 - DNA, 122 bp, Homo sapiens
gtgaagggggcacggctccgtgggggctgcgcccagacaggcagcccctttatttcgcagcgccttgattggagcccttgatttagcatctgatgtcaaccggcaaacaaaatgcccgctcg

SEQ ID NO: 43161 - DNA, 122 bp, Homo sapiens
ggaaatcgtggtatccatagagacgctatcggaagttggggttgctaggaagccgcggcgcgtctgctaagctgcaaatggctgaagtcccggaggattatgattccggcccagatgaagat

SEQ ID NO: 43162 - DNA, 122 bp, Homo sapiens
tgggccacatagaggactgggtcctgctggggcagggttccaggctactggggctggcaccgctgcatttttccttcctaagagtcatgtcagtgtgtctgtcaagtcaggcttgacgtctt

SEQ ID NO: 43163 - DNA, 122 bp, Homo sapiens
ctgcctgcccccaggtgcccccggcccagccacagggtgctggctgcctgttactcagcacgtccgcctctcctgcctcctgagcccacaggcgcccttcctgtcacccgagcgccctctcc

SEQ ID NO: 43164 - DNA, 122 bp, Homo sapiens
gttcctatcttgttcaggttcatcctgttatcaactcagcagctggaggaagtgacatcacgtgcccaagctcggctttgaagctggaggtgcataccgagacactgtatgtggtactgcac

SEQ ID NO: 43165 - DNA, 122 bp, Homo sapiens
atattaaacaaagcaacatttagaaaagcaacaaaaaaagcacagccctcaccttctgaacgttcatcaaagtcttcatcaccttcctctgaagccactgagtaatcggactggttgtcgga

SEQ ID NO: 43166 - DNA, 122 bp, Homo sapiens
ggtgtcctgttgagcgatccctcactgtgcgtgctggctcatcgtgtggttctgcaaaggcgaagaaaggagacacacatgaaggagaagaatggagagcatgctcgtccctcccactcagt

SEQ ID NO: 43167 - DNA, 122 bp, Homo sapiens
gcttagagcagttaagagactacaactcccagcaagccgggcgagggccccgcccctccgcgtaccgccggcggccccgccccgcgaagcctagcactctccccaaacctctctcgcacgcg

SEQ ID NO: 43168 - DNA, 122 bp, Homo sapiens
gaaataactaagcacgcagtgaggactgtgggggcagctaatgtctgccaccccctcactcggtgttcagccatttatcatcaatacgtcgttaggcaggagcaggggcaggtggctgacgg

SEQ ID NO: 43169 - DNA, 122 bp, Homo sapiens
aaaatgagaatacggtttggggaggaggatccctcacattccttttcctaatgccagcctcgcgaagtctggtcccatgtaccctgggattctgccacggaagatgactcacttaattaaca

SEQ ID NO: 43170 - DNA, 122 bp, Homo sapiens
ggcttctgcttttcagtgaatggcatgactgcctatgtgggtggcaagccacccaggtgccgaggaaagagactgagggcacgagctgttccagtataataaaatatataaaataagaagag

SEQ ID NO: 43171 - DNA, 122 bp, Homo sapiens
cttcgcctccgcgcccgggtttggttttggtcacttggatactcgcagtcgcatcctctccgcttcccccccaagcccaagttcttggtggtgacggtagctgatacctgccgggggcccag

SEQ ID NO: 43172 - DNA, 122 bp, Homo sapiens
ttacatttgtaatatagttcacattacattttaccttagtactattgttatttgggaatacgtttgatctctcccatttaaatgtaaattaaaaggtgggaattgtttcttttcacttttat

SEQ ID NO: 43173 - DNA, 122 bp, Homo sapiens
tgaaaaatgtcaagtttacaagtaactaccaaaaaaagcagagagaaaaagtgacatgtccgagagaaaaactgctgagggattccaaggaaggagacatttcttcttgttggaaagacatg

SEQ ID NO: 43174 - DNA, 122 bp, Homo sapiens
ggaggaggtgcgggctgagcgcgcgcgcgtttgcggggtgagggagggcatccatcagcccggaaaggcgaacccaaagctaaaatacccctcaattgccccaggtcccccaggtcccatac

SEQ ID NO: 43175 - DNA, 122 bp, Homo sapiens
tctctgcctctgggagcaaatgtcctccagccctacagacacatgcagggcctcggaagacgtatctctttactgccactccggccacgcacatgtctgataagaagcagtattatagtgaa

SEQ ID NO: 43176 - DNA, 122 bp, Homo sapiens
aaccaggctggccaacatggtgaaaccctgtttctacatgaaatataaaaatcagctgggcgtgatggcaggcgcctgtagtcccagctgctagggaggctgaggcaggagaatcgcttgag

SEQ ID NO: 43177 - DNA, 122 bp, Homo sapiens
attggcagtgcagtccgaccaccggcgcatggtcttctccatctgcgccgcccgcgcccgcgcctcctccagctcccgcagccgcagctcctcgcggctctcccagtcgccgtcggccagca

SEQ ID NO: 43178 - DNA, 122 bp, Homo sapiens
gcaccccacgggagagagcacctgcaaggaccataacacgtgaggctgtgctgagtcctacgacaggcaggaacttgtacttggcccccggcgacccgggcgatttgcgggtcttcctcttg

SEQ ID NO: 43179 - DNA, 122 bp, Homo sapiens
ccgtgtgccgctgctcacatctgctgtcggctggttttgttgaggtcctgaccacagaggcgcgcagcaatgaagtggccccggaaggccgggatgagggtgactgtggccacaaatcccag

SEQ ID NO: 43180 - DNA, 122 bp, Homo sapiens
gctcccgcccggctcttcacacctacccgcctcccccggcggaccccgcgccagctcccgcggccccgccgccaccagaaccagctcctggccgcagcgccatcttgctcccgacctgccgc

SEQ ID NO: 43181 - DNA, 122 bp, Homo sapiens
atttcacctaaaaatctggatttccagtttctcttcaaaaatccaaagctctagctggcccgggctggtcatgaggactcagcccttaccagccccactcccgccatcctgcctctccaggg

SEQ ID NO: 43182 - DNA, 122 bp, Homo sapiens
cgcggcttccccaaccttcccaccctaacccaccgcacccaataggctggccgctcaagccgcccaggtcccgcactgcccctcttacccggccggccactgggccggcctcccttccctgc

SEQ ID NO: 43183 - DNA, 122 bp, Homo sapiens
ggctgttgtgcccgctgcaagaggagaggaggggagaggggagccgcggtgtcagctgggcggcagggcattcatggggattctattttaaggtgacaggagccctggagggtttgaagcca

SEQ ID NO: 43184 - DNA, 122 bp, Homo sapiens
acaatctccttcaaagctaaagtttccttaaaacagccaccatgctgtataacatcactacgtgccaggcattcttgcagatttatttattttatgctcatagataaatttattttatgctc

SEQ ID NO: 43185 - DNA, 122 bp, Homo sapiens
gtgggaagggcagaggtggtgaagggcgagtccggagcatcctcgagttgcccaggtgctcggagagtgaggaaccccccagggagggaggagcccccaacccacagggctgcagccttgga

SEQ ID NO: 43186 - DNA, 122 bp, Homo sapiens
ctcgcccccttcagatactcctcactacaaatcggctctctcgggggattagtggctccgcgaaagtgcacacaagcgcggcgggcgggagggccaggggccgggcgcggcgggcactccct

SEQ ID NO: 43187 - DNA, 122 bp, Homo sapiens
cgatgctggcctctgcgaaccaggacttctgggggtgctgccgctgtgtaggagtctggccgtggcctcctccccactcaacctgaggaaaggaccagagcgggccgctgagacaatcaaac

SEQ ID NO: 43188 - DNA, 122 bp, Homo sapiens
actctttactatagggggattgttctaacctgcaaattctgcctctccccaggacaaatacgccttggggacaattacaaagcaactgcaacctacaatcttttcatggttaaaggaagaac

SEQ ID NO: 43189 - DNA, 122 bp, Homo sapiens
cgcaccattaaataagcttctgaacctttgaacaaaaaccacaaacaaaaagcctgtgtgcgagaggttggcagggaaagaagggagtcaagtatggtgaggatgatcaaagaaagaaatga

SEQ ID NO: 43190 - DNA, 122 bp, Homo sapiens
tcaggatgacgttctcattggtgagctgatactccatgtacttttccagaccctcttgctcgtagattttcctgccgtccaccatgttgaagagcgcgcaggatgagagagcaatggtgatg

SEQ ID NO: 43191 - DNA, 122 bp, Homo sapiens
aggtaccgggttcatctcattagggagtggcagacagtgggtgcaggacagtgggcgcagcgcactgtgtgcgagccgaaacagggcaaggcattgcctcacttgggaagcgcaaggggtca

SEQ ID NO: 43192 - DNA, 122 bp, Homo sapiens
gcggggacttggggcagaggtgtgacggtccctgggccacttcacagactgcatcctggtcgcagccgttttcgcgaggcagcggcgacgccctctcctcagggggctccgcgcccctccct

SEQ ID NO: 43193 - DNA, 122 bp, Homo sapiens
tcctgatccaaacgcaccagtggtagaaaggcccgtggttacagccccagcagacgatgccgaggtctgcgttgactgggggcagcaacaacagcatgcagtcatgataaaaagaaaagtcc

SEQ ID NO: 43194 - DNA, 122 bp, Homo sapiens
agcttaacttcgaaagtacaaatatggtcaaaggcagcagcagcaaagactttactaactcgtaattcttcactgagttctcgaaggtgttccataatgtccaccaagaagccaaagtcaca

SEQ ID NO: 43195 - DNA, 122 bp, Homo sapiens
cctccggccgccgcggctcccggggcctccgcctgcagccggcggcggaacgagggcaggcggctgagacaggcgagctatttgcattccccggcagtcatttttatatgcggaggtaatga

SEQ ID NO: 43196 - DNA, 122 bp, Homo sapiens
ccatgtgtttcctgctggcatcctggctgatattccagacctcatgtataattctcaagacgtacctgtggtagagagcagggaagaaagttctagtctatgtaaaaaagttcaaattatac

SEQ ID NO: 43197 - DNA, 122 bp, Homo sapiens
tccgagagaactgatcgctccccatctgaacactgggacctgcgatactggcggtaacttcgtggcgaatgagaatgcctgatgcggattgggtcaccttgtgtcctgaacaagcaaccaag

SEQ ID NO: 43198 - DNA, 122 bp, Homo sapiens
gtggggacattcaaatagctgctccccgctgcagtgattggccgaaaggagtgggcgcgccggggcggggcggggtctccgctgcctcagggacgggtcttttgaagtgcctggtgtgaccc

SEQ ID NO: 43199 - DNA, 122 bp, Homo sapiens
tttctgcattttacatttgaggaaactgaggttcacagaaattaagtaacatgattatggcgacccagtttgtaaagtaagtggtagaatcaggattagaagttttcaccaatgccaacatt

SEQ ID NO: 43200 - DNA, 122 bp, Homo sapiens
tcctgagcttccctgggtatccaattgctggcaaatgtgacggttttctcccatccagtacgagttgtttttctgtttcctgctttatcacattgtccattatgtacatcataaagttagtc

SEQ ID NO: 43201 - DNA, 122 bp, Homo sapiens
gacttcaggttatcatttcccaggaaaattctggatctgttatctgtgaggaggccactccgttgacagttgtgtaaaactctgctgctttccccagctccaacctctctggtcttcaacaa

SEQ ID NO: 43202 - DNA, 122 bp, Homo sapiens
atgcagaacggagcctcaggagagctgaggaacacacagcgggtcctgtagaagggccgtcgatcggaggagagtcaaaggcagcggggtgggcttcagagtcacctaatcttgcctctcag

SEQ ID NO: 43203 - DNA, 122 bp, Homo sapiens
attctagtcggaggaacagaatgtgccaacgcgccgaacagggaggatagttttacgatacggagatgtgtatgatagggaataagtgggagcccagtttggactaattggaagaagtcatt

SEQ ID NO: 43204 - DNA, 122 bp, Homo sapiens
tccaaaaaactgaggaggatggacctctccccaacttattcgatgaggccagagtcatctcgataccaaaacctggcagagacacaacaaaaaaagaaaatgtcaggccaatatccttgatg

SEQ ID NO: 43205 - DNA, 122 bp, Homo sapiens
tggctcatttttcacgggtgccgcgtgactttccagactgtattttcagcctcggtttgacgtcaggctctcacggtcccaaaggatgggctttgtacatttccaggccgcagaccggagcc

SEQ ID NO: 43206 - DNA, 122 bp, Homo sapiens
gagagctccttcaagctgtagcccaggtactatggacgtgcttccatcatattttcagtgcgtctttccttctgacattacaatatatgccaggcttatctaatattttttctgcttcagcc

SEQ ID NO: 43207 - DNA, 122 bp, Homo sapiens
ctcggggtcccacggctggtgggtggcccctgtgcttctcgctttgggatttgctgtccccgagctgcccatcatcgttttctgggtacctgagatgcagtgtggtgagttgggcgtggcct

SEQ ID NO: 43208 - DNA, 122 bp, Homo sapiens
acaacatatctgagtgtcagaatcagcgaccatcatccaagatgctggagttttttcttccgcgttgaaatggatcctttgagagtcagtcaaggggaaagaatgtggaaggatgaagctca

SEQ ID NO: 43209 - DNA, 122 bp, Homo sapiens
taaatcctcaagttagtcccatggcccattccgctccagggcttggggaagtagctcacccgggggctgtgcctgggtctctctgtccagtggaacgatagggggtgaagtctggaggccag

SEQ ID NO: 43210 - DNA, 122 bp, Homo sapiens
tccatctctctagcaatagaaatagaaaagtctgggctcatgacctacacaaagaccaatcgaccccttaagtgatgtcagcttatagacattgagagaatgaggcttgcactttctgataa

SEQ ID NO: 43211 - DNA, 122 bp, Homo sapiens
gtggtgtccagggcttgggggacaattactgggcgtgtcccctcctctgtaaccagaaggcggaacatgtgctgacagctgagagggagaaaggagctattttctcctcccttctaaagctg

SEQ ID NO: 43212 - DNA, 122 bp, Homo sapiens
ctggtgttgaaaggaatttcccctgctcttgccagagtctcgaggggtggcctccttccacgggtgagtaaccacaagtccatgtgaccgaacaaacagcatattcttttgttcaaaagaga

SEQ ID NO: 43213 - DNA, 122 bp, Homo sapiens
tatgctggagaacagaagggcagagagcagcctggagggagaagtgattcagctcaggatcgctctgattgtttttatgtgggtaagaagtggaacagaatacaaaatactggaaaatataa

SEQ ID NO: 43214 - DNA, 122 bp, Homo sapiens
gcggcttcaaggcctgggccgagcgggggagccacagcgagggttccggagcctgcaaggcggagtcccgggctcagctcaccccaggcgcaggcctgagggctgggagggctccgggggct

SEQ ID NO: 43215 - DNA, 122 bp, Homo sapiens
aagtctccaagatgacattaaccaaagttttaaaagttctcgtctgtttccttgaggatccgctgttgtgtttctcttggtctctgtcattcacgttctgcttttccttatatgtcagatga

SEQ ID NO: 43216 - DNA, 122 bp, Homo sapiens
cagattcccacttgccccctggcaccctctcaattcacagttggcactgcgatgccactccgctcccctgtgcccgcaaccttggccaagagctgccgggatcctcgccctggggtccgcca

SEQ ID NO: 43217 - DNA, 122 bp, Homo sapiens
gagccactgcgcccagcctggtctgtaattcttttggcttctgctgcctaccaggagcgccgtgctccattcaaagtgacaaattttaactggacaagataaaacatacatagcacatgaca

SEQ ID NO: 43218 - DNA, 122 bp, Homo sapiens
caggtcccttgggccctctgggccttatcatcttcatctgtaacagggcgatgcctctgccgtgtctggtggtgttgaggagttcctgtttgtgtaagcagctagttcagtgccagcacgag

SEQ ID NO: 43219 - DNA, 122 bp, Homo sapiens
cctactttcaagaagaggctcatgttctggttccagggcaccagccttagagtgggcagtcgttcattactggcctaggacaatcatattggagatctccctggacatcagacacttgctat

SEQ ID NO: 43220 - DNA, 122 bp, Homo sapiens
ctctggaatgcataaagcatgatttcagaacatgttctaattctaagacccttctcttcccggcagtttaaaaaaaacaaaaaacaaaacgtcgtatctttgagcattggttttcaaacatc

SEQ ID NO: 43221 - DNA, 122 bp, Homo sapiens
gccacagggagctggctgaaggctcaggagaggcttttctgacaggcccagttccaatcacgccagctcctaatctactgatcagtttgctttcctcctgctttaaaatctctttctccctg

SEQ ID NO: 43222 - DNA, 122 bp, Homo sapiens
gcaaccagaagagtactgagaatatttaacccgcacccgtgcacccaccctgaattaagacgtgtgtcgcaactcagcatctttatcggcagcactgaagctttccattctttattttcatc

SEQ ID NO: 43223 - DNA, 122 bp, Homo sapiens
acgctccgtgcgcagtgctcggtacacagtgtccgccacggcaaacctggggcggaggctcgtcagggagtttggggaggggggccaagcagagccccacgagagtcccgctcccacatctg

SEQ ID NO: 43224 - DNA, 122 bp, Homo sapiens
aagggtaccgagcgggtggagtcgggagccggagagcggtggaggcggatttcctgggcccggccctctggcgctaccatggcgtttggcaagagtcaccgggatccctacgcgacctccgt

SEQ ID NO: 43225 - DNA, 122 bp, Homo sapiens
gctgatgctctgggcgccggggctagttggcgggtaggatcacgtgcgaggggcaggccccgtctaggccccgcctccttgctgctgctgccgccgccaatcctggtccggttgcccgagtt

SEQ ID NO: 43226 - DNA, 122 bp, Homo sapiens
ggtacgtagggggagcgggccgcaggttggggcatggagcaacagacaccgaggtaagtccggggtggcgggggagttgctgcgtcctctcctcgccgggcaggtcggcggagactgcaagg

SEQ ID NO: 43227 - DNA, 122 bp, Homo sapiens
tcaccaagttggccaggctggtctcgagctcctgacctcaggtttaattgttataccccccgggcccttaacaaagctgtagtggccaggctaacctgggcaacatagtaagaccctggtct

SEQ ID NO: 43228 - DNA, 122 bp, Homo sapiens
tactggaatactacattatccataagaaaattgccacatgcttccatgaaacataaggaacgacatccgtctcccattttatcaccgtaagaactctgccagccactctggagactgagttc

SEQ ID NO: 43229 - DNA, 122 bp, Homo sapiens
gggcgcctaagtgagggggtcggtccccagctgcaggagggcgggaatcgacgctcagcgcggccctggaggctgcacggtgcccagtaccagggtccagctcctggatcgcgggtcgagga

SEQ ID NO: 43230 - DNA, 122 bp, Homo sapiens
aggttgttgcaggggctgggatgagtgcgttacaggcctctccttggcaaaatgtttttccgtttgtagtttctcagcattttctcttcccctgtgcaatccaggctagtggaattgagata

SEQ ID NO: 43231 - DNA, 122 bp, Homo sapiens
gggctccgggcccggaagctggaggagctgatccagggggctcagtgtgtacacagcccccgttttcctgcccaggtaggaccctgggtggtaactcccaagctgggagtaggggcttttcc

SEQ ID NO: 43232 - DNA, 122 bp, Homo sapiens
cgcgtcccccttcggccgtggcttgcgaggactgcagctgcagggacgagaaggtggcgccgctggctccttgacgcgctcccgggcctcaggtatcagcccccgctctgggtgcgccccgc

SEQ ID NO: 43233 - DNA, 122 bp, Homo sapiens
agcgctggggccactggccccaggagatgcgtccctggtgtgcagagccacagtcaagtccgcggtctctggacctagaggggtttcaggtcccggctggggtggctgccaagccccgggga

SEQ ID NO: 43234 - DNA, 122 bp, Homo sapiens
tgtctgccttggggagattgtccgggatactacatgtggccacggtctctccacagataccggccttggggaccctgtatgactgccaggaggctcttggacatagagagaacgttagtcac

SEQ ID NO: 43235 - DNA, 122 bp, Homo sapiens
ccgttgttaaatattttgcactgcagatgttggagaggcccaaattcaagctcttgtacccgacgtggagctgatcccaaacactgacacatgggtgcttggagatagagaaagttgtattc

SEQ ID NO: 43236 - DNA, 122 bp, Homo sapiens
gcccctttaagcagatacaaaggctcggcttgttttgttacagttcattctattccgcgccgcggagcgcagcggccggcgacaggagacgcgcgcgcatgcgccccgcggccgccagccgg

SEQ ID NO: 43237 - DNA, 122 bp, Homo sapiens
ggcgtccgttcgggcgccggggtcatttcgcccctcagcgctcccggctctgtgcccttccgagagtctacagccacccgtttcagcaggtggcaattcgggcatctaggctcacgagagca

SEQ ID NO: 43238 - DNA, 122 bp, Homo sapiens
ggagcatctacatacaaagaggcttaaactgcccagaacctccgaatgacgaagaatcaccgccagtctcaactcgtaagctgggaggcaaaaccccaaagcttccctaccaagggaaaacc

SEQ ID NO: 43239 - DNA, 122 bp, Homo sapiens
tggacaaggggcgcccggcagctcccccgcagagcgcacggcggacccggggttgggggtcgggggcccagcagtgccttcaccccggagggctccagtcacagcccagaggggtcgaccct

SEQ ID NO: 43240 - DNA, 122 bp, Homo sapiens
gtgcaggtgtgcgacctggccccgttgtgtcttgcagggtgcctcaggttcctgtggccgcggggacaaagctcacagcctggctggcttagaacacaggcttgtgttctcgtgcaggtttg

SEQ ID NO: 43241 - DNA, 122 bp, Homo sapiens
cacagatgcccacatgcgactctgcctcccagtgccatggagctctgccagagcctgggtcgtgctcacctcaggagctgcggtcacacctgggccctgcagagccacaggggtcagcagct

SEQ ID NO: 43242 - DNA, 122 bp, Homo sapiens
cccgctctctcgctctcttttttttttttttttttggtcggaggaaagaaaacagccctgcgcccggatgcgtagagagccgacaagtggaaacagggacacaccctcccgtgagcccgccc

SEQ ID NO: 43243 - DNA, 122 bp, Homo sapiens
tgctactggagacagcacctctcgcgcccgggcgggcggcctcgtctctgcacccctaggcggcgctgcgctcctcaacacccggccggctccgctttcccagacggctgcccagcctccag

SEQ ID NO: 43244 - DNA, 122 bp, Homo sapiens
ctcacaactctaagggggtccgcatgagagggtcgtgatcgatggagcaaacagggggtacgtgactcggggctgcctgcaccggtaattagaatggaacaggacaggacagggattttcat

SEQ ID NO: 43245 - DNA, 122 bp, Homo sapiens
gagtttatactccgtttttttaagggaaaaatgtatgtatgacacaccaaaagagctagtcgacaaaaactatgaaaagagagagactcagcctggaacaatcactaaagacaaaccagaag

SEQ ID NO: 43246 - DNA, 122 bp, Homo sapiens
gcacatgagtcagagcgatcctgggggcttcccgctgtcagcgctgacgcaagggtgggacgaggcgcagggctcaggccgccagccacaggtcacgcacatcatgactcactcccaggtgg

SEQ ID NO: 43247 - DNA, 122 bp, Homo sapiens
gcccccggggtgttcgggcctcctctgcgggccgcgccagccccttgccttcctccatcccggcctgggcatcctcacaggccgagccccgccccccaactcagccctctcccacgctccgt

SEQ ID NO: 43248 - DNA, 122 bp, Homo sapiens
ttcttttcttttgagacagagtttcactcgttccaaagcgcaaaggttggagtgcagtggcgcaatctcggctcactgcaaccgtcacttcttgggttcaagcgattctcctgcatcagcct

SEQ ID NO: 43249 - DNA, 122 bp, Homo sapiens
acagcctgctggccagttggtaacccctgcctctctaggagctactggcagggcactggacgctgctgccaaaactgaaactctgctcagtgtttgacccacacctgggctcttaaagggcc

SEQ ID NO: 43250 - DNA, 122 bp, Homo sapiens
ttgaaatggatcggaaaaaaccaagcgtgcattggccggtaatcggacgcgggcctcccgcgttgcgggcgagaagtctaccactacaccaccaatgctaatgtcgatgaaagagctgcagt

SEQ ID NO: 43251 - DNA, 122 bp, Homo sapiens
aagtttgaggttctgcaatcctgtcaggaattcccctcaaactgaaattaacattgaacacgatggcaaattaaaaaatatatatattattagaacaaaaaaagtatctcaagaaagatctt

SEQ ID NO: 43252 - DNA, 122 bp, Homo sapiens
cttaaatatctcctttcttaagtcccagcgaatgattacttattttctcttcttcagaaacggccatcattcaagcaaatcatttcaatcctggagtccatgtcaaatgacacgagccttcc

SEQ ID NO: 43253 - DNA, 122 bp, Homo sapiens
taccccccaatcttaagagtatcacagtaaggtctgtatgcacaatcatttgggctgtaacgctatactactatgtttctgattggaatatccttgttatacttcaaaaaatttcctcatct

SEQ ID NO: 43254 - DNA, 122 bp, Homo sapiens
tgaggaacctgatccagacgctggtgtccggcatcgcgccagccacgcgcagccgggccacgccccaggccctgctcctcgatgccctctgcctgctcctggacattcttgcacccaagctc

SEQ ID NO: 43255 - DNA, 122 bp, Homo sapiens
gcgtgagccaccgcacccggccactttcccctattattaacatcttgccttagtgtggctcgtcttctgtgactgacaggcaatattgatatgtgacttttaactaacacccatggttcaca

SEQ ID NO: 43256 - DNA, 122 bp, Homo sapiens
tataaggcagccctcggagttgggaggctgcagtctacctgggacactcgaggaggcacacgaggcggaaaagtggacgggtgccccgcgccaccgcctctcccgagggcgcgtactgacca

SEQ ID NO: 43257 - DNA, 122 bp, Homo sapiens
gaaacccatactctttctactgaatctttcagacacaggtgacagtcaacagagtacaaacgatgtaatcttgaggtgaaaacctgaccctgactgaagctgaagatgataagaaaatataa

SEQ ID NO: 43258 - DNA, 122 bp, Homo sapiens
ccctccccgggcgcgctcgggtggggccgcgggggcggatatagtcatctgggctgggggcggggacccctcccggccgggaggcggcgcgggcaggtgcgggcggcctgggtgtggaccgc

SEQ ID NO: 43259 - DNA, 122 bp, Homo sapiens
tgccctctgcagccgctggcctgggtgctaagtccctcattgcctggggccggcagggcccgccggctgctccgagtgcggggcccaccaagcccacgcccacccagaactccagctggccc

SEQ ID NO: 43260 - DNA, 122 bp, Homo sapiens
cctttgattattttggtgattattctacatttaaagttcagcaagaagatttaggtccgtcgaattatagctgcacttgaaataatttgatggcatgttatttgcatccataaattgccata

SEQ ID NO: 43261 - DNA, 122 bp, Homo sapiens
agcaactcataaattgtggatgattaacaacagaaaaaaagaaagaaagataaactttctcggcaagtttaaaagttgattaccgactggggtagcaattctcttgtaccttatcggggagt

SEQ ID NO: 43262 - DNA, 122 bp, Homo sapiens
tcgcgcaccgtctcacatccgggtatctgggaggcctgattggcggccgcggcgtcctatcgctgccccttagagtgcctagtagaagatccgcccagacctcggatttccggctgcgcggg

SEQ ID NO: 43263 - DNA, 122 bp, Homo sapiens
agggtgcccattgccccctgctggcagcccacgtgacagtctcactatccgccccgcaatcgtccccctgtgtgcctgacagtgaacaaggcaaggggctgacagtcgcaggtgggggcagg

SEQ ID NO: 43264 - DNA, 122 bp, Homo sapiens
aagacagggcgaggctggtgtccaccaaggcagttctaccacttgtggctgctccttcctcgtccctagcccagtgtgcctgcaggagcaggtgtgagcaggcacagcaacagcctgtcagc

SEQ ID NO: 43265 - DNA, 122 bp, Homo sapiens
tagctgagaggcaagtggagtctccccgctggaggcccggcgttgcaggcgcccctggcacgtctggaagccaggactctggcggctcccatggccctgggcccctcgttgggtcctgaacg

SEQ ID NO: 43266 - DNA, 122 bp, Homo sapiens
gacagcactctgtgcaccgtcacacacaatgtgcgggaagacagtcgtgtctgggaatgacggaagcttcgtgtttgggacactcccaggcctcactcatgcatctttcccttcggctggtt

SEQ ID NO: 43267 - DNA, 122 bp, Homo sapiens
ctctttgtggtaatgcagctacttcagctttctgatgctttcttatgtttccatggtatgcgttttttcattcttttactttcgactcatttgtacttttgcatttaaatagcatcttttgt

SEQ ID NO: 43268 - DNA, 122 bp, Homo sapiens
tgtgagccctcacctctgagtgcacaaggaaccctggtcctgactgacaggtctcacatgcgacatgggggaaaacaaatacattcaaatccagtgttttcacccatatattgaccaatcta

SEQ ID NO: 43269 - DNA, 122 bp, Homo sapiens
gcacctttagaacttagcgcaggagcccggagggctacgtgttttgctccactctttgtccgaccttcacctctttctccccaggcaagccatcaaaacctgcaaaaagcgtcctcccctcg

SEQ ID NO: 43270 - DNA, 122 bp, Homo sapiens
gcaaaaaacagatttggcgtttccgctttctcgcttgtgttgggatccaggaaccggcgacgcgccggccaagtctcctttcctgggtctctctcgcgcgctctctcactgatgcactcctt

SEQ ID NO: 43271 - DNA, 122 bp, Homo sapiens
aaaaagccatcatggaccttcctcactcataaatcaccttgattttctagtaggctagaccgaagtgatatcctctgggtttgcaagtagtggaaaagagtgtaagtcctttcagcactaac

SEQ ID NO: 43272 - DNA, 122 bp, Homo sapiens
gcgcaaagactacctgaagacagacatctcgacggcgctgaaggaaatccgctcccagctcgaaagccactcagaccagaatatgcaccaggccgaagagtggttcaaatgccgctacgcca

SEQ ID NO: 43273 - DNA, 122 bp, Homo sapiens
gagctccgtgctgcgccaccagcgcgcccatgagccgccgcggcccgagctccgctgccccgcctgcctcaaggccttcaaggatcccggctacttccgtaagcacctggctgcccaccagg

SEQ ID NO: 43274 - DNA, 122 bp, Homo sapiens
actgaagagctcttctgcagactttggcaacgagactacatatagcaggtcacagcagcacgagctcacatggaagactgaaagcactgcggaataacaccacccaacacctcctatcagtg

SEQ ID NO: 43275 - DNA, 122 bp, Homo sapiens
actcctgggcgggcgcctgagcccccaaaatagatcctcagggcccaaaagcagactcttcggcgggcgccatgggaccggcagaagctgggcgccgcggggccgcctcgcccgtacctcca

SEQ ID NO: 43276 - DNA, 122 bp, Homo sapiens
gattaattgatcttcatgcattattttcaatcctgatgtatgagcccacattcctattcacgaggccacagtatctatgagtgaaaacatgtagtgtttgtctttctgtccatgcaatagtt

SEQ ID NO: 43277 - DNA, 122 bp, Homo sapiens
tgcgaggctgccccagtccccttcaggctgatggtccggggcagggctgctccccttggtcgtgccccacagtcacgggggcaagtattaacacactgctgctccacccccagaggcccctc

SEQ ID NO: 43278 - DNA, 122 bp, Homo sapiens
ggacgcgcttgttgattggctccgaatgtcgaccaatggtcggcgaagcgggttgcttgccgcacggtcaatggccgcaaaccgggaggaaggcgggaagagaggaggtggaggcgggcctg

SEQ ID NO: 43279 - DNA, 122 bp, Homo sapiens
ccgctggtggccctgccaaaacggtccccacatgcaaagtgcagggtgccaatgccccatcgctggagagcttgcagcgctagattttcaatgacgccacatggagaaaacgtgaaaagaaa

SEQ ID NO: 43280 - DNA, 122 bp, Homo sapiens
caaggtcctgaggttctgaaatccgggattgggtcccaggaatctggggcatccggtgatcggcagctcagagccacttgggggatcctgggaatcggctcggaggtgcccgccacctggac

SEQ ID NO: 43281 - DNA, 122 bp, Homo sapiens
ctccagcacccacgcctcagtgcggtcagccagcaggaaggtgctatggtaggagaatggcgcagcatcctccaggcagttgcccccctgcccatagtgctccagtaaccctgtgatcacat

SEQ ID NO: 43282 - DNA, 122 bp, Homo sapiens
gataaaggggcttctgcagactccccaattcatttggtaaagaccgctcagcatcatggtcgggccctgattgctttcacaaccgcttcgaggagtgtcattcccatcacggccacaaggtg

SEQ ID NO: 43283 - DNA, 122 bp, Homo sapiens
gtcaaaaaatagaggacactgacagtagagtaaaggtaaaatggagtccaactcagttcacgctgctatggtggagaatccctggattgtgctgtcttcggcattcagcagctcaagcagga

SEQ ID NO: 43284 - DNA, 122 bp, Homo sapiens
ttggaactggaactagggaaagcaggggctagatctgttagcaacgtaaacaaactcagccgcctaaccggaactgcgtttccagcagcaagggggaacttccgagatcaaaggtgacagct

SEQ ID NO: 43285 - DNA, 122 bp, Homo sapiens
ccctcccctgcatccgtgctgtgcttgttgaaactgagatcctctagcctttggcctctccggacccagccccagctgcaggccccagccatggtggtccctttgggaggcgtggtccagga

SEQ ID NO: 43286 - DNA, 122 bp, Homo sapiens
cggggactgcgcctctagagccgcgagttctcgggaattcgccgcagcggacgcgctcggcgaatttgtgctcttgtgccctcctccgggcttgggcccaggcccggcccctcgcacttgcc

SEQ ID NO: 43287 - DNA, 122 bp, Homo sapiens
cgcctcgagcaccgactccacagccacggccaccgctcctcggctcccgtgacaccggcgcgcctgctgcttcgagcaggggaggctttgcactcccatcgcacttttctcgtccgaagata

SEQ ID NO: 43288 - DNA, 122 bp, Homo sapiens
gcttgctgtttcttttcactttttattaaatgtgaccactagaacatttaaaattacacacgtggcttggtcagtatttctctggggcaatgctgatctagaggcagagaccatccctcccc

SEQ ID NO: 43289 - DNA, 122 bp, Homo sapiens
tcatctgactgccttgtgatgtgatgtagctacatgaacatgtccacatctaatttgtggcgcagaagttagacatctgtgatgcaggaagtgtcagcaaatttttattttaaatctgttag

SEQ ID NO: 43290 - DNA, 122 bp, Homo sapiens
aaacctggcttgtgtgatccagtcctgcctcttgcttccagctctgtcaaaatccctgcccgtctacaggttaccaggaccttgggggcagagggatcccagaatgagagctggacctgctg

SEQ ID NO: 43291 - DNA, 122 bp, Homo sapiens
ccgcgcccaattttcgcttccgggatggaagctacgtcatttccccctctgttgccctagcgccccttggaagccaagaatatgaggaagtcttcttccttcgcgccttcttcttccttacg

SEQ ID NO: 43292 - DNA, 122 bp, Homo sapiens
tctgagaggggcaggactggctgggagtccctggaattagaccaggaagtctcctggagccgggaaacgggtggggaaggagggcggtttctcttcgccacagtccattctccctgcttaga

SEQ ID NO: 43293 - DNA, 122 bp, Homo sapiens
ccttttatccacttaggcccacacgataagttcactctggaaatctcttcagcgtggctgcgtgcagatgtaatcggacctgctctgggtcgtcctaattgcaaacacatttctctccctct

SEQ ID NO: 43294 - DNA, 122 bp, Homo sapiens
aggtttcgtgtgcaaggggagagcttccgcggctaggagctgccggccttggggggtttgcggtgggcgggcactgcgctcttggacacgtgggtggcgcgcggccctggacttggtggcga

SEQ ID NO: 43295 - DNA, 122 bp, Homo sapiens
tccaactcgccgaatcattactagtgcaggcattttattctaagctgctttttactaaaacgtgctcttgtcgctctgaacctttaggactacaatacccagaagtctctgggagtcgccga

SEQ ID NO: 43296 - DNA, 122 bp, Homo sapiens
accttgctgtgatatttctcccactttagtccatttccagaacatttggcataggcaagtcgaagacaattggctggcagtccttgtgtctccgcaatgcagttgcccagctcggtttcctc

SEQ ID NO: 43297 - DNA, 122 bp, Homo sapiens
tggtacacggaggccttgggcaggtccaggcacacggtgcagcacagcaccgagtagagccgctcctccagtttcccgctgccggccgccgccgccgccgccgccgcctcggccgcctcggc

SEQ ID NO: 43298 - DNA, 122 bp, Homo sapiens
aaatttctggacggcagctcaggcccctggatgcagccatgactgccatagcaccagaatcgttcttccaggctgggctgtgcccctgcccccatgccaagggtgctttcgtataaattttg

SEQ ID NO: 43299 - DNA, 122 bp, Homo sapiens
cacctgccagcaaggaggacctggcgctccttcaggcagctggccagtcaatcacctgtgcgcgccactgccgccgcgcccgcccgcgcccgacccgcacgaccggccgcaaagcgccgccg

SEQ ID NO: 43300 - DNA, 122 bp, Homo sapiens
caggactctcattctgcaatgctcagctctgtcccggcaatcagagttctcctcacacaccgttccaaactctgaagccaaaatacatctggtgacgtgctactcctcgatcgccacacatg

SEQ ID NO: 43301 - DNA, 122 bp, Homo sapiens
gttgagaggtagttaggttatggggctagatgtgatggatgaaatgaacagagcaagcatcgaggcttgctttagtctgatgctcttaggccttacaagctgaggaagaagagaacatttgg

SEQ ID NO: 43302 - DNA, 122 bp, Homo sapiens
cagagacctagtgagttccttggactcccgcaggcagggcttagtggttggtgatcagtgcggatgggcaggagggtggactaagcagagtcacagtgggcttactaatctgtgcagggctg

SEQ ID NO: 43303 - DNA, 122 bp, Homo sapiens
agggaatgctgaattttctaccatacaccttatctcatctcctctgtccccaaggctagtcgtttcacctctgaaacacttcttaatctcttcttcaaccgcatggtccttccttcccttcc

SEQ ID NO: 43304 - DNA, 122 bp, Homo sapiens
tacgtggtggttgactgatttgctgatttcttccctgcaaaactggaaatgtccttgtttcgattcccatgtttcttatgccttccctactcctctcctccccaattttggggcaagtggta

SEQ ID NO: 43305 - DNA, 122 bp, Homo sapiens
caataacttattaatagttgaaattccatgactttaagattctttgactcagtccaaacacgttccccattacagacttcctaatattcatttttaaagctgtaacctcttaattataaaat

SEQ ID NO: 43306 - DNA, 122 bp, Homo sapiens
ttttccccttcacccatttttcctcctcttttcctgtggtccaagtgatttctaagaggccgtagctcagtgatgctggcaggatgcaacccttttcagtcttccatgtgagaggatgaaag

SEQ ID NO: 43307 - DNA, 122 bp, Homo sapiens
tctgtaaaggggaagctggcccaggagcttccggtagcttccaagggaacctggtcagcccgcaggagactgggtaggaggaggggatgcagagatgcctccagaacacggcctccagcccg

SEQ ID NO: 43308 - DNA, 122 bp, Homo sapiens
tgggtgagcccgctgctcctgattagtcatgaatggcacctggtctgggcgacagtcacccgcaggaagccctgagctggccaccatcaccctgggcagtggctcccggggtgccaacaaga

SEQ ID NO: 43309 - DNA, 122 bp, Homo sapiens
cgggagcacccagggaacacaagtgcaccatgacgcggagcccttcatcaccgcaggccacggcgcttgtccttcccagaggcccccaaccacagctgctgagcgacacccacaccgcttct

SEQ ID NO: 43310 - DNA, 122 bp, Homo sapiens
cgagctgagggagaaaggtccaaagggcgcgagcgcccagggcgctgggagcccgtgggacgggcacggggagggcagagccagccgaggggagcggctgccgggaggtgcgctgagcaggg

SEQ ID NO: 43311 - DNA, 122 bp, Homo sapiens
ccaaagcatttgtgtaaatggcccgagcacacattttaagtgagaaccatttgaagactccgagtttgcctgcgaggattcccaaagggatctgggcagctggtggccccgccccctctctt

SEQ ID NO: 43312 - DNA, 122 bp, Homo sapiens
ggcccggggccggcctggagggtgcagtgcaccagcagcaggttctccaggcacaggtcccggtggatgatcccgtgctccttcaggtgctccagcccgttgcagagttgcagaagcaggaa

SEQ ID NO: 43313 - DNA, 122 bp, Homo sapiens
tctggaagcagaggaagaggaagtcggccccggccaggctgaggacgtagacagagaaggcgttcctgcgcatgcggaagcccaggagccagagcacaaacccgtttcctaccagcccgacc

SEQ ID NO: 43314 - DNA, 122 bp, Homo sapiens
tggtccatcgactcagcgggcgagcgcggggcggcaggtcctagcggatagccccgtcctcgtcatggggttaggtggcagctgctttaactcttgacaagcgtgactgggcgcatcctgat

SEQ ID NO: 43315 - DNA, 122 bp, Homo sapiens
ccgttcaacccatgggccgtggcgcaggtctgtgtgagcggggacaccccctgtcctggtcgtgcccgtcgcggttatgcattgctggtagacctcgtcctcagcacccaggcagccctggt

SEQ ID NO: 43316 - DNA, 122 bp, Homo sapiens
gaaaggcttttgaaacattccttactatccagaacctcgaaactaagctcagcacctaggcgggtgggtgacctcgcgatgtttctgtgcccaggcagcacatggcagagagcagccctggg

SEQ ID NO: 43317 - DNA, 122 bp, Homo sapiens
tggttgtccctgcggctgaggatgtgtgtgtgtgggcccgagtgtcccgtgcgccctgtgcgccttctgagtccagttaggcgcccgcacctgttcccccagctctgtgccaggctccgcgg

SEQ ID NO: 43318 - DNA, 122 bp, Homo sapiens
tttgtctatggtttcagtaaatacgtctgttgcggcatctagcggctatgggtggcaacgcggctgataaatttcgggctggtgtagagttagcccttcaatctggaaacaaggtgtgcgtt

SEQ ID NO: 43319 - DNA, 122 bp, Homo sapiens
cccactgctttttgcctccgccgccgcggctttttgcccccccaccaccgcagctttttgcgcctcggctttttgccccaccagcgccgcggctttttgccccatggccatcgtcagaagtg

SEQ ID NO: 43320 - DNA, 122 bp, Homo sapiens
acagtatgcggagggatgactccgacagcgatttcggagcctctctcggcgtcagtcttgcgccggcacccgccacggccagcgcaaccaacacctgcctgaggactggcccgagctcggcc

SEQ ID NO: 43321 - DNA, 122 bp, Homo sapiens
gttgtggtccttcactggctcggtcagcaggtggctttgcagtttgatgttcacctgatgcggctgcaagtgctcttcacagtaattcaccatgcaggttagacaggacttcactgccttca

SEQ ID NO: 43322 - DNA, 122 bp, Homo sapiens
ccgcagcctggctggcttctcaggcctcctctgctgcccacacagatgagctccctcagccgtcccccatctggtgctgcggccagtgcgggtcataaaccctgagcccctgcttaatccgc

SEQ ID NO: 43323 - DNA, 122 bp, Homo sapiens
aggcctccttcggagagccctgctccgagcccattgggcttccaatcttggcctgcctagcgccgagcagccaatcagaaggcagtcctcccgagggggcgggacgagggggtggtgctgat

SEQ ID NO: 43324 - DNA, 122 bp, Homo sapiens
ttaccattcgtgtgtaagaatgtgttctagaccacttagaaatccacttttccagctgggcgtggtggcttctacctgtaatcccagtactttgggaggttgaggtgcacggacaacagggt

SEQ ID NO: 43325 - DNA, 122 bp, Homo sapiens
tttttaatgcttgtagcagctgggtctctgaaaataactaacatttttcaccttgtgcagcgaggggaagaaaaattctctgctctttaattatagaaccaccaaagacaacatgcagtgag

SEQ ID NO: 43326 - DNA, 122 bp, Homo sapiens
cccaggcccgggtcgggcagccgtggggagcccagctccggtttgcatatacacaatgcacgcccggggctcgtcctatcacgggtgctcccggctgtgcgaggacagggaggcgggggcag

SEQ ID NO: 43327 - DNA, 122 bp, Homo sapiens
attcatttaattccagccacaaggtaggcagcctctgttaacattttacaattgtgagaacgcagagatctgggactggctcaaggtgacacactgcagcaaggagtcagaatttgaatccg

SEQ ID NO: 43328 - DNA, 122 bp, Homo sapiens
ccgtgggacactgaaactcttcccttaccttcctcggtagtcctgtgagggaggctggcccggccggctgccctacggtgcggacaggaggtcgcggtcgggaggggccctgcccggcggtt

SEQ ID NO: 43329 - DNA, 122 bp, Homo sapiens
atccctgcctgcagtcctgctgtgtggccctgggcaggtcacaggtcctctctgagcttccgctttcccgtctgtaaaaccgggctggcgctgctggcctcgcagcccgccgtaagcatcct

SEQ ID NO: 43330 - DNA, 122 bp, Homo sapiens
atctcagtgagaatgacaggtcattttctagaacattctgctggtttctgtggaaagcggcggatgttagcccttcctctgcatcttccatgttgtccttgctctctggtttgcagcatttt

SEQ ID NO: 43331 - DNA, 122 bp, Homo sapiens
cgcttggcatggaactccaaaggctccttgactgcggccatggcgggcaaagcatacgcgcgtgaaactcagcctatttccgctctgccagtggcgtaattcctgtcggggcgtgtcttctc

SEQ ID NO: 43332 - DNA, 122 bp, Homo sapiens
tagttgctaccgcttagaatattatggcctgaataactgcagtgtttttctacctaatcccgatcttggatttgaatggccattatgtctggtcttgcctttttattttaattgaatgctct

SEQ ID NO: 43333 - DNA, 122 bp, Homo sapiens
gtgggaaggcgggaaggctgcgggggataattccggggacgctgggctgagctaggacagcgtgtgtgtgtgtgtgtgggcggagggggggagctgcacctcttggggggttcgcagagctg

SEQ ID NO: 43334 - DNA, 122 bp, Homo sapiens
gtcctccccccactgctgcacaccaccctccaaagggcacaagtactcccagtcggacagcgtttccctcgttcacaaaagacctccatgatttgagaccaggcagagagctgtttagagca

SEQ ID NO: 43335 - DNA, 122 bp, Homo sapiens
caaaattcggagtcttgtgctgggagactcagcccactccaggcttctccagggctccttcggtgacagtgagacttcccgtgggtttactgaccttcctttttctgctgagcccttttacc

SEQ ID NO: 43336 - DNA, 122 bp, Homo sapiens
gtttggagcgctctcgggaaaaaaaatgcaaaaaccaggaacgaaaatggatatccgcaacgaaaaagaaattacaaccacttaggccttagaaaaaactggcaaataccaatgtcaaaaca

SEQ ID NO: 43337 - DNA, 122 bp, Homo sapiens
gggagagtgggaggggcgactcgtgagtttcttgagtggaaggggcaggttacagtagggcgaagtgttgggcagagactgtggcaactccggggtaaccctggccatctcccctggggctg

SEQ ID NO: 43338 - DNA, 122 bp, Homo sapiens
aaaaccaaatctgggtgtcagaggccaagaccctggggtgggatcagggaccacccctcacggggcataaggtcagttttcccccagagcccgggtccctgtcccccacagggcaggcgggg

SEQ ID NO: 43339 - DNA, 122 bp, Homo sapiens
tcactactcccactcgagatcattcctattaatgactctgaggcttcacctaacaggccacggtggaggcaaggaaatgtggcgtggagaacccactgggcctggctctccgtcctatggtc

SEQ ID NO: 43340 - DNA, 122 bp, Homo sapiens
cctgctgtgtgccaggcatatagccgggagcagatggccgatgcagagcgcgcaagcggccgtaatgacaccagcagggccccgtctgtggagagaagatgcatggtgaggcgctcgccgtg

SEQ ID NO: 43341 - DNA, 122 bp, Homo sapiens
ccagcacccccgacactccccacccaccactgcccatgctgggggtccgagaggaagcttcgagggaggaacagccaatgcccctcctggatcccaagccaggcagcaggtagtgagtactg

SEQ ID NO: 43342 - DNA, 122 bp, Homo sapiens
aggccccgcccgcggccccgcccccggctgaatccagcccaggagggcggggctcctgcacgccaccgccaggcttccggcccgcctggcgcagccttccccatccagctgtggatccgtcc

SEQ ID NO: 43343 - DNA, 122 bp, Homo sapiens
tacaaacattcggactcagagagacagtattacgtggccctgaacaaagatggctcaccccgggagggatacaggactaaacgacaccagaaattcactcactttttacccaggcctgtaga

SEQ ID NO: 43344 - DNA, 122 bp, Homo sapiens
gtgactaagggcaacagaatcacccaaggcacttctagaaatagcaaattcggcagggtgcggtggctcacgcctgtaatcccagcactttgggaggccgaggcaggcggatcacctgaggt

SEQ ID NO: 43345 - DNA, 122 bp, Homo sapiens
cactagggttttgcctccgaagatggcttccctggagtcaacagttgcctgtcttcttcccgcctcactcctcctcttgccaatcttcttagcacccaggattaagcataaacatgggagta

SEQ ID NO: 43346 - DNA, 122 bp, Homo sapiens
ggggcacgcgaccccgctaaccccagccagactgccaggtcaccaggccggatccaggagcgctcggacggcccactccccagctccgcagcccccggcccaccccacagccccccgagtcc

SEQ ID NO: 43347 - DNA, 122 bp, Homo sapiens
tctacctttcctctcctctgaagaggttgaggaagtcctcagtactctctctccagaggacgccgcacaacttgaggccgtcattttagaaatggacccctactctgatattcctttggcac

SEQ ID NO: 43348 - DNA, 122 bp, Homo sapiens
ggaagtccaagatggagctgctgtgagggttggtttccggtgaggcctttcttcctagctcgtagacagccaccttctctctgtgtcctcacatggcttttcttttgtgtccatgccgagag

SEQ ID NO: 43349 - DNA, 122 bp, Homo sapiens
taaccaaaatccgtgcaagtttgtggagctgaaacaatcctcccacacatggggccttggcgcccctccgtccctgagacttccagaccaaaaatatgagagagaaaccagcgttcgagttc

SEQ ID NO: 43350 - DNA, 122 bp, Homo sapiens
ggagggccccggggtctttctcaatgtactgggcacttcgaggagctgggaagaggaaagcggagggtagcgtttagaaagggagggaaatcctcccaggctcaaaacctctcgcagaattc

SEQ ID NO: 43351 - DNA, 122 bp, Homo sapiens
ggagcggtgaccagctgtggtcaggagagcctcagcagggccagccccaggagtctttcccgattcttgctcactgctcacccacctgctgctgccatgaggcaccttggggccttcctctt

SEQ ID NO: 43352 - DNA, 122 bp, Homo sapiens
tctgtgacgagcgggacctcctcagacagcggttccaggagctgacagagcgcgtggccacgtccgacgaggatgtggctgagctccgggaaaagctgaggagaagagaggctgacaaccag

SEQ ID NO: 43353 - DNA, 122 bp, Homo sapiens
aaaaagaaaaaaaaaaaaaaaagctggtcataggccctggccacagtccctcggccttctcgcattgtcctgccccagtggaggacagcgtcttctcacgatcacttcccagggactctctt

SEQ ID NO: 43354 - DNA, 122 bp, Homo sapiens
cagctgcactgggtgtcaagcgccacggggtttgatggggactccttctggttccaccctcgcccactcacttctcgggctggccataatgctgcacagagccccggccagccattaatatc

SEQ ID NO: 43355 - DNA, 122 bp, Homo sapiens
gaaaggcaaagccctgtgctgcgtgaggacttaggagcgaagtgggggcccattgcagcgcgacctgtaaaagttctgagcctatggccaggattctggagcttcgtatccagctggagatt

SEQ ID NO: 43356 - DNA, 122 bp, Homo sapiens
gctcagccagctccaaccccacttcactggtggacggaaatagagccgctgcagccatggcgaacaatggccaggaaacgcctgctggcccgtgtgcaggtgaaaggaagatgcctgcggca

SEQ ID NO: 43357 - DNA, 122 bp, Homo sapiens
aagagcagagccgcggaagagaaccctagcggcggggaactagctcgccttcagtgctcacgggagaaggcaagttagaaagaacctgagacgtgacactgaaaatcagtagaagaaatacg

SEQ ID NO: 43358 - DNA, 122 bp, Homo sapiens
ccctctaacctgtagcccttacattgcccttgaaaagcttaaacatctctagatttcctacggcacatcgctctctcaataccgtttttgttcatattctcacaggggtcttaaattgcaaa

SEQ ID NO: 43359 - DNA, 122 bp, Homo sapiens
ggtggcgtagagaagggggcggggcaggagcgggacgcggcggccactgcgggtggggtccgggctgctgcgggtgagaggtataccaggagttctgcacgcctggccttccaaccagcaat

SEQ ID NO: 43360 - DNA, 122 bp, Homo sapiens
tcctgtacgccatgtacaagtacaggaacagggacgaggggtcctatcaagtggacgagacgcggaactacatcagcaactccgcccagagcaacggcacgctcatgaaggagaagcagcag

SEQ ID NO: 43361 - DNA, 122 bp, Homo sapiens
ctcctggtcaccgaggctgggtggcttctccatggagctcaggatggagcccagtaggtccgccatcttgggagtgactgagagggggcggtgcgtcttaaagggaagggcggaatgccttt

SEQ ID NO: 43362 - DNA, 122 bp, Homo sapiens
tttcctacaaagacaacggcgtcatctgtaaacaggcagtttcgtttcttcctttgtgatcgacacgccttttctttccttgtcctgcgtactgcagtgcccagcgcttccagcaccatgcc

SEQ ID NO: 43363 - DNA, 122 bp, Homo sapiens
gaggcttttggtattgcatcacaacaaacgagaccatgaaattgtcttgctagggtttagcgggggatgaccaactcagattgtgcactaacacacaaggtttcctgagtgaaatgactagt

SEQ ID NO: 43364 - DNA, 122 bp, Homo sapiens
tgcccgacaccgtcttccaccacggccgcgtgggcatcaacacagaccggccggatgaggcgctggttgtgcacgggaatgtcaaggtcatgggctcgcttatgcacccctccgacctgcgc

SEQ ID NO: 43365 - DNA, 122 bp, Homo sapiens
catggaacacttgctgagaagagccactcgtaattgaaaaccaaagaaatataggcattacggtgctgccagtagtttaatttaaagagcgtcttcatcacgtgactcttctgaaatggcca

SEQ ID NO: 43366 - DNA, 122 bp, Homo sapiens
tacgagcccaccacaggcatgatcttttccacggatggcatgcccgtgctctgctgagcccgccgggccctgctggccaccggccacctgtgccccgagggcggccagggacccctctccat

SEQ ID NO: 43367 - DNA, 122 bp, Homo sapiens
cccgctgtatggattcagctggcaaagtaactcaagccttgtcctgactgcaagggtgggcggggtggacggctcggtgttctgcccgttgtgtcttacgctccaggtgctggtctacgcgg

SEQ ID NO: 43368 - DNA, 122 bp, Homo sapiens
cccctgtacagaggcggggcatggagccggcggctttcagaactcccagggtctctgctgcggtagaccggctatttaacctccctttaatgcctgtgtaatgtgctggagaacaactagct

SEQ ID NO: 43369 - DNA, 122 bp, Homo sapiens
ggatggtgtaaagcagagtttggcaaactttttctctaaagggccagatagtaaaagccacgtgttctgactttcaggctttgtaagccattgtagccccgaaacagccataggcagtgtgt

SEQ ID NO: 43370 - DNA, 122 bp, Homo sapiens
gcaaacaattcagccaagccagcacacagctgccccaggagcagatggatttgtaattgccggaataacggcgttgcgtcagctaccccacacatcctcagccagacccaagggtgatctgc

SEQ ID NO: 43371 - DNA, 122 bp, Homo sapiens
tgttcacacacgccaggctcgtcctcctaaccctaagtcctgtgcacagagccctgtagccgcccctacccagagcaggcactgacaagcccacccatttctagtgctgcccaaggtggact

SEQ ID NO: 43372 - DNA, 122 bp, Homo sapiens
tggcatgtgaaaatttagggggagttagtatgaaacttggggcggaagttcagacggtgacgtcaaaagatcaccccgtggcccggcaaatccttgcgcgagctccagtcggtcatattggt

SEQ ID NO: 43373 - DNA, 122 bp, Homo sapiens
cttcttcatccctctctggccactatggaattctaatttgaaccatgtttggattgaagccgcctctgtattacttaccaggtaagcgagccgtgcgcctccctgggtcccgcgcggcgccg

SEQ ID NO: 43374 - DNA, 122 bp, Homo sapiens
atctgagtatgttgaaatgttctaacaggaagcaacagaatcaaatttcttttcaacttgcgttctgcataaaggaagaattatgataaccaagctctcaccaggctttaggtattactcaa

SEQ ID NO: 43375 - DNA, 122 bp, Homo sapiens
tcattacaaggaaccataacaagccacagagaaacgagaaagctgttaccagggaacactcgtgcctatgtgcaaatgtccccagagttacttagtcaccttggtgtgtttgttgcactggg

SEQ ID NO: 43376 - DNA, 122 bp, Homo sapiens
acgcacaggtgccacccgcgtgacggtccggggagtctgatcacgggagcagagtgcagccgcacggccgccaggttgggtggagggaggggctgaccacccagggacgggcagaggagtct

SEQ ID NO: 43377 - DNA, 122 bp, Homo sapiens
agaccgcagggcggaggtgaagaacggagtccagagccctccagagatggcagcgaatcccggccctgcctcttgccagctgtgtggcctagagtgagtccgacctctctgggcctcagctt

SEQ ID NO: 43378 - DNA, 122 bp, Homo sapiens
agaccatggagtgaaacagtgctgagggccccaggcccagggacaggcagctctgtggctcgcaccctcatccgctgactcctctgggagagacaacgtgatggtcccaccctttttctgat

SEQ ID NO: 43379 - DNA, 122 bp, Homo sapiens
agcagtggggttgggggctggctgaggtgggtgggatgcagtgggaatcagaaaactcaccgggaggacctgggaggaactcaggaaacagggctttgcaaactctcaagggctgtgtgccc

SEQ ID NO: 43380 - DNA, 122 bp, Homo sapiens
aggtaattgaatcatggggctggttccgcacgtgctgttcttgtgcgaatgagtgagtctcgccagatctgatggttttataagcgtctgacatttcccgtttgcgcgcattctctctcctg

SEQ ID NO: 43381 - DNA, 122 bp, Homo sapiens
ggtgaaaataacacaaccctaaggtcacacaagagatggagccaagattcaagcccagggcgtctgaagcaagactggcactccctgccgcccctcggtgtcagctccttaactctgttagc

SEQ ID NO: 43382 - DNA, 122 bp, Homo sapiens
tctcctagcctaactctcttcttctctttaaatctactgactgatttttattagacccaacgtgatttctttcgttttctttttggatattttcagatacatcagctcctatttttatagct

SEQ ID NO: 43383 - DNA, 122 bp, Homo sapiens
cagggaggggcgcccaccccggggcggaccactcccctggcggctcggccctgccccttccgagtctacaccaggtgtgaatgaacgctccgggctaggcactcaggataggggcttccagg

SEQ ID NO: 43384 - DNA, 122 bp, Homo sapiens
acagcgctgtggctctgcagcccccactcccatgcccccacagccacgtgccctcatctgcgggtcagtctcactcttgctcatctttgtttatgggtataaaaggtcagccactgcacttg

SEQ ID NO: 43385 - DNA, 122 bp, Homo sapiens
acagcttccttcaccaggcatggtagtgagggcagcgcccactactcacccagggcctctcgtgcaggaaactgcatggacacgtcgtcctgttcctgtcatgggaaggggcctggagccgt

SEQ ID NO: 43386 - DNA, 122 bp, Homo sapiens
ttgcaattgtccttccagcctggtgataaatatgcaagtggggcactttgtagaatctcccgaagggcagagctaccagcctcaggcaaatttttccctcccacttaaccccacctggcccg

SEQ ID NO: 43387 - DNA, 122 bp, Homo sapiens
tatcagaccccgggatagggatgaggcccacagtcacccaccagactctttgtatagccccgttaagtgcaccccggcctggagggggtggttctgggtagaagcacgtccgggccgcgccg

SEQ ID NO: 43388 - DNA, 122 bp, Homo sapiens
cccaaccccggcggcgcggcctccccggcggcgcggcctccgggatcgtcctggtccccgcgtcccccaggtcccggccccgggctcccgcgcctcccgggctccaggtccccgcactccct

SEQ ID NO: 43389 - DNA, 122 bp, Homo sapiens
aactccaggctggcccacgtggcaggcgctgccttgggcaccaccgctcaccccagcccacgcctggcacccccagcccagccaagcgcctctgtttccaaacatgcctgttttaattagtg

SEQ ID NO: 43390 - DNA, 122 bp, Homo sapiens
agaggtagaagtggtttttggttagatggatgatttgtatagtgaagtctgggatattagcgtacctgtcaccagagcagtgtaccctgtaccccataggtagttttttatccattaccttc

SEQ ID NO: 43391 - DNA, 122 bp, Homo sapiens
cgctaccctggctccccgccggcagccggcagccagcggcagcggatcgaccccgttctgcggccgttgagtagttttcgatttcggctgatttttgtccctctgcgcttgcccccgctccc

SEQ ID NO: 43392 - DNA, 122 bp, Homo sapiens
gaaaaaaatttaaatggcctgagtccggaagctcgccagggcagaagcgcagggtcgctccgccgggctcgccgggccggggaccccccagccacccgccaccacggcggggagggcagggt

SEQ ID NO: 43393 - DNA, 122 bp, Homo sapiens
ctctcggacggcgtcctcctttccaatgatggtgatcaggtcctggtccttgtcctcagccgcagggaagatgacacgtgctccagtgctgtcgcgcaccttgcgaattttgccgcccccct

SEQ ID NO: 43394 - DNA, 122 bp, Homo sapiens
tccgttactgcagtctccctttttcacacagggaaacaacccaagactcagagttctccgcggaggaatgcaaagaacacaggaagtcagtactcccagaaacagtctttgctggcgcgctc

SEQ ID NO: 43395 - DNA, 122 bp, Homo sapiens
tcccccaggccctcaggccacgagcaggggcgggggcacggctcacgatgtcatttacaccgagacaaaagcctaaattgctccctgtgctttcagtgacctaggccttcctctcgtattct

SEQ ID NO: 43396 - DNA, 122 bp, Homo sapiens
aggctggcgagatcgcctcctcacccgctcagtcctgaagtgtccaaggatgaaactgtgcggaaattctccctgtcgctctcagtttgtgggggaagcgccgggactgaggtacatggtta

SEQ ID NO: 43397 - DNA, 122 bp, Homo sapiens
ttttgtcctaactcactctccagcagcagcttctcgtcattcaaattaacgcaacggttgcggctcaggccccaagacagcgagatcccgggaaagctggttcggcgggtcggtcacacctt

SEQ ID NO: 43398 - DNA, 122 bp, Homo sapiens
ctagtcacatagttcaaaattcaagagacacaaataagaatgcagggaagtccccctccccgccccccaccatcccagtttccctccttagagacagccactgttagaaacttcttatgtag

SEQ ID NO: 43399 - DNA, 122 bp, Homo sapiens
tagtcctggcatgtcgggtgggtcagcttggtggacagctggccctgctgacccgggatccgccctgggttccccatggcctggaggcaggaggagatggccactgcatccagcgtcgcctc

SEQ ID NO: 43400 - DNA, 122 bp, Homo sapiens
tcggcgacccgccgggactttctaatcagagtcgtggggattttacgggtggagttactccgaaacctttaaggccgagtgtgataggtagttcaaagcttcctgtttcttcagtctgacag

SEQ ID NO: 43401 - DNA, 122 bp, Homo sapiens
gcagcaaacacgcagggtgagtgtgcgggctgcccaggcagtgcagagcggagagagctgcgtggggccacactcactcgcactcacaccgggggggcacgccggcctgggaccccgtgtgc

SEQ ID NO: 43402 - DNA, 122 bp, Homo sapiens
ctctgccaggtatttaaaaatgtaagataaggtgatatttgtgagccggccagaaggcaacgaaaggcagagagcagatcaccggcagcctcggatttcactcttgcagctcggcctgaaac

SEQ ID NO: 43403 - DNA, 122 bp, Homo sapiens
ggcgccggaagtggacctgcgaggtggggccatgcgagtgcgcagcctcaaaaagcagctcgccccgctccctcgccatctgccccgcccctcgccaacgggctcgcctcccggcgcggctg

SEQ ID NO: 43404 - DNA, 122 bp, Homo sapiens
gcaataacacgaccaggcggccctgggggcgcaggggctcggggtgggagcggcggagcgcgcggagtcgccgcggggtggcaggggtgggccgggggcggggccgcgggcgtcggggaggt

SEQ ID NO: 43405 - DNA, 122 bp, Homo sapiens
tcagtgactgacccttgagtaaaacagtaaaacttcctgttctccagtctcagtctccaccgtttctcttaaacctgggtccacagggaaacgggaggactcctgccttccagccctacagt

SEQ ID NO: 43406 - DNA, 122 bp, Homo sapiens
aaaaattcaacctcctagagacgtagatctaagctatctctgtgataaaaagctggacaacgtttaggaaactgttgtatgagtctaaatgacaaaatctagtaacaaatggccattaagta

SEQ ID NO: 43407 - DNA, 122 bp, Homo sapiens
cttacacagagctaagccctgggccagggaggatggatgcaagtaccgtgcatgtgcaaacgtgttcgcagatacccgcagcggtgcacactcgggcccctcgtgtgcacgggccctgccca

SEQ ID NO: 43408 - DNA, 122 bp, Homo sapiens
ggggagcagggtgagaggctgggaacggctcagtggtggggtcccagagccaggtgaaaccgaggcttccccagagtcgagccggacccggaacaggagccgcggctctgcgtcggggcggg

SEQ ID NO: 43409 - DNA, 122 bp, Homo sapiens
tgatgatcatctctgactctcaggacatggcacagagtggggcaggagccctgagcagaacgaaattctagtcctctctctgctatttgattgctgtgtgatcttttagacaaatcatttaa

SEQ ID NO: 43410 - DNA, 122 bp, Homo sapiens
cagtgctggccttcacccagtttacggtggcacctcgggaccgcttctgagtctgcttgtcgctgaaggtcggcatgaggaaggcagcgttccctcccagatttagaaaatgtcaagtctcc

SEQ ID NO: 43411 - DNA, 122 bp, Homo sapiens
tgaaagaggggagaagggtttgcatttttcctatggaggattcttctctctctagcatttcgtttgatgtattcaactggtagaagtgagatttcaacaggtagcagagagcgctcacgtgg

SEQ ID NO: 43412 - DNA, 122 bp, Homo sapiens
ctccgctcctgacagatggcgcaactgcaacgacgcgccgccgccaccagcgcggctgctcgctgctactcttgctgatgctctgcccctccagctccggaggggagcgaggagggggcggg

SEQ ID NO: 43413 - DNA, 122 bp, Homo sapiens
caagagtgtttccagtcgccagcctgggggctggcgcaccgacgggggcgggcagccgggcgggtgaaggcagccaccccagctccccggcagaagccaggtctgggcttgccagtcaattc

SEQ ID NO: 43414 - DNA, 122 bp, Homo sapiens
aggccgaagccttgtggagcctcagtgcggggcttggccaggtcctagggggcgtggcctcggaggcgaaagcgcagggcggggccgaggtgtaggaaccgggaggggcctcgtggggggag

SEQ ID NO: 43415 - DNA, 122 bp, Homo sapiens
gtgtgtgtctattttctgccaagggtgagatgttctgagcattttctctatgtctacctccgtcaagtactttccataactgctgtcatgtcagcctcctactaaccctgtacagtaggtat

SEQ ID NO: 43416 - DNA, 122 bp, Homo sapiens
ccgcacccagccaatttattttttttgagatagtcttgctctgtcacccaggcgggtgtgcggtgacatgatcttggctcactacaggctccgcctcctgggttcaagcgattctcctgcct

SEQ ID NO: 43417 - DNA, 122 bp, Homo sapiens
tggttcagcggttgcaaagccctgcaaaccagtgttaagaccactccagaaagcagcaatcgacaagagacactcactacaaaactaccaagatgatgcaggttgcacagaacactcagcct

SEQ ID NO: 43418 - DNA, 122 bp, Homo sapiens
ttctggggaaagaaggctcagcagccacctgcttttttgcccgggtgggtggtccggccccgagccctcctgactctctcgccaatgcccagaggcgccgcagcgattccagggaggccgcg

SEQ ID NO: 43419 - DNA, 122 bp, Homo sapiens
cgttgatggctctgctgcggttggagcgctccaccaggatgtccagatgggctttgattgcggcgatgccggccagcccgccctgcgggtcaaagcgggcaaagtcaccaaactcaggcaga

SEQ ID NO: 43420 - DNA, 122 bp, Homo sapiens
aaagaaagtgccaggtgatctcccacagacactgaattttttgttgatttcaccttggcccgcacaaataactaccactgagtattctcatctggttccttgacctccataaccctgtggga

SEQ ID NO: 43421 - DNA, 122 bp, Homo sapiens
tcagagacgccgccagtttcggggctggggtgggggcagggagccacacccctgcgaaaccgagcttcgaagaggaggccccgaagccgcccaacctccgctcagaacccagagggtgggga

SEQ ID NO: 43422 - DNA, 122 bp, Homo sapiens
tgcaagaagccctttcgagccaggaatcctgcctgacttcataccccctacagtacccagcgcgccctcaacacagaacagagtgcggctcaaagacccggagggaaatggaaaaattatct

SEQ ID NO: 43423 - DNA, 122 bp, Homo sapiens
atctcccactgcagagccttggccagccgcgcccggactcctcagagctggcgcaaactccgtcctccaaaactcggctctgggaggcctaagtgactccgaagccggcggcagccgcggca

SEQ ID NO: 43424 - DNA, 122 bp, Homo sapiens
ggatctagaatgagccataaccttgaaggtcgtctgaaacaaactcctctccactgctatcgttttctgcttgactcagaaagctctttcttccctggtgcctttcccagcagcatttgggc

SEQ ID NO: 43425 - DNA, 122 bp, Homo sapiens
aactccaagctctaccggaggtaagccccagccaggtggggcttgggcctgagagcgggtcgtcctggggaagaagggcttcctctaccggcgcaccagctctcgctctgccgcagacacag

SEQ ID NO: 43426 - DNA, 122 bp, Homo sapiens
agcagcgccgcgtcaccgacttcttcgcgcgccgccgccccgggcccccccgcatcgcgccgcccaagctggcctgccgcacccccagccccgccaggcccgcactccgcgccccggcctcc

SEQ ID NO: 43427 - DNA, 122 bp, Homo sapiens
tcctggcagtggggcatagtccaacagctggctcccccaagatagccagcggccattacgcgcttgggtcgggggagatggagtcgcatttagccgcacagcagcctggaacctgaagtttt

SEQ ID NO: 43428 - DNA, 122 bp, Homo sapiens
gccggggcccattagcctctgcaaatgagcactccattccccaggaaggggccccagctgcgcgcgctggtgggaaccgcagtgcctgggacccgcccaggtcgcccaccccgggcgccggg

SEQ ID NO: 43429 - DNA, 122 bp, Homo sapiens
tcttgacgtcagatctacctggactaagatccgaatggtattcccggcggggcggagaagcggctaaaataagcagccagggattaggaaaaggaaggaactgtttgctgggatcagttaag

SEQ ID NO: 43430 - DNA, 122 bp, Homo sapiens
tccagagacccctcctccctgagtcccctggggtggaagaggatatcaggagaggggtcacggggcctgggagtctaaggatggggtcagccccgtctctggacctccctgcagagctgcct

SEQ ID NO: 43431 - DNA, 122 bp, Homo sapiens
tcccaggaggcggaggttgcagtgagtcgagatcgcgccactgcactccagcctgggggacggagcgagacaacgtctcaagaagaataaaataagataaataaaatactgacacacaataa

SEQ ID NO: 43432 - DNA, 122 bp, Homo sapiens
ggtccgcgagcctggtgaaaagcgatgctccgacctcatctgtgactctcgagggctcctcgtccactgtggcgagtgcagaggacgcggcctgggcagtgcctgcggggagaccgtgctgg

SEQ ID NO: 43433 - DNA, 122 bp, Homo sapiens
taatgggtagcagacacaaatataaatgtgttcaaaatcccttccttaattttatagtctcgatttttctttcttcaagctggtttgtagaaagtggaatgggggttcaaataacctattct

SEQ ID NO: 43434 - DNA, 122 bp, Homo sapiens
ggcataaggcagatgctaaatatttataaattcaacacatgtttattgtacaccctatatcgcattatgcaaggtgctggggactcagagaaaatggccccaacctcaagttcacagtctag

SEQ ID NO: 43435 - DNA, 122 bp, Homo sapiens
ggaaagttattgttcatagagcttttgcgagcttgccacctctgccattgataccaggcacgccatattttgtagagccagctttatttttattttgaagtggcttccccctttctgaaaag

SEQ ID NO: 43436 - DNA, 122 bp, Homo sapiens
ggatgcgacgggccggggcgtctgccgctgccgcatgagacgtgggggcgtggcctggtacgctagtcctttggccagagggcggattccgcctgctaaggtatccccagagttatttcaac

SEQ ID NO: 43437 - DNA, 122 bp, Homo sapiens
ccgggctccaccaggcggagcccagaaaactaacagccccagagaactggcaggaggcaccggagcctgcggcaggaaccggcacagctgcagggagacctgaagggccctcggcattgggc

SEQ ID NO: 43438 - DNA, 122 bp, Homo sapiens
aaacccccaaaccccagatcctggagaggctactacacccagcccaagccaccagaccctcgggggtgtgcaggtggtacagcctgcaccctgctgggaaatcacccctgggggctgctccc

SEQ ID NO: 43439 - DNA, 122 bp, Homo sapiens
gtgtctgcaggcggctccaggtggtgctggtggtgcaggagatgggtctggggcccgtgccgcttgacagcagtgcacagctcacgttcatggcctcgttgaggcttgtcagtgccttgttc

SEQ ID NO: 43440 - DNA, 122 bp, Homo sapiens
tggctcggcagcccccagccccgccctgcggccaggcacacatgcgggcacaggcaggggcgccagaaactcaactagaggacacagcagcttcaggaacactggtgaattccgccggactt

SEQ ID NO: 43441 - DNA, 122 bp, Homo sapiens
cagtctctctcatttcagaaaacaaatctgcatgtgtgttctctgaagttcttcttagtgcggctcttgatgcactatattttgaatattaccaaacctgagctctttaaaaaaaaaatact

SEQ ID NO: 43442 - DNA, 122 bp, Homo sapiens
cctgattgaaggggaaccacgtgccggtagtcagcgacaaaacagaccaggccaggaggccgggacagcacagcactgagtcggacaggagagcccgcagtcggggcgcctcctccagctgg

SEQ ID NO: 43443 - DNA, 122 bp, Homo sapiens
cacccacgggcacacgcgcgcacacagacccacaggcaccacacgtacacagacaactcgcgcagggccgcacactcaccacacgtgtacacatgtgcactcccaaagtcactacactgcac

SEQ ID NO: 43444 - DNA, 122 bp, Homo sapiens
cctcgggacacccagcgctttcctcttcaaagccgttttccgtggagtcgggagacgattcgttggcgggagagagaggaaccggctgggaaaggcttgaggcggagggaagtcgtcccggg

SEQ ID NO: 43445 - DNA, 122 bp, Homo sapiens
attcatcaacatattatttgcagagagcctaccatgtgccaggcattattcaaagtggttcgcatatatgccgataagccagacagacaaatatcctgacctcacgttctgacactcttgct

SEQ ID NO: 43446 - DNA, 122 bp, Homo sapiens
gtttgcatttcgaagctgcaggaaatctagtcatgctggggaagtggtcgtggagtcggccgtcatgggattcccgtgggaggacctgcctgaaaagagatgagagtttctaatacattgag

SEQ ID NO: 43447 - DNA, 122 bp, Homo sapiens
atttggttatgaaggacacccttctggcagggatatgtctttctctggaattctgaatagcggatcatttcagatcacttgggagtgtattatattagattttccttagttaaacactatag

SEQ ID NO: 43448 - DNA, 122 bp, Homo sapiens
tgcatgtctcaagctgcaaggcaaactccattcctcatattaaactattacttctcatgacgtcaccatttttaactgacaggattagtaaaacattaagacagcaaacttgtgtctgtctc

SEQ ID NO: 43449 - DNA, 122 bp, Homo sapiens
gaggcagcctggctggcacaagggacgggcacatcggcctcagcaggggccgcgccaggacgcatggctgtgacacacttgggcacccctccgtgtgaggtcctgatggaggtgcgccgagg

SEQ ID NO: 43450 - DNA, 122 bp, Homo sapiens
actgctcccttggtaagaaaaacagaccacccttaggagcagccagagagctgctgaggccgtttcaacaataagctcactgacaattccagaatccatcgttctaggatactccttaccct

SEQ ID NO: 43451 - DNA, 122 bp, Homo sapiens
gtccgtgagggagacccacaccgtacagactctctaagtaatggctttcttccacatagacgtgaatgtttaaaggccagtgaacaccacccctatgcactcaggcctaagcttaatcagcc

SEQ ID NO: 43452 - DNA, 122 bp, Homo sapiens
cctgcttggaggtcgctggtgtgtgcgtgcgcgcgtgcgcagcctaactccttccagccccgggtggtgaaattagtttccaatactagtacctttcaagtttccatttattttgactgtac

SEQ ID NO: 43453 - DNA, 122 bp, Homo sapiens
ggctctccaattgtgctaagaggatgctctgctgttcctctagaaacttcctcaggtgtgcgaactcagaaatcacctgttgtctcttggtggacacctgagtctgagggggcaggaggcaa

SEQ ID NO: 43454 - DNA, 122 bp, Homo sapiens
catagtaaagcgctaactctagctcatgtgtctggcagagcaatggtggaatgtggttagcgcatagcttcttcagccagcccacctgggttaaaatttggtctttggtgcttactagctat

SEQ ID NO: 43455 - DNA, 122 bp, Homo sapiens
aacccctgaccaaaacgactggtgttatctgtaaatcccagacattgtgtgagaaagcaccgtaaaactttttgtcctattagctgatgtgtgtagcccccagtcacgttcctcacgcttac

SEQ ID NO: 43456 - DNA, 122 bp, Homo sapiens
ggcataaaatgtgttgagtgctttggagctaactctctacatgcatttaatcctctgcaacgaagaagtgagactcagcagggtgagggctgcttgatgccacgtggaaaacgacagagctg

SEQ ID NO: 43457 - DNA, 122 bp, Homo sapiens
cccgactcgccgaggtgcaggcgcacgaatgttgggattgcaggagctgtgcgttccgcccgggctggttaaggccacacagctcggaagagtaacagcggcagccatagccccaaggggag

SEQ ID NO: 43458 - DNA, 122 bp, Homo sapiens
tattgtcgcctgctaccacggctttgtggataccgtggtggccttagcagagtgcccccacgttgacgtcaactggcaggacagcgaggggaacacagccctaatcacagctgcacaggcag

SEQ ID NO: 43459 - DNA, 122 bp, Homo sapiens
tgtataattatttcagttttcactcactagctactttactaaaatgtagccccaaaatgacgggccagcctcagcgtatctgccatatgtatttcaaagattacagtcagaatgagttaatg

SEQ ID NO: 43460 - DNA, 122 bp, Homo sapiens
ccatcggcaacatggaaagtgctggatcctacctggggcgtctggaagcctcactgcaaacggctgcagctgcctgcaggagtgaagagtggcttctgcctgtgtccagcaactcccagtct

SEQ ID NO: 43461 - DNA, 122 bp, Homo sapiens
ctagacctttggtgctatgtggtcttccctcccttgcctgttccaaccctgcaggacaagcgtcacccctctcctcccagggcccagcatggtgcctggcacagagtggatgcttcatgaat

SEQ ID NO: 43462 - DNA, 122 bp, Homo sapiens
acaggctgcgcccagtcagagggtggaaggtgccccgcggtgtgctgagaactgtgcttacgtttctcaacataaagcggagcattgataaaccccagagaacaagctgtgcggcgctgacc

SEQ ID NO: 43463 - DNA, 122 bp, Homo sapiens
cccagctcggtgggagttcttcctttattcagtgtacttcagtcctgggggaggcaggggcgggggcatggcagccaatacccatccagctgctcagctctcgagtctcttacctgttactc

SEQ ID NO: 43464 - DNA, 122 bp, Homo sapiens
ctcgcgggagccgagtgaccaatcccgaggctgcatacaaatgaccacgcagcacgggggcggggcctgttggtggtggcgcggcgccgcggaggtcagcccacccccagccccagccagcc

SEQ ID NO: 43465 - DNA, 122 bp, Homo sapiens
tcgcctctgtgcctggtcccagaagagcgggccctccccgccagaactgacgattccatgcgccttgcaggtactttaactaactgcagctcccccggggtgcaggcctgcagccttcccgc

SEQ ID NO: 43466 - DNA, 122 bp, Homo sapiens
cgtagcccttgcggcctccctcatacagctcggggtcaaagccgttcccctgggagggcccgatgcaggtcttgctccagctgctgctgcgctccaaggcctccagccgcctccgcacggcc

SEQ ID NO: 43467 - DNA, 122 bp, Homo sapiens
gatacacagacggaggaggccctgcccaggcccagcagccccacagccaggaacaaacctcgtggccgcgtacatacacacagaacaacctagcacagtacaccctgctgcggaggctgcat

SEQ ID NO: 43468 - DNA, 122 bp, Homo sapiens
gcagataaagggagtgcagaaggcacgaggaaaccaaagtgctctgtatcctccagtctccgcgcctccacccagctcaggaacccgcgaaccctctcttgaccactatgagcctcccgtcc

SEQ ID NO: 43469 - DNA, 122 bp, Homo sapiens
gtggataacgagggtgagaggctccccggggtggtgcttgatccacttctccctcttggccgtagagaactgtgggttggggaggtagtccaggcggaacctgctgccccgctgtgcctcct

SEQ ID NO: 43470 - DNA, 122 bp, Homo sapiens
aggcggtgacgtccagtctgtaaaatgtgaaaaacgcccaggccgaaaccacccagaacccgttcctgcagggaggagggtgggtgggaccaacaggggatcagtcactgcgccaaggcagg

SEQ ID NO: 43471 - DNA, 122 bp, Homo sapiens
agcactgctgggatgctgtgttgtgtgaatgaccctcggtgtcatggaggaaggaacaggcgagcgttcctgggatgctgtgttgtgtgaatgacccttggtgtcatggaggaaggaacagg

SEQ ID NO: 43472 - DNA, 122 bp, Homo sapiens
gtgcccatggccagacacaggctcaggaatctgggagaggtgatctgcaccccgagatcccgggatttgtagagttggagcatttgagcaagacagtgaggaaccagtaaacaaacacacct

SEQ ID NO: 43473 - DNA, 122 bp, Homo sapiens
ctacgccccgtcagacaagtggcctgagtcccccgcaacccctgcaggtccggccgccggcgccaagcctcaaggcatccaagccaggaacgatcgcggtcagctctgccacggaacatgtg

SEQ ID NO: 43474 - DNA, 122 bp, Homo sapiens
agcacgtgcctgaaggcaaacgggggctggcactctttctccttgttggggcatgggtttcgcagcttatcagggtgcgtgttcacgaacggcagcacggtcttgtccacgaaggacccgaa

SEQ ID NO: 43475 - DNA, 122 bp, Homo sapiens
gccagcccgctcccctcccatgtgaccccaggcaaccattttaatttttttacagccaagcgtagtggagaactggctgcgcgccggttgccagggacgcggcagccagcttggcggggctg

SEQ ID NO: 43476 - DNA, 122 bp, Homo sapiens
acatgtaaaaggcttgcaacagcgcaggcacacagcctactctgaagacactcacctgcacgtcggtcctcccggcggtcttccgacaacacgtagcgctgagggcaggcgcttgggggcgg

SEQ ID NO: 43477 - DNA, 122 bp, Homo sapiens
cctcagacacagctccaaggagcgcaagctcgcaatcactgtgcgcaaaatccacaagaccgctgaagtcaggagcacagcccgaaagccagccagccgcagactcggctgtgagcaggctc

SEQ ID NO: 43478 - DNA, 122 bp, Homo sapiens
agtgacctgagcccgggcttccgtgtgccaggcaggcctgaggtgagatccctgactgaccggcagtccgggcaccttctctctgtgcccctccctttcctccagttaacacctggacatct

SEQ ID NO: 43479 - DNA, 122 bp, Homo sapiens
agaggaaccccaatgcaacctgaagcctagagtcacaacggatgaagagagtaaacaaagcgtgagaagccgtcccccacacagtgtgtaaactattctgtgtcttgtgcttaacgataacc

SEQ ID NO: 43480 - DNA, 122 bp, Homo sapiens
gcaagcagtgttgccccacttcaagacagcaagggagtgctacagtgcttcttatatctacgttttgggggttctgtgaacttatttatgcctaggtagatcctgcctccaagccagcttgt

SEQ ID NO: 43481 - DNA, 122 bp, Homo sapiens
gggccgcatccgggatgtctcaatagctgtggccttgacgtccacctcggacccctgccccggacccagcccagttcccaatgggccctctgcccggggaggtgcctagtgggagggacgag

SEQ ID NO: 43482 - DNA, 122 bp, Homo sapiens
acccgccccaacgggaggcaggaggctgctgcttgctgtgtgattaacacccagccagggcgcgttggtgtctgcgccagagatcttgtcccgccaaactggctgtagacagtcaccggcaa

SEQ ID NO: 43483 - DNA, 122 bp, Homo sapiens
tgcacacgctggggcacctggagccagaggatgctgggcgggccttccgacacaggcacacgcgttgcacatttcacctactgtatgggccaaagaggcatttggaaaccagcttgggaacc

SEQ ID NO: 43484 - DNA, 122 bp, Homo sapiens
ccgcacgccccagcgagggcgtgcggagtttggctgctccggggttagcaggtgagcctgcgatgcgcgggaagacgttccgctttgaaatgcagcgggatttggtgagtttcccgctgtct

SEQ ID NO: 43485 - DNA, 122 bp, Homo sapiens
gagggcgagcgtgggaggccaagcctggaggggaacgtgggggcctccaggcggcaagaacgtcgggcggattttggagctggtgaagcatctgctctgggaagggagaggcagaagggacg

SEQ ID NO: 43486 - DNA, 122 bp, Homo sapiens
gtaaagctgcctgccagggtcctgctggaaatagggatgacgtcagagagagcctcaaaccgtcagcgttggccaccgccttgcactgcgcccatgcttggagccccgagccccaggccagg

SEQ ID NO: 43487 - DNA, 122 bp, Homo sapiens
gcttgaaaactaggacgattgggcaatatcggccttaactccacctgatggcaggtgacccggatagaaaatggccctgcgtttagccaggatgtggctctccagcttggcttcagtgtgat

SEQ ID NO: 43488 - DNA, 122 bp, Homo sapiens
gcctctgccgccggggtggaagcgatcgattgggtcgctggcagagtctagcacagcgcccggcacatagtaggctcttaattcattcggcattaagcaaatattcattgagagcctactat

SEQ ID NO: 43489 - DNA, 122 bp, Homo sapiens
agctctttgaatctcagaaaaaagtagattttaataaagtgtgaaagttgtcaatcaaagcggagtcacttgtgttcaagaaacaaaaaaacaacccgaacaaatagagtagggtttgcagt

SEQ ID NO: 43490 - DNA, 122 bp, Homo sapiens
agagccgtgactctcatggagggcttcaggaaggctctgtggctgcgtaggtctggcacccggtgctgcctgttgtggggccacgtgagacttccacagctttcccgtgatttctaaaaata

SEQ ID NO: 43491 - DNA, 122 bp, Homo sapiens
tacctcagctctggctttacactggtagccgccttcccctctgcagccgaaaccaacttccggtctcctccgggaagaagccaccgactctgtccttgattggctgtaagagctgtccttta

SEQ ID NO: 43492 - DNA, 122 bp, Homo sapiens
agctccgtcggggagggctggtgggaggctcctgagctccgggtgcgccggccccgagggcggggtgccttgcgaacgggggagctctcgggtgtgatgtagcgcagggcctcctcgtcctg

SEQ ID NO: 43493 - DNA, 122 bp, Homo sapiens
gagtcttgacatacacacaaattgtgtgaccaccatcacaagatatgagaatagtcccagcgcccctccaaatttcttcctccccctctacagtcaactcttccccctcctcagcccctggc

SEQ ID NO: 43494 - DNA, 122 bp, Homo sapiens
agaacagcatccgccacaacctctcgctgaacgactgcttcgtcaagatcccccgcgagccgggccacccaggcaagggcacctactggagcctggaccccgcctcccaggacatgttcgac

SEQ ID NO: 43495 - DNA, 122 bp, Homo sapiens
gctggcacaagtcacgcctgcttcacgctgaaggcagcaggttggcaggtgtgcctgcctcgcactttgtgggcgtggacggggttcgggctttcctgcagacctattcccacgaggtctcc

SEQ ID NO: 43496 - DNA, 122 bp, Homo sapiens
ctgtagactcacccatgaacaaaccatccggaagagacagggaaccttaactggagaggtcgtctgggtgcagaatttggcgctctgagagcctttctatcagggaagcatttccattcacg

SEQ ID NO: 43497 - DNA, 122 bp, Homo sapiens
ttaagctgcgtcctctctttgacctgtcagtgagggagggacagtccaggcagttctgtgcgtgttcactgtttagtagtactcaaaactgccagtgtgagaggatttggaaatcactggat

SEQ ID NO: 43498 - DNA, 122 bp, Homo sapiens
ggagcaggagaactccgagcttcttgcccaggcagagagagcaggagcggaccgcgcgcccgggattgagagtccttgcgctccagacccccacccagtggccgccagggtccccgcctgtc

SEQ ID NO: 43499 - DNA, 122 bp, Homo sapiens
ccactcggcagcgctgcgggctgccgggaactgttctccgctcggggtgctgaaagcggacgcgggagagcgcgcagagaaggcgaggagccgggtcggccaggctctcctgcaggcgcggg

SEQ ID NO: 43500 - DNA, 122 bp, Homo sapiens
ttatttttttcctcctcctgagcccctgagagcctggtagagaaacatggaatatttcaccgtctcttgtgtctgcctgctccagtaatcagcggactcaatcacgcttgcagtgtttttat

SEQ ID NO: 43501 - DNA, 122 bp, Homo sapiens
ctactcacagtgcttttaagtgaaaatggtcgagaaagaggcaccaggaagccgtcctggcgcctggcagtccgtgggacgggatggttctggctgtttgagattctcaaaggagcgagcat

SEQ ID NO: 43502 - DNA, 122 bp, Homo sapiens
agtatgaagactttaattgttattattttaaattaaaaaaaggcagaatacttcatttgacgtcagacttttctgaaatatttggattcaggatgtaaaatattttctgttcaaaattcttt

SEQ ID NO: 43503 - DNA, 122 bp, Homo sapiens
cagagtgacgctgaattttgtaactacgtcaggaggctcttgaactttctgcagctcactcgtggactttgtagagatgcgtgttaaggaagaaggttcagctgagaaaaatgttgaaggga

SEQ ID NO: 43504 - DNA, 122 bp, Homo sapiens
tgagtgtcagctttgtatgcacctccccttcatgggccaatgggaagtgacacggaagtacggattgtttatcagctgtttgactgtgtgtgtggcatttaaacctgaggccatttgatttc

SEQ ID NO: 43505 - DNA, 122 bp, Homo sapiens
ccggggaggtcgccctggcacgggacactgtcgcggggtaggacccgagagggtctggggcggtcaggcttcatcctgagcaccgcccgggtgcagggagcgctgggtgctgggtaagcgcg

SEQ ID NO: 43506 - DNA, 122 bp, Homo sapiens
ctgcaccgacagctccgacagcgccaggctcggcaacgggctctgctccgggtgcagccacggcttgaagtgaggcaggtgcttctgtttccactcggggtacttgaggcacgccttgtaca

SEQ ID NO: 43507 - DNA, 122 bp, Homo sapiens
tggtattaattaactcgtttaacactaacaatctcatgaggcgggtgctgttactattcccgtaatgtagacgaggaaaccgaggcgtgtgctggagcaggatcacggccgtgctcagagac

SEQ ID NO: 43508 - DNA, 122 bp, Homo sapiens
gggtgtcaccacgctgcagatggctctcccacctggcttgttctttgatgtgggtctcaccgtgcttttaacggagtgctgttgagggaaatggggccgccggttggcaggtgacagagctg

SEQ ID NO: 43509 - DNA, 122 bp, Homo sapiens
ttccacgcccacttctgcaagtcccctccggcacctcggcgtccaccggactcctaggggcgagccctcatttccgaggaatgggaccgccttcgtgcccccggggctgccagtccctagac

SEQ ID NO: 43510 - DNA, 122 bp, Homo sapiens
aacctcagagaacatgtcacggagtccccccgggagagccacagcagccccagagaggcccggctccaccggaccgccctgcaacagagatacagcgtgagtcaccgctggcagcctggctg

SEQ ID NO: 43511 - DNA, 122 bp, Homo sapiens
caagtcaccaacaaattgtggtgtgataagctactggcctaaacagctggaagcatgacacgctttttaaagactaaagaaatgaaatatccagtttaaatcaaaggataataaatgcaaga

SEQ ID NO: 43512 - DNA, 122 bp, Homo sapiens
ggggagaatgggtcggcgggtttttttccccaggacctgggcagggtcaatggtgggggccgctgtcgcatccttggctggtgtttccacagctgagaaccactccagggccaagcccagag

SEQ ID NO: 43513 - DNA, 122 bp, Homo sapiens
cctcctttggattgaagtacaatttgaccctcttcggttttttgcatttctgagctttgccgttgggtacagagtttgaggtgattcgggaaaggagtgtgatgagggaggctggcgccccg

SEQ ID NO: 43514 - DNA, 122 bp, Homo sapiens
ggcccgggtcccgctcgactaccggcgcgcactcacctggacggtctcagcctggcgtcgcgcttgccgtccaccacggagggcacacagctggtgagctcggtccagtcggcgtgcaaccc

SEQ ID NO: 43515 - DNA, 122 bp, Homo sapiens
ccctttggccgcgatcccgtgacaatgccggcatccgggcaccaactggcttttgcgaaccgctctccgctccccgcccggattccgaagcccggagccgtttacagtttgaggcgccgtgt

SEQ ID NO: 43516 - DNA, 122 bp, Homo sapiens
cccctggcagttcgctacgtgtaggggcgggtttgccttcagagcaggaagaggtaattacgatggcccagagtgggaaggaaccaagtttccatctggtaggagctggccaggccatgcaa

SEQ ID NO: 43517 - DNA, 122 bp, Homo sapiens
tagacttgccaactcacggctacgtgaggctgggaggggtggggacggctccgaccccagcgctccctcagatgtttttataccccatctcccgtgcagctaggcttttgcaggcggcgcgc

SEQ ID NO: 43518 - DNA, 122 bp, Homo sapiens
ttttgaaaatgcggttttatgagtattgccagctattcagtctctccttaataccatcaacgcatctgtgagatgataaaaacagatgccctcttggaaggcattatggaaaactcacggac

SEQ ID NO: 43519 - DNA, 122 bp, Homo sapiens
aagccgggttctgctcccgggaccgacgccgcgccgccctgcgctctcgccgcctgcgctcgccctgcgctggcccgggtcgctgtgctaatcgccgagctctccccaaacttcctgcatgc

SEQ ID NO: 43520 - DNA, 122 bp, Homo sapiens
ctctaccctcggtcctgcgctctgcgctggcatccagagagcaaagtatgcagttctacccggagactggccgggcggtggggaacccgcagctcccggtgtgtgtttgagggagcagggac

SEQ ID NO: 43521 - DNA, 122 bp, Homo sapiens
gacgaaacaaatgctatggagagagggcagcaggagaatctgcacagtgagcagccggctcggcctgtctgcattcgctgccttgcttagccactcagagtgaatgggaggctgcctggagc

SEQ ID NO: 43522 - DNA, 122 bp, Homo sapiens
ctctctaagatgtgtgcagcttaccttgtcactccttactaaccgacttcttaaactatccggtgaaaagaacattaaagaaagagctatttcgtattggacccatgtagagaaatattcag

SEQ ID NO: 43523 - DNA, 122 bp, Homo sapiens
ggcctagtacctgacggcacggtgtttcgatcacagaccgcgtccttgagtaatttgtctcggatttcccagctgaacatgcccgggttctctcttttgtattcctcaattttcttctccac

SEQ ID NO: 43524 - DNA, 122 bp, Homo sapiens
agctgacgggggaaatccactggcagcgagtcggatgagtcagcgctgagtcacgctcggcgctacgtgccggcctgggcggccgcagcccggggcccgcagccgcggagtcagcagagatc

SEQ ID NO: 43525 - DNA, 122 bp, Homo sapiens
ggcctcccatgaactcagtagtggaagcagtagaagcacccggtgccaggccctgcccagcgcccagcttcccagcctcccttggaggccggccctggtttccacaaacaaggaattcctcc

SEQ ID NO: 43526 - DNA, 122 bp, Homo sapiens
ggcgtttttccgaggactgtgttccacttggtctgtctctgatggctattaactaataaccgttctcattctgctgctgtgggaaataagcaacaacggaaaagtaatcgataatcttagag

SEQ ID NO: 43527 - DNA, 122 bp, Homo sapiens
tacacccgctgggctgtttatatccccaggggcccacaaatacgcatctgaagatgcgcccggggccttcgcccctttccaggcttacttctcaacgcaagaagactctcacgtgttgctac

SEQ ID NO: 43528 - DNA, 122 bp, Homo sapiens
actccatggacgcagcgacgagagtgatcagcaggagtccctgcacaaactgttgacatccggaggcctaaacgaggatttcagcttccattatgcccaactccagtccaacatcattgagg

SEQ ID NO: 43529 - DNA, 122 bp, Homo sapiens
ggcctcagcgtcctcctctgtaaaatgggccccttctgagggctggctgcgcgctaatggcgggaggatgcgaagagggccaggcagggcagagggaccgggagactcggtgtcccgcgcag

SEQ ID NO: 43530 - DNA, 122 bp, Homo sapiens
ggctagttcaaaaggagcataaaggactacttgaggatggagctcactctcttcagcttccggccctcaacagtggcatctgtaaaggacctcccagataagactgtctggcttcagagagc

SEQ ID NO: 43531 - DNA, 122 bp, Homo sapiens
gtctaccacgcctcaggtgtttgctcgggctgggccacgaaccctttcctttttggcctgcgcccggggtggcccctaacccgcagcgcacggccagacccagcgctacaaggagggcgcgc

SEQ ID NO: 43532 - DNA, 122 bp, Homo sapiens
gaagcggccccggagggcccattgtccgcgcttccgttccggctccgcctcgtcctcccgcggccagaggtgcgacctctgagcccctggccagctcccagccggcctaggggggcgggggc

SEQ ID NO: 43533 - DNA, 122 bp, Homo sapiens
gagaggtgcaggcacacacatctctggcttggggacgggcaatcaaggggcatatttgggcgtgaggagcttccctatgcccctcacctctgcattacagcccacacactgctgccctctct

SEQ ID NO: 43534 - DNA, 122 bp, Homo sapiens
ctcagtttcttcatcttgaaaatggaccattaatgtccagttacagcctcttccccaggacgctgtgagggagagatgtgacagtaaagtgcctagagcaggatgtagaaagtggaccctca

SEQ ID NO: 43535 - DNA, 122 bp, Homo sapiens
gtgagaatccacccaccaagagctggcctcttagctggtatatctactatgcttggcccacggaattcagtggctgtattaattgccctctggagaaagatgtgcctaaccaatgcttggta

SEQ ID NO: 43536 - DNA, 122 bp, Homo sapiens
acggtctctcacgaaagggtctccagacagttccgctgctccgggagcagcccccggccccgcccccgcgtgcgcctggccccacccccaagcgctccatgaccagcctccacgtgcatccg

SEQ ID NO: 43537 - DNA, 122 bp, Homo sapiens
ctcctccttgtgacctgggcgacactcaagacagaggcaaacaagccttggcgtgcccttcgctccgaaaaacggaggaagccgccgaaagcccaggctcaaccctgcacctcagagccgcc

SEQ ID NO: 43538 - DNA, 122 bp, Homo sapiens
gggcagctgctgcagcctggggacaagaacatcaaatgtccgagtctgagctgcctggttcgtgttggatctgttgtttaccagctgggggaccttggcaagttacgtaacatgtatcacac

SEQ ID NO: 43539 - DNA, 122 bp, Homo sapiens
caggccaccctcccagaactccttgggggtgcctgtgtttgccaggacccctgcagtcagcgactgaggaagagcgcccgcgagtggaggccctcagtcacggagtccacccgggcagtcag

SEQ ID NO: 43540 - DNA, 122 bp, Homo sapiens
agggcccctccgggcattcactatgggcacctgagtgttcgacccctggacttcatgcaacgtgaaccctggcagatcccctcgtggcctggtgtagccctggagccctcccctggggctgc

SEQ ID NO: 43541 - DNA, 122 bp, Homo sapiens
ttacggcgcgggtgcgcgagtttgcggcagcgtgacgccctcaagttttggcgggaaaagcgctgcatttggattcctgcagtggtgggcaaaggacagtccggtgaggaagggcggccggt

SEQ ID NO: 43542 - DNA, 122 bp, Homo sapiens
ccaggggcacattggagcacaaagaactgtgatcaacaggtaaactacacctaaaaggaacgccaggcttgatgggcaaaggggagccaaggtaggtccctctgcaggttcccgacagggga

SEQ ID NO: 43543 - DNA, 122 bp, Homo sapiens
ggagactaaacagctatgagggagtcatgcttccgtttgccactgttgtctcctttgtctcgtataggctatcagagatgtttcctggacttttaagagtagctccaacagaagttttgcct

SEQ ID NO: 43544 - DNA, 122 bp, Homo sapiens
gtgtgtatgtgtgcgtgtgtttgggtgtaacgggcctcttgtttggctgcgcggcctgtccgtcactgcgcgggccaatggcaggctgccttatataaaatgagtgttttcagtctctccgg

SEQ ID NO: 43545 - DNA, 122 bp, Homo sapiens
tgcagccatggggacccgagtcatagaaagcggaagcccagagaaggagagagatttgctcggggccccattctcaagctgactctgcatggcatcacctcgtcacttggtggcactgacca

SEQ ID NO: 43546 - DNA, 122 bp, Homo sapiens
ttgttgcaaatgtgaaaggttctcctagaagactttttacctttctttttcttcttcccccgccccctatctgtcttcctctccctctttctcgctggtggcgtctgcagctgtgctagacc

SEQ ID NO: 43547 - DNA, 122 bp, Homo sapiens
gtggaatctgtccggtgtggggactgtcctgtgtggaagctgtctggtgtggggactgtccggtgtgcaagctgtccgatatggggactgtctggtgtggaagctgtccgatatggggactg

SEQ ID NO: 43548 - DNA, 122 bp, Homo sapiens
accttaaattttttaaagataatttttatttgccctctaacgaccatgtttcctgctccccgtcaacccccttcccccctcccactgatcaatctttgatctttctctgcatgctccctacc

SEQ ID NO: 43549 - DNA, 122 bp, Homo sapiens
ccggggcggctggaggccaaagtgggctgcgctgtttgctttatgcggccagtcccttcccgcccaccagactaccctcgccctgccggactccgccctccaggaaccctggcgcccagggc

SEQ ID NO: 43550 - DNA, 122 bp, Homo sapiens
tgcttctgaaaggaacttgcaggctgggcagccgctgctccagggcctggacggtctccacgtatgcagaggcacagccgagccacacacccaccatgcaagacagggcctggagacccgga

SEQ ID NO: 43551 - DNA, 122 bp, Homo sapiens
gtctatcagctccttccggcgttgcgattggccacaggctgtcttggcctctcggacgcccgcctcctagttgctaggggtttacttccccaaagtacacgggccccaccttgtggcgcaac

SEQ ID NO: 43552 - DNA, 122 bp, Homo sapiens
agacactctggcagggtctgcaggttcatctgtgaggcttcctgtccggctggggaggggcgaccccaattctggggtgggacaggtgggggtaggtgactgctgcagctgcttagagctat

SEQ ID NO: 43553 - DNA, 122 bp, Homo sapiens
gtgggggagggagagagagacagagacagggagacagaggagatggggaggaggtgggcccgtggcccccacgccctaccccgtgggggtctccccagctcagggccccttcctcctctgtg

SEQ ID NO: 43554 - DNA, 122 bp, Homo sapiens
ccggggttcctaggctgcagccaggtttgaggctttgtgcagtgccttcctcctggaatgcgccctgccccccactttcctagagaaactcatttttgccctttcctatttgtccttggaga

SEQ ID NO: 43555 - DNA, 122 bp, Homo sapiens
cagcactgaccaggctggcctgggtggggtggccaagggccccacctgatgggtgcagggcgggggtctctgggtcggggttttctttggaaagctggaccggccgtgccctgcgtgtggga

SEQ ID NO: 43556 - DNA, 122 bp, Homo sapiens
gcagacggatccgcttttccgtgtgttcgccgacgccgcgggggcgtggcgcggccctagcgcattgtaagcagttgggggtcatttcctcgaggccctactcgctagccagcgcccccggg

SEQ ID NO: 43557 - DNA, 122 bp, Homo sapiens
gtcaagcccctgtcaagccacctggtgctccgtgtcctgtggatggtagctgccctgaagcgggactttgcagactgaagtgctgtctcttcagagggagtgcaggtgtccggctcctggtg

SEQ ID NO: 43558 - DNA, 122 bp, Homo sapiens
acctcaatagcccgatgggggagcagagggcagtggcagacagatgggaaactgaggcaccgaccactttgctaacagtgcacacagccagcctcagagtctgtgcttccaaccaccatgtc

SEQ ID NO: 43559 - DNA, 122 bp, Homo sapiens
tcccgactgctggccttggactgtcgactttctcaccctctgtggtcagcagccctgggccggtggatcagaagaggtgagtcctctgtcaccatccagctgccggagctcatagtgacagc

SEQ ID NO: 43560 - DNA, 122 bp, Homo sapiens
tcatcctttaagtgcataaattttatggatgcaaaagtagaagtaaaggggaggcaaatccgaagtcgtgaacgtatttgcaaactttgtttctgaaatgtatgttctaatctcttctggct

SEQ ID NO: 43561 - DNA, 122 bp, Homo sapiens
atgtttaagctacagaactaattactgtgaaaagacataaaggaatgagaagaccaaaaccgtatcctcatgatactgacaaatcagttggactgagcacacatgaatcaactgaagaacac

SEQ ID NO: 43562 - DNA, 122 bp, Homo sapiens
tgctggtttcagcactgctctcagatggttaaaaaaccactctcaatatataatatctcccgcctgttatgtaatagtcacttcaacagtttttatgttgtttaacttttcaatacaacctt

SEQ ID NO: 43563 - DNA, 122 bp, Homo sapiens
cccttggggaaggcaggctgcccttagcatacagaaaccccctcctggcagccattttatcgcatctcttattctttggcttcttcccggctcaggcctcagtgaagcccagttcactccag

SEQ ID NO: 43564 - DNA, 122 bp, Homo sapiens
gggtatctctgcggggtgggccctctgctgagtgggttcacggagtgagtcaacggagggcggtgcccagtgaggctgggattgaaccagggcaggaagcatggggggccgggagggcaccc

SEQ ID NO: 43565 - DNA, 122 bp, Homo sapiens
ggctcgagcccttgacccaaaaccctcagcgaaacggagagccgcagagccggcctcgggcggcctttgatggctttgttattgtttgggtttgaatcgatacgcccctccccatccttcct

SEQ ID NO: 43566 - DNA, 122 bp, Homo sapiens
ctggaatccagaaatctggtgggtttaggagtgcagggacgaagctgagcccaggctgaccgtgccctggaaggagcacggcgttgtggagacatggactatcagcagcgcagccgggatga

SEQ ID NO: 43567 - DNA, 122 bp, Homo sapiens
ccggagctggagggacgggattgtagatccggctccgggctcccgggcgggagcgcagcccgtggcatttaaagagacaggcgctcactccccgagctcgggtctttttcacattgcgccga

SEQ ID NO: 43568 - DNA, 122 bp, Homo sapiens
gttgtgcacggtgtgccattttgcattctgatttcttaacaaagcgtgctgtcccccagccgccggcgtctccgcaggtggggtgctgtatttcctgtctgtgggtggcagcgggtgcggac

SEQ ID NO: 43569 - DNA, 122 bp, Homo sapiens
cgtgccaagcactgtactgaggacaacatacatttatgcccttgaaactcaaagcaaactcgcaaggaggctgccctgattgcccctattttaaagaacgagaaacggagactcagacagag

SEQ ID NO: 43570 - DNA, 122 bp, Homo sapiens
cctcagaggaggagaaaggccggagccagccgaggtttgccgagggcggtgttccggacccgcgcggtgcggggaggaaggccgagggtgggagaggaggggcccggcggaaactgccgagg

SEQ ID NO: 43571 - DNA, 122 bp, Homo sapiens
tacgaagagaaagtgatcaataaaagaaagatagtaaaagtgaaactgaaagtagcctgacgagcctcagttgaagagtgaatggtattgaaaagttgcagtgttgttttcctctaacggct

SEQ ID NO: 43572 - DNA, 122 bp, Homo sapiens
cgatacattcctaattgactgaggggcaggtgaagctcccgccccatgcaggctcattcacggtgggaataaatggctctttctcaactcacactgctcacaatatatcatcagggaaaaga

SEQ ID NO: 43573 - DNA, 122 bp, Homo sapiens
agtccgtctgttaaactcactcccagagccttaagtcctgaaaactgcttcgaggaaccccggcgcttctggacttgatctgcacatgcttagtgtcagctccgaagcggccgctcgcccac

SEQ ID NO: 43574 - DNA, 122 bp, Homo sapiens
gctgtggaaccacaggcctgtaacttaagcttcactcggctccatttgggcagtcagggccgtgagaccccctttgcaaggtggttgtgactgcggcgtgagagaatgtacatgaaggtgct

SEQ ID NO: 43575 - DNA, 122 bp, Homo sapiens
gccatacacaagctgctgactggccttgtagccttctgaggtagatgctcacaagccctgcgcttcatatccatgcattctgaatcccaaaacccttctccccaaaaaagctcccaaaccat

SEQ ID NO: 43576 - DNA, 122 bp, Homo sapiens
cagtggaggcccccttgaggaaatgacttcagcctgagagttgaggaatcagtgtgggatcggaggaaggatgaaagagccaattgtagaagcccagagacaaaggatagggtcctggaaag

SEQ ID NO: 43577 - DNA, 122 bp, Homo sapiens
ttttctagttaccactccttttttttctgaaatgaaaagtcaaggcatgtgaaaacctgacgttcacagtaatctaagcacatccttgctctgtcagggagagattctgcctccagatggtg

SEQ ID NO: 43578 - DNA, 122 bp, Homo sapiens
tggcttagggtggtgttccctggtccgaagcccggagctaagggcaccgggtctgcggtgcggctgcgaggagcagggaagcgcaggcccatggcagccgcgaggcggaggagcgggccagc

SEQ ID NO: 43579 - DNA, 122 bp, Homo sapiens
gatctccatgtcatctctgattaggaactccttcccactctcagccttaactgaagacagcgtacattctgcagttagaataagaacttctggctgggcacggtggcttatgcctgtaaccc

SEQ ID NO: 43580 - DNA, 122 bp, Homo sapiens
ttactggagacctgtcactgtcagagccttaaaatatcaccgacggggccttaatgtcaccgaggtagagagaaaagggcagtagccctagagactattgcgacacagtgtgcccctcataa

SEQ ID NO: 43581 - DNA, 122 bp, Homo sapiens
tcccccactccccgctacgaccccctttccccgcttgattgtcaagcctaaccttgcccgcgtagtcatgggatgtctaattttatttgcatctaggctgctgagagcgctccttgctctgt

SEQ ID NO: 43582 - DNA, 122 bp, Homo sapiens
tggggctggtgagggattaagtgtttccataaatacacggcctcctcccatccacaggaccgggtccccagcggtgggggcgcagaacccaaggagggcgtggcctgcacaggtgagggtgc

SEQ ID NO: 43583 - DNA, 122 bp, Homo sapiens
gctcaatcctccaaggcctcagtgccgcccccagtctttcctggcagaagaaatagtagccgaccactgttggggaaactgaggccagaattctgacttacagagggtagctggggggaagg

SEQ ID NO: 43584 - DNA, 122 bp, Homo sapiens
tttcctcccctgcccccaattatttcaattgtccttgtctcttatattcctattttcttccgtaggctaatttgagagactgcattgtttctctttcccttttggaagttgagggtggcccg

SEQ ID NO: 43585 - DNA, 122 bp, Homo sapiens
cctgcagccgcggaaaccctcctagaagtggatccttcagatgagccatggccagcccctcgacagcaacctcctgggaaaaacgtccagctaagccacaccccaactggaagtgggtcctt

SEQ ID NO: 43586 - DNA, 122 bp, Homo sapiens
cctccggctgctgcgctcctgttttgagcaggagactgagctttctggcggctctgagcgcgctcgtgtcccgggcgggggttcgggggaggggcgggactggcggcggctgcccgggggag

SEQ ID NO: 43587 - DNA, 122 bp, Homo sapiens
tcttgaaaaaggtttgtgtccaccgccccccgtgctggggtgtgcagggagtggagtgtgcgctgagatcgtatctattttaaatcaagccgatgtcctggcgtccttttttgaatacagtc

SEQ ID NO: 43588 - DNA, 122 bp, Homo sapiens
gaattcatgaaagaggccccatctttatagttaacattgctgtgggaggcatccactccacgaatgtgtatcaagctgagcatttacagtgctaagcgtggagccaggcactggggaaatgg

SEQ ID NO: 43589 - DNA, 122 bp, Homo sapiens
ccttgattgcagtcttggggaacctcaagcagaggagccatctaagctgtgcccaggctccggaaccacaaaaaactgtgagataataaatgtgtgttgttttaagttgctcaagttgtagt

SEQ ID NO: 43590 - DNA, 122 bp, Homo sapiens
cagtctccaagtccagacaccatcacctcccagcaagggccaaggtgagagaagctgccccgtgaagcaagaatcctggtgagagatcaggaattccttcttaggagacttttggaaacata

SEQ ID NO: 43591 - DNA, 122 bp, Homo sapiens
ggggtcctggcttggagccccaatccagagactcagcagccctgccccggcagagcctagcggagcacgttgggaaccctgtggacactgcacacagcaccctctgtcctcacggagcctgg

SEQ ID NO: 43592 - DNA, 122 bp, Homo sapiens
tgggggaagagtttggaattcagaatccattgaggccttcactcaccactttccctctctcgctgtgttcccaaatgtgccacttttctgttggctcacatgcacccatgctctatttgata

SEQ ID NO: 43593 - DNA, 122 bp, Homo sapiens
agggactccggaccccactcccacccacagtttaacaccttgtgccccggaacgcaatcccggaactggttgggttccagtgccctgaaaggctgcttggttctggagtcgccacacgcaaa

SEQ ID NO: 43594 - DNA, 122 bp, Homo sapiens
aaaagaaaaaaaaataaaacattttaaacatctttgctaactttggtgggcttggttacccggcatgataacgcacggaaggttttcaggtttttcggtggaaagacttgcatgcgtctgtc

SEQ ID NO: 43595 - DNA, 122 bp, Homo sapiens
tccagggtccccacccccagggcgcgacccccgcttccgggcccccggacccgcgcgccccggaagccgaggctactcagccctggaccctcggccctgcctctgctgcccgagccctgcgc

SEQ ID NO: 43596 - DNA, 122 bp, Homo sapiens
cccgtgagagcagggatttgtggaatgactcactgtgtagcggcgtcttctggcggtggacgaggccgggcgcacgattttccccgtgggtgagagtgccctctgctggtccatccagacac

SEQ ID NO: 43597 - DNA, 122 bp, Homo sapiens
atttacttcgcagaggcttaagagtttccactgtgggattttgctcacagtgagctcagacgactcagaggtgtggtgacaacaggaagttccctagggactgactgcaggcagtcccaacc

SEQ ID NO: 43598 - DNA, 122 bp, Homo sapiens
tggaggacgagatgtgtgagggcagcaaagagtgctatgtgtccagcagagggccctgcccggcctgtggccggaggctgggagggagggcaggcgagtgatgccagacgcctgactggagg

SEQ ID NO: 43599 - DNA, 122 bp, Homo sapiens
cacccgctgctcgtacacctgcaggcacccaacagaaaacacggaatgcggaggcctggacgcaaagcagagcagtctgagcctcagcgccgaaagcttccagggatggggtcggaccctgg

SEQ ID NO: 43600 - DNA, 122 bp, Homo sapiens
aaagcagagatgacgcttctcacctcagcacttagtatggcacctggtgtggcacaggcacgcgatgagtatctgttgagtgaatgggagggtggcggaatccccgccgtgaagctgcctac

SEQ ID NO: 43601 - DNA, 122 bp, Homo sapiens
gaaaaggctgccaagagacacgaaaccttggggacacactttgctcctttataagacgaacgcagacccggggtgtcctctcttgcgagctctgacccccctcctcgtcccacgtttcactg

SEQ ID NO: 43602 - DNA, 122 bp, Homo sapiens
ttctttcttgcctccattgtggaatagtagcacattttccccttggtagtcaggatcagtcgccctagacaacaccaaaactttgcctgtcaattcagaggtatgaggagcccaaagtggct

SEQ ID NO: 43603 - DNA, 122 bp, Homo sapiens
aggcccatgcgaagctttccactatggcttccagcactgtcccggtgagcgctgctggctcggctaatgaaactcccgaaataccggacaacgtgggagattggcttcggggcgtctaccgc

SEQ ID NO: 43604 - DNA, 122 bp, Homo sapiens
ccagatccggaatgttcagaggcttgctgttgtgccgttctgccccgatggtatcctgtccgctcgcattggggcgcgtcccccatccgcccccaactgtggtgtcgcgacaggtcctattg

SEQ ID NO: 43605 - DNA, 122 bp, Homo sapiens
ccctctctcccgtcattaatattggtgacggttcagctggcgcggcgcaccctggcgcagcggagggaggcccggccccggcccccggcgcctcccccgctcccgcccaggcctccacgccc

SEQ ID NO: 43606 - DNA, 122 bp, Homo sapiens
gctgctttcctgcctttagagtgctgaccctttgttagtttctacttttcacaaccacatcgtctcttctcagctgctcttttatcaactgaaaattgagagcagctttttttctacataaa

SEQ ID NO: 43607 - DNA, 122 bp, Homo sapiens
atctcagactgctgtgctagcagtcaacgagactctgtgggtgttggaccctctgagccacgtgcgggatataatctcctggtgtgccgttttttaagcccgtcaggaaagcgcagtattag

SEQ ID NO: 43608 - DNA, 122 bp, Homo sapiens
actggctcaggagtgaagctgcagatcttcgtggtgagtgttacggctcttaaggcagcacgtctggagttgttcgttcctcctggtgggctcgtgggctcgctggcttcaggagtgtagtt

SEQ ID NO: 43609 - DNA, 122 bp, Homo sapiens
tctgctcccaacggaccgttaggccctcacctagccttctttggcacctttcttcggagacgcagtcgttccccggctcaggccccgctagggccccgcctgggcctgggatccattttccg

SEQ ID NO: 43610 - DNA, 122 bp, Homo sapiens
ccggcctcggcctcggcctcacagcggactctccacgcccagctagctctcgcctcactgcggtctccccagtccaaagctcctggctttcggccacttcggcaggtccagctcctgcctgc

SEQ ID NO: 43611 - DNA, 122 bp, Homo sapiens
caccctctgcggcgccttcttctgattggctctgagtaatcagagccaaagcgttacttccggcggaaaaggacgcgggagattcgattggaaggctgccggcgtgctactgagttcggccg

SEQ ID NO: 43612 - DNA, 122 bp, Homo sapiens
cttgctccgcgctggtgccgaaagaaagcgtctcctcaccggaaagacgcggctctgaggcgccctcagatacagtccgcccgagggcagcccgggttggcagcagcagcagctggatgccg

SEQ ID NO: 43613 - DNA, 122 bp, Homo sapiens
cccgccgggaaccaactgcagtggtacaccccacggaaagctacgtctccttaccgactgcgcacgcccccaacagactacaactcccagaagcccccgcccgcgttccggcgactgcgtgg

SEQ ID NO: 43614 - DNA, 122 bp, Homo sapiens
agaataatcgataaagcaaaataaaaacaccttctccaagattttgtaactgcaagcgaacgcatggtggcgctgttgactaagaaggcgaattaaaccacaggcattgtgcatgctcggtg

SEQ ID NO: 43615 - DNA, 122 bp, Homo sapiens
ctgtcccccaaggcgcggccgactcgcaaatggggccggcctgggcagggagcggccccccggctgccgccggacagccacattttaaggccttgtagtcactttctcgctagttcgaggaa

SEQ ID NO: 43616 - DNA, 122 bp, Homo sapiens
cagtgtgacctaccgccccttcccgaagctaaaacctctggtgagggggtgagatccatgcgacattgtgggaaaccctgaaaagaactcagggaaaccgtacacttccagacaagctttag

SEQ ID NO: 43617 - DNA, 122 bp, Homo sapiens
ggccggcgtgagtgacagacaggggggcgagctgcgcgaccagcggtttgtttttcggagcgttcctgaggtggagaacggtggccggacggagagactgcgggtctgagggactggcgggc

SEQ ID NO: 43618 - DNA, 122 bp, Homo sapiens
gtgtgcgcaccgatggaagcctcccacggaagtttctttcctccgggctacgggagaagccgagcgcagcagccgcccacagcctcgcctcgccccgcccggcgccagaccagctccgactc

SEQ ID NO: 43619 - DNA, 122 bp, Homo sapiens
gatccagaggggcaacgggggaggctgctggtgaatattaaccaaggtcaccccagttatcggaggagcaaacaggggctaagtccactggctgggatctgagtcgcccgcctacgctgccc

SEQ ID NO: 43620 - DNA, 122 bp, Homo sapiens
gcacccgtaggctctgggggcccgctccccagcagacccgctccctgcaagacccacgggcgtcgccctgctgagaaactggtcccacacctacgtggacccaggtttcctgaggagctccg

SEQ ID NO: 43621 - DNA, 122 bp, Homo sapiens
caccagtgagagccactggcctgcagaggcctctgcccttcgacacaggggcgtgcggctcggctgcctctcaggctacctggcaccaggtctggaggcatagctgcctgggccagccaacc

SEQ ID NO: 43622 - DNA, 122 bp, Homo sapiens
tcccagctctcccagggagactgcgtgtgaaagagcccggctcccccaaaagctccaggccgcgttttgcaggcttccgcatctgcctccctgtctctcttacctccttgatgttcggcact

SEQ ID NO: 43623 - DNA, 122 bp, Homo sapiens
cattctccccgttgacaatcctctggctgaagctcagtgccggtttgatggcaggaatgccgcagcctggccattgggctaatgaggacctgcttcccatgcctcagcccatctttccccac

SEQ ID NO: 43624 - DNA, 122 bp, Homo sapiens
aagggatctgagctactgaacagtctcaaatcacttgttagggccgccgctcgccgccagcgccaaaagaaaggggcccccggaattctccagctacgtacgaggagcgcgagcccacagcc

SEQ ID NO: 43625 - DNA, 122 bp, Homo sapiens
gctccgcgccctcaaggctcggcaggttcccaccctgtctctgtcacctggccgccagggcgagggcttccctactccaaggagattttacagggaacaccaactcagaggctgggaccaaa

SEQ ID NO: 43626 - DNA, 122 bp, Homo sapiens
cctcagaagcctatcttgggaggccacacaccagtgtacctaaggttcgtttacccggaccggaagcgacagcaccgatacctttggcacacttccgcctggtacactacaaacggcctcct

SEQ ID NO: 43627 - DNA, 122 bp, Homo sapiens
aaaggccaagagcaactgacacactgtgttaaaactcactggagcacatatttacaatcccgttaaaactgactcacagaggaggtcctgggaacattagttagtgtctctgcttgcacaaa

SEQ ID NO: 43628 - DNA, 122 bp, Homo sapiens
ctggggtcaagtgatccttctatttcaacctcccgaatagctgggaaaaggtgtgcaccacgacgcctggctaatttttaaaattttttgtagaattggggtcccactggctgggtgtgggc

SEQ ID NO: 43629 - DNA, 122 bp, Homo sapiens
ctgcgggccgggaaaagggtctcgcacgtgcgccccccgcggtccgcgatccccagccgtcggcctagccccaggcgggtcgatcccgctgtccccagccccggaccagcctcctccagctg

SEQ ID NO: 43630 - DNA, 122 bp, Homo sapiens
ctctcaactcccgccgatccctggctcctggggcccgacccaagagcgacaaggaagaaacggaagaacacacagcccgaccaccaagccctgccgcctttgcagctctgcggaggccaggc

SEQ ID NO: 43631 - DNA, 122 bp, Homo sapiens
gcagtgggctttgggccaacttttaagtttgaaaatcaagattccctcttttcaaggggccgccagactgagcagatacaggcaccgtgaaaagagtgtgccatattcagattcaggaaaca

SEQ ID NO: 43632 - DNA, 122 bp, Homo sapiens
ttgaggggcgatgggagacgagggacaggtgatcactgatgggaatgggttcttgaggggcgatgggagacccccacatgtggccgtggcatctgtgagcacagcagtggccctgggcggca

SEQ ID NO: 43633 - DNA, 122 bp, Homo sapiens
ggccccgccagcgctttggagacggctatccgcgcgggagtgcgccacgcggggccggagcgcctattagccgccaggacctcggagcgccccgaccacccctgagcccctctggcttcgga

SEQ ID NO: 43634 - DNA, 122 bp, Homo sapiens
gcggagagccagtggctgggggcgggaaggcttcttggacccctcgcgcttctccgaaatcgtaaagaaatgactaaacaaacgtgggggagcctttaaaaagaaaattgactccgatgccc

SEQ ID NO: 43635 - DNA, 122 bp, Homo sapiens
tgtagagcatgcaaagacaaaaagacaaaaccccaaggaaccctacattatccatatgcacgtctaattcatctttttaacaaccccatgagttaaattttatcttttctgatgcaaatcaa

SEQ ID NO: 43636 - DNA, 122 bp, Homo sapiens
actcacggggtcacactggaagcttccctggggggtggggggaaaccgtgacaccgacaccgtggcatgcaaggagccaaaccattattaaatcaaagactgctggagctcggattccccgc

SEQ ID NO: 43637 - DNA, 122 bp, Homo sapiens
gtcatgagaagactgagatggggacagtgtccctgactcagggaacagctcgtgccaagtcggatgagatacttgggtgtggctgcagtttagggcttgcacatgggcagctcagtactggg

SEQ ID NO: 43638 - DNA, 122 bp, Homo sapiens
gttgcaaaagttcatggaaccatttcagtcgcttcatggaatcggggtaggcatgaggcccgttgttctttcaacctgagccgcatggctcttgtgtctttaaaccttgtggtaggattttt

SEQ ID NO: 43639 - DNA, 122 bp, Homo sapiens
ccaccaaaagtgggacaggcctggaggcctgttcatattacagtgaggcatagacagacccgttttctgatttagttgttaccagtgaaagttctgctgccagtcttttattctcccccttt

SEQ ID NO: 43640 - DNA, 122 bp, Homo sapiens
cttcagccactcagaggcctctacctcaggacctcaaccgatgattgggcgagcgcagtacgggcgttgcctggggaacgccttccgcgcctcgaagtaacgtcagcacgtcgacgcggggc

SEQ ID NO: 43641 - DNA, 122 bp, Homo sapiens
tgtgcaggcaccgggagctggggcagcggggcgggaaggagtgtggccggaaggcctccccgcaccttccccagcaggcctggatggcagatctgggaggtgctgatttggctgggggtgca

SEQ ID NO: 43642 - DNA, 122 bp, Homo sapiens
gttattaggagcatgctggtgctttgtgtcgccaaacccctggcaggacaagattgagggcggagcttctcagatactgccttcagcaaagttctatgagcctgacagtgcgaagaataggg

SEQ ID NO: 43643 - DNA, 122 bp, Homo sapiens
ccatccacagaaacttcagtctcgaaggctgttccaaaacagggatcaaaaaagaggcagcgcctttaaggtgaatgtagcctcattttaagcaccaagttcaggcgggtttgtttaaaagc

SEQ ID NO: 43644 - DNA, 122 bp, Homo sapiens
tcatgttcttattcttccccacgggccactctggagaatagtctcttacctgagttttgtcgtcaggatgctgtattttgggctgagttggacttaacctgatttataggtgatcatttaat

SEQ ID NO: 43645 - DNA, 122 bp, Homo sapiens
gcgggtggacagcaggtacttgaccaggcagtcatggcagaacacatggccacagctcagcgtccggctggcgccctccaggtcccggaacttctcatagcacacggggcactcactgcccg

SEQ ID NO: 43646 - DNA, 122 bp, Homo sapiens
ggttgcccaggccttggctgcagcagtcccgctgccagcactgggagaggttgaagagcacgagacaggccaccagggccactgtcagcagcatgacctttggcttcaggctcatctgcaag

SEQ ID NO: 43647 - DNA, 122 bp, Homo sapiens
ttgcctgaggagtctgcttctgaagctccttgatatctacaatgttgtcccttgggttaccgaaccgttttctcttatttctctatgattgtctgttgggtgacctgagccagtatctttgg

SEQ ID NO: 43648 - DNA, 122 bp, Homo sapiens
taagtggttaaaaatctttgctttagtttgagaaatgtggggtatggattcacacattcacgcaattaacagatatttactgagggcccactgtgtgccacatgctggatttattattatta

SEQ ID NO: 43649 - DNA, 122 bp, Homo sapiens
ccttccttagacacagaaccacacatgcagctaccccgggtggcacagcaccaccattgccgaccacaccagacctcatggagacagtgcacctgtttcctgtttgggagaacaccactcca

SEQ ID NO: 43650 - DNA, 122 bp, Homo sapiens
ttcactcctgagccagtgagaccacgaaccccaccaggaggaagaaattccgaacacacccgaacgtcagaaggagcaaactccggacatgctgcctttaagaactgtgaagcttaccgcga

SEQ ID NO: 43651 - DNA, 122 bp, Homo sapiens
gagcagggcttggccaagcctggcgccagggacttcccccctaccccaccacaggcccctcgccaggtgagaggcaccgacagggtcccagactgatgccccagacaggatgcccagcgcaa

SEQ ID NO: 43652 - DNA, 122 bp, Homo sapiens
gaattccgcggccacactccccgaaaatagttttgtcaagtctcctttctgcatcttcggcgttaaagactcaactcagagtcggtagctgtggctcacgcctgtaatcccagcgctttggg

SEQ ID NO: 43653 - DNA, 122 bp, Homo sapiens
ggcttgcattgtggggaaggccagtacagaccaccaggcaggggctcactgtcccacctgcgtgtagaggctgcctcttcctcctgggtgtcatctgccatccaaagctctgacctggtcct

SEQ ID NO: 43654 - DNA, 122 bp, Homo sapiens
atgtttgaaagtgcagaacgcttgctttaagaaatgtatgataagaaggatgctaaatcccggttctgctgctttgggtaccaaagtcttgcgaaacgacaccaggcgaactataggtcatc

SEQ ID NO: 43655 - DNA, 122 bp, Homo sapiens
gcctccgccggcatgagtttgctccgtgtctgccccacaggacataggaggcacttgtcacgactgccagcgctgaggaccttgctgctgctggggagcagctacgtaggtcaagaggatcc

SEQ ID NO: 43656 - DNA, 122 bp, Homo sapiens
cagcttccagtgagtttcacgtgaaaaaaaaatctttcacttccttccttgggaaatgctcgtttacatttagtgaatggtcctggtagttttgacaaggaaatatattacgaactaatgga

SEQ ID NO: 43657 - DNA, 122 bp, Homo sapiens
gggcccacccctctggcccccttagtgtccagctcgtggccccttggcatttccacaagacgccaagatggagattcccatggggacccagggctgcttctcaaagagcctcctgctctcag

SEQ ID NO: 43658 - DNA, 122 bp, Homo sapiens
gcctcggtggggggcactgggctgggtgtctgccttccctggaggctgcactgcctgagccggtgacaggctgcggactggcctgtcgggcggcagggcagagcgagcaggaagcgctggtt

SEQ ID NO: 43659 - DNA, 122 bp, Homo sapiens
aaaacagggagatcttcacgattataaactgaaccctggaacacccctcctgtccttccccgaacaggcctgtgccccctgctcattctccaggtgcaccccaaatcaagaaagctcaaatt

SEQ ID NO: 43660 - DNA, 122 bp, Homo sapiens
tgactggttctgcagcgcgtcctgcaccttccacacctgctccgtcaggtccgcttgcagcggagcctgcagcagccgcagctgcaagtcccggaagctctcattcagccggttcacattgc

SEQ ID NO: 43661 - DNA, 122 bp, Homo sapiens
ctccaatcagctgggatggctggagcagagagtaagatcaggagtgcagacttatagctgcgctaactttacacaggcaactggggagtccccaagggatgttagaaggatagagtcaatga

SEQ ID NO: 43662 - DNA, 122 bp, Homo sapiens
agtgggtattttgaaggggaaatgatacatcccgatggcctgaatgcagtgaggccgattcggctttgtggtggccgctgatgtcatttcagagaaagagctaaagggttgttttgtttttc

SEQ ID NO: 43663 - DNA, 122 bp, Homo sapiens
catccttcccccgctccggtgatttctatagctagagggctgatttactgcagaaacctccgtagcgccctcctcctgcctctgcaccgtcaggcccggtgggtccggctccagagcgccac

SEQ ID NO: 43664 - DNA, 122 bp, Homo sapiens
agcgggtcgggggcggcctggctgggctggcagagcacgtctcggcggcaaaagaggcgccgggcatgctctcggatgaacttggcagatttagacactcagccctaattgcggcgagctcg

SEQ ID NO: 43665 - DNA, 122 bp, Homo sapiens
acggcgggggcgtgtcggcgggaaggacaatcgggccgggactcgcggtgtccgggtgaccgcggcttcccgggagcagacctctgtgggcactgtgaggcggaacggagcggcggggcagg

SEQ ID NO: 43666 - DNA, 122 bp, Homo sapiens
ccgtgctcccgattctacagcacgggcgcgtgacacccgggtctccgcgcgaaaggagaacgtgggactaaatccacggctccttaagaaggacgtctttggaaactctcgcccttcctcgg

SEQ ID NO: 43667 - DNA, 122 bp, Homo sapiens
ttgacaggagggggcacagaggcagcaccagacggatgcctgccaaggggacgctgcagccgtgctggcgagggaggtcacgggaatgggcacaggcgtctccctccagccgcacttaggtt

SEQ ID NO: 43668 - DNA, 122 bp, Homo sapiens
cagactgctgtgctagcaatcagcgagactccgtgggcgtaagaccctccgagccaggtgcgggatataatctcgtggtgcaccgttttttcagcccgtcggaaaagcgcagtattcaggtg

SEQ ID NO: 43669 - DNA, 122 bp, Homo sapiens
gctgtctcggccaccaatcgggcgccgctttcctgcgcgggcgatggctcctctctggcgcggagggcacccacatttgcatgataaattgaccagactggcggcagccaatgaaatattca

SEQ ID NO: 43670 - DNA, 122 bp, Homo sapiens
ccgggggcgagtcagggcctggtgacggctccccatacaggctggcgtcctccgacccctcgtcttcctgcaagtcccggtataagtccagtggggccctgtaagcagcaggggagcctcgg

SEQ ID NO: 43671 - DNA, 122 bp, Homo sapiens
acagtaattctactggtggagacagcattcgtttcgtcactctgagcccgtggtgtgtgccgtgtgggattgggctaacacatcaccatggatattctaacgctatcctcacctgtgcccgt

SEQ ID NO: 43672 - DNA, 122 bp, Homo sapiens
cctccaccggcagcccggggaggtggcccagctagggcagggggcaggcggcaagcgggccgcgatgcgcagcgcggcgcagcgcagcgctcccaccctgtgcgccaggacctggaggagga

SEQ ID NO: 43673 - DNA, 122 bp, Homo sapiens
cccgcaacggtcccaaaccccttccagggactgggactacggaccctggtccgaccttctcgcgggcttcccactgcgccaatcaaatcccagaaacagtgagtgctagaggcccggctgct

SEQ ID NO: 43674 - DNA, 122 bp, Homo sapiens
gaaattagaggcttcttttctcataaattgtaagttcttgagtagccttaatgctattaccgtgtaaaactcttgcattagatgcaaggtatgtaggtttgtggatatgtgtggggtgtggg

SEQ ID NO: 43675 - DNA, 122 bp, Homo sapiens
acctggtcaaagtgggcggctacatcctgggggagtttggaaacttgatagctggagacccgagatccaggtgagaggccctttgcgagtcggggctgtgtgcgctccggcgggcctctcgg

SEQ ID NO: 43676 - DNA, 122 bp, Homo sapiens
tccatcagacattatttctgctttccctgctatcctctccaaagccagaatctggttaatcgctttcctcaagaaaggatatttctgagagttacaggagaaatgaaagccatgggtcctga

SEQ ID NO: 43677 - DNA, 122 bp, Homo sapiens
gaacttgtagggcgtaaatcagctgttttatcataagaaagtatttctccaggctggacacggtggctcatgcctgtaatcccagcactttgggaggccaaggagggtggaacccttaaggc

SEQ ID NO: 43678 - DNA, 122 bp, Homo sapiens
taccagtccgcccgccctccagcctctgaaaacagctgtttgaatttggagctccgcatgcgcagtgcccggtactcaccccccgcaagcaccgctccccggacagagttgcttggccaagt

SEQ ID NO: 43679 - DNA, 122 bp, Homo sapiens
gatagagatgcccttgaaaatgtgtcacattcttaagatgtcttgccgaagtagcaagagcggagggtgactgtgtgagcaggagcgagagggcgccagctcctgcgggggaggttcctact

SEQ ID NO: 43680 - DNA, 122 bp, Homo sapiens
gtacttaattaaatatatctctgaatagttattcaaaaacttggtagcaagttcctcctccggggaggagatctaaggtggggtgggagagagatttacttttaacctcattttccattctt

SEQ ID NO: 43681 - DNA, 122 bp, Homo sapiens
gctctttggagagactccggaaacgtttctccggtggttaagggcacagatgaactgggacgtcgacaccagctggaactggaaaatcatcaggcggggagtggcctaccccgggaacttcc

SEQ ID NO: 43682 - DNA, 122 bp, Homo sapiens
cggcgcgcggcggccgaggccaggtgagtaccaggcagcctcgggttggcgactcgagctcgaagcctgcctttgggggctgcgcagaagagggacggagctgagggctgatgggggacgcg

SEQ ID NO: 43683 - DNA, 122 bp, Homo sapiens
cagcacctgagagtggggagctgctgggccctgtgtctagctcctctccagggcagggtccgggcagggctcctgtccctgccctcagagccagcaaagccaggcagcacccgcggagggct

SEQ ID NO: 43684 - DNA, 122 bp, Homo sapiens
ctcccctctagcttgcagccttcatgctaccggataggctgatgtggaccgatggggaggcgggggggctctcagggtgaaaggaagaaggttctagatgcgaattcagaacccaaacatct

SEQ ID NO: 43685 - DNA, 122 bp, Homo sapiens
taccaggaagatggaggccactgcagaccgcgtgcccctactagtccctgcggccctgggcgctcgaacctcgggccacagctaggatgggcgcggtggttattcccttttctggaaggagg

SEQ ID NO: 43686 - DNA, 122 bp, Homo sapiens
gacctgccgggaactcagagcttagtaacattcagaagactcagctcaaacgaaccgacacgcacggggaagacccgggggccgagggtctttcctgacagtggccttgcccctcccggttt

SEQ ID NO: 43687 - DNA, 122 bp, Homo sapiens
tgtgtctggtcacatccaagggggagaagaaggccagcatgattggagagtggacacagccggggggcttctgtggttgctcccaccctgggtgttttccctgagagccccctcatctctgc

SEQ ID NO: 43688 - DNA, 122 bp, Homo sapiens
acgcccaccagtctgttctgctgagcccggtctgtgctgctctgaccagacgccgcctcccggcctccctgtgctgatgtctaaggggcaacttccacagcacaccggggagcccgggggca

SEQ ID NO: 43689 - DNA, 122 bp, Homo sapiens
accacgacacctggctgatttttgtatttttaatagagacagggtttttctatgtttgaacgttacaggtaacgttttactcaaagaataatattaatgatgagtattgaagcaagtcaata

SEQ ID NO: 43690 - DNA, 122 bp, Homo sapiens
gagatctgagccaaccttggccgacatgcagcatccacccccagccggggagaggctccgcggtcgctcaggggcatgaccctatgccagtcctggagccacccagagaggacatctgagga

SEQ ID NO: 43691 - DNA, 122 bp, Homo sapiens
ccaccgtgcggtcggggtcccggagccagctgtggtagcggctaggaaggtagtccaggccgccgtagatgccccccgagatggccagcacttcctcaaactcccgttccgtggccaccacg

SEQ ID NO: 43692 - DNA, 122 bp, Homo sapiens
gtgcccgccaacccctgggctccctggggggctggacggggcacactttcggctgcccagcgggcatctgctccaactcagagggcaatgttattgtggcagacgagcagaggcgccaggtg

SEQ ID NO: 43693 - DNA, 122 bp, Homo sapiens
aagttcagtcaaaaaccttggattaatccttttctcttctttttttctcacatcccatatcggcaaatattgtcagctcctacctaccaaataaatccagaattcagacacttctcactgcc

SEQ ID NO: 43694 - DNA, 122 bp, Homo sapiens
tcctagccgcccaaggccagggaccctgcctggcttttcctccagggcagcagatctcagcggcctggcacctcggcacagaggagcgtgtcccccttccgcagaggaagggagtggacggc

SEQ ID NO: 43695 - DNA, 122 bp, Homo sapiens
cctctggtttttccaaggtcgctcacattcttgtgcttgtgtgcatacaaatggacaaagcgataagaagcattagaagccttctaggaaaattgctacaaagcagagaatgttattcctta

SEQ ID NO: 43696 - DNA, 122 bp, Homo sapiens
tctagatgattttggtggcatgcttgctgagccataattactaaagagaatgtaagtggacgggttccctgaatccccggggtccttggagagccatcgaggagaatgtgcaattggactga

SEQ ID NO: 43697 - DNA, 122 bp, Homo sapiens
ctttttaatacatttggagctttgggagtattaaagtatttacaccaagcttgtccaacccgtggcatgtgtcccaggacagctttgaatgtggcccaatacaaattttaaactttattaaa

SEQ ID NO: 43698 - DNA, 122 bp, Homo sapiens
aggggaacaaacggcatacgcaaccgtccccgcgggagccccggcccagctcagcgcacccgccagcatgccccaccctgattggtccacttgctcagctcgccggcacccctatatccaat

SEQ ID NO: 43699 - DNA, 122 bp, Homo sapiens
gctgggcgtggtggcacacgcctgtagtcccagctactcgggaggttgaggcaggagaatcgcaagaattcttatacattatatgtagaaatgtaaaatggtacagcatagccagacatggt

SEQ ID NO: 43700 - DNA, 122 bp, Homo sapiens
tggcttggctccctcatagcatgatggctgggttcccagggagaatgtcctaacagaccacgtggcttttttcttcttctttttttgagatggagttgtgttctgttgcccaggctggagtg

SEQ ID NO: 43701 - DNA, 122 bp, Homo sapiens
ggtttctgccaaatgcagttagctttgcttcgcttccctaagtgcgttcccccaggggcccggcagtgtgctaggggcaccctgcttcgtaagtgaggcagacagcccgtgataaatgccaa

SEQ ID NO: 43702 - DNA, 122 bp, Homo sapiens
gccctggctctatgagctccaggggctgccccctgctggtcctgcctcccacctgccctgcgcacctgtggctgcctcctcacctgtggctgctctgccctggtcccctgagctccagggtc

SEQ ID NO: 43703 - DNA, 122 bp, Homo sapiens
cacattgacgctagaaaaaatgcctggcagtatttcaaatcatgatgcctatttttctctcgatcaagtaacaactcaaattatactttaaaaagaaaaaaagcaaattataaagttgcatt

SEQ ID NO: 43704 - DNA, 122 bp, Homo sapiens
ggccattcagccgccgctgtccccgctgcgcgccctcgcgcctctgcctgagaagccaggcgctgttcccccaccccagaagaggatggcaaaggtggctaaggacctcaacccaggagtta

SEQ ID NO: 43705 - DNA, 122 bp, Homo sapiens
gtcctgattccatctcaggagccactctgctgcgtttcctcatctctctggtcatgggggcgcccatcccgggcagagctgcaaatggggggtgggtgtggccaccaagccccctcccctgg

SEQ ID NO: 43706 - DNA, 122 bp, Homo sapiens
atgcccacggaatttgattttgatgatgagccagtgacaccaaaggactccctgattgaccggagacgcaccccaggtacaaacgaagaggaaacagttgggggaggtgaagggcctcggct

SEQ ID NO: 43707 - DNA, 122 bp, Homo sapiens
tatgggttaatcttaatagcagctaaatgtttaacacattctgtggcaaggactgtgcaccgtgcttctctcaacagcctaggaggtgggtactattatcattctcctttaaatatgtggaa

SEQ ID NO: 43708 - DNA, 122 bp, Homo sapiens
gagccagtacatgaaagggcaaggctttaaactcaggtaatggaggaggcctggaatcctcggtgtctgtggtaggccatctccaagacagtccccagtgatcctagcctcctggtgttcac

SEQ ID NO: 43709 - DNA, 122 bp, Homo sapiens
tttttttggaggtggtgtctgcctctattgcccacaggctggagtgcactggtacaatctcggctcactgcaccctccgcctcctaggttcaagggattctgctgcctgagcctcctgagta

SEQ ID NO: 43710 - DNA, 122 bp, Homo sapiens
cctcccagacggagcggcggccgggcgggggctgccccccacccgagtgtgtctacctgtcgtttgtggtgggacatttagactgctgccctcccaatttggtattaaaactcaatattgca

SEQ ID NO: 43711 - DNA, 122 bp, Homo sapiens
tttgtaaaagtcagttttaaagactcattaatctagttttggcagctgtagatcacctcccggtgttcctcctgatttagtccccatccccaacaagctgggagaactggatactttatata

SEQ ID NO: 43712 - DNA, 122 bp, Homo sapiens
ccctgcgggctcccccgcccctgtccggagtctccccgaccggcaccgccctctgctccgcggcggctggtcccatcaacaaccaaagggctgaggagtgcaggcgcctggcgtgggactgg

SEQ ID NO: 43713 - DNA, 122 bp, Homo sapiens
cagggattctgtggtcctcactgagtcatctggaccagaactagactagcccaaggtcaccgggcgttcctggcgaggccagggccgcgccgcgccgcccctggtgcatcccgggagccgcg

SEQ ID NO: 43714 - DNA, 122 bp, Homo sapiens
ttgaacagggaatgaacatgagtttttgtaacgtgactgaagttgagtttaagtaggaagcgcaggaagttcccaagtgccaggtgtgtgtagctcagagttccttttacagtgaggtgtct

SEQ ID NO: 43715 - DNA, 122 bp, Homo sapiens
ccagcaagtgacactcagcaaacatttgggacagctgagagaattcaacaaagcccataccgttgtctcttgtataacatctcctagtacattcacctcagatcattgttagtcttacttag

SEQ ID NO: 43716 - DNA, 122 bp, Homo sapiens
cggtgcctgcgcaacctgagccccggccgcctcgcgccttatccttggggctccccctggcggctaagccggtccctgcagggaaacgtgcccgttgtctcatctgcatccacttagcacca

SEQ ID NO: 43717 - DNA, 122 bp, Homo sapiens
gatcctggaatactgaactttaagtggtatcacagtcacactgcagccacagagtcaggccgtctcagtgttggtttgtctgtcttgtgacaagggcacaaaagatccatgactcctgcaag

SEQ ID NO: 43718 - DNA, 122 bp, Homo sapiens
cggagaggaagaaagaaagagggagtggtacagagaaggttggggagaagccacagcttgcgagctgggggtataatgaatgatttccaggatctttaggtcctttaaatttgggggtgaga

SEQ ID NO: 43719 - DNA, 122 bp, Homo sapiens
tgctgcaaaactgagatacagaaatccatcggcaccagctttgggggcatggagaggcagcggagagatgggggacgggttgtcagtcttggatgaacagtggagcggtcgggttggcgtct

SEQ ID NO: 43720 - DNA, 122 bp, Homo sapiens
attgatcagtgccaggtactgttctaaggaggtgcttgttatccctcacacaaaccttcccggttggttccttatttactgtgttgctcagcagcctcagccttctctgggtgaggccactg

SEQ ID NO: 43721 - DNA, 122 bp, Homo sapiens
ggggcaggtcccggctgcgcggggcagttgtgcgcacttgggttcttcacgcgggacacacgtggaacgccgacccctgcgcccctggccgctggcaactggcaaggccgggaacagaaagt

SEQ ID NO: 43722 - DNA, 122 bp, Homo sapiens
ccctccagggtactgcctatcccagataggtcagtgcaccagggacccggccgccagcaccgccgacccctcccagagtgacgcccttgttcactgacaaagagacctgtcccaggagtgtc

SEQ ID NO: 43723 - DNA, 122 bp, Homo sapiens
cagctgtctctgtccttcttctggtactttgggggcagtaacagggcaggttggagtcaccgggtgccccacagaggagaggtgggacttggggtcaagcacaagctgcgaggcaaggtttc

SEQ ID NO: 43724 - DNA, 122 bp, Homo sapiens
ggaaatttgatctatgcaaccaggcagcatccataatctttttatgagtaatatgatattcggttgtctcccttcagcttcagaaacgctctggaagtgattctcagggcctgtatacttgg

SEQ ID NO: 43725 - DNA, 122 bp, Homo sapiens
gtcagccgcggagtgggtaggtcctctgaggacgatcacacctgtgggcaagagcacacccgggctctgggccaagtaagcctgtgaatcccactggcgttgtgaacccggagcccttggga

SEQ ID NO: 43726 - DNA, 122 bp, Homo sapiens
ttgaactctgacatgcagacacctagaaagtcagacactaaggtaacagccataaaacgccgcccagaagggggcagtgaccaaaagcacgttcactggcccctgggaaccgcctggcgcct

SEQ ID NO: 43727 - DNA, 122 bp, Homo sapiens
gcaggcgggaaccggggctgcgcatggtgctcatgggccagtgccagttctggccgggcacgggctcagcaggccccacactcagagcagccggctgggggcaccgggcagtgaggggctta

SEQ ID NO: 43728 - DNA, 122 bp, Homo sapiens
cacaatgaatgtaaatgagatcatagaggccaatgtcttgagccatcagaaagattttgtcgcagcagctgccagatgagcttcaggactcctgaccctgggatgccagggaacaagcacac

SEQ ID NO: 43729 - DNA, 122 bp, Homo sapiens
cagggaggcagagttcccctcccagaatccaaaagccggtagggcggggggcaggcccctcgtttggcaactgagaagaggcggctttgggcggcaggatgctggtttatttactgtaggat

SEQ ID NO: 43730 - DNA, 122 bp, Homo sapiens
ggcgggaggggggaccggaagcgcccctcccccacgggctcgccccgcccccgccgctcgcggtcccccacgtcccgcccgcgccccggcccagggccagcccccggtttagggagcatcca

SEQ ID NO: 43731 - DNA, 122 bp, Homo sapiens
ttggtctcacctgccaaggccaggattgcctgtagtccagtcacactttcagccactcctcgtggtgagaggtggctgtcatctgattcacctctgcccccatgcctagcactctgtctggc

SEQ ID NO: 43732 - DNA, 122 bp, Homo sapiens
aggaacagagaaaagttcaacattcctttcccaatgtgatatctttcactagagccttatcgccttcaaatgacaaggtttggctataattcaaatcagataaggcatgttatttattttaa

SEQ ID NO: 43733 - DNA, 122 bp, Homo sapiens
tcttctgaaagagggcgtggcccgcaggaagttctcgcgttacggaaagtgaagtgtttccggctccggtgtcatggccggctcctaccctgaaggtgcacctgcaatcctcgccgataaga

SEQ ID NO: 43734 - DNA, 122 bp, Homo sapiens
atgtcagtcatgtctaggttgcatgcacatgactcattcatttacttattaaatgattgtcgatcctgtttggtgccaggtgctgtgctgaattctggtgttcagaaaatagtacatctaga

SEQ ID NO: 43735 - DNA, 122 bp, Homo sapiens
ttaagttgtccaaagcagttggaaccgttgcggagggtttggcaggctttggatgcatttcgagtgggtatgtggcaattgcatacatacccattggtctgggtgcttgggctgcagctggg

SEQ ID NO: 43736 - DNA, 122 bp, Homo sapiens
aacaaaagtcttttttgaattctcattccaagaggcccagtttctgcaggtgtgtcttttcgatcttaccttgtattcagtattatttcaagcaatctccattttaggcagtgtctactcca

SEQ ID NO: 43737 - DNA, 122 bp, Homo sapiens
cttgtcactccggaggcgggaggctccggggggtcgggctgggaagatcgagccggaggccgctaggctcccaggccccggccgaggctgcgcggccgcacggtgggcaggctcgggtgttc

SEQ ID NO: 43738 - DNA, 122 bp, Homo sapiens
taccagagccacatctcaagggtctgacactgggaaaacaccacgtgcggatcgggcacacgctgatgcttgccctgctcagggctatctagtgttccctgccagaacctatgcacgtgtgg

SEQ ID NO: 43739 - DNA, 122 bp, Homo sapiens
actcggcgggcgctgttgagggagtcgggccgcgactgtggtcgtttttataccttcccgcgcggacgccggcgctgccaacggaagggcgggtagggcggtgcgtgattaggttggcgaag

SEQ ID NO: 43740 - DNA, 122 bp, Homo sapiens
cagctggataagttattcttcacttcccttcctaaaaacacaattgcctagtgctgctggcgcagagtcagaatggccgctgcatttcacccccgaggtggcttccttccagcagtgggtga

SEQ ID NO: 43741 - DNA, 122 bp, Homo sapiens
acaattatctttgagacccgccaaaatcattagttatccccctaataaattcttttactccgcccccataccacatacactcttaaaatgtgttgctagcaagtgtttggggcttgatgaca

SEQ ID NO: 43742 - DNA, 122 bp, Homo sapiens
tcgcgtaccctggcaagaggagctggttagcacctcccgaccccgagaaggcccagggggcgcccggcgggcggggcggggaccgggcgaggcccgcctcccattggccgcatagcgccgcc

SEQ ID NO: 43743 - DNA, 122 bp, Homo sapiens
tccctgtcggctctaaccgctggtgtagtggcggagcacgcgaacttagcaagggctaagcgatcaggaataagaacagcaggaaagccagagctgacttgatcagtttttttttcttttat

SEQ ID NO: 43744 - DNA, 122 bp, Homo sapiens
ctggcgccgaggggttcgaggggttcgtgtgctgtggagacgcagaggatccaggcggtgcggtctgagtgaaagccaatggaaaaagtgtgacatttagaagcagaagacttagcttcaaa

SEQ ID NO: 43745 - DNA, 122 bp, Homo sapiens
tgtcattccgttcctaaagcagcgggaagcatcgcttagaacccagggaatctgcagaggcgggactgaagagagccaagcaacgctgttggaatagagacacaccctgggctagatgcagt

SEQ ID NO: 43746 - DNA, 122 bp, Homo sapiens
gccgggccctgaccgagcctcagtccagcggggccgtggacctagctctgtggaaagcagcgttcggccccgcgcgcgttgaggcacaggaaacacgaactgtggtttcagctattatcata

SEQ ID NO: 43747 - DNA, 122 bp, Homo sapiens
gggaacccgcatttttcaagctctttagttgtttctcttgcatgttaaagtctgaaagtccgtgaggtgtgggtagggagagcattaggaaaaataggtaatgcatgctgggcttaatacct

SEQ ID NO: 43748 - DNA, 122 bp, Homo sapiens
ggcaaagggtttcaccaaaccctttgtaatgggagattcttgccttcttacctttcctcacgtttgcttctctgccagaatgtcttcccgcactttccccagaacccaagttctcctaatca

SEQ ID NO: 43749 - DNA, 122 bp, Homo sapiens
ggttcatctcactagggagtgccagacagtcggcgcaggtcagtgggtgcgtgcaccgtgcgcgagccgaagcagggcgaggcattgcctcacctgggaagcgcaaggggtcagggagttcc

SEQ ID NO: 43750 - DNA, 122 bp, Homo sapiens
ccaactggtattaaacaaagcatggcatccaaccaggaggacagttttgtgtgaatacagcgcaaccttcctggtgtcgctggctgaacagccttcagggctgacgcaggatctgagctagc

SEQ ID NO: 43751 - DNA, 122 bp, Homo sapiens
cccgagcccctccccgccctggatccgatgccgccggctctgactcagcgtccccaggggcgtgcgctgcgctgcaagccgcctgcaggtcccttggggctctcctccaggtgccttctctc

SEQ ID NO: 43752 - DNA, 122 bp, Homo sapiens
tgttgctgtgtacggaggagccagtccgagggaccgcggtgtggacagggacaggcaaggcggggaaggaggagaaacgaaagccacattggtggcgggtgctctgcacacgactcgctccc

SEQ ID NO: 43753 - DNA, 122 bp, Homo sapiens
cgtggagcagagggcggtgctcctaggggaggctcgggccgcacaggagcccacgtaggtcgggggaggctcaggcatggcgggctgcaggtcccgagccctgccccgcgggaaggcagcta

SEQ ID NO: 43754 - DNA, 122 bp, Homo sapiens
aacgtttggggacaggagcgcgatggccttcctcagatagctggggggctggcatgaagacgggagctacagccagcacaggtcctgggccgggagcccagagattgagccctgactctgtc

SEQ ID NO: 43755 - DNA, 122 bp, Homo sapiens
ccgcagatctcctcgcgggtggagtgtgaggagcaaagccctcccttaactataaaaacccgcggattcgctgacataaacgctgtttttttaatcctttggtttctgaggcatggtcagga

SEQ ID NO: 43756 - DNA, 122 bp, Homo sapiens
cgcgcggagcgggggaggggcgggccagggcggcggaggtggcgcaaccgccgcccctcccgaggccaagtttgaaaaaaggacgtggttcccgccatttttcaagcccaaaaataaaactt

SEQ ID NO: 43757 - DNA, 122 bp, Homo sapiens
ggggggaaaaagaaagaaagaaaaagtccctaggtttctccaaacctcttttaatgccaccgtgttagatggctttgctacccatcactgtttcacttctggtaactaacagcttggggttc

SEQ ID NO: 43758 - DNA, 122 bp, Homo sapiens
agaagggaagaggcgtgtgccttgatttctcctcgttgctagtctaacgactgcgctttgcgttcagccacttctcgggccagtccttgcctgccttcgcccaaggctgggctgcctgaggt

SEQ ID NO: 43759 - DNA, 122 bp, Homo sapiens
tccataaccacccgagcaatactaaccatgggtccgagacgttctaattgtcgccgcctccgcggcgaatagaaatctcacatccctttgatactggggatacagccatagaggtgacccac

SEQ ID NO: 43760 - DNA, 122 bp, Homo sapiens
aacaggaagaaggcatgccaagagattaacactagtcatccctgcactgtgggactacagcggctattttattctttatttttcagatattcaaaattgttttataattttttttctttttt

SEQ ID NO: 43761 - DNA, 122 bp, Homo sapiens
tgataggccttaagggtgggggatacctctgggctcgaaatcggcgggcggtgcaaaactcgaggtccagttctcggagcccatagagccaaaaaagcctcagcttgtccggggcgggttct

SEQ ID NO: 43762 - DNA, 122 bp, Homo sapiens
cggaggccactgaatgctggccgaggcctgttcgttcccccagggtctggctgtgcccatcgcccttgcgctcggcgggtccggcttggaaggcccggcttggaaggccccgggacggcgcg

SEQ ID NO: 43763 - DNA, 122 bp, Homo sapiens
attcttctccatccctagaaagcaaggtgctctgtgtggtagggtttaataacacagggccgtatcatccatcactgtctgagttcttcacaattacgacatgcatctcagaaaaatgcctt

SEQ ID NO: 43764 - DNA, 122 bp, Homo sapiens
tcttaagggtatagtgagttcaggtgatctgtccaataagtatcagaagagccagaccatcggggagctgctgggagaagtggaaaaggtcactaaaaatcagcccatcagaaacctcaagg

SEQ ID NO: 43765 - DNA, 122 bp, Homo sapiens
atatgttgcaaatcgtgtcaagtgtcacagccaagatgcaaggagaactcccagctgtggcgaccagggacaggcgatgggagtcggaggagctgcctttggctctgagacaaagcaggaga

SEQ ID NO: 43766 - DNA, 122 bp, Homo sapiens
cagaccagggaggagcatatgtccatttggccaaggcatattagatatgctctacttcagcgtttctcaaataagggacagaggaacatctgcacccactctcctagaatatggattcctgg

SEQ ID NO: 43767 - DNA, 122 bp, Homo sapiens
taagaccagaactggtgatctcacagtcaaatctagtaaacttactaatattatttaaatcgtgaaaatagaaagtaagtaatttttccagtacaaaatgagtgctgaacacttcaaggaaa

SEQ ID NO: 43768 - DNA, 122 bp, Homo sapiens
gcccctggggagcccacctgggccagagccccgtgctcactgtggaacagagactccttgcgcctcgtgtgggggctctcagccagcatggcgaagccgtaggacgtctgggccttgggcac

SEQ ID NO: 43769 - DNA, 122 bp, Homo sapiens
ctttagttaacgcccgtcagtaccgtatacccagggcgcccacaccccgcctttagttaacgcccgtcagtaccctatacccagggcgcccacaccccgcctttagttaacgcccctcacta

SEQ ID NO: 43770 - DNA, 122 bp, Homo sapiens
gtgagggcggggcggggccagaggtgggctgaggccggatcaggcggtgggggcggtccccgtagccccgtgaggctcgcgcctgcgcacgggcccgcggcggggcgggactgcgcgtgcgc

SEQ ID NO: 43771 - DNA, 122 bp, Homo sapiens
cgcaagcgcagcgcgacgtgcgcccggccacgcttcctggaagagatgcattgcggagctcgctagttggggcgttggccttccttaggagtgtgagtctagcgttatcccttttttccggc

SEQ ID NO: 43772 - DNA, 122 bp, Homo sapiens
gtgtgtcagggttgtgggtgaggatttggtccctgtccacacctttccagtgggcccaagcgtgggctgcaggccctgagccactctgcgggaaggtggggcttggagggtagctgccccca

SEQ ID NO: 43773 - DNA, 122 bp, Homo sapiens
tattatgggaggtataaacttagactccaggagttgagaccttgcgccctggagcttaggcgcctgggaactctattgccaatcatatcaccaacctttatgtacttctttcgtcagttgta

SEQ ID NO: 43774 - DNA, 122 bp, Homo sapiens
aggttggagaaggacagacaatcaacaagtcaacagagaaccaagacaggtggcaccaggcgaggcggcctgctcaggtgtggggatggggtgaagggtgacggtggcaaacccaggtagag

SEQ ID NO: 43775 - DNA, 122 bp, Homo sapiens
gctgaggtcagggtgcctggcagctgactccaggggagacctgagaggcgcgggccacagcgtggaaggaagctcttcagccttgaagaaagcgccggggccaggtccgccagcccaaagtc

SEQ ID NO: 43776 - DNA, 122 bp, Homo sapiens
ctcactatgttgccaaggctggcctcaaactcctgggctcaaggatcctcctcatcctctcgagtactgagactgtagatgcccaccactgtgttgggcctttttaaattgaaaagtttaag

SEQ ID NO: 43777 - DNA, 122 bp, Homo sapiens
cttaccccagggaccaggcacagggcctcacagagcccagtgtgggtccctgggacagagcggcagagggagggtcactccaggagcagacttggcagcatgtctgggcctggcaccagcct

SEQ ID NO: 43778 - DNA, 122 bp, Homo sapiens
ctgggcttccgtcctccgcccgcgcccgacggagcctgttcgcgtcgactgcccagagtccgcgaatcctccgctccgagcccgtccggactcccccgatcccaggtaacggccagcagggg

SEQ ID NO: 43779 - DNA, 122 bp, Homo sapiens
gcagcagaataccctgacccaaaataaaaatactatgacaaaaatactccaggaggcagccggctttacttcgtttaaagccggatttcgcttagtcccgtgaaagcgaaggagcaccagcg

SEQ ID NO: 43780 - DNA, 122 bp, Homo sapiens
ttacagaagtccacgcggcaagtgaaatccaggcagtgtgaaagtcactgaccagaccggcggggactctggccccgctgccggccgtgtaagggaagaggcctcccggtgtccaggcctgc

SEQ ID NO: 43781 - DNA, 122 bp, Homo sapiens
ctgtatgggttagaggcaaatgcttcatttttctgcacagtgtacacgttccttaataagcgaagtgtggggtgatttctaaaaggatttaaatggccctcatcagccacgtcctgctgagc

SEQ ID NO: 43782 - DNA, 122 bp, Homo sapiens
gctctgctggtttccattcctttatcttgattccattcctttatcttgattctccctggccgagagcttttctgacccacctaaaatctgttcatttcagaccccggcctttccaggatgcc

SEQ ID NO: 43783 - DNA, 122 bp, Homo sapiens
ttgggctagatttcggttctgccgggtgggcgttttaagggctgtgggcgtcacattcgtcggtgtgtggccaaggggacatgacacgttttaggaaaagtaaacgtgctactaagttgcac

SEQ ID NO: 43784 - DNA, 122 bp, Homo sapiens
aagactcggtctcaaaacaaaaacaaacaaacaaaaaaccagttcctaccgtttatgaaacgccgctcgcagcctgcccctgtgcccttcacgccgtactttgtcccgtcttctcagtgacc

SEQ ID NO: 43785 - DNA, 122 bp, Homo sapiens
tttgatgttcgcacagcaacaaagtcacctaatgacacagtcctcagaacttgtccctttcgttacatgatgcatgactgcacgaaaagacacacgtggctgttacaaataaagttgatcga

SEQ ID NO: 43786 - DNA, 122 bp, Homo sapiens
tgagccctgtcccggatgtgatgcccaatggacatctgctccagtccactgtctgaatcccgaacagtcctccgtgtctcccggatctgggatgaggcagaacgtggcacactcagccgccc

SEQ ID NO: 43787 - DNA, 122 bp, Homo sapiens
tcacatcccagatggggtggcggggcagaggcgctccccacatctcagaagatgggcagtcgggcagagatgctcctcacttcctagatgggatggcggccgggaagaggtgctcctcactt

SEQ ID NO: 43788 - DNA, 122 bp, Homo sapiens
aatgctctgagtcactgcccagtgtcccatgcccagggccagtgagtgcctctcatagcacgactatctctgatgagttcatactctcctagctgctggctcttatcccttctgcagggaag

SEQ ID NO: 43789 - DNA, 122 bp, Homo sapiens
ctacgccttcatgccggccaggagccaggaccccaagaagcctagcagggtctgaggcctcggccttgcaccgggacgccgagtttgggacaccgaacactgggcaaaagagaatcccctgc

SEQ ID NO: 43790 - DNA, 122 bp, Homo sapiens
agtaattttccatccactgacccccacacactgttccttggagataaatgcatacttgcccgtgtcgttttccgacctgagccccgtctctctcccttactgcaagcccctgttgcagtggc

SEQ ID NO: 43791 - DNA, 122 bp, Homo sapiens
ggaggcacggcttgtgccaggaggtggggtatgcggccaccaggcactctagttacacagcgatgggctgaaggctgtgcatcccgcagggagtgagccctccgaccctggaggagttcaag

SEQ ID NO: 43792 - DNA, 122 bp, Homo sapiens
tacccacacgccacgacgcccattgggcgacctaagccggccaccccgccctcatcttctcggccatgccagtagaagactagatgccgggacttcaccccacccttgaagaatgagtggcc

SEQ ID NO: 43793 - DNA, 122 bp, Homo sapiens
cccggggccgaggccaggcccgctgcgagcagcggaggcatgtgctgatttgcatgagaacgggcgggtcgcgtggctcagctggcggccccggcgcagatgacggctcggcagcgggcccc

SEQ ID NO: 43794 - DNA, 122 bp, Homo sapiens
cgggacggacttccctggccgtgggggcgaggcttccataatggggcgtgacttttagggcgggggagtggctagccaatgagcagagaggtgctggccggggcggggcttgcgcgcgggtg

SEQ ID NO: 43795 - DNA, 122 bp, Homo sapiens
tgctcacaggctttaattacatcttcatccctacggccccttctgaagtcggtagatgcacgttaatagtacctttcgttttaggcatggacacattccggtaccagaagctttagcaattc

SEQ ID NO: 43796 - DNA, 122 bp, Homo sapiens
gagtctaccaacccaccacgacctcatattcttgtgcgggtgtctgactcgaatgacaagcgagctgattttttcagtacatagctgggaaatgtagtgagtgataatagagatttctcttt

SEQ ID NO: 43797 - DNA, 122 bp, Homo sapiens
ggcctgccctccccagtgagcagtttcttgtccacagcctctggggctctagcaggcctccgtcagggctgaggatcgcttggcatctgcagaggatgtttctgcctctggttcatcctcca

SEQ ID NO: 43798 - DNA, 122 bp, Homo sapiens
tcctagggcctcgccacaggggtgggcttcggggcagaaaggagccgcccagtgggaatgcgtctaacccacaccctgtaggtccccaggccagggtgcagcacatggtcctcccctagcgg

SEQ ID NO: 43799 - DNA, 122 bp, Homo sapiens
atttgcttttactttcctgtctttggcctttgctctgatgtttcagtatctagactaatgcgaatttcattcttcagtttaaatcagcacgtcagtcagggattcatccaaaccttaatggc

SEQ ID NO: 43800 - DNA, 122 bp, Homo sapiens
ggcgcagttcatccaaggttgctgtgggcctttcctcctcaggggaatcttagaagagggcgattaatgagacaaaccacagcccctaccgctgtagttggtcttgaggccataactgctat

SEQ ID NO: 43801 - DNA, 122 bp, Homo sapiens
ataaggtcaacttaagaattagagagtatgttaatgaaggtaatttctccaaggctatcacgtggaataatcacatatatttttaaaactgagaaagccttgagaaattacaaacttgtttt

SEQ ID NO: 43802 - DNA, 122 bp, Homo sapiens
ctggcgaggctctgggtgtggtgggcgaggctgtggctcctctgtgggaagggctgcagccgcgggggctcccgcacccctcctgtgctctccttcagaagggctctgcctcctttggattt

SEQ ID NO: 43803 - DNA, 122 bp, Homo sapiens
accctcgccaggctcagcagacccctctcctgttgcgttgctccttcggcaggaggtcagcgtgggtgagaagggagcagaggccagatgacccttcatgtcagttcaaggagaggccccca

SEQ ID NO: 43804 - DNA, 122 bp, Homo sapiens
gcttcactagcttcaagatttccacagagaggttaaagacacaccggttttatattttgtcgcatatgttttgcagatatatttgatcaagaaaacttgctgagccaaacatcaagccattg

SEQ ID NO: 43805 - DNA, 122 bp, Homo sapiens
ggacatggatggccaaagcgagcacgccacggcatcctatagcccctcaaatatgtggggcgtgaggcttcggggaacatcaggaagtgcctgtaagagaaaagtaagctgggaaaagcaag

SEQ ID NO: 43806 - DNA, 122 bp, Homo sapiens
aaggaaaaacgctgcttcattaatacagtacatgcatgcccctgcctctatcaaaagacacgttcaaggccgggtgtgatggcacacgcctgtaatcccagcacttcggaaggctgaggcgg

SEQ ID NO: 43807 - DNA, 122 bp, Homo sapiens
aggctggatgttgcagcctctcccaggcatccactctgcagctgaggccaaagtttccaacgggaagggagggtgaggcttctatttgtttcccaagagccagctgacctttgaagctagtg

SEQ ID NO: 43808 - DNA, 122 bp, Homo sapiens
tcttctgggtgccggggttctccagagaaacagagccagtggcacccacatgtgtgtgtgcgcacgcgtgtgtgggagtgtgcgtgcgtgcacgtgcgcacgcgtgcgtgtaaggagctgtg

SEQ ID NO: 43809 - DNA, 122 bp, Homo sapiens
ttcctcatcatttgtatgctcttgagagagtgactcatgtactgttttctattgagttcccgaaagtttataaagagatgacaaacaattggctatgggattgaaataatgcacatgtaaaa

SEQ ID NO: 43810 - DNA, 122 bp, Homo sapiens
gtgtgtgcccttggctggccaggaccctcgaggccgttatttgtctctggtgaagtcctgcgtatgggctcaggggcaggagggtggactgaaaggcaaggtgacccacactgagcttcggc

SEQ ID NO: 43811 - DNA, 122 bp, Homo sapiens
agcagtaatgggattttaaaatattaacggatgtttccacctctctgcagtgttttctgccgctgtctccattccttcaggtatccaggcaattgtgtgctcattatctcaggaaggatgtg

SEQ ID NO: 43812 - DNA, 122 bp, Homo sapiens
aatagaactggattactcagccttctattccacgcctattcctctccattttccttggcacgactgagagccaggctatttttagttaagcagttttctatttttagacaactaccagttag

SEQ ID NO: 43813 - DNA, 122 bp, Homo sapiens
gtcccccgcgccgggtcaaaggtggccaacaccaaagccagggtcatgaactggcccagccgctcggcacacatggttcttggtattaacctcccgtcgggagacctggatcctttgtgctc

SEQ ID NO: 43814 - DNA, 122 bp, Homo sapiens
agtctcccttaggttgagtccaagttctggaggccctcaggagcacccaggcatgggaggcgagggtggttgcagcttccttgagtcttccatacccggttcatgctctcccttccacactg

SEQ ID NO: 43815 - DNA, 122 bp, Homo sapiens
gtggtacttggagagatagtagaccgtatagcgtacgctttatctgtgacgtatgtaacacggtccactaaccctcagtatcaaatccatccccgaggctcctggaaacaacgctgtcttcg

SEQ ID NO: 43816 - DNA, 122 bp, Homo sapiens
agagctttccttccgtctgaaaggctgtgggggacagagacccgcattttgacagcttgtcgaatgtcctgtggcaacatcgctctctggcttctccctgctcacggtgctgcttactccgg

SEQ ID NO: 43817 - DNA, 122 bp, Homo sapiens
tgtctctcgagttggaggcatcttgacttagttgctgggagcctggtacgttgagccgtccgagaacggtacattctgcagataaagaagcgttctgcgttttctgtcttttggaattacct

SEQ ID NO: 43818 - DNA, 122 bp, Homo sapiens
tgcctcgcaagcagcaacgacctctccctggtctctcatcaaactcatcctcccagaaaccgggttcctgccctgtactgtgttcccatggcaacctgagcttactacccgctgctggcatc

SEQ ID NO: 43819 - DNA, 122 bp, Homo sapiens
ttggatctattgctgaacttttctatctccccattagcctcctccagggcagccttgaagcggttcatggctgtggttaacttctcagagggcacgctcctctttccttggtcctggagcat

SEQ ID NO: 43820 - DNA, 122 bp, Homo sapiens
gtttcagattttctggaaaggctacggcctaattcttccatattttcaagtatcacaattcgcagactccaaatgatactgaggctgaccatgttttattcttaaatatgataaattacaga

SEQ ID NO: 43821 - DNA, 122 bp, Homo sapiens
gctccatgacgtcaaagttgaagtgggagaagaagaagacccaatgcccggggagaagtacggtgagcctgtcattattcagagaggctagatcctctgtgttgagaaggatcatgatgggc

SEQ ID NO: 43822 - DNA, 122 bp, Homo sapiens
atttttcttcttttttggagcagtttggaccaggttttctgatgtcatctccccagcctccggatcatcacaaaccatgtcatctccctgggcctccagctcaggatctttcacttcaaatt

SEQ ID NO: 43823 - DNA, 122 bp, Homo sapiens
gcacctctccaggtgggcctcctcgatgccccagtaggccagctcctcctggaaggacagcgcgcacatctcctgcagaagcaccagcttcccggccgccaggaagctcacgatcaccccga

SEQ ID NO: 43824 - DNA, 122 bp, Homo sapiens
taccatcggaagacgatgggacggtgctgctgtccacggttacagcccagtttccaggggcgtgtgggcttcgctgcaggaatccggtgtctcaatgtatgagaggtgtccggctggtagaa

SEQ ID NO: 43825 - DNA, 122 bp, Homo sapiens
gctgcgtgccccggcgcgcacccctcccactcccatccactcggagccacgtcccctgcccggctccggccggctcccaccgtccccggccaccgtcttcgcccctgcccggcccccgcccc

SEQ ID NO: 43826 - DNA, 122 bp, Homo sapiens
aagaggtaaggtaaatgttcaaatccaacatttattctgtccctgagaacaaaataacttcggccagggcatgggtcacatggacaggattaacatacggagtaggaggatattctcaaaaa

SEQ ID NO: 43827 - DNA, 122 bp, Homo sapiens
tccctaagccccggcagccgattcggagactcgggaggccacaggctcagcgcgacaccacgaccacaactaggaggcaccatcgtcgatctacctggggaggcacctacaaagccagcaga

SEQ ID NO: 43828 - DNA, 122 bp, Homo sapiens
ttcactgctttcactggcctggaattccttcctgcacaagatccaggagccctctcttcgcgtctcatcagccctctcttcgcgtctggatcagccctctcttcgcgtctgatcagccctct

SEQ ID NO: 43829 - DNA, 122 bp, Homo sapiens
agcagctctgtcctgccggagatgggaacccacagtgaggctgggcacagaagagtggctcgaaaggacttgtattctaatgtagacttctgaatgtatctaaacaacatacaaacacaatc

SEQ ID NO: 43830 - DNA, 122 bp, Homo sapiens
ctggcctgaggcggatactgacgccctgagggcatggaatagggcggcttgtgcaggtcccgccgtctcgggccttgcaaaaagggcggcctctccaacgcccctaccggaacctccccgga

SEQ ID NO: 43831 - DNA, 122 bp, Homo sapiens
ccgcctcccgcacacctgacgatgttcttgtgcttcagctccttgagtaggcagatctcccggagggcggaactcggcacaccctgcatatgtgagggggccggtgggcagcagtcagatcc

SEQ ID NO: 43832 - DNA, 122 bp, Homo sapiens
cctcccagctgcatgcacacaaccttcaaagcacaggactttcttttgttttttctgagacggagtctggctctgtcgcccaggctggggtgcagtggtaagatctcggctcactgttcaac

SEQ ID NO: 43833 - DNA, 122 bp, Homo sapiens
cccagccccaccccaaagcggaggcccgatcggggttccggtgccccagggctcccgaggcgcacatctggctggcgggcccgcagcccacccaagggcggcaccagctgtgggctcgacgc

SEQ ID NO: 43834 - DNA, 122 bp, Homo sapiens
aatgcaagctcaccaaggtcccctctcagtccccttccctacaccctgaccggccactgccgcacacccacccagagcacgccacccgccatgggagtgtgctcaggagtcgcgggcagcgt

SEQ ID NO: 43835 - DNA, 122 bp, Homo sapiens
tgtcttgggaccccctgtgtcattctgtgacgaggaacacccagcctcctgggctgcagccgcgcaggtctcagccccatttttcccagcccctgttcaagatggagttggtctggctggaa

SEQ ID NO: 43836 - DNA, 122 bp, Homo sapiens
taatttgtggttaatatctggccaactgttagtgacaaattccttgcccaagaggatcctcgacacctcgaccagcatattttctcatttgttcttttaatctgtctaaaaattatgtcgca

SEQ ID NO: 43837 - DNA, 122 bp, Homo sapiens
gcccaccagctccgtaggagaggccttgagctggactcgcccaataggaatgtttgggggcgggacgctttcccagcacgccctctaagagcttggggcagggcttcctgtaggtagcgccc

SEQ ID NO: 43838 - DNA, 122 bp, Homo sapiens
atgttatgactgtagtttcaaattaactggcaaagtggcgcaacgttacagctgtaatagcgcagaggtcctccaatgactttctaataacagctgaaatcagaccgatatttgtgtggtct

SEQ ID NO: 43839 - DNA, 122 bp, Homo sapiens
ggggtctcgcggggcggctgcggtgtttcaccgggaaaggctcgaggagagcgcggctcacgagaggtaaacggaccctgcagaccgtgctgaggcggtcccggtgccgggccgctggagct

SEQ ID NO: 43840 - DNA, 122 bp, Homo sapiens
tacacgacctcctgtttattggaacatggcctctggatggatttccaactgtaggatgtgcggccacgaagtacccatagccacccaggctgcaaagaagatggaggtggataaatggggca

SEQ ID NO: 43841 - DNA, 122 bp, Homo sapiens
agggcagggcaggagagcagagggagacgctcacgcccccgcccccaggcccgcagaagccgtgggtgctgatgaatgcccctcagcccacaaatccctggcaccttgactgtgacaacgat

SEQ ID NO: 43842 - DNA, 122 bp, Homo sapiens
aggctgagacaggagaatcgtttgaacccaggaggcagagcttgctgtgagctgagatcgcgccactgcactccagccttggtgaaagagcaagactttgtctaaaaaaaaaaaaaaaaaac

SEQ ID NO: 43843 - DNA, 122 bp, Homo sapiens
ggcgagcgcaagggaaggggccagccattgaccagcggcagcaactgcaggaaccgccgccgcagttgcagccgcctcctcgtccgcttcctcgggttcccgggaaaatggctgtggggctg

SEQ ID NO: 43844 - DNA, 122 bp, Homo sapiens
ccttgcgtaacgggccccgctctcccacttgggctacgcacgttcctaactaacaaaacacgacgctcatccttccaaggcctctgcagattagaaacagaaggagccctccctgctgcctt

SEQ ID NO: 43845 - DNA, 122 bp, Homo sapiens
aggaagagacctcgctcccacgccacagccccaggccccaggcccctgacaccctggctccgaacccccagcagccagcgggtgggttggattccagggtctccactcaggggcattgccgg

SEQ ID NO: 43846 - DNA, 122 bp, Homo sapiens
tgtggcactaggagcgagccccaccctcggcttgggtttgcacggtcccggcagtgcactcgcttcataacctgagaacgtccctgtccacacagaggaacagccctcctgcctgagcttcc

SEQ ID NO: 43847 - DNA, 122 bp, Homo sapiens
aatctggtgggcgagtacagaatgtaaactgtctggaggttggcattggcctagcttctccgttgctctcttgttctctagaatccaatcaagcacctgtggccagagagctgtgtgaaatg

SEQ ID NO: 43848 - DNA, 122 bp, Homo sapiens
actggggctcagaggagcccacattgacctctcctatctgaacccctatttgagcttggccgttggccaaccccctccacacttcatgcctctggtgtaccctaagtgcctgtagtcccagg

SEQ ID NO: 43849 - DNA, 122 bp, Homo sapiens
taggcagccccaggcgctcaggtgggaatcactgcccagcacacagaacccagagtccagcgcggctgtcaccggctctaggctggatctaagcgtcggaccaggaggccgcagtcaaaatc

SEQ ID NO: 43850 - DNA, 122 bp, Homo sapiens
tgtgctccgtattggtttcttgacctgcctcttcaggactttctaaaattaaggtacaaccgattcttttgctgcagtcctttctgcctaaagaaggaagaaattcttctgttttcagaaaa

SEQ ID NO: 43851 - DNA, 122 bp, Homo sapiens
attttcttccttattgacttgaacacaaggacaccacctacctcatgtcttccttcttcccgtggatgtccagatgaagcactccacactcctttgagagagataaacaaggaagatgtgtg

SEQ ID NO: 43852 - DNA, 122 bp, Homo sapiens
agccaggtcgcacgttcttggagaggccccgtgatcgctgtcctctgtgcttgcacgcatcgtaacggggagaggacacacaagcccctgctcacctcctgctgcacccaggagccgtcctc

SEQ ID NO: 43853 - DNA, 122 bp, Homo sapiens
tggctcgggacacgccaaagctgccaggacggacgggaatcctgtgacttacggccgtcccgcttcttgagccctcactcctggccctgtgcccagtgtggggacaaagttggcctggcccg

SEQ ID NO: 43854 - DNA, 122 bp, Homo sapiens
cacatgtgcacacccatatacacatctgcacacgtatacacatacacacctgtgcacacacgtgtacatgtatatcctcacacacgtacacacttatcctcacacacgtgtacacacatata

SEQ ID NO: 43855 - DNA, 122 bp, Homo sapiens
gcattcctgagcagggctctgcagggcgcggcgtgcacggctctggaacctgccaggatgcgctgatgtggcaactcactcagggtggcatcgttccatgggcaagcaccccttagagaaat

SEQ ID NO: 43856 - DNA, 122 bp, Homo sapiens
tgtaaggtgtgagttggctgagtggcttgaattaagagaaattaaagtctgaggcaagaccgagacccactttccagactgaaacttgaagaggactcatttgaggagaatgttgcatctct

SEQ ID NO: 43857 - DNA, 122 bp, Homo sapiens
gggtatcctgggggacccaatgtaggagctgccttggctcagacatgttttccgtgaaaacggagctgaacaataggctgttcccatgtagccccctggcctctgtgccttcttttgattat

SEQ ID NO: 43858 - DNA, 122 bp, Homo sapiens
ctccaccatcccctccctggaagagggactgctgcgtggggctgggggctttgcctgcagcggagggggggcttgtgggaccactgagcccctgtgtccttcccagaccaggccccgtcccc

SEQ ID NO: 43859 - DNA, 122 bp, Homo sapiens
tcaggtgtggtcgtgaatattaaacatgtggattgcaaccctagacagagctcccttggacggttgagcagatgcagccaggtgtgggtccggctgtgggcggagggggtcacacggggccg

SEQ ID NO: 43860 - DNA, 122 bp, Homo sapiens
tgttgtgaaatgctctccctctccctggaatgggaacagcagttctaggaattccatcctcgtactctcactaagcctcacgtccccacatccaatggaagaatgcttctgccaaaggaacc

SEQ ID NO: 43861 - DNA, 122 bp, Homo sapiens
gaggagtttctggagatcatggcacttgtgggcatggccaccaagcccctccatgtccggcgcctgcagaaggcactgagagagtgggccaccaatccagggctcttcagtcaaccagtgcc

SEQ ID NO: 43862 - DNA, 122 bp, Homo sapiens
tcttaggagcctggtgcactggtttagttattcctattgagggcatggaaaatggggtcacggagagagttggtgaagaccactcatttggggagagttagtgaaaggaaattaagaatagg

SEQ ID NO: 43863 - DNA, 122 bp, Homo sapiens
cacggttcgggtcgtgtcaccatttcttggcttgctgacctggccaggagctggggatggcggcagcaccgcggaggtacgctttgcgctgccctcacgctcccttccgaaagcagtgcccc

SEQ ID NO: 43864 - DNA, 122 bp, Homo sapiens
gccagttattattcctgtcacttctgtgggagacggcacatcagagtacccaccttatctcggtctagtcccgtccagtcgcaggcctttgagtacagtacagccctaaggtttttacaatt

SEQ ID NO: 43865 - DNA, 122 bp, Homo sapiens
gaaatgtgaatttacatgccctctcattaattaatgatgactctcatcctcactgtatatcgtgctttgagatatcagctaatgagatatttgctaatatttgtaccgttaagttcatatga

SEQ ID NO: 43866 - DNA, 122 bp, Homo sapiens
ttccaaggaccccacctccacagctcacctgatattgtcagctcctcttagctcaatctgcgcttttatgtcctctaagctgggggtggggtgaggtagaggaaggtctgatcctggagact

SEQ ID NO: 43867 - DNA, 122 bp, Homo sapiens
tttaccacaataatttttctaaaaagcagcgagaacctgaggcacctctcgggaattctgcgatggcacatagagtccttgtgagtcctctgtgtccccagcaccgagaggcagcctctcag

SEQ ID NO: 43868 - DNA, 122 bp, Homo sapiens
agggggcgccaggaaacggcgcggcgaggccccagctcaacccgcccgcgcgggcacacccgggctttgacccctttgtgatcgaggacacggacgggtttctctccaacaaaagggggcca

SEQ ID NO: 43869 - DNA, 122 bp, Homo sapiens
gccacccaaactgccctgcagttgccccggggatgttaaatttccctgaattccaggctgcgcctgctcccaaggcttccggagaaagtcgtaagataagccctaaagaggacagcaacgag

SEQ ID NO: 43870 - DNA, 122 bp, Homo sapiens
gaagttgtaattgggaagatctcaaagaaaaaagtacaacatagtctgcgagagggtgaccgacttatctcatttgcaagcaagcaaatagggacttaaagatgttcaaattctaattgttt

SEQ ID NO: 43871 - DNA, 122 bp, Homo sapiens
cgaactcctgacctcaagtgatccagccgcctcagcatcccaaagtgctgggattacaggcgtgagccaccacacctggcaaactactttaaagcagtaagttcctgacttaggtaataact

SEQ ID NO: 43872 - DNA, 122 bp, Homo sapiens
tgaattgactgattagttcaacaattagtgtcatgttgaggacttgccaattacaatatacggcaagtgtcttttatgaattaaaatgaactaaaccttccacttcagggtttggatgaaac

SEQ ID NO: 43873 - DNA, 122 bp, Homo sapiens
actatcgtcccaaagctgaccaagtagaataaaaagaaaaaaaaaaaaaaacaacccatgcgcaaagatagacatttgcttgatctgctggctcagggccaaatgtttaatttgcttctcca

SEQ ID NO: 43874 - DNA, 122 bp, Homo sapiens
tcccgaccctcctggggtgcaatccgggaaggagatcttggaagcaggtggcagttagcacggagtatgccaacagacagtgaatcaggggcacaggagggcagcatggaggccagaggcca

SEQ ID NO: 43875 - DNA, 122 bp, Homo sapiens
ggccgggaaggctcgggctgtctgaagagaggcgtgacctcgcctacaccagatccaaggcgcacataccgagacacccctcaacctcactcagcagtgccgtttccaactccgcggcagag

SEQ ID NO: 43876 - DNA, 122 bp, Homo sapiens
aaaagaggagggagggaagcggaggccaggagcgacggagcaaggaaagcagtttgcaagcgagaaaagagggaaaaaacacagccgcacgaatccagagagatcacaagccgtacgcaagc

SEQ ID NO: 43877 - DNA, 122 bp, Homo sapiens
tccccccagagccccgggttctgtattccagagccctgcagtgacttccgtccccttccccggaagtcctgaccacggagacaggccacaggtcctgcagctgccacgtgtggtggctttgt

SEQ ID NO: 43878 - DNA, 122 bp, Homo sapiens
tcagtcacgtatgcttacaacttctattcccacattatattctcgctttcttttattgaacgatgtctaggaagaattaaacggcttcagggacaaaagctcctgccttgttaagtaatgaa

SEQ ID NO: 43879 - DNA, 122 bp, Homo sapiens
gagggcaacatttggagcagagggacccctcttgccctggttaagttaagaagaaatgaacgaggaactcagggcaagaccaagagaggtgattcatcaactggccttcaactagaaaggag

SEQ ID NO: 43880 - DNA, 122 bp, Homo sapiens
ttaatagggagtcatttgtgactcaggtgcgctctctgcgtctgcaagtcacgttcccttcggcacgcccatctcgaggattcatcctctccaacgggtgacgagcaccgcctgccggcggc

SEQ ID NO: 43881 - DNA, 122 bp, Homo sapiens
tgtaggcagagatctccaagccctcaaatcgggagatgaagtccttcaggtttgggaaggcgtccaaccacttgggctcaaatacttggtttctctcaaggatgccatacgcgatgaaatcc

SEQ ID NO: 43882 - DNA, 122 bp, Homo sapiens
tagatgctcttatggataaaactaccccagtggtggaaaatgtctgtctcctattggggccgaatctacctagcaatctgtctggacttctattgagtattcaccttgatgcttcctaaaag

SEQ ID NO: 43883 - DNA, 122 bp, Homo sapiens
gagaagtcgagcacagcagctgctggcccaggtgctaagcctctcactgcccacggccggcgggccggctggttgctccaagtgcggggcctgccaagcccacgcccacccagaactcgcgc

SEQ ID NO: 43884 - DNA, 122 bp, Homo sapiens
gaagaactaatggctgacattgaatgtgcgggatggtgccggcccatcccggctcagcgccgcgcagctcgggaccccagtccctccgtcagagccggtttagatgtggagtaatgaggcgc

SEQ ID NO: 43885 - DNA, 122 bp, Homo sapiens
cgggtcctgcctgagcatccttattggtgctcagggctaggcgtgcattgctgctaggggcgcggaaaggtttatcgtgggtggatgctgcccggggcttgagtggtttttagaggtcttga

SEQ ID NO: 43886 - DNA, 122 bp, Homo sapiens
gccgtcaagtgcgtggcacccctaagcagcgaggacttcttcctgagcggcagcaaggatcgtaccgtgcgcctctggccgctgtacaactacggcgacgggaccagcgagacggccccacg

SEQ ID NO: 43887 - DNA, 122 bp, Homo sapiens
taccctcctgcatgcgttacctggattgttctgtttaatcttcacaatgatcctatgagacgggagctattactatacccattttacaaatgagcaaatggagtcactaagaagttaagtca

SEQ ID NO: 43888 - DNA, 122 bp, Homo sapiens
ccattggccaggcaggctgtttggcctctgatttgcacctagagggtccccggatcctggcgctgcgtgggtcagtgtctcgggagccggggaccggcactggccgtgctcggttgctgagt

SEQ ID NO: 43889 - DNA, 122 bp, Homo sapiens
ggctcactcagttcacactgaataagcaaaacaataaccacttggcttcatgatgcttttcgacctaaaataaacacaaggtatcaaagcaaatgaaatgttacatctttccagtgctccat

SEQ ID NO: 43890 - DNA, 122 bp, Homo sapiens
ggcggcggcgaaaggggaggcagcggccgataaatgctattagagcagccgccgcggagccgtccccgacgccacctccttttccttcgccgcagtttcctccgccgctgtcgggcgtgcgg

SEQ ID NO: 43891 - DNA, 122 bp, Homo sapiens
aggtgtggaaacaactgacacgtccatcaacagatgaatggatacaccagacatggtccacgatccacaccgtggaatactacacagcctttcaaacgacgtcagttctgcaacacgcaaca

SEQ ID NO: 43892 - DNA, 122 bp, Homo sapiens
tggagacattgattttcttgtagataccggtgctgaacattcgctagtaactgccctggtcgcccccttatccagaaagactattaacgtcaccggagccacgggggtttcagcaaagcaag

SEQ ID NO: 43893 - DNA, 122 bp, Homo sapiens
ttggaaagtgctgggttttaattggggctgggtcctgccttctcccctcttcctccagatcgggccctctctgtaagcggatttgctttcccgtgtatcgccagcaggtcgtttttaggcaa

SEQ ID NO: 43894 - DNA, 122 bp, Homo sapiens
atgaatcctccttacttctctctgaaccggttccctaagggctctagtcttaaacttgcacggcatcttctccattaaagctgtgtgtgatctctgctaaacctttgtaccctttccagcaa

SEQ ID NO: 43895 - DNA, 122 bp, Homo sapiens
aagggatactcagcctatactatatgatctagcaatccacttctgagtatgtatccaaaacgattgaaagcaggatctcagggagacatttgcatacccgtgttcatagcagcattattcat

SEQ ID NO: 43896 - DNA, 122 bp, Homo sapiens
gaagctcgctaacaacaccacagtgaaagccacagtcatatctgctgcctctgtccagagcgccagcagcgccatcattaaagccgccaacgccatccagcagcaaactgtcgtggtgccgg

SEQ ID NO: 43897 - DNA, 122 bp, Homo sapiens
tcctataccatgaaggcctcatacagaccaggagcctgaggcgccgcctgctgtcccgcacgctgccatctgagcccaggtggcctccagtgtagttacctcagcccacagcaaggcacagt

SEQ ID NO: 43898 - DNA, 122 bp, Homo sapiens
cctccagcaccagcaaacgggctccgctcctagaggacacaggccggagccctgccactgcgctgtccgccaagagtcgcattcttcggatgtcatctttgctcagccaggagggggcgctc

SEQ ID NO: 43899 - DNA, 122 bp, Homo sapiens
gcccgcctcgcactttgtgggcgtggatggggttcgggctttcctgcagacctattcccacgaggtctccctcaccgcggactcgaggaagagtcacctgatctttccccagcccaactacg

SEQ ID NO: 43900 - DNA, 122 bp, Homo sapiens
ccccgggcagggagggagcagctgggctcggccagaccctgccggcgtctggggggcctgcgaagtggaggggagacgggcagccgggcagtggccggcgttccccggagctcggaccggtt

SEQ ID NO: 43901 - DNA, 122 bp, Homo sapiens
acttgtgctacgttaatgcatgacgtaaggtgtggctcctattccggatgaaactgctcacgtaaagaccaagggataagaggactggaactatcagccccacccactgaccttcgggaagc

SEQ ID NO: 43902 - DNA, 122 bp, Homo sapiens
tctggagcctgcagccgagttggtgggcacatggacagagtggcaggcaaatatgctgcacgttccacttccctctgccctagcaggttcagctggaggagtcagggcagcacctggaaggt

SEQ ID NO: 43903 - DNA, 122 bp, Homo sapiens
gtaaacacacaagagttacctggtcggctactctatacactccttccttttggctgcaatcgcaggtataggcgtgcactcttgtggctccagcttcccgagccatcttacatgtttcctca

SEQ ID NO: 43904 - DNA, 122 bp, Homo sapiens
aaacgagctctgtaatcgttgccgtcagcgggtgtacaattgcagccttatgtttcctgccgctgtttaccttcctgagcggcgcccagagatgcacacacgctgccctgaagcgggacgtg

SEQ ID NO: 43905 - DNA, 122 bp, Homo sapiens
agattatgcattaggaactcttttttttttttttttgggtaaaaagctttctcatttccacgcaccctccaccttgggctgctgggtgtataggcacatggtgtgataagtctttggtatgg

SEQ ID NO: 43906 - DNA, 122 bp, Homo sapiens
gcaggctcgggagttaccaggcagttgttgcctgcacacagagggcgactgcagcttgggcgcccaggcggcggagcatggtctgggtgggctccagaacgcgtgcgcgccaggcctgtggg

SEQ ID NO: 43907 - DNA, 122 bp, Homo sapiens
agggctcaggtctgttttcatttcatcccagagcctggcacagtgtttggcacatagtggcgctcgccaacggtttgctgagagctttccgggaagggctcagtgcgcttaggatccaaaag

SEQ ID NO: 43908 - DNA, 122 bp, Homo sapiens
gcctgcggagccaggtggagcttccccacttccccttagggtctggagcgaggccgagcgcgccccggcccggcctggtgagggggtggagagtcccgggccctactcgggcgggtgtggag

SEQ ID NO: 43909 - DNA, 122 bp, Homo sapiens
ccacgttggctcgggctaagtgttcaagatggtgtggtgcagtgagtcaggggccctgaccgggaccacccgtaagttaagtggggcgtgtggtcttcagggcgcacaggtggagatgccac

SEQ ID NO: 43910 - DNA, 122 bp, Homo sapiens
cactacaccctgcataaaccaggcagggagccctccttccctatcaagttaaggggcccacgtggcaccctatggccccacagaccgtcttctacccagatgcccagttctaatgctgagtc

SEQ ID NO: 43911 - DNA, 122 bp, Homo sapiens
gaatacccccacctctccacacccccccgccccgccccgtttggcttggaaaaaggagcgcgctgatggggtgcattctctcttaggttatgctggcagtgtgcaaatggttatggtcccct

SEQ ID NO: 43912 - DNA, 122 bp, Homo sapiens
ttggacaaatgtgcccatcaccttcccaggagtggggaatggaagggagggaggcagggccgtgtgtctgctctgttgctgtgaacaagacaaacgtggccaaaggacctggctggcaatgc

SEQ ID NO: 43913 - DNA, 122 bp, Homo sapiens
tcctttgcagcacctgctaatgatctgtcagtgacgctgtgaccaaggctcatcaccctgcgggccgtgggccccagagggcggcacagcttctataggagcacagggcccagggaggtgcc

SEQ ID NO: 43914 - DNA, 122 bp, Homo sapiens
tctctctctcctgccaggaccatgggtagcaacaagagcaagcccaaggatgccagccagcggcgccgcagcctggagcccgccgagaacgtgcacggcgctggcgggggcgctttccccgc

SEQ ID NO: 43915 - DNA, 122 bp, Homo sapiens
cgtggctgctttcttgctgtgtcctcgcatggtctttcctctgtgttttcacatctctggcgtctctctttgcatccagatttcctctttatgagaacgtcagtcaggttgtattagggccc

SEQ ID NO: 43916 - DNA, 122 bp, Homo sapiens
gcagccacgtggaccccgcctctgctgctgccttttgtctggcagcaccagccgggctaacggtctaagcagatttcgtgcaaatccccgtcagaaagcacaaatccacccggtcagcacaa

SEQ ID NO: 43917 - DNA, 122 bp, Homo sapiens
ggaggggccgcccacgagggacgtcggccaggtccaggcctcgtggggtcaggaggggcccgcggggcaggggctcaggaccgcctccctacacctcggcactgcccggggcacggtagtcg

SEQ ID NO: 43918 - DNA, 122 bp, Homo sapiens
tccttgacccatcgtgctgaatgagcctcggaatctgggctgcgctgtctgttgtacacacggccgaggttgcactagggggagtctccatgccccgcaggtcccaggctgggctcccctgg

SEQ ID NO: 43919 - DNA, 122 bp, Homo sapiens
gtggggctgagattggaaaggctggcccaccctctgtttaaaagccacgtttttccatcacgattaggagggagatcagctgacgttggacacgcgagtgatcctgtgtggaggcttccgac

SEQ ID NO: 43920 - DNA, 122 bp, Homo sapiens
cgcccccgggcagccttgggcttcaggattccggcggcaggggcggggcctgagcgggcccggggcggggtcggggcggggacggggcggggcgctgatcggacgggcagggggcggggcca

SEQ ID NO: 43921 - DNA, 122 bp, Homo sapiens
ttctctggagaacaaaaactgccattgtccagcagctcattagcatgactgtacagcctccggagttagcaaggtaattagttttagaggtaagtggagatggggggaagttcgaagcgcag

SEQ ID NO: 43922 - DNA, 122 bp, Homo sapiens
ctactcgctctcttagagctcagagattggctcagctttcagcgcccagaaccagccacacggaaaaccaattttcccttggcgtcttcaggttgtcttggctaaaattagcagctggatga

SEQ ID NO: 43923 - DNA, 122 bp, Homo sapiens
tgtcttcccagtaatgggtgcttcacttgggctcacttaatgtggttagagaggtcaccacggggcttccaggaagagaacagtctgagtaaagcactgggacaattatgttaagaatctac

SEQ ID NO: 43924 - DNA, 122 bp, Homo sapiens
agggctcgggactgcagcccgccatgcttgagcctcccaccccctccatgggctcctgtgcgctggaggctcctcgacgagtgccaccccctgctccacagcgcccagtcccatcgatcacc

SEQ ID NO: 43925 - DNA, 122 bp, Homo sapiens
gaggtgagctcggacagggatcgtgctgtcaggtttgcccaaggtgttcctagtgtacaccgggtgctcctggctaactcacaggagcctcattcattctcgaaagcgtcccagtttagatc

SEQ ID NO: 43926 - DNA, 122 bp, Homo sapiens
tcggtctcccaaatcgctggaattacaggagagagccaccgcgcccggccagcaagtcagcgctcaccatctccaaccccattttacagaagagaaaactgaggcttggggagggctgcaag

SEQ ID NO: 43927 - DNA, 122 bp, Homo sapiens
agagaagaagcaggacatcccatcagctcagcccccgcggggactggcttgggagaggcccgctccccacacatggcgggcgggggcgccaggcctcccgtctggtcctgacaagcagcccc

SEQ ID NO: 43928 - DNA, 122 bp, Homo sapiens
atcaaattacttcaaaatgctgggctaccccctccatatctcatggcaacaaaaattaaacgtggcaacatttcttttaatagtaggaaaggtcaaaaacaaccgccacaacaaggggatat

SEQ ID NO: 43929 - DNA, 122 bp, Homo sapiens
atgttcacctttttgccagatgagtacacccagaatgctaatttttctgtccatcgtgtacgctattctagtgcttgtggcccagtactgtctatgagttgtcgtgctcctgtttctgaggt

SEQ ID NO: 43930 - DNA, 122 bp, Homo sapiens
agtgatcctcctacctcggcctcccaatgtgttgagattgcaggcgtgagccactgggcccggacttaataattttgaacaaggggctttgcatcttcgttttgcaccgggcctcacaaact

SEQ ID NO: 43931 - DNA, 122 bp, Homo sapiens
cagaagcgctgccactcactcagcactcaggcctatcctgtactgggaagatttccactgcgacgagattaactgtgactctgcccaaattctggctcttatgaaaatgttttctgaagcac

SEQ ID NO: 43932 - DNA, 122 bp, Homo sapiens
tgtgctcaagtctgggctccatgatggcactggggtttgttctgtttgctgctttgtgcgcgtgaggctttctctgggtgcctgaacagatgcctccagtttcagttctttctgtttggccc

SEQ ID NO: 43933 - DNA, 122 bp, Homo sapiens
gcggcaagcgagcggctcttgctgatgggggagctcatggcagcgggggacaccggagcgcgggaaggcaggaggatggggtggggcgaggttggtacgaggtgctagtgggagtcggggct

SEQ ID NO: 43934 - DNA, 122 bp, Homo sapiens
caacacactcttaacgagaaacaacacaccaagcaccgtggagctgtcctaggcaacactcgcggtctcaggctgcggtgggcgtctgtcctgcatgtggcccagaccaccctgacccccgg

SEQ ID NO: 43935 - DNA, 122 bp, Homo sapiens
gaaaaataatgaagccatctactaaaatgttaatccatgcaaagcacctggaagagggcccggcacgtagtaagtgcctgtacttattctccacttgaccccttagcaagactccctccccc

SEQ ID NO: 43936 - DNA, 122 bp, Homo sapiens
ataagcttcctgagagcatgaataagcctttctgtcttattcatcattgtatcccctgttcggtacctagaacagtgcttggcatgttgcaggcactgaaatatttattgaatgaataaatg

SEQ ID NO: 43937 - DNA, 122 bp, Homo sapiens
gactagcctgggcaacacagctaaaccctgtttatacaagatatacaaaaattggctgggcgtggtagcacgcgcctgtagtcccagctcttgggaggctgaggcaggaggatcgcttgatc

SEQ ID NO: 43938 - DNA, 122 bp, Homo sapiens
tctgtatacctagcaggacattttggacctatccggagcgtctgtgaacctgttggtggccgccacacctgcgattgcctccagggggctattttcccggaaagtgttccaaggggtacggc

SEQ ID NO: 43939 - DNA, 122 bp, Homo sapiens
cgggtcaggcggatagagaaggactcgagagacagactgagatcaggaaacagaggctagcgaggcagacagacccaggctggggttcaggccaacactaaaggggaggtgatcagagaagg

SEQ ID NO: 43940 - DNA, 122 bp, Homo sapiens
tgtggttgctgcgggacgagacgctgggcggggatgcgctggggcggcctccacgtggggcgcgcagccaggcgcagtgcctcttgcagcagctccgcgagctgcccggccagctcgctagc

SEQ ID NO: 43941 - DNA, 122 bp, Homo sapiens
tgggcacgggcgtgggcggcggcgtggggtgaccgggctgcaggtgcatggtggtctggccgcagtgcgcgatctggaactgcaggtgcggggcggccaggtgcgcgggcggcgggtgcggg

SEQ ID NO: 43942 - DNA, 122 bp, Homo sapiens
tgacctctgggtcactcagaaggggcctgagccactgtcccgctattccgccccacacagcggggaagctgagcccagcgccctgtgttcccctcggctagggccaaccgtggaccatgggc

SEQ ID NO: 43943 - DNA, 122 bp, Homo sapiens
tgctccctctgttgttcgtgactattttgagggcagtggatttggcttcggggtcaccatcgggaccctctgttgcttccctttgggtaaaatcatggacagagtggggtggggtgagagat

SEQ ID NO: 43944 - DNA, 122 bp, Homo sapiens
aacgttatttgcgggcccgcccttcacccctgctgcacagcttcccctagtggatttggccgtaaatgagcagactggtgcctccagagcagccctcaccttggtgcccctgtgtttgtctt

SEQ ID NO: 43945 - DNA, 122 bp, Homo sapiens
aaaaaggccaaaaagtctacattgcgtgtgtggatggatgaatgagcagtgggagtgcagcgccaggtgacaagatgttgtgaggggttttgagtcatccagtcctgggcactgaggtctgt

SEQ ID NO: 43946 - DNA, 122 bp, Homo sapiens
tcagcctcctcgtcacggctccgacatccaccaaagtcctggcagctgctgggctccagacggtgttcccacaagccggggaaggtttttaaaagataaaagaaacaaacagcagcaaccac

SEQ ID NO: 43947 - DNA, 122 bp, Homo sapiens
gtcaacagaaaatatcggcaaaccatacctctgataaagggttaatatccaaattatatacgaaactcaattcagtagcaagaaaacagcctatttttttaatggtcagaggacctgaatag

SEQ ID NO: 43948 - DNA, 122 bp, Homo sapiens
cccacgtggccaccagaccagccctgccccgccctgcaggcctccgtgtcccctggctgccggctaggcagtcctgctctctcgggtctgtgttctcagcttcgaggtccaggctgagtgag

SEQ ID NO: 43949 - DNA, 122 bp, Homo sapiens
tgctttcaggagacaccctgcagtgcagggaagctggttttttttatctggcagctcccccgaattggctcagcacggcttccttaactgccatgtgtaacccgcaggcaggggcagtggcc

SEQ ID NO: 43950 - DNA, 122 bp, Homo sapiens
tcccgggaagagttcctggcaaagagctcaggaacgttggatcttaatcaaggctttctccgtcggggtggatgggttggactttaggctccagcaagccccgccccactcggcgggtcggt

SEQ ID NO: 43951 - DNA, 122 bp, Homo sapiens
agcccagccccagcacttaggaaactctatataggttgcggtccctcagaactgcagggccgtcagccttgccggagccagacgtccgctgtgccgtcctcacagcaaggcctgctccgagg

SEQ ID NO: 43952 - DNA, 122 bp, Homo sapiens
acgcgcgagcttggcgctcctctctctcctcattaaggtgagtggcaacaccacggatcgcgttcattatatgaaatgcgcatctgtcaacggctctgctcctgaaattggttagagcgcaa

SEQ ID NO: 43953 - DNA, 122 bp, Homo sapiens
tctaccgcaggcttaaggaggcttcgggctcctgggatttctgtccgcgctcctggccctcgtccttcgcgccagagcaggttcgcaaactcctcagacccttctgctcccggccgccgctt

SEQ ID NO: 43954 - DNA, 122 bp, Homo sapiens
cagcttccgggccggggatgagcgcgaagcctggagatcctaagccctaagtgggacgagcgtgcgccgcttacctgccacctgcgctgccgctgaggtctgcagattgcggggctgcggtg

SEQ ID NO: 43955 - DNA, 122 bp, Homo sapiens
ttcaagtacccggggtgcgggcctgggctccgggaacccgcacattgcgggcgggagaggcgcagggtgcctgggacgccgccccgctcgcctctctcctggacgccgtcgccctgcctccc

SEQ ID NO: 43956 - DNA, 122 bp, Homo sapiens
cagaaatcagctgcaaacgtcctctctcccagtgggcagagcggctgcactatatgaaaacgacacatgtgaaatggagggtgggtatgtgaagctcaggatgattcatggattcgctgccc

SEQ ID NO: 43957 - DNA, 122 bp, Homo sapiens
cggggcggccagtgctgggtccccgctcccagcccctgcccctgcccctgtccctagtcccggcttcagatctggccccagaccccggcccctcgcccacctcctcagcgccttctcctcgg

SEQ ID NO: 43958 - DNA, 122 bp, Homo sapiens
ctgtatcttggggatgctagcagactaacctttggttttcctttgaaaacaggcaccatgcggactgtgcggagacacctgttcccccagcactcagcccctggccgaggtgtcgtctggga

SEQ ID NO: 43959 - DNA, 122 bp, Homo sapiens
caggaaagcaggtccaggcaaggtacagcccttacacacagccacctcaccctcacagggcgcaatgagcttgggaggctgggactttagtgagttcatctaaaggccaaccctgtatctgt

SEQ ID NO: 43960 - DNA, 122 bp, Homo sapiens
gctagtgcttgccaggggcccttggctctgccggacgctgcccgctccgcattctggtgccgtgccatgtagatcccggcctgtgctctgagggccacaggtcctgtggtggccccagaggc

SEQ ID NO: 43961 - DNA, 122 bp, Homo sapiens
acactcacctgtagctgccctttttggtcagcagctccttgaactggcccagggtgacagcgcggcccctcaccagggtgcggtaggggatgggttccccgcagaagtagtacgccacaacg

SEQ ID NO: 43962 - DNA, 122 bp, Homo sapiens
gcctctgacctcgctttcctttgtccctcggcccaagtcctccgggatcgttttgaaacccgacagggccaggccttaaatttgcgactgacttttcctggatgaagggcctcgaagacgag

SEQ ID NO: 43963 - DNA, 122 bp, Homo sapiens
tgcacttcttttcacccactgtttactgctgaaagcctgagtagctatgggccatctttccggagaaactaggaaaaaaaatgtgtggaaggcagcaagcccacgatgtaagaaaaagtgtt

SEQ ID NO: 43964 - DNA, 122 bp, Homo sapiens
acaggaaaggcaaataatttgcctaaggccacagaactagcaggtggcagagacagaattcgaacacaggccaagtcggtgagtcgacactctccaccacaatctgttctcctgtcactcaa

SEQ ID NO: 43965 - DNA, 122 bp, Homo sapiens
gggcagggcaggtgcagggaaggtggcaagggctgcggcgccacaacgccaggccgggagcgccgagccgcgccgcggttgtcccgccccgtgacacactacgcaggcgcgcgcgcgcccgc

SEQ ID NO: 43966 - DNA, 122 bp, Homo sapiens
gtccaaccgcgtcagtcttttcgccgttagaggcccgactcgaggccgtggttctgcctccgaggtcaccaacctgcctgggcagcctgtgacctccagcatccatatgcccagccctccag

SEQ ID NO: 43967 - DNA, 122 bp, Homo sapiens
ctcagcacaagcctggcctaaacagccgggttccaatccgtgcacagtggaaccgcggcacgcacccaagaccggaatggtggggctatacctgtccctactcagtcctgttcgtgccagcc

SEQ ID NO: 43968 - DNA, 122 bp, Homo sapiens
ggacagcgctctagagaatccaggccagaaagtgcagagtgcagcgccctcctctgggtgcggccagtgttttcaacacccttttttttgactttgcatatagagaaattgtgctcctttct

SEQ ID NO: 43969 - DNA, 122 bp, Homo sapiens
aataaaaccccattttaaatgtcctaggagagctggcaattttaagtgccttacggactacgatcatatttggtcatgcttagcatgggctaagactgattgactgatgagtcatttgatag

SEQ ID NO: 43970 - DNA, 122 bp, Homo sapiens
tggaggaactactgggcatttaagggactcgttgaacacactctgtaggtcaactctgcccggagtggagggagctgcgcagaccgctggccctctgcacgggtttgcaactcggcttctgg

SEQ ID NO: 43971 - DNA, 122 bp, Homo sapiens
ctgatggggaggtggagaacctttgtatgtagctcagggattgtaaagggcaccaatcggcgccctgacaaaacagaccacgccgctctaccaatcagcaggatgtgggtgaggccagataa

SEQ ID NO: 43972 - DNA, 122 bp, Homo sapiens
caaggtcaaggagggaagtgcgcggtgccacggaccgacacagttcgctctagcatctgacgctcggactccgcgccctcagccggatcccagagcccttccattcgccaaccgcccactgc

SEQ ID NO: 43973 - DNA, 122 bp, Homo sapiens
gtggccgcacccggggctcggtgcagggaaccggcttccatagggacggccggctcgggtcgctggactgggacggggtgcactggcgggagccccgcgatttcctcggtttctgagcaagc

SEQ ID NO: 43974 - DNA, 122 bp, Homo sapiens
ctcgccatgatttggacagggcttcactcttcggctaggacagctagagtgcagggaagccggctcctaaccagggaggatgcccatgactgctgaccccccagcttccacttgaaggggaa

SEQ ID NO: 43975 - DNA, 122 bp, Homo sapiens
gggcgagcggagagcgaaggaggaaaggagggaaaaggaaacacccccaaaaaagcaggccgtttgccaaccacccctggtttgtccttgagctgaggccttggggagaaagttggggcgct

SEQ ID NO: 43976 - DNA, 122 bp, Homo sapiens
gtgaatagcgtctctgagggggccaagtatccagagctggtgctggagcgggccctggaccgtgagaaaaaagaaattcaccagcttgtcctggttgcctctgatggtggcgaccctgtcca

SEQ ID NO: 43977 - DNA, 122 bp, Homo sapiens
cagagagcggaagttgtcagatttcaccgggccgtaaagcgcgctggctgtgtcatcttccggttagcgacaacggctctgaccgtctggcaggccgcgtggcgcccgcgccggccttcctg

SEQ ID NO: 43978 - DNA, 122 bp, Homo sapiens
acaggcacgcccagaggccctcacagcaggctggaagcccgttgctctgcagttaccacccgtgtgctgatgtggctcagccctgggggccctctctgtccttcacctttctgctgctggtc

SEQ ID NO: 43979 - DNA, 122 bp, Homo sapiens
agaagctcagaccgtccctaacatccctgctgcgagacccgcaggctgtggaatctcgcacgtcacctggccccagcagggcggccagctgaggggttgattttattttatttttttgaagt

SEQ ID NO: 43980 - DNA, 122 bp, Homo sapiens
ccggacccacagccttccaaccaggtggggaccccacccacggactcaccggaactgctccgagtgcccgtcaagagttacttccggtttccacggagctccgccccttaggggggttctcg

SEQ ID NO: 43981 - DNA, 122 bp, Homo sapiens
caagctaactataaccttttggaagaacatctggatacagttttcatttttaaaatgtatcgttttttaggtcattagatttatatagttcaaatttattggtgtcagttctcttcctaggt

SEQ ID NO: 43982 - DNA, 122 bp, Homo sapiens
caatggtgagagtggagggacatgatgcggacccactctggggctctgcaacatgactcccgtggtgccagtcaacaacccattcatggactgatccacaaagatctctggggcaacaacta

SEQ ID NO: 43983 - DNA, 122 bp, Homo sapiens
gttgattgggtgagacgactcaatgatgagcaatgattggttcacacggcgcaagctgggcggaaccggaagatggtgtgagccacgggctgccgggggcctggggctcggcgtcggtcccc

SEQ ID NO: 43984 - DNA, 122 bp, Homo sapiens
gacttttccgatgggtgtttggttccgtgttggttagaaaaaagcctcctctccaggtaccgtcgtgcgaaccgagttcggagcttcgccccggaccctggctggtgcgaggagcctgggca

SEQ ID NO: 43985 - DNA, 122 bp, Homo sapiens
gcagcgccgcgttggtttcctgcagttcccgaagcatctgcgggcccaggtctgagcctgcggcggcaggggacctggtgaggcgtcatggggccggggaatcccaccaccaactcccaccg

SEQ ID NO: 43986 - DNA, 122 bp, Homo sapiens
gccaggctcccgcacccgagtgatcctctgtgcgccgcctgcacccggggccggggcgggcggacagagcaaccgctgcgtctctgccctgccttgtcacatctgggtccggtgtttcggat

SEQ ID NO: 43987 - DNA, 122 bp, Homo sapiens
tggaactggagggcattatgttaagtgaaataagccaggcacaaaatgacaaatatcccacgtttatactcatatgtgggaggtagtgctagtatggtggttaccagaggctggaaagggta

SEQ ID NO: 43988 - DNA, 122 bp, Homo sapiens
ctacattcacactgcatttctaagatttacatccaaagagcatactgtatttacatgcaccggtcagcccaagataacaaattcaaaccatggctgcgttaagacaatggtttgttccaatt

SEQ ID NO: 43989 - DNA, 122 bp, Homo sapiens
cccgcctcgcgccaagactaaaattaaaaagccaccccgagaaaacccaagagccgtcaccgctgaaacaggaggcgaaaacctttctcgctacactgccaagcaggagcgaacagcccaga

SEQ ID NO: 43990 - DNA, 122 bp, Homo sapiens
ccaaaggagtaaattgcgaagtcaggagtgggggaaatgaggtgcaccccaggaaggccccgtagacctccgaagactccacaagaaactaatggatcactggtcagtccccatggggagca

SEQ ID NO: 43991 - DNA, 122 bp, Homo sapiens
tgacctcgttgcagggctggctcgggaggctgtagcagccgctgccgtccgagagcaggtcgttgagatcctgcaccgagagctcgaacgagcccgacatggcggcggcggggccctgcacg

SEQ ID NO: 43992 - DNA, 122 bp, Homo sapiens
accgaaccgtcccgactctttcaggcaatcaggaagaccgggagaattattagacgctgacgtccgcagggccaggagctgagaaaagggtaaacagtatactcgcaggtaggttgaaaaaa

SEQ ID NO: 43993 - DNA, 122 bp, Homo sapiens
caggtctcagtggggactggaagatgcaggtcacagccagctccacaacttcacacctcccggcatctctgctgatgtgcgtccatccccctggctcatcttccctctttttttttttttga

SEQ ID NO: 43994 - DNA, 122 bp, Homo sapiens
ggaaactgaggatcagtgcagaatgtagggggagcccaggctggcccagggagcagttggcggtggaggccttgggcaatttcccgtgttcccactgagtggggctgtccctgggcctgggc

SEQ ID NO: 43995 - DNA, 122 bp, Homo sapiens
gacccctcccgccgccatctcagagcctcacttggtcagagcggccaggggaggcgggatcgatgtgcagagaactcagtaataatcccagcacaggcagccaggctgctgtataaagacag

SEQ ID NO: 43996 - DNA, 122 bp, Homo sapiens
tcaaaagtgtgattctaacagtatttcctgttgcattgctgattgctagcattagacttacggagcttctttctgtttaatgactctctgtgcaaaactttcacgtatgacatatgatccta

SEQ ID NO: 43997 - DNA, 122 bp, Homo sapiens
cagttgaaatttccaaaatcatggcccggagtaatctggaggctgaatttcagagattcccgagggctgccgcgagggggcgcccagcccctgctaaacccgagcgctgcgcgcttgagccg

SEQ ID NO: 43998 - DNA, 122 bp, Homo sapiens
aattgcccagaaggggatgaggacaatcctgaagcccttcctgactgaaggcacgtctctcgctgcagaggcacagctcccagctctggctgcagaagcccagatggatcagggcctagagc

SEQ ID NO: 43999 - DNA, 122 bp, Homo sapiens
agttccacagaaaaagccgcagagggtgatagcactgaagttaggagaaaatggcagccccgagtgaggctggtgtcagcctccctgggtacctttggaggctcagttgaaaccttacctgc

SEQ ID NO: 44000 - DNA, 122 bp, Homo sapiens
ccaggacgcgttctcagatgactaagaaacacggatacccctttattttctgcctcagcccgtcctgaatttggatctagctctgttatttgccctctcacatgacagtccctggaccattg

SEQ ID NO: 44001 - DNA, 122 bp, Homo sapiens
gcactggggttgtagcaggccgtgggcatgccccttcccctgagtggacctgccatgtggcgctccggggagccgcagaggctgtgggcctggagcccccaggccggggacaccagggcagg

SEQ ID NO: 44002 - DNA, 122 bp, Homo sapiens
caagtgccaggcttggcctgggtgagaacccggggctgcgcgagcacggtggcctcggtgcgtcccccggctgtccccgccgcgctgggcggccctgccgcaagttctctctactttctcaa

SEQ ID NO: 44003 - DNA, 122 bp, Homo sapiens
taatgatcatcactgttataggtattcttaggtccaagagaatctaggtgacatcacaatcgcttatgtgctcacttatatggaggcacatccatggaatgcccaattctatgggaattcca

SEQ ID NO: 44004 - DNA, 122 bp, Homo sapiens
tctctccctgttttgttttgtaacctaaggaagcagagcctctgagaccacacacagcagcgtcgcccgtccccagaggcaccccggccaggacgggcaggagaggagacccccgttcctgc

SEQ ID NO: 44005 - DNA, 122 bp, Homo sapiens
ccactacattctggcactgttcttgatgcttgatgcacgttaactcattcacagcacacccgtgcagtggtcctgttactacatcctcacccttattttccaccgagaaggaccttgtgaca

SEQ ID NO: 44006 - DNA, 122 bp, Homo sapiens
aaagcgtcttctcgttcttatgctaatgagccccattaaagcttaatggctgcgaacgcgcgggtttaattgcacctgcccgggcctgaggcgcggccggccgcggaagcagctgcgcgccg

SEQ ID NO: 44007 - DNA, 122 bp, Homo sapiens
cagctgggttccagcctgctctgggagaggagcacgcctcccttgagctgcaggcgggtccggctctgacgaaacgctgcgagaatgccagacagtgtagcctccaccgtttgctcggggtc

SEQ ID NO: 44008 - DNA, 122 bp, Homo sapiens
caaacacgagtcgatcctgcgcgcgcgcgccgtggtcgccttccacacgggcaacttccgcgacctctaccacatccttgagaaccacaagttcaccaaggagtctcacggcaagctgcagg

SEQ ID NO: 44009 - DNA, 122 bp, Homo sapiens
gaaagatctatattttgctaataaaggaacgctttgtgtccaataaggttttcgtcattacgcatgaaaacgccaccttaagcttatgtcgcctgtgaatatttaagggaaaaaaacatccc

SEQ ID NO: 44010 - DNA, 122 bp, Homo sapiens
cttgcatcctccgcatgctaatgaagctgtgatgtcagcaagtcagtcacggcatctggacgtcccatcctgctgcccagtgctgagatttatttacatgtaaattagccttgccttccaaa

SEQ ID NO: 44011 - DNA, 122 bp, Homo sapiens
tcattcttccacatttattatttagaattcttctgtaaaaaagatttgtcccttctctcccgcttgtttatgtattcaatcacctacttataggtgtttaatttattctttgggttataacc

SEQ ID NO: 44012 - DNA, 122 bp, Homo sapiens
cctggggtctgatccaggcctgcggcactgggtcctaggcagactgtctgcctggtgagacgtggaaggagccagtgtccgcagccgtctcaggacgtcagagagctcggtggcctgtctcc

SEQ ID NO: 44013 - DNA, 122 bp, Homo sapiens
gagatggacatgcacaggcacacatatgctcaggtacaaacaggcatgtttacacccctgcgtataagcaagtgcacacatgcaaacctacacaaactgcaaaacacacaagcctatgtgtg

SEQ ID NO: 44014 - DNA, 122 bp, Homo sapiens
aaccggggtgtacatcagtgctgcctgtagcgaagcgttttaatgcacgcattgtgggtccgacaggaggcgggggtatgagcccatccccgagtttcacttttctttctccctttctcatc

SEQ ID NO: 44015 - DNA, 122 bp, Homo sapiens
ggagtgcgcaccccacccattcccggaaagagcagaccctagcgagcgcttcctgcgagccgtgcgctctgcctctgttggtagtgaatcttcccagcaactccacatggtagatattatta

SEQ ID NO: 44016 - DNA, 122 bp, Homo sapiens
ttatttttagttcggctgctgcacctccctgcctgcaacagctcgccccactctcagactcgttttgcaggatttgtgcccctggtggctaacctgatccacacttgaataaacagcgagcg

SEQ ID NO: 44017 - DNA, 122 bp, Homo sapiens
gaggcgatggtgttggtgcaggttgtgggcgtgcagtgtgagcaggaatggaggcgccgccgccccagtgtgtgcctgctgagcgggcgggctgctgcctcaccttggctagtgtggctgaa

SEQ ID NO: 44018 - DNA, 122 bp, Homo sapiens
tcccatagtttcaatccctagaggtctaaccctccacctggttttatgatctcttcatgtcgtatctccacagtttatcatcttttaaacaccgtatagaaactttctggcctatccacttc

SEQ ID NO: 44019 - DNA, 122 bp, Homo sapiens
aggaaagggaactcgctgaccccttgcgcttcccgagtgaggcaatgcctcaccctgcttcggctcgcacacggtgcgcgcacccactgatctgcgcccactggcactccctattgagatga

SEQ ID NO: 44020 - DNA, 122 bp, Homo sapiens
cgtgctattttacacctgcatgcctttgaacatacattttcctagaatatcctccaccaacgaagtgcctactatctgtcaggctcagatatatgtgctggagttgcaatggtgcaaagtca

SEQ ID NO: 44021 - DNA, 122 bp, Homo sapiens
ttaaattttaaccatgagggaaatcgtgcacatccaggctggtcagcgtggcaaccagatcggtgccaagttctgggaggtgatcagtgatgaacatggcatcgaccccactggcacctacc

SEQ ID NO: 44022 - DNA, 122 bp, Homo sapiens
agcagccaccaaaaccaccagcagcccgtccgcgccgggaaatgcgccctcgctggcttacggggccactcagacagttctaagtgcctttccctgtaacgcagaggcacacctgccttccc

SEQ ID NO: 44023 - DNA, 122 bp, Homo sapiens
ggcctaccaaccgtgggcacctgggactctgccctgttgaggctgctctgagaaatggtacggaccccctagggcaggcagatgaatgacgaactccagtaggtctatgtcccaagccccag

SEQ ID NO: 44024 - DNA, 122 bp, Homo sapiens
gctgattgttggaggggaaaccgagactcagggacactgaggggcagcaacttcctcccccgacacgacagaacagtggcagagcctgcctgctggggcgtgcggctggcgccaacctctcc

SEQ ID NO: 44025 - DNA, 122 bp, Homo sapiens
ccgagaagaagggtcttggcccccaactgtagctccaagcctttttgtgctttcagatttcggatcctccgcgtggagcaccttggggcgccccttggcaggttcccgccgcatagggccga

SEQ ID NO: 44026 - DNA, 122 bp, Homo sapiens
tgtctaagtcctgggcctgggggaaacactctgacgtagcagcagacacaggagggtccccgtcagaaccatgttttctgtgaagtggggatcagtccttttccctgaagtacctagcacat

SEQ ID NO: 44027 - DNA, 122 bp, Homo sapiens
cacgtgagtggacagcctcattttacaggggaaaaagctgaggtccagacaggagacagacggtacgcagaggacacagacatgcaggaataggttgagacagcaggtcaagttcatttcca

SEQ ID NO: 44028 - DNA, 122 bp, Homo sapiens
ggtatgtcttgctcccacctgctgaagtttaccttgtacctttcatggcttctgggggcacggccttgcggagccccccttcccgctggccagcttgtgttcacctatcagaggtttgctca

SEQ ID NO: 44029 - DNA, 122 bp, Homo sapiens
ctccaggagcagaggctgcaaggacaggaagacaatgaggcaatggtgtgctgggggaatcgtgctaaagtgaaagcatccttcgatcatttttaagtcattctaggatcttcagggcatca

SEQ ID NO: 44030 - DNA, 122 bp, Homo sapiens
aacgccttgtcggcttctgtgattgctgggcgccgatctgcgctcccccgcgcccggttacgatagaaatgcactggagtcttagtcgtcactgtagctgctgctggaacctccccacagct

SEQ ID NO: 44031 - DNA, 122 bp, Homo sapiens
cccttgttgaggggactctgcgctcagccctgggagcatgttgatgtccagcctggacgacggacgccttcctgagggggccatgcagacaaccatgcccaggccgcagcaagtctgctttg

SEQ ID NO: 44032 - DNA, 122 bp, Homo sapiens
gcgagggttagagggttagtcaggccagggtcaacttcagagtcatgggctccctaaatgcgacttctagggttgagttgctgtggacgagcgacccatgtcggaatcccgcgcccacgtgg

SEQ ID NO: 44033 - DNA, 122 bp, Homo sapiens
acagccctgagtgctgtgtgaaatatttgatgaggtcctctgtttgccttttctagacgccgggaggctctgctcccgcccaggtggtgcacacccagcccccgccacgggcagtcggctcc

SEQ ID NO: 44034 - DNA, 122 bp, Homo sapiens
ttcatgacaaaagatgcaatgaagtgaagttcttgagtgcggagtgcaccccagtcatcccggcgggcttcctaaatgccactgcgtgtcctcatagaggtgtgcacgggagatgtgataca

SEQ ID NO: 44035 - DNA, 122 bp, Homo sapiens
ggtggagaccaggactggggactctggaactaagtcctgaagggcgttacccaggtgaagcgggagagcgggagggtgctcattcaaggcagaaggcagggattgggacaggaagagtggaa

SEQ ID NO: 44036 - DNA, 122 bp, Homo sapiens
gacatcgcgatcggagtcctcagcctcgcttggcggcggcggcgggtcgctaagcgggaccgcagtgaaagcaggagactttctagaaaaaaacaccagttgtcaaccttggggcaggcagg

SEQ ID NO: 44037 - DNA, 122 bp, Homo sapiens
gggtggggcctcggcctcagtcagtctgaagtttggctttacgtactgcccgggcttcagcggcctcccctccgaggtgggggcggccattttgacggtgggggccacaaagttggtgggca

SEQ ID NO: 44038 - DNA, 122 bp, Homo sapiens
gtgggcatgtatgatagagctaggagaaatagcaggtggttctggcatcttccttaccatcgtgtctcccactttgactgcagtcgtgaccactgatgtgccagtctgcttcagtctctacc

SEQ ID NO: 44039 - DNA, 122 bp, Homo sapiens
cccttgtcctcctgtgctacctcctgaccttgacgggcaactcggcgctggtgctgctggcggtgcgcgacccgcgcctgcacacgcccatgtactacttcctctgccacctggccttggta

SEQ ID NO: 44040 - DNA, 122 bp, Homo sapiens
atgccttggctgtaggagaacccggaacggcctccaaaccagcttctcccattggagggccgacccaggtaagcacctgagcttgagaccccggtgcacgtggacaggtagctttccaagag

SEQ ID NO: 44041 - DNA, 122 bp, Homo sapiens
acaaaataaaacccaaaaagaactagctaggtgcagtgatgcttgtcatagtcccagctacgcgggaggctgagatgggaggtttgccggagcctgggaggtctaagctcatgaggtctaag

SEQ ID NO: 44042 - DNA, 122 bp, Homo sapiens
cctcggagatccgagaatccccagggacacgagccggaccaaaggctgccggggctaaagcgggatgtgcatccaaaatgaaggcagaagacccgctctcatcccaggaaaatcccttagcc

SEQ ID NO: 44043 - DNA, 122 bp, Homo sapiens
aaatgggttctgcccacgggcccgaggattcagtagaaggaaagtggggacgctgtcccccgccccaaaggcactgacactgggcgacacacgctgagcctctcacaccgacgggcctctca

SEQ ID NO: 44044 - DNA, 122 bp, Homo sapiens
aaaccagggcccaggtatcatgtttcctgctctctgacatctgagccactggaacatccacgcccagccctggctcacctgaggtccccaccctgccccttcaacttggcttcaatcaactc

SEQ ID NO: 44045 - DNA, 122 bp, Homo sapiens
tgaatcccaagggaggggtttaagccaactgcattcctgagcttttgcccagaaggctggcgtcttaggaggaaagagatagatggctccaggccgggcgcagtggctcacacttgtaattc

SEQ ID NO: 44046 - DNA, 122 bp, Homo sapiens
aaataacaacaacaacaccagaaacaacaaacaaaaggctatcatttcatgagcacttgccgtgggctggacacacaaactatcacatttatttcttacaataatcctaggagataagttct

SEQ ID NO: 44047 - DNA, 122 bp, Homo sapiens
gggcacggaggcagaatgtgtacatagtcagttgcctctgaaagttgtaacactcacttccggcataaacttccagttaggaagttttcctgctttatggttcatcccttccccagttctta

SEQ ID NO: 44048 - DNA, 122 bp, Homo sapiens
tttgatcagcattgtcaaggcttatttcaaaaagggactgcgattcctctcacagactagcgcagccaaagtcaattggcacaatttcaaggtgaatttattcattctttataaagttctgt

SEQ ID NO: 44049 - DNA, 122 bp, Homo sapiens
ccatgaaggctccagggagggtctgcttcatgccttctcttgagtttctagtgttgccaccgacccttggcgtgtcactccagtctcggcctctgccaacatggggtgatcatggggtgtct

SEQ ID NO: 44050 - DNA, 122 bp, Homo sapiens
agagggaaatggacggaaataagcaaaagcaaaacaaccccttctgagaagtgtcctcctcgctctcttataaaaacaggacttgttgccgaggtcagcgcgcgcatcgagtgtgccaggcg

SEQ ID NO: 44051 - DNA, 122 bp, Homo sapiens
ctccccctctttttgtatgcttgtgtgtgtgattgtcgagtgaccgaggaccaacacttccgaaaggtgggtctgaaagatgggtttctgacgacccgggggtggttgtagacaatttacag

SEQ ID NO: 44052 - DNA, 122 bp, Homo sapiens
agcctctccatcccctcagctccctttctctctgtgacacagacatgactggggactgcacgccagtgctggtgctgatggccgcagtgctgaccgtgactggagcagttcctgtcgccagg

SEQ ID NO: 44053 - DNA, 122 bp, Homo sapiens
aagggtgaagcagggactccagccagtcctcaaaatcccagggcaccggaggctggcagccgggctgggggagggcggggaggggaaagccctggagccacagagcacgaggttgggctgaa

SEQ ID NO: 44054 - DNA, 122 bp, Homo sapiens
ccgccagcgccagaggatgggacaggggtaggaggcgaataggtttcagaaggaattgagcgcgactttttgggttttcgctctttatttttagtttggcatcgtgtgccttttggaagatt

SEQ ID NO: 44055 - DNA, 122 bp, Homo sapiens
gagataatgtgattttatgcgggctgaatgttgtgcacggaacctttcagccaagaatctcgcgatcatgcagtgtttatccacgggatggcaacagagagccatctatgcctgcgtcccgg

SEQ ID NO: 44056 - DNA, 122 bp, Homo sapiens
acagggccgaggaagaaggcagagggaccggggcggcaggcctggggagtgtgctggggtcggggaggactccagagccttgacagaagcatcaggatggcccagaaaaggggcacccaccg

SEQ ID NO: 44057 - DNA, 122 bp, Homo sapiens
cccctgcctcctgcatacagcccccgatatgttgaggctgcctggtacccgtggtgggtacgagagggcttcttcaaaccagaatatcaggttagtatctggcagggaggggtcctaaattg

SEQ ID NO: 44058 - DNA, 122 bp, Homo sapiens
ccaaactatttcagtatgaaactgccttttctcagaaattctttgaatttctaactctggcgctttgggaatgacaggggaaattgaatgcataaacatgggaggggacagggaaagtgggg

SEQ ID NO: 44059 - DNA, 122 bp, Homo sapiens
aactcaagggatcctcgtgcctcggcctcccaaagggctgggattataggcgtgagccaccgcgcccagccactcagcttttgagggttaatcatcaaccgcacaaaggggaaaggaggagc

SEQ ID NO: 44060 - DNA, 122 bp, Homo sapiens
cggcgagatggaggaaggggtcagaggcgccggggaagaccggggggcactcacagttcccgagtccgcttctgtctcctggtcctgattccaaaaggaaatgtgactcttttgtgcagaac

SEQ ID NO: 44061 - DNA, 122 bp, Homo sapiens
tggccggcgtttcgtgggcctctcgggcaagtcggtgcgcacctgggctggggacgagggcgaaagttccagtttgctcaggaaactgcccatgaggagagatgaggcgcgggcagtgagtt

SEQ ID NO: 44062 - DNA, 122 bp, Homo sapiens
cctgccttgttttctggtcctggcctgggggggtcgtggtctcgctggtgcagcctcctccgggcaggccccgcctctgctcccttcccctcactccatctgattcggccccgtttccttgt

SEQ ID NO: 44063 - DNA, 122 bp, Homo sapiens
gacacaaccatgccattcattcttcccaccaagccaaaagaaaatctgggtgtatctggacgactcctgtcttccccttcatatgcagccattatgtttctagagctagaaccatctgaaaa

SEQ ID NO: 44064 - DNA, 122 bp, Homo sapiens
ttctgcagggggtgtggtgtttttgacccacttgatttgcctgtggtctcttgagggctgcggctcttgccttgagcatagaagaggactagagtttccctgtgagtttccatgtttctgct

SEQ ID NO: 44065 - DNA, 122 bp, Homo sapiens
atctctgacctggtcccctaaacccagcacccctttcttattcctggatgaggggaaatccgagtcacccagagctgggaggtagtaatgacagacagctatgtatgctgaggtaaaaagaa

SEQ ID NO: 44066 - DNA, 122 bp, Homo sapiens
tacaccctggcgctgtatccagttgatggaactgcaccccccaaaaagacagccacagagcgcccggcccagaagttggaggagacggggaggatcctcctcacagccttgacgagtgagtg

SEQ ID NO: 44067 - DNA, 122 bp, Homo sapiens
tatttcatgagtaaaaatttcagtgtgtagccctaaagattaaagactcttttaaaacaacgacataactgccaaaacacacgagattattatactgaaaaaatagtttcctaatataatca

SEQ ID NO: 44068 - DNA, 122 bp, Homo sapiens
tcttattcatcatttatttcagtctcaattgaagagtcattatttctagaaagccttctccgcccagctctctacattgcaccgttccctacagcaccaccagagtgcctctaacacttgat

SEQ ID NO: 44069 - DNA, 122 bp, Homo sapiens
caggtctgtgggaaccaggaaggcagaggaaggaagggaggctcccgggagcccaggccccggcaaggcccttacagttcccagacccgccaaaccgaaagagagaccctggagagggctga

SEQ ID NO: 44070 - DNA, 122 bp, Homo sapiens
ttttttttttgaggtagggccttgctctgtaggccaggctggagtgcagtggcatgatctcggctcactgcaacctctgcctaaaacctgggagttctataggggcaggttcaccagctgca

SEQ ID NO: 44071 - DNA, 122 bp, Homo sapiens
aggtgttaaacatttttgtttgcttccgactagtccagacgaagggccgcgtctcggtagcgctctgccagggtggaaggtgccggggccggggttcctagcaacacctctgggctgggggt

SEQ ID NO: 44072 - DNA, 122 bp, Homo sapiens
ttatcacagggtaaggggtccaccagacccggacaagcgctcctagctggaggagggtcgcgttcctgccggatgtggaaaggaagtccaggaatccccttcctgtctttctggtttctctc

SEQ ID NO: 44073 - DNA, 122 bp, Homo sapiens
caatctataatctgcacttctgtgtgtgtctctctctgtatagtccatgccccatttggtcggccacatcctgacagttagtgcagggcctccttccctctcctctctgcccccacccccac

SEQ ID NO: 44074 - DNA, 122 bp, Homo sapiens
agaaatgcactcgagaggaacataaaagcatcacacttaagcgctcgaaagaaagccccacgaacccataaaggctcctccccgctccttcctcgaagctcctccttcatcctgcacctcgg

SEQ ID NO: 44075 - DNA, 122 bp, Homo sapiens
ctcatctaccccttgtgcaatgagaacttcaagaagacattcaagagaattctgcatattcgctcctaagggaggctctgaggggatgcaacaaaatgatccttatgatgtccaacaaggaa

SEQ ID NO: 44076 - DNA, 122 bp, Homo sapiens
acagaaaagaatatcatctcagaggcatattcttaagctggctgtagctggtgggtgaggcgtgccctgtggaagcctttttcagcagcaggccttggtgccctggcacctgcaggcttgtt

SEQ ID NO: 44077 - DNA, 122 bp, Homo sapiens
cgggagtcggaggcaggaccaggagctgcagaggggccgcgggcagagccccagcgagcgcgctgccctggcgcggagcccaggggccgcccactggcgggggaggcggggagcgcgcaggg

SEQ ID NO: 44078 - DNA, 122 bp, Homo sapiens
ttcccatggatatggctggaaaatcagtaaacctgagtaataagagctaggcagacccttcgcatctatctaggtccgggctgtctaagagcaagctgaatgggcactgaaaaggtggggga

SEQ ID NO: 44079 - DNA, 122 bp, Homo sapiens
ttccgggcggtgccagctcgcgggccgggctgctggggagccctagtccgctagagtccgcgcgccgggcaaccgcccggggctgaagtcctccccacaccatgatccttccgtcctttatt

SEQ ID NO: 44080 - DNA, 122 bp, Homo sapiens
gtggggtgaccattgaccttaaccaaaaagatgtcaaggctttcctcctcctcactcccgcgtccccagtgccaggcagagtctctcagctagaccctagcagtctcagcacacaccgcacg

SEQ ID NO: 44081 - DNA, 122 bp, Homo sapiens
caaagtcattgagtgcttcaacgtggaatctcgcatcctgtgcatgctgtacgttcccgtcgaggagaagcgcagagagcctggggcacccccggaccccgagaccccggccgtgagagctt

SEQ ID NO: 44082 - DNA, 122 bp, Homo sapiens
tctcagagaagaggaggccggaggggctgggggtccccaggactgcatgcgccaggcagacggaggggaggccgagccaggagccgcaggcttctcagtgccagaccaacgtcgccctccgc

SEQ ID NO: 44083 - DNA, 122 bp, Homo sapiens
agatggccatcaatgcacatctgagccggtcatcatacacatcatctgagccggtcaccacgcacatcgtctgagccagtcatgcacatctgagtctgtccccgtgcacatcatctgaactg

SEQ ID NO: 44084 - DNA, 122 bp, Homo sapiens
aagttcgctttcattctccaggttttctgccttttcccttcccccttcctgcaacgcccccgcgcctcctcagcctggggatttcctggcgcttcgccggccctctccgcaaccccctgata

SEQ ID NO: 44085 - DNA, 122 bp, Homo sapiens
tggggttagagcacaagatggtaagggccgtggtggggaaatctgcctgttggtgtgagacggaggctggacttgccttagcagtatgcagagttgcacacacccaacaaatactgcaaatg

SEQ ID NO: 44086 - DNA, 122 bp, Homo sapiens
cagcagggcaccgaggggaggctgtgggcccagcgctctcaggtctactgcaggaacactcgggtctgtccctcgcttatgtggatagtgtccgcgtccaactgtgtcctgaggctccacct

SEQ ID NO: 44087 - DNA, 122 bp, Homo sapiens
gggaaacataaaataaaatagcagttgtaccatttatagttcctacctgatatggaaacccgtatggtttccatggatattttagcctcttggaatcatacaatttctcccagttataaaga

SEQ ID NO: 44088 - DNA, 122 bp, Homo sapiens
ggctcgggggcgctgggcggcggccctgggctgctttggctaacttggctgcggggcaggcgcgaggagcggcgcgccgaccgggccgagcggagaggccgcccattggccggccagcgcca

SEQ ID NO: 44089 - DNA, 122 bp, Homo sapiens
gcggcggcggggcggggcggagtgcagaggcgccgccggcggggcggcttcgggagggcgcggcccctttaagacgccccgccggccccgcccccgagccccgcctcccgccgcccacgtga

SEQ ID NO: 44090 - DNA, 122 bp, Homo sapiens
agctgattaggcgacaaaggttcctccctcacgaatgggattaagactcttataaatctgcgtgctctcccttccaatgtgtgaggaaatcgtgttcctccccactggagaatgcagcaaca

SEQ ID NO: 44091 - DNA, 122 bp, Homo sapiens
aaagacatcatctttgactccttgcaaataatacaccaaatattttaatttttagttatccgaaggaatatatagtggacatggttatgattaaaatacagaagatttgcagccgggcgcgg

SEQ ID NO: 44092 - DNA, 122 bp, Homo sapiens
ttcagcatgctcagctgctctgcatagctggccttctctgcccgcagctgctgagctgttcgctcctgctctgccaccttctgccgcagaggaatcagctccccaagctcccgctgggcccg

SEQ ID NO: 44093 - DNA, 122 bp, Homo sapiens
actgcgcccagcccattttacagacttttattttgttcagtttctttattgtcttcccaacgtccccccacacacactgcactaaaatgcaaacttcacgaaggcaaggaggaacttttgcc

SEQ ID NO: 44094 - DNA, 122 bp, Homo sapiens
tccatggtcccagatgctggagtgagagcttcatttgaaagccgatacacggaataaccacgaggtggcgacagaccccagcaatatccaggagagatgcccgcgggcccagaggagctgcc

SEQ ID NO: 44095 - DNA, 122 bp, Homo sapiens
taagggaagcaatggagggagagaactacaaccagaagtctcaggttttcgtcctttcttcgccatcattttttagggggtgaccttgaacaatttcctgccacataagcactaacattctc

SEQ ID NO: 44096 - DNA, 122 bp, Homo sapiens
ccatctgtgtgctctcccattcttgtcattccatttgcacatagcattgctccatgagcgcggaagtctagtggatcaaggaagcacgggaattcattgagactcagagtgagtacaagtgt

SEQ ID NO: 44097 - DNA, 122 bp, Homo sapiens
tggtggtctggcagagcaagcgcactgagggcattgtgtaggcggggcccaggctgcccgcgggtgcacccaggctgcagggtgaggccaggcaggcctgggtaggggcagcttctggagcc

SEQ ID NO: 44098 - DNA, 122 bp, Homo sapiens
gaagtgccctggtgggaggtggattccttgaaccctattggtgggagtgaatcaaggccccgtccccctaaagaaaaggctcaatcctagagagacagctctgcagccgcggccaatcaacg

SEQ ID NO: 44099 - DNA, 122 bp, Homo sapiens
gtgtttatacccagcaataaaaagggaaaactgaggatacatgccacaacctggatgaaccgtgaaaacatgctgaaagaaaccagacacaaacgatgacatatatgattccatttatatga

SEQ ID NO: 44100 - DNA, 122 bp, Homo sapiens
atcgtacggttttggaaagacatgccagattcttggtgggcaggcttaatatcataatgacgtcagccgcatcaacaataatgtgcaattgtatgtaatccggatcgcaccttcagcttaaa

SEQ ID NO: 44101 - DNA, 122 bp, Homo sapiens
gtctgtctcacaatctgctcgaaatatcttggtcaggaatctcaggatgtctagtgaccccgagtgaggtgctgccttttattcctgagcatctttggaagcaggaagcagggagcaacggt

SEQ ID NO: 44102 - DNA, 122 bp, Homo sapiens
gcggggtcccctttctcccagaagagacgtcacccacacaaacctgaccttcacgtggggcgcgggaccttgcggggtcccagccgcaggcgcccctgttgtttccttcgggcgggtgggtt

SEQ ID NO: 44103 - DNA, 122 bp, Homo sapiens
ctggtgtcacgaccgactgttgaatgggagcaaagtgccaggacagcggagggcggagcgcgcgccaggcatcccggggctcccccagctggcgctccggtggtccgaggttaatgtagtcc

SEQ ID NO: 44104 - DNA, 122 bp, Homo sapiens
gcttaatagccacatatagcttctgcattagccagtccacacataaaacactgacatcatcgcagaaagctctttgcacagtactgatctggggcctatctttctgtctcattccctgacag

SEQ ID NO: 44105 - DNA, 122 bp, Homo sapiens
ctgggaacagcagttcatgatctggtatcagatcatgaacccaggggtccagcacaaagacgtagatccagccctgataggagaatgcctggtttttagaaatagggggattagcttccaaa

SEQ ID NO: 44106 - DNA, 122 bp, Homo sapiens
gagagcaagggtccaggtttcctccctctttcaggcaccttgagcacaggcctgtcagggcgattgggatatgcaaaggagacgtcttggaatttcacaaccccctgcagagtggtgggggc

SEQ ID NO: 44107 - DNA, 122 bp, Homo sapiens
gcccagccccagtccctcagaggagccggctcctcgcccctcgggtccgactccccgagacgaaccttccatccggacgcttccaaactcccccaaaggacggggcagactcccggccccct

SEQ ID NO: 44108 - DNA, 122 bp, Homo sapiens
tttttttttcctgagaagaaatgttaattttaatttcgtttccctccttctggccctgggcgggggaagaggtggagaaggggcgccccctatctggacccacttggagggagacagcggtt

SEQ ID NO: 44109 - DNA, 122 bp, Homo sapiens
ccaggcaaccaaagcaaacctagataaatgggacttcatccaactaaaatgcttctgcaccgcataggaaataatcaacaaaatgaaaaaacagcctatagattgggagaaaatatttgtga

SEQ ID NO: 44110 - DNA, 122 bp, Homo sapiens
tgcaatcgggggggagcgtggtgggtggggcacagcctgaaggaggaggtcgagcaaacacgtggcctcagctgggacgcagcactgtctgcagagcccctcgaatccagctccacatctgg

SEQ ID NO: 44111 - DNA, 122 bp, Homo sapiens
acttggcaccaccatcctggctctgagtgagggagaaagtctagggcttcaactggaaagcggcgcccttgacaacaccaaggatcggtttgtatttatttactcagagcaggagacaactg

SEQ ID NO: 44112 - DNA, 122 bp, Homo sapiens
cctgtcccttgggacagggcaacagctttctctatgtggacacactggtgatggatcccccgtcctgcctgcctgcctgcctatggtggcctatgctgcctgcccctggtgagtccaggagg

SEQ ID NO: 44113 - DNA, 122 bp, Homo sapiens
acccagcgtgctgcatcctgcttctgtgatttcacacgtattgttccatggaaatgtgtgcgcccacctggcgtgctgtctcctgcctctgtgatttcacgtgtattgttccatggaaatgc

SEQ ID NO: 44114 - DNA, 122 bp, Homo sapiens
ggagggtgcagagggccagggcctgctggctggcagagcgcaggattcccaccaggcacccggaggctgaaccttttcagagcaattcacacaagttactgggttcacaacattgactttta

SEQ ID NO: 44115 - DNA, 122 bp, Homo sapiens
acgcccgacgccttctgggagttgtagtttcttccgctggctccgggccggccctcccgacgcctcctgggagttgtagtttttcctgggctccgttcccggcctcttcggggacgcacggt

SEQ ID NO: 44116 - DNA, 122 bp, Homo sapiens
tgcaaaggacgggagaagcattggcctctaaactgggcgcaggccctgcctaagcgtccccgctaccacagtaaccgaagccacgcccagttcctgaaccacgtcggctcccctcccccaac

SEQ ID NO: 44117 - DNA, 122 bp, Homo sapiens
gacttacttcagcattggacattgtccaccacttcctcacatgggaatctaaaacctgaccgtgtcctgaccttcttcctccccaaagcctttactggcttccccttctgcagctgcttcct

SEQ ID NO: 44118 - DNA, 122 bp, Homo sapiens
cacggcccgcgagcgtgtcaccgcctgcaccccgtccgatggtcccggcggtggcgctgccgcctgaccaggccatccggcccccagagcgcccctccctagtgacccggaggccacatgag

SEQ ID NO: 44119 - DNA, 122 bp, Homo sapiens
ccctttgatgggccctgggtttggtctccattgtttgttgtgggtttttttcttgaaacacggtctcgctctgtcacccaggctggagtgcagtggcgcgatctcggcccactgcagcctcc

SEQ ID NO: 44120 - DNA, 122 bp, Homo sapiens
agatgcagtttcaggattattttcttcttttctgcagtgtcttttcccaagctacatcagcgtctaaattttggagttactgatgcttccgttatttctgcagatagaatattatgtcgtaa

SEQ ID NO: 44121 - DNA, 122 bp, Homo sapiens
cacaagaatgaaaaaaatgaaaaaacaaacaaaaacctttgctaaacacccaggcttcctcgtagggggcatttgtgcagagttgatatgcaaaatgatcaatgatcaaaatcacactgaga

SEQ ID NO: 44122 - DNA, 122 bp, Homo sapiens
ggggcagccgccggacacagcacgcgcgtccccaccagttcagcagccggcgcaggagcacgatgcccacactgcgaattggaaattaggcgcgaccacgtttccggcaaggctcctgggga

SEQ ID NO: 44123 - DNA, 122 bp, Homo sapiens
tgtttttatgtttttgcctgattcatacgggcttctccggtgaagatgggcctgaagtaacgcttgggttgcttctgacgttataactcatcctgtagctgcagcaaccgtggtccttgcaa

SEQ ID NO: 44124 - DNA, 122 bp, Homo sapiens
cagggctcggtgcaggccccgctttgtacaccctccacccaggccccatgaccgctgggccgggccctagctggcccctgccctctggctgcccaagctcagcttcggtgctccctctccat

SEQ ID NO: 44125 - DNA, 122 bp, Homo sapiens
ggttcagttgcggccagacctaggcctggccatgtgccagggtgcctggactttggacaccggtgtgttcagagtgtgatctgatactagcaggacttctggctgggagcgccactgtgggt

SEQ ID NO: 44126 - DNA, 122 bp, Homo sapiens
ttgggcccaccttctgtccctgttccacacccagctgtccctgaccagtagacaagtttccggcgctgacacccgtccccaccccccaccagggcacagctgcggaaaacggccccaggcgg

SEQ ID NO: 44127 - DNA, 122 bp, Homo sapiens
atgagggttttgtaaacaggcaaggcccagtcggagatggtggtggaggaagtcacaaagcgttgtgcagaaaccagactactctgagtcagttctgccccctatgaagtcaaaaagacagg

SEQ ID NO: 44128 - DNA, 122 bp, Homo sapiens
gttaaagagaaacccaagacagctgcagccaggggctccataatagccacgcagaggaagcgcatagaggtcatttttctatgccacgaagggagacttgtttcagctgagacccaatctgg

SEQ ID NO: 44129 - DNA, 122 bp, Homo sapiens
agccagccaaaattcagcaaaaccaaaatggccacgagactgacctctggtcatcttcaccgctacattcccaccagcgccatgacagtttacagatgcaatggcaacgtcaggaagttacc

SEQ ID NO: 44130 - DNA, 122 bp, Homo sapiens
agtagccggcctgccaccaagttctttacataggggatgcctatgtctgtgcttcattggcgtcatctcacaaggccctgagctggcaggaaattgaggtctcaaggggaaaagccacctgc

SEQ ID NO: 44131 - DNA, 122 bp, Homo sapiens
accccaccaccattcagcgttttggggtctgtttgtttttattgttatcccaccccacaccgccccgaggcgcgcgcgcgcgcgcgcacacacacacacacacacacacacacacatacaca

SEQ ID NO: 44132 - DNA, 122 bp, Homo sapiens
gaaaaaaaaatctcattatacattgtatttaaaggtctcttttgctctaaatttaatgaacgtcattatccagtaactccacgcctttcttcatttatccttcaaaatggcggactttagac

SEQ ID NO: 44133 - DNA, 122 bp, Homo sapiens
catcggtgggagcgtgggtgaggatggagcgcaggttactcaaaccagtgtcatcaatcacgtctctccctccgtgaaccagccaggcctgtgttcagctgctatttatcttcctcgccttg

SEQ ID NO: 44134 - DNA, 122 bp, Homo sapiens
gccgagggtgcactagccagatattccctgcggggcccgagagtcttccctatcagaccccgggatagggatgaggcccacagtcacccaccagactctttgtatagccccgttaagtgcac

SEQ ID NO: 44135 - DNA, 122 bp, Homo sapiens
gggatgaggggcatcggctcgggttttggttaaatcccgccttgcccctgctgtggaggacgccccctgtggtgcctggtgaaccttagtcttagagatcggttcatccccgcggtttccca

SEQ ID NO: 44136 - DNA, 122 bp, Homo sapiens
ggcgcgggcatcagcagagccaggcggcggtgtcggggcgcgaaggtgcccgtggtgttccggtggccacacccgaggagcaggggagaccggggggctgcggggtcagaagctccgggtgt

SEQ ID NO: 44137 - DNA, 122 bp, Homo sapiens
aattaggcacaggaagaaaggaaagaaaacacaaaggaactattcttctccaggaaccaccgaccttctgtccaggggtggaggaggaagaaacaggtaagcatgtcccagcaccagagtgc

SEQ ID NO: 44138 - DNA, 122 bp, Homo sapiens
accgacggaggcctacagagctgcagaggcaggatttcgagtccaggggctcctctgaggcgttggcaggggcagcgcatcagcagccgtgacactgccctcgccgtgtggcatcctcttga

SEQ ID NO: 44139 - DNA, 122 bp, Homo sapiens
tgcgaggcggggcaaaccgcctgagtcaccgctcacggttgtgtttttccacctcccggccgtccctcccatccgggtgagtcctcgtgggtcctcccggaggcgccccctagtcccaggct

SEQ ID NO: 44140 - DNA, 122 bp, Homo sapiens
cgcctcactcaccctgaacgtgacagggacacccggggacagtgcctcactcaccctacacgggacagggacacccggggaccgtgcctcactcaccctgcacgtgacagggacacccgggg

SEQ ID NO: 44141 - DNA, 122 bp, Homo sapiens
aaacacacacacacacaacccaaacacacacaacacacacacacaaaatcagctgggtgtcgtggtgcgtgcctgtagtgccagctacttgggtacttgggtggctgaggcgggaggatcac

SEQ ID NO: 44142 - DNA, 122 bp, Homo sapiens
aggagaagttgatcccggtgctggtgagtgtgcccagacctcccagcatccatggccagccggggaggggacgggaacacacagacccacacagagactcaggagagcatggaggtcagaag

SEQ ID NO: 44143 - DNA, 122 bp, Homo sapiens
cttcccggggcccccgcgcccctgccctgcgcgcggccgtggggcgccggtgccctcgcccggagatgccctgccaatgccacccgctcgcaagatgcggcctcgaccccgcctggacccag

SEQ ID NO: 44144 - DNA, 122 bp, Homo sapiens
acccccagcgccaaacctccaccccggtgcgcgcccctccaggctcctgctggtcccactcgccggtaattaggtctccggtcagcctcagctcccgagacacccaggcccagaaggacacg

SEQ ID NO: 44145 - DNA, 122 bp, Homo sapiens
aactccaggggaggccacgtgctcagagcagacgggacaacatcccacagctggagactccggcacccaggcaggcagctctgaggtgggaccccagggttccaaggcaggcgctggccctc

SEQ ID NO: 44146 - DNA, 122 bp, Homo sapiens
agtgaggatcaaggtgggaatgactgggtggtggctgccactagcccaggaacatgacaacgtgaccacaccacacatgcctccaacacacacccacagtctaaacatctctccttctcagt

SEQ ID NO: 44147 - DNA, 122 bp, Homo sapiens
ccagttgcaatgtctgtcagtaacgaggcttttgatgtgttgagctggaggtgagtggaccgggggctgtgttttaagctgcttccttggcatttggcatcactgccttctgttcccggggg

SEQ ID NO: 44148 - DNA, 122 bp, Homo sapiens
ttgagccttcatcctctattccccatccagtggggtgccgaggctcaggcagcatgacgacggagacctttgtgaaggatatcaagcctgggctcaagaatctgaaccttatcttcattgtg

SEQ ID NO: 44149 - DNA, 122 bp, Homo sapiens
ccgacgattcttgggaggctccgggcggacactggacagccgaccagtcttgggaggctccgggcagagtctggacacccgacgagtcttgggaggctccaggcggagatgagacactgcag

SEQ ID NO: 44150 - DNA, 122 bp, Homo sapiens
cgtgacgtggggtcgagagcgggatccgaggctggcgggttttggcagtagctgtggctgcggctgccgggcctggggacgcgggcggccgaggccgccgtcgcagcctcctcgtctcgccg

SEQ ID NO: 44151 - DNA, 122 bp, Homo sapiens
gatgggccgtctgggggacagcagggagtccgggggaaacgcaggcgtcgggcacagagtcggcaccggcgtccccagctctgccgaagatcgcggtcgggtctggcccgcgggaggggccc

SEQ ID NO: 44152 - DNA, 122 bp, Homo sapiens
ctgacttcatccctctggtttcctgttgagccctctggaatgcatgtttccctgcagtgacgcatagtcagggaaggcaggcgctggggccgtgccctgactgagtgtgaggtaagggctct

SEQ ID NO: 44153 - DNA, 122 bp, Homo sapiens
taattgaaagtccagaaagaaacgagaggcctctgatgaacctaaacacagttcacaaatcgtaggtgcattattaataaaaagccctttgggtcttcgcccagaaccgaattgttcttttc

SEQ ID NO: 44154 - DNA, 122 bp, Homo sapiens
caggaatgtgccacagcggcattcaggaaaattcggcgatgcgtgccaccgttgggtgcgcgccccgtccctctagtgccaggtgggggactgggaagccgcctctgccatctgccaaggac

SEQ ID NO: 44155 - DNA, 122 bp, Homo sapiens
gaccttcgcagtgagtgttacagctcttaaggcagagcgtctggagttgtgcgttcttcccggtgggctcgtggtcttgctggcttcaggagtgaacctgcagatcttcgcggtgagtgtta

SEQ ID NO: 44156 - DNA, 122 bp, Homo sapiens
tgccttcattgtctacagacttcaacctcacaaaacgcccaacaaaagccctgcagtccacggcccaaaggccacaagccagctattgtgacattccagctggcctgggaggcttcacttcc

SEQ ID NO: 44157 - DNA, 122 bp, Homo sapiens
tgctgcttgaggcctcgcacgcgctctccctgaagtttcaccagctcctccagcgccgcacgctctgccatcccggctgtccacttgagccgcctgctgtctcgacctgcggtggttgcccc

SEQ ID NO: 44158 - DNA, 122 bp, Homo sapiens
aggttttggacctcgagagctgcagaactgaggctactggtgccgccagcctgctggctccgcctctgcctcagtttcttcccctatggcccgcgtgccgctggggtgagtcagggcgaacg

SEQ ID NO: 44159 - DNA, 122 bp, Homo sapiens
tcagaaataattcccaatgctttagttaaaattggggttgtctgcagttaacagagaccccgaataattgacttaacatatatatctttctcacataaaaatctggagataggcagtccagg

SEQ ID NO: 44160 - DNA, 122 bp, Homo sapiens
tggggaacgcgagtggggacaggggggccttcagctgggccccagggaaccgccccgtggcgctctcggcctcgctctcactcacggtgctacaggtggtaagcaaattgactatgttgtgg

SEQ ID NO: 44161 - DNA, 122 bp, Homo sapiens
tggtaaacagaataattgcaaaatatgtgccaatggccttgaaatcaaagaggagcaggtcgcctgaggagaagcatatgtttaatgcttcacactccatgatgagtcctggagaagaaatg

SEQ ID NO: 44162 - DNA, 122 bp, Homo sapiens
cctccggtcctcactccgcgtgccctgcccgatacttacccaggcgcggagagcggtcagcgggccctccgctccgcatccattagctggtggtctggccgcttcacttccggagcgcgggg

SEQ ID NO: 44163 - DNA, 122 bp, Homo sapiens
cggacactttccggcctcttttgtgtgagtgtgtgagtcaagccctgaatccgctggccacgtccggcctccatcccctttccccacgcctcctgggctccattccctgcctagtgaccact

SEQ ID NO: 44164 - DNA, 122 bp, Homo sapiens
tagcaatcagcgatactccgtgggcgtaggaccctccgagccaggcgcgggatataatctcgtggtgcgctgttttttaagcccctcggaaaagcacagtatttgggtgggagtgacccgat

SEQ ID NO: 44165 - DNA, 122 bp, Homo sapiens
caggccctcgagcatcttcgagacacccgcgccaagtctggtcccgggggtggctgccgtcgggccccgcctgcgctcctggctcctgtccttgccccgacgcctctgccaaccagcacctc

SEQ ID NO: 44166 - DNA, 122 bp, Homo sapiens
cagcgaggcagaaagcgcgctgtcgtgaagcgttgcaagcctctcgtagcggcctgaaggcggctgtctgtctgctggcttaggggaaaggtcagaatctgggttttccttcttggatggaa

SEQ ID NO: 44167 - DNA, 122 bp, Homo sapiens
gtcctgcctccagcgcccaccaccccacacgcccacctcggacctcgccggcggggcctccgtgccctcagtgacagtgaccccggccgtggctacagacggctgagccacgggctccgctc

SEQ ID NO: 44168 - DNA, 122 bp, Homo sapiens
cccaaggacaatgtgatgaaggtcagatgttcaattcacctgcatatgcagtggggtctgcgctacagagaagaactctgaaattatgagactcagagcttatatagaatggttgacatatg

SEQ ID NO: 44169 - DNA, 122 bp, Homo sapiens
aaaggccaatcttaggttctacaacagtgatgttatctgcaggaatgattggggaagatgcgaatttgtgacctgtggaataatgggtggtaatcatttaactacaattacaacttagaaga

SEQ ID NO: 44170 - DNA, 122 bp, Homo sapiens
ggaaacaacccaccccagaagggtgcactcattcatcatgcccctctatataggggaagacgggctgggtagcagggcctattgggcctgaatgttctggatagaccaaattgtgggttcag

SEQ ID NO: 44171 - DNA, 122 bp, Homo sapiens
ggaaggcttgaagacagaggggccctggtggcctgctctgactccggcccttggcgggcacgaggtccagtctgagcctgggcccaagccacacaccttccccggcataagatgggcagcgc

SEQ ID NO: 44172 - DNA, 122 bp, Homo sapiens
tagacgggatggcggccgggtagaggctgcaatctcggtactctgggaggccaaggcaggcggctgggaggtggaggttgtagcgagccgagatcacgccactgcactccagcctgggcaac

SEQ ID NO: 44173 - DNA, 122 bp, Homo sapiens
agcccccacggcacctcacaggcggaacttccatctcccacagcccggaagctgacgccgcggcccgtgggttcggaattgctctgaatcgctgtgcactatttggcaatgtaaaactgagg

SEQ ID NO: 44174 - DNA, 122 bp, Homo sapiens
catcttcccctttcagtccattgttcccacagttcgggtaggagagaaaagcccccgcagcgcccacattccgtcccgccgccccgcggcgcagcctgagcgccacacaaaggacgcggccg

SEQ ID NO: 44175 - DNA, 122 bp, Homo sapiens
gccagcccggagggagccccggggggtgtggggccatgtgcagcctggcgacctggacctcggacctcaggagttggggacagggacacaaagttggccccgaccccggctcccacgtggcc

SEQ ID NO: 44176 - DNA, 122 bp, Homo sapiens
agaggggcggtctgcggggacaacaatggcggggttctgggtcgggacagcaccgctggtcgctgccggacggcgtgggcggtggccgccgcagcagctgatgctgagcgcggcgctgcgga

SEQ ID NO: 44177 - DNA, 122 bp, Homo sapiens
ttgctgagcccccgcttgccggccctgcccgacagccagcagccggtgccagagcagttgcgcatccaggtgagtcgcgtcagcatgcacgactatgaggccctgcactacgacaaggagca

SEQ ID NO: 44178 - DNA, 122 bp, Homo sapiens
ctccaggcccgggagttcctggccctgctggaccagctgcaggagctgcgccagggtaaccgaagctgaggcagaggccggggccgagcattggggactgcggggacgctccatgtcgggtc

SEQ ID NO: 44179 - DNA, 122 bp, Homo sapiens
agctcgtgctccagccggcacttggtcatgaccagcagctgcagcgtgtcctgtgtctcccgcagccgcagcttgagggtctgcagggtgtcgtcgatggtgaacacctcgttcaccagcct

SEQ ID NO: 44180 - DNA, 122 bp, Homo sapiens
tgacaatgggaagaccaaaacaaaaatgtcttctcttctgtctaatgtttcaccaggtgtcggaaaattagtgagaatacatcatttaaaatacagataatattctggttttccactacata

SEQ ID NO: 44181 - DNA, 122 bp, Homo sapiens
tggacttggctgtgatctttgactgctaggggagggaacctgggtatggtgagacggtgacgagagaaaagggtcacaaaggtgaggtgaaacctctcaattggtgaaatttccatgcttcc

SEQ ID NO: 44182 - DNA, 122 bp, Homo sapiens
caggcgtccctcaactctcgcgagacgaggcgtccctgggcccgcgggagagttgtgtcacggggcactgagctgttccctgcgctaaggtgcttcttcctaagtgctgttcagatttttaa

SEQ ID NO: 44183 - DNA, 122 bp, Homo sapiens
gtagggctcaatgtgcacggaggagccgaacggaatctgcggcacgcggccctccagctccgtgtcgatggtcaggtgcccatgctcatcgatgccgctgaaccgctgcttaatgaccagat

SEQ ID NO: 44184 - DNA, 122 bp, Homo sapiens
atgagtaccatgacatttgtgccttcttgtctgagccaggatggctgtgcccccaacccacgtacctctagcttctcagagacatattcgcactctgacatgagctgaggtatgatttcact

SEQ ID NO: 44185 - DNA, 122 bp, Homo sapiens
agaggccagcgggaacggtggcctcgggtgtgtgggggtgaggggtgtggtgtgtgtgcacgtgttcacgcgcgactagaagcggttccttgtgcatttctagaatcttgtagatgtgtttt

SEQ ID NO: 44186 - DNA, 122 bp, Homo sapiens
tttcctacaactaaccataatatcacaggactaataatctgtgatataccacagttaaaacgtaattcttcttgatttcttacttataaagatcataattgctggtcagcaattgatccata

SEQ ID NO: 44187 - DNA, 122 bp, Homo sapiens
gggacggctcttggaaacggaatccgtactttaattaaagtttatgcagttttccaggagcgtcctgtacctcatttcggccctcacgtttcagggaagccctctccacagttacaggcaga

SEQ ID NO: 44188 - DNA, 122 bp, Homo sapiens
tactaaaaatacaaaaaattctccttgagtggtagcgggcgcttgtagtcccagctactccggaggctgaggcaggagaatggcttgagcccgggaggcggagcttgcagcgagccgagatc

SEQ ID NO: 44189 - DNA, 122 bp, Homo sapiens
ccgcaggcggtccagccagcttgaaggaagcggcgccgctgcgcctccacgtcaggaaaacgctccaggccatgcaggggggagtttagctgccgaaaatgttgcagcatgaactggccaaa

SEQ ID NO: 44190 - DNA, 122 bp, Homo sapiens
ccgtctgctgggtcctcgccggaggctgttccaagcctgagtggctgcgtctgccgaggacgttggtgaccctggtctctgaggtgccgggagtagggaataaaagagtaaagcattgtccc

SEQ ID NO: 44191 - DNA, 122 bp, Homo sapiens
ggtacactcacacactgccttggtatactcacacactttgcttcagtacgctcacacacccgcctcagtacactcacatcacctcggtacactgccataccccgcctcagtacactcacaca

SEQ ID NO: 44192 - DNA, 122 bp, Homo sapiens
gtggccgcctgcgcaaggtcctcctctggcgccccccggggccggcgtagctgtgcatggcggggaactcgcggcagcaatgaccttcaagcatcccagccgagaaggtgaggagcgcaggg

SEQ ID NO: 44193 - DNA, 122 bp, Homo sapiens
aatgacgctcaacttttcactgttgtgaacacttgctttcacttgctatgcacctgatgacgaggggtccacagccatgcccatgttcgtgaaaggtcaccacgttctgcttctcatcatgg

SEQ ID NO: 44194 - DNA, 122 bp, Homo sapiens
ttgcccccaagacttgggatcttattgggttacctacagcctcaatccactaattccttgcgctctccgctgggcccgctgtctgttctccgacgcctacccgggacgcctccctgggatgc

SEQ ID NO: 44195 - DNA, 122 bp, Homo sapiens
tgggaggaggccagagtgggggtgtgggggtgcggtgactggcatgacccctcaatctcccgcctgacccctcgaggtcaggccctgggcccccaggcacgcagctggtcctgggcggtgcg

SEQ ID NO: 44196 - DNA, 122 bp, Homo sapiens
ccccggcagccgccacagtccggcccgccccccggagcccggctctcataggccccgagccgaagcccagccgcttattggccgcccgagctgctactcgagagcagcagggtaggtggtgc

SEQ ID NO: 44197 - DNA, 122 bp, Homo sapiens
gtggtgtttttttgtgtttttttttttttctttcccgatgaggacaatacaaggagaatccgatttaaatttaaattacagagatggagattgaggctcctcccaaggggacaacttatcct

SEQ ID NO: 44198 - DNA, 122 bp, Homo sapiens
cgccacgcgaagccagaggttggacgacgcagccggccaggcgcggctcccgggggaccccgaaaccgcctgtggctcaggccctacttggcaagaagagactggggagtgagaggaggggt

SEQ ID NO: 44199 - DNA, 122 bp, Homo sapiens
tcccagcccccgaggcaggaggtcactgctggcctggacgtggccttggtcctgcccagccgcatcccaggtgcctcccgagtgccctgaggtggcggtggctgcagcctaagcttggcagg

SEQ ID NO: 44200 - DNA, 122 bp, Homo sapiens
tctcccaactgagctatttcggcagccgttacgactgcgatgctcttttatcctcctggtcgttttgccgccccgggtctttgacacagacgctgggaatgcaggttcagcagggactgcgt

SEQ ID NO: 44201 - DNA, 122 bp, Homo sapiens
cttgatttcctcatcagccccctaaaagttctgcaaggcccagcaggactaccttgctctcgcctggaagtgttcttgctgtgctaatttaattacatggcctaactgggcccaggctgagg

SEQ ID NO: 44202 - DNA, 122 bp, Homo sapiens
gccactggggtcgaagtattgaagagtgggccaggttctctgttttcctccaggtccaggcggctgggcagggccaacgtaggaaatgaagaactgtgcacggcgcaccccaggaattcagc

SEQ ID NO: 44203 - DNA, 122 bp, Homo sapiens
ccctccataagccgtactcacctgtcaggaagtggtcgcccagcagccatcttaggaccccgtcaacatcgcgccttctcattggctcctgcgtctcaaccaatgggctggggccgttctgg

SEQ ID NO: 44204 - DNA, 122 bp, Homo sapiens
ctctgccacgtttctgctgtggcaggaagaactgaaattccagaagccggagaaacaagccgccgtcaagactgctgaagcgaggcctacggccctgtaatcacacaagctcaggcttcacg

SEQ ID NO: 44205 - DNA, 122 bp, Homo sapiens
ggggggcggacacgcgaggcgtgggactgatggtagccctgcctccaggaagcaggcaggcggggacctctgggcgctcggaggggcagctccgagggcacagggtacagggagaatcagcc

SEQ ID NO: 44206 - DNA, 122 bp, Homo sapiens
gcctcccacgggctcggagctggaagggtcgtggggaggcccgcccttcacgtccatcttcgtttggcccctctgagttaggggaaatacatcacagtgcttgggccatagaaccaggcagc

SEQ ID NO: 44207 - DNA, 122 bp, Homo sapiens
tcaaagcatgttcctgagacaaggcgtcggaaggccctgaagttcatctcccaagttccccgtcgatctgctcccacagccctgtgtctgtgaagccactttgcattttctcacccactgag

SEQ ID NO: 44208 - DNA, 122 bp, Homo sapiens
tcacgaatttagtttgtttcagagcggcaggactcgtagctagagaacgaggacccacgacgcgtacgcgttacagtcctgtttccctagaaacggagctgccggcgcggaggtggctttga

SEQ ID NO: 44209 - DNA, 122 bp, Homo sapiens
cctaacccacagacactttcatgtggtatcctctggcaacaggagggtttgttacattgccgtggcccataacagtgcatgttcattttcctttcctcacaaaaacatggtttgtcaaaaag

SEQ ID NO: 44210 - DNA, 122 bp, Homo sapiens
gtcgagtggggacgagggcttttctccctctgtcaggaagagctggcattggagcccagccggcgggtggcacggtcttcccagggtaactttctctttgctttcccgtcacccacacttgg

SEQ ID NO: 44211 - DNA, 122 bp, Homo sapiens
cattggctggaaggcgtgtgagtgacaggggggccgggcgcagggcccatgggccggtctcgtcagctgcgagcccgggcgctccgggggagggcgacgccgagcggctttccacgccgcgc

SEQ ID NO: 44212 - DNA, 122 bp, Homo sapiens
gcagtttcagttcacagtttatgtacaggtggtgaagctgtaatatgtacaaaatcacatcgaggtttgggtatagagtacatctggctatagatgactaaagcacatctgctgaatcgatt

SEQ ID NO: 44213 - DNA, 122 bp, Homo sapiens
ccccggacccgcggcgcaggggagggccgggccgccagggggcgctctcggcggacggggcgggggtcccccttggtgtctcccaggcagcttcgcaacagccctgctggattaggccccaa

SEQ ID NO: 44214 - DNA, 122 bp, Homo sapiens
ctgtcaggggaagggcactttccggctgggtcttccccctgggaggagtgagcgaagtcccgcagtgccgggcagtgccggccagggactgagcgggcgcgcaggaaggaggctgggtagcc

SEQ ID NO: 44215 - DNA, 122 bp, Homo sapiens
tttcagagggctgaggttccagtaaaaatgtgcccactgggaggcagaggtgtggaaactcgtgggagccttggtgcccgatcaacctaagtttcaatccctgtttattctgaagcttacta

SEQ ID NO: 44216 - DNA, 122 bp, Homo sapiens
tttcgcaccacccccattccggcctctccattgattcctcgatcatcccgccccctacaccgcccactcccgggcatccccattggctgcgtgcttctccggctctcaattcgctgtacgtc

SEQ ID NO: 44217 - DNA, 122 bp, Homo sapiens
cgggcggcaaggcaggatcaatgctgaatgtttgcagctgggcccagctgactatcgctgcggaccctcaggcttctctcactgcctcccagaggcgcaggcctgaactgatgcctggggag

SEQ ID NO: 44218 - DNA, 122 bp, Homo sapiens
acacacccattttcccctccctccgccagggccggctcgggcgccggttccagcctcgcgcgccagcccctgtcggccccggcctgcaccttcatccccaggacgtcccgatagaaacgcgc

SEQ ID NO: 44219 - DNA, 122 bp, Homo sapiens
cctgaggcctggttaacgtccctcacctggtctccgtgtccttggctggcactggcggcccgaacccaaccagcgagcgttccccaggcccagggaagagctccgaagggggagctccggcc

SEQ ID NO: 44220 - DNA, 122 bp, Homo sapiens
tggggggaggggcggtggcctgggagggttcagggaagccccgggcctcacccgccgggtcgtctcctccacggaaccccgtcccgctcaggagagcgcccagcccttccggccgcagcagc

SEQ ID NO: 44221 - DNA, 122 bp, Homo sapiens
ggaagaggcaaagctttcagccttctaaagaagggtagctcagccaggcacagtgtctcacgcctgtaatcccagcactttgggaggccaaggcaggcagatcatgaggtcaggagttccag

SEQ ID NO: 44222 - DNA, 122 bp, Homo sapiens
tgtccagatgtctgtagaggtgtgacgtggagggcactttgcatttttgccgaacctcttcgtccaacttcctttcttgttctaccgcccccctaccatacccgcctgccaacctcacactt

SEQ ID NO: 44223 - DNA, 122 bp, Homo sapiens
gacaaagatgcaggatgaagatggggctcaacaatatggtggagcctcgaagccaaccagcgcgcaagctctctcgccacatgttcttggagatggtattttcacctccttggctgagctct

SEQ ID NO: 44224 - DNA, 122 bp, Homo sapiens
gcccgtcctttcacctgcgagtccaagcccttggcagaggcctgaaaagtccgaaaactccgagttcgggcgctgaggtctcccgagccggttcctgaactctccgggcctcagtcgatcgg

SEQ ID NO: 44225 - DNA, 122 bp, Homo sapiens
tttcccctatctaggtgcactggccgtgattttaccccactccatctggggcgcgcccggcgcagacaggactgcagagaaaagggacagggaggggacctagtcagtccctactataactg

SEQ ID NO: 44226 - DNA, 122 bp, Homo sapiens
gggaaaggcctctgccaggagccttcccccgagagaccgcttttcctcccaccgcagggtcggcttgcatgacaggcctgcgctccgctggctccagcgcctccgaagtcacctgccctgca

SEQ ID NO: 44227 - DNA, 122 bp, Homo sapiens
gaggactgacctaggtgagtcaaggaggctagggtgtcttcctcagacatgggaagagggcgtgctcttgctacctcagtcacatagcagggagcgtggtgctctaaccccttcgcaaaggt

SEQ ID NO: 44228 - DNA, 122 bp, Homo sapiens
ccattcctttcagattctttgcttttactggaaggaagctgctgcctgtcaggtgagtgtcgtgatgtccaccagggtaacgcagaccgagagacatgtcagcaatatgcttgcaatgaccc

SEQ ID NO: 44229 - DNA, 122 bp, Homo sapiens
taccgtaagcacagggtttcttccgcgcttggagcctaggaatagtacaaggtgtcaacccgcgctaaggacctgaggttcaaggagggaaaagtctccagcgcagcgctaggaggcgctac

SEQ ID NO: 44230 - DNA, 122 bp, Homo sapiens
ccagtctgggaagtgaggagcgcctcttcccggccgccatcccgtctaggaagggaggagcgtctctgcccagccgcccatcgtctgggacttggggagcgcctctgccccgccgccccgtc

SEQ ID NO: 44231 - DNA, 122 bp, Homo sapiens
caaactgtccctcgggaactgtccaggacaggctgagggagtcaggggtggcatctgtcacggtcagctcccccaggcgaggcttgatggggggctcgggggttgcggtgggaggttctgaa

SEQ ID NO: 44232 - DNA, 122 bp, Homo sapiens
gtccatgcacacaggaggagctgcgtgtcctttcccaggataaaggcaggtctctgtacacgtgtggagctgtctgttccctcccaggataaacgctggtccctgcacacaagggggtctgc

SEQ ID NO: 44233 - DNA, 122 bp, Homo sapiens
cgccgggctttggctccgaacgcggtgccccacttgccttcgcttgcccattgtgcggagcgcacttccctacagcagatatcagggagaagcaccggctgtggcatgctgtccgcgaggag

SEQ ID NO: 44234 - DNA, 122 bp, Homo sapiens
ataccccgaatacaagtagctgacgctcagagagcagtattaaggcgagcacccgcagaccggacctggataactccttggagttcacctctagcggccccctccccttggagctgcgcaag

SEQ ID NO: 44235 - DNA, 122 bp, Homo sapiens
agactaacccacgtttccccggaggaccccagaggttggaagcccctccaagattaggggcgcagtgctcccctggcctgcggaagagtcagaggagtggggacaacatccaacatcagcct

SEQ ID NO: 44236 - DNA, 122 bp, Homo sapiens
ccactgaggaagcaaagggacgcccagcctccagccccaaatagggaggctgacttgggacgtcctatcaagagtctcacctgggtccagacacatgaacttgcagcactctttggggtcct

SEQ ID NO: 44237 - DNA, 122 bp, Homo sapiens
gggcatgacattggcacatgaattcaagatgtttcatattctgaacaagtgagtcctctccgacacacagaaaccactacgtaaaagctcatcaaagcacccagctgaccaaaccatttaaa

SEQ ID NO: 44238 - DNA, 122 bp, Homo sapiens
ggaggagacgccgcggccgccgttttcccgccacggcgagagcccgccccggccggaagacggcctgcgccagcctataggaaggcggtagacagcctataggcgctgtctgcgggcggggg

SEQ ID NO: 44239 - DNA, 122 bp, Homo sapiens
aaattatttcccccgccccgttcctgccagctttaaaacggtcatcagtggggggtgctgcgtatcccctttcactggggtggcttcttcactgaggagagtcgcgcctcagaggaactgag

SEQ ID NO: 44240 - DNA, 122 bp, Homo sapiens
cctccctttgtgcctcctattatctacctacttgcctcaaatttaccttcaacatgtagtcgcacatatttatttctgtctctgtctccccctagtggacatattacttattattatatgcc

SEQ ID NO: 44241 - DNA, 122 bp, Homo sapiens
tgctgaggtccagagcgtagtccgagggctccgaagtcagattaaagggctcgaggacggcggacacaggggtgggcgccagggatgcggcgttaggggcgtcctctggaggcaggggcgcc

SEQ ID NO: 44242 - DNA, 122 bp, Homo sapiens
gggtgctgctggtcctcccattcccctctgggtcacatatcccctcatcgtgtcctcagacgcttcagcctgccgggaactctgtgctgtgtcacctggcggagcctcttccattcatctcc

SEQ ID NO: 44243 - DNA, 122 bp, Homo sapiens
ccttcccccttctgattctatttacggctaggtttttaaaagcagcaataaaacaaatgtcgactctttgggggtttactgggtgaacatgttccggctgtttgtgctgctttcggccagtg

SEQ ID NO: 44244 - DNA, 122 bp, Homo sapiens
taaggccctgacatcaatcttatgctctgtctctccagggtatggtccggaagagtaaggcgggggaccagactctcaactgtgactggtttaccaagtgcctgccaccctatgcggtgggc

SEQ ID NO: 44245 - DNA, 122 bp, Homo sapiens
gctgaccacgagattctttattcttttttcttttttctcggagacagaatcttgctctgtcgcccaggctggagtgcaatggcatgatgtgagctcactgcaacctctgcctcacaggttca

SEQ ID NO: 44246 - DNA, 122 bp, Homo sapiens
cgagactccgtgggcgtaggactctccgagccaggtgacggatataatctcgtggtgcgccgttttttaagcccgccggaaaagcgcagtattcgggtgggagtgacccgattttccaggtg

SEQ ID NO: 44247 - DNA, 122 bp, Homo sapiens
cacattttatgtggcaattggaaaatttaaaattacactcatggctcacactgtttccatcggacagcgctaccctatggcatgaccctcttttgctgccctcctggcacttacattgtaga

SEQ ID NO: 44248 - DNA, 122 bp, Homo sapiens
cgatgtccctaacagcgaattccaaggcgcccgtgtagcaggagaggagcaagtcggccacgatgcgtgcactgtgcatcagggagacctgcagctccgagctggggttcagcaggaactgg

SEQ ID NO: 44249 - DNA, 122 bp, Homo sapiens
ccccatgtgtaaactttccttgtacttcttaatggagcaactgggaaatgaaagatggtgcgaaggaggctgaaggaacatccacagaccagtactgctggtgtcattcatctgagtcatct

SEQ ID NO: 44250 - DNA, 122 bp, Homo sapiens
attccaacgggacgcaccgcgttcagtgacgaccctcatcggtgcccacagctctgggctcgctgaaggcaccacagaagcaccagttattaccagtgttagggtccagtggcttcttctgt

SEQ ID NO: 44251 - DNA, 122 bp, Homo sapiens
caggcaggaaagggttccttcaattccacccagggcagctcccagctgagtctcggtgctcgcgtctggactgccctgactatgtggggggccacaggggctctggggtgccttgggggtca

SEQ ID NO: 44252 - DNA, 122 bp, Homo sapiens
gctctcttgagctttccttactgttcctgggtgggcactccctggccgggccctgcattccgccgtgggccctgctgcaccacacactgctgaggttcccttcaaagatgaggactgggggg

SEQ ID NO: 44253 - DNA, 122 bp, Homo sapiens
ccaatccaagcaaagtttcctgaacttgtgggccagctgaggccctgtgcctgtctttaacgcgcctttcactctgtagccatgaccctgtttaagacgcttcaaagactcctatgaccttt

SEQ ID NO: 44254 - DNA, 122 bp, Homo sapiens
cactctactccttaaaagataagcaataatagtccttgccttttcctacacataagataacgtctgattgaaggatacctctgtaacctataaccagatctgctcatacacccaaacgttga

SEQ ID NO: 44255 - DNA, 122 bp, Homo sapiens
gtttatttttggactctctgtcccattgatctatttatctatcttcatgccaataccacccggtctctattttattttagctttatggtaaatcttaaagtcagggacggtaaatgcagttc

SEQ ID NO: 44256 - DNA, 122 bp, Homo sapiens
atcctctccaagaggtcagggctttgtccgtcttgctgtccctctcctgaacgtgtttgccgcagggagcctcctcacgacaaaacagctttggcagggcttccgcgccttcctccagcccc

SEQ ID NO: 44257 - DNA, 122 bp, Homo sapiens
gggctgggaatatcagtgattgggaggacttaagtttttagttaatttgaccttgttgggcggccaagtccttaattataacttatatttgagtacaaaattatactcgggattcaaggctg

SEQ ID NO: 44258 - DNA, 122 bp, Homo sapiens
cggccagcctgccggctcagcccagcccagctctgccacagagcagccacgccagcagcacgtctgttttctcgtcggtgagacgagtggtggcttatccaagtcctcagagtacaggcttc

SEQ ID NO: 44259 - DNA, 122 bp, Homo sapiens
agttgtgcacgccgttctggtggtcctggaaggggaccacagtgagggcgaagggccctacgctgcgcgggctccggttggtcagccgcacctccaggcgcacggggtcgcccacctggcag

SEQ ID NO: 44260 - DNA, 122 bp, Homo sapiens
ctagtagtcgaggcctgtttaagaagccgttagactccccattccacacagttgggcaaccgtgcctacttcaaactcgtgaaagaccagaggaggtgtgccgctttcagctttcagtatct

SEQ ID NO: 44261 - DNA, 122 bp, Homo sapiens
tgctgtctgccacgcgaccaccaggtggcgcacaacacctcgcggcgactggaccgggcacggctgcctcttattaatcccgcggagaaaacagaggctggaaatgcccccggggtgaggct

SEQ ID NO: 44262 - DNA, 122 bp, Homo sapiens
ctacctaaactgaactctggtcccagccagaacaagtcaggaagaggggatgtctaagaccgaaaggggggctttctagttaagctcttcaggcaggagaggaaaaggatgcccgcatcccc

SEQ ID NO: 44263 - DNA, 122 bp, Homo sapiens
gcaaccaccctccgaggctcgaatctccgctgctctctcccgggcctgggctaccccgggcgctggagaggcaagaagacaagctcctgggtaggttgggtctctgtgttggagaattggca

SEQ ID NO: 44264 - DNA, 122 bp, Homo sapiens
tcattaatggggtcttttgagaccgcgggtgacagacaacaggagccaggccacgcgcggcgcctctgcgcgaacgctagggaggactcagcgcgcggcggccggtgacgtcagggcagcga

SEQ ID NO: 44265 - DNA, 122 bp, Homo sapiens
cagtgggacctgagctcatccccgagaccgccttttttcacttcgttaccgagggttgagcgtctgttactgagggtggtgcgcgcctgtagtctcagctattccagaggcttgatgcagga

SEQ ID NO: 44266 - DNA, 122 bp, Homo sapiens
tgtaataaaatttacttgcatcctaattgttgtttttcacaattgggtaatttttaacagcgtccagtctgtaggtggaaaggtgccccaaggatattttttatatataaaaatggtgccag

SEQ ID NO: 44267 - DNA, 122 bp, Homo sapiens
tggactcagggttggtcacctaagatcaggctcctaggatctggttgctaagagacaagacgctgggagggtggggacgctgcactgcgacaagcctgggagtgtatgccagaggaggaagg

SEQ ID NO: 44268 - DNA, 122 bp, Homo sapiens
ggcggggccaaggctgtggctgtggagagcaagttccaggtctctggggaattcccaactcggacaggcccagaatagcccctggaggtttgaagaggccccgtcagaaacccaaacagagc

SEQ ID NO: 44269 - DNA, 122 bp, Homo sapiens
tcaccacttgctatccgccgccgctccagatcccgtactccacgaacagctcggggtaaacggtccttaacaagatctcctccagccatccgcaggcgttctgcatctggaagtagttctga

SEQ ID NO: 44270 - DNA, 122 bp, Homo sapiens
cagcgggttcccttttgtgtctggttcccttcatcatcgtcggacacgtgaggcgccccacgctgttgggtatatcaacactcagttcatcattactgttcactgcacttcttagtacaatt

SEQ ID NO: 44271 - DNA, 122 bp, Homo sapiens
attccgtacgttcctaggcgacatatgacggcgacctaattgcggattcttcacgggcgccgccatcttggtggttgattccgtacattgcccgtttgtcaggcagagaggttcacaggtaa

SEQ ID NO: 44272 - DNA, 122 bp, Homo sapiens
aggaaggaagaactgctgtggcagctgctgcaaagacaaatcatatgcagtaatgcatcacgggctgagggagggtctgagtgtgcggcagggcagcgcgggcttatcagcgcggaatggct

SEQ ID NO: 44273 - DNA, 122 bp, Homo sapiens
tgtgcatcccagcacagcccacgtcagcacgctaatacacagtgtccaccccagaacacacgtcagcaccccaatacagtgtgcaccccaatacagtgtgcaccccaaacacacatctgcgc

SEQ ID NO: 44274 - DNA, 122 bp, Homo sapiens
gcggccgcgccccgccccggaaccacgccccgcccccgtgaaatgcgttcccagtagccacggcaacgcccagctccgccctccccgcgcatgcgttatgcgccatcaccggcaagcagggg

SEQ ID NO: 44275 - DNA, 122 bp, Homo sapiens
ttaacttgcaatcctaacacggaaggaggttccgtttttagaagtttaaatgttgtcacacgggcgcaagaatacatacaacagccatgctttccagctctgcgcacaacgccaggcagatg

SEQ ID NO: 44276 - DNA, 122 bp, Homo sapiens
ccacgccggctgcagggggcgctgcgcccctccgacgcccctgccttcccctctgcgaggcgcgctggtcaagcagccagtcaacaaatgctccagggtgcagactgctcagctcggcgctg

SEQ ID NO: 44277 - DNA, 122 bp, Homo sapiens
acaggatgcaatctggagagcaggagaaagcaatttccactaaacctataaatcctcctacgtcagatgtcagggattttctgaactgaggttgaattcctgtgtcccagtggaacaattat

SEQ ID NO: 44278 - DNA, 122 bp, Homo sapiens
aaccaaaccctgaaactcaccatcacagaactatgtcaaaaggtttctgcatccccactacggcacccatcaccatgactagcccagagtatttccaaacgattgctatccatcatattttc

SEQ ID NO: 44279 - DNA, 122 bp, Homo sapiens
agcaggggcaagggctctgtctcacgcacacgggcacaggcacgcaggtgccggccctgccgctggctcccaagaggccgatagcccggtagggaggtcacacacacacagctgatccctgg

SEQ ID NO: 44280 - DNA, 122 bp, Homo sapiens
cgccgatcgtggggagggggctcctctgccccaggtcgatgggagcgggggcccaggctgcggtttacactgaatccacaaaaatcaccgaagcttgaaaagtgctcaataagccatcgatc

SEQ ID NO: 44281 - DNA, 122 bp, Homo sapiens
cccagtgatttgcttaaagcaaaggatctctcagcccaggaggggtctgtgaattacagtcgtagtgttgaaatgcatcttgtgtctttcagatagtgaatgcattgattgctttgcatctg

SEQ ID NO: 44282 - DNA, 122 bp, Homo sapiens
cccggactttccccacagcgcagcatcccctagtcccttcagggctggaacagtggtacccgcagacggtgcaatagggaagtcccttttgcctttccatggaagctgtagggcgcttagag

SEQ ID NO: 44283 - DNA, 122 bp, Homo sapiens
acacaggtggcggcgaagccccgttgtgggggccgtggccgggggcgaaggacccctgggcgcccccgctccggggccactgaggcagcagtagcgacctccggaagcggagactgtcccca

SEQ ID NO: 44284 - DNA, 122 bp, Homo sapiens
cccgcctgctgcctgcagagggagccagaggctgaggctgcaccagccctgctccagccccgggaggtcacggtcggcagaatgctcattagcattccagagccaaatccagcttccggctc

SEQ ID NO: 44285 - DNA, 122 bp, Homo sapiens
cccgagccaaaggggcggtcgagcggcgcactcggagcggagctcaggggatggtgcgcccggcacttatgctgggctcagcccagcccagcccaggaccgctggcggtgcgaacccagccg

SEQ ID NO: 44286 - DNA, 122 bp, Homo sapiens
ggcggccaggggggcggcgcgcccgggcccggaaagcggcggaggggacgcccgggacagcgcccctcaccgcccgctgctcgcaggaggagcagcatcgatcccacgagaactgcctggac

SEQ ID NO: 44287 - DNA, 122 bp, Homo sapiens
aaatggaaatatggtctttctgtgcacaattacgtcaaggaaaatgcagcgcctgagggtcggcctgcaactgtcaagttcctaagtgggttttttttgttttttcttttgttttgagacag

SEQ ID NO: 44288 - DNA, 122 bp, Homo sapiens
gggcaggaggaaggcggggtgctgggcctggggctcacaggcagtgccacacacaatgtccggccgccctccgttccgctcctggcttcctggggcactgatgggacccctcccttccctcc

SEQ ID NO: 44289 - DNA, 122 bp, Homo sapiens
ttgtaagctccagcattatgaatactatttggggctttgcctcataccctccaccccaggcgctctgccgatactttgcaaacatttattgcagttcgtgttagtttgtgaaatcaggagcc

SEQ ID NO: 44290 - DNA, 122 bp, Homo sapiens
tttgcatactaaatttttcatcttccatcattcaacaggcttgtgagcaaaacatttgtacgtatttactaccataatcaaattatctgacgcaaaaagaattttatgctacagtcgcaaac

SEQ ID NO: 44291 - DNA, 122 bp, Homo sapiens
gggaactgtgacacctcccacctgagccccacatcccccacccccggaggacgcattggccggggcctgcctacagctttacctgagcccatcccggagcgtggactgggacacaggagcag

SEQ ID NO: 44292 - DNA, 122 bp, Homo sapiens
gagccacccgggagagccgggcgtggcaaacacacaggcccgtctggaaagctctgccagcggggctcctgacccaggtccagcaaaagcagctcaaggtcagcctcagggcctgacatctc

SEQ ID NO: 44293 - DNA, 122 bp, Homo sapiens
ggaatgaaaatacgttggtttattatctaagaaaatgtgatcctttgttaaaattttgcacgtatgtccattttagggaaagagaaagttcatagctttcatcaaatttgcagaatatcacg

SEQ ID NO: 44294 - DNA, 122 bp, Homo sapiens
gcgatccctctcagacttgtgagtccctgctggagtcagaagttttaggcgaatcccaggcgcgccaaggaaagtgctacaaaagccatccatcttgcaagcgttggtgccgaggcgcaacg

SEQ ID NO: 44295 - DNA, 122 bp, Homo sapiens
gggcagacgggacagcaatgtgagcacgctgatgctcgacatcgcacactgcagccatgacgagacagcaccacacacccatcatgatggggcagactggacagcaatgtgagcacgctgag

SEQ ID NO: 44296 - DNA, 122 bp, Homo sapiens
tggaatggaacaagtttagcattttaaagcagacacacatctaaagcaaacacacacgtgcgcacatgtgcataagtgacagggtatccaaacactagggctgcaattgtaaacccaaagtg

SEQ ID NO: 44297 - DNA, 122 bp, Homo sapiens
ccgcgaatgctaacgctcaccaggatgctatatagccttttttatattgcctatcaagcccggaatgtctgggtctagcgggtattgctaagtaggattgtgacagtcacgcccccggcagc

SEQ ID NO: 44298 - DNA, 122 bp, Homo sapiens
gcgcccagagcggctcggcccggcagtagtggtgggacggcactagctgctggggcctgccgccccgggagtggctgcagcagcgccaggaatcgaggatggtaaaatgacccaggggaaga

SEQ ID NO: 44299 - DNA, 122 bp, Homo sapiens
tcagggtggcccttgtggggcaggatgtggtgcctgccaaaggtgctttatgaatggagccggggaaggctgctgactcagcaggcagtaaggctttgaggccggaagcgtctggaaaggaa

SEQ ID NO: 44300 - DNA, 122 bp, Homo sapiens
tgcatgtaacatttgcaataagggagattgggtgctgtgagaataatggggctaacaaatcgggtggtcattgatgggccttgcagagttctggtcagtctgatacctgcaggctgaggatg

SEQ ID NO: 44301 - DNA, 122 bp, Homo sapiens
tcgcgtcgcggagcagctcgggctacagagggggccgcggcaggaccatggagcgaggatcgccgcggagggaggtggcggcggcggcggatcggcgctggggaccaggaggcggcggcaga

SEQ ID NO: 44302 - DNA, 122 bp, Homo sapiens
tttgaacataatccaggctgatggaggtggtttaagacaggaaaccacaccccagggctgcgggatgcaggcgagaacgggagccccttccccacaggctgcgtcctgcaaggtccacggag

SEQ ID NO: 44303 - DNA, 122 bp, Homo sapiens
tcgggttttcgcccggataccctaggcgcctccgggacatctccacatctttgcctacggcgcctagcccagtaccaaccggtgcttggtcttcccgttcgctaaaaatttattataataac

SEQ ID NO: 44304 - DNA, 122 bp, Homo sapiens
gcggtggacagccgctcctctcgctaccgccacgtcaccaccactaccgcccctcgtcgccgacagcctgcaggagactctgccagacctcagcgatcactctgcaaagctacagcctgaat

SEQ ID NO: 44305 - DNA, 122 bp, Homo sapiens
gctggaatccctagcttccctaacctcctttttccagtccggagtgagcgggggccccatcgccccacccccctttcctggctctggttacggccttgcgagttgaacaaacttgctgcagg

SEQ ID NO: 44306 - DNA, 122 bp, Homo sapiens
cgctgatgtgagaaccccacctcccatgtcgtcccctcgcgctactccttgagaacatcgcggagggcccctccgcctgggagccgttttcaaccagccccgttagtggttgggacgtaagc

SEQ ID NO: 44307 - DNA, 122 bp, Homo sapiens
gcagcgccctgaggatgcggtgggtggggacaacgcgggagggcagtgtgggcggggccgcggtggacttgaccctctgactcaggctgggcccgggtgagctcaggacagcctcggaaaca

SEQ ID NO: 44308 - DNA, 122 bp, Homo sapiens
cccgcttctcctttgccctctagtctaataacttcgcagaaatacagggccaataaactacgagttggaaatggacagtgttaaataaacaagggtctctttaaaattctcatccacttcag

SEQ ID NO: 44309 - DNA, 122 bp, Homo sapiens
tctgacctgtaaagaagttttctgttccctggcattatcacagggtcctcccttcctgctcgggtgcagttgctctttgtgtgttgagaatgtctgtctagctagggcctcacatcttcaga

SEQ ID NO: 44310 - DNA, 122 bp, Homo sapiens
agtggcactccctgaggtgggtcgggcaggtattcagagttctctccagaggctgcctgtcgtctttattaatgcagttgcaaatgaaaaatattttaaggggaaagatgaggtaccgttcc

SEQ ID NO: 44311 - DNA, 122 bp, Homo sapiens
tttcagttcattcataaacgttgcatggttttctttccatccagccttgatagcacagggcggctcttcgaaagtgacgagcatatacctgtctcctctgctggcagggtcccgggcacgga

SEQ ID NO: 44312 - DNA, 122 bp, Homo sapiens
cctcctccttccctactcctgggacggcagcaaggacatgggggctgctgttagcttctccgtcaggaggcctcatctcactgtagccctggaacccagggtccatcttgcccttcccccat

SEQ ID NO: 44313 - DNA, 122 bp, Homo sapiens
ctcattgtcaagggaaacttggcaccaggaggggcaggagaggtgatctgggggtgtccacggcagcctcaaagagatggttggtgtcttcacctctgagacctctgatccattgtttgcac

SEQ ID NO: 44314 - DNA, 122 bp, Homo sapiens
aggccctgggaaggagtatctcgcttctttgggtcagggcaccatcatatctggagacaacggcgggactagtctattcgttgaatacctagtgttaaccgaaaagtgactgatgcaggtct

SEQ ID NO: 44315 - DNA, 122 bp, Homo sapiens
acagggcgcggaagggcaatgccaggagttctggggtgggtctcatactgtggaggaggccgtgtagcctcagaggagtagggcggagattatgcgaggcgcgccagtggggctctcaggac

SEQ ID NO: 44316 - DNA, 122 bp, Homo sapiens
caaagagagagaatggctaccagattctctgattgatgatactttgcttcctaacattaccgcaaatataagtagcgaaagcggcggtttaggtgcaactgcaagctcagagcttctggcag

SEQ ID NO: 44317 - DNA, 122 bp, Homo sapiens
ctccgcctcccaatagctcgggtttttttttgcggtcgtggcggctgctgctcctactgccgcaacttggaatccaaaacgcttcgtggtgctctcaggacagaaccatgaacccagcgcag

SEQ ID NO: 44318 - DNA, 122 bp, Homo sapiens
gggaacccggcttcgggcggcggacgagttggctttcctgcgtggtagtgtggagccccccgagacgggtgccagtcccactcgaggccggagaaagagggccgcctaccgcggccgcctgg

SEQ ID NO: 44319 - DNA, 122 bp, Homo sapiens
cgcagctgcccagacttctgcaccgaggtgcagctcgacgcctccttgtcagggcttctccgcagaggcggggcttctgtgctagccaatcagcagcctcaccgccctctccgggccccctc

SEQ ID NO: 44320 - DNA, 122 bp, Homo sapiens
ctcccggcttgggcctctccacgccttccagagggagcggagccgtgagattcaaggcttcgccgagactgccagggaggtgggctttcaaagaagcggcaaataaatgaccgcggaagttg

SEQ ID NO: 44321 - DNA, 122 bp, Homo sapiens
aatgaaaaacaatttctgagaagtgttagcccggttcagctgaggtcctctgaaagccagcgtgtgggctgtcacgcttcctttacagggaagcagcgcccgtgcgtgaggcggttcctggc

SEQ ID NO: 44322 - DNA, 122 bp, Homo sapiens
tggcgggggcggtggggaaggggagtcgctccctttacccctgccgtcccgggacctccccgtttgagaaccaatcactgagctgagcggcgacgctggcttcccaccgaccacttcgattt

SEQ ID NO: 44323 - DNA, 122 bp, Homo sapiens
tcacttcccacgggtcactcagctagggaatggcagaggcagaattcgaacctagcagtccggaggccatgccaagactccttagagacagctgagaaagcccagttcctaaaatatcattg

SEQ ID NO: 44324 - DNA, 122 bp, Homo sapiens
atcctggctgcagagtacatctccacggtgaagacgctgtctccagaccagcgcgtggagcgcctgcagaagatccagaacgcctacagcaagtgcaaggaatacagtgacgacaaagtgca

SEQ ID NO: 44325 - DNA, 122 bp, Homo sapiens
agtcgtctccgtgacctctgtggcctcgttgaaaggctttctctgaattgaatgacaacacggaggctgagggtaagattgcaaatcagagaacgtgggtatgaatgggaagctttgacccc

SEQ ID NO: 44326 - DNA, 122 bp, Homo sapiens
gagatggtgcggtgcctgttcttggccctgcagagagctgtgggcggttgttaaggcgaccgttcgtgacgtagcgccgtcaggccgagcagcccccaggcgattggctagacaatcgaacg

SEQ ID NO: 44327 - DNA, 122 bp, Homo sapiens
aggaaactgttgctcctatctctaagtgagatatgatggaataacagtacaaaccatacacgggttatagtaaatgagtgctgtatcaagtgtacaaattacaagagtaaaggcaaaggtaa

SEQ ID NO: 44328 - DNA, 122 bp, Homo sapiens
cctcaaccaaaacctcaatatcagactagagaaactgggatatagctggtgcaggcacctcgtggagtggaagaactgccacctcccatccccaaggtattctgcctcaatgtcttccctct

SEQ ID NO: 44329 - DNA, 122 bp, Homo sapiens
tccgcgggcgggcgggcggacatggcggccaacatgtaccgggtcggaggtaggcaggctcggcccgacccggcccgtgtgggagcgggttccgggagcggggggccggggcgagtgcacgc

SEQ ID NO: 44330 - DNA, 122 bp, Homo sapiens
cagcagccccgagacatcccagagcctcatgggcccagcctttctccctcacagcgggggcggggcaacagccgcatcctcctggccaagctcgccaggagctggaggagctggagaaagca

SEQ ID NO: 44331 - DNA, 122 bp, Homo sapiens
taagccactctcttcctcagccctgcccctcgtccccgcccccttcaacaacttcagccacgcccctcactgcctcgccccgccccgcggcgacgtcacctccggccgaccagcttccccaa

SEQ ID NO: 44332 - DNA, 122 bp, Homo sapiens
gcgttatgctaagtcttccggctgggcgtgtgcggggcgctgtgctgtcttccggttcggcgtgtgcggggcgctgtgctaagtcttccggctgcattcgcactctttccctccgactcaac

SEQ ID NO: 44333 - DNA, 122 bp, Homo sapiens
ggattttggacatgtatgctgggacctgggaccgggatgccagacacggatgctgggccccgggacggggatgccggacatggatgccgggccccgggacggggatgacggacatggatgcc

SEQ ID NO: 44334 - DNA, 122 bp, Homo sapiens
gcagcccttcctcagcaggctggtcttgcacatcctgcaggactgctacggggatggccccggcccagcccggcaccccagggaggcctatgagggctgctgtgaggcctgtgagctggggg

SEQ ID NO: 44335 - DNA, 122 bp, Homo sapiens
caaaaattccatccgaaggtcaccaatggcaaagaccaaaggtagataaattcatgaagacgaagaaaaacgagcccaaaaaggctgaaaattcaaaaaccagaatgccttttctcctccaa

SEQ ID NO: 44336 - DNA, 122 bp, Homo sapiens
tgtcacgctcactgtgagagcatgctgcttcgctctgaaagccaggaaaaccctgaaccccgcaggaagaacaaacaattccagacgcgcgaccttagagacctgtaacacttagcgcgaag

SEQ ID NO: 44337 - DNA, 122 bp, Homo sapiens
ctgctcaccaacatctcacctggtcataaagagctgggttgctacctgccgacgcatgcgcgctggcccaggaattcactccgccagctgcagtcccagcgccgcacagagctgacctggga

SEQ ID NO: 44338 - DNA, 122 bp, Homo sapiens
tctgggcaggggaaacttcgccgccccgcacaggctgccagcgggcgcggcgcgctggggcgtcagtccgggcactcggtaccggttaacttcaggatttcgcttccctcgccgcttccgcc

SEQ ID NO: 44339 - DNA, 122 bp, Homo sapiens
ctccaagaaatgacacaaaaccaggatttctggtctcttcggcaatcaaaatttgccttgcgaaacatttgcccctagggatagtgtttccacagtaaatactacaggccgcccagttaaat

SEQ ID NO: 44340 - DNA, 122 bp, Homo sapiens
catttttctcgcagtggcggggggaggtgggggaggagggcaactgaaggacctcaaagccggggatctaactcagatctgcaaactgcgactctaaagggttaatgagcaacttgcacccg

SEQ ID NO: 44341 - DNA, 122 bp, Homo sapiens
tcgcaggtagtgctcgcgcacgatcttcatcacgccgcccgcccgggtcttttttaagaacgtcttggacttgagcatcttgcctcgccgcgcagaatcctaaccccagcagcgctcttcca

SEQ ID NO: 44342 - DNA, 122 bp, Homo sapiens
tgtcaacgtccacatcttcgtctctgagtactggttctgagggctggtctgccgcacagccgcaggtgcacctccaggccaaatcattgctgccagtgactgtggtctgtacttgtttatac

SEQ ID NO: 44343 - DNA, 122 bp, Homo sapiens
agagaatggctaatgaggctctagggatcagcacagccagctgctggaggtcccagaggacgggtgactcagcaggaatgggggagtctgaggggttgacagagtgcccaattctcacctcc

SEQ ID NO: 44344 - DNA, 122 bp, Homo sapiens
tgcctcctctgaatgcaggccacatttcccctctgcatctctgcttggattctgcaagtccgcgtttctctggcccctgccgtccgcatccctcagggttatccggtggagtgggcaccctt

SEQ ID NO: 44345 - DNA, 122 bp, Homo sapiens
gcaccctcggcccgacatcacgtggatgaaggacgaccaggccttgacgcgcccagaggccgctgagcccaggaagaagaagtggacactgagcctgaagaacctgcggccggaggacagcg

SEQ ID NO: 44346 - DNA, 122 bp, Homo sapiens
gggagagtgatattgatgataaaattatagccgacactttctgagtgttctctctatacacggatactgttttaagtactttatatgtgtaagtcatttcatccacaaagaactctatgaga

SEQ ID NO: 44347 - DNA, 122 bp, Homo sapiens
ggcccagtagggccgcccacgccacgccccctccgcctgcccgcgccacgccccttcccccgccctgccacgccccctccgcggcccgcgccacgccccttcggctgccctcgccacgcccc

SEQ ID NO: 44348 - DNA, 122 bp, Homo sapiens
ggaggccgggggcggggccctcctgcctcacccaggtcttcgcgccgggggtcgctcccccggcttcaggcagggtccccccacccagcccgagcccttagggtcccggtccctgagcgcca

SEQ ID NO: 44349 - DNA, 122 bp, Homo sapiens
atagctcctgggtgaacggtggtttttgtaatgcagtggttgtcacgtgtgccacccacgcgaaatggaaactgggcagaaatatctccttatgggtctctctctctccctctctcgctctc

SEQ ID NO: 44350 - DNA, 122 bp, Homo sapiens
tgttcttccccatgcctgtgctctgacaagtctcacgcctgcatcaggggcgagaccgagcgcccggagaaaccgcccgacccaacccaaaggcgaaacaaggcagaaaaaaaggaaaccag

SEQ ID NO: 44351 - DNA, 122 bp, Homo sapiens
aaacactgactgcatatcaggcagaaagatcccaagatttgtcccagccttcaaatgggacggcctactctctcttcagtgagaatacttcatttccattattaccctaactgcaaactgta

SEQ ID NO: 44352 - DNA, 122 bp, Homo sapiens
cgcgaaagccgagctggagagtggctggtcaaactctaggcgcggatcagcaggcagcagcgatggctccgaacctcgctcctaaagcggcttgtgtgctctcaaccgtctccctctgtttt

SEQ ID NO: 44353 - DNA, 122 bp, Homo sapiens
agggccttcattccaagcctgcgtcagcacctgccctggggcagggccagcagtctcccccgaggcttgtttttgttcttattgatgctgttggctaataggtgccaaacccgatcttgttc

SEQ ID NO: 44354 - DNA, 122 bp, Homo sapiens
ttttgtcctccatatttgcctggtgccccaccatcaacaggtactttggtcaataatgtccgactcccaagaggtcacaggctggaattgagtgatggagacctcctgacctttggccctga

SEQ ID NO: 44355 - DNA, 122 bp, Homo sapiens
cggcagcggcggcggcagccgacgggaactgaggcaggcctggcgtgggcagcagtgtgccgggcgcacggaacacgttggtcgtctttttgcgcttcttccacttggcgcgtcggttctgg

SEQ ID NO: 44356 - DNA, 122 bp, Homo sapiens
agggcgggaggcttggctgtgcttctcccgccgcctggtgcaaactttcaaaagatgcggcggccgcggccccgcccctgcactgttggaggcggtgggaggcgggggcggagccggcgggc

SEQ ID NO: 44357 - DNA, 122 bp, Homo sapiens
aagggaaatgcgcgaagtaggagtcttttgtgtctgtgcagaaggaggttctccggccgccggcccttgttgcacgtctggatagaccccttattgcattggtggtagactccccatttgcc

SEQ ID NO: 44358 - DNA, 122 bp, Homo sapiens
attctactgcatggaacaccaccatctatccacactggatagacaccagatgagtgcttccgcctgctgtgaatgaagctcctatgaacagtctcatattaggtatgaaaggaaaataaatc

SEQ ID NO: 44359 - DNA, 122 bp, Homo sapiens
ttgcgttacttggcctcacctcacctgtgctgtccacgcctggctttgtctcacctgacgcgatatgcctctcctgcgtgggcgctgtcctgcccgccgccactaccgccgcttggccctgc

SEQ ID NO: 44360 - DNA, 122 bp, Homo sapiens
attaccgagccacagtccaaccaatggtatcaaaacagaatctctacagatgtagctcagcgaagatgaatctcggcctcaccccagagaaattaaatatattgggggtacccagaatcccc

SEQ ID NO: 44361 - DNA, 122 bp, Homo sapiens
gctgcagcataggagtctcagctgcttacatccaggtccaggattatgtctgctaacagacgctggtgggtaccacctgacgacgaagactgtgtgtctgagaagctcctgaggaagactcg

SEQ ID NO: 44362 - DNA, 122 bp, Homo sapiens
tcctgagtgctcctcgggccaaaagcagagcgcacaaattccagaagaaattaccaacggcgggactatttcagtgctccgagaagtatcaccagtaaccaatcagcaaaaagctctagctc

SEQ ID NO: 44363 - DNA, 122 bp, Homo sapiens
gggagggggaaaggttggacatcacctccctgggcctgtttcccccaagtcctgactgcacgtagggaagaggccccctgctgaaaactgcatcagagtcacattcacgtgccatcaaaaat

SEQ ID NO: 44364 - DNA, 122 bp, Homo sapiens
aacgtgcagaatccgccggccctgcgcgctgcgctccacgtaggtcaggagtacccgcggcgccccattcccaaccctccgggggcacctggttgctcgcgctccggaccaaggcagttgga

SEQ ID NO: 44365 - DNA, 122 bp, Homo sapiens
gccaaggggcggctcttgaacgttccttcctcttgattagtcctatttaggaaaagagggcgggtactgaggaaaagcggcagaagcgcctgcttccattggtcagtcctggcaggaggcgg

SEQ ID NO: 44366 - DNA, 122 bp, Homo sapiens
gtaaccccaaattctgatcgcaaacatttgattaagcttaagacgtctgatttcttctctcggggaaacaactcaagaccctcccccgagggccggaggtggtgagggcgattgcgggggcg

SEQ ID NO: 44367 - DNA, 122 bp, Homo sapiens
tccggatcgaaagagtggggcgagtgctattgattgacgtgcattccaaccaacctacgacgcaaggagagcgcgcgcgagcaagacgatgcccaataaacactcagccccagcggcggggg

SEQ ID NO: 44368 - DNA, 122 bp, Homo sapiens
cccatgaagtctaatgttccattcgctgccatggtccaggggactcccaccagcttccaccggcttcaacaggatctccactagagagcccagacttatctagtcctgtcggggaaaaggga

SEQ ID NO: 44369 - DNA, 122 bp, Homo sapiens
ttagctgtcaatgcatatttcaaacagcaggcaggaactgactgcataaatcaagctctgcggggatctgctgcccttcaccaggctggtgtgtgatccaggatgtgatttgatttttgggc

SEQ ID NO: 44370 - DNA, 122 bp, Homo sapiens
gacacttcagagcatctcagccagagacacggggccactagctgcaagaaagttccttctcgcccctcttcttgaggcctggggggatctgcaggcccaagtatcctccgaggaactgctgc

SEQ ID NO: 44371 - DNA, 122 bp, Homo sapiens
atctactgctacgtgatacccggtaggcctctctctgggtcttcagaacagctctctccccgcttctgctatcttgctgacgcacgctgatgacgtaagccgccttgcgccttgggactggg

SEQ ID NO: 44372 - DNA, 122 bp, Homo sapiens
cgtcgccgccgccgccacccggaggacccagcaaaagtttggatctgggggagggcgcggcgctgagcgggattaccaccagggctggaaggagacctcgagaacctttgcaggtaacgcgc

SEQ ID NO: 44373 - DNA, 122 bp, Homo sapiens
gcgcagctgtcctgagaccgggcctggcccacagcgggtgcttactcaatgctgatgtctcggcacgtgcgtcatgttccgttctggagttagtcgtctttcatgaacacgcgggaaatttt

SEQ ID NO: 44374 - DNA, 122 bp, Homo sapiens
tggcagctggactataaaacccgggactgcaaaggcgtcttggacagagcagaactggaccggctgagacctggcgtggaagagaaggagctcgccagagagaaggagctccgggacccggg

SEQ ID NO: 44375 - DNA, 122 bp, Homo sapiens
aaagggagccaccagcctcccctatgccactcacattttcccaccaccaatatctgtaagcggtaccagaaatcaaaactgagccttaaatagtcagagctagtgagggggttgtatttctt

SEQ ID NO: 44376 - DNA, 122 bp, Homo sapiens
gtctctgggaaaggtagtttccgcgcctaaagcgccggggccgggccctgttcccgcaggcgcaaggcagcactgtctccgccgattgtccctctgggaagtggagtctggccggcggaact

SEQ ID NO: 44377 - DNA, 122 bp, Homo sapiens
ataaaaacatacttttttttttacttttttttttttttctgagacacagcctcactctgtcgcccaggctggagtgcaggttttcatgtttatctgtgagatgtacctttggcacattactt

SEQ ID NO: 44378 - DNA, 122 bp, Homo sapiens
cttaacaatctaccgccttccttgtaatgtgctagggtgacctaatttgttggcagcctccgctaggatgtggtagtgaggttgatctctggaattcgcacacacactcattaaccagatgc

SEQ ID NO: 44379 - DNA, 122 bp, Homo sapiens
cggggcatttcaactgtcccggggcccaggaagaggggcgcccaattttgtctcggacagcgtataagtccagagaagaaggcgctctgccaagagtatgaaacttttcccccaacttggtt

SEQ ID NO: 44380 - DNA, 122 bp, Homo sapiens
aagcaagaggatccgagagtggaagtgacgcagttttaaggaattccaggagctgactgccgatcaatgagccagatgaagggaacaatcaggactattcctagacactagcaaaatctaga

SEQ ID NO: 44381 - DNA, 122 bp, Homo sapiens
cttccccatacacagtgatttggccagagggcatcttcaccaccccagactgcgggcctgcggggaagggcgaagcggggcgggaccgggggcgggagcagcgcggggcgggaccctacccg

SEQ ID NO: 44382 - DNA, 122 bp, Homo sapiens
cccagcggacgcgggcggccgggagccctcgcgtcgccgctgccgccaaaagacggcgagcgctcaaaccaaacagcccagccgccatgacagatggtgctgcagggtctcaggggcgggga

SEQ ID NO: 44383 - DNA, 122 bp, Homo sapiens
agagttacgcatgagaaccaacatgggttgtgcttctcggattcaggccaaagttctctgcgccggtgggtggagcttcgttgcacgaaatgaacacccagtagtgatctgcccggctaacg

SEQ ID NO: 44384 - DNA, 122 bp, Homo sapiens
agcaggagcccatggtgcccgcctatacaggaggcccccgggtgccccgcgctcggcccccgcccccgctccgcccgctccccacgcgccgcagcctggaccccgccccctccgcatcccgt

SEQ ID NO: 44385 - DNA, 122 bp, Homo sapiens
gacatcctacttggggtcccagctactcaggagttcagaggtgtcagggcccagggcccacgatcctgggacgccctccggtcctccgccctgtcgcggaggcagcgttttggatccctcgc

SEQ ID NO: 44386 - DNA, 122 bp, Homo sapiens
cggagacgctggatcgggaggcgacggaggtgctgcgcgcgcaacccgccgttcccgtcacggcgccacggtcgcagttggccacacagtgcaagtgcagcccaagccgaacgcccaagagg

SEQ ID NO: 44387 - DNA, 122 bp, Homo sapiens
gaattcgcggactgtcgtcagtcctaacctacacatttattcgttcaacaaatatttcagcgcctgggtcaggcatcaggaatacactggtggttaaaacagacggaaagctccatctggtg

SEQ ID NO: 44388 - DNA, 122 bp, Homo sapiens
tcacctctaccgccaggtgtgtgtatgctgagtcccagcgttccagatcagtgtcccgcacgtcctcggccttctgccagtaggggaggagtcgggggcggagcgggaggagtggcgcgggc

SEQ ID NO: 44389 - DNA, 122 bp, Homo sapiens
caccaccttaaacacccggccaatcacctccctatctatatagcaccctcggccggcagccgacccctaaagaaggccattctgattcacagagagttttcaacttcagggggtcagcttaa

SEQ ID NO: 44390 - DNA, 122 bp, Homo sapiens
aatgaaaaaaaaattccctaaaataacccaaggtaattataaccgtgctgttgacactaacgattaataattgatcaggagtcacacacaataaattgtcaatttatctccccacaaaaatg

SEQ ID NO: 44391 - DNA, 122 bp, Homo sapiens
agtagagacggggtttcaccatattggccaggctggtccggaactcctgattttgtgatccgcctgcctcggcctcccaaagtactgggatcacaggcgtcagccaccgcgcccggccaata

SEQ ID NO: 44392 - DNA, 122 bp, Homo sapiens
aatggtcttgttaccccggcctcctcccctgcacctagggcctggcatgcagagagcgcccgcagcagagggggaagtctccaacaactggcaggtgtcccccgaggagctccgcttgattt

SEQ ID NO: 44393 - DNA, 122 bp, Homo sapiens
ctgcctgtcccttggaaggttcagagtcttgggtccagcagcagagaggagcccaacctgcgtggacaaccccttgaggcagcccttggtcacagctgctctgggtgggcagcaggtttaag

SEQ ID NO: 44394 - DNA, 122 bp, Homo sapiens
gggggggccgaagagagggcgagggggagagaggacagcgagaggcgggcaggcgcacagcgggagagaacagcacggagagaaacagaaagcgtgtaattaatccactttggttcggcgaa

SEQ ID NO: 44395 - DNA, 122 bp, Homo sapiens
ccgcagcgctcctgggctccaggcactgcgggaccctcagatgcccggcgtccagcccagcgagctcctccttggggaccccaacggaccccaacctccagactcagcggctcacctttagg

SEQ ID NO: 44396 - DNA, 122 bp, Homo sapiens
acaccccagtgatcactttattggagcattctcctcgactcagccttagtgacatgcatgcgtcagaagggctttaggtacagaagccactgtgtaagaactagagcacctgtgcactcaca

SEQ ID NO: 44397 - DNA, 122 bp, Homo sapiens
caggcggcgggggggcggtgcaggtgctttaagaattaccgcgggactcggtagggggagcgtaggcgcttctcgccaagatagaagcgttcagactacaactcccagcagccacgaggagc

SEQ ID NO: 44398 - DNA, 122 bp, Homo sapiens
gatagccagctcctctgtaaagacctgtccttctatgtcagcagcccagcagataaatgacgtgtaaataccacatttaggagggcttatgatgatgccaattaatggagacctttttgaaa

SEQ ID NO: 44399 - DNA, 122 bp, Homo sapiens
aggcctgtgagacctcaggagctgctgtcaaacgtgtctcgctgtgggatggggatgatccgcctcttccgaggagctcaggtacgacaccatctgtgccaggatggagccctgctcggcca

SEQ ID NO: 44400 - DNA, 122 bp, Homo sapiens
ctaggtgcctccgctgtccgggctctagtcccgccctcgcccctccccgcccaccggcctcgcagtcaccgcggacgccaatcttgtgcatggagtcgccattttgctcctagagaggccgc

SEQ ID NO: 44401 - DNA, 122 bp, Homo sapiens
cacagtgcgtggatgcttcgtgtgtaaatgcttgagccacaaacttgtgagaataagtgacgctggcaactttgatatgctcattcataaggaagaaacttctgtcttttaaattctctgga

SEQ ID NO: 44402 - DNA, 122 bp, Homo sapiens
ggactcatgcagaagaggacattccgcaggtaggtacaatcccagcgctggggcctggggcgtccggggggcggcctttgagcttcccggataccgctcgcctgctcccggagctgttcggc

SEQ ID NO: 44403 - DNA, 122 bp, Homo sapiens
ggctgctgccacttcggagtgagaaactgagctgctgcttcagttccgtattcaggttttcgtcatttcctgccaccccatcctcacagctacttcctgaaatttgagtcagttccttctgc

SEQ ID NO: 44404 - DNA, 122 bp, Homo sapiens
acccccacgcagggcctgtgtcgagacggcatgtccaggacccccacgcagggcctgtgtcgagacggcatgtcccgccatcgggtttgctgctgaatgagcagatgatctaatgagtgacc

SEQ ID NO: 44405 - DNA, 122 bp, Homo sapiens
attctcacccaggtctcaaacggctttttacccgacttggcaatgactatggaatgcctacgctgtgaaatggagaaattacgtggaataaagggtcaaccagggagtgtgctttatcacac

SEQ ID NO: 44406 - DNA, 122 bp, Homo sapiens
atccacagtgtgagcaggaagcacggggccaccttggtgcactgtgctgcaggggtgagccgctcagccacgctgtgtatcgcgtacctgatgaaattccacaacgtgtgcctgctggaggc

SEQ ID NO: 44407 - DNA, 122 bp, Homo sapiens
ctggtacatgaccggcatcgactaatcagggccaggctcgatgaggctttgtctccctaccgcgcgcggggccgattctcccgcctcccagccccggcgcacgcgcgccccgcccagcctgc

SEQ ID NO: 44408 - DNA, 122 bp, Homo sapiens
gaaggaggaaggtgggggcggcggagcagttcttggtcctccggtgctggcactcggccacgaggttccaggtgtggttgttgaggatgatgccaatgatgaagagcaccagggcgggcacg

SEQ ID NO: 44409 - DNA, 122 bp, Homo sapiens
cgtcttcgcctcccccgtttccagtagaaaagacagctttgctcctttgaaagcgcagaccgccgcacctccagccccttctccccggggaagtaggccccgctaagaatgtgggaaggtgg

SEQ ID NO: 44410 - DNA, 122 bp, Homo sapiens
tatgacgtggcaattcaactttagtaaagttaaaatggtcttattacctcacttaaaatgcgtcaggggaacaaaatataaggacattattaggtgataccaaagtgcctcccgtgcaagtc

SEQ ID NO: 44411 - DNA, 122 bp, Homo sapiens
gccctacagcagcctctcactggatctcttcatgctgggttacttccagctgctggagtgcgacctgccggcggaggagcggaagctgcgccacctgctgtgcttcgaggtcttcgagcacc

SEQ ID NO: 44412 - DNA, 122 bp, Homo sapiens
cttcgcccctcggaggactgtccatgagcgtacgcagctgctccgggttttcgtggcagccggcgggaggcaggctgtagcggcggccgggggtggaggtgagggggagggtcggggggcgt

SEQ ID NO: 44413 - DNA, 122 bp, Homo sapiens
agatatgcttcacccctctttcttgatccatgaagttcaaaaggaggcaccaagcatttccgtccttcttcaagatgaaggtaggcaatatgagttggctgtagaaggtctacaatcagcca

SEQ ID NO: 44414 - DNA, 122 bp, Homo sapiens
cctggggaagcaacaacactccattgaaaacagtggatgagtttgaaaccaccgcttccccgcattgttccttaataaaacctccagataattcaagggctgatctttttgtttggtctgtt

SEQ ID NO: 44415 - DNA, 122 bp, Homo sapiens
gggtggggccggggaaccagggcagcagcagcaggaagagcaggtagaccagcgagagtccgctgaagcggagcaggcaggctgcggggagatgggcgttaactaggtcgccaacagaggat

SEQ ID NO: 44416 - DNA, 122 bp, Homo sapiens
tggcatcccacgagcacaggatgaggaatcttacttcgggaattcttgctgagaaaagtgcgtcggcaaggccgcccagcagagaggaattcattcaccggctcaggttgtcttagataata

SEQ ID NO: 44417 - DNA, 122 bp, Homo sapiens
tgaagactaataacatggaaaatctctctccaatgctaagatatcaggattcaagcagggcgcggtggctcacgcctgtaaacccagcactttgggaggccgaggcgggtggattacttgag

SEQ ID NO: 44418 - DNA, 122 bp, Homo sapiens
aaagacgggagttctactgacactccagtccaaagctaggtgggaccgcctcctgtcgcacgtttccgcctggtcccgcgctttaggagctaggaaatgtgacagaggcggtgcctactgcc

SEQ ID NO: 44419 - DNA, 122 bp, Homo sapiens
agtgatgagaaagtgctttcagacagcacaaagagggagcagatgtgggacaatgcccaccgatggcaagaggttttgggctgccacaggctacacatgctctttcctactcagttgaccag

SEQ ID NO: 44420 - DNA, 122 bp, Homo sapiens
catcagatggggcattacagcatccagagagccttgccatttacaggaagcaccagggcacggacaggaataaggcctaaactcacagagctcttcatggtctgctttttctgtgtgtggca

SEQ ID NO: 44421 - DNA, 122 bp, Homo sapiens
tgcatcacgcgccacttgagaattagggggtgagtccggcgtcggcccggcatgcagcagcgtgcatgttccccgccgatttctaacccaaacacagtgaccctgtgccacttgatgcagaa

SEQ ID NO: 44422 - DNA, 122 bp, Homo sapiens
gcccatttctggaaatgccaatcgcgcccgactgcgggagccaggatcaggtccccagggcgcccttgcagacagcaccctgagcgaaggagctcagaaggcagtccggcttcacccagacc

SEQ ID NO: 44423 - DNA, 122 bp, Homo sapiens
acccgcgaatggcaaagccgtaaagcgggaatgctgccaccgggtggcagtccgaagccacggcccagaggcctcagaactggggcgatggtcagaggcgaaaacatattagtctttccctt

SEQ ID NO: 44424 - DNA, 122 bp, Homo sapiens
tcctctcacctggaccttcccatttcaatcatgcagatggtttctttttgtaaagagttccgtttgcctttcaatttttagagaaaataaagactgcattcatctcattgtcttatttattt

SEQ ID NO: 44425 - DNA, 122 bp, Homo sapiens
ggtaaaaaggtggccagagttgccaacccccggctggataccttcagcagagaaatcttccggaatgagaagctaaagaaggttgtgaggcttgcccgggttcgagatcattatatctgtga

SEQ ID NO: 44426 - DNA, 122 bp, Homo sapiens
tcctctattggccagaggtcagatccatcccaggccagtcttggtactcagtcccagcctcggctggctccggccttcatccgcccgccctgcgtgctccatgagcaggaggcagcaaggcc

SEQ ID NO: 44427 - DNA, 122 bp, Homo sapiens
gctgcagagaagggaaggatgctgagcagcaggctgagggggtccagtaggcctctgccccggctgcatgaggagaacaccccagagaccgagtccactgggtggctggtggtcttggcctc

SEQ ID NO: 44428 - DNA, 122 bp, Homo sapiens
tggggcccgtgtcttcactcagcgagtatttattgagcatttagggaattcagaggtaaacgagatgaactgaatccctgtctcatggagcttacagttttgtgggaacagcagataaaaac

SEQ ID NO: 44429 - DNA, 122 bp, Homo sapiens
atttgcctgcacccaggagtttgcaacccgcagagcccgcagaggccaccgccaagagtgcgcgccttggcgccccgtcggcctctacttcctcggatctgagccagcgccgctaatccgca

SEQ ID NO: 44430 - DNA, 122 bp, Homo sapiens
acaaaggaggaaactctggcactgagattaagtaactcccccaaaataacactgagtattcggctaaggtattaatttgaacgtaagtataatttaggagccctctatttgttaggctatgg

SEQ ID NO: 44431 - DNA, 122 bp, Homo sapiens
ctgatgtcccttggtagaccgtggggacaccctctcccgcgctggagtaggagatggcagcggaggatgaaacggtctggcaagagcctccagctgtcatgtgttccatcagtcatgtcgtt

SEQ ID NO: 44432 - DNA, 122 bp, Homo sapiens
aattgttgccagattgtagcgtcctctagtggcagtctaaattcggactttattctgtgtcggaatcttccagaagaggagtggcataaaaaaattgatgctgtgcatcaggataaacggac

SEQ ID NO: 44433 - DNA, 122 bp, Homo sapiens
ctgagcgcccagcgttctgccaagccctttacctcagacatctcactgactcctgggaatcgccctgtagggtgggtacaatatcacccacattgaggaaaccaaggcctagagccaatcac

SEQ ID NO: 44434 - DNA, 122 bp, Homo sapiens
gctactggacatgccccctgtgtcctatgatgtccagctgctgcattcatggaacaacaacgaccgatcgctcaatgtctttgtgaaggaggacgacaagctcatctttcaccggcatccgg

SEQ ID NO: 44435 - DNA, 122 bp, Homo sapiens
ccatgacagcggggacgaaggtcctaagccctggccgggagggcagttgacctcgggactcgccgcggggcggagcgggtgctgggaggaaggagggcgtggctggcggggtgtggctggcg

SEQ ID NO: 44436 - DNA, 122 bp, Homo sapiens
ggatggtagccgaggtgtgtgctgctttggacgctctgcttttagcaaccgcagctttcgcgtagcagaataaatccgagaataacgctcccaacttacactcttttctatagctgtactcc

SEQ ID NO: 44437 - DNA, 122 bp, Homo sapiens
acaccctatatatttatattagaatacatatattagaattatattgcccaaatactttgacgtattttccaagcagtggtaatgggtttgcactaatccatttgaattctcgcctagtcctc

SEQ ID NO: 44438 - DNA, 122 bp, Homo sapiens
gatataggtctgatggacaagatgtgtcatgtggcaacttaaaagttggctcaacagggtcggggtgggcgccggtctgggcgtgggcgtgaaccagcgcatggacagttacaagcacctga

SEQ ID NO: 44439 - DNA, 122 bp, Homo sapiens
gatatagtgcgcacatgcgtgatgacgtagagggcgttgattgggaccgagtacagggcccgcgcatgcgtggattgtcgtcttctgtccaagttggtcgcttccctgcgccaaaggtaagc

SEQ ID NO: 44440 - DNA, 122 bp, Homo sapiens
gagagtcagggcggcgggaagacatttctccgagttctcccgaagggagccaggcgcgagcgcgacctggggaaagtccagagtgccagccacggggaagggcgggcagtgcagagtggaag

SEQ ID NO: 44441 - DNA, 122 bp, Homo sapiens
gttggggtcacctgaccggagagccggctagatatggcgtcctctttgcttgcgggcgagcgattggtgcgtgctttgggccccggcggggagctggagccagagcggctaccccgaaagct

SEQ ID NO: 44442 - DNA, 122 bp, Homo sapiens
tggtgaccactgtgctgggcgtgcagggcccgcgggctctggccggagccgctggcctgacgaggcaggatagggagtatccgtgattcagaagctgagacccttccccagtgtctgaggcc

SEQ ID NO: 44443 - DNA, 122 bp, Homo sapiens
gaacgtcccaggagttaattcctgcataggactcagcccagggtctggcacgtaagctctcgatgccagacctaccagccatctatcgtcaagtgtaatacaataaagggcctgcccacttg

SEQ ID NO: 44444 - DNA, 122 bp, Homo sapiens
tgcgacggtattgacaggcgcagcaaccaatagacggtagagaatgcccttggcaggaggcgggccctgtcagtagttgtcctcagcagctagtgggcgtctccgcagcgagtggcatcggc

SEQ ID NO: 44445 - DNA, 122 bp, Homo sapiens
cgtgactcaggcaagtcccagcccgtgaaacagcagtgatgggctcgcctcattgcagggcgcctggcacacatctcttttgcttgtgatagaatatttgagctggttaaacatgttatgta

SEQ ID NO: 44446 - DNA, 122 bp, Homo sapiens
ccagtccccaaggctttcacaaactggccccagcctacccttcctgcctgtcacccagcacgtcacccacccgcactgtccagaaacccggcgaagtctcaagccacacttctacttgcacc

SEQ ID NO: 44447 - DNA, 122 bp, Homo sapiens
tccattgtactaataatgccttgcagaagtaataccaatagctatttccctggaaagatccgtggccagggcgctttccaagaggttttctttgaatgttctttgtgtcctgctgtacgggg

SEQ ID NO: 44448 - DNA, 122 bp, Homo sapiens
tcatacgcgggaggcgaaatccttattgatgtgtctgtgtggagccttcgattgtcggagcggtttgatttagggtgtttgtgttgccttctacaagaaaggagagaaagtccttctcaact

SEQ ID NO: 44449 - DNA, 122 bp, Homo sapiens
tggcggagcagctctaggcggcggcttctactttcagtttcgtgcagagcgcggaggagccgcgagcgctgagggtgagtgccgggagctctgagggtgagtgccgggcgtgccgcggggct

SEQ ID NO: 44450 - DNA, 122 bp, Homo sapiens
ggaaaagtgcggcgcgggacagcgcgacggggtgggtgggggacctgctgccgggagatgcggcggcggccgcgcggctgactgcgactcgggagctccgggagcggcccgcgcaggtaagt

SEQ ID NO: 44451 - DNA, 122 bp, Homo sapiens
ttcgtggccgggtcctccctgggaacagggtgaaggccgagaacctctggcctcaggaagcgcatgcgcaaccggttctccgaaacatggagtcctgtaggcaaggtcttacctgaatcagg

SEQ ID NO: 44452 - DNA, 122 bp, Homo sapiens
ggtcggacggttccgggagggtgggcccagcagcctcagggtccgggcgagcggccgcggcgcatcccccgccctgtcagagagactccgcccggcctgagcaggcacatcccccgccgcac

SEQ ID NO: 44453 - DNA, 122 bp, Homo sapiens
gcggcgcggcgctcacctgggcaggagcggagtcctcggtgcccgcgggagaggaggaggcggaggaggccatgttgtggggctgctgctgctgctccttccaggaactccagtctctcctc

SEQ ID NO: 44454 - DNA, 122 bp, Homo sapiens
attatttccattttattgtatgggtgactcacggttatgagaatttacctaagttcacttcgtgggtatgtggaagaagagggctagaactcagaacttctgacttctagtctggtgctgtc

SEQ ID NO: 44455 - DNA, 122 bp, Homo sapiens
cacttccggccctggcgtgcagccacaggaccaggggcacgggcacacagacgtgtacaccggcgtgcctggcagcatcacgggcaacagcccatcaacagatgagcatgttgtggtccatc

SEQ ID NO: 44456 - DNA, 122 bp, Homo sapiens
ggcgcctgtaggtcgggcgcggtggcccacacctgtaatcccagcactttaggaggcgggcggatcacctgagaccagcctggccagcatggcggaaccccatcgctactaaaatacaaaaa

SEQ ID NO: 44457 - DNA, 122 bp, Homo sapiens
gttttcctggggtgaagaggcagggcgttgaataatcgccatggcgacagcagcagatgacggtgtcccttctgagtgctcctacctagagttaagggatacctgagggtaagcaaccgagt

SEQ ID NO: 44458 - DNA, 122 bp, Homo sapiens
ccagcggtagaactctaccgtgtcgttgagtgccgtggacactacgtttaggacactacccggctccgagtccaggagccccatcgcggcgatgagcgggcgctggcggcaggagaaagcgg

SEQ ID NO: 44459 - DNA, 122 bp, Homo sapiens
gctctctccagtactaataggcaagaactcacccaccccaagagagtattaatccattcacgagggatcctccctcacgaccaaaatatctctcattaggccacacctccaacaccggggat

SEQ ID NO: 44460 - DNA, 122 bp, Homo sapiens
acgacatagcacgttggtaagacattctcattaaacacccagtgaaccaaaccaagataccgaagagcaagttatcagggaagacaaaacttccaccttctggtgtctgtgggaacaagtcc

SEQ ID NO: 44461 - DNA, 122 bp, Homo sapiens
ttgcccgtatctaaacacaggaggtggactaaccagatgatctctaactggttagtctttcgctatgatattatcaggttgggaggagaatggaaatgccatccaaaaggcaaacacgaatt

SEQ ID NO: 44462 - DNA, 122 bp, Homo sapiens
acagcttagactgcttagtacttagcaataatggagaaaatgccagtaaaaatgacaaaacggcagcgccctgacccaccaggtaattgtgtattgaatatgtcttggctcaaaccagggat

SEQ ID NO: 44463 - DNA, 122 bp, Homo sapiens
accccgggggctgccggggccatgaggtggaggacgtggacctggagctgttcaacacctcggtgcagctgcagccgcccaccacagccccagggtgagcctctgctgccttcgcggcgctc

SEQ ID NO: 44464 - DNA, 122 bp, Homo sapiens
cagcgcatacacgaaggccgactcccgggtccctgagggtgggaggggaaggtcagccgacgctgatccagggctaggaccctgcccaggtcagaggtcctccaccttcgcccacaccctgc

SEQ ID NO: 44465 - DNA, 122 bp, Homo sapiens
agctgcgcaactacttccggggcgaaggcaacaccatagagcacgaggagcagtctagagcgcccccgcgcggctgagcggcagccgaaccagccacggtgcccggacgactggctggcgcc

SEQ ID NO: 44466 - DNA, 122 bp, Homo sapiens
atccgctgcacacacctgttcatccaacaacagctaacaaaagtcagactccgagttaagcgatgtacacatcacagtttgtgctggaaatctgatccaagcacatggacagaactttctat

SEQ ID NO: 44467 - DNA, 122 bp, Homo sapiens
gtcccatcaactggaagagcggtcgttctgcctggtgttatttgttcagatccggcttttcgggctcacccaaatatatatcatttggcaaatgctaccttgaacgtagtagggatcttaag

SEQ ID NO: 44468 - DNA, 122 bp, Homo sapiens
tcttcagttcatagtctgttctgcctcagaagttaggtggatgatttttgcaccttctcacgtttgcaagtccctcttcctcaatatgcttggtggtgagggtaaggggacaacggtgatgc

SEQ ID NO: 44469 - DNA, 122 bp, Homo sapiens
cacccgcgccccctcaaagcttcccctagcaacaagctcgggctcagagcgaaggcggggcgagcgcatgcgctgcagctctgtccaccgccagtcgtgggacagagtgccgggctcctccc

SEQ ID NO: 44470 - DNA, 122 bp, Homo sapiens
cagcccgatgaggcggacacggataactgcattagatgcactcagctcttttcaataaaacgcccttgttggaggcacaatagggggaacagggcagcaaccccaggccgggccgggggcgc

SEQ ID NO: 44471 - DNA, 122 bp, Homo sapiens
acctgatattcttttagacagtcttgtctcacactttattgtggttcccatctccccacccgctcctgtcccccaccagcctccagcaaaattaaattaaccaggagtagatgtctcatgct

SEQ ID NO: 44472 - DNA, 122 bp, Homo sapiens
caagccgaatgctcaaactgctactgctactcctaaggttgtgccattaggagtcacacccgtttggtgatattcaaaaggatatgtcattttattctcccgtggttaaatatatggtgaga

SEQ ID NO: 44473 - DNA, 122 bp, Homo sapiens
taaacggcttctgtcttcgcagcctaacaggacgtattatctgatggaccccagcgggaacgcacacaagtggtgcaggaagatccaggaggtttggaggcagcgataccagagccacccgg

SEQ ID NO: 44474 - DNA, 122 bp, Homo sapiens
gtgagggcgagagtaggcagcaaaggaggggagtgtcccttcctttgccttcactaaaggcgtctcttgtactgtcaccttgggactttttattggcaaaatgggcactgagggctgaaaag

SEQ ID NO: 44475 - DNA, 122 bp, Homo sapiens
tcacaatgccagcaagagaacctgtgacagcagtctttccagggagacaatgtaggccaacgcctcatactctgttcagctcagttagcacacagtgaacccagttatccatcatcacccaa

SEQ ID NO: 44476 - DNA, 122 bp, Homo sapiens
caaaaatgcccgcgacaagcttctggggcagttctcgccagtctctctggagggagcctacgggttctgcgacgtttctcgcacttgctccctggcctcgctcccgtttccacccctcccac

SEQ ID NO: 44477 - DNA, 122 bp, Homo sapiens
ggtctctgggaggggcctcgggtcttctcatagcacagcgcttcatggaattttctcggccgaggagtgaggtctaggtctgactttgctggaatttctgggaaatgtaaagaaacaaaaag

SEQ ID NO: 44478 - DNA, 122 bp, Homo sapiens
ataaagtgtttccactccctgcctgccttcaagtctcaccaaagtatagtggtatggtggcggactcccaacgacagcagcctctgcataaatatcctctcttcttatctgagtggttttca

SEQ ID NO: 44479 - DNA, 122 bp, Homo sapiens
ccgagcgagacaccaggtgggcacactgaggattaaagagggcctcgcggttccgcactgcggccgggagacaaaccagtagccactatcaccagccccgggcagaccactaagaactgtgg

SEQ ID NO: 44480 - DNA, 122 bp, Homo sapiens
gccgcccttttgcctccagcagctgccggtccagccacagcccctccaggagacccaggccgggttcctaactccgctgctctttggcctcgtccctgcctagcccctgctgcaggttgctt

SEQ ID NO: 44481 - DNA, 122 bp, Homo sapiens
cctcctcccagccattcattaggctccaacctgctacttgtcaggtagcattagttgtaccggtatcctggggaccggggtgcccttgctcttcctggttccttatttattatgttaatgag

SEQ ID NO: 44482 - DNA, 122 bp, Homo sapiens
ggcccacgccccctgcccggaccccgccccggccccgccccgcgtcacctgactgtcccgcggcccccagacccggcgccaccgacctgatgacactgatgtggaactcgtcctcgcggagg

SEQ ID NO: 44483 - DNA, 122 bp, Homo sapiens
gggtgaagccccgcctcctccatttccgaggctgtttctggggcctctgacagacctcagcgtgtgatgggctcccggcgtcgcactgtgagagagcgaagtctaaagggtttgaataaatt

SEQ ID NO: 44484 - DNA, 122 bp, Homo sapiens
ccggtgcggccaaccagctcgtggtgcgctgtgggaaggtcacaggacggagctggggggcgggggcggcggtgggggcgggggcggcggcgggggcgggggcgggggcgggggcagatcct

SEQ ID NO: 44485 - DNA, 122 bp, Homo sapiens
ccagagctgtaatgatgtcaacttgttatttactttccaaatctgaatgactgagcaaggcgaaaggagaatcaatcaaccacaatgtgaccctacaggcggaaaaaacgcagcactcccac

SEQ ID NO: 44486 - DNA, 122 bp, Homo sapiens
ggaccctatctttgtgcgggcatccggacaggctgcggtgatgtgggtacagcccagttacgtggccggttccatcacacccgggggttggacacttgctctctttcttttctgttcttgag

SEQ ID NO: 44487 - DNA, 122 bp, Homo sapiens
ctatacaccataagtttgttctgatccaactactgcctccattgagggttttctaaatctcggctagaatgttagatatagtcattgaacaaacagtgctaactgacccacattaaatgtca

SEQ ID NO: 44488 - DNA, 122 bp, Homo sapiens
gcacagactttctcccaccattggcccatctgccagcctcttcctcaccctcaagcctgccggccatctggggtcaccttgtcctgccacatttcaacaacactgggcttggtgcccgtcgg

SEQ ID NO: 44489 - DNA, 122 bp, Homo sapiens
ctggggcagggcacccagcccacaccacatggatggggatgaacctccagctgggctgcccgacagggacagaggcaaacagggctcccaggattccggggccagcacaactctgtggctgc

SEQ ID NO: 44490 - DNA, 122 bp, Homo sapiens
tcatcttcactatcagagagcccaaagagattctctggcaatgacttccacaaaatcccccgatagtaacccacttttagtggccatttagatagtgatctctacactgatgtctccattcc

SEQ ID NO: 44491 - DNA, 122 bp, Homo sapiens
gtcctcttctgaaatgaggacagttggccaggccaaagaaaacagacccaagctgtgtttcgggagacacagaagccccccagactctcctacctgcttgttcttgttcctcccttaaccca

SEQ ID NO: 44492 - DNA, 122 bp, Homo sapiens
cagcattccagaacagctgcccttccacagttagcatgtggtggtggtccgtgccctgaccgtgtgaccgttccctctgtgggcctcagtttccccctctgtcaaataacaggtcctttata

SEQ ID NO: 44493 - DNA, 122 bp, Homo sapiens
aaattgccttcagtttcactatccaagtaaccccaaagaatatccttttagttagggattcgtgttaaagctatggagattacttcctggactctgtgtaggacttgatgattgagagacga

SEQ ID NO: 44494 - DNA, 122 bp, Homo sapiens
tgttaacttcaggaggaatcacttattcaggcctgcccgaggcatggaaacacgagagcccgccttgggagaagccgcctgcccaggtcggcccgacctgcctcacggggaaattggcttcc

SEQ ID NO: 44495 - DNA, 122 bp, Homo sapiens
aaccgcccactccctgagacggctaggtcacagaagcagtgggtcagaagccagaggggacgtggggagtgccaccctggagcctaccggcacacctgctgagatggaggcctcagatgggc

SEQ ID NO: 44496 - DNA, 122 bp, Homo sapiens
cttgtattagtctcttaactaaataaaactgggtgactttaaccaacagacctgcattcccgcacagttctggaggccacgagtccaaaatcaaagtagcagcatggctgggtccttctgga

SEQ ID NO: 44497 - DNA, 122 bp, Homo sapiens
ggaaagccagtcgacgtttcccgggagctacgactccagggaccctcatccgagcttaaccgttggaacaatcacaaacccagaaacttttagctgagtgttatttataaaaagcgctgttt

SEQ ID NO: 44498 - DNA, 122 bp, Homo sapiens
ggcccctggctgccccgcgcctcgccggagcccgagggggcgcaggtccggggcgagggccggccgggctgtttgatggcttcactgagaagagtcaaagtgctgttggtgttgaacttgat

SEQ ID NO: 44499 - DNA, 122 bp, Homo sapiens
tcagaatggaaaaagcaaatatttacgtagagggaactcctccctcctgttggaggtacgcggcggtcagtgtagcttctgaggccgcgtggagatgggaacatcctcaagacagagcagac

SEQ ID NO: 44500 - DNA, 122 bp, Homo sapiens
ccatccttccatcctcacctctttctcttgataactttctcttcccaaatcacaatatagcggactttttcattttccatggcccctgaacttagttttgtcatctctttttggttaaaaag

SEQ ID NO: 44501 - DNA, 122 bp, Homo sapiens
gggagacactgcctgggggtcctgcaggggtgctgggcagcgtcttggcgagggcagagccgcagggcgactccggagcccggcaagtttgtagcgggcaccgcacctcccagagctggagc

SEQ ID NO: 44502 - DNA, 122 bp, Homo sapiens
cctgcatcccactgaaagtcaccccttccctgtggctggaagttatcccttcctcatgggcgagtgttgggaagggtggcctcctgaagtgggaaggcccgctattgagggtctgctcctgg

SEQ ID NO: 44503 - DNA, 122 bp, Homo sapiens
tctagtgttaaatggacagcctttgtcaagactgaaaattctcatgctgcgcaaagtgctcgaataccatctgatgtcaaggtatataatcttactcatctgaatccatcaactgagtataa

SEQ ID NO: 44504 - DNA, 122 bp, Homo sapiens
gaggcactgacgctgggatctgaggcatctggggtatggtggaagccagctgcttccaggcgagcagggtgggggtggagggcacggaggccgggctgggagcgggcccctccagagaggac

SEQ ID NO: 44505 - DNA, 122 bp, Homo sapiens
aagaagagcgcggcaagtgcatggccgggtagcccagcgtccactgatgcaggtgcacagcgtgcaacgcgctgaaaccatacaggttgggcagatggtccgaaggcactgtgggcaggccg

SEQ ID NO: 44506 - DNA, 122 bp, Homo sapiens
taatcttagttttttcgtttctagtccacagtgtctacgtaatgcctagcacatcataggcgcctaggagacacctgcgcatgaatgaacagtgtcttcactgctttggtcctgccctggtt

SEQ ID NO: 44507 - DNA, 122 bp, Homo sapiens
gcacagggccaggccgaggtacgtgatggcgggcactgaattacagatcccgtctgtggccgccagcctctgtgtcctgccacctcctccgagaggacatcaccgccaccaggtggagcgag

SEQ ID NO: 44508 - DNA, 122 bp, Homo sapiens
cagcaaacgagaattcaaacagaggaggggcttggaggaggcgggtttcgacgaacccagcgcaagagtacgccacggcgcctgcgcatcccctgacgggtactttccattcgccagatggg

SEQ ID NO: 44509 - DNA, 122 bp, Homo sapiens
ccgggccaggccggggccggggcaggggcggggccggggtcgcggcagagggcgggtcaccgcgcggcctttgtgcgggcggggccggcgcggtggcggtggcgggcgggccttaggctggc

SEQ ID NO: 44510 - DNA, 122 bp, Homo sapiens
gcctcctgtcagatctgcaggtgctggattctcataggagccagaaccctgttgtgaatgcgggatccaggttgcgggctccttaggagaatctaatgcctggtgatctgagttggaacagt

SEQ ID NO: 44511 - DNA, 122 bp, Homo sapiens
gcgatgcgaagttactggtgattctctgcatttctcccagccagaggcacctggcacagacgttgcagggcctgggtttcgggatccgagctcggcaagtccagcgaggccctgcccgaaag

SEQ ID NO: 44512 - DNA, 122 bp, Homo sapiens
aaccgcagcgcggcaactgggcgcggactcgctcttaggcgaaatccgcaaacggtgtgacgtgtgcgcgctgtggccccaaaggccggtcttacagcgacctgggcgttcgaggtcgtgtc

SEQ ID NO: 44513 - DNA, 122 bp, Homo sapiens
gatgaacaactccggacgcgccacgtttatgaactgtaacaccacgaaggtctgcagcttcgctcctgaggccagcacgaccatgaacccattagaaggaatgaacaactccagacgcgctg

SEQ ID NO: 44514 - DNA, 122 bp, Homo sapiens
gagaaagccagcatgcagcggactcctgggcaagttccaggatgctgtcctcaagtaccacgtggccactgctacccatggtggggtgggagcaggggcaggcagaggccttgggccacaga

SEQ ID NO: 44515 - DNA, 122 bp, Homo sapiens
taagctctgcccagtgttcctaagcgaaagaagaccgtgatgtgccttacggagaaagtccgcgtgttggataagctccaatcaggcatgagttacagtgctgttggccatgagctcaatgt

SEQ ID NO: 44516 - DNA, 122 bp, Homo sapiens
gacccccaagtagggaaattggggcaaaacgcggagcgctccaggctcctacgggctgtgcggtgccagggctcgactgctgagcgtcgtgggctccgagagggacgcgggcggagggcaaa

SEQ ID NO: 44517 - DNA, 122 bp, Homo sapiens
aaataaagattaggagcccctttgcagtgccaaagagattactgtaggtgccccacacttcgtatatccaggaggccctacagtccgttttatagtaactgtttctggcattataaaaacat

SEQ ID NO: 44518 - DNA, 122 bp, Homo sapiens
atataaaattccagcccaaccagagccgagtgctgaccagcagcaaaccccttccggaggcgcccggaatacaggcacctgctgggaagtgcgcacacagccgtgaattactgtgcacagat

SEQ ID NO: 44519 - DNA, 122 bp, Homo sapiens
aaaaaaagaaaaaaaaaaagtcctgcctgtagtccaagctacatggcaggctgaggcaggcggatcacttgaacctgggaggttgaggctgcagtgagccatgattgctccactgcactcca

SEQ ID NO: 44520 - DNA, 122 bp, Homo sapiens
ggcctggctaggcatggtcctaagactgctccctttcccaagctgagctgagggcctctgcggcttctcccatcctcctatggttcacacttggctgctgcagcctccagtgggttaagggc

SEQ ID NO: 44521 - DNA, 122 bp, Homo sapiens
accctcgccgcaattctcagaacctcgcatggttccctccgccttccttcccactcccaccgcaggccccactacggaccggaagtcacagagtttccgccttcatgcaactaagcgccgcc

SEQ ID NO: 44522 - DNA, 122 bp, Homo sapiens
taagtctttctgcagcgaggccatggcaggctcaccagaggttcaccaggaagacgtgctcgatctcctgcaggatctccagctcccggaagacgttgcggacctcgtcgcgctcgatgcac

SEQ ID NO: 44523 - DNA, 122 bp, Homo sapiens
ctgcaggtccccagccctgccctgcggggaggcagctaaggcccgagaaatcgagcgcagcgacggtgagccggcactgctggggcacccagtacaccctccgcagccgctggcccaggtgc

SEQ ID NO: 44524 - DNA, 122 bp, Homo sapiens
gtcctggcattcagggggtgccatccccatcctcgtggcatgaacagaacgggaaatgtccgcagcacggctgcagccacggcttccacaggatgttgctcatggaaaactgctggggcaca

SEQ ID NO: 44525 - DNA, 122 bp, Homo sapiens
cgctccgtctggaatggcgggcactccaggagtgccgggaggcagatgtacagggactggcgggggcaagaggagaacagcaaccagcatttccaggagcgctggcggccgaacggggggcc

SEQ ID NO: 44526 - DNA, 122 bp, Homo sapiens
cacggcacccgtggtccctgaactagaccgggggccttcctaccgtccttccaaggatagcgagccctcaccttcatacggaataccttcttcccactccgaatggcgttgtcctcaaagga

SEQ ID NO: 44527 - DNA, 122 bp, Homo sapiens
gggcggacagggtgtcccgccccggcccctcctcaccgggctgagagggggagggagacgcggaaacctgggttcttccggcccccacctttgagcaatcacttccccaggctttgagctcc

SEQ ID NO: 44528 - DNA, 122 bp, Homo sapiens
gttgggggtctcactacctaagacagtgactcaggacagtgggacctgggtgctgtgctgcggccaggcagagcctgcgacccgcggcgccccccgcggcctcggcgacagcccggttccca

SEQ ID NO: 44529 - DNA, 122 bp, Homo sapiens
gcttagtacaaggttttttattttttatttttttttctttgagacacggtctcgttctgtcgcccaggctggggcacagtggcgctcagctcactgcaacctccacctccgggtttcaagtg

SEQ ID NO: 44530 - DNA, 122 bp, Homo sapiens
ctcacaagtctaagggggtgtgcgtgagagggtcgtgatcgattgagcaagcaggaggtacgtgggtacgtgactgggggctgcacgcaccagtaattagattggaacaaaacaggaatgag

SEQ ID NO: 44531 - DNA, 122 bp, Homo sapiens
ctgagatctgggatatgtggggaccaggctccaccaagtaggagccaagggtggagatggcggtagaaggggccagcagaatggataaaagctgccacctccacattgtgactctcgctagc

SEQ ID NO: 44532 - DNA, 122 bp, Homo sapiens
gcctgggtggcagattgagaccctgtctcaacaaacaaacaaaccacaaaaaacatgagccgtataatgggaattttttttttctttttgcgggttgtatttgatgatggcagactatttgt

SEQ ID NO: 44533 - DNA, 122 bp, Homo sapiens
gccctccactcgcaattcttcatctccctctaaatcaaggaagtaatttatctgctgcttcgctaaaccttcctttttaatatatccatacctcactatcacaggaaatagcgggaggggta

SEQ ID NO: 44534 - DNA, 122 bp, Homo sapiens
gggctggtcttcagagcttgtcctcattttggaactctctcagcctgctgcccagtttcccgggaaggtagggcggaaatcgccccggccaagcggtttcatccaaaactgcatataatctt

SEQ ID NO: 44535 - DNA, 122 bp, Homo sapiens
cattccatgttatgtgacattctggtgtgctggcgtgtggccgcgttatatgacattccacgttatgtgacattccggtgtgctggcgtgcggccgcgttatatgacattctggtgtgctgg

SEQ ID NO: 44536 - DNA, 122 bp, Homo sapiens
gaaaggaaggagcggggacaggcaagcttctcccaccctgcagtctcccctcctccatttcgttttgtatgtagcagccagggttgttcttaaacccagacctgacaattctctgctgaaaa

SEQ ID NO: 44537 - DNA, 122 bp, Homo sapiens
agttaacttcctgggatccagggcaacagaatccaccttcacctccagtgggccatcttgcgaaggaaagctgttggactctaaaggtgcagtggggtcggtccatatccatggccaatcct

SEQ ID NO: 44538 - DNA, 122 bp, Homo sapiens
cgagtggacggcgacttcctggaggcggtgaagcggcacatcttgagccgcctgcagatgcggggccggcccaacatcacgcacgccgtgcctaaggccgccatggtcacggccctgcgcaa

SEQ ID NO: 44539 - DNA, 122 bp, Homo sapiens
ccactgagaccaaattcattcatccatcaaacatttgttgactgattatatttcaggcaccgtgctgaataataggtattccgatttttatgatttctttctattaatattggcctctctgt

SEQ ID NO: 44540 - DNA, 122 bp, Homo sapiens
tacagtttaaacgtttattactgttatcctcaggtttattcacatacacttcaaatgatccgtagccttcagcaaaggtgactgccattttaaagaaatgtgaccaaatatttcatgataaa

SEQ ID NO: 44541 - DNA, 122 bp, Homo sapiens
aactgaactggttagaacctttaatgcagtgttaaatagagataaatgatactgggcatccggcctgtttctgacctcaatgggaatgcctccagtattgccccattaagtaatatttatcc

SEQ ID NO: 44542 - DNA, 122 bp, Homo sapiens
ggcccaatctgctgctgcagcagctgcttggccttgacccaggtggcgataagctgctgccgggtgccggtgggcaccgtctcctcgggcgcactcccattggtcaggttcagggcaaactc

SEQ ID NO: 44543 - DNA, 122 bp, Homo sapiens
ctttaagggactgtatctttagttcatgacccatcatcagctgcctttttaatacctgaacgactagtttcatccaattgttatcaaaaagttacatgaaaatttattttttataaatccaa

SEQ ID NO: 44544 - DNA, 122 bp, Homo sapiens
ccagaggtgggctgaggccggatcaggcggtgggggcggtccccgtagccccgtgaggctcgcgcctgcgcacgggcccgcggcggggcgggactgcgcgtgcgcggtgcgccggccctgga

SEQ ID NO: 44545 - DNA, 122 bp, Homo sapiens
gttccatcggctcctcggtgcccgcacgcagccgcgcgtgccagtcagtgcctgggtcaccgcgaattccatcccaacccgctccggcaccgcgacggtctctcctgtcactggagacgttt

SEQ ID NO: 44546 - DNA, 122 bp, Homo sapiens
ggacatgtcttgttaacagtgtcctctgtactttagtctgaacctgtactcagtgaaggtcggttatatgaactcgtggtagaatgcctggaagctcaccaccagcacttccttgtgtctga

SEQ ID NO: 44547 - DNA, 122 bp, Homo sapiens
taactggggcgggtcgcagggtcctggcaggctgggcgcatgcgcgcggggactacaagccgcgccgcgctgccgctggcccctcagcaaccctcgacatggcgctgaggcggccaccgcga

SEQ ID NO: 44548 - DNA, 122 bp, Homo sapiens
gggaaggaagggggtgtggagggctcgctgcttgacagtgcgtaagggtatatagggagccggcctggacttggaggttacactcccacaggtccctgcacacaggtgtgtggaggggggga

SEQ ID NO: 44549 - DNA, 122 bp, Homo sapiens
tttctgcccgtgctccccgagacacttggccatggcacctgcctcccgccattggccttccgtcctccttcggagcgaagctccacccagcccacctggacaggagctggcctgtctggcac

SEQ ID NO: 44550 - DNA, 122 bp, Homo sapiens
tgggggagaggaggagggggctgggctgccctttccattggctgctcctagatggagcaacggagatgtttttggcacctggcaaatgtctccagaagcagagcttgtagttagggccctgg

SEQ ID NO: 44551 - DNA, 122 bp, Homo sapiens
tggcctttccactttggcctccccctcacagggagactagcggcccggggcagagaacgccgccatcagatcacagcattttgagaagggaaagtggaaagggaggctctgggagggtaccc

SEQ ID NO: 44552 - DNA, 122 bp, Homo sapiens
tcggggcagcaaccggggggccgcggcggcagggaggagcccgcggggcggggcggggcgcgcagctgctcccgggccccggccccctcccggcgcccccccagccgcaggacaggtgcggc

SEQ ID NO: 44553 - DNA, 122 bp, Homo sapiens
gctgagagatacctgggcaaagcctggtttcagcataaaggctgtgatcattcctgtcgtcgtttgttttggtgactataacaaaaaggcataaactaagtggcttataaacaacagaaatt

SEQ ID NO: 44554 - DNA, 122 bp, Homo sapiens
ccagcctccgctcctggacctgaggaggccctcacaacagtcacagtggccccagcacctcgccgggcagctgccaagtctcctgatctgtcaaaccagaactcagaccaagccaatgagga

SEQ ID NO: 44555 - DNA, 122 bp, Homo sapiens
cttacattcaaatcatacccccaattccatccctgtagaggagggctggggaggatcttacgcatcaaataccctggtaggcacctccgtggggccagaataaaaggtgtattcaccttcag

SEQ ID NO: 44556 - DNA, 122 bp, Homo sapiens
gggaggatggccaatgggatgctccacgtttcctttagctaaatctggaggaagggacaccgtggttcctctgccaccatctgtccacccctgccgtggccaggctcctggactcagcatag

SEQ ID NO: 44557 - DNA, 122 bp, Homo sapiens
agtcgctcccactttctgccgggcttgcccaacgagggggcaaacaccacgctcaggtggcgtggacaggtcgctgccgcctcggactacaccagagatctcagctatgagcctggacgccc

SEQ ID NO: 44558 - DNA, 122 bp, Homo sapiens
aatttcaggaaggggcactgcttcaggggctatggaaggaatagatgtgtgattcacccacgggcctgcacttcacacctcggtgtgctgctctcaccatgcagatcccatctgtgtctcta

SEQ ID NO: 44559 - DNA, 122 bp, Homo sapiens
gtttgccatcccaggagaattggcattaacatcccaggaaacctaagactccatctcagtcggctaagtatgcatattggccagagagttttgacccggacctgaaccccaggaggactggg

SEQ ID NO: 44560 - DNA, 122 bp, Homo sapiens
ctcctcgatgatggcgtccagctcctccttggtgggtgtctggcccagcatcctcatcaccgtgcccaactccttgacgctgatgtccccaccaccatcagcatcaaacatgtcaaaggcag

SEQ ID NO: 44561 - DNA, 122 bp, Homo sapiens
cagaccaacgtccccaacccagaagggttgggggttgttagaaagcccttccgcagatagcgtaacacctgagtcttaagtccggcggccacgctaatcgtttttaactggctgacaggtgc

SEQ ID NO: 44562 - DNA, 122 bp, Homo sapiens
agccccaagtcacgggcttgcaaaagaatgtttgccatccctaggaagcctaacacagggcgctgggaaatgcttgcaaaagcagatattctcaggtcacatccttttagttttctgaggcc

SEQ ID NO: 44563 - DNA, 122 bp, Homo sapiens
tgtcgcccaccagcaggaacttgagcagaaagtcgtaggcccggaccgggctgcccagggcgctcatcgtgacggcccggcgcccccacccatgcccggcctgcggggctgagcgcagaggc

SEQ ID NO: 44564 - DNA, 122 bp, Homo sapiens
taaatgaagtagagaagagaaaaacattggagaactcaacaaaactgatagctgagtgttcgaaaagcttggtcattggcattggaggtggctttgatggatttctagaaacagaccaggga

SEQ ID NO: 44565 - DNA, 122 bp, Homo sapiens
agtaatgacctaacttcaggagcgtctgtgagacatgtcaggagacgagacacacggcatcgtcattagtgaagtagacttggtttctgctacagataaaagtcacatgggggcgaacgggt

SEQ ID NO: 44566 - DNA, 122 bp, Homo sapiens
ttcagtggtcattccctgaggaaaaatgccttcagcccaacctcagtatatacacatgcgcgcgcgcgcgcgcgcacacacacacacacacacacacacacacacacacacacaccactcca

SEQ ID NO: 44567 - DNA, 122 bp, Homo sapiens
aggcagctgagacaggcccagcgccgccaagcagtacgtgcggtttaataagttctcctacgtgggagtcagcacacagccttaatgaaagaggaaagaaagaaaaaaaaaaagagagaaag

SEQ ID NO: 44568 - DNA, 122 bp, Homo sapiens
cgcacaggcaccagggcagaggcacagccagggtccagggtgtttgtgaatgtctgtgttcgtggcaccgtgtgactcagtctcccttcctggacgctagcggtcacttgccatttctgagc

SEQ ID NO: 44569 - DNA, 122 bp, Homo sapiens
cttgctcagctggaaaagggggctccatcatgaaccggggcttcgggtttttataaaccccgctcactggagcgcccattgtctgctaagcagctgccttgctgcaagaaggtgaatgcgaa

SEQ ID NO: 44570 - DNA, 122 bp, Homo sapiens
cactttctctgttgacaggctgatcttaagtcccccaagaaataaactgaatgattaaggcgttcacttaaaagaatgtggaatcttaaaaatgcaacttataaattatttttgaatcttag

SEQ ID NO: 44571 - DNA, 122 bp, Homo sapiens
gattttgcttgtttgccatttgtttctgtttgataagggcattgtgtcatctcaaaagaccgactaatgggggttacatcagaaacattcactattacagcagcaaaggattgtacagatcc

SEQ ID NO: 44572 - DNA, 122 bp, Homo sapiens
ctgaatatctctgcctctcccgctaacggctccaaaccgcagataacggtcaatcgcctccggttgtcctggtaacagccagcaaccacaaccctgcctgcgtaactcctcccagaacaccg

SEQ ID NO: 44573 - DNA, 122 bp, Homo sapiens
tttccaaaggacacttttcctggaaagcccctggagcttagctggctcatcctgtgaagccggttctggccactagggtgcagggccatgaactcagcctggaggaagcctgcagggcagct

SEQ ID NO: 44574 - DNA, 122 bp, Homo sapiens
aggctgggactggatgactggctggtgtgggtggcaggcgccgcattgcttggcggtgcacgtggtgtgtgggggcatgtgaggctgggggctgtctgctctttagggcggtcgcagctaat

SEQ ID NO: 44575 - DNA, 122 bp, Homo sapiens
gactgtggtggtgagtccggctgtcctggcgcggctctggaccctggagggtggggaccccgggacccaggacagactggggtgttccgcagcctcccggctctacctgctctccgagccca

SEQ ID NO: 44576 - DNA, 122 bp, Homo sapiens
ttgggtaatttgagcttcaaaatctaaggtatgtgaccataaaatctcagaaggtaagaacggctacaggtgccaaaggtgagaacagccagagaacatattaagattctggaaccagaaga

SEQ ID NO: 44577 - DNA, 122 bp, Homo sapiens
gaaatttcttgctgtatagagattggagcctttctctaggactgagagctcacctgtgcacgcagtcatgtgatggggtaaaacagtgtggctttgggtgcagaaagactcctgtttgaata

SEQ ID NO: 44578 - DNA, 122 bp, Homo sapiens
tgcggtcctttacgagtgtgaaatgcaggtgccggttgaagttctttttcagctcagtcacgttctccacgccggccaggccacgcacactgatttgctttcttttctcttggtctgacagg

SEQ ID NO: 44579 - DNA, 122 bp, Homo sapiens
cactcacccctcattccccgctgctccctcagagggcagaacccgaaaccacggccacaacgtctgcagcacctggggcaacttccactacaagaccttcgacggggacgtcttccgcttcc

SEQ ID NO: 44580 - DNA, 122 bp, Homo sapiens
agtggtgtctgtcgcgggtactgccacctgcttgggcacacgggtagtctgaatgagcaccgtggtagaggtggtatatgccggctggtaaccagtggacgtggtaggaacaggcttgtact

SEQ ID NO: 44581 - DNA, 122 bp, Homo sapiens
ccgggctctgcagggcaattctggggccaccagaggcgtctgctgcgtggtcagcctggccgactgacctcccgggcctgacctccccaggccgtgcctcccaccccagggtcttctctctt

SEQ ID NO: 44582 - DNA, 122 bp, Homo sapiens
gaacgagagcaagcggcgacctgaagactcacaggaagcgagggcagtgcggcggcagcgcgcatgcccgaacacgcacgccgggagaggtgcacacgcgcaggagtgcaccggaagtccgc

SEQ ID NO: 44583 - DNA, 122 bp, Homo sapiens
taactgtcaaatgcgcggctcctttaaccggagcgctcagtccggctccgagagtcatggcgaccgcagcgtctaaccactacagcctgctcacctccagcgcctccatcgtgcacgccgag

SEQ ID NO: 44584 - DNA, 122 bp, Homo sapiens
tataatacgtaaatctatgtaaagtgtttccctgtattttgtgagccactctagcaaattcgttgaacctgaggagggggtcaagggactcctggatttatatctgatctgtaagcacaagt

SEQ ID NO: 44585 - DNA, 122 bp, Homo sapiens
ttattaactagaagaacttaataacaccctttagaggcttccagttggttaaaccctatgcgaatgaagaattggcctgtgaccaatcagaggctagagcccctatgcaaatgaaggctttg

SEQ ID NO: 44586 - DNA, 122 bp, Homo sapiens
ttacttagaaaacgacattattgccattcctcctggtcttcacattcccattctggatctcggaaatattttaatccttccttgatgaaatcttctttgctttctcagatactacaaatcac

SEQ ID NO: 44587 - DNA, 122 bp, Homo sapiens
cccgcgctcgccgccgtttggggagcattgggacgacagcctccagcagcgcggagcgaacgcagagggaaactccgagcgagacggaaggaagccccagtgaggctgacggaagcgggtgg

SEQ ID NO: 44588 - DNA, 122 bp, Homo sapiens
aggaagaggggagtgctagtacccggggctagtggaagagggtagggtgtgggcccggctcgttgtggggcagctgtttacttcactgcagcctgcagccctcccatttccctacagcccac

SEQ ID NO: 44589 - DNA, 122 bp, Homo sapiens
tgcccagctctacaggggtagactacaagtcccagtacgcctcgggtcagcatctcttcacgtcactccccctccctggggtgggcaggtccggagggcggggcccgggggcagctgggctc

SEQ ID NO: 44590 - DNA, 122 bp, Homo sapiens
tgggcacttatgaataaatcttaagtttcatcactattgtgtatttttagttttacatcacgcccatacacacatgagacagagcccagctctccatcttccccgacatacccagggtggac

SEQ ID NO: 44591 - DNA, 122 bp, Homo sapiens
cccctgaccccgttaggggtgacggctgttgtcagaggccctgtccccggctcagtggcccgtggcagggagggcactgcgagagtctggccggccggaggggtggctagcgtggggtcccg

SEQ ID NO: 44592 - DNA, 122 bp, Homo sapiens
cccgggtacctgcagggccatggtggcggctgccgcgttgttgctgctgctgttgtcgtccggtgctctgccccctctcgcacccaccgcttcttaaacggccgcgtctcctccggccgctg

SEQ ID NO: 44593 - DNA, 122 bp, Homo sapiens
gccgtaggagaatacaaaccgatcctgcctttcaattacagatcaaaatggcttgaaacgcgatgttttgttcatctatcttcctaaaaagcgatggaaaaaataacggctttcaagagcaa

SEQ ID NO: 44594 - DNA, 122 bp, Homo sapiens
cccgccgttgccttcggcccgcgcccctcccaatcccagggaccggcagcccttcatccacggacacccagaaagctgcgctctccacccaaaagaaaaagaaatgcaaacaaacaggactc

SEQ ID NO: 44595 - DNA, 122 bp, Homo sapiens
agcacagtgcggcttctggaatggacagaggccgcggccccgcccccagggggcggcctgcgggtcagtgtctgtggggattggctaagcctcgtaaaccgcagccatggggcggggcttgc

SEQ ID NO: 44596 - DNA, 122 bp, Homo sapiens
tagtgtagacagtcctagggcagggcagcttctataacaagaggttccttagggagctagcggccgagtggaaagagcgggaggaacggctcgggcaggcaggtcctgtgctgtggtctaag

SEQ ID NO: 44597 - DNA, 122 bp, Homo sapiens
ttatttacaagcctttagtctgagttgacctttcttctttaaaagacatcgatgccctttcgttgtttcattttctgccaatttccaaatgttctccaagaaaaagacaacctctgaaattc

SEQ ID NO: 44598 - DNA, 122 bp, Homo sapiens
gcctcaccctcatttcagacaacacgtccagtgatgtcaaaatggtagcttgacattggccgtggaggggagtgtttacaacacaggaattggcaactcatcagggccagctgttaaacagt

SEQ ID NO: 44599 - DNA, 122 bp, Homo sapiens
tgttcttatgttaaagaagggctctacgtcctgtctggaaagggcggagctggctcggaccgccccactgcctttcccaggaccttcactcgtcctgtcccaccgcagccccgcctcctcca

SEQ ID NO: 44600 - DNA, 122 bp, Homo sapiens
aatcccgccaccgcctgccgcgtgtgcgcgaagcgagccgccgggtacctgttggcggggcgctgagtgctaccgtcctttgggaattgtagtcccgcgctcactgggtcccggccagcggt

SEQ ID NO: 44601 - DNA, 122 bp, Homo sapiens
gcctgagtcctctcaggccctcccctacctggttgctgggtctcctgggcagggctggcccgggcttgacgtcacagggcacttaggtcagagttataattaaccgaggctcagcagagggg

SEQ ID NO: 44602 - DNA, 122 bp, Homo sapiens
atgaattgtatttttccttggacagatttcacagagatgatgagagccctgggataccctcgacatatttctatggaaaatttccgtacacccaattttggacttgtatctgaagtgcttct

SEQ ID NO: 44603 - DNA, 122 bp, Homo sapiens
gggccgctcggggccccactgcccgccccaactgataagacggtctgggagcggtggagacgcgccccgcgcagcgggaggccgggggcgggccgggacctggggaccagccgctgctcctc

SEQ ID NO: 44604 - DNA, 122 bp, Homo sapiens
gagaggctgacaggtaaaagcattatttttattagaaagccacactgcttggttcagacccgccctgcagcttagctcagtgagggtgccagagctggctagctgaccggcgcgccctctgc

SEQ ID NO: 44605 - DNA, 122 bp, Homo sapiens
aacactttatccctttatcacagggcctggctcacaggaggcccttgactggcttcctatcggcgaactcagcagtctctttagttcgattcctgaatctaaaagcatagctttaaaaaaat

SEQ ID NO: 44606 - DNA, 122 bp, Homo sapiens
atagccccactctgaggatgacagcagcgaggaggagcactcgcacgacagcatggtccgcgttggaaccaattaccaggccataattccggagtgcaagcctgagagcctcgcacgctaca

SEQ ID NO: 44607 - DNA, 122 bp, Homo sapiens
gattctctttcccaaagtcaacctgagccccgtgacgcccgcaaaggacacggggctcaccgctgctccccaggaaccaaaggcccccaaagccagcccagtccagcacgccctaccgtcgt

SEQ ID NO: 44608 - DNA, 122 bp, Homo sapiens
actgatactaatagcagaggccagcatcttcttcaaaatgggcatagaagagaccaagagcgtgaagccacggagtgcataagaaacattacttgctgttcttgggtggggtaaaggtgaca

SEQ ID NO: 44609 - DNA, 122 bp, Homo sapiens
gcttttcagaaatagattatggctgcttgttctctcagaccctcttccatagggcatttgcgagcccagaaatcctaaccagtagaccaccaaggaagcatttgaaacattacatttagttg

SEQ ID NO: 44610 - DNA, 122 bp, Homo sapiens
ctcggaaggagtgactgtcgcggatgatgaaggcccccggctcctggtccttgaggagcgcgatggctgcatggggaagggacaaggagagaggaggaagcaagacctcggtggcgctagtt

SEQ ID NO: 44611 - DNA, 122 bp, Homo sapiens
tcccaaccttgaagatgaacttcacagacaaagccggcttactaagacaactcccatctacgcccagcccccacaggcgtggtccgaggaggaaggatgggtggccgggcagccccgtgtga

SEQ ID NO: 44612 - DNA, 122 bp, Homo sapiens
aagttggaggaatcagctccttaatattttctgctagctctgcttgtcataactgcaactcggaatagaacaacctctctcccgtgcatacgcacccccaactctcgccctatcctcccatc

SEQ ID NO: 44613 - DNA, 122 bp, Homo sapiens
gtagtggccagtgtcagcggaaacggtgctccatccaccacagctgacccgactcattttcgataataaacatttccagggtagcgaacatcatggaggcctaggcaaagaaccaactttac

SEQ ID NO: 44614 - DNA, 122 bp, Homo sapiens
aggtttcaaaactagtcagcggcagagctgggattggacggcagttcaatcactgctcctcgcacggtccctccgcgcccggcctttgtcaggccgcccctccacaagttaccggccccctc

SEQ ID NO: 44615 - DNA, 122 bp, Homo sapiens
tgcagaagagaaaggcaagcaccagaggggggaatggagaatggggattgggacaggattcgaagcaaaggcaaaagattggcctttgacaggaggctggaaggaacagcatccattcattc

SEQ ID NO: 44616 - DNA, 122 bp, Homo sapiens
gctttggggaaagttctgagtgtaggcaggtcagaagcgacagcccgcggggcagcagcacgggcaaaccatgctgtgtaactcagtatatggagtgattccataaagaggcaatacaggag

SEQ ID NO: 44617 - DNA, 122 bp, Homo sapiens
cagtactcgaatcagtgtccctactttgcttctgtgcccgggtcccccttgattgacacacgacctgtcatctattctggtctctgaagggcctttgtgcgcctcttctgtgctgcacgagg

SEQ ID NO: 44618 - DNA, 122 bp, Homo sapiens
ttacatcttatttctaagctgaagcaccactgcaacaaaatggaactccatcgagagtgccgtcatccaggaataataaactaaatcaacaaatatttattgagtacttactatgcatcaga

SEQ ID NO: 44619 - DNA, 122 bp, Homo sapiens
gcctgggccgtttgtccacccgctgggcctctgggccggggagcggaaggtgaccctctgcgcgccccccgccgtttcccgcccgcgccgccgaggggggcggggaccctgccgggcagggg

SEQ ID NO: 44620 - DNA, 122 bp, Homo sapiens
cgtgatccacccacctcagcctcctaaagtgctgggattacaggcgtgagccactgcgcccggcttacatgtgcttcttagatccatggagaaggatacagactctactagttcagagaccc

SEQ ID NO: 44621 - DNA, 122 bp, Homo sapiens
gcagggatgccgcccgacgccagagccatatttacatcggctgctgctttgccaaaaagccgacttgtgcccagtaatattgcctttaaaggaaaaagaaaggacctaagcactaaagctgc

SEQ ID NO: 44622 - DNA, 122 bp, Homo sapiens
cagcgcccataaaggttgggacagaacggacgaaggccctcagtgcttccaatccactgacgtttattttcaggcaaaggcccattttaaatactttctatcaatgttaaaatgatgagttt

SEQ ID NO: 44623 - DNA, 122 bp, Homo sapiens
cgctttgtgttaaaattctgcccttaatgtgtacacttttatagcctagaagatgaatgccgccttaaacgaatgagtcaggaagcccctttctgtccggcccctccactccccaccacacg

SEQ ID NO: 44624 - DNA, 122 bp, Homo sapiens
gcactctggctaaggcactgaatgaacaccactgtggccctgggacaaggagctgtggtccgtctgggatcaactaggtggcgaaggggagggagaaaggaagagagagggcttgcgcgcgg

SEQ ID NO: 44625 - DNA, 122 bp, Homo sapiens
atgccatggtgttgccattatgtgtctcccaccagactgtaagccacttgagagcaggaccgtatctcagctctcacgcagcctgagcatctggcacatagtaggtgctttgggaatatatt

SEQ ID NO: 44626 - DNA, 122 bp, Homo sapiens
cctttcttccacagatgcctgtatattattacccatctggtcagtaccctacctcaaccacgcaacagtaccggcccatggccccggttcagtacaacgctcagaggagtcaacagatgcca

SEQ ID NO: 44627 - DNA, 122 bp, Homo sapiens
tccctgggaggaattcagcccttagactccctgtagccacttctccaaagaaaaggcctccgatggaaaagagagactttagattattccaaaggactccacactttgttttagctctcatg

SEQ ID NO: 44628 - DNA, 122 bp, Homo sapiens
agccggagacaccggcccgggaggcgagggctcggccgcgatgcggccgtagggatgcagcgacagcctccgaataaggcctggtcccgcgccccgcgccacctcctccctcctccccgggc

SEQ ID NO: 44629 - DNA, 122 bp, Homo sapiens
ttgagattcatcttgagcggagcacctgccacaggacaagggccgggacgaagtggaggacgcaggcagagtctccaagcctgctcgaaagccggcaaccaccctccgaggctcgaatctcc

SEQ ID NO: 44630 - DNA, 122 bp, Homo sapiens
ccctctaggcgggcactttggaagctcgctggcatgctgctggagacccaccggcaaccacgaggacaagtggggacctggtgacattccagctctgccagccctcccagaataaaggggaa

SEQ ID NO: 44631 - DNA, 122 bp, Homo sapiens
ttaggattcagtggtacccagcaaggactcagtaaattccagctactgttcctattaggtcgccaatataaatgcttgatgagtgaatgaatgacttccgtctgggacttggttgcaaataa

SEQ ID NO: 44632 - DNA, 122 bp, Homo sapiens
ggagggactcgatgtctatggcaatggtcgcctggtggaagggacggaactagatcccttcgctcgggacgctcacattccaggcccttgtcctgcaggctgccgcgggcggacacgccaga

SEQ ID NO: 44633 - DNA, 122 bp, Homo sapiens
ccaggacagggagctagaggagcagtccagatgaaagggggaggatcagctgtcagccagcgtctgggatcccagcaatgggatctggaaagctcctgaaagttctctggagcagaatgaag

SEQ ID NO: 44634 - DNA, 122 bp, Homo sapiens
tcagcttgctgactttgatgcagtggtttaggccaagctttgaagtcagcccttggaggacgttcctatcagcctttgcacagatatctcccactccaaccctaagactcaatgccacctca

SEQ ID NO: 44635 - DNA, 122 bp, Homo sapiens
aacaaccagatctcacatgaagtaatagctgagagctcgctcattaccacggggaggacacgaagccattcatgggggatcaacccctctgacccaaacacctccctccaggccccacctcc

SEQ ID NO: 44636 - DNA, 122 bp, Homo sapiens
ggagcaggagcaggagcaggagcagcagcagctacagcaggagcagcagcaggaaatggacgcttaagagggctgcctgcctgttgtgggggaaaactgttacctgaggaaatctttcctga

SEQ ID NO: 44637 - DNA, 122 bp, Homo sapiens
ctaagcttcaatcatacaaattttatttagcttattaattgccaaggtatctcttgactacgggcctgtgcacaggcagatccctggaacactctttcttctaccaataccacccctccttt

SEQ ID NO: 44638 - DNA, 122 bp, Homo sapiens
ggctggagccggctccctcagcttgcagggaggtgccgacgaagaggcgcaggcgggaatcgggggctgcgcccggcgcttgcgggccagcgcgagttccgggtgggcgtggccttggcggg

SEQ ID NO: 44639 - DNA, 122 bp, Homo sapiens
gcgtctgtccgggagcgccgtgctgggtcgctccccagtcatctctccccgcagctgccgcgaccctggcagctagactccacagagtcgggagtcagctgacccggaccctttaaagcgca

SEQ ID NO: 44640 - DNA, 122 bp, Homo sapiens
ggggctgagagaggtggggctattgtttgaggctggcggatttgggtcagcaggcggagtcgtcccagactgctagatactaaggtgaggacccctagtggggacgtagggaccagcgacgc

SEQ ID NO: 44641 - DNA, 122 bp, Homo sapiens
gtaacctggggctgggggccggcgcggcggagctcggagtagtagagcggagtgaagacacgggggaggatagagactggcattcctttgggccgggggattggcgggagtcgtgctgggtg

SEQ ID NO: 44642 - DNA, 122 bp, Homo sapiens
tggagacatttcgggactctgcagagatgctagagccaatacaacagttataaataagggcgatatttccttatatttatatcctgacagtttgtaagtccttttatcaacatattctaatt

SEQ ID NO: 44643 - DNA, 122 bp, Homo sapiens
acactcccggcaaagttcagccacgcacccaggatggtctgcgaggagggggtcggggaccgggtcaggaacgctgccaccagcccaagtgcctgccccgtcccccgagcacctggacctcc

SEQ ID NO: 44644 - DNA, 122 bp, Homo sapiens
gtagcaaggcgcagagggctctctgagctcatgccaacgtcagggaaaggattctgctgtcggtcccactccaaagttcacagaatgggtggtgggcacagaatctggactctgcttgtggc

SEQ ID NO: 44645 - DNA, 122 bp, Homo sapiens
gttgctcgagactgcgcgcccccagcaaaaaatcaggtcggttctccgagcccagtctagcgcttcccgacccgcaaaccaaggcccagtgaccgtccccgctgcgcagccgcctgcgtcgc

SEQ ID NO: 44646 - DNA, 122 bp, Homo sapiens
aaatgtttccagaccatatgcttgccgcttcccgcacttggaaagaccaatcgttaggcccgaggatgcaagacccacccactttgcgatggaggcagccaatccagttgctcgttacttcc

SEQ ID NO: 44647 - DNA, 122 bp, Homo sapiens
ccagcactctgaaccatccggacatggtgtgacctgaacccagcgcatgtaccatccagacgtggtgtgacctgaacccagcacgtgaaccatccggacatggtgtgacctgaacccagcgc

SEQ ID NO: 44648 - DNA, 122 bp, Homo sapiens
gtggggcgaggctcggcgtgggacacgagggacgggacgcgggggcacggcaatgggtggcgcagggcgcactctcgggctccctgcaggtgggcagccccacctgtgcacgccgctccccc

SEQ ID NO: 44649 - DNA, 122 bp, Homo sapiens
tcccagctccaccccgcaagcaccatcccctccggctaagcaggcgcaagggaggcccagcgcggacatcccctgctggccggacacccgactccagtccaagtctcgctacatttccgcca

SEQ ID NO: 44650 - DNA, 122 bp, Homo sapiens
cttaagagtctagcaagtggaattgttagtagttctctcataatgaattgccacattgaacgaggaagttttctgtgttggttttatgttttgatgtcatttggacatctgttttggctata

SEQ ID NO: 44651 - DNA, 122 bp, Homo sapiens
ttgctcaatggcctgtgagttagggatgatctctgcccgttgggagcttatactctgatgcgggagagagccacaacggagcactcacggaaggttgacaataccacgactttacgcaaagc

SEQ ID NO: 44652 - DNA, 122 bp, Homo sapiens
gctgcgggggccgtacgcggctgctcatacctttaatcccagcactttcggaggttgaggcgggaagatctgttgcgtccagctcaaggccagcctggacaacatagaccacccctgtctct

SEQ ID NO: 44653 - DNA, 122 bp, Homo sapiens
ggctcagggctagctcgcccatagacatacatggcaggcaggctttggccaggatccctccgcctgccaggcgtctccctgccctcccttcctgcctagagacccccaccctcaagcctggc

SEQ ID NO: 44654 - DNA, 122 bp, Homo sapiens
agttggtgaccccagcctagaggaatccacgccgcgccccagtcggccgtgctagcgtgtcgggccgagtagggactctgctgcttcctacctgcagggtgacttcccctctctgcagatac

SEQ ID NO: 44655 - DNA, 122 bp, Homo sapiens
gaaaatctgctagaagccaagaccatagaatcgaggagtgagagaggctgtcagattgctcgtgcctctacacatcattctgggtataccaagaatgcaaggccctgactgcatctcacctg

SEQ ID NO: 44656 - DNA, 122 bp, Homo sapiens
aactctgctctgttctcccagcaggtgtccggaggctgcactgcagcgtagccgcttgggcgggcggccagtggcgactacagtgagtcctgggatgagggcacctgggggaccagaagctg

SEQ ID NO: 44657 - DNA, 122 bp, Homo sapiens
ttgctggttccatttagcttacatgtaaatgtaattatttaaaacacacacactgctctgcgttgtatagtttttccttttttgtatgtaacagaacacatttcagattgtatttaatttaa

SEQ ID NO: 44658 - DNA, 122 bp, Homo sapiens
gccgtgtgcgcctgaggctgttggctgcggtcttgaaacgggctctgggagcttcctctgcgcggtcggccctggctgaggcgtcccgggctgcgcgcggggctcggcgctgcgcagtgtcc

SEQ ID NO: 44659 - DNA, 122 bp, Homo sapiens
tcctcggaggcccgaccccctcctccttcttggttcagctcaggactctgagggttgctgcgtggaggcagtgcatgccctgggcacagtgcccagttcctgcccacccaggaagtagactt

SEQ ID NO: 44660 - DNA, 122 bp, Homo sapiens
ccacaagcgattggacctgtgggagttctgttgtgggtggttcccggaactgtgggcgggcggttttacccagggctccctctgctttgtgtcttgtagaatgtcgtactctcaggaggctc

SEQ ID NO: 44661 - DNA, 122 bp, Homo sapiens
cttgcagtgagaatatgtcccgatatgtcctcacccaaaatcatctggcactatgtaacccgtgtgtctatcaatgcagttcagcttaactgtcatttcctggagactgctcgcccttcaca

SEQ ID NO: 44662 - DNA, 122 bp, Homo sapiens
tagggcttgttggggaacctaacccttatgaatatgggaatggccggcacttcttgggaacgacaagtttcctcacagacatacatgaggacacagtcaaccctctctggactggccacaca

SEQ ID NO: 44663 - DNA, 122 bp, Homo sapiens
cctgggctgggcgctttaaagccgccacggcccccgccccctccaggccagcaaggcgcgcgctccctccgccagccgctatggtggcctgggaaaggcccggcctgcagaacgtaactgac

SEQ ID NO: 44664 - DNA, 122 bp, Homo sapiens
gtgccgcctgtagtccctgcgaggatccaggcccgacagctggtgaggcagcccccggtgcgtgtgcaggagcccagactcctggctctgcctctggccgggccagcctgggtgctgcggct

SEQ ID NO: 44665 - DNA, 122 bp, Homo sapiens
cccatggtgttgttatagatcccgtcacccacgaactccagcactgcactataaagaacccggaaaaaaaggggatcagggtgtgttcagggaacagactgaaggtcccaggtatccccata

SEQ ID NO: 44666 - DNA, 122 bp, Homo sapiens
cccaggtcctgcgaggcgtccgtgtgcgcgcggtaccagcctggagctgtgtccgccgcgcgggaggagcgtttacagtgcaagcttctgttgccgggccctggcctgttagcgaagcacgt

SEQ ID NO: 44667 - DNA, 122 bp, Homo sapiens
gagctgcatggacacgtatgacagacattctagaactaataaaaaagaacaccacagccccgcgcacaggcagctcctcccggacaggcgatagcccaaggcggccagacctgaggtgactg

SEQ ID NO: 44668 - DNA, 122 bp, Homo sapiens
gcacacacaccatctccctgccagagctgagggacaccaaaacctgccttgtcacgtccccgccctgggttcccatggttgagtcgctctcactcacaagctgtgtggcttggggcaagggc

SEQ ID NO: 44669 - DNA, 122 bp, Homo sapiens
tgcggggctggagggggtttatttacctgccgtggaaccagtccttgcagatatcgcactcgatcatgaagcggttcacgtcgtacggctgccggcacacacagtacacgggcgggggcggc

SEQ ID NO: 44670 - DNA, 122 bp, Homo sapiens
gacactgtgcccggctttagtacgtgcctcggacactgtgcccggctttagtaggtgcctcggacactgtgcccggctttagtaggtgcctcggacactgtgcccggctttagtaggtgccg

SEQ ID NO: 44671 - DNA, 122 bp, Homo sapiens
gaacctccgcttccggctccacgtccgcccggaagaagatctgctgcacacttccgtttccggtccgtgcccttggggctccgtgtcctgctgtctttccgtccgctgcctagtctgcatct

SEQ ID NO: 44672 - DNA, 122 bp, Homo sapiens
ccccgatgacgacgacgacgacgaggatgagccccggggctccaggggcgggagcgacgccgcagaagacaactacctgtagccaccgcccctgcggacggcgtggctcagcagcccacctc

SEQ ID NO: 44673 - DNA, 122 bp, Homo sapiens
accttcagcagggtctgagggaaaaggaggttctgcacttgctctgcacaccgatggggacgtctgtcctgtggcctctgacgactcggatgcctgttcctctgtccttgcaccctgctgat

SEQ ID NO: 44674 - DNA, 122 bp, Homo sapiens
ctgcttaaagggagcaaaggacagagacgtctcactcagagcgtggcagttatgctgctccggaaagggaggctggtcccgcagttgaggctggcgacaagccccacttcccacaccctcat

SEQ ID NO: 44675 - DNA, 122 bp, Homo sapiens
cctcctctggcttattcttttcattgcattatcatcattcatttcttcctctttcttcaccgcctttccccctcccttggccctgccatccatcctcctcctcccaccacccccgcctctct

SEQ ID NO: 44676 - DNA, 122 bp, Homo sapiens
aataataatgtattgctgtggatgtctaccttgtactcaacgaatattaaagcaggatgccgctttgtgtcaagtactagattacgatgaacggtgtcacgaagaacactccactcttgata

SEQ ID NO: 44677 - DNA, 122 bp, Homo sapiens
agcttggccatgagtatgaaatcatcatttccacctggtctgagtcccggtccagtgaggcgaggaccctgctgtttcaacagagggtttcccatcacaaggggactaggtgtaaagtcgat

SEQ ID NO: 44678 - DNA, 122 bp, Homo sapiens
gccaaactacggattgttctctcaggtaacacctaacctaagtgaagtccttggtggatccgcgttcttgagcttagaaaataccgaatgaactaccaagagcaccagaataatcgcctcct

SEQ ID NO: 44679 - DNA, 122 bp, Homo sapiens
cactattggggtaattcaaacaacccactgtaatacaggaaaggctttgaaaacaggaggcgcagaatatttccaatgctcataaaggcagagaatttccaaattgattcttttgggaaaac

SEQ ID NO: 44680 - DNA, 122 bp, Homo sapiens
gctggcagagcccactcatgcctgcccacgccccgagggattccccgaattctgctcccacgtcaactgcccagagggctgacaggcctgggtctgagcctggctgccaggagagcccaggg

SEQ ID NO: 44681 - DNA, 122 bp, Homo sapiens
tccctcccgtcctccctctttcctcgagctcctgggtggttcaggccgcagcgctcggcgcgggcaccttcagccacttctgcgcctgcgccgtctgctgcagaacatccagtcctggcccc

SEQ ID NO: 44682 - DNA, 122 bp, Homo sapiens
ttaccccgagactccaagcactactcaccagtcacgcccacggtggacaccgggcccacgcgccgcccctcgtggaggccatacaggtgcatcttgtatttgcgcccaggctccaggccccc

SEQ ID NO: 44683 - DNA, 122 bp, Homo sapiens
gggttccctcctgtctgcttggccagtccagtggagtccagtgtttctctgatgagcccccgtttaatctatttttcccacgtgtgcccccttctagagtataaataccttgagggcactga

SEQ ID NO: 44684 - DNA, 122 bp, Homo sapiens
taaaatatattacttgcttaatgtttgcactctgaagtatactttgacacatacaagttccgataagagaatgaaattgctgtggcaaaatcctggctgatgatcaagacttggagagtttt

SEQ ID NO: 44685 - DNA, 122 bp, Homo sapiens
ttgcgtgtgataaaggcagccgtctgttctgctcagaaggggtttcctaacaggaggggccgaatgcaggcgtcacatccacgccgccccaggtcgtacacctaggccgtccgggctgtccc

SEQ ID NO: 44686 - DNA, 122 bp, Homo sapiens
gtccggaggccggcgtcgaggtgagacccgggcagactgaggctgcgggtaggagtggaccgaccgacggctgacgccgggcggactgcacgggaatgcgggtgtctggagggctggtggtg

SEQ ID NO: 44687 - DNA, 122 bp, Homo sapiens
ccacccctacaccttctcctcagcctgtccattcactgcttctcatttcttccttcttagcgtctacctcccattccctccattctcctaacccataccccagcatctctctcctggaccac

SEQ ID NO: 44688 - DNA, 122 bp, Homo sapiens
gctgtgggagacaggtctgggttcagacaaatcctgaaagagaagcaatgacggtctaggcgccggataagggtttgaagtgtttcttttagcctgtctccccaaaatgtgagatggccatt

SEQ ID NO: 44689 - DNA, 122 bp, Homo sapiens
cggcgaactctcccgttcacggcttcctgtacatctgcccttgtggttggggtcactcctcgcaggcactgtggcttttgtctgcatctggacaacagggtgtgcacccgtgtattcaaata

SEQ ID NO: 44690 - DNA, 122 bp, Homo sapiens
tccgtccctccgcccaccgagggtcggccctgtaggtgacctcagagcgtcggggatgggcgtggccccgtcgggcgctaagaagacctagcgcagagaggaccgccgagctcccgacgggg

SEQ ID NO: 44691 - DNA, 122 bp, Homo sapiens
agcaacctattaattgaattcctctcagcgaattcttcactcaggtgattctggagagggcgggggacagacgcggccgcagcccaggtcccgggagcgccacggaacctaacggtggcagc

SEQ ID NO: 44692 - DNA, 122 bp, Homo sapiens
gtcacccgggacaaagcggctccagggaggggctgagccggcggctctcgcaggagccggcggagatgggcgcgtccccagctccgactcatcgggccaacctccaatcagacccagggaaa

SEQ ID NO: 44693 - DNA, 122 bp, Homo sapiens
ggtctcttcatttcctttgtctctgtccctaaggcaactggaagctggagctgctgcagtcggcctggcaagcccgttggctctgcagagtgagcagtccctggcagcccctggagcagctg

SEQ ID NO: 44694 - DNA, 122 bp, Homo sapiens
cttgggggctccagtcaggggaggggtttccagaaggactgggggccaagaaaccagacccgtgtccctgtggatgattgggagatggatattcaaagtaaacacagattacagcaagtaac

SEQ ID NO: 44695 - DNA, 122 bp, Homo sapiens
gtatgtgcgtgtgtcctactactactaattcttggccccgaggggctcctgggggttccccgggcccctgttagggaaccgcgtccacttctcgccctctcggcccacttcggaggctcggt

SEQ ID NO: 44696 - DNA, 122 bp, Homo sapiens
cctggcatccgctgggggcgctgttctttagctagtgccagtattaaaacattgtcattacgagagtgccaaatgacatcttccctccaccctgcccctgaaaaacagtacacacacatccg

SEQ ID NO: 44697 - DNA, 122 bp, Homo sapiens
ctgagagcaaagacttttgttcactaatgtgaacatggtagataggtggcccgccaacaccgccaaaagggcaaaccacaatggaaatgctacagagcaagatactcttctaaaaaatccaa

SEQ ID NO: 44698 - DNA, 122 bp, Homo sapiens
ccaccttctgggttcaagccattctcctgcctcagcctccctagtagctggaattacaggcgcacagcaccttgcccggctaatttttgcatttttattggagatgggatttcaccttgttg

SEQ ID NO: 44699 - DNA, 122 bp, Homo sapiens
gtgagctggcactgtctgttgcactgtgaacccggagagtgggaacactcaggccgcacacgtgcagggctgtcctgacgtgaccctgaccttggtgactgtctactctcccgtggctggtt

SEQ ID NO: 44700 - DNA, 122 bp, Homo sapiens
agaaggggaggtgcagtttcagaacccagccagcctctctcttgctgcctagcctcctgccggcctcatcttcgcccagccaaccccgcctggagccctatggccaactgcgagttcagccc

SEQ ID NO: 44701 - DNA, 122 bp, Homo sapiens
tgagatgccgggaagggggcctttcctcgggagattcctctaccctttcctccctgcagccgtcccagaatttaacccttcgatgtccttatccaccagccttagggcccgtgccttgtcca

SEQ ID NO: 44702 - DNA, 122 bp, Homo sapiens
aacggctcaccaaggcgcgcaaacctccgcgcccggaagtttagtgtgtagctgctccttcgctgtcgctcatgcccatcacctccagctgaccaatcagagacggcgcctcggcccgggcc

SEQ ID NO: 44703 - DNA, 122 bp, Homo sapiens
atttcctggggccagggtggagggtgtgtgtaaaagtggattttcctctgggcccagatgcgacgtgctaagggggctaagaagggaccccaggaccccagcaccaagggctccggcagaga

SEQ ID NO: 44704 - DNA, 122 bp, Homo sapiens
cggaggctcagagaggggcggccacctggtccaggtcacacagctgggaaatagccgtcgcgccctggaacctctgctcaggctagtccctccaccgacctggaaggccgtgcggacagcgt

SEQ ID NO: 44705 - DNA, 122 bp, Homo sapiens
caagcttctctgaggtgacaaagagtgtcttcattgtcatggcttgccctctaaacagagcgtccccaaatcaccttgtaggaggggctgaggcaaagactcagactagctctagccacatt

SEQ ID NO: 44706 - DNA, 122 bp, Homo sapiens
acatcccagacgatgggcagccgggtggaggcactcctcacttcccagacaacgggcagccgggcggaggcgctcctcacttcccagacagggcggctgggcagaggcgttcctcacttccc

SEQ ID NO: 44707 - DNA, 122 bp, Homo sapiens
atttggacatagcatctatataggaagtggccactgtctagttggggagatgacatataccggtcattgaaataatatctggtgtagtgccggacagagcaagagagaagactatgggatgg

SEQ ID NO: 44708 - DNA, 122 bp, Homo sapiens
atcttgcaactgcgcactcttctggtccgtgtttgttacggctccagctgagctttcgctcgctgtccgccactgctgtttgccgccctcgcagatctgccgctgacttccacccctctgga

SEQ ID NO: 44709 - DNA, 122 bp, Homo sapiens
taagtctgagtcattgctcttagtactgacaactcccactgcagtggatcagagacgaggcggaagcagcctggccagcctctcctgggaaggaaggagcattgccccatctcagattcgga

SEQ ID NO: 44710 - DNA, 122 bp, Homo sapiens
tttagcaaccaagggggtgtggctaagcgagagagcggcttccctggtggcccgggcgcgcggtcttgtcatcttgttgctccttgtgagcgctgggtagagaaagtgagggggtagagggt

SEQ ID NO: 44711 - DNA, 122 bp, Homo sapiens
cactcccatttcttagcaaacttgaagcccattaacctcaattccccgaggcctggttcccgccttagtgcattctgggaactgcagtcccatctttgagcaccccgccaaaatccccgaat

SEQ ID NO: 44712 - DNA, 122 bp, Homo sapiens
cgcggctaccggctgttgaagatgacctctagccagcacgggcagctgctgatgaactggcgggtgtagcactggccccagcccttcacaaagctgatctgcacggtaaagcccgtccacgg

SEQ ID NO: 44713 - DNA, 122 bp, Homo sapiens
atagaccggaggggccgcgctgccaccaaccgggtctccactccccaggtcctcactccccgggccccagcctcgccccaaagctcaaacacgcacccgggaacccttccaccaccctccct

SEQ ID NO: 44714 - DNA, 122 bp, Homo sapiens
gctgaagtccaatgagtgctgaaaaacagagcatgtcctggtatttatagaaagaagacacgtggtgtccagaacttagtaccttaaactacggaagttaattaagaaaacgctatgatttc

SEQ ID NO: 44715 - DNA, 122 bp, Homo sapiens
aacctcaggtgatccacctgcctcgacctcccaaagtgctgggattacaggcatgagccacggcgcctggccgttgcctagtttttgtggtaacaaacaaaaaaaaggcgggggggggggga

SEQ ID NO: 44716 - DNA, 122 bp, Homo sapiens
agatgatggatgcaggtttggacaaactgagttcctgaaacatagacttttattcttagccgtattaggtgtgaaattgccctgagagcaccagttgcttttatgctagatttggaggggaa

SEQ ID NO: 44717 - DNA, 122 bp, Homo sapiens
gcggtcgccggtctgaagataaatttagcactctagagcacccgaaccctacaatcttcacgagcgactctgccgccgcccaatcagcgccagatttgcgtcccgccaccaatccgcgctga

SEQ ID NO: 44718 - DNA, 122 bp, Homo sapiens
cagcacaagctcctccttggtgtagcatttggcatcaggtgcatcaacacatctgggttccgggtagaacctagtccacgactggcccagcccccgccacgccccaaggccacccctggctg

SEQ ID NO: 44719 - DNA, 122 bp, Homo sapiens
ccaccagactgaccaggccgacggcggggcgcggaagtgggtgcgaaggcagccagcggccggccgaccagggctctccccaccgactgcctgctttggcacccggctaccccccttggcct

SEQ ID NO: 44720 - DNA, 122 bp, Homo sapiens
ggaccctggcctagagtctcagcaagtccatctccttcaaatgcccccacctcggctccacgcccctcctccagagcacactcgcgtgaggcgccagctggaagatcctcgcgggtcccagc

SEQ ID NO: 44721 - DNA, 122 bp, Homo sapiens
aggcctggcccgcccacgaaggctcgccccgcccatccacggccctgcccaccacaggcccgccccaagcctgggccccgccccagcaagggcactaatcccctaacccccgagccccgccc

SEQ ID NO: 44722 - DNA, 122 bp, Homo sapiens
ggcttacgtagcagcacgtgattggccaccgctccctggcaggccgggattggtggaagacgggccgaccccgcccctcgcccccgcctccggcccgaggccgcacgggtgtcctcgcgctg

SEQ ID NO: 44723 - DNA, 122 bp, Homo sapiens
cagctgccggctaagcttggcatgcagggcacggtcagatgtgtgggcagcattgcccaccgcgctgcgggcaaactccaacagctcgtggacggcactctggacagcggccacagcagcct

SEQ ID NO: 44724 - DNA, 122 bp, Homo sapiens
aaatgatgatgtttctctgggcatcttctcagtgcatgctcttcctcaactggaatgagtcgagtcttggtggggaaagcatgtgatagttctgtttgtgtctctcagctgtgtctgcaaac

SEQ ID NO: 44725 - DNA, 122 bp, Homo sapiens
gcgggctcgttgcaagttttctttctctctttcctgtaggtcaaaacctggtttcagaatcgacgcgctaaatggaggagactaaaacaggtatggacatggttctgtttctatggaaataa

SEQ ID NO: 44726 - DNA, 122 bp, Homo sapiens
acggggagggggaggagggaatgccaggaagtgagggcgccgcggacctgtccggccgtgcgcatgcgccgcacgcccgccccgcaaggtaaatccttagcctatcttctccgcccctcatc

SEQ ID NO: 44727 - DNA, 122 bp, Homo sapiens
tgaaagggcttctgtgctgggattctccttttaagctatccaaaggcacaaatcaagaaccgcaaccttggagatatgacaaatgaacacaattctggttttttgttttattttaaagtgaa

SEQ ID NO: 44728 - DNA, 122 bp, Homo sapiens
cgcagaggagcccgacccacaggacctgctgaggtacctgctggcttctggcttcacggacgtggacatgtgtcatgttggtgaaaggaacaccaagtcaccaagacagcgactgtgggaag

SEQ ID NO: 44729 - DNA, 122 bp, Homo sapiens
aaagaatgaattggtagtgatggcatttcaggaagcagagatgtttctgtattggggggacggtccctgtgttcctcattcagtgggcacagtggcatctttgatatcgccttggctctgaa

SEQ ID NO: 44730 - DNA, 122 bp, Homo sapiens
gcgccctggcccaggcagtgccgggtccgctggaccccggctgcccagcggagggcagtgcgcccccttggctcacccagcactgctgcctccccggcaccccagggcaggtgcagacccgc

SEQ ID NO: 44731 - DNA, 122 bp, Homo sapiens
tgatgccgtgccgtactttacacgagaaccagcttcccgttggggactttacagagctttcggcagggacagtaatgggggcggcccctgggaagctgtgcaaagtagcatttgcggcgcca

SEQ ID NO: 44732 - DNA, 122 bp, Homo sapiens
gcctcataccagcccgacgaggaggagcgagcgcgcctggcgggcgaggaggaggcgctgcgtcagtaccagcaggtgggcgggaaagtccctggacagacacctgcagaccgcacggggga

SEQ ID NO: 44733 - DNA, 122 bp, Homo sapiens
agatcagctcatcatatctgggtcaaaggcgagtgggcagcaccgatggtggtgggggggcgtgtttgtgttggtggaacgtcaccatgatgcgagggtctccgtcgtctcccatgggggtg

SEQ ID NO: 44734 - DNA, 122 bp, Homo sapiens
aggcgccgggaccggctgcagagacaggcgttcgaggagatcatcctgcagtgtgagcggcgccggtgcgggctgggagtggggcgggcgggccccgcggaggcatgcggggcgtcagcggg

SEQ ID NO: 44735 - DNA, 122 bp, Homo sapiens
gcgccgtgaggatgcccacagtatattatgtattcagacacggactccagtaggccccagcgcgcgagcgcgcacacactggcactcacactggcgcgcacacacatgcaacttcaggttcc

SEQ ID NO: 44736 - DNA, 122 bp, Homo sapiens
gagaaacaaaccactctgccaagagatgggcaaggggcctcttgtggccctcccggtggacggctgcatctacagtcctttgcctaaaaccaacaatcctgcctgaccccagtccctgtgag

SEQ ID NO: 44737 - DNA, 122 bp, Homo sapiens
gcggcccagcccctttcgggggtgcaaggcatgggggaaacttgggtgactcagttcctgcggagcagagcgtggggggccgcgtgcccagccctggggttttggagggtcgggtcgggtca

SEQ ID NO: 44738 - DNA, 122 bp, Homo sapiens
acctggttccatcaggtttcacctcagctcccttatcgtgctgctaagctctgaccccaacgtgagtctccctgccgcagaccacatgggcaatgctgggtctcgagaaggcactttggtgt

SEQ ID NO: 44739 - DNA, 122 bp, Homo sapiens
gccaggtcgaagaagatgagcagcgtgcgagtcagccccttgcagaagaccccataggagcgggcggcggccgagcgcgagagccggacagccaggcccgacagagccgccgccatatagag

SEQ ID NO: 44740 - DNA, 122 bp, Homo sapiens
tccaaactgcccactgagcggtccgcacacacagtccttgccctgcaggcttttcctggacgactgctgaagttctagtcgattccacagccaaaaacatggaacaccttgagcaaaaacca

SEQ ID NO: 44741 - DNA, 122 bp, Homo sapiens
ccaaaggaaatctttgggtctggaaggcgacaagagatcacaggctttctaggtctaccgcgcaccccgatgacgtcacgcggcgacgttctctgacgtcagagtttcctgcccaccatctt

SEQ ID NO: 44742 - DNA, 122 bp, Homo sapiens
aagaactcccggacttaccatagtgacggcaacctgcttctcggactccagtttaagaaacgtttttaagttcatgccctgtgctggagacagttccctgggaacgggttgagagcagggta

SEQ ID NO: 44743 - DNA, 122 bp, Homo sapiens
gctgtttgcaggatacaagtccacctcacctcgcctactaggctgtagacgccatgcaggcgggaacgtgtgttttatccattactgtatcctctagaacagagaacgtgctcaagaaaatt

SEQ ID NO: 44744 - DNA, 122 bp, Homo sapiens
agaagacgttgcgcttctttggaaacttgtggaggccctggtgggggcacactggagccccgacgggcggcatccctgcggggctgtgtggcctcagcgttcctcggggctgacggtttcca

SEQ ID NO: 44745 - DNA, 122 bp, Homo sapiens
ggatggccagccagtgtcttcaccttctgctttgccagacagaaccagacagtcccttcccggagtggcagggagaggggagaaggaggtcagggaaaggaacagactggagcaggcagcag

SEQ ID NO: 44746 - DNA, 122 bp, Homo sapiens
gggagtggggaagaagcgcgactcccggccgctttggagtaggcgtcccagcaaaactctcgcctcatcaccagacactaccccgggcagaaggttcctaggctaggtcctcggacccgaga

SEQ ID NO: 44747 - DNA, 122 bp, Homo sapiens
tgttagcacttgtttctagggttcagtcatgtgtccagtgcgtgctcagtgaagtgtccacggttctaggaacttgagccctgccttatagctcctggtggaagggacagagcaaggacaaa

SEQ ID NO: 44748 - DNA, 122 bp, Homo sapiens
ggggaggctgggtgggagtgatagggagggagggaccgaccgccatgagaaggaggggagcgcccagggtcaggcttggaaaacgtaatttaagcgcactgggagatgagttcggaagacga

SEQ ID NO: 44749 - DNA, 122 bp, Homo sapiens
tccattaattggtggctgtcaacaggaacccagctggtgaactgctaatgcactatgagacgaggctttgaacatttcataaacattgtaaatagcctctgtataactgatcattgttcata

SEQ ID NO: 44750 - DNA, 122 bp, Homo sapiens
agggtctggggacccgaaggacagcaggctatatctaaggaagatggctctagaactccacgtcctttcttcctccatgtcccattcccccaacaaggctctgcctcaaccccaatctacct

SEQ ID NO: 44751 - DNA, 122 bp, Homo sapiens
gaaacctgaggctcacagaggtaaagacgcttgctcaagatctcatagctaccgaggttccgaattctggcttagattctcaaccccactaatccatccccaccagaagcccctgagtctcc

SEQ ID NO: 44752 - DNA, 122 bp, Homo sapiens
caggtgtcctgtataaccagttcctgtcgcaagtggactttgagctgctgctggcccacgcgcgggagctgggcgtgctcgtgttcgagaactcggccaagcggctcatggtggtgaccccg

SEQ ID NO: 44753 - DNA, 122 bp, Homo sapiens
gcgctggagctaagcaactggcctttgtttgtgaattggagcagtttaggggacatcctccggtcgccgcggggcgcgcgcctccgctgagtgtgcggtgcggtacccagcggtgcggggga

SEQ ID NO: 44754 - DNA, 122 bp, Homo sapiens
gagaacaagcagcagagttgtggctccaaaccagggtcaatttgttcccaattcctgctccgtctaaagtctcggagacaaagggccacctcacgctgtccccaccccttcgacttaccttg

SEQ ID NO: 44755 - DNA, 122 bp, Homo sapiens
gactgcggctctgattctgggtctctgatccaacgttcccgctgttccgctcgcagcccgcgggtcgctgctttcagtttgttgaccaccaagtttaacccagcagatctgctcctccccac

SEQ ID NO: 44756 - DNA, 122 bp, Homo sapiens
tccaaagccaactgaacacatgcatttatctccattcttttcccatcaaataaaaaaagacgtaactattgtagaacagactaggggctgctcacccagtgcagtaagaccagatacctaaa

SEQ ID NO: 44757 - DNA, 122 bp, Homo sapiens
ttcaagcaattttcctgcctcagcttcccaagtagctgggattataggcatgggccaccacgccccgctaatacggaggcacttttaattagcccacagtccagtgaaatttgacggagtga

SEQ ID NO: 44758 - DNA, 122 bp, Homo sapiens
ccacgcttggtgcccgcggtgcgcggcgctcattgcgcgcgccttcgagccaagcccccgcggaaaacaggctcgggtttctcctcgcagggcccaggaactcggctctgcctggcccgggt

SEQ ID NO: 44759 - DNA, 122 bp, Homo sapiens
atggcagtggcatgcacccgcagtcagtcaaagccaccgggctcaagtcttcctcttttgcgcagcaccggtaaggagagagggtgtctatgcatcacgttggcctgggtgccatttcccca

SEQ ID NO: 44760 - DNA, 122 bp, Homo sapiens
tccttacactgggcctgcgtaagagagatgtgttaatataccacaatccaggcagctgaacgcttgaccaaactttagtcatctaggaggaatgtcagcctacatcaggtgcaactccaatg

SEQ ID NO: 44761 - DNA, 122 bp, Homo sapiens
ccatacccgggcctcaggcagccacgaggtagacgggctcaggctcgggggtgcggcaagcggcacccgggcgcggcggggcgcagctgtggggaccgcgcaggcgccacgtcagaccccgc

SEQ ID NO: 44762 - DNA, 122 bp, Homo sapiens
agtacatccctctttgggcttagtgtgcagtgctggtcactgcatcctaagaaaaagaagcgccagagaaaggcaagtaaaataattaaaagaatagaggggctttttttctctgggttaaa

SEQ ID NO: 44763 - DNA, 122 bp, Homo sapiens
tcaaatgggagcctgtaagtaaatacttgtgctgcccaaacatttggggtttgggggagccgaattacaagtcggcccaggaagctatctatgtacaaccttgaggcgcaaaatcgagcaaa

SEQ ID NO: 44764 - DNA, 122 bp, Homo sapiens
ttttataggagtattgaatagttgggaattggaacccctccagggggaaccaaacattgtcgttcagaagaagacaaagagagattgaaatgaagctgttgatttcaacacacaaattctgg

SEQ ID NO: 44765 - DNA, 122 bp, Homo sapiens
ccaccccctgccccagttaagatcctgctcagttccctgggccagccaggctgaggagcccggctcatccccaggcctgctagggagcctccctgccttgccattggaaggacatgctgttg

SEQ ID NO: 44766 - DNA, 122 bp, Homo sapiens
cgcggccgccaccccctccccagtggctccccaggagcccacggccgccaggtccccagccgtcagcagtgattcaggcatctggggacacacgtgggcctgtctgtgcaggggatcatagg

SEQ ID NO: 44767 - DNA, 122 bp, Homo sapiens
ttctaggcactggggatacaaccatcaacaaaacaggccctgccatcatagcgctgacagcggctcttgcttccagactttttttttttttttttttttttgagacggaatcttgctcttgt

SEQ ID NO: 44768 - DNA, 122 bp, Homo sapiens
cagcgctcagcccggcagctgctgctgctgctcgccgaacccaccctgaagcgacagcgccggattcgaggcaggttactctccaaggtgatcacttcctgattcgtcgcctccattacttc

SEQ ID NO: 44769 - DNA, 122 bp, Homo sapiens
tacggccaaattcatctttgttttccttcccagtgacatctggctctcagtgaggtcccacgaattacaaaaagcagaagtctgaacttctgttttattgccacaggaaactcattgccaca

SEQ ID NO: 44770 - DNA, 122 bp, Homo sapiens
tgggcgtgtgttgactgctgagttgaccttctcatgttcccaaccccaaggttccttatacgtgaatgcttagattgcatgtctccaacaacaagtttgcaaaatatttaagactattcctt

SEQ ID NO: 44771 - DNA, 122 bp, Homo sapiens
gccctaggtctaggcctggccagcaggtgtttcggtttctcccccagtgggtgtcagcctcgcgggctaaatgaaaatgcggttccaggcatcccggtttggacccgtctccacccgggcac

SEQ ID NO: 44772 - DNA, 122 bp, Homo sapiens
agtacgtataagaactaagctccaagctggtctcttacccctcatcctaccaatccctgccggctaaggtgctgaactaacttaagtggggggcctgagcttgcccatagttctttgctacc

SEQ ID NO: 44773 - DNA, 122 bp, Homo sapiens
ttcccagccccgggggaacaatggggaccttgccaagggtccccttctgtcgacccctgacggcccccaggcccgtttgggtggcgggagtgccggcaccctgggaccttcgggcccgaggt

SEQ ID NO: 44774 - DNA, 122 bp, Homo sapiens
gccaccagcagtgtagccccccgatagcgcacccagcacacccaaactgccccctcttcccgcaccatgggcattgcagcaccccatagtgcctaaacccaaacccccccccgacccgcacc

SEQ ID NO: 44775 - DNA, 122 bp, Homo sapiens
taaagcatgagaaaatctgccatttttttttaaatcacaaaagggtttctatagatggagcggtaagaagctgacagctttttatgcataaaaggcagctgttccttctcaggtaatattat

SEQ ID NO: 44776 - DNA, 122 bp, Homo sapiens
gtcggctggagacggggaggcagggagaggacctcatgagagagttttctaaatcacaggcggggtagggtggagaatagtcaacgaagatcacgtaaaagactgagagctagtgaccacac

SEQ ID NO: 44777 - DNA, 122 bp, Homo sapiens
cccccaatggacggcagacgaagaggcctgtgtgggaactggctagctgtgggcgctccacgcggtggctatgatgggtgaagccccccagcctgcttgtcttcagaagggcaggaggccta

SEQ ID NO: 44778 - DNA, 122 bp, Homo sapiens
gagggggatgggaggtcatgtctcttctcagggaaagcgggagcccttctggagcccttccgcagggtcagggctgaggcctgggggtcagggccccttacgttcccctcttttcccagagc

SEQ ID NO: 44779 - DNA, 122 bp, Homo sapiens
cagagtggatttgtgcaagaaggaacctggggggtttaaggacagcaaaatgatcttaggcgtaattgactggtttttctgaggtcttgccacactgggcaagaaaatgctgcatcgggccc

SEQ ID NO: 44780 - DNA, 122 bp, Homo sapiens
tcagtaagttaacggtatttgggccctgggctgcccttgtgggtcagggtcactgatgtccgcgacacggactggaccgcgcaccacgcctgctcccggcagaggccccacccgggtggctg

SEQ ID NO: 44781 - DNA, 122 bp, Homo sapiens
ccacaaaggaaaggtagaggatgctatgcgaacacacaacagatcgtaacatgatgtatacgctgtggtaaagattctggatgttccccaaagagtaataggaaatcatctaagcaaaatgg

SEQ ID NO: 44782 - DNA, 122 bp, Homo sapiens
acacagcatcctgtacatacgccacctgggctgggggtggggaggcagggccaggagcatcgattaaagatcacatcctggggcttccagggagctcacaccaaccttgcgtttctctcctg

SEQ ID NO: 44783 - DNA, 122 bp, Homo sapiens
agcattgggggaggtgggggcgcccatggtggtgtaggaaacatatggtggcgccagtggcggcattgggaggggtgggggcgccggtggcggcgtaggagcagctggtagtgccagtggcg

SEQ ID NO: 44784 - DNA, 122 bp, Homo sapiens
agggagcacacctcagtcatggtcacagagaaggtgatgatggcaccagggctgtctctccgtgcccgtctgcacctgggcctgccagagccgtcttctgtgccccatggggtaggggagca

SEQ ID NO: 44785 - DNA, 122 bp, Homo sapiens
acattccctccgccccagactcactctttcccattctcctcaacatatccacttaaagagcgctcagtacgctgagggccccaagcctgacagagtcaaaaaaagaagcatctctgcccaac

SEQ ID NO: 44786 - DNA, 122 bp, Homo sapiens
attttttattcctttactttcttaatacatttgctttcactttattctatggacttgctccgaattctttcttgtgtgagatccaaaaaccctctcttgggtctggatcaggacccctttcc

SEQ ID NO: 44787 - DNA, 122 bp, Homo sapiens
ggaaatggcaggttcacaattttggctacagctgctcccatctctaagcaacccaggctccgggttggagggtggcgaccccaagatgcggcctcagccgccggccgtgtttgtgctccagc

SEQ ID NO: 44788 - DNA, 122 bp, Homo sapiens
agcagccttctttctgaagacagagctagggctgtggatgagcactgcaggaaggcacttcggggtctatcagaggaaatttttgctaaccttccgagttgtctcagagccaaacgtagtaa

SEQ ID NO: 44789 - DNA, 122 bp, Homo sapiens
agagctcaaactccatcccttggctcaggtttgcccctttcatccttctccagtgctctgcgatggagaaagaaggcaccaccataaatgaggttgaacacctggggctctgactgggttta

SEQ ID NO: 44790 - DNA, 122 bp, Homo sapiens
gaacccgctcaagctggcgtggggctgagtgactgcctgggacctgcggcccctagcgcccgatatgactcacacacggactgcccactgagggggagcccctgtgaatagtgtaaatgtgc

SEQ ID NO: 44791 - DNA, 122 bp, Homo sapiens
ggaccagcctcaacaccacccgtagggtactcaaagtccggtggcgacgaaggaatgagacgagacaggttaagagtgcataaagattgggggccagggggccaattgcaaaatggaggctg

SEQ ID NO: 44792 - DNA, 122 bp, Homo sapiens
gagggtgagcgctattttaaacatggctttctctttcccttagcctaggagccaccgcagcgcacccagcccgcgagtacagccgcatgggaataatcccaacatttgcctgatttattttc

SEQ ID NO: 44793 - DNA, 122 bp, Homo sapiens
tttatctatctattgagacatgatctctgttgcccaggcaggagtgcagtggcactatcacggctcactcactacagcttcagtctcctgggcctaagcaatcctcccacctaagtcttcca

SEQ ID NO: 44794 - DNA, 122 bp, Homo sapiens
acccttacaaggagacctgcaaaccagtacccaagagacctgcaagccaaatgcaggaaccgcaacctgttaattttgcacacactgtggagcatgtctaccttttgtcatcttacctgaat

SEQ ID NO: 44795 - DNA, 122 bp, Homo sapiens
tggccgacaaagttttactgatatacatataggtgtatcgctttcagtgatgattatcaacgggttcccatcaactattttagaagaagtttactggtacacatcttcacatttttcttcaa

SEQ ID NO: 44796 - DNA, 122 bp, Homo sapiens
aattcaaatcgtgggcaaaagggtttacttgtgcatgctgctgctttgtatctcaagtaacgtgattgaaatatataaaatcaagaggctgcccatgaaaatggtgcttttaaaatactctc

SEQ ID NO: 44797 - DNA, 122 bp, Homo sapiens
gggagggtcagtgggcacaaaaccaacaataggttatgggcaagggatgcgcttcggtcgcgaacaccctgaacccacctaccggagctactctgtcccaggagcggccgtggagaaagcaa

SEQ ID NO: 44798 - DNA, 122 bp, Homo sapiens
agaagtgcggccggggaggaagtaggtgccacacccgcactcccgggcccctgtgggatgcgtgtcagcagagacccaggcacaggggcctgtcatccagtggctcctggggatgtccctgg

SEQ ID NO: 44799 - DNA, 122 bp, Homo sapiens
gcagggcctccagaagtggctgcacaacaaccttatttccatagtgggcatttgcctgggcgtcggcctactcgaggtgatctggccccgcccccacccgcgatcggccctaaatccctaga

SEQ ID NO: 44800 - DNA, 122 bp, Homo sapiens
cccgggcatgtggaggctggcagccctcgctcctgtgaactggcggctggggctgcatctcgcccacgtcgctgtcatgtgcggggcccacgttgtgagttgtgtgtctgctcactattgtg

SEQ ID NO: 44801 - DNA, 122 bp, Homo sapiens
gagtccgccctgcaccttgacaaacagctggagcttggtctccgccatggtgggagctgccgcggtcaggcgcgggtggggacctggggagctctttaagtctccctgtgcgccccgccctc

SEQ ID NO: 44802 - DNA, 122 bp, Homo sapiens
gcatcacgggatttgtagtctccgtgggcatatacccaccgcgcttgcgcaccggtgaggcgcgcaccgccccgctccacgcccctatcaggattcgggtcctcgtgaggagcagtccaggc

SEQ ID NO: 44803 - DNA, 122 bp, Homo sapiens
taaaaggaacttgagaaacagaaatcaacagcacaggagggagatgtgagccagaaaagtcgttagaacagcgaggtggaggaggaagagccacctcacccaggcactgaaattcctcccaa

SEQ ID NO: 44804 - DNA, 122 bp, Homo sapiens
aggcaagatacggtgtcaggccgcggtccccgtaagcacgctcgcagcagccggctaagtcgtgggaaaggggccctacccactgaccatcaccccctatacatggtgtccaagggggagtt

SEQ ID NO: 44805 - DNA, 122 bp, Homo sapiens
aacactagatggcagtaggagactgctcagaaaatggagagcggcgcccaccttgcagtgcgcaggcgtcgtcagtagacatcgcgcaggcgtcgtcagtagacatcgcgcaggcgtcgtca

SEQ ID NO: 44806 - DNA, 122 bp, Homo sapiens
tgttcgtttcaggtgggctgcccaaatatatgcctgaccaaaatcaagcatacactctctcggaaacaattaattatgatctttgctgaggtacaacaatgttatcgtcactagggacttta

SEQ ID NO: 44807 - DNA, 122 bp, Homo sapiens
ccctcctcctcgcctgactacttctgacgcgggtcgtcaggactccgcttgggtgtcacccgtccaggaagcctcccttaattaagggccctcggcacccaccccatatgtgattagcagcc

SEQ ID NO: 44808 - DNA, 122 bp, Homo sapiens
ctctcattgcaggcgttggaggggcaaggagtggaagaaggggaaacggtggcgagagcgcggggcagctgcctctcaggaagtcccagggagccctaggatgcccaggccctgttcttcag

SEQ ID NO: 44809 - DNA, 122 bp, Homo sapiens
agcagcaggtcggccacggccaggttcacgatgaaatagttggtgacggtctgcaggtggcggttgcaggccactgagaggatgacaagcaggttacctgccacggccataaggatgaaggc

SEQ ID NO: 44810 - DNA, 122 bp, Homo sapiens
tcccattgatcattgcataaaatccaatttctttaacaagtcttctcccctcacccgcttcggaccactgcctgccttgcctaagtcctttcttatgacctctttcccacctctgccggctg

SEQ ID NO: 44811 - DNA, 122 bp, Homo sapiens
ggcgtctgtctggaagctggcagccgccgtcggggagcggtgcgaggctcctgcactgcgcgccgctaggataccctggagaaggaagctacgaagaccgactacagcagccttttgctgag

SEQ ID NO: 44812 - DNA, 122 bp, Homo sapiens
gtccacgccgcggtagaaaagcggatgggcatatgcgtcagggatgttcaggatctggcccgtggtcgccacgtgtcccgcgatgccctgatcggccgggatgcggatctcatagctctgcc

SEQ ID NO: 44813 - DNA, 122 bp, Homo sapiens
attccaaggtgtctgcctagaaataaatgatagtttatttaacatacttgtaacttccaacgacaacacttcaagactgcaaatcatccatccgggcaattacagaaatgctgaacggccac

SEQ ID NO: 44814 - DNA, 122 bp, Homo sapiens
tcctcctcccaggtggtgactgtggcggtgtacagcttcttcctgacttgtctagttgggcggcagtttctgaacccagccaaggcctaccctggccatgagctggacctcgttgtgcccgt

SEQ ID NO: 44815 - DNA, 122 bp, Homo sapiens
tgctccaaaacctttcgtgtatgcattcacattgagtgtggctcattttctttccccgaacgccatgactgttcagaagcacaatactatctcctgaaagagataagagacattccctagat

SEQ ID NO: 44816 - DNA, 122 bp, Homo sapiens
cctgcggaaacagtgaactcagtggctgctgttttctgagcacctgaaccctgtgggggacgacagagttgcccgaggcggcaggatgtccccacactcgcggtcccccgcacatcttcctg

SEQ ID NO: 44817 - DNA, 122 bp, Homo sapiens
caaccctgtgatattgttcctaatatccagagcgaaagaggatgatatgactctcaatatcgcagagggtgtgcacccgtcctgtaatattgtccttaataccctgcgagggagagcataag

SEQ ID NO: 44818 - DNA, 122 bp, Homo sapiens
cgcgcccagcgagcgtgaccccgacccagggccacggctgcgcccgtaggatcgcgggcgcgcgggtctccatgagggactgggagagatgcgtcacccgctaatccctcaactgggtcgca

SEQ ID NO: 44819 - DNA, 122 bp, Homo sapiens
agcgctggccgagagcaggacgtggtgcagaaagactgcggcccacacgggtgggtgacccgggacccacaggagctgaggctgcatcacagagcaggcagagacgagctgggggcatcgtg

SEQ ID NO: 44820 - DNA, 122 bp, Homo sapiens
gagggcgggggacgccaggcctaaagcgcctcgtgggtttagagaactcagagagggcaccgggtgggggtgggaagaagactcaacccgtagctaaatgtttggcctttggctatttttta

SEQ ID NO: 44821 - DNA, 122 bp, Homo sapiens
ctcagccggctctgggaggcgggggccgcggtcgaggggcgccgctattggctgatcgggcgggggaggaggggcagggaggccgtgattggcggggacccgagctgaagggggcggggccg

SEQ ID NO: 44822 - DNA, 122 bp, Homo sapiens
ccgggcccctgagaatcagccatgggatggtggctggaactgccgggaaagaggcgacatcgctccactggaagccaagccacagcctcgggcggccaccttcgccccatcagggaaccccc

SEQ ID NO: 44823 - DNA, 122 bp, Homo sapiens
tctcctctggttgtttcgttttggctttttctccctccccatgtctgttctgggttttcacgtgcttcagagaagaggggctgccccaccgccactcacgtcactcggggctcggtggacgg

SEQ ID NO: 44824 - DNA, 122 bp, Homo sapiens
agcctggtgaaccatcgccacagccatcggactggagagtaccagtgctcactctgtccccgcaagtaccccaatctcatggccctgcgcaaccacgtgcgggtacattgcaaggctgctcg

SEQ ID NO: 44825 - DNA, 122 bp, Homo sapiens
tgaagttgctgcttctcccaggcaaggctgtggaccatggagtggcagcccagccagcgtcggtctgtgccccttccgccactggggctcagagccggggtggggtggctgcagcctcagga

SEQ ID NO: 44826 - DNA, 122 bp, Homo sapiens
tgcccaccccgcttcgcccgtcgcgccgaggagtgtgtgtgcttgcatctgcaaaccgtgcgtcccgtgcacagaatacgtccggtgcaaaacgtgtcctgtgcacttgtcctatgtaaacg

SEQ ID NO: 44827 - DNA, 122 bp, Homo sapiens
tagcaatcagcgagactccgtgggcgtaggaccctccgacccaggtgccggatataatctcgtggtgcgctgttttttaatccggttggaaaagtgcagtattcgggtgggggtgactcgat

SEQ ID NO: 44828 - DNA, 122 bp, Homo sapiens
ctctctccaaggttgcatctcggagaaacaagccatcagattcttgtctaaactttgcctcgtcttatttagttttctagtgattttctgcaaaaggaaataccagataggcaatctagtgg

SEQ ID NO: 44829 - DNA, 122 bp, Homo sapiens
ctaagaagtgctgggattttcattttccatgccatatgtacatgcacatatgcatgtgcgcgcgcacacacacacacacacacacacacacatattaataggcctatattggttactataga

SEQ ID NO: 44830 - DNA, 122 bp, Homo sapiens
gcctctcctgccctgctcatgtctgactagctgcctactgttacagaatgcctaacccagcgatgcaaaatgcaaatacagtgtcctgtagacctggtaacataagaacttaaaatggagaa

SEQ ID NO: 44831 - DNA, 122 bp, Homo sapiens
gcctccccgcccggaaccgccgcaaggctagagccagggttctggaagcgcatccgagctcgcaaccggggagagagtggcggatgcccacttacctgccccgggccgcgcctggaaacttc

SEQ ID NO: 44832 - DNA, 122 bp, Homo sapiens
taccacttatatcctcagcattatcatcaattgtcttaatacaaggttggtggcaaaaaacggctcacaagtatgcatacaaaggggccaaacacattgagcagcaaaacccccaaagcaga

SEQ ID NO: 44833 - DNA, 122 bp, Homo sapiens
tttttaaagtcccttcacaacagcggcaaacagccttgggcagcaggaaaccttcagacccgcttctcatcctgcgtgagtcctggaggcgggaacgtggctggttgaggttcaaagacctg

SEQ ID NO: 44834 - DNA, 122 bp, Homo sapiens
ataaaagatttggtggtgctgtggtttgaacatgtcccccaaaagttcacgtgttggaaacgtaattgccaatgtaacggtattaagaggtggggtctttaagacgtgactgggtcatgagg

SEQ ID NO: 44835 - DNA, 122 bp, Homo sapiens
caaagaggggtgtgacccgcgagtttagataggaggttcctgccgtggggaacaccccgccgccctcggagctttttctgtggcgcagcttctccgcccgagccgcgcgcggagctgccggg

SEQ ID NO: 44836 - DNA, 122 bp, Homo sapiens
tcactcctgagggtctaattttcttactctcctgatgcctcacggggcgagggactagaacggggcgctgagctggctgtaggcaaaagccaaccgactccatcccctactctcccatcagt

SEQ ID NO: 44837 - DNA, 122 bp, Homo sapiens
cctgtagcagcagcgtgtctccgggaggacccagagaagcaacatcacccatgtgctgcacggaaccctaacccccgcatgtccaccctcctgcctctgggcctggacacctcaagactcca

SEQ ID NO: 44838 - DNA, 122 bp, Homo sapiens
gcagaaaagacggctccactttacacgtacccaggcagaatactacagtgggcctgttgccgggcaaccacagctagaacactttgtttccggagcattttgagaatgattacacttgcggg

SEQ ID NO: 44839 - DNA, 122 bp, Homo sapiens
acctctatgctctactgaagcagtacagtgcagtggctaagtgcctggagcctggctgaccgggttcaaatcccctctgcagcttatttatatggccttgggccacttcctttttccatggc

SEQ ID NO: 44840 - DNA, 122 bp, Homo sapiens
cctcgtgggcgggtgaagtgtgtctgctgggtcagcactgcccagatctgccatcgtgttcggaccccatccctgcaggagctggggcaggtggagatggtctagtcctcctggggcctctc

SEQ ID NO: 44841 - DNA, 122 bp, Homo sapiens
gtcaatgactgaggatggtgctcaggtagccttctgcccctcctaaaagggtcatgtttccgagagagcttggaggtaccaggcttgaggggtcattgcagccatccccttgcctatgggag

SEQ ID NO: 44842 - DNA, 122 bp, Homo sapiens
ctccccgacctcagcctcggcgtgcagaagtcaggcagctcccagcgagcgcagaaggtgcgcagaggcagggctccgaggctacctcccgctgggcttccgaggctggtggcttggccttc

SEQ ID NO: 44843 - DNA, 122 bp, Homo sapiens
gatgcagttcaggagctgggggcgggcggcgcagccttcagcacctcagagggaccgggacgcaccagacactcccccagcccactcggccagagccccggacaggatgggtgcccgaccag

SEQ ID NO: 44844 - DNA, 122 bp, Homo sapiens
gggagaaaagcatgtctttcaccctggaggcagagggatagacacacagagcctggctcccgtcccagctctgccttcacttgaaggatggctttgggtcagcagtgactgacttctcagga

SEQ ID NO: 44845 - DNA, 122 bp, Homo sapiens
atgagcagcagcaggtaggtggaggcgaacatgcccaccacctgcaagtacttgaccaggcggcacagcaggtcgggcccgtagaagcggaaggtgatgtcccacagcaactgcggcagcac

SEQ ID NO: 44846 - DNA, 122 bp, Homo sapiens
gccaacctctcaaaccgtgctaagaaggcaaacgcgagctgtaagcaacccagcagtttccgtacctcacttccgttttctgtacctcacttccgtcttctgtacctcacttccgttttctg

SEQ ID NO: 44847 - DNA, 122 bp, Homo sapiens
agcgagtcggcgtgaatgagagcaaaccaacagggctgtgcgtggcgcgtgtgagtaagacgcgagcgggccccacacgcaggcggcggcggcggcggcggcggcggcgaggtctgaggcgg

SEQ ID NO: 44848 - DNA, 122 bp, Homo sapiens
cgcagcagggctgggcacgccaccttcacgagagtaagagagaagcaacgggcttggacgcggggactgggcacgccaccttctccagccccagagccccactgtggagagaaaaggggctg

SEQ ID NO: 44849 - DNA, 122 bp, Homo sapiens
ccaccccagtgactcggcagcgcggcagccgacgactgcgcagacgcagggcggcggccgcgcctctccaacgccccgcacccgcccccctcagaagcacgtgcgccttacgtaatttcctg

SEQ ID NO: 44850 - DNA, 122 bp, Homo sapiens
ccagggtgaaaagcgtctctctctttggcaggataaaggcgaggggctcctgaatggcgccgatgttcacatgccctaggttaccgtacttggagagctgagtgggaggaatgcctaaccca

SEQ ID NO: 44851 - DNA, 122 bp, Homo sapiens
ctggggtgcttgccagataacaggcaaaggcaatgagcacggagcctggaggagggtccccggggagttcccctcagccacacctcaaataaaccccacagaaaccaccaccgtctggttct

SEQ ID NO: 44852 - DNA, 122 bp, Homo sapiens
ccggcacctcccgggccaaggtctccaaatctaacggaggctgggaagggcccctcagtgcgaaggcacggccgcctgggcagcctgagcgctcttcccgcgcctcccgccacgtcttccca

SEQ ID NO: 44853 - DNA, 122 bp, Homo sapiens
cctccctggctcctcctcctcctcagtcctatccccaccctgtcacacatacacttaatacgcctggcatccaagtccacccactccggactttggccttagcagtagttagtgtgggaggc

SEQ ID NO: 44854 - DNA, 122 bp, Homo sapiens
accatgtccacatctgtgaagaggatggggctcctcgagaagtaagaccgtatctgccagcgtttctcaccacactggagagcagctgctctggagcagggatccaccagattggtattttt

SEQ ID NO: 44855 - DNA, 122 bp, Homo sapiens
catgaaatctgtaaggtgatttggcagaagtcgatgctgttggtgccaggatttgggtaccgtaccacggtttcctgttttcaaatgtattaattgatccgcaaaggacatcttttggagac

SEQ ID NO: 44856 - DNA, 122 bp, Homo sapiens
aatcacttgcccaggatctggagccaagtaatggtgatactgatgcttccttttctttgccgcgctcggattctgagtttcacaagaatgtacctgggtgccccttagcgggatatgaatag

SEQ ID NO: 44857 - DNA, 122 bp, Homo sapiens
ggttgcatgttataataaccctgagttactcagagaaaaatcttgatctagaaaccaccacgggttcagtctcctttatgggaagacagaggatctggagattggatgcagccactccggga

SEQ ID NO: 44858 - DNA, 122 bp, Homo sapiens
aggtggccacttcttgctcctgtctgggtctttggcctcgaggacggcacacagcaaggccgagtggtgtggagccgggtcttggagtgaatgcagggatgcattccaggcctgggaggaga

SEQ ID NO: 44859 - DNA, 122 bp, Homo sapiens
tgccactctcctgcctcagcctgccgagtagctgggactataggcacctgccaccacgcccggctaagttttcttagtacaggtggggtttcaccgtgttagccaggatggtcttgatctcc

SEQ ID NO: 44860 - DNA, 122 bp, Homo sapiens
caaggtcaggcccagccccccaaggtcaggcccagcccctcggcaggaggacggggaccgcggcctttgggcagggctgacttggcactgaccacaagggaggcccttttgcaataggggaa

SEQ ID NO: 44861 - DNA, 122 bp, Homo sapiens
tgagggcgtttgggctcaccagcattttcctgtggtcatttgacggtatcacttcggctgcgaacatgcctgaaccagctaagtcagctcccgccccgaagaagggctccaagaaggcggtg

SEQ ID NO: 44862 - DNA, 122 bp, Homo sapiens
tgaagataaaagcaagagagactccatcgagatgagtatgaagggatgccagacaaacaacgggtttgtccataatgaagacattctggagcagaccccggatccaggaagctcaacagaca

SEQ ID NO: 44863 - DNA, 122 bp, Homo sapiens
ctcctcggctctccgcccccaccgctgatttgtcagcgcttctgcccgcccctctcccggcgctcgctgctttccctgcagcgtgctcctcgtccctatctcggatggggatggggcagggg

SEQ ID NO: 44864 - DNA, 122 bp, Homo sapiens
tgactccggctttgctgaggctcctcctggttcctgacgacgctggtttgtgttgcttctcggctcgtgctgcctcgtgctcccctctgctctggctcctaggccacggctcttgccggagt

SEQ ID NO: 44865 - DNA, 122 bp, Homo sapiens
aaaggctttaactaatgacttttcagggccacccacccactccacatccataaaacatttcgcgatgaacacagccagagctacggtttccttccatccggcacaagaagcgcttctctgcc

SEQ ID NO: 44866 - DNA, 122 bp, Homo sapiens
ccccagtgtccctacttcttgtgcctccccaggagcctggatggaggtgaggctgctgaacggcacaggaaggtgctcaggccgtgtggaagttctcgtccagggcacgtgggggaccgtgt

SEQ ID NO: 44867 - DNA, 122 bp, Homo sapiens
cttgtaaatgaacatgcttcccttcccccattgagtgttgagtgttgtgcctgtgggaagcgttatacacacagcctgggacctcagcacagatgcccgttgacaggtgtcccaccggcctt

SEQ ID NO: 44868 - DNA, 122 bp, Homo sapiens
gggaggggcgcgcaagccgggacttgaacctgcactggctgagctgtggacgcggcctggcggcctctgcggagcgccctctgcggagctgcctctggcacctgtccacagcgtctggacac

SEQ ID NO: 44869 - DNA, 122 bp, Homo sapiens
tctttgtcttctactgcacacttcggagtgcccccaaacaattacaataacctcacagaacgatgatcacagatcaccatagcagatatcacaatgaaaaagtctgaaatattgcaagaatt

SEQ ID NO: 44870 - DNA, 122 bp, Homo sapiens
aggagtccctcggatggctatgggggtcgccttcctctgggggctgcacagtggcctctccgggagccacctcccaggcttgtgagatattgccttcccaagaccgcagcatcttcttccct

SEQ ID NO: 44871 - DNA, 122 bp, Homo sapiens
tggatgggcactgtcacctggtggcagctcttggaactgacgccgagatccttttgtcaacgtgggcaagttcactttcgtgagccacatgtcctcaacgtctgcaaaatggagatcttttt

SEQ ID NO: 44872 - DNA, 122 bp, Homo sapiens
tgagttcaagaggcagaagttgcagtgagtcaagattgctccactgcactccagcctggacgacagagccagaccctgtcccaaataaaaaagaaggaaagaaagctaaacatgaatatttt

SEQ ID NO: 44873 - DNA, 122 bp, Homo sapiens
cgcacgggcttgaggagggcagcatgtcgtagcgggccatatttgtgtcagggttgggaacggcacaaggcacacctgtttcctagtgctgcagaaccctcgtcctgggatgagcctgcccg

SEQ ID NO: 44874 - DNA, 122 bp, Homo sapiens
agtctcttctatttttggcccccaagacaatttcagagaaccagtaaagttgggtgacaacgtggatcgctttctagtgtaaggtcccggggaatggcaaaactcaaatgtagcctcactga

SEQ ID NO: 44875 - DNA, 122 bp, Homo sapiens
ggccccgcagcacaggctccagcgggtgcgcatttagctggtttggatcccagcttttggcgggctgggctacggggacaccggtgtttggggcctgactgtccacgtggcgacaggggcag

SEQ ID NO: 44876 - DNA, 122 bp, Homo sapiens
tggcccgcggacaggtagaagaggttgcaaatcaagcacagtctcttcgctgtacagattcgaaaaataagcctgagaggccgagactgactcgccgcggcggagcagggttgggcagggtt

SEQ ID NO: 44877 - DNA, 122 bp, Homo sapiens
ttgaggccgccgcccggggtgggaccaggctgtgtgcttgctaactgtgcttcaggaatccgctctgggatgccttcctgtctggcaaaaggggttacccccagttctacccagtccctgtc

SEQ ID NO: 44878 - DNA, 122 bp, Homo sapiens
ttgtcaggtcttcacacacataaatgggaaggacagaagtacccaggtttcctgatgcatcggttatatcaacatgatgcccaaacaccaggtctgcttagggtaaaactgcaataactgta

SEQ ID NO: 44879 - DNA, 122 bp, Homo sapiens
cagaacatgtcagttattactgctcacaaatcttgggggatttaggaatcacgtggtccacgcttcaaaacagaccatgaatcccttctgaactgagaatctggtctctgtggaccacggga

SEQ ID NO: 44880 - DNA, 122 bp, Homo sapiens
ctattctgcacaggtccacaccccacatctcctgtgagaggtgacagatcaatgagcattcgcggctttcttgagtgggaccagaagagaatccaggctacctctggagataaaaaggactt

SEQ ID NO: 44881 - DNA, 122 bp, Homo sapiens
acttaaataacaattgctaacattttaatctctatgttccaagaacttttctaacctcttcgtagaatattaactcatttaatcacaactaccttctgtggtaagcagagatttttgtctgg

SEQ ID NO: 44882 - DNA, 122 bp, Homo sapiens
gcacttccagaggcacaaggagaagtacccccacatccagatgaacccttacccggtccccgagtacctggacaacgtgcccacctgctcgggcatcccctacggcatgtcgctgccccccg

SEQ ID NO: 44883 - DNA, 122 bp, Homo sapiens
gaggaagttatttcatactatgagcaaattcattttcattaagtatctgttgtaaccaaacgttgtttcttagcttcttagctctgtaatatggcacaataatctgacttactgaagccact

SEQ ID NO: 44884 - DNA, 122 bp, Homo sapiens
gcccaggctccgccaggttggatatcggagtcccagagcccatacccggtccagtcccctcgctgcctgccgtccccacagggcctgtaacccgggcaatgctgacccatgatgccctgccc

SEQ ID NO: 44885 - DNA, 122 bp, Homo sapiens
ttcattcttcatgatggagctcaagtctccttcataaaggcaccaaagaccactcctcaccgatttgtctcaccactggagcctgtgcatgcccagatcccagcatttcccacttgtggttt

SEQ ID NO: 44886 - DNA, 122 bp, Homo sapiens
gggcgtcgtcctgttcctgcagtggcacatgcagttgtgggagagccagtgcccccacgccgtgtcatgcagcctgtttgtgagtgtccgcgtaacctttaattctgagctgattttgcttt

SEQ ID NO: 44887 - DNA, 122 bp, Homo sapiens
ttcttggggggacgtacccgagggctcgaggctcccacttccctgcttcgatggagaaggcgaggtggtccagcaggtgccgtaggtccctgacccagctgaccaccaccctgggccagctt

SEQ ID NO: 44888 - DNA, 122 bp, Homo sapiens
gtctctacccggctggtgtctgctttggctgttcctgccctgcgaacactgtccccggagcgggaccagactactggcctctgagcatcgggccaagtccagctactgaacctgctccgctc

SEQ ID NO: 44889 - DNA, 122 bp, Homo sapiens
ctgagcggcccgagaggcgcagcgctcagagtggccttgatggaagaacctggccctcggcgggaacgattttcttttgctttacctcttctggatcagccgttttccacctgacttgagca

SEQ ID NO: 44890 - DNA, 122 bp, Homo sapiens
ggacagacggggtcagggaggccccaccatggcttgtcgagggcacgggcacctgcatggcggcgctctccctgcctcccctgccgggctgcaagcctgaggtctgtgctgccagacgggga

SEQ ID NO: 44891 - DNA, 122 bp, Homo sapiens
gggtgggcactcgatggctcgagtttctctgaccagctcgagggctctgacgcttggcagcgaaatgccagattgtttgggaagatctaaaaaaagctcaacacagatgttagcaaggctgt

SEQ ID NO: 44892 - DNA, 122 bp, Homo sapiens
cacatgatacacttgttcatccctattctctatcttcacacatatgcatatcagtccttccgtggctgctatattcttgtggtgagatccaaaccagctgcagtcttgctctcccagtgcat

SEQ ID NO: 44893 - DNA, 122 bp, Homo sapiens
tcacactgggatactcgaggaggaggcctggggcctgcattcaattccctaagagggacccgcgctggccgctgcaggcgggtggagaacgggcgtctgagtctttggctttcgtaccggaa

SEQ ID NO: 44894 - DNA, 122 bp, Homo sapiens
ctggggtgtgacttaacctgaaccccaaggagtggagtgtgtgcctgcctgtgcaagtcccgggagggaggcccagggcttgagtgagtttgtttgcactgagattggtgccatcaacctca

SEQ ID NO: 44895 - DNA, 122 bp, Homo sapiens
acagcctgagacttgtctttaaaaaagaaacacacacacacacatacacacacacacacacgatacgagttctttcatcttgcaagaaagaatcatgcggatgtgcgcggagccgagggacc

SEQ ID NO: 44896 - DNA, 122 bp, Homo sapiens
ttccccgttttcaggcatgcagcatgcaggccccactcctgccgctggacttacagtgaacggagccaggaaagcgaatctgccttgacttgtcctggattctgcaggaaggccccacctga

SEQ ID NO: 44897 - DNA, 122 bp, Homo sapiens
tgtgcgttctggctctggaaagcaagtctccaggcatttgggctcagaattgctgggccccgagtttgggcgggggtggtccttctgggggtcaggccttgagcagcttgcactggtggcag

SEQ ID NO: 44898 - DNA, 122 bp, Homo sapiens
tgagtccccccaggaaacttgctcacactggcagacgccccgtggctcctgtctgattcacgtccaggttatgcctgcctgaccatcgctctggtgttgggagcctgccctctgtcccccac

SEQ ID NO: 44899 - DNA, 122 bp, Homo sapiens
ggggcgcctcaggggaggcaggacagtcccaccccacacaagggagcggggtctgagccacgagtccccggcccagggtgcccctaacagggcgatgtcacccagtggggagggagcctgag

SEQ ID NO: 44900 - DNA, 122 bp, Homo sapiens
tgcccaagcaatgtcccggtatctctgtgaaaggttggctgcctggtgtgactgagagaccggagatttggccctggaaggtcaagtgtggtggtctttttcttttttccactttttaacct

SEQ ID NO: 44901 - DNA, 122 bp, Homo sapiens
ctggcacgcacggagccctttcatcaccagcgcagaaatctaattagtgtgggattaagccggccacaaaccagcgagccgggaaggctccggcaagggcagatgaagccccggggcgagga

SEQ ID NO: 44902 - DNA, 122 bp, Homo sapiens
tgacagcactgtgaagtaagtactgtactgttattatctcatttttacagatgaggaaaccgaagcacaagtgacttcgtaacttgcccaagggcatgcagatactaagtgctggagctggg

SEQ ID NO: 44903 - DNA, 122 bp, Homo sapiens
tcagacagcctggggttcgcgttcccttccagctcagcggtctttggagctcctccttcccggagttctgatttctaaagggctatccagagttctggctcaggcttgaatgctgaagattg

SEQ ID NO: 44904 - DNA, 122 bp, Homo sapiens
cccgcccccgcccgccctcccccaccgcgcgcgctccgcccgccccggagcctcgccctccgccacgatgagcaaatgagcgcgagcgagggcatgaaatttaaattccactcaggggagaa

SEQ ID NO: 44905 - DNA, 122 bp, Homo sapiens
gggaacatgtgaggttttagagggtcaggcaagtcaagggcaaacgccccgtactccccccggggacatgagcactccccacctactggggttgggctcagggaggccaggacattatcccc

SEQ ID NO: 44906 - DNA, 122 bp, Homo sapiens
ttcagcctcagcagggattagctgaggctgctaagtggcctccagctttctcctgtgctccggagaaggggggagggaagggcgaggggtggggaaacagcaccagcggtgtgtgcgtatgg

SEQ ID NO: 44907 - DNA, 122 bp, Homo sapiens
ctcccggatagctgaggggcgcgagggcgcctccagtctcccacctgccctcccgcgccgcggactaggctgccagtctaccccaccgggacgtctgcccccgcatgcaggagggggtgtgt

SEQ ID NO: 44908 - DNA, 122 bp, Homo sapiens
gggctggagtccagcccctgtttcctctgcagcaccccccagtggtggcagctcactccccggcagcctatgcagctggggctccccacagcgggtcctggaggcatgccacctgctcaccc

SEQ ID NO: 44909 - DNA, 122 bp, Homo sapiens
tgcaggttctttatcttcaagttcgaaatgatatcatccctacctatctaactgggtcgccgtgaagttcatatgaatcaaaggtatataactgctttgaaaagtacaatttcataaataga

SEQ ID NO: 44910 - DNA, 122 bp, Homo sapiens
tcaaattgactaaaataagggccatagtcatacttacgatattgttcttctggaactattcgctaatagccatttctcataaattggctttagaatatacctctaaacaacatgatagtgac

SEQ ID NO: 44911 - DNA, 122 bp, Homo sapiens
acctcccagggtctagcggatggcggggcaggtgggggacggcacgaaaaacagcagacacgatttcagaccgctggtggcggctgagctcaggtgggcctcacctggagagcctggacggt

SEQ ID NO: 44912 - DNA, 122 bp, Homo sapiens
cctgtgccttgagaacttcgggactgtctagaactgcccagtcccctcatcaaaggtggccgagagattttaaagcaggaatgaggctgagttctctgcggccggagcctcagttttcgact

SEQ ID NO: 44913 - DNA, 122 bp, Homo sapiens
gggctagggtcaccctgccgtgacacgcagggacaagccaaacactcccgcctccgggatcgaacggaatgaaccagagtgattaactacgagaatcaccaggcgctcattgggctgatcag

SEQ ID NO: 44914 - DNA, 122 bp, Homo sapiens
actcctcattgccagcacttctcacatcaagcacccggtccaccacaaatatgcacatctcgtcacatgccggtgacattacatgccctccagtgggtaagctttcttcactttgtctaaat

SEQ ID NO: 44915 - DNA, 122 bp, Homo sapiens
acgtgggccgcttctccacgcgtcgctcctccgcgcgccactagcagtatgcgccgcgcccgcctccgcacgcctctttaaccagcgcccggcgcgctctgcccccttgctccgggctccga

SEQ ID NO: 44916 - DNA, 122 bp, Homo sapiens
tctgttctctaccccagaggttctacgtggcttcctcccggcagctgaagcgcctcgagtcggtcagccgctccccggtctattcccatttcaacgagaccttgctgggggtcagcgtcatt

SEQ ID NO: 44917 - DNA, 122 bp, Homo sapiens
cactatttgaatccttgaaacaatcctatgatgtactattaatattccaattttacagaacgaggatactgatgcatagagaggtcgtgactccaaacccctactcttactgtattacacct

SEQ ID NO: 44918 - DNA, 122 bp, Homo sapiens
tgtcctgccgctgcttgcgcagcggcccttgtttcttcttacccgttgttaggggcgcagcgtcaggtgttcagctcccctgggaccactggtcccttcattagtgacgtatttcatcatca

SEQ ID NO: 44919 - DNA, 122 bp, Homo sapiens
gcgacgctgggtttctgagattgcagcctctgcctgctgcctttctgctgggatggggaacggctgtccctcccttcagagctagaaacaaggccagccaggatgttgggggcggcatttgg

SEQ ID NO: 44920 - DNA, 122 bp, Homo sapiens
gctccccggccgccccgagctgtctttttacggctctttccccaggaaatggagcgagaacgtcttcttggataacgagctgctgacctccaagatcctgtctgtgctgcggccgcagtcgg

SEQ ID NO: 44921 - DNA, 122 bp, Homo sapiens
aagagtcaggaggccccgcccacctgtcatttacctgaatacctgcaagcaggtaggtggcgtctctttgtggacaaataaatcagttagagcaatttgccaggtggaatttactttctttc

SEQ ID NO: 44922 - DNA, 122 bp, Homo sapiens
gggtgcgaattccgagtggaagtgtattctcttctctcctccagtgtttctgcgatgttacgttagaagtactgtaggccgggtgcggtggctcacgcctgtaatcctaacactttgggagg

SEQ ID NO: 44923 - DNA, 122 bp, Homo sapiens
cccaggtagctggctgatcgcctgggaatggtgccatatcaagggcttggtgttggtctccgctgctggcagattgggcagtcagcagtgtccggagccagttaggccttggtgaatgggag

SEQ ID NO: 44924 - DNA, 122 bp, Homo sapiens
gtcccagacagggagcgtcgggcgcagcggcgggctgggctggaggtggataaaatcttacgtccatttcactctcacatcaagcaactccttttctttttccttttttaaaaaaaagtgtt

SEQ ID NO: 44925 - DNA, 122 bp, Homo sapiens
ctcgtctaaagcacctgcatctttctctggccattttactaatataaccggagtcttactcgtagctcattaactttaggcctcactgagggaacctgggcactcaggtgttcacccatctc

SEQ ID NO: 44926 - DNA, 122 bp, Homo sapiens
ggtcaccctcgcgaccggggcggtcattgccgtattccgtcctgagctgccgctcccccacgatcctcccaccaatcccgggagggccgcgacgtcccttgccgcttgggtggcgccagcta

SEQ ID NO: 44927 - DNA, 122 bp, Homo sapiens
ccgggctggtctctctgggattggagagaaaggtggcggagggcggcgggggtggggggtcgggtgggcaagaacccactatgggacacatctcggtgcctgtacatagaggggtgagggct

SEQ ID NO: 44928 - DNA, 122 bp, Homo sapiens
cctctgcaggcccaaatcgtcctgaagtcggcctctccaggcccagctccagcctcccggcggcctctgcaggcctaagtcgtcctcaagtcggcctggaaatgggcctggaagagctgcaa

SEQ ID NO: 44929 - DNA, 122 bp, Homo sapiens
cgctcgcccagccccagcacgcagccctgggagcatgtgaatgccatccaggaggcccggcgtctcctgaacctgagtagagacactgctgctgagatggtaagtgagagaatgtgggcctg

SEQ ID NO: 44930 - DNA, 122 bp, Homo sapiens
gccccttatcaatcatttcctttaatggactcacaggaaaaaatctttgaaagttaagaccgaacagggtgagaatccttttacaaataacaatctggaacccagagaggtctagccactcg

SEQ ID NO: 44931 - DNA, 122 bp, Homo sapiens
tgacactatcgtctccttcgttccaggagcgggcggggcagccatgctcctgtctgggggcgatcctccggcgcaggaatggttcatggtgcagacaaaatcgaagcctcgggtgcagcggc

SEQ ID NO: 44932 - DNA, 122 bp, Homo sapiens
caatattgtatcaatttgagatctaggtttgctggcgtcacataccgtacacgcccagggcgtgaaccaggcctttgcggccaagttctagggggctttggagacccggaacctcccgaatg

SEQ ID NO: 44933 - DNA, 122 bp, Homo sapiens
aaatcccatctctacaaaaaatacaaaaactagtggtacatgcctggagacccagctactcgggaggctgaggtgggaggatggctggaacccacggaggtcgaggctgcagtgaaccttga

SEQ ID NO: 44934 - DNA, 122 bp, Homo sapiens
atagtaaaatgaaaacttctgctcttcaaaggacacttttaagaagacataaaggcaaaacgcggactgggataaaatattaacagtatatattacatatgtaatttacttgtaacatatac

SEQ ID NO: 44935 - DNA, 122 bp, Homo sapiens
tccaaatccagtacattacctactggcatttttcgtggtgcttggggaggagacagtcgacgcaggcaggagtttctgggcttcgctcaccctgaaagagaggagactcagttcttttcaag

SEQ ID NO: 44936 - DNA, 122 bp, Homo sapiens
caatcaccaccacccccacggtcccccaggaggtctctttgaagattttgcttgctaggacggtgctgtgactgaaaggacccaggagtctgggacccctcctgggatccccagcacattct

SEQ ID NO: 44937 - DNA, 122 bp, Homo sapiens
agcctaccatgggaacttggaagccctagagataatctgcagtagagggtaagttcaacccgatggtttctgttggaaacagtgttcatggtaggtttttgcagacagcagcaagaggcagg

SEQ ID NO: 44938 - DNA, 122 bp, Homo sapiens
acgcttggtatgtgcaggtcttcccagcacacacaccagcagctctaggaagagctttctcggaagggccctggcttgccctgacgatgccttacggttccaggatgcacagaaagcaaaat

SEQ ID NO: 44939 - DNA, 122 bp, Homo sapiens
cagcccccctcggcggccgcaccgacaccgcaccccaagtcctaccccggggcctggcggcgctcctcgccgggatgccctagctgtgccgcaagctccccacgcccctctgcgtccttttt

SEQ ID NO: 44940 - DNA, 122 bp, Homo sapiens
acagcaccgggcagtcgtccatggtccgggactgggtcatgctgtccctctccaacttcacgcagagggccccggtcgccatggccacgtggagcctctcctgcttctttgtcagcgcgtcc

SEQ ID NO: 44941 - DNA, 122 bp, Homo sapiens
gggagctgccaggtgagcggggggccccaggtgcagggtgtgaggaccccagtacatgggcgcgggggcttgggtaccgggcgcagggaaccgggtgcggagcgctgggacccgggtgaggg

SEQ ID NO: 44942 - DNA, 122 bp, Homo sapiens
cagcctcggcagaggcccccgcacttcgcgaaccccagcaatggccccttccagacgccacgtccagctaccgcgcgctcacacctgcagggccccacaagaggcctcccagtgtgcgcggg

SEQ ID NO: 44943 - DNA, 122 bp, Homo sapiens
tcggcccgccatgctgctatccgtgccgctgctgctcggcctcctcggcctggccgtcgccgagcctgccgtctacttcaaggagcagtttctggacggaggtaacgcctggtcccgcctcg

SEQ ID NO: 44944 - DNA, 122 bp, Homo sapiens
gtcggtcgggcaagggaatgggctggttagtggccaaggagccggggcccaggagaggcgcggggggtagatgggtggtaagactgggatgtggagaggagccagaggccccagcggctgtt

SEQ ID NO: 44945 - DNA, 122 bp, Homo sapiens
aggaaggcggccctggatccagccgtggcagcagggggtgggtccggcagcccatgtccccgcgtggaggtcccgggaggtctggccccctgcagggcacccatgctggggcagtggatccc

SEQ ID NO: 44946 - DNA, 122 bp, Homo sapiens
acatgtccacctgcacatatagcactttttaaaacatgaagaaaagcaaataagaaacaacgcaattagttcaagaatgcttcagtcattaggtgtgatcatgaaggggtgagatttttaat

SEQ ID NO: 44947 - DNA, 122 bp, Homo sapiens
cacttccccaagtgaaggagcagtgatgtttcacagcccagaggggatgaaagggcttagcgatgtgataagccaaaccatggttcagctccattctctagctgtgtgacctgggcaaacac

SEQ ID NO: 44948 - DNA, 122 bp, Homo sapiens
agcgcccctaacccgccgccagctattggacccgggatggcgcccctaacaccctcccctcgccgctgcagtgtagaaacccaatagcgtcccgaacccgtccccgcctcagacgttgcagc

SEQ ID NO: 44949 - DNA, 122 bp, Homo sapiens
gaaaggggactttgggttggggattcatggggggagcccatctggagcttgtcaggggagcgagcgcggggacctggactgggctgagcatggagtgaggaggacgagagcagagagacccc

SEQ ID NO: 44950 - DNA, 122 bp, Homo sapiens
cccaagctcgtggctgaaaacaggactgacgacggaccaagtttccacaggtcggctgagcggactgtcttctggcctcacctgggctcattctggcagctgccacccaccagcaggtcagc

SEQ ID NO: 44951 - DNA, 122 bp, Homo sapiens
gccatgtgtttacgcgactggagcaagcggacgccggccccgctccgtcattgcaggccacgcctccactgaaccagggccacgcccccgagatgacggcgaagctcgcacgtgcgcagccc

SEQ ID NO: 44952 - DNA, 122 bp, Homo sapiens
tcagactcctcccccttcactgcagcccgggcaatactcgggcctagctcctgagagcggcgccgttggcttacgtagcagcacgtgattggccaccgctccctggcaggccgggattggtg

SEQ ID NO: 44953 - DNA, 122 bp, Homo sapiens
acagtccgggtggacccaaagctccgtggcggtgctgaactttagggcagccactagccacggacttaagcggcaattgagctcctcaaagtgggtgagtgcaaatcaaatgtgcgctaaat

SEQ ID NO: 44954 - DNA, 122 bp, Homo sapiens
tggacactgaaaaaggattttaccaagaaactaaaatgacagatgactaacaagtcttaccgtaccttagcaccacattacagtcctccagaaacttggcaacaatcttgtgacagaaaagt

SEQ ID NO: 44955 - DNA, 122 bp, Homo sapiens
tccactaagttggtaaaaagaaaagttaaaaagacatatttgttatccctataggattttcgtgagcatcaaactagatgacatgtgagacaatttcaattcttaagggccttacacgtttt

SEQ ID NO: 44956 - DNA, 122 bp, Homo sapiens
cccggcccggcctcgccccctccccggcatggcgggagcgcgtcgcgcgtgcccgccgctcgggctgactcaggcttcagctgctgcatttgtgagtcatcgcgcgctctggggcgggggcg

SEQ ID NO: 44957 - DNA, 122 bp, Homo sapiens
atcatagcgctttcttgtcggttaagggtgtcattcccataagaagctggacctggggaccgccagggaaagcctgagcgtggcagcaaatggggaggcctggagggatcgcagcagtcttg

SEQ ID NO: 44958 - DNA, 122 bp, Homo sapiens
gagttagcttttgtgaactttagaaagctgagtgtcatgcctcagccccttgatttcacacgcgattgcttagggggaggctaagttaaaaaaaaaaaaaaggaaattgagttcttaaaaga

SEQ ID NO: 44959 - DNA, 122 bp, Homo sapiens
aaccttaccaagcctcagcttgcttagctgtaaaatggggcgataatcgcccctgcctcacggggtgctgaggcagtgacgtagcgcttggaaccagcactgctagcagtttattcccctgc

SEQ ID NO: 44960 - DNA, 122 bp, Homo sapiens
ggctaacaaaagcccccagtgaacaaagtccccagtgaaatgcggtgcaaatctctatgtcgctactgatgcagctgtagggtgggggactggaggtttgctcggcatcctcccatttttga

SEQ ID NO: 44961 - DNA, 122 bp, Homo sapiens
tacaaattaggaagcaggccccgagctcttcacaggcacggggaggaagccagagtggtgcggaaggcagtaacctccacctagccaggctgtggctgccaggcctggcaggcctggggtca

SEQ ID NO: 44962 - DNA, 122 bp, Homo sapiens
ctttagtgagataccacgcacgcacgcacgcacgcacgcacgcacgcacgcacgcacgcacgctcttacgctgttgcggacagcagcgccctgcctactggcccatcagggggttgcgtgcg

SEQ ID NO: 44963 - DNA, 122 bp, Homo sapiens
acctcaggtgatctgcccgctttggcctcccaaagtgctgggattacaggcatgagccatcgcacatgggctaggtcgttatcttttatgtgtgtttgtgtctttgtcacacatgcctggca

SEQ ID NO: 44964 - DNA, 122 bp, Homo sapiens
gggccgtcgctcagctgcacccacagaggggtcggcggcgcggcaagttaggctgcggggcgccgggagaaggggctgcgggtgacgggtgcgctgggacggacctggggagctcgtcgtga

SEQ ID NO: 44965 - DNA, 122 bp, Homo sapiens
gcacgggcattctggagaccttaggagcctgctctgtccaaacgtctgtgctgggaagatcgcagactctgctctgaggagagaagacaagccctgcctcccttagttcaagaggaagtggc

SEQ ID NO: 44966 - DNA, 122 bp, Homo sapiens
ctccaccaaccccactcactttgtaacttcatcactgacccggccaataaggaccctgtgcgtcttctccccctcctaagcccttgtgtccttaaaaataatcagtccgaacccatgtagtg

SEQ ID NO: 44967 - DNA, 122 bp, Homo sapiens
cactcccccatacctcatctcagagacctcccaggtccttcagcctcgctgaaggaaggccgagcctctgtggggccctgagatgttagggctgagcagattctaaagcaggactctcagtc

SEQ ID NO: 44968 - DNA, 122 bp, Homo sapiens
cctcccgcagcagcctgccaactgcagcgcaacaaccaaccctctcattgggtgagaacacgctctcaacaacagcctcccttattggctgcagtatgccggcagccccgccctgtgtgcgg

SEQ ID NO: 44969 - DNA, 122 bp, Homo sapiens
agctttcctgagaggaggaggtgttcaaagctaaatgaaagccaggaagggaaacacagacgcctttttaaaaggacagtcatccctctgggtgcacatctattcaaaacacaggaagaggt

SEQ ID NO: 44970 - DNA, 122 bp, Homo sapiens
aaaagtcagcccaccttcatggcccagataaagtgggcaataattcctctctaggtcctccgcacattaggtgccagtctctcaagtctcttcctagacaatttctagcagccaggaaacat

SEQ ID NO: 44971 - DNA, 122 bp, Homo sapiens
ggctgaactaagttgtccatagctagtgagtggcagaggcagggtttcaatgggacagtccgtggcggagcacactggctccgccgccagcccccctgcggtacccatccgcgctcgccgcc

SEQ ID NO: 44972 - DNA, 122 bp, Homo sapiens
tgctccagagcgtgcccgtacgccgcggccagcggcatcaggtcctcgggcgggaagccccggaagctgtacttctcgtactgcgccccggcgctgcccagcagcaaccacagcagccccca

SEQ ID NO: 44973 - DNA, 122 bp, Homo sapiens
ggcagagaccctgtccctgacggcagcgggcgtgcgaatcccaggcttgtcagaggggggcgctggaggctggggtcgctgggcccgcctcgggctggcagacgtccagactcacccagggt

SEQ ID NO: 44974 - DNA, 122 bp, Homo sapiens
gggcagcctcgttgtggctccttgggctctgttggcggcggcgctagcttcggagtctcccgcgcgcacctcagccgcctcctagcggcgcggcgctcgctcctacggtaagagcggcatca

SEQ ID NO: 44975 - DNA, 122 bp, Homo sapiens
catttgttaaagagaatttaacagcaagaggaaataagaaccaatgataccaaggataaacgcagtccttaactcccctatcactgaattcttagaaatatgggggtaggggtggtggtggt

SEQ ID NO: 44976 - DNA, 122 bp, Homo sapiens
cccaaagctggagcgcagggctctaggccggccccgccccggggctgggggcttcccgcccgtttgtctcattttaacttttgggggcagctctgtcccgaatggtgagtggtccagactct

SEQ ID NO: 44977 - DNA, 122 bp, Homo sapiens
tcgagaaattaccacatttgggtttttctaccaacttgcttaggattttatccgaggtaacgaccccaggatcacaattttgtagctgaccgaagcacggcgagaaaattcctccgcaagaa

SEQ ID NO: 44978 - DNA, 122 bp, Homo sapiens
caaatatcataagcttgtccttctctcctactgggatataaattctcctaagtatctcatcgaaaaggctcctgggacgaaagtcgatgggggcaaatcttggagggaaatttcgtgactgt

SEQ ID NO: 44979 - DNA, 122 bp, Homo sapiens
cagtggtgatggtcacaggggtgatggtagtggtagtgatggcagtgacgaccttgaagacgtgagttgaccgggagcattgatccaacaggcagccagatggtccaacttctggtttctgg

SEQ ID NO: 44980 - DNA, 122 bp, Homo sapiens
tcctcccccgagttggtttggggctgcctcctgtcccccttggcaggcaggtgtagagggcgcctgggcctgggatgtggccctttggctggtgcccacgctgtcctccgggattggagaga

SEQ ID NO: 44981 - DNA, 122 bp, Homo sapiens
tcggccagtgagagcgcagaaaccgtggcacgggcgctcccggaactggcgattgcaaagcgcgagggctggaactcagacccagaggggcggtccctgttgcaagtcatctcccgaaaggg

SEQ ID NO: 44982 - DNA, 122 bp, Homo sapiens
ggctggaagtcgagggcatcgccagggggccgagttgggcccgggtgtggagaacgaagccgaacgctgggctctggattctcctccagagcgctccgccggcctaagcacggccgccccac

SEQ ID NO: 44983 - DNA, 122 bp, Homo sapiens
agtcggcggcgagcagtttctgatcaataacaaagctgccaatagatgcggctctccgggcgcccctctcccccgccccaccccccacccccgaagggggagggggaagaaacaaggcgagg

SEQ ID NO: 44984 - DNA, 122 bp, Homo sapiens
tcactgtcgtcaccatcttttatggcacactatttttcatgtacctgcagcaaccaaaagcggggaattcatggaagccaaacaaagtagtctctgtgttttatagtcttgtaattcccatg

SEQ ID NO: 44985 - DNA, 122 bp, Homo sapiens
cctttaggtttccagactggcttgctctttggctgaccttcaattccctctccaggactccgcaccactcccctacacccagagcattctcttcccctcatctcttggggctgttcctggtt

SEQ ID NO: 44986 - DNA, 122 bp, Homo sapiens
aaaatgttcaacatcacaagcatcagggaaacgcaaattaaaacgtgagataccaccttacgcctgtaagaatggccattacaaaaaagtaaaaaaacaatagatgttggcctggatgtgag

SEQ ID NO: 44987 - DNA, 122 bp, Homo sapiens
gggagacgggctggggctgcctatcttattacaggtagcggcaagcatggccagaggagtcgatcccaacctcggttcttcctgcgaggaggagaggagaaggagtgggggaggggaggtgg

SEQ ID NO: 44988 - DNA, 122 bp, Homo sapiens
aggagggccgcccttctgctgcccgcaagacatacaggtgcagagctggggacatggcgtcgggacgtggcgcggggcggctggctgggttaaaccagagatcagatggcaaatgggagggc

SEQ ID NO: 44989 - DNA, 122 bp, Homo sapiens
tgccagtatgtctctcacacgtttcctagtacaggtaaaacagtgttacttgccaccaaccgactcatttatttcgtaggcatttactatttgtattttctgtacccacccctgtgctgggg

SEQ ID NO: 44990 - DNA, 122 bp, Homo sapiens
acttttttcatgattctgggttcctgcatcatctcaggtaaataaatcatttaacctctccgaacttcagtttcttatccataaagtgagaataaaatagtcacctccatagagtgaagttt

SEQ ID NO: 44991 - DNA, 122 bp, Homo sapiens
agttctctgggacaggaggaagggcccagggcagggtgggcacccttgccacataggggacgggacagaagtcttttaggccctgacatcctctggtctctgaatgacatcctgtggctgct

SEQ ID NO: 44992 - DNA, 122 bp, Homo sapiens
cattcagacaatagagatgattaccaaggcgctggcttgagaagcaatatataccgacaccggaggggaaagggctatttatttagaaaagttcaccatcaaatcactagacaggataaaca

SEQ ID NO: 44993 - DNA, 122 bp, Homo sapiens
gtcggggcgggcgtcactagctatgtagggggttgtgggggcgggcgtcccgggtggtgacggggatggtccttgggttgggcgtccccccgcggtaaggaggtagtctggccgtgcgcccc

SEQ ID NO: 44994 - DNA, 122 bp, Homo sapiens
tctacatagatgtatacacgcaaaagaaccggtgtgtggcctctgagcccacggtggatacgcaggactgggcggaacggaatccctactctcggggtctccaccctccgggaaggacttgt

SEQ ID NO: 44995 - DNA, 122 bp, Homo sapiens
ggcagaagctcgagcagcttcgaggatgtcgggcctgggggcggggccgcgaggcagcgacgtcgcgcggggcgcggccctgacgcagcgtgacgcaccggcgccgcggcgggtacgggctc

SEQ ID NO: 44996 - DNA, 122 bp, Homo sapiens
aaggtactgtttgtgacaagtttcgattatagtttccatttataggtcaggaatctggggcgtagtatttaggtaatttaattaaggtcacatgcctagtaagtgacatagccagcatttga

SEQ ID NO: 44997 - DNA, 122 bp, Homo sapiens
tgtgtgggtctgtgtgtgagcacgtgtgtgtgctctagtgcatgcgtgtgcacatgtgcacgtgagtgcgtatctgcctctgtggggtgggtgtgccgctgtatgtccatgagcacgtgtgt

SEQ ID NO: 44998 - DNA, 122 bp, Homo sapiens
cctggcgagaattcgagctcggggcaggctggcagtgctgggaggacctggcacaccctccgcagctgctggcctgggtgctaagcccctcactgcctggggccgacggcgccggctggccc

SEQ ID NO: 44999 - DNA, 122 bp, Homo sapiens
gcatataatggattcttaccttaccggcctggaaggctgtgggaagggcatcctgggaaccggcttctggaagggaagtgtgggatggggcggaactgagtggactgagcggagggcaggcc

SEQ ID NO: 45000 - DNA, 122 bp, Homo sapiens
ccgcgtgcagtttccggcctggagcctgagcccctcagaggcccgggtccctgcccactccggtcttagagatgctcttgggggggctctcagcccatgtttatagggatccagaaatgcag

SEQ ID NO: 45001 - DNA, 122 bp, Homo sapiens
tgcaggacgccgtcgcacaaggacgggcgctgtagtctttccttctggattctgcagtgacgaatgaaggcgcgggctcagcccctgagagcgcagcaccgtcgccctaagctaacccacct

SEQ ID NO: 45002 - DNA, 122 bp, Homo sapiens
tccaggctgatgctgatggtcacaggcacggtggcatcagggagccgggccagcaggcggcgtgaggcggggccagcagctcactgcaagggcattttccacctgatcctggtgtgccccac

SEQ ID NO: 45003 - DNA, 122 bp, Homo sapiens
ttatttaaaagaacaagttaatcttccctttggggggcagcaggggaactgaaaaccacacgatcctcttaaatagttctatgcccggccctcccttgttgacaggtctgctttcataattt

SEQ ID NO: 45004 - DNA, 122 bp, Homo sapiens
gcggcggcgccaactgttttcaaacagtggcggacaaacagggcttggggctggcccgcacgctgcctgatcgtttccgcccgccgctccacctccccgcgggccccgcaccccgagacctc

SEQ ID NO: 45005 - DNA, 122 bp, Homo sapiens
actctggcgcgccagaccgcagcgccaggcgccctctgccgccgggaagccgaatcctcccgtcctaaccctaactcgctggctgcccccgcccgggcctcggctcccgccccctcttcccc

SEQ ID NO: 45006 - DNA, 122 bp, Homo sapiens
cagttcttgcctcctcagaagaaataattcaactgaggggtataaggcagagtgagagaccgagacaagatttagagcaggaatgaaagtaaagaacacttggaaaagtgccaagcaggtga

SEQ ID NO: 45007 - DNA, 122 bp, Homo sapiens
atctccctcagaactgcgcgagaagcgagaccttagaaggcagggcttcccgcgaaggaccggaaaggagcgcctactaaggacgccgtcgaggtccggggcgcctcaactctatagctcta

SEQ ID NO: 45008 - DNA, 122 bp, Homo sapiens
ctacggacaggtgggagcagtcagacagcctgagagagggagaccagaacgcaaagagagcgagagcattaagtaggcagggagaggcacacagaaagatagacagcaacactcgcgtgctc

SEQ ID NO: 45009 - DNA, 122 bp, Homo sapiens
gttacttcttttttatttgcaacggaagtgatcgggtgttaagtaaaaacgcaaggggggcgggagataggaccaaagccttggggcgcagcctgccccacccccaaattccttgaggctac

SEQ ID NO: 45010 - DNA, 122 bp, Homo sapiens
gcgaggggcttggcctggctgaaagccacattattctcgaaaacaaccgtgggaagcacacgctgagctcccggggcccctagagtatgcaaagaggccggccctgcgagactaaataagtc

SEQ ID NO: 45011 - DNA, 122 bp, Homo sapiens
gggaaataaagataataatcaggaagctgcccggcactggagtgctgagtcggcaggagccgctgccgggacttgggagagtgtggtgctcactggagtctccgggccagaagcagcgacgc

SEQ ID NO: 45012 - DNA, 122 bp, Homo sapiens
gggactgcaggtctgggtcctctgtgtgccccggggccaggccaaaaccaggctggaacccgccggcagggcccccgaggcgcctctgcctgctctctccgttcttgccggcggcagcgatt

SEQ ID NO: 45013 - DNA, 122 bp, Homo sapiens
tcccctctgggcctctgcattcaccgctgccgctgcctggaaagctctccccgtccccaccggtgatgtcccctaggaaagctccccgtcccccggggtgatgtcccctaggaaagctcccc

SEQ ID NO: 45014 - DNA, 122 bp, Homo sapiens
aggcaagcacaaagagtagctgccctcaattagggctagtaaagaattgttcccactgcacggggttttccaactgcaatctttgggcttgtgaagcattttctctgcatctgttgttgatg

SEQ ID NO: 45015 - DNA, 122 bp, Homo sapiens
ttcacaaagtttgagaagtaccatggtaacaagaatggctgcagcaatctcagacaacagcgccaaggtttgcaagtgggtaggaatgaaagctgctccacagtaattggcctgagaccgct

SEQ ID NO: 45016 - DNA, 122 bp, Homo sapiens
tggtaacaacgacactttccctagaggggccatgaagatgaaatgaaataataagcatgacggatggtcctggtgctagcctcacagtgagtgctcaagaaatggcagcaatttgcagaaaa

SEQ ID NO: 45017 - DNA, 122 bp, Homo sapiens
tgccgtgtggaagtcctttctcctcggattctgatctagggacggcccacaagctcctggcgaggatgaactgagttcagtgatgtcaagctcggcacagtgcctgtccacaatgagcccaa

SEQ ID NO: 45018 - DNA, 122 bp, Homo sapiens
gactgcgctcaaggtgtgggcagggctggctccttctgtggctgtgggaaggacctgtcccgggtccctctccttggcttgtagatggctgtcttctccctgtgtctcttcacatcgtcttc

SEQ ID NO: 45019 - DNA, 122 bp, Homo sapiens
tgtagccgcgtgtgggaggacgcacgggcctgcttcaaagctttgggataacagcgcctccgggggataatgaatgcggagcctccgttttcagtcgacttcagatgtgtctccactttttt

SEQ ID NO: 45020 - DNA, 122 bp, Homo sapiens
tgcttgccattgttcaaagttctgaaatcgtcacctggctgccttctgtcaatattcttgcgtagagattgtagtccaatgaaaaccttgtactgagtgaaagaagatgtgtttgagtttca

SEQ ID NO: 45021 - DNA, 122 bp, Homo sapiens
caaagcagaatgcagaaagcggcagcactgggagcgtgtggggagggacggggcagccggcggaggctgagccaacatgccgtggttcaggcccacacctcgtggaaggcagaaggcgagtg

SEQ ID NO: 45022 - DNA, 122 bp, Homo sapiens
aaaaagaaaagtatgaaacgatgagtacaatgagtagccagccgcctgccccacctaccccgccgttccggactgccgcctgcgccgagcctaggccgcccagcctgactgaaactgccgct

SEQ ID NO: 45023 - DNA, 122 bp, Homo sapiens
cgcaccggctggggcaggaaacacttgcttctggttgtgactgcaaacagcctaaaagaacggactcccgtaaccacgctcctgtgtgcgcacatccaggctcgccctccattgacaaaaag

SEQ ID NO: 45024 - DNA, 122 bp, Homo sapiens
cccccgggggccggcctaggcgccccatggacctgcagttgatggggcctggtgcacgcccggaggatgggccctcaatagcagcatgaacaagtagcccggagccaggagatgcacctgcc

SEQ ID NO: 45025 - DNA, 122 bp, Homo sapiens
cccgccccgcggcctcctccctcctccttgccccgccccctatccctgcgcgccggcggccgttaccatagcgacgtgcacgcagtagccaggcctgacccgctggtcccttgctggcggga

SEQ ID NO: 45026 - DNA, 122 bp, Homo sapiens
ccgctgcccagcgctgggattttaaggaaccttcccttgtgtacttgcgcatgtgggtgccgggtgcccgaggcgctgtcttcaactgaaatgcggaagtgccacatcccactcggcccacc

SEQ ID NO: 45027 - DNA, 122 bp, Homo sapiens
gggcaaagatgctgccttagttcaggtttgtcagaagcagggtctggaatggggcttcagcgagggagtcagggaagcaggggaggggagggagcagctgggcaaggaagtggcttcagagg

SEQ ID NO: 45028 - DNA, 122 bp, Homo sapiens
gagtcctgggctatctgaagctccggtccctggcctgacccagtccggctgagccagaggcgcagcttccgggccggggatgagcgcgaagcctggagatcctaagccctaagtgggacgag

SEQ ID NO: 45029 - DNA, 122 bp, Homo sapiens
cagctcccgatggagtgttctaggtgccaagaaacaagccgctctgggtgataattgtgccggaagaatggcttaggtgagggaccctgtcaagaacacctgtgcacaaatcccaggggctg

SEQ ID NO: 45030 - DNA, 122 bp, Homo sapiens
ctgcaatccagtaatgcctgtccagtatatggcagccagtgagcactcaacaggtgcaatcgttgggccacacactcttgttttaaaatgtgctttatcctcttgacctttttaggttatgc

SEQ ID NO: 45031 - DNA, 122 bp, Homo sapiens
tcttccaactttagactcaaccagatggttctttcatacttttccttactttatagttaacgatgcttgtggggtactttcacaatcagggattgttatgcttcacaggaaactttcatcat

SEQ ID NO: 45032 - DNA, 122 bp, Homo sapiens
aggaagtggaagctgaaggtcctgggagcattaagggctctcccctgctttacatgggggcggcgcttaggaaccttctggaagcctgaaggaggaggggtgaaggaagagcagtcccaggc

SEQ ID NO: 45033 - DNA, 122 bp, Homo sapiens
gcagtcgccaggaagcagcctgggccgaaaggggcgctcagcggtcaccagcaggcgcagcgtagcaccacggagtggctgccgtgcacctcacccggtggctggaatccgccagcgacgca

SEQ ID NO: 45034 - DNA, 122 bp, Homo sapiens
gtggtgcccgaactggctcacacgtggtgagccgggagcgcgcggcccctccccgccacgcgcctcgtgccggccacccggccacgcccccaggactggctccgccccgtgcccctgcacgc

SEQ ID NO: 45035 - DNA, 122 bp, Homo sapiens
catgtacaccccgtgggataaataagcactataaatagcctcagctcagagttttcctcccggagagttgaggttaggactggtctggccttcaaatgagttgtgaagggctttcggaagtt

SEQ ID NO: 45036 - DNA, 122 bp, Homo sapiens
agcacaggagcaggtggacaactacatcttaggaaagggtgcgtaactgtgaactctaaacgtgagctgggtgcctgatgcagtataggaaccacagtaagtcgataatcagtgaggctgga

SEQ ID NO: 45037 - DNA, 122 bp, Homo sapiens
atgggaaactgcactgtacaatggtactataactttggaagagttcaggcttatctctgccgaagttgaggttaggctttctctatcacccagcacttccaacagcaggctgtgcgcgtgga

SEQ ID NO: 45038 - DNA, 122 bp, Homo sapiens
cggcactgaggggtgggatgatggcaaattgaccaaaacgctcagggggtgctagccacgcggcgggtgcagatgtggactccccagccccacgagcttggagtgccattcagccccgctgc

SEQ ID NO: 45039 - DNA, 122 bp, Homo sapiens
aatgagaggatgcacacagggtgcctggcacctgagcagcactcaagagatcgctggctgcggtattattacctggaaaacgaggatgccgatgccagctggcgggccaggccagcttcact

SEQ ID NO: 45040 - DNA, 122 bp, Homo sapiens
cgcaaacaagagtgacccctgttcttggttctgctggctgtgtgcctgcgcccaacctggcgtctggccgactagggcaggagggctgttggagggggctgggagcctgctaggaggctctt

SEQ ID NO: 45041 - DNA, 122 bp, Homo sapiens
ggggatagcgctaaaccattcatgagggatccgcccccataattcaaacatctcctatcccgccccaccaatgtgagagttggaggggacatccaaattgtatcagtggagatccttttttt

SEQ ID NO: 45042 - DNA, 122 bp, Homo sapiens
tcacatcatccactaaatttgtgcagaaagatttggaactatgctgcaggagcatcttaccgacagctgtgcaggaagaccagccaaaacacacaaagcaggagcagctcccaaggccaggt

SEQ ID NO: 45043 - DNA, 122 bp, Homo sapiens
gccttgaacacagttccgtaggtgcctaggggaaggaggtcaggggtcagggtgaggatgcggcactcttccctaagccaggaaatgcctcctgagagaggtgaaggcagcgtctcagtatg

SEQ ID NO: 45044 - DNA, 122 bp, Homo sapiens
caagaggctgggtcaaccagcatctccagaaacctctggcagggctccaggacctgcaggcggagcacctcttccagacctggagtttcaggacagaagatgcagccagggggaggcagacg

SEQ ID NO: 45045 - DNA, 122 bp, Homo sapiens
acagggaaggcagctgggggcctctgagggggattccgcgtgccacaagcccttccggtccgctggggtccgtggcgctgccctccccgccctccctccggccccccagctaggcaggcact

SEQ ID NO: 45046 - DNA, 122 bp, Homo sapiens
cttcacttgctccttcacttcccagttccgcaagaaccgtgggcgacagttatggagaagcgtctgcaggaggctcagctgtacaaggaggaagggaaccagcgctaccgggaagggaagta

SEQ ID NO: 45047 - DNA, 122 bp, Homo sapiens
gctgggtggatgcggggggctcctgggaactgtgttggagccgagcaagcgctagccaggcgcaagcgcgcacagactgtagccatccgaggacacccccgcccccccggcccacccggaga

SEQ ID NO: 45048 - DNA, 122 bp, Homo sapiens
ccagccaatcacgctttcgatcctgccgtgcgagcccgaggcgctgcgaacggtgcctaacgtcagacgtctcgaggctcgcgttccatggaggaagccctcccaatccgaaagcgcccggg

SEQ ID NO: 45049 - DNA, 122 bp, Homo sapiens
acgagggccaccgccttcgtgatcagaagcgggtatgactgggcaccggttggtccactgcggctgttccaagctgcccccacagcctcaccccaggactccaccaggagcacagggaaggg

SEQ ID NO: 45050 - DNA, 122 bp, Homo sapiens
ccctcctgctgtcctcgggactcgggcgcgggaccacgaccgccgcggctcaggaggcttcgccagtgaaaggacaaattggacctgtcccgaaagacaatttataagcgaactgtttgaaa

SEQ ID NO: 45051 - DNA, 122 bp, Homo sapiens
tagacaatcagtttcctaactgctccctagctgctcctagtggctataaccactgtttgtcggcttccagcaataggatcagaaatggagttgggactcgtgggagctgaggtactctaagc

SEQ ID NO: 45052 - DNA, 122 bp, Homo sapiens
tggacaggccgctgcaggttttccatgtggaggtggcagtgaaggacatcaatgacaatccgcccaggttctccagacaagaacaaagattattcattttagagtcaagaatgccagattcg

SEQ ID NO: 45053 - DNA, 122 bp, Homo sapiens
aaccaatgttgtagaaacgatgagaaaataggtggaagagatatgtaacatactagtctgcgggttctcttaaatgtagaggctaacagagattttgagaaagcatgaaatgttatatgtta

SEQ ID NO: 45054 - DNA, 122 bp, Homo sapiens
agacagggatggggctgactgcactggtgggccggctggggggctctttggccccactggcggccttgctggatggagtgtggctgtcactgcccaagcttacttatggggggatcgccctg

SEQ ID NO: 45055 - DNA, 122 bp, Homo sapiens
ttgtgtccagggaacggaggaaccgaccaacaagcaaaggtcagttccttgttcctttcacggaaaacacattctgttccctttatttgtcctctgcaggggacaggaccatgtgcttacgc

SEQ ID NO: 45056 - DNA, 122 bp, Homo sapiens
cctcgtctccaagagaaatacaactgacatcagtaatttacccaaatactctacaggtaacgtgtgccaaatacaaacctgcactaaattagggccagaactctcctctgtgcattctgcct

SEQ ID NO: 45057 - DNA, 122 bp, Homo sapiens
acttgagttaggctctttcaataaggcccaaacacactaccaattaatagcattatgctgcgcttttgatttcaactttggtcccagaacccagaaatgggagcctgtgtctattatctatc

SEQ ID NO: 45058 - DNA, 122 bp, Homo sapiens
tacagttacgagtagactgtgagcccttgcagggtataattcaacctggcattccccgcccgccccagcagtgcctagcacttggcacaaccaggaactatctctgaatgaatgtcccacgt

SEQ ID NO: 45059 - DNA, 122 bp, Homo sapiens
gctatagcgtcattaccataacatgtgacatatgtgccagcatcatgactcatgcatctgcgccactcggaccccgcccctacatgcgatgatgcactctctcccctctccatcgccccata

SEQ ID NO: 45060 - DNA, 122 bp, Homo sapiens
ccgggttcaagggaggcgccctggtcctcgaggaagggtcgcaagcccgcagccccccggcgcccctggccggaagacacaaatgacccgagaagttgcgaggctccccggtggcggggacg

SEQ ID NO: 45061 - DNA, 122 bp, Homo sapiens
ccagtcttgtgccaagctatgtacacaaatacactctttacaaacacagatgtgaaatgccgtgctaagacacaagcgaggcatagagagagattcgcgtgtttagtctagaggctccacac

SEQ ID NO: 45062 - DNA, 122 bp, Homo sapiens
atgcagtttgttctttttacgttgctgtgttgtatttcctggtgtgcagaagccacagtgcgcttatccattctgctcttgaaggacttgagattgttttcagtttgtggctattagaagtc

SEQ ID NO: 45063 - DNA, 122 bp, Homo sapiens
gtgcagtaaagaacatctcagtgcctgccacacagcaagtgctttctctccagataccagcgtgacttctttctgtctcatctcctttagatctttactccactgtgaagccatctttgacc

SEQ ID NO: 45064 - DNA, 122 bp, Homo sapiens
gagccccgaagccagccaatgcttggccagcatggaggctatgattaaacgctaacggggcgcccttggaaagacctcagggctttacaactaaggaagagggctcgatgctgtcaacattt

SEQ ID NO: 45065 - DNA, 122 bp, Homo sapiens
agccttgttgctcacacaaagcctgtttggtggtctcttcacacggatgcgtgtgacgtgcgtgacatttggtaccaaagatccgggacgggagtactccttacagagaccggtcccctgtc

SEQ ID NO: 45066 - DNA, 122 bp, Homo sapiens
gagtgaggaaagtctcatttacaattttgaccctagagctggagtcaagtatttccatttcgtaagttcgagggttctgctcaagaaataggcatgtggccagggtaaagggaaggggcatg

SEQ ID NO: 45067 - DNA, 122 bp, Homo sapiens
tttgcaggcacagccttgatctgagtccaagttacattgaaaagctggacttcatgtccccgtgaaaggcaggagaggcttgcaaagcagtgggatcctggaactcattgacactcccctga

SEQ ID NO: 45068 - DNA, 122 bp, Homo sapiens
aaaaggccagaatggcttgacagaaccagagagcaagttccaattcacgggaggctcaagcgcctgggttttgtacagggctgacccctgctggtaaattctggtagaagcccaggaagcca

SEQ ID NO: 45069 - DNA, 122 bp, Homo sapiens
gctcgcttgcacactcatgttgacgccatggacacacaacatgcaaccaagcactacagccgaaacacacttgtggagctgtgatggagacacactcttgtattaggtgggggggggggggg

SEQ ID NO: 45070 - DNA, 122 bp, Homo sapiens
accattgccagcggggagcatgttgcagctttcccacgcagtggatgagaacgaaggttacgaccattgtgtgggaggcgtctgtgtagcaattgctggaatcactgtgagtagtccgtgtc

SEQ ID NO: 45071 - DNA, 122 bp, Homo sapiens
atgcgctctcctccctggtactctttgtgtctgtgtttccacgtattttcttctggttcacgtttactaggacgacgagagacagcgtgagcgagcacgtcctttgagtcctccttaccctg

SEQ ID NO: 45072 - DNA, 122 bp, Homo sapiens
tctgcgcacatcttttaatcctattaactcagtgaggcaagcattacatcaacttgcctgcgtgttcatagacataggaagaccaagacacagcgggtctatgaaacgtgcccagggttacc

SEQ ID NO: 45073 - DNA, 122 bp, Homo sapiens
agccgctgcagcatcaggttcactgcgtgcacgcacggggctctgggaacagtccgagaccgcccccccccacccccctccgccacctcccccctagataatcagagcaattagctgcaaaa

SEQ ID NO: 45074 - DNA, 122 bp, Homo sapiens
tggtcaaagttgctggtaaacaccagtcacctatacatactccacccagcactcagccagcgtcaggatgtactgggctcatcagaggaccttcatattctatggggtcttggggtatggaa

SEQ ID NO: 45075 - DNA, 122 bp, Homo sapiens
acagcaaccaatcagaatgaacctaatttacctgagccagcatgataagaacatgccctccgtttcagcactaaggaaagtaactttgaaatgaccaacccattctggttctgtgtctgctt

SEQ ID NO: 45076 - DNA, 122 bp, Homo sapiens
gctgcctgctgggagagacagccttggggcgggtggtgtgcacagagctctgtcggccagcgcgggcgggcggggccgttgttgggggcgctgaggcgagtgaggctggagctgggagtggg

SEQ ID NO: 45077 - DNA, 122 bp, Homo sapiens
cctggcagcgtgtccaagtgggtccgactcaacgtcggcggcacctacttcctcaccactcggcagaccctgtgccgggacccgaaatccttcctgtaccgcttatgccaggccgatcccga

SEQ ID NO: 45078 - DNA, 122 bp, Homo sapiens
ccgcggtcccggagcccagcccggcgcgcggagcccgctcaccgagtttcccacagtcaacgtgcaggccccgccgcagcaacagaactctcccacagcagccccggccccgcccctcatac

SEQ ID NO: 45079 - DNA, 122 bp, Homo sapiens
ccttaaatggtaagatggtatggcataggaaccccagccaggacattcagactgtccagccgtcttgggtacatttttccattatctcaccctcaacctgcaaggtgtggaggggactgtgg

SEQ ID NO: 45080 - DNA, 122 bp, Homo sapiens
ggggctgtccgagcgctcctggctgtctccggccggtgggagcgtgcgcaggcgtggctgcgaggtggggccatccttggagcagttgtgctggctcatgaggtcctctatgccatggacgg

SEQ ID NO: 45081 - DNA, 122 bp, Homo sapiens
gccgagggcacccaccccggcggggagaagggccgctggtggtctctgcatcgcctctctcgacccagactcctgtctctgtccgagatgtcccaaagtggccagttattatctgcaacacg

SEQ ID NO: 45082 - DNA, 122 bp, Homo sapiens
caagtattcatgttagtatatatcatttgctcagtcccttcacgggcaggcacggggtggcgttattacccccgttttacacagtggaaactgaggctctaagaagttaattgacccaccgc

SEQ ID NO: 45083 - DNA, 122 bp, Homo sapiens
tcagcatacatttctgctgttttcagctatcacatttgtgtgttttgttgcagcagccaccgtgggaaacgaatacagtggccaagagtgtttggggcaggccctaggccagcgctggagga

SEQ ID NO: 45084 - DNA, 122 bp, Homo sapiens
ctccctgctactttgggttgatgcagggcatttcatggaagatcatgcagtgctgctttgcgaacaggtatttctagcagtcatttggtttatttcccagtaatgtaatcgtggtgtttagg

SEQ ID NO: 45085 - DNA, 122 bp, Homo sapiens
ttccccagaccaggccgcccagacttctccctctcaacaaaagcctccccatcccctacacgggagagtacgctgctgaggaccagcccctgtccggggcagcacataaacagctcttgaac

SEQ ID NO: 45086 - DNA, 122 bp, Homo sapiens
tggcccggcctgagcggtgggatcggggagagtctctttgcaggcctgtgcagctgctcccgagattttctttaaaacatatttgtgtgcgttattgtcaggagaggttccttttctttttt

SEQ ID NO: 45087 - DNA, 122 bp, Homo sapiens
gggccctctgcgccccggaaggcgcccagtcccggtttattgtgagcttacagtacagttcgcaaggtcccggccggtgacggcggcgaggcggcaacgtcgcctgtagcaaacctccgccc

SEQ ID NO: 45088 - DNA, 122 bp, Homo sapiens
ggtgatccgcccgtctcggccttccaaagtgctgggattacaggcgtgagccaccgcgcccggccaaaacattgagggtttttttggcgatttttttttaagctcatcagctatcgttagtg

SEQ ID NO: 45089 - DNA, 122 bp, Homo sapiens
catggttttgtatggttaaagcacagctatttagtagctttacccagaacacaacagttccgtcttctagtgagcccagacttaccaatttggtttggccaaaactcttgaatgcctagctc

SEQ ID NO: 45090 - DNA, 122 bp, Homo sapiens
gggagagaagagattccgttgtgcaaacacctggtctatggtgcttcgtcctcgcagatgcggcaagcgggtccagccaagaataaatgcgaggtgggcagcagcggaatcacttctcactg

SEQ ID NO: 45091 - DNA, 122 bp, Homo sapiens
ccccgcaagaaacagccaggttggagggagagaacagcagcagagggccagccacaggctcgatggcatttattctgcaccctgaccaccctggcctcaactgaggttggggtttgatcctg

SEQ ID NO: 45092 - DNA, 122 bp, Homo sapiens
ccgcctcctgcccgcctgcccgcctgcccgcctgcccgcctacccgcctacccgcctacccgcctacccccctgccggcctgccgtccttccacgcggagagccatggagggagtgagcgcg

SEQ ID NO: 45093 - DNA, 122 bp, Homo sapiens
gccctggccccgccccttgactcggccccgcccacagcggaatccgcagattcgccaggtcggatcctcagaattcctcgggtccctcgatactcggctgaaaattctcatcggactctgag

SEQ ID NO: 45094 - DNA, 122 bp, Homo sapiens
tctagtccactgacatgcccgcaagcaattccattctgccaagtggtgctggtggcaagccggaatccaagaaaaggaaagactccgattttaagggaacggggacatgcggagccacgtga

SEQ ID NO: 45095 - DNA, 122 bp, Homo sapiens
tttcttaaattgtaaaaatgaataaaccccaagcatgccagcccacacaaatctgacacacgcctggccatgctcccatcaactgcagaacgagaggttctaggtgccaaaaggcccagcag

SEQ ID NO: 45096 - DNA, 122 bp, Homo sapiens
catcatgaaacaaaaataagcttgcatcacaaaacagaattctatggcccttgattcagccgtgtctgcttgagtttgcatgattcaaaatgtagatgtggtagttaatgtcaaaccatcct

SEQ ID NO: 45097 - DNA, 122 bp, Homo sapiens
aattaacaggctttcacattgtgacttaatcttatcagagactcctaaagtaaacaatagcgcagtaggagaaaccctgattgtgtaacttctgctcttgctcccctggaaataatgtcatt

SEQ ID NO: 45098 - DNA, 122 bp, Homo sapiens
acctgcttctcctgcagtaaatggcaactccatccttcaaattgatctaccctaaaatatcggcatcactcttgatcatttctcatgatttcactactattgaccttgtctaagccaatatc

SEQ ID NO: 45099 - DNA, 122 bp, Homo sapiens
ttgtcctgaactttggactaaaggtatgtttgtatggtggttgactaagatcagaatgaccggggcaccaaacaccacttatgggggatttcccaatcagctctgagtagggagtggagggg

SEQ ID NO: 45100 - DNA, 122 bp, Homo sapiens
actcggttatttccggattgactcggctcgttccgtaaagcgccggaggattggctggggcgtcgggagagaggaggctcgaaactacatttcccatgacgcagtgagaatttaaaaccaaa

SEQ ID NO: 45101 - DNA, 122 bp, Homo sapiens
gagaatttggatgcaacagggcaacggagcgacgtttctcctctgcactaagccagccctcgcctctgaagaattttgtactaggcgttcactagcactgagatgaactggaattatttcca

SEQ ID NO: 45102 - DNA, 122 bp, Homo sapiens
tgcgagttggggatagggtttctctttgggggcgtggcttatggaacctcgttttcccgccgacggttggccacgtcacgtgacatgggttggaagatggcgtctcccacagacggtaagag

SEQ ID NO: 45103 - DNA, 122 bp, Homo sapiens
ctacagaacgagcatcgaggtgcgcgggggcagcgggaggaggtgccgcctcctcggggtcggcgcctcccggcagctcttggtatctgtgcagctcggctccttccttgggagtgttcgga

SEQ ID NO: 45104 - DNA, 122 bp, Homo sapiens
gcggcctcccaagcccgggccagaccccgctccccagcccgggctcgccctccctgaccgcggactcaccagctgcaagcccttgagaacgcgccggagcaatgggagccggcccatgaaaa

SEQ ID NO: 45105 - DNA, 122 bp, Homo sapiens
tcaaatcagagtgtcatcttcaatataggaaactgaccaatgttggaaccttactgaaagcggtaccaagtggcttagggtcaactgagatgttctcgtacattaggaattggggttttata

SEQ ID NO: 45106 - DNA, 122 bp, Homo sapiens
gcaacggggaaggaggatgccccaggtggcgcagcagagggtggacctggccccgggagacgccgggcggggggcgctgacctggtgcagggcgctgataccgtcggcgttggtggagtcca

SEQ ID NO: 45107 - DNA, 122 bp, Homo sapiens
cgcagcaccagcggtgagctctcccgccaccacggcagcttcagctcttccacccggccccgcaggggtcccgccatgccctgggctcccaggaccccaggccccgggcctccgaacatgcc

SEQ ID NO: 45108 - DNA, 122 bp, Homo sapiens
ctccgtggactggctctcccagagcagctgctcagggccgacccacacccccaggcctgccgacttctccctggggagcctccctggcccaggccagacatccggcgcccgggagccccctc

SEQ ID NO: 45109 - DNA, 122 bp, Homo sapiens
gagcccgggctagcgaaaagtgggggcagaacgaactacatctcccatcgtgccaggaggcggtcccgcccgtttccccctgggagttgtagtctaaccccctcggatccaacagcaacctc

SEQ ID NO: 45110 - DNA, 122 bp, Homo sapiens
gccaggctttgttgcttccgttcatggaagcgcacaggatagggccgacgctgtgccggtcgtggggaaatctcactggggaagagaaaagcccaagccttgttggttacgtcagccggtcc

SEQ ID NO: 45111 - DNA, 122 bp, Homo sapiens
ggggctgctcctcctttcaggtagaagagggtttctcaggttctgctggtgaaccaaggtcgctgagtaccatcttcattggcactgtagcccgtttgacccaaggctagaatccagcccgg

SEQ ID NO: 45112 - DNA, 122 bp, Homo sapiens
accggatgctcagcaaggagaacaagatcctacaggtcttctgggaggagcacaaggcctcgctgggccgagaggagagccgggccccctcgccactgctgcacaaagacagcgcgtccctg

SEQ ID NO: 45113 - DNA, 122 bp, Homo sapiens
tcccaaggtagtcggattacagtttggtttaacacatttcagggaggcaggagttaccggcgaagacataaatcaacacatggaaggtataggttggcacagcctggaaaggcaggatattt

SEQ ID NO: 45114 - DNA, 122 bp, Homo sapiens
ccccagacacccggacctccccgtgccgctgcaggagctggtccctgaactgttcatgaccgacttcccggccaggtatgccccgaaggcccctcccagaacacagtgcaggtcacaggggg

SEQ ID NO: 45115 - DNA, 122 bp, Homo sapiens
aagtcagcctgcgcccgggtgtacggtgctgcattctaagtcagtgtgcgcccgggtgtacggtgctgcactaggaaatggcatggtttctgcccttcagggctttgcaccataacccggga

SEQ ID NO: 45116 - DNA, 122 bp, Homo sapiens
ttgtaccgaagagacacttacacctttatcagaaaatcacggtttatttcctgagaatcacggggattggttgggggtactctgttttggggctccatttgaggcctgtggctcaatggaag

SEQ ID NO: 45117 - DNA, 122 bp, Homo sapiens
cagagctgggactcctctggctgccactcttttggggcaggcacatcaccaggagactgccgccctggggggtgagggtggggagagagaccttcagctctgcctttaccctccacgtgcca

SEQ ID NO: 45118 - DNA, 122 bp, Homo sapiens
tttctgaggagaaactcttggtgagaattcccagagtgataatggctacctacagcctggcgaacgagagactacgcgctctggaagacattgaacgggaaatcggcgccatccttcagaat

SEQ ID NO: 45119 - DNA, 122 bp, Homo sapiens
cacctggtcccaaccgcaccgcggaggaggaggtggttctagccaggcctccgagttctgcgttgggtaattggctatgccaagagaaggagagcagggctgcctatgtggcagtgttcctg

SEQ ID NO: 45120 - DNA, 122 bp, Homo sapiens
gagcccactgcgctctgcctgcctcagcactggggctggggacagcagcgctggcccaaccgcgccgcaacccccagccaggtgccgccgcggagtagaggccactctgctctacagggcca

SEQ ID NO: 45121 - DNA, 122 bp, Homo sapiens
gcctgctcccgcagacctgccatgccaatgctctccaagctgaggccgggtggcctgcgacgctcagcccgctgcccatcacaagaagaaaagcgcttatcagggcgctgtgcgcacggggc

SEQ ID NO: 45122 - DNA, 122 bp, Homo sapiens
cctgcgcgctgggtgattttttcacgtgtcgccagggccggactgcgagtctctttgcggcgctacactagagcagagtacgagtctgaggcggagggagtaatggtgagtcccgcgtggcc

SEQ ID NO: 45123 - DNA, 122 bp, Homo sapiens
gagttacttatatttctggagagccccggtgttatcctattaaatactttacaatgggatcgcatcgcagactgtaaatgaagaggaaacccttcttcctttggaggtttaatatgagctct

SEQ ID NO: 45124 - DNA, 122 bp, Homo sapiens
caagcagatatcatacgctctgccgcgggaccatgaagtctgtggaacctcagaggaacacggacaaacagctgcctcgacgggtgcccgtgtcaagaacacagacacgctgggaggagcag

SEQ ID NO: 45125 - DNA, 122 bp, Homo sapiens
ccggcccagatgggggaggccacaggcgctgccccagcgtgcatgaagggggcctaaaagcgcaatcgggatattttcatgcaatattttaaaaatcgaattaatgctaaaactccacgatg

SEQ ID NO: 45126 - DNA, 122 bp, Homo sapiens
aagatgaaggagcccgggaataaaactctcctgacatcacttctgagcgtatttcactgccgtgacaggccgtcatgattggggacgatatcgtgggcgacgtcggcggtgcccagcggtgt

SEQ ID NO: 45127 - DNA, 122 bp, Homo sapiens
tggaaggccagaggggagaagccgagaccggggaagtaattcgtcatggtcctaacgcgccggtgggccagggttcagcctctgacaaagcgcgttcgcactgttacccctttgagcctcac

SEQ ID NO: 45128 - DNA, 122 bp, Homo sapiens
aaaggaaccaccatttagttttgggggatttttgccagctttcaagacaagctcctctcacggagtcctctgcttcccgaagtttaaagccatctggtcatttttgggtccccttctggtcc

SEQ ID NO: 45129 - DNA, 122 bp, Homo sapiens
gcccagttgtttcccaaaggtgattccagctattccaactatactccctccaccagtgtccgtatggatctcctcttgatttacatccttgcccacactcatcactttcagacttcttaatt

SEQ ID NO: 45130 - DNA, 122 bp, Homo sapiens
gggcgcgcggccctagctgcagcctgggtccggggcgcagggatcgcgggggagagggcgcgccatggacccagtcacagccacagcaggagagcgagctgctccaggctgcggctcagcct

SEQ ID NO: 45131 - DNA, 122 bp, Homo sapiens
ctgccaacagcggggcaggcggggcggagggacgtggcaggttggctgggcctcgaggcacggcctgaggcttctccaggcctcccagcctcccaaaggcaggtggggacccagcctcaagg

SEQ ID NO: 45132 - DNA, 122 bp, Homo sapiens
tgatgtgtgaccgggcttcctctcaaaatggtatagttgggtctgatcatgtaacaatgccgcagaaacaccatgagagggtagccctgtgggccctggagtctgtgctgcctgcttgggtg

SEQ ID NO: 45133 - DNA, 122 bp, Homo sapiens
aaagaaagagagagagagaagagagaaactgattaggaattaggactgattcaagggaagcgagcgctagggctttgtgcatttgaatattaacatttgaggtgttctgaccagaagaagac

SEQ ID NO: 45134 - DNA, 122 bp, Homo sapiens
tctacaatatggtcacagttaccctgatacgagatgtgtaaggctggttatcatcaggaacgaaagaaaaaggtatttcccacctgcatggataactggcaaaatgctaccggggggagcgc

SEQ ID NO: 45135 - DNA, 122 bp, Homo sapiens
atctctgaaaggaggcaatgcctgattttgtcactgaacgatgagcatgatttttccaggcggtggaagcaggtgctcccggcagaagaccccatataagcaaatatctagaagccacaagg

SEQ ID NO: 45136 - DNA, 122 bp, Homo sapiens
caaatcggctggccaatggcttcagaagcctcacactgtctcacgctcagagaccaatcacggggtggttggacggatgtttcctattttgaaggcgtccacttgggggaaaaaaatgaaag

SEQ ID NO: 45137 - DNA, 122 bp, Homo sapiens
cctggggctctcaacttcccttccacactccacctcccttgcagagttttctataaagttcgggctctgggtgtccccttgcactccccacagggctgtgccgcaggcttgggcgactttcc

SEQ ID NO: 45138 - DNA, 122 bp, Homo sapiens
tatgtaacggagtatctagtcatgaagaaaactggctctggagcctcctacctgacttcacgtactgcctctgcaacttacaaggtgcctggacaaattacttaacctctctgggcccctat

SEQ ID NO: 45139 - DNA, 122 bp, Homo sapiens
gactcagtgaagagtgatgtcatatgttatcccaggactgccggtgtggttctctctgctcgctctaaccattccccctgcttctgtggcaggcagtaatccccgctttccatcctctagtc

SEQ ID NO: 45140 - DNA, 122 bp, Homo sapiens
ccctacctcacccaggaccttcaccgccgctccgaaagaaacgcgcaggggaggaacctgcgagacctaaggcccgcctcggagtcagccccattggtcagacctatcccaccggaagcgat

SEQ ID NO: 45141 - DNA, 122 bp, Homo sapiens
tactagtgctgggaaaaggagagaaaatgctatttcattgggtcttgtggttcctccagccgggttagaacaagatttgagagttgcaccctttattttcaaggccaagtggctgcagaaac

SEQ ID NO: 45142 - DNA, 122 bp, Homo sapiens
agccctgcatcctggttcttcccctgaatgaccaccttccccagttcctcctgggctgcccggtttttgggatctatcgccagcaccttcttgaggtcagcagttgctttttccaggttccc

SEQ ID NO: 45143 - DNA, 122 bp, Homo sapiens
ctgggatcacctggtgttttgttcctgggtagatttcacatcaggaaagtcaacagtgtccggctcctccaaagtgcagacccatctcttcgcttaaggcctccctacttctccccagcact

SEQ ID NO: 45144 - DNA, 122 bp, Homo sapiens
gaatttcagcgcagtctgatttgtcgtttttcccttgtacggctcctaccctgtgtctcccgtggccacaggggggtggcgcagccccaggtccccacaagggacacagccctgggccacct

SEQ ID NO: 45145 - DNA, 122 bp, Homo sapiens
agcctgggtctctgtgttccgaccacagcgctggggccctttctagaagcttcctggaagcgagagccagtttttgtgtaggcgcggggaacgcagtccagaggccccgtaaggacgggcac

SEQ ID NO: 45146 - DNA, 122 bp, Homo sapiens
agaatcttggattccaaagatccgctaacctctgttttaggggaaatcagtttctgcctgcgtgtgtgttcagctaggggttcaaggcccggcgacgatggctcagcctgcttggggagggg

SEQ ID NO: 45147 - DNA, 122 bp, Homo sapiens
aggtttaacatgttattagccttttatagaaagctagtgactactagagcctgggccaaacggaaaactcagtgtaatgcttcttcgcatcccaaacagggtacatttagtggcttaacttt

SEQ ID NO: 45148 - DNA, 122 bp, Homo sapiens
tctaataagcgaataccaacccacaaaccactcatccttttaaaaatatttcatgggcatcggtgccataactaataaatttttaagagtaccaactggtctttaattattttatgctttta

SEQ ID NO: 45149 - DNA, 122 bp, Homo sapiens
atccaatgggaaccttagtctcttttacgtcactgatcaccgggcaaatccccagacagccgcgggcggtggggcaccaggggcagcgaaatggaaactgaaatcaggcgggaccgaggctg

SEQ ID NO: 45150 - DNA, 122 bp, Homo sapiens
gagctcaggcaaaccatccacctcagcctcccaaagtgctaggattacaggcgtgagccacggcacccagcctagaatgtcagattcttaatgtatttgtattttgttttctaatctaaagg

SEQ ID NO: 45151 - DNA, 122 bp, Homo sapiens
taatggtatcaacagacgaggacaacagcaacaacaaagtctttatacaagcctgcaacacgtgacaactgcggatcaggcatctgaacccggcctatctttccaccgtatcttcctacact

SEQ ID NO: 45152 - DNA, 122 bp, Homo sapiens
caaaattgggaattatttcaaaataaaaagctggataaatgcatacacacaaggcagtatcgcgtattttccacgagtgcctgtgcaggcaggtaaggatttaggaaaggtctggaaggatg

SEQ ID NO: 45153 - DNA, 122 bp, Homo sapiens
ttctgtgcttgggaactttgccctgtaagggagctttcggagctgtcactggggcacgcacgcagcccccggagaaccctcggttgaactcagccaaggggactccacctgcctggctggga

SEQ ID NO: 45154 - DNA, 122 bp, Homo sapiens
tttcttcactcaaatagtcacaataaaaatacttctgggcggatcacgaggtcaggagatcgagaccatcctggctaacatggtgaaacctcatctctactaaaaatacaaaaaaaaaatag

SEQ ID NO: 45155 - DNA, 122 bp, Homo sapiens
cctgcagcacccagggtgggagtgcgtctcaaccggacccagagcctgggggacagggcacggcacacagcgcccggagccctgcactcacctccgtagcggactgctccccggcgctgccg

SEQ ID NO: 45156 - DNA, 122 bp, Homo sapiens
cattagaccatggcttgtttctgggctgagcctcccgctggtgcagccctgcagatggtccgcttcagctactccgttaggaggcgggcagttttgtctgtgtcttactccttccgtccagg

SEQ ID NO: 45157 - DNA, 122 bp, Homo sapiens
tacataactgccaaactgttattcaaggtggctggaccgttttacagcccccgttgtatgcgtcccagttgcctcccccagcagcatgtggtgtggttggtctttttcgtggcagccagtcc

SEQ ID NO: 45158 - DNA, 122 bp, Homo sapiens
tcccagcccctcccacgcgtcctcccagactcgccggccgcctgccccgggcggggaacgcgcacatctggcggcccaggagccacatctgatgcactaacccccgcacccagatgtccaag

SEQ ID NO: 45159 - DNA, 122 bp, Homo sapiens
acagagctgcttgatttgttttaattaccagcacaaaatgccatcagtctgggacgtgatcgggcagaggtgtactcacagtagtgtaaatactgctgtaaatagttgtctgatggtggctt

SEQ ID NO: 45160 - DNA, 122 bp, Homo sapiens
aaaaatatcaagcatcttgggcacaatgctggtgctaagtgaaatgtctgtggctcctaacgtggccaggaagatatacatgggttcatggaggcttggctcagatttgatgatgatcaaaa

SEQ ID NO: 45161 - DNA, 122 bp, Homo sapiens
gtaccgggtgcagagggcattcctcatggcacgagcagatacccaggtgacacctgtggccggctctgttcctcatgcggtgggtggtggccaccctgggcactcctgcttccctttctggg

SEQ ID NO: 45162 - DNA, 122 bp, Homo sapiens
aggtctgttacatatgtaaatgtgtgccatggtggcctgctgcacagatcaaccaatcaccgaggtattaattaagcccagcacctattaccccaacacccattagctgttcttcctgatgc

SEQ ID NO: 45163 - DNA, 122 bp, Homo sapiens
aaagggaaagcaaacaagaaaagcagactgggaaagaggtaatgatctttactgaaggcccgctatgtctcaggcactgtgctatgtacttcccatatgattttcatttaatattcatcaca

SEQ ID NO: 45164 - DNA, 122 bp, Homo sapiens
taacaccgctcaagctgttttcaggattaaatgagataatgcaagtcaaattctgcacagcgtgagggacacagtatgtgcacaacaaactctaagacttttaaacactttcaattattttt

SEQ ID NO: 45165 - DNA, 122 bp, Homo sapiens
cctcatgaagcatttaacaaactctgggagctttgctgtcaatggctgaagccaaagatgcgctctaaggaacaaatcctggagctgctagtgttggagcaattcctaactatcctgcccac

SEQ ID NO: 45166 - DNA, 122 bp, Homo sapiens
cccccaaccccaaaacccccaagtccccgggcgccgaggacgctgcgagtcctgcgcatgcgcaaggttgcccactcgctcaccgcctccttggcgaatggcctgttccattctcgagggat

SEQ ID NO: 45167 - DNA, 122 bp, Homo sapiens
ttgtccacccaatgtggattatctatgcccttttcttctgtctttcttccagctctccaccgtatttcagagtagaaaattaagagaagagtgcagaaattaaaattttatatatgtctaca

SEQ ID NO: 45168 - DNA, 122 bp, Homo sapiens
tggaaacgcctggggcgggtaccgggtggtctccgcgtccttccctttcaactgttacgtcgatgtggacttcagtcacccgtacaaagctgggctggccaacccaggtcctcgagagggga

SEQ ID NO: 45169 - DNA, 122 bp, Homo sapiens
gtggtatgttttcattatcccacttcacagataaggaatctgggcacagagcactgaaggcgcttgttaatagtcacatgcaatctttttcctatttcttggcttccagtaatttttcaggt

SEQ ID NO: 45170 - DNA, 122 bp, Homo sapiens
catttgcacttcgatgcagtacaccttaaagaccagagcaccacccatctagtattcctgcgttaaagcccaagacattctctcattctccacacactccacccttgtctttctctttgata

SEQ ID NO: 45171 - DNA, 122 bp, Homo sapiens
tggctctgaaaatttgtctcagaatgcacagagacccccgtgtgcaggggccgccctgggcgatgtgtgagcctctgtggtcacagctcccactggacaagtttccactgaagggacaagga

SEQ ID NO: 45172 - DNA, 122 bp, Homo sapiens
atgaaagatgtgtattcctgtacttatgttccacattaaattgtcttgggtactggtgaccggtgtcaccagtgctatctgtagcattcctggtaagaaaagttggtttatctctgtagctc

SEQ ID NO: 45173 - DNA, 122 bp, Homo sapiens
caaccacctcctcaaactcacggcaaagggatgcgagagctggaactcttaccaggcctgcggaaactcagccctccggcagctaatcccgcccgccagcccccgtcctctctctctttctc

SEQ ID NO: 45174 - DNA, 122 bp, Homo sapiens
ggacgtctgctccgttctccaccaggagggtcaccagggccatgttgcgtctctcgatggcgatgtgcagtgctgtctggcctacagaggacgcgcacggttggcttcgtggtcacggtcct

SEQ ID NO: 45175 - DNA, 122 bp, Homo sapiens
cctcacacccgcgacctctgcagtgggagtgctgggttggcgagcagcccatcctgatgccggatggtggatggcggggctggcgaggcacctccttcctgccccacgggcatctcacttcc

SEQ ID NO: 45176 - DNA, 122 bp, Homo sapiens
tctgctcccctctgtcatgccgcttcatcttaccttcccttgcaaagttaaagtctgcttcgagtctatttggttccttgtagagagcctgcttcccactatgcctctgtcttacctggtgt

SEQ ID NO: 45177 - DNA, 122 bp, Homo sapiens
cgcgccgcgtggcctgcctagctgcaccttagcccccatgcgccgggtaggcccgggccccgccgccgcgctctgagcccgcgtgggtctcacaaccatggccctcttatctgctcctgtgc

SEQ ID NO: 45178 - DNA, 122 bp, Homo sapiens
acactgcccgtcggaccttggcatgctccattcagctgacctgctgaggacaggcatcgccgagactccttgggtcctccccgccctccctcatgctgccacaagctgctgctccaaggcct

SEQ ID NO: 45179 - DNA, 122 bp, Homo sapiens
ggggccctagctggctcctccctctgccgcctgctccacagctccgagccgtgtccgaaccgctgtgctgtgcccacagttcctggcctggaacagcccacccctcacctccgagtttgtgg

SEQ ID NO: 45180 - DNA, 122 bp, Homo sapiens
gcatgaacagtccaacgtccacctcgtaagatgtcatcgggcttcagggttcagaagcatcgaggactggtggccggccctctgtgctcgccgtgtgacaattccagtggctttcctggcac

SEQ ID NO: 45181 - DNA, 122 bp, Homo sapiens
ccagcctccccaggcccacgcccacctgcttcagcttgtcctcaatctcccgccgtcgagcggatgcctcctgtgggggaatcatcgctctgaaccccgcggctcccactccccagtatctt

SEQ ID NO: 45182 - DNA, 122 bp, Homo sapiens
tagataccacacagcagtgaacacacaatgaacaggtcaacacgtgtcattatagaactgcgcaaaagagctagtagcaggcattgtaagtgtatttatataatgtttacaaccatggaaaa

SEQ ID NO: 45183 - DNA, 122 bp, Homo sapiens
gggctctggtagggccttgcatcaagcaggcaggggccttctgaggagctccaggatattcgcatgggtgggactccactggaagtcactcaccattgttgctagactgatccagtctttgt

SEQ ID NO: 45184 - DNA, 122 bp, Homo sapiens
cagctgcagtggaggcggcggtgggaaagcctggcccacacacgtggtctgtagcgacagcggcttggaagtgctctaccagagttgcggtaagcccttgcagtacacccatgtgtgtttat

SEQ ID NO: 45185 - DNA, 122 bp, Homo sapiens
actggctggatctgttgttgttgttgtttttatttcttcagtggtgaactgctggctcaccggaacatagtggaaggatgttttttgctgcctgaacgtgagcaaatattggacctgagatc

SEQ ID NO: 45186 - DNA, 122 bp, Homo sapiens
gtggtgggcaggggcaggtgtgacaggcaggtgggctggggctggatgggggatttgtcacgcccacctgaggaaggaagtgcttcagctgagctggggacagctgcccacgacacccttcc

SEQ ID NO: 45187 - DNA, 122 bp, Homo sapiens
gcagccgaggctgtggagtagacagccctggacaggggacttttagactgccatgtttgtcgctgcattgtgcaattttaacaagaatcctgctaagtcagtttagttagaatttcccatca

SEQ ID NO: 45188 - DNA, 122 bp, Homo sapiens
ttagcactttttgtgggaatggcacttggtgcttagatgtggtcctttgaaagccctcaacgcaacacatctttgtggagaatagattgattttttttaaaaaacagtccatattttggcaa

SEQ ID NO: 45189 - DNA, 122 bp, Homo sapiens
atccgggggccccgtgtgtcccccaggaaagccggctggtctccaagtgaggcgaagacccgtgcccagcagacaaggccggtctcggggctggcagagagctgcccccagggtgtgtgtca

SEQ ID NO: 45190 - DNA, 122 bp, Homo sapiens
tgcccacctggggcacatgtgggtacagtgcagtggagcatacattgcctagattgtaaccgtgtgtgtgcctagacacaggcaaatgagcccatgtgggtgttcatgaagggcctgccccc

SEQ ID NO: 45191 - DNA, 122 bp, Homo sapiens
taccaaaaggcttgtccccattacagaaataatatagtcggtgctagttttgtgaacccgcgccaaccgataaggtaagaaacggtgcgctgacagccgaggtccgaaggctgctcagtggt

SEQ ID NO: 45192 - DNA, 122 bp, Homo sapiens
attttctctcctggttcctagggtccacaccccagaaagattcttctctggctgagattgcggtgggtgtgaggcatggaccgagcctgttagacctggggtcaggccgggccactgtcatt

SEQ ID NO: 45193 - DNA, 122 bp, Homo sapiens
cttgctctgctggggtgctggcggagcttcctcagagaaccttcattgcagcctttccaccgcagcttcttactaagctggccagtgttgaatctctctcagtttctgtatctgacggtata

SEQ ID NO: 45194 - DNA, 122 bp, Homo sapiens
agatagggtcttgctatgttgcccagggtgttcttctgggctcaagccatctgctcacctcggcctcccaaagttctggaattacaggtgtgagccaccacactcagccacatttttttttt

SEQ ID NO: 45195 - DNA, 122 bp, Homo sapiens
cacgcgcgcactcactcagcgcgcccgggggtctgaggtcgccgctacggcgcctcgccccgggcagcagcaaccagcacgcaggcacccctggaacaggcgggactgccttcccgacgcgc

SEQ ID NO: 45196 - DNA, 122 bp, Homo sapiens
agaaatcaaaactgaaatcctaaggggagtaaccaggacacttgcagtgcaggtcattagcgtgattgttgccaaattcaaagcagaaaggtgttaaatggcttttgtagggatcaaaacaa

SEQ ID NO: 45197 - DNA, 122 bp, Homo sapiens
cacacacggcacttacctgtgttctggcggcaaacccgttgcgaaaaagaacgttcacggcgactactgcacttatatacggttctcccccaccctcgggaaaaaggcggagccagtacacg

SEQ ID NO: 45198 - DNA, 122 bp, Homo sapiens
gctacaggaaagtcccaacttctctaggggtcagattcctcacctgtaaaacaagggaggcgcacaataacttcacgatcccttagagtctaaaactcttgagtttctgactggagccacct

SEQ ID NO: 45199 - DNA, 122 bp, Homo sapiens
ggaatgactgtgccccctccccttcctgatcctcagctcaggtgagcccagatgaggcgccgggtagcttctaagtcactaatggaaatagaaggctaattcaggggttaggggccgtcgtc

SEQ ID NO: 45200 - DNA, 122 bp, Homo sapiens
ggccagcagcagccccgctcccgccaggcgggcggacgccggcatcctgcggcggaagcacgcggaggcacagccagggcctccgccctttgccagacaagggcacaccccaaggtctggga

SEQ ID NO: 45201 - DNA, 122 bp, Homo sapiens
ctttgccagccttgtaatggggcggcggaggggaccagccaccggttgggcagaagcagccggcgtcggcctgggattggaccacgtcacggggccagcgcgctccactccttcctccccag

SEQ ID NO: 45202 - DNA, 122 bp, Homo sapiens
cgtccccacctcctgtgaacacttgtcagagacagcctcgaggcctgtgtcgctggggcacgcaagcttgccaatccctctgcccaatggcgcctgcgcagcgcgactcagaggcgtggctg

SEQ ID NO: 45203 - DNA, 122 bp, Homo sapiens
tcctcccctgtggcaagtttccactgttaattaagcttggcagatgcccttccctctctccgcccacctacctccctggctgggggagtccacaggccaagcgacacgttctgttcctcttc

SEQ ID NO: 45204 - DNA, 122 bp, Homo sapiens
gccaacagtgggtgcgcaaccagagctgctttcagccattctctctcctcccacagtgaccgcgtacagccccgaggacgaaaagaagggggagaagatctacctgtacacgcacctgaagc

SEQ ID NO: 45205 - DNA, 122 bp, Homo sapiens
tgggaccactgctccaggaagttttgagagccccaaacccaggcacctttcaggcttctccgaggcagccagacaggacctgcctttccctttcgttttcgggataaggccaacagctcccg

SEQ ID NO: 45206 - DNA, 122 bp, Homo sapiens
aggtgctctgcccaggagtctcttggggccgctgcaagtgggcaggtgccctggtgttctcgtgggccggccccaggccctttgcggagcgtgtgccgcgctgaaggaaggggccgtccccc

SEQ ID NO: 45207 - DNA, 122 bp, Homo sapiens
acaccctccgccccaccacacacaagggctcaaactctccgagcgccctttgtttggaggcgcggaggcagtgggagccgccacctccggggttcgtgtagcctaggcgggcagtgaggatg

SEQ ID NO: 45208 - DNA, 122 bp, Homo sapiens
gcccgggaaccctaagcagagcacccaggggttagcgtggaaactctgtcctgtggaaggcgccgcagcgcagggcctggcagcctcgcgacacagacctgatgtgaaccttgcctccacca

SEQ ID NO: 45209 - DNA, 122 bp, Homo sapiens
gaatgggatgtgttatgcatagactcacgacctctgaaccaggttcacacccatgactttcgttctttcctgccacacgctgccttcagttaagggccacatttgtgaattcactctgcacg

SEQ ID NO: 45210 - DNA, 122 bp, Homo sapiens
gtttagggccgcgatcccgaccctaacttgggactatttcaggaactggagttgaggcttcgttgggacaggaaagaagggtggggcgggggtgaagcgcttagggcacggctcttgtgagg

SEQ ID NO: 45211 - DNA, 122 bp, Homo sapiens
tcccctctttccgttctaaagtttcatttcaaaagtattaggaaatcttactttaagcagcgagctgatggcgttctccagaactcggtttgagcaacaaacttgagacaacctttgtctgg

SEQ ID NO: 45212 - DNA, 122 bp, Homo sapiens
ttccgctctggggtagggtcactgggggcgtcaatgagatgcatgagaatcgccttcccacggggtcaggaaactgacaggcccaagagtgcatctcagcaaacgctccgtttcctgcgggc

SEQ ID NO: 45213 - DNA, 122 bp, Homo sapiens
caagtcctggttcttagaaaggctctcggcatactcaggggacagagccccagggctccccgcttcctaggactccaagcatgggcctggccttgcagcaaccctcctggtctgataactgg

SEQ ID NO: 45214 - DNA, 122 bp, Homo sapiens
gggccccgccgccagccgctgctcggagggagcgagcgagaaaggggagccggcgcagctcgctgccctgttccagaactcagaatttgagaggcgagagttcggtaagccgtgcgaccaga

SEQ ID NO: 45215 - DNA, 122 bp, Homo sapiens
tcattctctctatactcagctcacacaccctgcatactcagggcgtgtgctgaagcagagcgaaagattacccacaggcattatacagatgatccctgtgctgtgtgaaggattcagttgga

SEQ ID NO: 45216 - DNA, 122 bp, Homo sapiens
gcagtttgcgcgtgcgcggctccgccccaggctcctccctcgcgctggcactcccgccttcgcccggccctccccgcgctttacggcccggcacgccacttttactgcagtcgcgcccgccg

SEQ ID NO: 45217 - DNA, 122 bp, Homo sapiens
cccggtcccctccccctccccgtgtctctcttagcttcccactcgtgttcaccccctcggcgtccgcccccctcaatagtccctacctacgccatgcagcaggcgcctgccaagattaccct

SEQ ID NO: 45218 - DNA, 122 bp, Homo sapiens
tgttgctagactgccaatccgttcctgcctaggccagaacacgggaagctctcgcagaaacggaaatgcccaaaggaggaccttaaggttctgacttctggggacatctagtggaaagctct

SEQ ID NO: 45219 - DNA, 122 bp, Homo sapiens
aaaaaaaaaagattagccaggagtcctagctactaaggaggctgaggtgggaggactgaccgcttgagcccaagaggttgacactgcagtgggccatgatcataccaccacactccaggttt

SEQ ID NO: 45220 - DNA, 122 bp, Homo sapiens
gcctgctgtgatactgttcgtatcatccagggagggagaggatgatatttctccccatatcgcaggtggtgtacacccccttgtgatattgtccgcaacatccggggtggggaaggatatta

SEQ ID NO: 45221 - DNA, 122 bp, Homo sapiens
tggggagcgcaggggtgacgcctgggcctgtggggagtgcaggggtgacacccaggcctgcggggaatgcaggggtgacgtcggagccgtggggagcgcaggggtgactcctgggcctgcgg

SEQ ID NO: 45222 - DNA, 122 bp, Homo sapiens
tcctgcgagtttccgaactttggaagatcgtgacccggagagaccctgggaggagagggccggccacctcctaggggtgctgtttttttaagggtcaacccaggacgctacgggaagcacct

SEQ ID NO: 45223 - DNA, 122 bp, Homo sapiens
tgttggcactgtcccacctttttcttctctgggatccacgcgggggcctactctcctctgcgaccttgagctacaaggacactccccattccaaagctcactcacagggagtcagcacacca

SEQ ID NO: 45224 - DNA, 122 bp, Homo sapiens
gatgcttcttccgcctggtcctagtggcagcggattctttccgcccccaacgctcgcccgcgccccgcgtggcagaaaggagttcctcagctgctgtatctggtgggaaagcgaatgcttta

SEQ ID NO: 45225 - DNA, 122 bp, Homo sapiens
cgcacaagcagcccggcgagcgcaggagtgagcgcgaggtgagcgctagaagaggcttggcgctccccgcgctcccagggtcagccgccaggggaggctgcgccgcccgcccagacctgcac

SEQ ID NO: 45226 - DNA, 122 bp, Homo sapiens
gggtgagtctccccaatagtggcgcccttgtgatttggaggacaggtctaccagggtgtccgtgggctgctgtctcaccggtggcttcgtagtctcggagagcagaacccggcagcttcagg

SEQ ID NO: 45227 - DNA, 122 bp, Homo sapiens
taccttggccttcagttgcacttctcccacattctcatcgaagtgggggaaatagttgcccgcgttctttaaaattttgcccatctgtggagtgaagaaattggtatcttgctgcgagttta

SEQ ID NO: 45228 - DNA, 122 bp, Homo sapiens
cctgtttcttccagttactccagctgaggcatcagatgtgtgggtgaagaaaccaccagacgcggtggctcacgcctctaataccagcactttgggaggccgaggcgggcggatcacgaggt

SEQ ID NO: 45229 - DNA, 122 bp, Homo sapiens
aggaccctggtctcaaaggaccctgccaccttagcctcctgagtagctgggacaagtgtgcgccaccacacctggctaattttttaaattttttgtagagatagtgtctcgctatgttgccc

SEQ ID NO: 45230 - DNA, 122 bp, Homo sapiens
gctctccattttggagtgagtgggaaaaaaatccccgtgccaatagcctctctgcgacctcgtaccccacactcagggctccaggcagatttgtcaggtcctcaggccccaggcagaaggcc

SEQ ID NO: 45231 - DNA, 122 bp, Homo sapiens
catggcggcggtggccgcggtgagggcctagtgagccctcggcttactctttagctcgagcgggacaggttcccgtcaccattcgtagacccacaatagggagtcctttggtctctgagctt

SEQ ID NO: 45232 - DNA, 122 bp, Homo sapiens
tggctgtttccccttaacatgtacccacagtcacagagtgcccctcacttttacacagagcgtgggctggccaccgtctacttgctcctacctgctggctgggagctctcccaagtgctgtg

SEQ ID NO: 45233 - DNA, 122 bp, Homo sapiens
tcaggtacacacctttttaagtctgaaaccaccacacacaaagaatttaattctgacagacgtttgttctcagcataaatactttagggccaatagttgtccccacttaatcatgcttctta

SEQ ID NO: 45234 - DNA, 122 bp, Homo sapiens
gcccgggccacacccccttctcgcccagccaagccaggctgggcatagggtgtgtgggaacgctgggtgccagggtggagaagagttgtaagggctccaggaaggtgtgctggtgacttcag

SEQ ID NO: 45235 - DNA, 122 bp, Homo sapiens
gtcggaattatcggcttcctcattatcactcttgcacagagagacagccacgcatgaagtcgcggcgcagatcacccgaggacccaggaggtcaccaggaacgtcccgaggaaacatgaggc

SEQ ID NO: 45236 - DNA, 122 bp, Homo sapiens
agatggaaggttatggggtggggcacgtggcagggcagccctgtgtccacagacacatcccgccaaggggacccagagacttgagtgtgtcagggcttggggtgaatgggcactcagctgtt

SEQ ID NO: 45237 - DNA, 122 bp, Homo sapiens
atgaacaggaaatcatggggaggagaagatatttgcagttcatgtatgtgacaacagcaccgagtatagcagaagtgttggcaaactttataaagcaaggcaccagatggtgaaaattttca

SEQ ID NO: 45238 - DNA, 122 bp, Homo sapiens
cgcccggtcccggggaggggaccggcggaagggccaagggcttggcctccagggaggggccggcgttcggggagggtagggctataggggtgttgaggctggcgttctggggctggtcctcg

SEQ ID NO: 45239 - DNA, 122 bp, Homo sapiens
actagcgacctgggcgggccaaaactgcggaagtcggcggagagtgggcgagggtaggggcggagcaaagaaggaaaaggaaagtgtgtgttggagattggaagattcttatttcgattctt

SEQ ID NO: 45240 - DNA, 122 bp, Homo sapiens
gtacagccacactgccacccttgttcccttcattttgtgagacttcgcctccggcaaacacgaggcccagaatgttccaccagggtagcagcaggtgcccagcttggggagggaagaggcgc

SEQ ID NO: 45241 - DNA, 122 bp, Homo sapiens
tgcgagcagagggaccccagagctgccgagagctccctctgcaaggctggctgagctgctcgcacctctacgctgcctgagcgggcggggggacgcgcgctcgccgcccccgctgcgccccc

SEQ ID NO: 45242 - DNA, 122 bp, Homo sapiens
taccattctccatagtgcagatggggaaacagggttggagagagggggcctcatctgggtcgttaacaatgcggtgcgtagctgtgagggagtttacacttctgacttcgggccttggctcc

SEQ ID NO: 45243 - DNA, 122 bp, Homo sapiens
gggccctgtggaggacaacgagaagtgctacccgccgcccagcgtgcagtcctgcccccacggcctgggcagtactgacaacgtcaacaagctgctgctgctggactatgccgctaaccgcc

SEQ ID NO: 45244 - DNA, 122 bp, Homo sapiens
ctggttgacttggtgaccgtggaggatgcctgggttactgagccgcctggggctctgggccgactgctcttcccctgcaacacggcacacgcctccaagggagggttcagtctcagtcccat

SEQ ID NO: 45245 - DNA, 122 bp, Homo sapiens
ttttcttccctgtacacatgtctctttgtctgaatttccccttttgataggcacaatgcacgctagccatttcgagttagagcccaccctaatgaatgtaatttaacttcagtatcccacta

SEQ ID NO: 45246 - DNA, 122 bp, Homo sapiens
ttcttcttggtctttctcatcttggtcccctcccctgctggagcttccttattcctaacacgcagaggtttcggtggggggtcagggcttcccaggtctcctggaaatggaagatgggggtc

SEQ ID NO: 45247 - DNA, 122 bp, Homo sapiens
atgccaggctgggccgcggtgccccctcttcctagggccccgggacacttgtgcaggtgacgcacaccaggcctgggggccacagatgcaaggagggatctgccgcctgacagccggctggg

SEQ ID NO: 45248 - DNA, 122 bp, Homo sapiens
tgtgtcgggggatctatctgagcgggctcctccagatggaagcccctgtttacatgtcagcgctttcccttcctctcggcactcagtcgcccggctctaggcgctggagagccgccggctcc

SEQ ID NO: 45249 - DNA, 122 bp, Homo sapiens
tggtgaggtgtgtaaaactggagccgagtgactaagggccctccaagggtctgagcaaagcgccgtgggaatgcgggtgggaagcccccttgggaatcagtttggctgaggttcgtggcacg

SEQ ID NO: 45250 - DNA, 122 bp, Homo sapiens
cgttcggcctctctccatcagacaccccaaggttccatccgaagcaggcggagcaccgaacgcaccccggggtggtcagggacccccatccgtgctgccccctaggagcccgcgcctctcct

SEQ ID NO: 45251 - DNA, 122 bp, Homo sapiens
actatttataggcctcaatttacgaaataacggaattgcaaagtccggagtggataggaccgtgaggacggtcttttttcttgggcaacacgcattatggtcgagagatcagttgttaaacc

SEQ ID NO: 45252 - DNA, 122 bp, Homo sapiens
cctgcactgagcaggtcttcggtggactttatgcgcagccacctcaggatgaaaataccacgtctgcctcctgctgaggtccagcccaggaaaggaagaaggggaacgaaagatgccaatgc

SEQ ID NO: 45253 - DNA, 122 bp, Homo sapiens
aattgtttacttctggaattttctgtttactgtctttgggctgaggttgaccatgggtaacggaaaccacggaaaactaagctatggataagtggctgtaattgatatttttatctgtcttc

SEQ ID NO: 45254 - DNA, 122 bp, Homo sapiens
gtgggaaatggggtgatatttttgcatagacttctaaggctaagaaggaaaacaaacagacgtggtgggcacaaatctacccccaccccaactgggtcccaactctaggctctctggcctgg

SEQ ID NO: 45255 - DNA, 122 bp, Homo sapiens
tttatggattctgatctaagtgtgagggctgacaggaggtcctaatctatagtattgttccgtgcttgtgagagtctcactaattagtagctgatgagctacaaaaggagtaaattttgttt

SEQ ID NO: 45256 - DNA, 122 bp, Homo sapiens
agatgctgaggagtgagaagttctccatattctgaccactgcgggggtacagagatcacacgcctgctctggagaggctggctggtttgtccagaggataaacattctgagcacagttgatg

SEQ ID NO: 45257 - DNA, 122 bp, Homo sapiens
ctcaccatttttactgcagtgaactcctctcagggtggggggctggtacagaggcaactccgctttcataactctcacagggtcctttgtcggaggtgtccctgccctcctaccccagcgtg

SEQ ID NO: 45258 - DNA, 122 bp, Homo sapiens
gtgtagggaggggtaaggtgagcacggaagcgaggcgcctgtgagcgtagccaaacgaggcgcagaggagaccagaaggaaagccacccacgggctgcgagatcgcgcaggggcggtgggaa

SEQ ID NO: 45259 - DNA, 122 bp, Homo sapiens
ttggagctgctgcattggagccacaggtaccttcgcttcctgaccataagctaagccactcgaccttcagaagctctggtttcatcatccataaggtctaactcacaggactgttgagagga

SEQ ID NO: 45260 - DNA, 122 bp, Homo sapiens
gggaccaccctccgggtaagtgacacttccttaggccgacccctccgagcagggccacgccgaacttgggtagaacttggggcttggagggaagcagggttccactccttccctgctgctgt

SEQ ID NO: 45261 - DNA, 122 bp, Homo sapiens
aaaatgtgcggaaggatccaaagaaggatcataaaagacacaaacgagccggctctgtggcgcaatggatatctgttctatggatatttgttcattcaacaagtattttctgctacctacta

SEQ ID NO: 45262 - DNA, 122 bp, Homo sapiens
atggactggaggcttgactaatgtgaaaggggcgtctgaaaggtacagccaatgaaatagcgacaagaatacattttgtaaaagagggagggtgagttcagtcctcttgctgagaatcctca

SEQ ID NO: 45263 - DNA, 122 bp, Homo sapiens
agcgcaagagacttctcaggatggtcagggagcccccagcatccctgctagtgccagtgccgagatcagagcatggggcctgtgtaaagggaagctccaaggagggatcagggagctggggt

SEQ ID NO: 45264 - DNA, 122 bp, Homo sapiens
tgctgagcggcgcggcccagggaggatccgccgaggcctgcagatccgagatctcttcctcgggggcaggattgtcctggaaaatcaggaaatggcaggcattgctcagagctacgtcttgt

SEQ ID NO: 45265 - DNA, 122 bp, Homo sapiens
ggatgcccaggccatcagcgacaccttccagggcctggtaggggcggcatgactgcccttcggtgctcgcctctgtgtggggagtggtggcagtgactagggccttagcgccgggagggctt

SEQ ID NO: 45266 - DNA, 122 bp, Homo sapiens
ttggggctgggttgggttttataagcatagggtaatgacgcatgatcggattagattttgcgatgaggtgatgctgggatgctcatctgactggaccctgccatggggtgacaccagggctt

SEQ ID NO: 45267 - DNA, 122 bp, Homo sapiens
tggcaacagcgctcattaaaaagtgaaaatacccttagtgttaatttaccaagcagtgttcgagaatgacaagccatctcaagagactgttttccaaaggttagcttttgaaattaaacaaa

SEQ ID NO: 45268 - DNA, 122 bp, Homo sapiens
tatttccgatgacctacatctcagggacgcagtaggatgttcattgataaacaaataaagcggctcgaagaaatattgtgcagagacatgattgaggtgtacaatcattaggatattgaatt

SEQ ID NO: 45269 - DNA, 122 bp, Homo sapiens
catcaggaaagcgaaacagatgtggaagggcataaagcagacgagcacctgcaccagcagcgtgatgatgatccttatggacttctccttgactttgggtttcagcttagacgtcctgccgt

SEQ ID NO: 45270 - DNA, 122 bp, Homo sapiens
acacgctctgtacaaggcagaatcactccccacttcctcgatctgcatagtgcaaggcaacgacgggatctggcctctcctcctgttatctttcctgaagccttttctgtgtcgctggcaga

SEQ ID NO: 45271 - DNA, 122 bp, Homo sapiens
cacgtccactccagcgcctctgccggccccacgtccactccagcgcctctgccggccccacgtccactccagagcctctgcctgccctggcacccactttgcttttagcccccgggctgggc

SEQ ID NO: 45272 - DNA, 122 bp, Homo sapiens
agaacgtcaaggctgacgtcttcactgcttacatcgtgctgctgcggcaaacacagcccccgaagggatggctggaggccatggaggaacccacccagaccggcagcaacctccatatgcta

SEQ ID NO: 45273 - DNA, 122 bp, Homo sapiens
gggtcagtatctctaactcacacatgcttaagggtaaactgtacttgtatctcccactcccgttcctattctcatttgcctctcagctctgccttatctgacagagaatcatagtcttaagg

SEQ ID NO: 45274 - DNA, 122 bp, Homo sapiens
agctgacctctctgagcttcagtgtccaccaacctcgacagagacagtgagaattaaatacgcagtaatgtcaaccaagtacagaggccacccttggccaacattccatacatgctcacctg

SEQ ID NO: 45275 - DNA, 122 bp, Homo sapiens
gtccctctcccccattaagccacaacctcccccacaccagagcaggcaccaggtcctcctcgtcacaagtgccaggcataaagcaggcactcaataaacatccaggaaggagacggcagggg

SEQ ID NO: 45276 - DNA, 122 bp, Homo sapiens
aaattaacttttcgcacacttcattatgcgccgtcccgcgtcccccggggccgaggcccgcgcccccgccccgcgccgacaacttgattgggcaattaatcttcgcgccccccacaccccct

SEQ ID NO: 45277 - DNA, 122 bp, Homo sapiens
ctgtgaacaaatcttcaagttatacccaagatttcaaagctcatgatggtccatagtactcgctctttaaatcaatagctgcgtatcccacagatgatttcctttgggatgatttcccagaa

SEQ ID NO: 45278 - DNA, 122 bp, Homo sapiens
cctgcagatatttgaaaggctgccatgaggaagaggaactaggcttttcccttgtggtttcggaaggcagtgctgaagctaacaacgtgaggctggcgtttccctaagactcacatggactg

SEQ ID NO: 45279 - DNA, 122 bp, Homo sapiens
accctgtgagtcttcctaatacctacaaaacaggtagaattttcttcttttgtctatgatcgtggtctgaaggatgacttttcagcagcagaagggactggaatggaaggtgtccataattt

SEQ ID NO: 45280 - DNA, 122 bp, Homo sapiens
gtggctgggtcctgtcctgccggaggccagagcactcccggcgacctggccctctcaggacgtgcagctgggagaacacagctacttctttcgccgggtggtcctcgaactactggagcagg

SEQ ID NO: 45281 - DNA, 122 bp, Homo sapiens
ggtgtgctggagttgctaaactgctgggagactcaggtttcccagctcttaagggaagatcgaggggtcaaaggtcgggttccggtcaagcccacagagaaccggaagtcccagatccggtc

SEQ ID NO: 45282 - DNA, 122 bp, Homo sapiens
tgctccagcgttgctcgccgactatggcttctctttctagacacgccccaattcaaattgcgacagcccggggagcagaccttctgggaaatgtagtccagagcttgacagcctcaggctgg

SEQ ID NO: 45283 - DNA, 122 bp, Homo sapiens
aggtgggcagtgatccccttatggggctgccctggtgagtggacaagggtctgcagctctcgggaggggctgaggaagttcggtgccccgaggagagaagtcaccccctgggggaggcgagg

SEQ ID NO: 45284 - DNA, 122 bp, Homo sapiens
ggtatttaagattcaattctagtttggtcctagatgaccacatatccattgttccttcaacgagcacatggtaaagagcctagaacacagagacacagaacacagtggagaaaagggagtga

SEQ ID NO: 45285 - DNA, 122 bp, Homo sapiens
ttccacttttcctggtctgtttttctgtctttctatctctctgcaggagctgggtcccttcgcatctctcttcttgtctgtcctttcctggtccctgtttcctcctctctttgccttcgctg

SEQ ID NO: 45286 - DNA, 122 bp, Homo sapiens
cgcacgcctgacacaaattgtgagagcagggcaggatgatgggctcccgatagaaggagccgcacacggggcatttcaactcctcttccatctcctccatggggaccggtctgggaggagac

SEQ ID NO: 45287 - DNA, 122 bp, Homo sapiens
ctccggcccggaggctgctgggcagggcgctcagggtagggcggcaggtctcccatggttcgccaggaggcacagatctctaggagaaaggcttgcagacaaggaggccaagcgagagccac

SEQ ID NO: 45288 - DNA, 122 bp, Homo sapiens
gatcccgaaaaactcgcttcctgtgacatcgtggtggacgtggggggcgagtacgaccctcggagacaccgatatgaccatcaccagaggtaggttctcagataccatttatttaacttcct

SEQ ID NO: 45289 - DNA, 122 bp, Homo sapiens
aggcactaggaaggagcaattaaaaccacaagtgcgacacagaaatcaggacgagccgagcggctcccggagttgcctggtggcggaatcattagctggctgttgctacaaagcctcaccgt

SEQ ID NO: 45290 - DNA, 122 bp, Homo sapiens
agcatgcccatctgcagtggtaagtccccttggctaccacgctgtctccccttttacgggcgttaacacgcccagcacatgtcagagggcagcgtgtgtgctgggacccccatctggacagc

SEQ ID NO: 45291 - DNA, 122 bp, Homo sapiens
agccagggaagaagagtacctcttcatggtgggcgacttcctgctggccgtcatgggtttcgccaccatcatgggtagcatgagctctgtcatctacaacatgaacactgcagatgcggctt

SEQ ID NO: 45292 - DNA, 122 bp, Homo sapiens
gaccagtttgccaataggaagtgatcggccggtggtggggaggcacccccagtgtgggagcggcacgctcagggttacgccctggtccagttctgaggttggggcggggggcactgacacgg

SEQ ID NO: 45293 - DNA, 122 bp, Homo sapiens
gcctgggggaggggcagagctcatgcctgggcctggctgtggctccaggaagctggacgccgccgcctgctcctgggaggctgctgcccagaaggccagcagggagctcgggcccctcttcc

SEQ ID NO: 45294 - DNA, 122 bp, Homo sapiens
gctccttccttgggtgtccctttggtacgcccccaccctggcggtgagctgcgaggctggcgcccgcgtggccactgcgcatgcggacccggccgcggggcggggccgcgcgaggaggaggg

SEQ ID NO: 45295 - DNA, 122 bp, Homo sapiens
ggagcaccttgctggggcgagttcgtctccagcttcagcgtggcgtgactgttggggggccggtgttgccattttatctgctttgaagtgcgcgattcaggatcattcggtgcatccatccc

SEQ ID NO: 45296 - DNA, 122 bp, Homo sapiens
ccctgggcacagcaggctgagaacactggaaccctgaatgccccacctcaaactccctgtcgagagattccaaacctggggcaagctgagaaccaggggttacctactctctcccctgctca

SEQ ID NO: 45297 - DNA, 122 bp, Homo sapiens
aaggtccaggctgaagtggcgggggcaggattcaagccggaggcaggccatgcccacagccgtgaccttctgaaggcgcttaaccctgtcacccgaaaacccctggtagggagcgtggtgcg

SEQ ID NO: 45298 - DNA, 122 bp, Homo sapiens
aaaggattttaacaacaacaagtttgcgaaccactgtccttgagaagctctccatggatgcgcatgagtctgtccaattggagtcctggtgtatttctacattagataccacacagcagtga

SEQ ID NO: 45299 - DNA, 122 bp, Homo sapiens
aggaggcagcaggctggaaaaggttccagcgaaggtcgcaaggaaccccacaggggaaaacgtggtgggagctcagggtctcccagcaccctgccgccctctgctgggctctgcctgacacc

SEQ ID NO: 45300 - DNA, 122 bp, Homo sapiens
cgcgggccgaagcggaggagaagaccccactcttggtgctggacgacgtggagctcatgccgcggccgctgctggacgagctgcacggcttcctgcagccgcagcgctcccaccacttccac

SEQ ID NO: 45301 - DNA, 122 bp, Homo sapiens
tcctctctgggccctccccaaatgctctaatggaccaggtggcatccccgagctgggctgcgtctcaccctttgaggtgccccctacagcccagcaaggatccagaacagtccttgtaataa

SEQ ID NO: 45302 - DNA, 122 bp, Homo sapiens
taaaatgagtaaaagcaaaccacttgcagttcagatgttgagattcggtgggaaggacctcgagaaacagcggacaatttcaggatttaggactttaggtcttgatgggtggatggtactgt

SEQ ID NO: 45303 - DNA, 122 bp, Homo sapiens
caccggcccctggcacagccactgcccaaccccagcgcccccctccggcgcatctatgagcggcccagcacaacctgcagcaagcctcagaggtgagggcctggggggccttcgggggccca

SEQ ID NO: 45304 - DNA, 122 bp, Homo sapiens
tctttctccccatccagagaccctgcccagaggagcaggccctggagctgcaacagaaaccggaggctggcccaagtccctctgggctgggctgggctgggctgggcagagctgggctgggc

SEQ ID NO: 45305 - DNA, 122 bp, Homo sapiens
ttctgcccttctcccttctggcaccccggccaggaaattgctgcagcctttctggaatcccgttcatttttcttactggtccacaaaaggggccaaatggaagcagcaagacctgagttcaa

SEQ ID NO: 45306 - DNA, 122 bp, Homo sapiens
tgcggaaagtgatgtgccgtgtcctgtcattggccgaaagagtctcgttttgatgccacccgggctcagattggcccagcgggtccagcgccgcatgaggcactggctgggtgtgaggtggc

SEQ ID NO: 45307 - DNA, 122 bp, Homo sapiens
taactctttggggcaagagagtacaaacagtgatgacggcctcattggagaggccacacacgggctcttcaggtgtacatgagggtctgggttccctcgtcaccagggatgccgtccccttc

SEQ ID NO: 45308 - DNA, 122 bp, Homo sapiens
tgctttcaggaagagtttggggagagacagtaattttgtctaaaatgctctgctcaccaccgtctcaggttgcctgtttttaaaggagaatggctcatggtctttgatgatgattctggtac

SEQ ID NO: 45309 - DNA, 122 bp, Homo sapiens
cagcaggcgccgcttctgtgtccaccgagtcagctgggatccatgcagctggtggcttgtcggtggcaggccaaggcctgagtcatgtccccgtcacagccttcagtggagggctgacccac

SEQ ID NO: 45310 - DNA, 122 bp, Homo sapiens
tatggtatttttaatcctttcaccaaaggtcatctggtcagtgagctctgataaggctgccggtacataggagactggtgctgggattttcccacagtgtctctccactgttgatgctggag

SEQ ID NO: 45311 - DNA, 122 bp, Homo sapiens
ctaggctgggggtatttgaaatgttagtccacttaatccacaaaatgatacccatgaggccgtcatgcttactttattacagatgaggaaactgctctcccagcatgagactccatccagct

SEQ ID NO: 45312 - DNA, 122 bp, Homo sapiens
cctgctccctctagagaaggtgtttataggtggggatccttcccagagctggtactgtagcgctgttccctgtaacctggcacccctcctgcctcttcccctgtccatgattgcagggatct

SEQ ID NO: 45313 - DNA, 122 bp, Homo sapiens
ggtggcactgatagcctgggagagggagggagaggaggacgggggcacctactcaggctccggctgcctcaccacaagaggaaaacagggtgaagttgcaggaaaggagccccaggccgggg

SEQ ID NO: 45314 - DNA, 122 bp, Homo sapiens
tccaatcaaatgggagcccgaggtgattggagggtcaaggggatgtgacgcgtcccgcgccgccgccgccgccgctgccaggactctcagtgccggttttaatgggcagctccctcttcgcc

SEQ ID NO: 45315 - DNA, 122 bp, Homo sapiens
gccagtccagcagcctctttcaaagaagcttttataggcagatagtttgtcagcccagctcgaaatgtgaacaaggtagcagccgagcccccacccatccggctgcactcccctgcatgtcc

SEQ ID NO: 45316 - DNA, 122 bp, Homo sapiens
taaggaaaattggggctgaaaagtggattgtggtgaaactgtggagagctgtgaatgtcacgaggaaggatttaactttgtagaaggaagttagcatcttttgtgcactttttagcagcaat

SEQ ID NO: 45317 - DNA, 122 bp, Homo sapiens
acgtcccttccgccgcctgccgcaggtggctagggtctgagcacacttgaacctcacacccgccccaggggtagctccttggttcccttcagccccgatgtgtccctcgtgctttgaaatgg

SEQ ID NO: 45318 - DNA, 122 bp, Homo sapiens
aagctggcttcccctctccacaactcagcaactatctattctcccaggaggccatacaagcgaggggccctgaagcttaacatttattaacttcatgtaaaggtctgagcggacctttcagg

SEQ ID NO: 45319 - DNA, 122 bp, Homo sapiens
ggtgatccaaccgcctcggcctcccaaagtgctgggattacaggtgtgagccaccgctcccggccttgcacaccatcttaagtgtgacgccacactgcccttcacagccttggggctctgcc

SEQ ID NO: 45320 - DNA, 122 bp, Homo sapiens
tgatgaaaaagttttaggtgtacgtaatagtgacggaaacagctgcccatctagagccgccgctatcaagacacaggataccgcggagaggctctggccagagctataacgctccacggagc

SEQ ID NO: 45321 - DNA, 122 bp, Homo sapiens
acgcgaaccgcgggcacgtgacggggcggggcctctggagcggggaggggccgagggtggcgttcgggcgccccctgcgggtctccgccactgctacgttttgacctcgtagggcagctccg

SEQ ID NO: 45322 - DNA, 122 bp, Homo sapiens
gatatcattctcctggtggagtaagcaatctctttgaaaaaacagtgaaaagagcatcaacgttggtcttagacaaagatttgtatgcaagctccaccaataagcttaattatatgccaggt

SEQ ID NO: 45323 - DNA, 122 bp, Homo sapiens
gggtaatactggggttaattcaaatttgttaaacaaattaaccctgcagtgactttctttcgtacagcaaaatcagcatcactctgaactggtgcctgtggcttgtatccaagtatctcttt

SEQ ID NO: 45324 - DNA, 122 bp, Homo sapiens
cgtgatccgcccgcctcggcctcccaaagtgctgggattacaggcgtgagacaccatgcccggcctaaatttcatgctcttggttaacaatgtaaagaaaacaacagcaggtgttggggtgg

SEQ ID NO: 45325 - DNA, 122 bp, Homo sapiens
actcccgctctctaaagagtcaccgagggcattggaaatttcggctgcgaacccggagagcggctggctctgctgcggccgggctgccgtcgctccactccagctgccgtttctttatttaa

SEQ ID NO: 45326 - DNA, 122 bp, Homo sapiens
gccccctcctggttgtgacaaccaaaaatgtctgtagcatgtccatatagaggacacaatcgccccaagctgaagatgcctgcaccagattatgagaaacccacagggaagggctacaattt

SEQ ID NO: 45327 - DNA, 122 bp, Homo sapiens
tccgtacctccaaggctcccatgggcccaagcctccgcatcaacagactgggagggattacgtggggtcccagggccggctctgaggcgggaaaactttctggaggcggcggcctcaggccg

SEQ ID NO: 45328 - DNA, 122 bp, Homo sapiens
agtgggcacattgaagccagcttgcttcaactccttcacattgggtggtacagacagacccggagggaggcggggacattggctacatttgaatgaaataacatccatttagaaacctgagc

SEQ ID NO: 45329 - DNA, 122 bp, Homo sapiens
ctgtcctcctagttttaccattggttggcttttgcgtccttcaagggcggttacttaccacggattggttctttttctcttgaggttggaggaagatttggcacggctctccgcggcctggg

SEQ ID NO: 45330 - DNA, 122 bp, Homo sapiens
cagacccagctcccaaagtgatggacttcaaggaaaaacccagctctccggccaaaggttcggaaggtcctgggaaaaactgcgtgccagtcatccagcggactttcgctcactcgagtggg

SEQ ID NO: 45331 - DNA, 122 bp, Homo sapiens
tactcagttcccagatggggtcaccgccgggcagaggcgctcttcacatctcagacagtgcggcggggcagaggcactccccacatcccagaccatgggcagccgggcagagacgctcctca

SEQ ID NO: 45332 - DNA, 122 bp, Homo sapiens
tgccacactgagctccgctaggcttcccctttgggcctcgctggcagacgagtgcgtgcgcggcgtccagtacctctcctggcctgatgactgaggccaggccttcccaatacgcagagttt

SEQ ID NO: 45333 - DNA, 122 bp, Homo sapiens
ggggggggggcggggagcgacattaggccagcgcgagtgtgcggctccaggccaccagggcggccgctctggctctgccctgttaaagtgggggcagcgcccgctgaaaattggcacatctt

SEQ ID NO: 45334 - DNA, 122 bp, Homo sapiens
ttagaatgggcgagggcagctctgtcccagtgaccagaacggttactgtctttaaaaagtcgtgaaaatgatcgtgaactgtaccccacaacgagtgcgcgtctgccccccaagacggtgga

SEQ ID NO: 45335 - DNA, 122 bp, Homo sapiens
ccaccatgtacttgtatacatgtacattattgtgttggatttctctgacacaatgatgctcgacaaagtcgctggccacagtgctgaatcaagacagccatattggtccctgctaaatctga

SEQ ID NO: 45336 - DNA, 122 bp, Homo sapiens
agtggctttttaaatgtgccatccaatgtttgcaattaaatttgtggagccgggcgcggtcgctcacgcctgtaatcccagcactttgggaggccaaggcgggcagatcacgtgaggtcagg

SEQ ID NO: 45337 - DNA, 122 bp, Homo sapiens
ccatgcctgagcctccccgctccgcctctgcgggctcctgtgcggccccagcctccgcgacgagcgccgccccctgctccacggcggcgcccagtcccatggaccacccaagggctgaggag

SEQ ID NO: 45338 - DNA, 122 bp, Homo sapiens
cccggctcggccccgcccggtccgctgcgcccgcgcccgtccccgcccccggctccctgacgcccccggcctggagacgcaacccgacgcgcacaaccccagaccctgcgcgggagtcgggg

SEQ ID NO: 45339 - DNA, 122 bp, Homo sapiens
gtcaccgtcctgtcctaaagacaagcaatgtgaagcccagagatggtatcttaaaacaatcgtgtggtttttttctgattacaacagcaattgtgttaatccaacaatatttttcctatcaa

SEQ ID NO: 45340 - DNA, 122 bp, Homo sapiens
aacttttcgcgccccaaggcggccctttataaagatgcggtgacgtcaccgcgcgccgcgcgtgcgcaaatatggtaacgtgaccacgccctggcctgcgctaaggccccggcgtcggcgca

SEQ ID NO: 45341 - DNA, 122 bp, Homo sapiens
caggcctggctgttctgcccagggttcacagagtggaaagggagatggctccaatgggaccgggccagatctgttggccaggaggggtcagtccccatcggagctccctcctgcctcccatc

SEQ ID NO: 45342 - DNA, 122 bp, Homo sapiens
ggccccacgcccacttccgcttcccgtgctgggggcggtggcagggccggtgggcggtggcggctcccggtctcggctcgggcacggccctgggcaggccgcccgccagccgcaggggcgct

SEQ ID NO: 45343 - DNA, 122 bp, Homo sapiens
accaggtggctggctgtagacctgggcgaatgccagctctcttcagcttcgtcccaactgcgacttctgctccattcttctaacagccctttcaactccgctcggctgtaaccgcagactcg

SEQ ID NO: 45344 - DNA, 122 bp, Homo sapiens
agcctcgggcagccctgagaggcaggggctttccacagcccagctgggtgccctgggctccgtgctgtccgaggagacgccatccccacacccgtccttcacccgccaccctcccgcaggta

SEQ ID NO: 45345 - DNA, 122 bp, Homo sapiens
ctcggggtgagcaccagcgtttgtcccatcccgacgctgccccccggtgagtgcggcccccgcacccagccagtgcagccctaagggcgaacgcggcccctcaccccattctgcgcgcccag

SEQ ID NO: 45346 - DNA, 122 bp, Homo sapiens
tctcagggaccgtgtcggggggtgctgactctgcccatcaaggggagccggacatttatccgccaaagcccgtccctcgcggtgagggtcgctcctgggtgtgggacccctggcttcccgcg

SEQ ID NO: 45347 - DNA, 122 bp, Homo sapiens
tgtctcattaggagattgcatcacaacaccaatgttcagaaacaaggagactattcttgtcgaggctgtcataactcagaaacgtctgtaaggggatgacaaaaacacaaaaatcaagtaat

SEQ ID NO: 45348 - DNA, 122 bp, Homo sapiens
tagactttgggacaatggtcctggggtaattctgagatatatgcagacagccaggggttccgtacacaaccctaccacctagaattgctactcctatttgtgagcttggatgtgtatctgtg

SEQ ID NO: 45349 - DNA, 122 bp, Homo sapiens
gaggcacccccgcgaagcggggactgagagccagcccctttccccccttggctcttgggacggccatctcaagaggggggatgcaaaccctgcaacgaggggacagagagacagcccttctt

SEQ ID NO: 45350 - DNA, 122 bp, Homo sapiens
gggctggggcggtacgaagcgggggtgggctctgcgcgtaatggcagcgccgtggcctcgcgtccatctttgccgttctctcggacctgtcacaaaggagtcgcgccgccgccgccgccccc

SEQ ID NO: 45351 - DNA, 122 bp, Homo sapiens
gtttgggtcctggcctgaggtcatagcatctaggttccaagggcagtgtaccagggtggacggcggagatccgggaggccgagaacgaaggctccaggtccccagagcggagatcggggttc

SEQ ID NO: 45352 - DNA, 122 bp, Homo sapiens
ctactgggctgcctacccagatggtgaaggcattctaagtcacaggatgagacaggaggtcggcacaagatgcaggtcacaaagaccttgcggataaaacagattgcattaaagccagctga

SEQ ID NO: 45353 - DNA, 122 bp, Homo sapiens
agggtttcatagcagagctagtaataaataactgcattcagcagccatttgtatttttcccgaactgttaatgtctaactctaaaattcaaatattctgattttctaatacatttgctattt

SEQ ID NO: 45354 - DNA, 122 bp, Homo sapiens
gggttcatggagaggcgaagggctggcctgccagtcaccagcacactccagtggtttggacgagtgtctgcccaggggcgggcgagtgtagcctgcaaccctccagtatccagaacgctgca

SEQ ID NO: 45355 - DNA, 122 bp, Homo sapiens
cttgcagttcccaatagggcagagtccgtcatctttttcgaaagggcaattattttgagccggtcggagccggtgcgccagtgtacttacaatacctggccgccgagatcttagaactggtg

SEQ ID NO: 45356 - DNA, 122 bp, Homo sapiens
tcagagaaaaagactggtgcttgagtttccatgatgacatctgactttgctttgcagcagcgagtgccacgtaatcaagccgtgtcacatgcagtcctctggcacggggtgtgtgatagctg

SEQ ID NO: 45357 - DNA, 122 bp, Homo sapiens
gccagcaggccccggcggcggggcgggcccaaaggccccccgcccactttagttttcccgcgactgcccaatcaacgccaagcaaccgcaatccgtagagacctaaggaacgcacatccgcc

SEQ ID NO: 45358 - DNA, 122 bp, Homo sapiens
ggtgagatgagagtaagatacagaactcaaggacaaaatccctgccctgcctagtcttaccgagaagtctagaggaatccacatctaaactaagcaagagcactatttaattaagcatttct

SEQ ID NO: 45359 - DNA, 122 bp, Homo sapiens
ggcgtgaggggctgggcagctgccaggcgggggcggggcagcaggtcacgtgcctggcttcgaggcgggcgccggagggggaactctgaccatgattggttcctcctaaccaggtgaccgca

SEQ ID NO: 45360 - DNA, 122 bp, Homo sapiens
ctgcctcctgagctcaggtcggtcgtgcccatcctggcatcaccccacagccggttctgccgcatcccgtcatgttcctcgtgctcccagcccggtcgtcctggaggcctcagtcagcctct

SEQ ID NO: 45361 - DNA, 122 bp, Homo sapiens
gtcctgtcacctgtgcgacgccgggcagccccacctgcagcacggggcagccttcctgaccgactacaacaaccaggccgacaccacctggtggcaaagccagaccatgctggccggggtgc

SEQ ID NO: 45362 - DNA, 122 bp, Homo sapiens
gcctggttgagacattcactggagggtctgggtgcagcccgctgcctggccggtaggcggcgcgcacaggccgtggggcccgggtctgggcgtgcgcgcggctggtagcagcggggccgcgc

SEQ ID NO: 45363 - DNA, 122 bp, Homo sapiens
tggtgcttgcgggccagctagagttccgggtcagctagagttccggatgggtgtgggcttcgcgggcccgcatacggagcggccggccggtccatcggcaccaggcagtaaggggcttagca

SEQ ID NO: 45364 - DNA, 122 bp, Homo sapiens
agagacagaacctgcctctaccggtcttccaaggcactgagagcccatcgccgcggacgccgctgtaaattccctgcgggccctgtgcaccaccctgtgcgggtccccctctcccaggccag

SEQ ID NO: 45365 - DNA, 122 bp, Homo sapiens
ctctggcattcgcgcattggctgtacccttccgcttacctatgccactgtgcctgccttccggcgggccaaggtctttttccggcatcaagcccaggaatggactgtcaacaggcttgctga

SEQ ID NO: 45366 - DNA, 122 bp, Homo sapiens
agaacttagagaatattggagacgtgtcaaagacacagaagcctgctccaagggggctcccgctgatcaatctgggacaacttgggcatcaaaataaagagaatatggatttaaactgaatg

SEQ ID NO: 45367 - DNA, 122 bp, Homo sapiens
gctccgcgcggagtccacaccagagaagccaggcaaaaacggccccggtttggaaagagccgcatggacggagcttgaagcgcgcccggcccgggcccaaacctccgctgccccgcgagagg

SEQ ID NO: 45368 - DNA, 122 bp, Homo sapiens
ctgccttgtgccacagctctacaggctttcacgtgtgtcatctcacgtgatcttctggggcgctggtgtctccgtttactagaggaccaatcggaagcttaaagagaatgagtaattggccc

SEQ ID NO: 45369 - DNA, 122 bp, Homo sapiens
aggtttgtgccttatggggatccgtcgtctcgcgagataacggttccgctgctggcggggcgtttgcagtggcccttgtgaactatgtttctgccgttaccagtgttggacccgccttcctc

SEQ ID NO: 45370 - DNA, 122 bp, Homo sapiens
cggcttcctgcacggcctggctgagccgcaggcggccgcgctgggccccgagggcggccgcgtggccatggacggcctgggcctccagttccccgagcagggcttccccgccggcccgccgc

SEQ ID NO: 45371 - DNA, 122 bp, Homo sapiens
attgatggggaggtcaggacacacacatttattgattaagtttgctctcttatatggatgcggtttatggcacctaaaacaattacaatagtaacgtcaaaaatcactgattatagatcacc

SEQ ID NO: 45372 - DNA, 122 bp, Homo sapiens
cacaacgaccacactaagagtagggtttacatgtgcattcacaagatactaaacaagaaacgcaattgccattcagtcatgtgatatcccagtggaaatgaaatgtatttagtgaacttcag

SEQ ID NO: 45373 - DNA, 122 bp, Homo sapiens
aggcacacgttgtcgtcgaagggcagtacgtcgagcagggagcgagccgccagcgccgcccggcgcacgtacaactgctcctgcagctcctcggagctgaaccagggccctgcagcgcccgc

SEQ ID NO: 45374 - DNA, 122 bp, Homo sapiens
gtttggattaactttagctcacctgtgaaatccgagttgacaagggaatcaaagctatcacggagtccactggcactgcgtctcctggggtgtgcgttttcttttaactcacatgcttgaaa

SEQ ID NO: 45375 - DNA, 122 bp, Homo sapiens
tctcctgtcggtttggtcccttttcaatgaggattcctcactggggagcagctagtcttgcggtctttcagtgtagtgtcccatcctctttctctgttacttgtctcactctccttattcct

SEQ ID NO: 45376 - DNA, 122 bp, Homo sapiens
ctctcaccttagatgcccctatccccgagtggcctcggtagccctcttaccgggcgatctcgcacttgctgacctccaggccccgcttgggcatgctgcccataccccgctgcggctccttg

SEQ ID NO: 45377 - DNA, 122 bp, Homo sapiens
tcaaccgctcagaggagcccaacaacgcccgcgcgcccgcccgtcccgctgactagcccgcgcccagccaatcaaaattggccttctaggtatgtgaccttagctggcagctgattggtccc

SEQ ID NO: 45378 - DNA, 122 bp, Homo sapiens
gtcccgccccgcgcgctcattggcagccccgcccccgccgccccacccggcccggggacgcgcgggcgcaccgagacctctgccttacaaggccgactctgctcaggccccgcggaccgccg

SEQ ID NO: 45379 - DNA, 122 bp, Homo sapiens
gcagtcggggcagctgtaggtgcggcctggcaggtgggtgcgggcgtggatggccagcaccgagctctggccaaagcgcttgccgcactcagggcacttgaagggcttctcccgggcgtggc

SEQ ID NO: 45380 - DNA, 122 bp, Homo sapiens
gcggggctcccaggggacctcggcggtgacacgaatttctaggtgaccttggcggtgacacgaatttctaggtgacctgtgtgatacactaggtgacctagtgacacaggtgacacttccag

SEQ ID NO: 45381 - DNA, 122 bp, Homo sapiens
tgtatcccaagagttaaggaaagctgaccttttgagggctatttcagccaaatcagggtgcggtctactgaatcatctccaccttacagcagggcacgtctatgtgaaaacaaatttcacac

SEQ ID NO: 45382 - DNA, 122 bp, Homo sapiens
ggccgcccgggcgaatctgcctctgccaatgggtgacacgccgattttgccccctggaaacgccaagaggcgcgaagctgggccaccttcgccgcgggctgcagcggcgctcgcgcgcgttt

SEQ ID NO: 45383 - DNA, 122 bp, Homo sapiens
agttgattggggtcatagaatcggagcctagttccttggctaagtcagcgcttaatcaagcgccggctggaggcccagcctggtttatagtgatgattctagctaactttaagagtttgctt

SEQ ID NO: 45384 - DNA, 122 bp, Homo sapiens
aaggggttaagctgcccgcctgcagcctcagcctgagctattgtgttgccaaacaagggccggacatgagggcaggaagccagcaggggccacacattttctgcaaagttggatgattcact

SEQ ID NO: 45385 - DNA, 122 bp, Homo sapiens
catctcattgggactggatggacagtgggtgcagcccatggagggtgcgctgaagcagggcggggcatcgcctcacctgggaagcacaaggggtcgggggatttccctttcctagccaaggg

SEQ ID NO: 45386 - DNA, 122 bp, Homo sapiens
gcagactcagcaggggcgggtgcaaggacgaggcggggcctctgcgcccggccctcttcccggactataaagagagccgccggcttctgggctccaccacgcttttcatctgtcccgctgcg

SEQ ID NO: 45387 - DNA, 122 bp, Homo sapiens
acagtgagtgagttctcttagtccccccagagctggttgttaaagagcctggcacctacccgctctcacttcatctgtgtcatctctgcacactccagcccactttctgccttcagccattg

SEQ ID NO: 45388 - DNA, 122 bp, Homo sapiens
caacaggaattcactgagaaagaacgattagtgatacaaaccaacccaggggtcaccgggcgagagcgcaccgtcatgcaaagcaccagcaagcaaggtcagaggtcgttagaggctcagaa

SEQ ID NO: 45389 - DNA, 122 bp, Homo sapiens
gcaagagtggggagaccaccactgaggggctggggtgggggtaagcccagggacaggcaacgcctgaggagggcggtgtcttgccacatgaggctgtcccattcatagcaacctgatctcca

SEQ ID NO: 45390 - DNA, 122 bp, Homo sapiens
tagaatcacggtttgctgtatctggaaggaaccatgaccacttggtacagacccttcaagcggtagatgaagaggccaaagcacgaagggatttgatggcttgtgaaggcaacgtgctcttc

SEQ ID NO: 45391 - DNA, 122 bp, Homo sapiens
cacgcaccggaaggcctggaaaacagtgcagggcagacagcaagcacgtcccacccgtgtcgtgggggtccactcacgctcaacgtccagcagagagaaacccagtgaccagaaagcagacg

SEQ ID NO: 45392 - DNA, 122 bp, Homo sapiens
tgcaaagcccccagcgtgttccacggaaccctccctgctacccgctcccagcgctcctgtcgccctggcctgtgcttttgagtccccccaggacgcacagggagcctggaggacccggggcc

SEQ ID NO: 45393 - DNA, 122 bp, Homo sapiens
gagtagctaggatgccaatgcaccaccatgcctgctgattttttatagagacaggggtctcgctctgttgcccaagctggtctcaaactcctggcctcaagcagtcctaccacctcaacctc

SEQ ID NO: 45394 - DNA, 122 bp, Homo sapiens
gaaattccaatcctgggggcgtgagtcctgccgcccctcctgcctggtgcctaccgccgacgggttgtgtagcctgatctgcctctccgaggtgcagcccacagcaacagagccaaagtaca

SEQ ID NO: 45395 - DNA, 122 bp, Homo sapiens
tggagcctgtatgtgagtgggaatggtcctcccttttcatcctcaggactggccagttcacgtgtcacccgcagggcggaggctgcaaattgggcaggatcgtggtggccgcctcgggtcca

SEQ ID NO: 45396 - DNA, 122 bp, Homo sapiens
ggggaagatgttcttggttcagtgcggagagccctgactcacattgaccacagcttgagtcgtcagaactgtcctttcctggctggggtgagttgggtcttgagatgaggactggggaaggc

SEQ ID NO: 45397 - DNA, 122 bp, Homo sapiens
caggtccttctccaccttgatgcgcttggcggcgctgttgagcccggggctgggcagcggcgcgggcttgcgcgggaagagcccggggaagggctcggtgcctggcgcgaagccgcccccgc

SEQ ID NO: 45398 - DNA, 122 bp, Homo sapiens
taaagagaaaaaaatttcctgtagacttcttcatctgcccttaaagtaaagccacagttgcgtctgtcctctcacctggcagcctatgggcaattcaaagttattttccctgtaagagattt

SEQ ID NO: 45399 - DNA, 122 bp, Homo sapiens
cttgtgacttgtttgagacccaaacaaaatgttatgcgtttaaaagcttactgggctgctcggggaccagtgttttgaatgaacctcttcgagtgtctctatcaacttagctggtagctact

SEQ ID NO: 45400 - DNA, 122 bp, Homo sapiens
tgcaaactctggtaccagcgctgtgaaaccccggcactcaaaaggagcctgagctagccacggggatgaccacagcttacaaagatgatgcagagggccactggggctgtctgagctaccca

SEQ ID NO: 45401 - DNA, 122 bp, Homo sapiens
gtgatttaaaaaaagcactgacattgtaacagtgcatataagttgcccagttgtttcttacgtttattatttcatgctgcacttaaaatgagttatttttgtcgtggaaaagaatcaaactg

SEQ ID NO: 45402 - DNA, 122 bp, Homo sapiens
gaggggtttagcacccgggccggcagctgcagagggtgcactgagtcccccagcactgcccgcccgcccacgctgcactcgaattctcgccaggcctcagccacctccccacggggcagggc

SEQ ID NO: 45403 - DNA, 122 bp, Homo sapiens
gcatacacttctctgaaagcgttctgctcatcaacagggccagccagtgacttttctgatcgcttaatgcacctatccagtctcttcacaggcggctcctggggtctgccgggggtgctggc

SEQ ID NO: 45404 - DNA, 122 bp, Homo sapiens
aaatacctcggctctcctgtttgatcactctcccttttgacctgaatggatcgcgggagccgcgccgcccgccccaccttcggcccgttgccctttaaaggaaaagggcgtggggacggatt

SEQ ID NO: 45405 - DNA, 122 bp, Homo sapiens
ccatcagctcactgctcctgcagaaactgacttgcggccccggtgagtaggcctcatgggcgagacggcacttggcctgggtctcaaagaaatctgggggatttgtcagacgcagttgtgat

SEQ ID NO: 45406 - DNA, 122 bp, Homo sapiens
aatgagcaaaggggaggccactgtctgtcaaagagcaaaggcggggtcagtgtctgccaacgagcagaggcggggtcagtgtctgccaatgagcagaggcgggaccagtgtctgtcaatgag

SEQ ID NO: 45407 - DNA, 122 bp, Homo sapiens
cctcttcttcgtcttgatgttaaatattactttgttgtggaatgtttaatctacaacattcgtatagtgattaagtatactagtatgtatggtttgcaatatttactgacttatggagtggc

SEQ ID NO: 45408 - DNA, 122 bp, Homo sapiens
ccaggttgcaagggactaggagagccgggcgggccgggcgggggcggggggcggggccagcgccgggggcggagtcccggcctcacctggttcacctccttaaagggacagtagggcaggaa

SEQ ID NO: 45409 - DNA, 122 bp, Homo sapiens
tgaattcttgtccgggtgggactggcctcggtgaaggatccgggaatgggacttccgggccgggccggaggggaagtgtcaggaagagctcaggctttagcgagcctggagggaagggaagg

SEQ ID NO: 45410 - DNA, 122 bp, Homo sapiens
tttctggcagttaacaacacacacggttagattctaaaagctcaacagggttcataacaccgcctctgagccagacatcaagggctccacacagccgacttcacatctccaaatcctactaa

SEQ ID NO: 45411 - DNA, 122 bp, Homo sapiens
cgacacagaaacccatcgaaaggggccaccgagacccgttgattagctggagggagcatgcggcagaagtgcagacccctcgctaacccgccaacctccaagagccctcttgcagaaagctg

SEQ ID NO: 45412 - DNA, 122 bp, Homo sapiens
gctggaggagtcatccctcaggccactcccacctcccgttcttggggatagctttaatatcgccacggagcagagaggttctctccttcgccctaaatgcagcaacttttatactccatgtt

SEQ ID NO: 45413 - DNA, 122 bp, Homo sapiens
ccacaaacagactcttgatgcaaaccagccagaccccttgtgggtcagatgccaatcatgcgcgagtcagttggtgatggggacttgggctgaaaggactcactgccactgcaggcatgagg

SEQ ID NO: 45414 - DNA, 122 bp, Homo sapiens
aatacgtgcttcaacgaggacgaaccatggaaacaggagtggtcaatacgtgcttcaatgcggatgaaccatggaaacaggcgtggtcaatacgtgcttcagtgcggacgaaccatggaaac

SEQ ID NO: 45415 - DNA, 122 bp, Homo sapiens
ttttttttttttgaggcaagaatattgaaaccaatccactctttctgtagctagctcccacgaagctgggattttcaacctcttgtttattcgtaaagcccatatggaaccccggttgaatc

SEQ ID NO: 45416 - DNA, 122 bp, Homo sapiens
cggggcgccagggccctggggccttcttggcattcgctggaggttgtgagttacgaggcccggatgttgatcttttattactagcaacactggacccctgactcgtgcccacgcgggcgtct

SEQ ID NO: 45417 - DNA, 122 bp, Homo sapiens
caggattcaaactccagcccagcctggcccagagacaagcttgtaaccacagcatcctcacgcctgccagagagaacatgagtccagctgtggcagccacagtggtcatagcttaaagggaa

SEQ ID NO: 45418 - DNA, 122 bp, Homo sapiens
gtggcggcccagctttgagcttggcgcgccttgagcccttccttcagatgtcccgcagtccgtccaccccgcacgtctcctatcagcctatgcacggcgggctccggtcaggtggaggatca

SEQ ID NO: 45419 - DNA, 122 bp, Homo sapiens
gagcaactgcagctccgccagcggctgtgcccggggggggggtgtgggggggggagcctacgcagcagggcgcctgccactctcacccagggtcacgagaaagcgctcggaaggagccctgc

SEQ ID NO: 45420 - DNA, 122 bp, Homo sapiens
tgctcttggtgcggaacagctggcgccggctgttgtcggtgaggtccgggatgtcgaactcgtccttctctgtgggagaagtggagagctgggctgtgctcacacattcccggggcccagtc

SEQ ID NO: 45421 - DNA, 122 bp, Homo sapiens
tgacgtgtcgatggagttacactgatgtattaatttattcggcaaacatgcatgggactacgccaggcgtggctctaggtgctgccgacactgggatgaaacagccgggatccctgcccctg

SEQ ID NO: 45422 - DNA, 122 bp, Homo sapiens
taagatgttttaagggctatcccataaagccgggaaggcacaacgggtggagctggcggccgccgggggcaggcacttttgagctaaggaggaagcgggggagggaaggagggcgggaagga

SEQ ID NO: 45423 - DNA, 122 bp, Homo sapiens
agcgtcactggtaagacatgatggcgctccacgactgaccagcagcgctgggaagggacacgcagaacccaccttccaaccacgcccaacacatcacagaaatgcctgctcgtttgttttga

SEQ ID NO: 45424 - DNA, 122 bp, Homo sapiens
cggggtgtgaaacgcacttgtgcgggaggcccgctttctcaacccacagcttccaccggccgactgcaggacatgagtatgtgtggattttgggatccacaggggtcctagaaccaattccc

SEQ ID NO: 45425 - DNA, 122 bp, Homo sapiens
ccattgttagcaggctattccacggcagctttgcatctggctccggcgggaagcggaaaacgggaggcggctctcgaagcttcccgaccttcctgcgccatcaacttctcaggagtggctgg

SEQ ID NO: 45426 - DNA, 122 bp, Homo sapiens
ccccgacatcctgcggacctactcgggcgccttcgtctgcctggagattgtaagtggggccgccggagcgagggtcgcgcggggagcgaggacaggcggcggcatccttgtcccccgggctg

SEQ ID NO: 45427 - DNA, 122 bp, Homo sapiens
taggcctcttaattgccttatttcataagaagctgactcactcaaaggtcacaaaggcagcgatggcagagccaagatcagaagtgttaaggctgaaaacaggaagagggcaacagaatgtc

SEQ ID NO: 45428 - DNA, 122 bp, Homo sapiens
tcctggtgcagctgcgggccgacctgctggaggcgcaggccctcaagctggtggaggggccggacgtccgggtaaggggccgccgtcgatcccccggcagcgcggactggccgccctcctcg

SEQ ID NO: 45429 - DNA, 122 bp, Homo sapiens
cccattcaggatagggtcaatgtcacttcaaaaggtataattacaaaaggctagagaccacgccttcagctttaagagaatagcagtaccttccatcctccagaaagcttttggacttgtgg

SEQ ID NO: 45430 - DNA, 122 bp, Homo sapiens
aaaattcccaatggttatgtagaccagagactaacaagaaacaatatttttattttctttcgggagttacaggcacattacaatatgagaatgaaactagattttgaaagttcatgatttct

SEQ ID NO: 45431 - DNA, 122 bp, Homo sapiens
gaagccggagaggatcgtccttgtcggggaacggagcttttccctggaaatggaggttggcgcaaggttcctgcaacagccgggcctgggctctctgcagaactggtttgggcaaggggctg

SEQ ID NO: 45432 - DNA, 122 bp, Homo sapiens
gagaccaaaggcagctcagctttgttcaaagtacagaagggaaaggaagtgacttatttacgcccttctctgtactgggtactttgcatgcctctgatcctcagagtaaattcataaggtgg

SEQ ID NO: 45433 - DNA, 122 bp, Homo sapiens
agcgggtagtgagctttccacggcagataacatggtggcgagcacgtcctgggtgcctaccgcagaccggccctgggcggcctcaccccacgctgcccactcactgtgacggtcggggtcaa

SEQ ID NO: 45434 - DNA, 122 bp, Homo sapiens
gggccaaatgcccgctgaggttttgctaacagtcactgacatgaggcagatggatacatacgagaaaagtcacacaaatttatttaacatttatacctgggaggcttaaggatgaagacctc

SEQ ID NO: 45435 - DNA, 122 bp, Homo sapiens
tgcgtactgccagaggaatgggctggactctttccagctccgtaatcctgggagcagcgtcggtgtggaaggaaccctgacggcaagctgttacataagagcccagtcctgcactgcgggga

SEQ ID NO: 45436 - DNA, 122 bp, Homo sapiens
aggcaagacttggtgtcgaggatctgctgcctgagccgctgcacctcctcgaaggagtcgcggttgtccagactgaacaccaggatgaaaacgtctcctagagggggcacagagagcagaaa

SEQ ID NO: 45437 - DNA, 122 bp, Homo sapiens
ctgcagcagcctcagccacctgttgcctggatgctggggcatggcttcaaacggcagcaccgtcctaggggcccgagcggctctagtgcccagtgcccgtgccctttgcagggacagccagg

SEQ ID NO: 45438 - DNA, 122 bp, Homo sapiens
cgctgtcccttgcccatggacaggccctctctggcaatgccctgcacctcctccccaccccggccaggttggaccccgatggtctccctgctcaaggaggagagaagagaagggacgccacg

SEQ ID NO: 45439 - DNA, 122 bp, Homo sapiens
aaacacttagagcttgtgtggccatcttgtctttctaacggtgccatttcctccctgaggcgtggaggactggccagcccccaaacctccaagcccatcggctggatgccgtggataagcga

SEQ ID NO: 45440 - DNA, 122 bp, Homo sapiens
ggaagataaaatccaccttggtgaagagcagctgaagtgcttattggacagccttcagcccgaaaggggcaaataagagaccagtccccggtggaggaggggcacggggcctccgagctcca

SEQ ID NO: 45441 - DNA, 122 bp, Homo sapiens
tcatcccacccacgcaatcccccagtttttgtgcaagggggccactagtcgggctctgcccgcccctcatcttctcttctctctccctcccgctctccccccaaaaccccgccagtggctca

SEQ ID NO: 45442 - DNA, 122 bp, Homo sapiens
tggacagatctgtgcccggcactgggtctgctccctgcacagacccacacctggtgctggcgccactccccggacacacctgcccctggcgctggcctgggttgggtgtgtccgtgtgtcca

SEQ ID NO: 45443 - DNA, 122 bp, Homo sapiens
gatttcatccctgacagcagaaaatgattggcaatggttatgacggagaacatgcaatagcgtggtccttaaaaacctgccattccttacaagtgccttagaaaggattcagggcgaaccaa

SEQ ID NO: 45444 - DNA, 122 bp, Homo sapiens
cacagttaaaggctactttctcttgaagcacatgaggagaagccttagcaacctcaataccgaagttcttcgcgcgctcgctctttctgcctccgcccgaactatgcctgagtccctcacag

SEQ ID NO: 45445 - DNA, 122 bp, Homo sapiens
gtgggctcttcctgttctaggatttctagggggcagagaaatcagtcttgctaaataccccgcccacatgctctcgaggagcaggaattctttgagctgcctaacgaagtctgtctagctgt

SEQ ID NO: 45446 - DNA, 122 bp, Homo sapiens
cccgcccacgcgaggcccattttgacggatccagttcgaggcctgacggcggccaatcggcgctggcgccttcaccctccccgccccgccgaacccgtcaagggccgccccttttcctgccc

SEQ ID NO: 45447 - DNA, 122 bp, Homo sapiens
cagggcagggaagctgtgtctgattcctctttcggactccggggactgacatatcataagcgctcaataaatgctagcggaatgaatggaaacgttccgacccgaggcagcggatcactcca

SEQ ID NO: 45448 - DNA, 122 bp, Homo sapiens
cggcaaccccgaaaggccggtcggggaccccggctgggagtcaggactctagctcccgggcgcgacccgagaaccctgaatccattccgcgcacacccggccgcgtgacccctgccgaccgg

SEQ ID NO: 45449 - DNA, 122 bp, Homo sapiens
gagcactcggaaggaaggctggctgcggccccggcgcctgggtccgctgcggcgccgggccggagacctgggaacagccagccacctgcaaggttgcagcccacctcaccccgccggcggct

SEQ ID NO: 45450 - DNA, 122 bp, Homo sapiens
agcgccgaggagccaaccgccccaaccacgcaggagcttctgcctaacagcgaaagcggacgttctgcggccacaagcaaatgtgcaaaacaacctcgcagagtggacaacgagcaaggaaa

SEQ ID NO: 45451 - DNA, 122 bp, Homo sapiens
atctacagggacctagacaccagtatcacagttttgtggcactctaagttagaacaaatccgctgtaggtgagagcctgtcatttttgctaatttccatttattggctgtactctacctcag

SEQ ID NO: 45452 - DNA, 122 bp, Homo sapiens
gggcttaggacgggtcgatatgtcacaaggaatgcacccgaaggctcttcctataggcttcgtttgctgaccaatcactgcattctcaatggcaacttgttgcttggattctcatcagaagc

SEQ ID NO: 45453 - DNA, 122 bp, Homo sapiens
tacatcagttccacatggataacgcaggataatctcccatctcaagattcttagtttaatcgcatctgcagagtcctttttgccatgtgaaacaacatattcacagcttccaggaatcagga

SEQ ID NO: 45454 - DNA, 122 bp, Homo sapiens
agcaggaagtcttttcctgaacaggggagacctggagatggcccttgggtggtggggggacgcaggggtgatgcctagagccactgtttgtgacttcatccacaccccaagtacagaccaga

SEQ ID NO: 45455 - DNA, 122 bp, Homo sapiens
cccccctctctctctccgcctccgctgccaaacagggaagggccccctgtccagtggacacgtggcttacatgaccttatcaatcattggagatgactcacactccttaccctgcccctttt

SEQ ID NO: 45456 - DNA, 122 bp, Homo sapiens
cttaggtgattgacatgtcttggcctcccaaattgctgggattacaggcatgagccaccacgctgggccttattttctaatggcactgcattcccctgtcagaatatttgctcctccctctc

SEQ ID NO: 45457 - DNA, 122 bp, Homo sapiens
gtagcactaaacgccaaagaaagaatgctcctggggctggggacaaggaactcggggatgcgctgtgtcacaagagacaggaaaggtcaccccatctatattcatctatgtcacctacccac

SEQ ID NO: 45458 - DNA, 122 bp, Homo sapiens
gcttgtgcgcgtggggatgaaaggcgcgctggcataattatgggcgagggtgcgcgggggcgggcgggcggctttaccttgccgccagcgctattaatgatgaggctccctctttttcttct

SEQ ID NO: 45459 - DNA, 122 bp, Homo sapiens
ctggagaaggagtttctcttcaatatgtatttaaccagggaccgtcggtatgaggtggcccgggttctcaatctcaccgagcggcaggtcaaaatctggtttcagaatcgaaggatgaagat

SEQ ID NO: 45460 - DNA, 122 bp, Homo sapiens
ggccaatcacacacttgctatcatgcactgaataacaagatataatctttgaattatatacgtacaagatttttaatgactaatcaagttacgtggcccagccaacaaatattacatattca

SEQ ID NO: 45461 - DNA, 122 bp, Homo sapiens
gagttgggcgtatggtgttctgacagtcatttgcactcaggaggcagctatttggaggaccggagcgtcaaccccttcccaatgtgagcatcgctctagagattgtcttctgggcttatttt

SEQ ID NO: 45462 - DNA, 122 bp, Homo sapiens
ctaccggggtactcccagcacctcgtagtagtccactatgctggactgccaaagagcctgcggggcactggcacagcgagcggcaaggctgccagcacccgcgcacaggtcagaggcttggc

SEQ ID NO: 45463 - DNA, 122 bp, Homo sapiens
gcgcccggacactttaaatctgttacaaaaaccgtgcaatactttggtccggggttggagcggccgagggtcggtacagccttttaggagcgcagccccggggtcggcggcaccgcgtcaga

SEQ ID NO: 45464 - DNA, 122 bp, Homo sapiens
ccgggaagggcggtcaagtgtggaaagggtctggcggctgccaggcctggcagagtggagcggggcggggcgcagcggggcggggcgggcctggagctgcacccgcttctgggtggacgcac

SEQ ID NO: 45465 - DNA, 122 bp, Homo sapiens
ggttgacaagttgtaattgctcttccccagttggctccggggagctttttctaagactgacgccccccatgtttggtgacattttatatacgccacctaacaaacttctatgacctgtcttg

SEQ ID NO: 45466 - DNA, 122 bp, Homo sapiens
cttttgacagatgtgatttatttcctcctagagccagtcacattggctcaagcaacctatcgtaagaaaacaaatacaatagtgttttagctggaaactgcccactgtctaagcggcttttt

SEQ ID NO: 45467 - DNA, 122 bp, Homo sapiens
tgcggcgccgagcctgccgcgcctccagagctccgccctaccccgccccgccctttcgggcgctccccaggccgcgcgcgcccgcggccccccacccagccacccctcgatgcccggtgcct

SEQ ID NO: 45468 - DNA, 122 bp, Homo sapiens
tgggatcttgcatttccctctcagatccttgctccactgccctgggactcaggatctaaacgtgtcaattcaacacctgtgtggtctttgatgccccccctcctcccccgcagtggtgactg

SEQ ID NO: 45469 - DNA, 122 bp, Homo sapiens
gcggagcccgcgccgctgcgcctccctcgccgcctccctggaggggcggtcatcaggggacgccatgcaggctggaacccctttgggcccaggcgttaaaccagccaccgcctccgccccac

SEQ ID NO: 45470 - DNA, 122 bp, Homo sapiens
agcttagttcttatgtgctgagatcatctcaacctaatctcaaagggtttccttccaatccgtcttggaaagaggtgaggcttaaataattttttctttttttttgagatggagtcttgctc

SEQ ID NO: 45471 - DNA, 122 bp, Homo sapiens
acgaggacaaggagggcagcagggacggcgactggcccagcagcgtggagttctacgcctcgggggtggcctggtctgccttccacagctgacccccggcctgcagaacatctgtccccaag

SEQ ID NO: 45472 - DNA, 122 bp, Homo sapiens
cctctctccaaacttcagctggggcctgggaggaccggaatctggacgggttttcacaaacggagatgaggccgagagcagccaactgcgaccactcaagagagggccttctgtacgctcag

SEQ ID NO: 45473 - DNA, 122 bp, Homo sapiens
tgcccatctgcccggcgaatttgtaggcatcttccgtctccaccaccttccgctcagggtcgtcattcttattacccacttcaaacgaaggcagagtcagcgcagccctgaggggcgcagcc

SEQ ID NO: 45474 - DNA, 122 bp, Homo sapiens
gcaccgtggacaggtagggccctggcctgcgctgcgctcacctgccccggaccaagcagtcgctgtctcctgcctgtggccatgcccgctctgaccaggccctgcacctcctccccacccca

SEQ ID NO: 45475 - DNA, 122 bp, Homo sapiens
tacagggcgaccgagaccatcatgggtggactacgcacgtccagctcttagtgtggtctccgtgtctcggttttctcttttgacttctcttttggagctcttggttgagacacttggtgagt

SEQ ID NO: 45476 - DNA, 122 bp, Homo sapiens
gcaaagttcggatcttcctggccaccgccatgaacacggctgcagcgggggcctcacccgcggggcatccccagcatccccgcccgggcctgggcttcagcttcggcttcggggaccatgag

SEQ ID NO: 45477 - DNA, 122 bp, Homo sapiens
aggagtgagacggcccttgttgctgggattatttagggcggatagtttccagttgaggttcggtttcatagcccattgcctggctgcctgcagctgtcagggcaccagaggcagcagttgga

SEQ ID NO: 45478 - DNA, 122 bp, Homo sapiens
tttaaaaaatgaaagcaggagggcaacgaagggccgcacaggaacggctgttctttggatcgagatgtcctccaacagcaatacattcatagtaaccacgggcaggaccccgcggctctctc

SEQ ID NO: 45479 - DNA, 122 bp, Homo sapiens
aggaacccatgggaatgagctaaccggagtatttctggttaagcattggctagagaatggcgctgagattcagagaacagggctggaggtaaaaccatttattactaaccccagagcagtga

SEQ ID NO: 45480 - DNA, 122 bp, Homo sapiens
ttacgcccccacctcgccaggaatctaggagtcggtttgttttccgaacccatctccttccgctctcccgcccctgcaggctgtgtgccgagcttggaagaaagtgtgacccgttcgacgga

SEQ ID NO: 45481 - DNA, 122 bp, Homo sapiens
gggccacgcagggcccccagactcacaggtgcgcgtggtcatgcagtaggcaaccatagccgggcagcgcatggggttgaagcagttgtctccgttgtaggcacacacgtggcagtccaagg

SEQ ID NO: 45482 - DNA, 122 bp, Homo sapiens
gagacctaaaaactgatctctttgttgacttcgtttgcatttctttagttcctactggaacgagtgactatttatgggccatttatggttctttgtaaactgctagctcaagtgttttgccc

SEQ ID NO: 45483 - DNA, 122 bp, Homo sapiens
cccccatacaagtaaaggcgggcggcacggggcacggcccacccggggaccccctggatgcggcacggcccccgcaactcggccgccctcctgccgcctcccgtaaccccgggcgcccgcca

SEQ ID NO: 45484 - DNA, 122 bp, Homo sapiens
aaaatgtaagtgtatgtgacttaccacaaagacctagaatttcacatttcttatattttacgtgcaggtgctgaggtcattatttctcagatttgtcctgttatgagaatattacctaagat

SEQ ID NO: 45485 - DNA, 122 bp, Homo sapiens
cctacccaatgtcggtcctacgcaatgtcggtcctacgcaatgtcggtcctacccaatgtcggtcctacgcaatgtcagtcctacccaatgtcggtcctacccaatatcagtcctacccagt

SEQ ID NO: 45486 - DNA, 122 bp, Homo sapiens
ctgggttatgtaagtgacagcgctgggccgtttctcttttttttccggaccccgcagtggcgcctaaagtctgcaaggaggaggtcgcctctgtgctgtgggtccaggaatctaaggcgagt

SEQ ID NO: 45487 - DNA, 122 bp, Homo sapiens
tgagcttgacttctggcctctgaacctttaggatcagctctcttttccatttacacacttcgtttatttaaagggaagaaggagggcagaggggatagccctgggtcggttcgtgagctcac

SEQ ID NO: 45488 - DNA, 122 bp, Homo sapiens
actgacttcaagaatgaagccgcggaccctcgcggtgagcgttaagctcttaaggtggtgcgtctggagtttgttccttctgacattcggctgtgttcggagtttcttccttctggtgggtt

SEQ ID NO: 45489 - DNA, 122 bp, Homo sapiens
cagaatggaggggggctgcaggtcctcgggtcccactcgacctccgagtaccgagtacttcgtgggttttccaggagaatgtcggagccggcaagtcttagatttaggaagcttgtgcccgt

SEQ ID NO: 45490 - DNA, 122 bp, Homo sapiens
gggttttagtgacgtgctccctgtgatagaaatcctgcagcgcagccaaggcatccacggcgcggacggtgtcatggatgagcagcgcgtcattgtagcgcctcaggtgaagcgcatacacc

SEQ ID NO: 45491 - DNA, 122 bp, Homo sapiens
atccgcccgcctcggcctcccaaagtggtgggattacaggcgtgagccactgcgcctggccgagaatgtcctttttgtaaggagaaatatgaacattgggagtaaaatgccaacagtgactt

SEQ ID NO: 45492 - DNA, 122 bp, Homo sapiens
gagcagacttggccagctcgggcataatgaaacaatagtggcaaaaccaaaacaagaagtcggtctcctctttttatataatagtttatgcggccgaggtagtgggaaggtctctgctgatt

SEQ ID NO: 45493 - DNA, 122 bp, Homo sapiens
tgccgtgagccggtccgaaacggctctaggtgcactgtccggctccagccaggtccgctacgcctggagagcatggaggcaagttctgccggctccacctgcaaagcagagcccctttccac

SEQ ID NO: 45494 - DNA, 122 bp, Homo sapiens
ctcttagatatatacctatgtaaattggaaaatacattcactcaaaaacttgtgcacaaacgttcatagcaacattattcataatgaccaaaagtagaaacaacacaaatgcccatcaactg

SEQ ID NO: 45495 - DNA, 122 bp, Homo sapiens
acacacacacacacactacaatcctgtatccattacttttcaaggtacatttactatttacgtttggggtccttgtctcttttttaatagtgtttcttaaagtcttgtattatatcagagta

SEQ ID NO: 45496 - DNA, 122 bp, Homo sapiens
cctagtgatcccccccgcgccttggcctcccaaagtgctgggattgcaggcgtgagccaccgtgctctgccatacatatgtagatttttaagagacaaaaacagtattaggtttgtagagat

SEQ ID NO: 45497 - DNA, 122 bp, Homo sapiens
agcaaggtcattcacctcagcggtcgcgcctctcccctgcccctgccccggattccccgccgctctcagctctcgaggagtatgcagcactcttccgtgcagcgtgcctcagtttcctccgc

SEQ ID NO: 45498 - DNA, 122 bp, Homo sapiens
ggtcacttagtgcctgccaaggagggaaggtgacatatgatggcactcagtagagagctccgcactttggccccccactgcaggcaccgtacaagcaacacaggcacagaagaaatccagta

SEQ ID NO: 45499 - DNA, 122 bp, Homo sapiens
gggcctgcgagggatgccggtcgggcctggctggagccaggcgcgcaggtggcgcatcttcggggctcactgtgcagcttaattgggttaaagcgaagctaaacaccgaagcactttgtgca

SEQ ID NO: 45500 - DNA, 122 bp, Homo sapiens
attcaaatctgtacattgaaggaaagaccccaggaaagtgggatttgggtgttcgggtcacgagtgggctgaaggcgcctctactcacctgcacgtagtccaccgaatctccgagcgccttg

SEQ ID NO: 45501 - DNA, 122 bp, Homo sapiens
gtccgctgggctgttggacattgagcttcccctcaccggcctggcggtttctcagctgtgcgcatgcaggatgagggcttggtcagcaggtggagccgtggacgcctttattgaacacaaac

SEQ ID NO: 45502 - DNA, 122 bp, Homo sapiens
tgagagagagacgctcctagccgggcggtgaacgggagggcggtgcgggcgcgggggcggcggcaggaggtgcgcctctagcactgcccacctcagctggctgccggggagcgagcaggacg

SEQ ID NO: 45503 - DNA, 122 bp, Homo sapiens
ggagcctctgctactgtgtgagaggaagccacgttccctcgcccttcctcccgtgcccgccggtcctcagctgagaatcgccacacagccaggctgtggccacagaactgctgtctgcagat

SEQ ID NO: 45504 - DNA, 122 bp, Homo sapiens
aaggcaaggcctgcgcatggccattttaataattcgctgcccgtctcatgcctgggggtccgggcgagtcctcgcaggccccgggcagagccgaggcggcttcgcagctcttcccccgctcg

SEQ ID NO: 45505 - DNA, 122 bp, Homo sapiens
ggacacactgattgcagtgggggctgacttggccaggccaaggatggtggatgacagcaacgccaaagccaggggtggggcaagaaaggaggccgggcatgaaggctcatgtctgtaatccc

SEQ ID NO: 45506 - DNA, 122 bp, Homo sapiens
gggcggagcggaaagtgaggcttagccacagagacgatccttgcatgagacatccgctggcgcctccgcccgccaagcctggttcggggggcgggggagggcacagagagggtcagagagcc

SEQ ID NO: 45507 - DNA, 122 bp, Homo sapiens
gacgcacagcccgcgagggagcctgggcaaggacggagcgggcctgcaccggcggttgggcgggctccgggggcggggtccacctgggaccgcggcgcgcccctcaccgctcgcgccgccag

SEQ ID NO: 45508 - DNA, 122 bp, Homo sapiens
agttgttctcgtaacataaaacctttgctgtcaatgcaaatcgcacgaaaagcagagatgcgttggagatttaaaggaaatgagcaactctagccagccggctgctgccctcgctgcagcgc

SEQ ID NO: 45509 - DNA, 122 bp, Homo sapiens
cagggctgccacgcactgctgcagagctttccgtgcaaagcgcggctcccctctgagactcggctcctctgctgacatggaccggttcatctacccacgcggacgcccatccacaaacactt

SEQ ID NO: 45510 - DNA, 122 bp, Homo sapiens
tcatcattcatctccctccctccccaccactgtagccccaattgttctttctcttcccatcggagggatttaaacaggtctctcccatttaaaagcaaacagggctggacacggtggctcac

SEQ ID NO: 45511 - DNA, 122 bp, Homo sapiens
gcgcggcgctggctccgcgcgagacacaaaggagccggagctggcgggcgggtcccttcgcggccagctgtacatcagctctggtccctctcggctggggacctccccagcacaccgatccc

SEQ ID NO: 45512 - DNA, 122 bp, Homo sapiens
cgcgtcttgtcaaacatggtctctgcccgggctgcccggcaagggcgatggactgagctgcgggacggcggccgaggcccttgattctcgagcccgggccggggctggcgacggccccgagc

SEQ ID NO: 45513 - DNA, 122 bp, Homo sapiens
gtgtgcagaatttatatatataaatatatctcctccaacccctcccaatgaagcaagtcacgtgagtcaatcctaccctaagatattagggattgagcctcctgggacatttggtggcttag

SEQ ID NO: 45514 - DNA, 122 bp, Homo sapiens
tccggcttgtggttccagacggaaacgcctccgggctccctggcccgggggacaagggttcgaaacttcaacagtcgcgagggcaaggacagaactaccaactcccgctcggatgcccggga

SEQ ID NO: 45515 - DNA, 122 bp, Homo sapiens
cacgcgtgaccgcggcggcggcggcgctggcgaggggaagggggagggggcgctccctcgcgcaccagattatttttggctccgcagccggggctgctcgctgcttgtcgcgcgctcacaca

SEQ ID NO: 45516 - DNA, 122 bp, Homo sapiens
ggttccgccgaagctccgctgcagtacagcctgctcctgcagtacctggtgggtgacaagcgtcagccccggctcctggagcctgggagcctgggcgggatcccaagtccagccaagagtga

SEQ ID NO: 45517 - DNA, 122 bp, Homo sapiens
aggcaatacacaggctcttcatgctgttgctggtttttcatttgttctgacccagagtctcgctctgttgcccaggctggagtgcagtggcccgatcttggctcactgcagcctccacctcc

SEQ ID NO: 45518 - DNA, 122 bp, Homo sapiens
gctcagggccaggcccctggtgctggaggaggtggtgggtggagggcagggggcaccaagcgggcagccaggacccccgggctgcagacaagaaaaggactgtggggtccaccgggtctggg

SEQ ID NO: 45519 - DNA, 122 bp, Homo sapiens
gaggaacatgagcacgcgtggccatggggagcgtcggcacggctagaaatgcctgattctcggtgtgtgtgtctaccccaggcagcaacggcaaatgcccttctcgccacggccgtggtccc

SEQ ID NO: 45520 - DNA, 122 bp, Homo sapiens
aactaggtgagcatcctatacctgctatacttgttctcttcaatgtactcaaaatatccacggccatgatcttctcgtggtcttttaacacccctctttttatctccgcctttctgttctgt

SEQ ID NO: 45521 - DNA, 122 bp, Homo sapiens
tgggatgcggcagcagggtagaggaggcagccagaactgcaaggcaggcagaagacggagcggagtagacaggaagcagtcccactgacagggaatactggaagatatgagaacaactaagg

SEQ ID NO: 45522 - DNA, 122 bp, Homo sapiens
gtcccccgtgtctgaactgggagcacagttataaaaccagtcatgttgttctgagagtggcgtctctcttccagtagcttcgataactccacaaatgtatttaacataattttcaaaacatt

SEQ ID NO: 45523 - DNA, 122 bp, Homo sapiens
agctgcagcttcacatttgtatatgtgttataattcatttactcaggctccgggatagaacgaggcctgcagctgcacagccagacccgccctattcctatgtccccagtgcccaaaccgta

SEQ ID NO: 45524 - DNA, 122 bp, Homo sapiens
gctttgccgagccccgtgtggccggtttctgaggcctgcaggggatactcaaccccgaagcgtcctgcctggcctgcagggaatctgaccacccagccccaggggacgggccagggcaagga

SEQ ID NO: 45525 - DNA, 122 bp, Homo sapiens
tacacccagtaatggaactgctgggtcgaatgacagttctgtttttagctctttaaatcgcgacaccgctttccacaatggtggaactaatttaaacgctcatcaacagtgtatacacgttc

SEQ ID NO: 45526 - DNA, 122 bp, Homo sapiens
ctctgaaatagcccaggtaccgatctgctccttgtcgccgagcaccagctcagtacaaggcgctggaggggaaggagggaagcacatcagcgtctcctcatagtgatgcagccaccccagcc

SEQ ID NO: 45527 - DNA, 122 bp, Homo sapiens
tggaccactgtacccagggctcatggataatcctcaagccctgtgggctgtcaagtaggacgtgcctaactgctaagacttgtgctaacaggagctctgggacctcagggagaatgggctcg

SEQ ID NO: 45528 - DNA, 122 bp, Homo sapiens
gtttcattcaacagcatacacaccagagtgtctcttactattatatacatcagtagaggccgggcgaggtggctcatgcctgtaatctcagcactttgggaggccaaggtgggtggatcacc

SEQ ID NO: 45529 - DNA, 122 bp, Homo sapiens
cactccgcgagccgggggaccaagtttggcttctcctggttgccatcgcctcggtctccacggcaaccgacggctcacagaaaggagccaatagcaaggccgcaccgaaaggagccagtggc

SEQ ID NO: 45530 - DNA, 122 bp, Homo sapiens
gacgggaccagacaagtctcctccagggagaatgaaacccggacatttaggacagcggaacgcggagccggcgggcaggcgggtgcagaggaacctcgcgcagcattccccgagccccagcc

SEQ ID NO: 45531 - DNA, 122 bp, Homo sapiens
aagtcctgctgataattacagcctgctccatctctcctcctccctgcttagccatccattcggttttctgggaaggtttcttagcactcaggcaagatgaagggatttgagaaacagtgagt

SEQ ID NO: 45532 - DNA, 122 bp, Homo sapiens
agcagtcaccggcgggagcctccatttccaggagccgccaccgctgggagctgccacagccgggagccgccaccgccagaagcctccatctcccgggagccgccatcgctgggagccgccac

SEQ ID NO: 45533 - DNA, 122 bp, Homo sapiens
ccagcaccagcgaaggggagggccccggagaccatgagacggatgacgaaccagcaccagcgaaggggagggccccggagggcatgagacagatgaggaaccagcaccagcgaaggggaggg

SEQ ID NO: 45534 - DNA, 122 bp, Homo sapiens
cgatgtcaaaattaaatccacaacttctcgagagttaggatttgccagctctgttggtaccgtaaagccaaataacatggctgggattctttagacggtgcaggttgtgtctacaagtgaga

SEQ ID NO: 45535 - DNA, 122 bp, Homo sapiens
tcccacttggtcttttttcagattcattttggcttaatggtgccttccccattttaaaagcggtcttttactcatagtgccccagccttttgaaggcacaggaacaggagctgggctaccac

SEQ ID NO: 45536 - DNA, 122 bp, Homo sapiens
tccaaccggtgtcccctttggtccggccgtccctaggagcccgttccgcccggcgccgctcgctggctttgtccacagcactctcccgccccaactaagggttggccgagaacaaggggttg

SEQ ID NO: 45537 - DNA, 122 bp, Homo sapiens
tgatggatttagtctataaagaaactacataaagtgactacattttcttcccgattgcctcgaaccttcatgcgatgtcattatctctgtgttttggggacctccccataagaatggttttg

SEQ ID NO: 45538 - DNA, 122 bp, Homo sapiens
tttcaaataaggacttaagtttgtccgctgtatacacagtagtgttgaataatctacacacgtaacaatagttatatctgaaagtgtcttctaaataggaacattctggtatagaatgcttc

SEQ ID NO: 45539 - DNA, 122 bp, Homo sapiens
caggagttcagggtgttcaagataaagcaccagagtcagtgtagccgggcgagtgagctgcgggagagggaggcacattcaccaaataattcatggccacccccataaccggccccgctaca

SEQ ID NO: 45540 - DNA, 122 bp, Homo sapiens
gacaacgtgcgccgtcacgtgacggcagagcctgtgagcgtttttctcacgtgacggaggcgcctgcacgtggaccaatggggaggcgggggcggggccggcaggggcggtgcgcgggaagg

SEQ ID NO: 45541 - DNA, 122 bp, Homo sapiens
agccagggccgggaggtgcacgtggacccgtgtttattggaatcctgctgtgatcagacccgggggcgacgtcgagacccaccaggccccgtggcctcctgtgaacatctgcaggctgttgg

SEQ ID NO: 45542 - DNA, 122 bp, Homo sapiens
agatcaggctgctctcctctgggcaggacatggcgcgcgggcccagtttggccagtgccacgtggtacgggagcccgggggcgtcgggccgagtccggctgcagttgaggtactggtcgaac

SEQ ID NO: 45543 - DNA, 122 bp, Homo sapiens
ctttcgaggtgtgtctccttttctctttcgaggtttgtctcggtttctctttagccaggacgagtccgggtgaccctggtgggccttcctttcccttctaggtgtcatctccttccctccct

SEQ ID NO: 45544 - DNA, 122 bp, Homo sapiens
ctggtgcccgttaaggagcagtccatccccagggccggaatgggaatcacgaggccggcccggccccactgggcgcctgtccctgaagcagccgaggggtctccccccgtgcccacggccct

SEQ ID NO: 45545 - DNA, 122 bp, Homo sapiens
cagtgcccggcccacgcctcctgccccttccccggaccctgcccgggaggtgtggggacccgcagggcacccaaagcggtaagggaggaacccggcccgcacacagccccagaagcccagcg

SEQ ID NO: 45546 - DNA, 122 bp, Homo sapiens
tgttgagtattggtcccagtctccccatcagccccagggtgcttgttgagtgatttcgcacggcgcacgatggcgtaacggtcagcaggaatgagtgtcacaaaggagggatggaagggaat

SEQ ID NO: 45547 - DNA, 122 bp, Homo sapiens
aaacactgggattggcaattctcctttgtgtggggcttgtttaaattctccctccttgggcgagcgtcacctgagtttggcctggttttgctttctgctattaacaagggcagcactgagtt

SEQ ID NO: 45548 - DNA, 122 bp, Homo sapiens
cagctctaatttatcactgtctttcatgtccagagcccaacactgactcaccgttgttaacgtgtttcttagttcaaattttcaacagaaaaggatctggtcactagcccagcaaaggatgg

SEQ ID NO: 45549 - DNA, 122 bp, Homo sapiens
caagccgtgatccaccatggcctttgcctttttctgaggagcctatgcgtcaagaaagctcgaggctgttgcactcagtgggatctgaaagtgttgtagagagaaggaaaaagaccaaaagg

SEQ ID NO: 45550 - DNA, 122 bp, Homo sapiens
tacacgtcgggactggcacttggcacattcaaaggggatcagtggagacacagagcccaccgtggcaccaccgcccgtgcctcccacccacgatgctcagtgcggcgagcagcacacgggcc

SEQ ID NO: 45551 - DNA, 122 bp, Homo sapiens
gttcaccaattagagattcaatttggtttaccagcaaacccaaggccggccgtggagaaccgggccagggctggagggcaggcagctgtggaagctaatcagaggcaaaatggaaaattatt

SEQ ID NO: 45552 - DNA, 122 bp, Homo sapiens
tgataggaacacacagtgaatactgaaagatagtcatacacatacacactcatgagatgacgtgaggatgtgatgtaggatctcaactgaatacactatagttttgcctggactattcaaaa

SEQ ID NO: 45553 - DNA, 122 bp, Homo sapiens
ccgtttcagccagaccttgggcactgcctgtgattggccagtgggttgcctgatgtagaccgctgtcttctcaaaacttcccttgcatccgacggtgctacgctgtcctgtcctggtttttc

SEQ ID NO: 45554 - DNA, 122 bp, Homo sapiens
gagagaaccaagcagaggctccggcctgtgaaagtcgctggctaggctcccaaaatagtgcggcggggtagctgcacgtgtttgttttcaaaccgcgctggtttaagtgagttcacactgcg

SEQ ID NO: 45555 - DNA, 122 bp, Homo sapiens
ccgctacttgcgcttggcggtcgccgggtgcagctgcccggacagggcgcatggaggggccgcctccccctgcgccccccggggccggcgcggcgaggacggcatagcagggcccagcatgg

SEQ ID NO: 45556 - DNA, 122 bp, Homo sapiens
gcaggagcccgcgggagctgccccaggccccctgtccccacctgtggctcccgtcctggtcgcctcccggggccgcgcctgctccccacacagcgctgccagtgctggaaggcgagactcta

SEQ ID NO: 45557 - DNA, 122 bp, Homo sapiens
agccgcggccggaccaatgggagccgcgaagcggccggccccgctccagaaacttggctgcggagaagttcgctgtcccagccaggaaaacaaaccaagagacccttcacaccccagcccta

SEQ ID NO: 45558 - DNA, 122 bp, Homo sapiens
aaaatcctggattcccctgggctttgagaacctagctgtcatcatcatcattatcattatcgtcatcatccagattaatgtttctcaagttctgctctcactgtattgctttcacctaggat

SEQ ID NO: 45559 - DNA, 122 bp, Homo sapiens
gtcacctctgcccaggcccaccctccaggaaattttgaagaaacatttcggcccttctaacggtgtactcttgagaaatgctggctggtgcacaaaggcacaaaatcctgtaataccaacta

SEQ ID NO: 45560 - DNA, 122 bp, Homo sapiens
ctggcggggagatgtcagctagcggccggaggagcgggctcgggagggggcggcggctcgcgcgctggaggaggtggaaggagggtcgctgccctgccccctctgagcaggcggcagtcgag

SEQ ID NO: 45561 - DNA, 122 bp, Homo sapiens
tgtgagtaataaatccacttcatgtaacttgtgtatgtgagtgttctggctcaccagactcgggcaggtagtagaagtacagcccaagatgcagtgaactgaattggtaaccagtgcacagt

SEQ ID NO: 45562 - DNA, 122 bp, Homo sapiens
atggaagggcacctctgtcctctgttcacactggacaccatcacccatcaccagccccgccggcggatgtcagcacacacacctgcactcagcgccactccacagccactgtggggtccgga

SEQ ID NO: 45563 - DNA, 122 bp, Homo sapiens
gggtactcccaccggggaggtcacgtggccagggcgccgccatgacggcggaagtaatggcggaagtggcaccgttgccaggcagccgttgcctggcgtcgcggggcgtactctgcgctggg

SEQ ID NO: 45564 - DNA, 122 bp, Homo sapiens
cgcggcacgtggaagcagcctgcgggtagaggcgggcaggtagtgagggccgggggcagccgagaggcgcaacccctgcggccccgccctctcccccactcacctttgaaaggacctccctt

SEQ ID NO: 45565 - DNA, 122 bp, Homo sapiens
gacccatcacaaacctccccctcaaagaaagcacatccgcccggcagagctcctaagcctcgagcagctgccaggagactcatttcaattaggacacatgtctggaggccaccccaaggtgg

SEQ ID NO: 45566 - DNA, 122 bp, Homo sapiens
ccggctcatgtttttattttttgtagagatggggtctccctctgtttcctcagctgctctcgaactcctagctcaatcagtccacccacctaggcctctgaaagtgctgggatgacaggtgt

SEQ ID NO: 45567 - DNA, 122 bp, Homo sapiens
tgcctgcgctggatattttatgtaaatagcatcatacaatatgtggcctttcgcacaatacggctggcttctttcacttagcataatgttttcaagtgtcagcctagcgtattatgtaatag

SEQ ID NO: 45568 - DNA, 122 bp, Homo sapiens
ctggcaccagcaggcactgaagctgcggccctgatctccgcagaggctgcctgctgcgctcggccctcaagtgcccgggccggccttcgtgctccgaaacaagagacctgggagccctcggg

SEQ ID NO: 45569 - DNA, 122 bp, Homo sapiens
tgactgactgctaggcattttcttcctttcgttcaacaaatatttgtggagtgcctattacgtgccagaagctgttctggacactgagaaacagggatgaagaagaaacagatccaagcctt

SEQ ID NO: 45570 - DNA, 122 bp, Homo sapiens
gcccgacactggcctaagagtcaccaccttgatggactgagttgggcttaaaacaccccgcggtggcagagtgttggcaagtaggcttacgtgtctgtgtgtggtgtctatctgcaatgtgc

SEQ ID NO: 45571 - DNA, 122 bp, Homo sapiens
tgcatcctcttcctcgggctgcaccaaggcggagttggtggagacatctgtgtagcgtagcgtgtcctgggagcgccttggaaacaaaagctggggaaggctcgaagggaagagagaggccc

SEQ ID NO: 45572 - DNA, 122 bp, Homo sapiens
ggctattgattggctgaggcgggagcaggcggctggccggcagcagttactcggggtttccggtgcgaggccagaggtggggaagccatcggacgtcggcggtgaggtacgtgcagcggcgg

SEQ ID NO: 45573 - DNA, 122 bp, Homo sapiens
acacagcctctgtcaatgaggacatacgtacttagggccgttttgaggattacatgagaacgtctgtaaagcccagtacttgacaagtgcctgagagatagcaactgtggttgttagaattt

SEQ ID NO: 45574 - DNA, 122 bp, Homo sapiens
aaaatctgataaaagaatgagcattgtgattttaattttgtaaaagtggttattttctctcgtggtaatttggtgttcacctaactggtaaatccttttacagtagatgcgtttgttagtca

SEQ ID NO: 45575 - DNA, 122 bp, Homo sapiens
atatccaggggatttcccagtgatttctcctgactcgcagactgacctgctggagctggccggcctaagagaaggaaacaggaatgggggtctggcctgggtaggtcttacggtagccttct

SEQ ID NO: 45576 - DNA, 122 bp, Homo sapiens
ggattagttgctctttgcatgaggttgtagctgtggacgtgggttttgtagcgattgggacgactctggagatctattggctgctgggtttgtaaatttcattcattttggtccaatggcag

SEQ ID NO: 45577 - DNA, 122 bp, Homo sapiens
gtcagtcatttggccgtgcctcagccgaagagaggcggggaaaagcatcgtaatcagctgcgtcgccttttggtgacgccagagagtgcgcgtcagcagtttattagagagctctgtagcca

SEQ ID NO: 45578 - DNA, 122 bp, Homo sapiens
gagatacttttcacacgctaggactgctgctctgctttgaaaacccaccagctctagaaccgctgttttctgtaggctgaagtggcctttggtccttagaggtgaaaggttggccctatttt

SEQ ID NO: 45579 - DNA, 122 bp, Homo sapiens
agcggtttgcgtgacttcccaggcctctgcaggcagccttggagtgggttcctgccccctcgggcacacaaacagagctgaagaccaccctgggcacctccttggctggccgcatacctcct

SEQ ID NO: 45580 - DNA, 122 bp, Homo sapiens
ccacggccccgggagcagagccgagcgcgcccccgagccgccgcccgccggagctgcgagcgctgaagccattcatgattttggtgacgttattccaggagtgggcgagggagggcggggcc

SEQ ID NO: 45581 - DNA, 122 bp, Homo sapiens
atgcacactgtgatttgcaaacatatgtccgctcttcaataaatgttacggctttcacagcggttccgccttggcctcttttgtaatcttccacatcttgatgaatgtgatggagtttgtgc

SEQ ID NO: 45582 - DNA, 122 bp, Homo sapiens
gaagccacagtcgctcagtgccctgggtatgacctggcaccgggacacacctagccaatacgtcctaaagagaaacaggaggagttgtcagcaaggaggcgtgtgtgccggccgcgcgtgac

SEQ ID NO: 45583 - DNA, 122 bp, Homo sapiens
tccaaggacccagagatccagcctcccaagcctcccagcccttgcaccctcggggccctgcgatcctggatccccaggcccctgcacccccaggacccagaagtctgggatcccagccgccc

SEQ ID NO: 45584 - DNA, 122 bp, Homo sapiens
ggataggcggggacatggaggaggacgcgggagccgccgttaccagggcgcgcgcggggacggcgacgtcatttccccgcagccaagccccgcccagccccgcgcagccgccgccgccgccg

SEQ ID NO: 45585 - DNA, 122 bp, Homo sapiens
gctctgcagtgtctgtcatggagttgacattccagaggcacaccacctgccgtgcctggacgcccagcccgcgtcagccctggaggggcataaacacggccggcagccccagagcacgaatc

SEQ ID NO: 45586 - DNA, 122 bp, Homo sapiens
ctcccaaaccccacagtgggtgatatcaggaaatggcgcagtagctgtaggtgcttggggcggtcctctcagaccttcctggtggactcaccccacacagatcaacccgaagaaatcgccct

SEQ ID NO: 45587 - DNA, 122 bp, Homo sapiens
caggatgcatttacaccccctgctctgcaccaaccaaaccccacaggagcactgcggccccgcccagcaagggccgagcctggagcctggactcatctttgtgagactgcagagaagtgtcc

SEQ ID NO: 45588 - DNA, 122 bp, Homo sapiens
aaaaaagccagcgtgcgagagcctctgaagccgtggctggggcgctggggtggcagctgccgcgggagcatcagctaccggcgtgaggcgaggcagggcacgcgcgccgtccgcagccccgt

SEQ ID NO: 45589 - DNA, 122 bp, Homo sapiens
cccggagtggatcccgcgcgaccgagcagccactcagcaccgctgttgagtggtgggccgcgccgcaggctcaacagctctggagttgcaaagcatttctgaatccgaatatcctttctcat

SEQ ID NO: 45590 - DNA, 122 bp, Homo sapiens
aactgggagaaacaggactgaacctgcctcttggcccagggtgtttttacttataccacacggatccaatgcactgactttttttaagttatgtcttctttcttccccttcccttttttaca

SEQ ID NO: 45591 - DNA, 122 bp, Homo sapiens
ccacagtgggtcctcaacagatatttatggaataaataacgcaacgcaatgtagtatttacgctttctacctggcacatgaagagcacttgaaactcttccacattgatggtttttgttgtt

SEQ ID NO: 45592 - DNA, 122 bp, Homo sapiens
cttgtgcttatcaccacacggcacgtatttctcctcccacctgcaccctcgtgctgggaacgtgcctgagggcacatttgcacctgcacagacactcctgccagcgagtctcctgaaaggca

SEQ ID NO: 45593 - DNA, 122 bp, Homo sapiens
gcaggaggcgccgcacctacttcccaatataaccaactacggcgtgggggagcggaactgcgagaaggcggcagccaaagtgccattaaagctcggggcggagaggatgcgttacctgggtc

SEQ ID NO: 45594 - DNA, 122 bp, Homo sapiens
ctccatctaggacactggggagaccacccaggtacagggcggaagccacctgccacaagtcgcctcctgtgatggggctggcaccaaatttggctgttttcactgtcctgcctccctgactt

SEQ ID NO: 45595 - DNA, 122 bp, Homo sapiens
cacacgacttcccaaaggctggtactgaaatgagtctggtactggagagagcccacacttcggggctaccaaatcctagggccgaactaaagtctgacgggagctctaaccaaagccaacca

SEQ ID NO: 45596 - DNA, 122 bp, Homo sapiens
ggacgctgaagatgctcagaaagaaaaagcaaacactgcaaaccaagagccgagaacaagcgtggcatgagcagtggacggccctgggcccacctgccagcacttcctgggctgccgtttcg

SEQ ID NO: 45597 - DNA, 122 bp, Homo sapiens
aggacaaggaagcatcagcaatcttgcgagcacatgtaggagtgactttctggagcaggacgagcctcatgggcatgagaccattgtgagtgctcagggtctccccctagaaaggcacacat

SEQ ID NO: 45598 - DNA, 122 bp, Homo sapiens
tcgggaagcgggctcggctcggggaaaggccgccaggcagcgaagcgcgccggcggctcacggaggagcccaagctctcaacgcggcgtctcctgccgccagccccgccccggcgcgctgac

SEQ ID NO: 45599 - DNA, 122 bp, Homo sapiens
caaacagactaccaagccccttactcagtgcgtgctggaggtgcacaggtatgatgggcacgcagaggaggagcccctgagagagcaggcaggcatcccagaggagatgctatctgtgctag

SEQ ID NO: 45600 - DNA, 122 bp, Homo sapiens
gcaaactgtttgtctctccctacatacaccataccagggaactgtttctgagctctataacgcttctgcctccaaagcaaatctgctactctcctcctgggtgctgctagaaaacacgccca

SEQ ID NO: 45601 - DNA, 122 bp, Homo sapiens
gaaatgaggtcttgctgtactgcccaggctgggtgtcccatcccttttgtaatgcctctgcgtgggcaggtaaatgaggggggctgagctgagggcccctttcactactgcagagaccaaaa

SEQ ID NO: 45602 - DNA, 122 bp, Homo sapiens
ttccagcggggctgctgcagcacctgcccatctcagcgccagcctgggaaagaaagtagacgtgtaatttcaggttggtttcgctgaacaattgtttctttcacgcaatccctggggggttt

SEQ ID NO: 45603 - DNA, 122 bp, Homo sapiens
cggaggtggggcccaaacgcgcgatccagccctcgcgcaggcgccctggaactccccgcgcgtgttgtgacccagaattcccggggctgtggaagagaccatagactcaacaggagggggag

SEQ ID NO: 45604 - DNA, 122 bp, Homo sapiens
cggctccccatcagcttctggtgccttcgtgataaatgcccacacgctcccaccccagcccgattcatcaagctccccgtggcacgttgcatggccagagaccttgcccaccaggagcttaa

SEQ ID NO: 45605 - DNA, 122 bp, Homo sapiens
gaatctctatgaggtgcagcagcacctggtacacctgcagaagctgctggagaagagtcacgaccgccacgcaatggcctcgagcgagcgcaggcagaaggaggaggagctgcaggccgccc

SEQ ID NO: 45606 - DNA, 122 bp, Homo sapiens
atgtgaacctgccaggaaatacgctgactgacatgggctgaagataccaaggctactggccgagcaagattgctcaggagatactagggctagaaatctgcccttaccttcaaaagaggttt

SEQ ID NO: 45607 - DNA, 122 bp, Homo sapiens
gcgggcgacccccagccacgcgaggagtaatatcacccacctttcacactctggataagacgatccacatcgcaggggggcgggcgccacccgcaaggcaggcagtcatatcacccccctct

SEQ ID NO: 45608 - DNA, 122 bp, Homo sapiens
ggcgaagtatacatgctcaccacagggctgagagggcccagaactgcccgcgtggagcggcgactggccctgtcttctggcttaccccagggatggaccctgggcactgaccacacgtggct

SEQ ID NO: 45609 - DNA, 122 bp, Homo sapiens
cacgccatgcgcagaatcccggaggccaagtaaagacgccaactttgcaagtcaggggggcgagtgctctcgcccctcaggtccccaaagggaaccgacttctggcctcgagggtggggtgc

SEQ ID NO: 45610 - DNA, 122 bp, Homo sapiens
aggctgaaaaatgttatatccctaggcttcacgagagaaccccagtttcctaatcaccatcgatggcaatgagactgagtttggaaagaaccacgtgtgcaaaggcagacgcaacccgtgcg

SEQ ID NO: 45611 - DNA, 122 bp, Homo sapiens
gacatgatggttaagagcgctggctttggtgtcagacccagattcaaattcttgctctgacgcttcctggctgtgtgatttttgacaagtcacttaacccctctgagcctcgatttcctctt

SEQ ID NO: 45612 - DNA, 122 bp, Homo sapiens
cgagcccacctcctcatttccccgcttcccgcattcccaagcatgggaggacctgccggacgcagcgcaccatctctcctaacagagaccaagtctgagcttcaaagcttgcgcagacgaca

SEQ ID NO: 45613 - DNA, 122 bp, Homo sapiens
tcatgggccacttatttaagccgggggaccttggaaagtctctcatgtctctcatctcaacggcctaatgtgacttctcttgaaatatttggacattagcaggaagctgaggctttacatca

SEQ ID NO: 45614 - DNA, 122 bp, Homo sapiens
ccacgggcgctgcgctcgatttctcgccaggccttagctgcctccccgcggggcagggctcgggacctgcagcgcgccatgcctgagcctccccccaccgtgggctcctgtgccgcccgagc

SEQ ID NO: 45615 - DNA, 122 bp, Homo sapiens
gggcgtgcgagtgcaggatgtgcgagggacccattgtatttgggtcgcaagcagcccacccgtcttgagtacgatattctcattccgcaggcgcgccctgggcgtgggagaaggtgggcccg

SEQ ID NO: 45616 - DNA, 122 bp, Homo sapiens
cgccaaggttccttgtaagaaatatatgattggatcccaggatctgtggaggacctctcccggctcctccccacattttaggaaaatcctgccggtttaggattaccagccagaggtccatg

SEQ ID NO: 45617 - DNA, 122 bp, Homo sapiens
gggatccgggaaaaccacttttgtacaggtgacgtacacagcatgggtgtagtaggggagcgcaaaaggttgcctccggcaggcggaaggccaggaagaaagggagggaagaggatttggag

SEQ ID NO: 45618 - DNA, 122 bp, Homo sapiens
tgtggcatgtgtcctaatgactcatgatgaggagtcgttccttttagcatgatttatgctcgcttatcattctcttgttctccagaggggaaagctgctctactgaatgagctcagcccaca

SEQ ID NO: 45619 - DNA, 122 bp, Homo sapiens
acatgacccactttaaaggccacttctttgtgaagcatttctcatccatttctcctaatacgtgtcactgaattctctcttctttatttccagagtattctatatttctctaatttattatt

SEQ ID NO: 45620 - DNA, 122 bp, Homo sapiens
gcccagctgtcaggcgcaagggcagaggtcagcgcggggtctccccggagcaggagtgagcggcgagtgacaggtgcagccgcgccatccccaagcatcccggaacctggcccggaggctgc

SEQ ID NO: 45621 - DNA, 122 bp, Homo sapiens
tgcgcgggccaggtggagggaccccgggggcgcgggaggcaggtgtggtgtgacgggccccggtgccatttccgcgcccatcacgagcgcggggcggggcgcgcgggcggcccctcctgtga

SEQ ID NO: 45622 - DNA, 122 bp, Homo sapiens
actgacgtgttcccattattcattaagcacttccttgttttctggcaaaacaacaagttccgggctcattttctgcaccccactcctacttcccagtgctagaatcagccgtttctgcaagg

SEQ ID NO: 45623 - DNA, 122 bp, Homo sapiens
ttatatgtcacactcacataccatctgaccaataagatggaaaccttcctagcaattttccgaacatataatcaagagttaggaagccatatgcctaatgataagtttgaactagcagtcac

SEQ ID NO: 45624 - DNA, 122 bp, Homo sapiens
tccgccaagagtgcgcctgcgcggtcgctggggctcgcacttcagcttcccctcccccggcgccctctggggctccgagcccggcgggaccatgttcaccagcaccggctccagtgggctct

SEQ ID NO: 45625 - DNA, 122 bp, Homo sapiens
tgtagttcgcagcgctgggaggagtcagtggctgcctgggacttgggcttagggtggagccggctgactgcgaggcggagcccggccggaactttttttttttttttgagacggagtcttac

SEQ ID NO: 45626 - DNA, 122 bp, Homo sapiens
ccatagagaataaggcatagagcggcactaaataaatttagtgtctttctcttgattcaccgaaaaaatatttattaaattcatactatttgctagttgtggtttatacaagacatacaatg

SEQ ID NO: 45627 - DNA, 122 bp, Homo sapiens
gaggtgactggattatggggtggtgtctaatcgtttagcaccatcctcctggtgctgtctcgtgatagagttctcatgagatctggttgtttaaaagtgtgtagcatgggctgggcacagtg

SEQ ID NO: 45628 - DNA, 122 bp, Homo sapiens
aaatatccattattctaaaactttatcacattttatcccatccttcttgcatggtgcccacggacaaagaagagcaagagtaaagtattggacaaactattctgaggttctagtgaaattcc

SEQ ID NO: 45629 - DNA, 122 bp, Homo sapiens
cagcaggcgcagagagagcaggacgtcacagtgaccgagggcctggaagttcgctaatcccggaactggaccccgcccaaagccgccctcttgcctccactggttgtgcagccgccgctcca

SEQ ID NO: 45630 - DNA, 122 bp, Homo sapiens
cgcctcccagacataacttaggctccgtctcgagctcctccagcgccgccgccccgggcgcgcgccaaccgggaaggccactcgctgcaaaaaacgttcgaattacccgccctgcgggaaag

SEQ ID NO: 45631 - DNA, 122 bp, Homo sapiens
attttccaccaggtcacaagattcttagcctttatgtgtccagtgacaagaaacatgactcgtaacctcggtttgcacaatcttctctcaggaacttcccagggaatgtgcaatttctggct

SEQ ID NO: 45632 - DNA, 122 bp, Homo sapiens
gaaaaatctaggttgttcgtgtctcttctgtattttccaagtctgaaaaggtttattctgcgtttaacgacgtcgtaccagaatggcctttcaaagactgtcaaaggcttgaaggaaagctt

SEQ ID NO: 45633 - DNA, 122 bp, Homo sapiens
gagaggagagagagaggaaggagtgaaagaaagacatacacacacacagacatacagcagcggcacagaaacacccaaccccaggtagcccttgaggctgccgggttctgctctccgcgaga

SEQ ID NO: 45634 - DNA, 122 bp, Homo sapiens
ttccctccccggccaccgccggctctccctgcccctttgcttccacctcccaaagctccgcgctggctgcgttctccagggagctgttcagaagtttggggctttgcttgggcttcttcgct

SEQ ID NO: 45635 - DNA, 122 bp, Homo sapiens
agggtgacgcgggtgattctggcggcgtgtgaggggtcagaatgattcacagaagggccccgaggatcaaggaggtgtccaaggggctgctgccagccaaagctcggagtgaagctgcattc

SEQ ID NO: 45636 - DNA, 122 bp, Homo sapiens
aggttaaggtgaccgaatctgaacactccctccatgtcttggacacgaagttttttgctgcgtagacagttttatccccctcaccccaaggtcaattgcacgaattcttttggaaaacagga

SEQ ID NO: 45637 - DNA, 122 bp, Homo sapiens
cgcatcctactgggaggggacgagttcaggctgcggcggctgcggtcgcgggacactgggcgctcccggcctggctccgggataaccgggcggggcctgggccattcactgcctcggtttcc

SEQ ID NO: 45638 - DNA, 122 bp, Homo sapiens
agtatggcgttttgactctgtttaaacttgccgcctccaccaatgaggacctccgggcaccgccctcctcgtcacgggaccaatcggtgagcagcatcccctggccaatgagacggcggcgc

SEQ ID NO: 45639 - DNA, 122 bp, Homo sapiens
cgcagcaaaggcatcaaactgcctattccagctgcaagtggagaggacacagctgcttgccgttggttttggggagggatgcaggttctggggtcagagagcagagtgaggctccctcagag

SEQ ID NO: 45640 - DNA, 122 bp, Homo sapiens
ttgccccatcttggcagcaagcctgctttaccattggagacctcagctctgattacaatacgtccgtgatcaacatgccctaactggttagcagatggcagctgcatgaagtcactgggccc

SEQ ID NO: 45641 - DNA, 122 bp, Homo sapiens
aaccaattccaatccccaaatctctgttgtactggggagctctccaactaacagaggaaacgcagtcactgcccggcaccgtattaatgatttatacaccccgcaccactgcttttgttcac

SEQ ID NO: 45642 - DNA, 122 bp, Homo sapiens
aactaaagaaggttaggtttcttctcctgaaatagggaacccactgtctctccattggtgcgtcacagaaatacccatgtcaaagcccctcaaatttccaggaaacttctagcctcccatta

SEQ ID NO: 45643 - DNA, 122 bp, Homo sapiens
actcaacagaagaaactgttctttaaagtcactagtgacatcctcatccactaaatccagcggccgtttccctgacaccttccttgatctcaattatccatttgtagtctgttcctaacccc

SEQ ID NO: 45644 - DNA, 122 bp, Homo sapiens
caaaacaaaacaaacaaacaaaaaaaacgataaaaaacaacaacaaaaaaacttggcccccgtctctaggcatatacaaaaaatcaaatcaaaatggattaaagacgtaaatctaagacctc

SEQ ID NO: 45645 - DNA, 122 bp, Homo sapiens
ttcctgccatgtccacgctgtccccgggagcgccaggccagcctggcctcgccatcactgcgcacctctcacagcggcccccggcccggccttagcctacagcaggtgctgccgctgcccct

SEQ ID NO: 45646 - DNA, 122 bp, Homo sapiens
ggagtgaattcatttcttttctctctgcatgtattttgcttttaccgttgtgctgtttcacgcttggcagcctcagttagcactccagcccgcctgaagccgtgcacagcccattcctgcag

SEQ ID NO: 45647 - DNA, 122 bp, Homo sapiens
ccaggttggggtacagaggtgtaatcatggctcactgctaaggttgggagattgacctctcgggctctgtcaatcttcctaccttagcctccctagtagctgggactataggcatgccacca

SEQ ID NO: 45648 - DNA, 122 bp, Homo sapiens
tggcaacttgctcagggtcacatgtctgctcagccatggccgggactccaatctgcctcgcgtcctctcctgctccttctgggccacgctgcgcagggagaaggaccccggctgggtggaag

SEQ ID NO: 45649 - DNA, 122 bp, Homo sapiens
ctgaccctggccccggcccggggccgagcgcctttcccatcaggtcctttcgcggggcaccgagcacactcggggaggagaagcccgtccccaccccactggcctcaccctcagcccaggga

SEQ ID NO: 45650 - DNA, 122 bp, Homo sapiens
gtagtccggagcccagcggtcatagaaatggagcttttgggccaggtcggggatgccatgcgcggccctgacccgcgcccgcacctcgggcaggctcccaccctcctcctgggccatgctcc

SEQ ID NO: 45651 - DNA, 122 bp, Homo sapiens
tttctgtgtctgatgccttccccacacagacacaatctcccttcctgccaggccctgacccggaactgtggcccatgggcagagatagtccctcaccttgtggaagaacactgtctccaaga

SEQ ID NO: 45652 - DNA, 122 bp, Homo sapiens
tcgccgctgaaggggctcagcttggtcgacaaggagaacacggtgagcccgcggggagggcgctgcgggcaggggagggaggcagggaaagcgaagccgctcctcactcacacgcgtctccc

SEQ ID NO: 45653 - DNA, 122 bp, Homo sapiens
gatgcacctgtcagccacgaaggagccccccgaggtgcagatccccacatccgccgcacccgtgtggagaaaacagcgctggatttcctgtcgtgggttttgtgactttgaaagccgaggct

SEQ ID NO: 45654 - DNA, 122 bp, Homo sapiens
gctgggattacaggtgtgacccaccatagcccagccccctacttccttgacttttattgacgagaaaggagtaagacctgtccaaatgaatgctctaaagcaatattttttcccagcttttg

SEQ ID NO: 45655 - DNA, 122 bp, Homo sapiens
ccggcacagtgggcaatgcccacgcggccgccgccacacacccgcacacccgccgaggcacgcccggggacggacacgccacccacactgccgctggtcagacgctcagcagcgcacaacca

SEQ ID NO: 45656 - DNA, 122 bp, Homo sapiens
atagtacctgttgcccgccatctgagggaggtgcaggtgccaatccttcacgtgacgtgacgtggctcaccacagcctgtgtacatgtgagcagccgcgtgcagaggggaagctctgcctgg

SEQ ID NO: 45657 - DNA, 122 bp, Homo sapiens
ctgaacagaggagcaagtgcggaatggagctggaggagggacagggaggccgagcctggtcgaaacctgaccctgcctgcctcctgcagcccctgagctgggaatagcagctcgacctttga

SEQ ID NO: 45658 - DNA, 122 bp, Homo sapiens
gcaaagaaactcattgacagctaaagctactgctgttcttctttatcatttattcacttccgtagctcctccttgaaagttattaccttttcagagtttaagttttcggttccacgctcttc

SEQ ID NO: 45659 - DNA, 122 bp, Homo sapiens
gtgcagaaccgggcttcaggaccgctgagctccgtagggcgtccttgggggacgccaggtcgccggctcctctgccctcgttgagatggacaacgcctcgttctcggagccctggcccgcca

SEQ ID NO: 45660 - DNA, 122 bp, Homo sapiens
ggattttcccctgacgaccctcccgtggtccctgcacaatctgagagagacgcggcgctgcgggtgcagagctgccaagagagggctccaggccaaggcacagtcactacgcagggaagaga

SEQ ID NO: 45661 - DNA, 122 bp, Homo sapiens
cgtcttcccactggacatcggggtcgtgggccacgtggctcagaccaaaaagatggtgaacgtcgaggacgtggccgaggtgggtctgtgcggagcctcagggaggcggctgtgtgcatctc

SEQ ID NO: 45662 - DNA, 122 bp, Homo sapiens
atcctgcatcttctcattctggttgttttccaccgcgtctgctcccatttgcgtgggatgcgctggtctcctgcccgactcttttgtgttcctcttttgcatgattaaaaacacgtttctat

SEQ ID NO: 45663 - DNA, 122 bp, Homo sapiens
ttttgtagagacaagagtttcgctatgttgcccagggctggtgtccaactcctgggctcacgtgatcctcccgtctcagcgtcgggagtacctgacattccaggcgcgagccacggcgccgg

SEQ ID NO: 45664 - DNA, 122 bp, Homo sapiens
ggagaggcctacccagttctctctatcttacactagatggcaacccagaggtctgtgcagcggttacaaacaaggcattattatccgaagggaagggactgtagaatttccattggctgggg

SEQ ID NO: 45665 - DNA, 122 bp, Homo sapiens
ctccagggtcctgcagaatggaggagataagttggagacgatgcccctctacttggaagacgacattcgccctgatataaaagatgatatatatgaccccacctacaaggataaggaaggcc

SEQ ID NO: 45666 - DNA, 122 bp, Homo sapiens
aggtcactggcccctacagccgctggatctaggtgccagggagccagcgtacctcagcgtcgggcctggcccgagctgtctctgtggtgcttttgccctcatacctgggggcgggttggggg

SEQ ID NO: 45667 - DNA, 122 bp, Homo sapiens
ggaaagggagcaccagacgtctcaggattcccagcagcatcagcagcagcagggtatgtccgaccatgactccccagatgagaaggagcgctctccggagatgcatcgcgtctcctacgcca

SEQ ID NO: 45668 - DNA, 122 bp, Homo sapiens
gcagagcgcagggagagccggagcggcgagctccaagcctggcatggacctgcagagacccgattcctaccagggaggagctggccctgacttcaacgaccacgtcctgcataaggtaaaca

SEQ ID NO: 45669 - DNA, 122 bp, Homo sapiens
gaccctcgtctcgctcaacctgggtttcaaccacatcggtgacgagggcgcaggctacatcgcggacgtgagtgcacggcggggagggacctgctgggagcaggggcggcttgggcggctca

SEQ ID NO: 45670 - DNA, 122 bp, Homo sapiens
gtttgatcctcaaaccataaaaaggtatagacaggtaagcccacaccctgagatgtaacacgtgtggcaggaagggtcattactgcccaggaggagaaagcacccaaggggcctaagtgtac

SEQ ID NO: 45671 - DNA, 122 bp, Homo sapiens
gtcaggtgtgatgtctgtaagcacctcaggctccttagggaagaccagactgactgctggcgctgacgcctatgctgctcctcggggtgagatccccgcgccagcagtgcagcttccctggg

SEQ ID NO: 45672 - DNA, 122 bp, Homo sapiens
ctgcaccccgccccctctgtctgcgctcccgctcctcccagcccctccctcgcggcggggcgggaccaatcgctccccgagccgctcctgacccacctaccccagctctcgcgccgcgtgca

SEQ ID NO: 45673 - DNA, 122 bp, Homo sapiens
ttcctggggcttgttctgcctggttttgcaacccctttgctttttggggtgaggagttggcggaaaggagaggggcccaagtagcacagagggcatttgcggggtgcgaggcagcatcaatc

SEQ ID NO: 45674 - DNA, 122 bp, Homo sapiens
ccccggtgctgggaccgtggccatctctccagggccctgctgagctctggctgctggggccgcaaagactaaaagcccagagccagcccacttcctgtgcagaggatagaggggcaaggcct

SEQ ID NO: 45675 - DNA, 122 bp, Homo sapiens
acctttggaattgaagtttaaacagaaggaaaatatgacttttcccccgtttcttccactcgggattctggctgggcttcagccagaatggatacatttggattgcagagaatcctgagaca

SEQ ID NO: 45676 - DNA, 122 bp, Homo sapiens
gtaacgtcctcaactcatccgtgttgcggcgcgtgtcagaattgccttcccaaggctgaacgttccgctgggtgtgtgtggaacatgtgtgtgaacacaccgcgtttctctagtcacccgtc

SEQ ID NO: 45677 - DNA, 122 bp, Homo sapiens
ggacggccaaacggggaggcctcctctttgtcctcgcagatgctggagcagcgactggcccgggagatccgtgccctggagagaagcaaggagcagctgctctcggagagtgagcctcccgc

SEQ ID NO: 45678 - DNA, 122 bp, Homo sapiens
atgggggaagcctggccccggaggttaagtgaaattgctctaagacacagagcacatcagcggcaggatcaggaagaaactagtaaccctggagcacctagcaccagcacccctagtgcagg

SEQ ID NO: 45679 - DNA, 122 bp, Homo sapiens
gagggcaggggtttggatgtttctcactgcagcagcaagaaccctacctagtctgggacacgacagacgctcagtaatacttgattggatggaagaatgaatgaatgaacagctaacttttt

SEQ ID NO: 45680 - DNA, 122 bp, Homo sapiens
gtgttcacctcagcctgggttttggcttccgcctcacaggtttgaaacttcaaggggccacgtgcaacaacaacaagctgtcactgtccaatgccatctcaaccgcccttcccctgacgcag

SEQ ID NO: 45681 - DNA, 122 bp, Homo sapiens
ggagggtcggcgcggggctgctcccggggagcctggggttgcaagttctcagcagacgtgcgggtgctcatttatgctttttatagtagctggagaagatgttatcgcagcttgagaacaga

SEQ ID NO: 45682 - DNA, 122 bp, Homo sapiens
aaacaaagagccaaacctttctttgggggaggttaatcctttaccacacagaagggaccccgtagtgctcctttgaaaatcccctccataccagctagagttctaggcacacaccagttatt

SEQ ID NO: 45683 - DNA, 122 bp, Homo sapiens
ccctgttgtcctgggcatctttatcggctccggcctggagaagcgagcgggcggctcgggcgttgttcacggcagcagcccagtgcagcgcagttttccctaggggacgacgtgggaggttg

SEQ ID NO: 45684 - DNA, 122 bp, Homo sapiens
tgcggcgggcagctgatcccagggcctgggagcctcggcccctgctttatgctttgtaagcgaataggggtcacctagggtccggagcgccggcgctctctcgcggggaccaggctaccagg

SEQ ID NO: 45685 - DNA, 122 bp, Homo sapiens
gagattttgatttacacctagcacatatttccaggaaggagtattgtttgacaaataattcgtacttggatttttcagaacagttcagtcactgtctagggtacctgctctgggtgccactc

SEQ ID NO: 45686 - DNA, 122 bp, Homo sapiens
ggttgctaagggttctatggggttcttactccagccaggaccaggtttcagggccacaggcgtaagccttataaaactggagtttggctgagcgtggtggctcatgcctgtaatcccaatac

SEQ ID NO: 45687 - DNA, 122 bp, Homo sapiens
ttacaggaccacacgatgacacaccccaggaggacatctgtccctcttgctggagagaaacgtacactaactcatgctggcaataaagcaatcactgcagggttgtgggggttgcttctggc

SEQ ID NO: 45688 - DNA, 122 bp, Homo sapiens
cgcccccgcccgggcccgcccccatcccgcccgcatacagcccgcatcccgccggggaagcgagcccagtccagcgctgcccgtccagtcctcgcccaagatttaaagcccgcaagttttgt

SEQ ID NO: 45689 - DNA, 122 bp, Homo sapiens
aggtcccaaccaatgcaaaggcactattgagccagagtcctgcactgagactaccccagacgtgtaccgccctcccgaaggtccaaaccaatgcaaaggcgctattgagccagagtcctgca

SEQ ID NO: 45690 - DNA, 122 bp, Homo sapiens
gctggggaagaggtgtacagtgagcagtcacgctcagagctggcttgggggacactctcacgctcaggagagggacagagcgacagaggcgctcgcagcagcgcgctgtacaggtgcaacag

SEQ ID NO: 45691 - DNA, 122 bp, Homo sapiens
gtggaaagctagcaggaggcgttgctcaagttcaaaacaatctgtgcgtgtccaggcacgcgcggagccagaccccagccgcgcggctcagacctcgcgagagccatcacctgagaaatcca

SEQ ID NO: 45692 - DNA, 122 bp, Homo sapiens
gtaggtcggggaggggcggggtcggctgggagttgctggagcgttttctcctgaacgttccgccgcgaacgtttccccctggcgcgcggcgcccagaagcgttcggctcagtcgtagacttg

SEQ ID NO: 45693 - DNA, 122 bp, Homo sapiens
agttaacgccggaatgacaaactctaaagcaccgaattgcctctccctagtagggcactgcgcgtgtggagcacggccaggggcgcgtgggaagaaagacgacctatttcctacgtccgtct

SEQ ID NO: 45694 - DNA, 122 bp, Homo sapiens
tcgtcatcagccagcctgtccagactgaaggaggcagcagggggctggaaatccgcttcccgagtcgagaccagcatttaacaatgaaagagacatgaaggagaatagagtaggacgtaggg

SEQ ID NO: 45695 - DNA, 122 bp, Homo sapiens
gggggtggggggaccggtcaaggtttgcaggatgcgtgctcggaagggctgggatcttgccgctgaccttcatccccctggccgggggagccaggcgagggtgcgtggggcagcccagggct

SEQ ID NO: 45696 - DNA, 122 bp, Homo sapiens
gttctgcttggcgacttattgcctcctcaacaggcaagtaagaacacaaacttgtttttgcggaaggggtgacattggtatcagaggccctactttctaagattccccaacctttgcacagc

SEQ ID NO: 45697 - DNA, 122 bp, Homo sapiens
gttgcacagccccaggtggcgccattctctcacgcaaggatggggctgcagggtgagcagcgtgggctgcagtgtgtcagtcccaggagtgagggagtggcaagcaccacagattaccacgt

SEQ ID NO: 45698 - DNA, 122 bp, Homo sapiens
gcatatgcttagaagaacatttattgaattggatttcaagtacttgttctgtgtctctctcgtcaaactgtaaactctcagtctgactcatctttctaatttcagggcttagcaagttattc

SEQ ID NO: 45699 - DNA, 122 bp, Homo sapiens
aggaggaaaaggagcagcatgaagcagagctgagctgttgcagaacccagcctagaccagcgcccagcacctccaggagaacctcaggttcctgtgtgcagccatgagcttgggggcttgtt

SEQ ID NO: 45700 - DNA, 122 bp, Homo sapiens
tggtgagctaatcatactgggtgagtgaaaaatcaggtctggagtccgaggcagcagcaccgcagtcacagtcaccccacagaactgtcctgtaaggccaccactgcctctggtgcccagcg

SEQ ID NO: 45701 - DNA, 122 bp, Homo sapiens
gggggagcgctgtgggtgtagcatggtgctgtcctccctggggtgagttagaacagctgacggagaccctggagtctgtgtctgcatgtgggctgccaacctgccagcctccctcaggaaag

SEQ ID NO: 45702 - DNA, 122 bp, Homo sapiens
ctggtatttgtcctgggccttagatacaaatcaggaggaacgagacaagggtaaaacagtcgaagtgggtcgtgcctattttgaaacagaaaggaaacatttcacaattttagatgcccctg

SEQ ID NO: 45703 - DNA, 122 bp, Homo sapiens
gatcgcgcggccgagcccgggtcgcgccgctcccagcatcggggccgctagccaagagttcgaggccttcccgatccggatgtgatgaaaaagagcaacagagggagaagtgtttcaggatt

SEQ ID NO: 45704 - DNA, 122 bp, Homo sapiens
tgcccagagggcatgggagggggcgctgcagaccctgaggagctccccaccccctgaagacgctgaccattgccccctgactgtggcagtcagactctgccccgcaacagcctgggctgggg

SEQ ID NO: 45705 - DNA, 122 bp, Homo sapiens
cccgcccgtctgggggacccttggcgagagggtgacgcagtctgacaggcggagcccctccggcagggccgttagacaacgagtgtctaactctgtcctcggcctctacttttcaactggcc

SEQ ID NO: 45706 - DNA, 122 bp, Homo sapiens
gcgcgcccggccgcgtcgcccccagcccgttggtccccggactgcggaccccgcccccgacgggggccaggtaacccgcttccgagtgtgccacggcgacccccatctcccctccccgtgtc

SEQ ID NO: 45707 - DNA, 122 bp, Homo sapiens
ctagcatcttacctctgtggtggttcacttttgcgagcttttgctgggccttggaaggtgcgtgggctcgctgctcctctcttctgtgggaactgttgcctttgggcagggggcacacccca

SEQ ID NO: 45708 - DNA, 122 bp, Homo sapiens
aagaaaattatttatgaaaccggataaatgacttcagagccttgatgcatttgaacctaacgctctcggctcctggcagccccggctccagctggggagaccgcgaaaaccccaagccacgg

SEQ ID NO: 45709 - DNA, 122 bp, Homo sapiens
gacagagtgtgagctaaccctgaagcagcctaaaactctggcttctcagggcccccatcccgactcaccagcccaggtgctggccttgcctcctcaggcgctgccttcctgcccagacaggc

SEQ ID NO: 45710 - DNA, 122 bp, Homo sapiens
gtctgcgggcaccagaccacacgttcacggggcacctcacccagcatctgcgggcatcaccgccccttccacctgttgcactcctacgagagctaagccaggtatgaggccagaccagaaac

SEQ ID NO: 45711 - DNA, 122 bp, Homo sapiens
ggttccgggcggccgaggcgatggtacgagaccgcgccggggtcaagccggtccgacgcccgctggggccgcgctgcatagtcaatgagcgtccccgcacctccgacttacaaagagcggcc

SEQ ID NO: 45712 - DNA, 122 bp, Homo sapiens
cccattgggtagctccgtgtcaagcacccagttaccagggtcgcacagcagcccagtctccgtctcccagtggcgtggagagcaagtgtgctgcagctgtactgccacgccgcgctctgccg

SEQ ID NO: 45713 - DNA, 122 bp, Homo sapiens
gagagacaaataaccaaggaatcacacaatttcaaataagtaacttgaaaggaagggacacgatgccatgcaagtacaaaacaaagggacttgagtgaatctagttggagaagagggttggc

SEQ ID NO: 45714 - DNA, 122 bp, Homo sapiens
tggaggtcctgggggcctcgggccgagcccggctttgctcccctttggcgtaggtgcctgcgtcttgacccccaccgaaggccaagtagagaaccctcaccagggtcctgggacccgtccac

SEQ ID NO: 45715 - DNA, 122 bp, Homo sapiens
agttctgcccctgcagatggaaacagctggaaagttttagggcacagttgccctgtgcctcgcactagatgtggggcctttaaagaacttccctttaggggctgtacgatcttcatgtcttg

SEQ ID NO: 45716 - DNA, 122 bp, Homo sapiens
tcccttgccactacccctgggtggtcagatggggtgtaaatgagatgcaaatgcatcgagcgaagtgttccaaaccccacttgtccagactccagaagggagatggggagggccagagagag

SEQ ID NO: 45717 - DNA, 122 bp, Homo sapiens
atagcctgacacatgtgggagccattctctgatgcaggaaaggcttaagagagatatctccgtcacaagcctttgccatctccgatattatatatgtggcagagttaggcccatttgaaaac

SEQ ID NO: 45718 - DNA, 122 bp, Homo sapiens
ctctgctgaaggagtttgctgcactcttgaaaggacaggcaagctcaggtcctcatggctcgatctctgagcaggcctctaacccagtgaggacagcggtcaaccagtctccagctaacagc

SEQ ID NO: 45719 - DNA, 122 bp, Homo sapiens
tgtcgcggctggaggtctggtccagggcagggtggagggtgagggaggacactcttcatgcggaattaagataataaactgcccagtggaggctggagctaagggaattcccagcacagaaa

SEQ ID NO: 45720 - DNA, 122 bp, Homo sapiens
gctggctctcaggcacggcgaatccgggagatcgctgctgatacgctgggcggacgctggcgcgctcttccgcagtgcgctttgctcacttggtcggaggctctgcagattcatgccaccga

SEQ ID NO: 45721 - DNA, 122 bp, Homo sapiens
agaaactggggtcatttgttaccacagcatagtctggcaaaagctgactgatggaggactcgaataagtgagagaaaataccaattttggagaagtctcaaatatatgaagatatcaatgtt

SEQ ID NO: 45722 - DNA, 122 bp, Homo sapiens
cgtgcccttgaggggaacctggccagcttggtgccaagtgctgtcactcccagcaggcagcgtccttcccatggcccaggaggggtgggggttcctgggatgctcccacctgggactccaga

SEQ ID NO: 45723 - DNA, 122 bp, Homo sapiens
ctgcagcctgctccccacagtgggcagccagaatccctagtgtccagcacccacacgtggcggccttggcatctgagtggctttccctgtgagcccctccttgcaggatggaccctctggga

SEQ ID NO: 45724 - DNA, 122 bp, Homo sapiens
gtctgtcaatctttctggcaaaatatggtgtccgtgaaaacgagcagctgctttagctgacgactcagatgcaggcacgctcccctgagagatgagggccatgtcatccctctgggcagagg

SEQ ID NO: 45725 - DNA, 122 bp, Homo sapiens
ggcgcccacctccacctccagtgtcccgcctcgggccgtcgccctccagcggctcgcgagcgtgggagacgtacctgggcaggcactgtccagcccaggcccaggcacagccgtgaggggcg

SEQ ID NO: 45726 - DNA, 122 bp, Homo sapiens
tatttagtctcctttaattcacaaagctccccctctcccaggtaattttggttttcaagacgctgacagttttgaagaaaccaggccatttcttttgaaaactagccacagtctagatttgt

SEQ ID NO: 45727 - DNA, 122 bp, Homo sapiens
ggcattttcagaacccataagtgcctgttatttctcccattgcaaacagaaaactgtgggcgaaagattacctaggtgccgaagcaagagactgaaggcacaaactgtttcagtataataaa

SEQ ID NO: 45728 - DNA, 122 bp, Homo sapiens
aagcacgacccgtgccgctgctcctccactggtcagtgccagggtggggctggggctggacgggcaggggacttgcttctgtggctctgtccctcacatgctgcctgtcctctctccccgca

SEQ ID NO: 45729 - DNA, 122 bp, Homo sapiens
cacacgggggacaagcttctccgaggaggcctggccaaggtggaacaaataccctgatgtcgaaaaatgtctaaaaatcccacagacggaattttcaaaaagaggagaaacctcccgcggga

SEQ ID NO: 45730 - DNA, 122 bp, Homo sapiens
ttcctttcacgctgtcgctgcccgtaggtggttgtggccactgtgcccggagggaggcggcggtggccagtaatgcctgggaaactcctctggggggacattatggagctggaagcaccctt

SEQ ID NO: 45731 - DNA, 122 bp, Homo sapiens
ggtttccggggtggcagggggttcccatgccgcctgcgaggcctcggctcgggccgctcccggaacctgcacttcaggggtcctggtccgccgcccccagcaggagcaaaacaagagcacgc

SEQ ID NO: 45732 - DNA, 122 bp, Homo sapiens
gggcgggtgcgacagctgctgcgccagcgcgaggtcaccgaccacaggctcagcgaagtgcgcaagggtctgcttattaaccagcagagcgtcaagctgcggggctacaggcccaagtctga

SEQ ID NO: 45733 - DNA, 122 bp, Homo sapiens
cttaaaagtttaaaaacaaatggtggatgtacttgacgagtgttactaggattcttcaaccgctgtatacacacttttatgtctgcttgctggtgaggagagactgccttctgaaggttaac

SEQ ID NO: 45734 - DNA, 122 bp, Homo sapiens
cctgcggggtggggggctgaagctacctgccgggctctgagagatgggtggcccgaggaccgtcggagtcgcagagaggaggaacgctagctagctccagccccacttctttgtgctttact

SEQ ID NO: 45735 - DNA, 122 bp, Homo sapiens
gctccggctgggacccggctcgggctgtggctccgcgagcggcccgcgctctgggcgccgcgctcttcggccgcgcggtccacaccgccgcgctatcaggcccccactgccgcctgcgctgc

SEQ ID NO: 45736 - DNA, 122 bp, Homo sapiens
gccgtgtgcgccgcagagataaggcactgccgcgggtccgcccgcccccgataagcgcctcggccattatgggccaaatgattcattttaatttggcaatttcaccggagggagtggggact

SEQ ID NO: 45737 - DNA, 122 bp, Homo sapiens
tcggctttccctgggtctccgccctacgggagacagtgaaggcgggagcaaggccccaaccgagaaccccaccccaaacccgggggccaggagccctttacacccttcggcccgccacccgg

SEQ ID NO: 45738 - DNA, 122 bp, Homo sapiens
ctcgtgatccgcccgcctggcctcccaaagtgctgggattacaggtgtgagccaccgcgccgggcccagagcataattattattaaaatgccaggccccataatattatggaacataaataa

SEQ ID NO: 45739 - DNA, 122 bp, Homo sapiens
ggaggggaagagtacagttacttttccctctgagtgcatgagttctgagtttgtcagaggcgcatccgtaggctggaaaagaaagttcatgagctgcagaaacgataccaaccgtgggggtt

SEQ ID NO: 45740 - DNA, 122 bp, Homo sapiens
ggcgctcgacctctttgccccctaggtcaacgaggggaatccactctgccatggggaagtcgctgccccgtagggtataagaacttccccatagttcaccccttcctccctggccgcccagt

SEQ ID NO: 45741 - DNA, 122 bp, Homo sapiens
acttcacttttcgcatagaaaatcattttaaaaagcaaaccaaacgcctgtaagcagacccgctagggagcaggactctgccgcgtgtccttcccggctccggagcggcggagccagccacc

SEQ ID NO: 45742 - DNA, 122 bp, Homo sapiens
ccttgagttatcacagagctccctgtgcacatctgcactatataactcaaccagtaaagacgccttcctcgcagggccaagttcagacttttcttagattaagcaactacaagaaagaggca

SEQ ID NO: 45743 - DNA, 122 bp, Homo sapiens
caaggctggatatctgaatgtgctataaaatcaaaacaggatcctccaagttaaaacatacgcaatgttaatccaccactccttgaaacgttcccccttgctgctatctgtttagcacggta

SEQ ID NO: 45744 - DNA, 122 bp, Homo sapiens
accttcctcctccaaaaaccctcctgttctatatgaggctttagaaaccaaaggcaaggacgtttctttcatctgcctttcatcctgcaaaaagccctccactcaagggaagaaagggcact

SEQ ID NO: 45745 - DNA, 122 bp, Homo sapiens
ggtggctttaagacagtctcggaggggctcctagggaggtggggaggggagccctgatgccggggcaccttgcttgcttttgatggaaaactgctctccaaaaatggctccagagaaagcaa

SEQ ID NO: 45746 - DNA, 122 bp, Homo sapiens
gacggacgggcggggagctggcggctggggcaacctttacctgaagctgcttccacactacgggccgggtcggccccgggacacgttcctgaggggagggcccggctcccccacgcctcccg

SEQ ID NO: 45747 - DNA, 122 bp, Homo sapiens
gagggtacatccttcacatattagtcattggaaataataaatgcacaaaagatcatgtttcgatatccctggctttacagggcttgacgattatttcctcaagatataagaggagagaaaat

SEQ ID NO: 45748 - DNA, 122 bp, Homo sapiens
ctgaaacccactgctgcagccacccgggctggagttggcccgttgggtggagccagtgctcgccccggtccgacccccggtttccgggacacttgggttgcggaggccggctggccggagtc

SEQ ID NO: 45749 - DNA, 122 bp, Homo sapiens
cttagtttgtcccaaatgaagtaaaataaagtatttctttagcacggacccaccctctcccgccttttcttacaggaagccaggagacggcgcgcccctaagagaggaccccggctgtggga

SEQ ID NO: 45750 - DNA, 122 bp, Homo sapiens
cagggaggaggtcagggatgctagggaagaacgaggaagggtgggccgaggcaagctcctcgcacactcacacattccgatgcgtgcatcacacagaccagactgcagcatatacttataca

SEQ ID NO: 45751 - DNA, 122 bp, Homo sapiens
tctctctcgctgtctgtctctctcttgctgtcttccataaagtcagcaggaactttgcagcgtaaaaggacaccctaggggaagcatggcataacttgaaagcggtttcctgctccagccta

SEQ ID NO: 45752 - DNA, 122 bp, Homo sapiens
cactcagagtagctgggggagacacaggcctgtgaaattatcctggctcaactattaggtcggcagaatcccagtgaagggagccctacctctgagccccatctaagctttggctatgggtg

SEQ ID NO: 45753 - DNA, 122 bp, Homo sapiens
ccctccctccacgtctcttggcagagacagaaagggacaccgctctgcccgcgtccagcgcgaaggaggtgacctaaaacccatgggcccttctcacactgcgttctctgcgctccggccca

SEQ ID NO: 45754 - DNA, 122 bp, Homo sapiens
ttcggcatgtaccgaggtgggcttctcaggtcccctgggaggctgggcagcaggtgtgagcgtatgggacatggggaactggtgttccttccgttgctgcggggatggggccagggctgcca

SEQ ID NO: 45755 - DNA, 122 bp, Homo sapiens
cccagccaacattcctcccttgtcttcccactttgggactgtgctagctgaaggggtccgcggattttcatcagggtcgacattctaaatggggtctcattcccctggccacattgtggctg

SEQ ID NO: 45756 - DNA, 122 bp, Homo sapiens
cgcagcttctcggcgtaggcagcgcgggtcttgctgctgttgttggtgatgaagcccaggcgcttgccgcgggctcgcagcgcccgcagggcctcgggcgcgccaggcacggcggtctcccc

SEQ ID NO: 45757 - DNA, 122 bp, Homo sapiens
gctcacggccctcgttgaagtacatgggtgcgcccaccagcaggacatcagtcacgccgtcgccgtcgatgtccaccgaggtgatttcactcccaaagtaagagcctatctgcggcacgtga

SEQ ID NO: 45758 - DNA, 122 bp, Homo sapiens
ataaacaggcattgtttaggtagtgaaatgtggttacacataaataggaacccagtgcagcgtaagatgccctggcatatcaagggcggttcatgagtgggtgccttcagcttgggaggaag

SEQ ID NO: 45759 - DNA, 122 bp, Homo sapiens
gggtactttctctgtttcttgtttgtatcattgcagtaaacgctactctcatttttggctcgttggtctaattggctactctgatacctgttagctcagctagtgctctctgtctctctccc

SEQ ID NO: 45760 - DNA, 122 bp, Homo sapiens
tcacattggagagaaaccacatgcttgtcttctatgtgggaaggccttcagtctgtcctccgaccttagatgacatgagagaacacgcactggagaaaagccatatgaatgccatttatgtg

SEQ ID NO: 45761 - DNA, 122 bp, Homo sapiens
actcagcattagcgggttcatcttccccccgttcccgccatcccggcaagaacgtgagcccgctaaggcgtgtcacactcaggaaaataaaacctaactaactccgcccttgccccaccccg

SEQ ID NO: 45762 - DNA, 122 bp, Homo sapiens
gactttgcctcccttagaagcgggggcttgtatattttgcaatgcctcattaaatatttccgcattttggtctctgcaaaaaaacgtgtgttctttttaggaaacggtggttttttggggac

SEQ ID NO: 45763 - DNA, 122 bp, Homo sapiens
tattctgataactgccagatgtatacatgcagctgtgatctgcctctaaattccagacggcgctttccagctgcctgcttgatgcctctgcctggatgtttaaacctagtgtgtccaaaact

SEQ ID NO: 45764 - DNA, 122 bp, Homo sapiens
aaaactttctatcactttgacagtaactattacaaacttagtatctcaaaattatcagtacgtctctgaaaacacaatgcctttaccaatgatttttaaaatcgttctgtggtattctttgt

SEQ ID NO: 45765 - DNA, 122 bp, Homo sapiens
aagagcttgtttaatgaatggagacagcatgggaataaagtataagaatttgtggctggccgactttatgagagacacaagtgagaacaggattgcaggtggggacaggagggcttgccgcc

SEQ ID NO: 45766 - DNA, 122 bp, Homo sapiens
aaaatgccaaccacccactttttgaaaaaaaaaaaaaaaaaaataggtgcaggtgagctacgagggcttgtagatcaatcctgtttcatacaagtcctctcctgagaggctgttccaatctg

SEQ ID NO: 45767 - DNA, 122 bp, Homo sapiens
aggggcggggctggcgaagcggggaggggcgaggccagaaacacaaccggcagggaggtgcgaggttgactgcggctgggctcccatgggctttaaagtcttgccctgtaattataatctta

SEQ ID NO: 45768 - DNA, 122 bp, Homo sapiens
aatgaattccacagcaggactctatggttttcattccagattatctgagtcctttcttctcgactcttccctctgactcagggcccaggctttctgggaatggaggggaggggaagggcggc

SEQ ID NO: 45769 - DNA, 122 bp, Homo sapiens
ctcctccccggggttttccctgctgtctttttctcccttgtctctctttgcggggcaccccggccagtctgaaccggttgtgactgcgcgggtggttgggggaaggaggaggaggaggcgga

SEQ ID NO: 45770 - DNA, 122 bp, Homo sapiens
tcgtgcgttcccgtgctggctgtgtgtggctccctcttggagatgggctttatcatgagacgggccgtggtccaggggcctgggggttgtttgtctggagagcagctgccgctgctttactt

SEQ ID NO: 45771 - DNA, 122 bp, Homo sapiens
gccggggcatcccccgacggggcgggcggcggcggcggcgggggctggaacacccgggaccgcttgctgaccagcttcgagttgacctggggaacccctgcggccctggggagcccgggccc

SEQ ID NO: 45772 - DNA, 122 bp, Homo sapiens
tgaggattaaatgtgatagcataagtgaaagtgccctttgaagaaagaggaaggcgaaagcgcttattgtgtcaggagaaatgtgtggagagccccctgttgttctcaggtgtctcatcctt

SEQ ID NO: 45773 - DNA, 122 bp, Homo sapiens
ctaaaagttagcacacatgtaaatacatatatacctctttgttttcttgagacagggtctcgctctgttgcccaggctgaagtgcagaagctcactgcagcctcgaactcatgggctcgagc

SEQ ID NO: 45774 - DNA, 122 bp, Homo sapiens
gattgcccatacttctaggttatgcaaattgatttctgaataagcccttgtttgcgacatcgctggtaaaggcaggatgttaacttaaagagatgccagattttggacttgttagttatagg

SEQ ID NO: 45775 - DNA, 122 bp, Homo sapiens
agcctaaggtgactattctcacctgccaggcaccctccaaccaagtctatagggagagaccgtgcctcatcctgcctgctgcagttccacaggagtgttgttaggggcagtgatctgcagct

SEQ ID NO: 45776 - DNA, 122 bp, Homo sapiens
ctgctctgcaggcctcaccgcccagctcccgggagggggccgagggcgccctgagtgctgcgcgccttcccatgacgcagttcctgtgcctttaaatcccactcccggagggggcgggggcg

SEQ ID NO: 45777 - DNA, 122 bp, Homo sapiens
cccacgccagacggccctccctcggggcgcgctcgcagacggaggtaagagccgcaggagcgaacaatgtgcctctgtgcccagcttcggagacctgtttgctttgcgcctccagtccgggg

SEQ ID NO: 45778 - DNA, 122 bp, Homo sapiens
atactgcacgttctcactcataagtgggagctaaacattgggcacacgtggacacagagacgggaacaagacaccgggaactactgtgctcactacctgggtgacagtatccgtcatacccc

SEQ ID NO: 45779 - DNA, 122 bp, Homo sapiens
agaagaagcccagtctctaaaactgagacccagacattaagcaagacaataaggctgagccggctgaactgctgaagtgggatctgcaagtagcaggcaagtggccacatggcccaaacaag

SEQ ID NO: 45780 - DNA, 122 bp, Homo sapiens
ctcgacaccacggaccaggcagcacccactgatggctggaagacagagatttcaggcccccgactccacaccacaggcccggcagcagccactgacggctggaagacagagatttcaggccc

SEQ ID NO: 45781 - DNA, 122 bp, Homo sapiens
gataccagcaggggtgatacatgaagaaaacccattataaatcttccgtgcatgccgttgcggggtggtgcgttgtcagacatagagattgaaatcactcagccttgtggtcatgaggcgtg

SEQ ID NO: 45782 - DNA, 122 bp, Homo sapiens
cgccttcctgtctccctccccatggctggtgctggtgaggccaccttcggagaccgtgggcgtgtgtgtgagccgggcctgcttccccttgcagccccagccctgctgcctgcatgtctatg

SEQ ID NO: 45783 - DNA, 122 bp, Homo sapiens
taaagaacggaaaaaagagttttaagatgcaactcacgtaaaggtccaaaccttgcacctcgtcctagtaaaacctctgataacatattgcagcattatttttactttactactacacaact

SEQ ID NO: 45784 - DNA, 122 bp, Homo sapiens
tttgggatggttagttatgtaacaatggctgactaacacaaactctcacctccatttctccgctctcagaggaagaagaatcctttctcctttttaagacaaatttatctacttgcccttta

SEQ ID NO: 45785 - DNA, 122 bp, Homo sapiens
tgacgcggccgcggccgccattttgttctgcggtgctggtatttagagcgcagcggctgacgggccggatcgccttcgccgccgcccgcccgcaaaccttcgtgcccggcccgtcctcgccc

SEQ ID NO: 45786 - DNA, 122 bp, Homo sapiens
gtcagagggaggaggatcagatagaggccctgtcaaggctgctggtgcagggcctgcagtcgttgcttctcacaggcagctgcctcttggaggtcggaagagaaactgcgctgggcacggtg

SEQ ID NO: 45787 - DNA, 122 bp, Homo sapiens
gtctttgcttttcctactcaacaagctttccagctcttggcgtcagctctagacctaaggcggacggaggaaggggtcggggtggcggaggaccccgcgcgcctgggagcccacgagggacc

SEQ ID NO: 45788 - DNA, 122 bp, Homo sapiens
gggctacaattactttcttctagaaccagcttctttctttcaagggaaaaattcttgccccgtcacttgcctcatgaatttccaggagtgttccttgcctctgatttgaagcatgctattgt

SEQ ID NO: 45789 - DNA, 122 bp, Homo sapiens
gtcactcgagtcagtggacctagagcggaggctggcaaactgcagccctggggccaacttcggccagtcaccagactttgtatgaacttggagttaagaatggttttaacctttttaagtgg

SEQ ID NO: 45790 - DNA, 122 bp, Homo sapiens
ttttttttgcccattttccagtttaaacctgatctgaggaaatgtcatcaatctctaagacgtcttactctagtctgatgactatccacacttagggcacatcctgccttaaccctggcact

SEQ ID NO: 45791 - DNA, 122 bp, Homo sapiens
tggggagaatagagttctctttttttcctttggcttaatccccttcccactcctcttattcggaggagtagcgattacttggcagcatatggattcgtctcattcctggtacaagccaaata

SEQ ID NO: 45792 - DNA, 122 bp, Homo sapiens
agggtgggtagtataggggtagagtggcctggcagcctggatcatggtggcctgtgagctcggaacgatgcagtatcttttgttcaggtccttctcctcaagcctcagggcagagtccgcct

SEQ ID NO: 45793 - DNA, 122 bp, Homo sapiens
gggcagcctgcagaggtgtcaccagcagccattaagtgcagatactgtcgtccctggtgtcgtccctgaaaatcttgtgacagggagagacagagtgaaaggaaagaaaaacgaggcgatca

SEQ ID NO: 45794 - DNA, 122 bp, Homo sapiens
gttcttgggcgtacctactctgggtgggtggagacctatccaacaagagctgagaaagctcgtgaagtaacccgtgtgcttcttcgagatctgattcctagattggaactgcccttccggat

SEQ ID NO: 45795 - DNA, 122 bp, Homo sapiens
cctgtggacaggacggggtgggggcatggccctggggactcctcgtgacagagggtcctgcggcaagagggtctcccgggccgcggaggccctgcctcacctgcagtcctccgggagcccgc

SEQ ID NO: 45796 - DNA, 122 bp, Homo sapiens
acctttgccgtcttctctaccaaggcagccaaaaacccaggcccattttctgagccggtccgtaagggcggtcgaaatctaggaatcagatctcgaagaagcacaggggttacttcacgagc

SEQ ID NO: 45797 - DNA, 122 bp, Homo sapiens
tgactatggggaaacaggtttacatctgtggatggaagaaaaacgttattagaaaccttacggaaggcaaacttatttatttgtttgtttactgaaacaaggtcttaccctcacccaggctg

SEQ ID NO: 45798 - DNA, 122 bp, Homo sapiens
caccctgagtgtctacactcaccccagaagaacatggagggttctctagaagccaattaccgatcaggagatgaagtatgcagatcatcagagcagtaggtgctatctgtgaaaagtcttag

SEQ ID NO: 45799 - DNA, 122 bp, Homo sapiens
gagaacatgcagtgttttgttttctgttcttgtgatagtttgctgagaatgatggtttcccgcttcatccatgtcccatttgtaaaaatgaaaaggataattgtgggaggatattctaaaca

SEQ ID NO: 45800 - DNA, 122 bp, Homo sapiens
tcctctgtgctgttggcgcggcgggagggccggcggaggccagttcaggggtcaggctggcgtcggctgccggggctccgcgtgctgcgggcggggcgggcccggtggggattgggcgcggc

SEQ ID NO: 45801 - DNA, 122 bp, Homo sapiens
tggtggcttggcattgctgtggcttagggacgcctggagaccccatcctggcagtgtggacggctgtttcattaaagatacaaacttctctgactctacattagtaagggaaaggctgagca

SEQ ID NO: 45802 - DNA, 122 bp, Homo sapiens
ccgggtgctgtatcggcgggtttcttcccatctcctggacatatactttatatgctgcggcggaggtcgtacctccttggcctggaggaacccagtggggactgacgcagctccgggtgagc

SEQ ID NO: 45803 - DNA, 122 bp, Homo sapiens
tgtttccaagccagtaggaggctccctgccaagacccatcggctgctggtgacatgaacacgctgtgtgaatcacacagccacatggtggactttcattatgtcagcccaggagtgtggtct

SEQ ID NO: 45804 - DNA, 122 bp, Homo sapiens
acctcccgggggggtgccccataccatcccacccggctgtcttggcccctcccagggagccgcaggagaaactagccctacacctgggattcccagagccttctgctggggctcctgccccc

SEQ ID NO: 45805 - DNA, 122 bp, Homo sapiens
gagccggagacatggaaagcgtccagatatgtgccgttaggccacgtctacaaacctctgcggggtacacgtggccgtccactgtgtgctctgagcccccctcattcactgctccccagtgg

SEQ ID NO: 45806 - DNA, 122 bp, Homo sapiens
cgccgatggcaccaggacgtatggagccagtctcctggtacctgcacaggatcttggagacgcagccgtgggacacgcgcagctggcgcgagatgacgcagggccggatgccgtggtgggcc

SEQ ID NO: 45807 - DNA, 122 bp, Homo sapiens
cgtgatccacccgcctcggcctcccaaagtgctgggattacaggcgtgagccaccgcgcccggcacatattttgatttctaatgtggacatcagaatgggctgttgacagctcttttttttt

SEQ ID NO: 45808 - DNA, 122 bp, Homo sapiens
atgatgccatacccatacaatggcatactacaccaacatttaaagttatttagtacgatgcgtattcatgtagaaaattattcataataggctggcgcggtggctcaggcctgtaatcctag

SEQ ID NO: 45809 - DNA, 122 bp, Homo sapiens
aaggggcagtcgtggctccgtgaggggactgaggtcatagcaaagccctcacagagcctgcgagagccgtagacctggaagaagacacaagacagaagtcagcgtgggtgggagtggtcaca

SEQ ID NO: 45810 - DNA, 122 bp, Homo sapiens
ttggggtctggttacatttggcttgagggcgggggtggggcaggacgcacacagtattctcgtttcccttcagagaatttccttttgaatttctcatagcctgttacatagtgtggagtttg

SEQ ID NO: 45811 - DNA, 122 bp, Homo sapiens
agtgggcgccattgctggatccggaacccctcctgagggtcttcacggggtctgagtgggcgccattgccggatccggaacccgcctgagggtcttcacggggtctgagtgggcgccattgc

SEQ ID NO: 45812 - DNA, 122 bp, Homo sapiens
ccgggccagtgctgggtcggacgcgcccccatgcttgtggatcgtgtagcacctttgaaacgggtgcttttgccattcaaactgccctgggaattggctgggtgtctgtggtgtcggctaaa

SEQ ID NO: 45813 - DNA, 122 bp, Homo sapiens
taatggggatagagaggaagacaaggaagaaggacatggtccatattctatagttgcttacgacttaagttgtagtgtggaaaaaatccagtcagaaagcacagtcaatattttggatgtga

SEQ ID NO: 45814 - DNA, 122 bp, Homo sapiens
ctgctcctcgcttccccagctctgatcgtagccatggcaacgcatgaggaggctggatgccggacagggcggcggagggctccccaaacacacccaactacaggaggtcggagaaggggcag

SEQ ID NO: 45815 - DNA, 122 bp, Homo sapiens
cggccccattgggcaagctcgtcgcccatgcctagttcccattggctcgatgtcctgtgacgtaagtcatgggaacccaatggaagaggcggaatgagaagggctcacgcttggcttccagt

SEQ ID NO: 45816 - DNA, 122 bp, Homo sapiens
gagtaagaggtgaaaaggcaccagaattcagacggagctttaaattccagacagggccagcgttgggagcacgtaggaggcgcccctcggaaaggagccggagacccagctgacttcgcact

SEQ ID NO: 45817 - DNA, 122 bp, Homo sapiens
tcagcagggccaggacagggtgggaagaagaagcttgtttattgtgttacatacacagcacggggctctggcctgccagccatggggacctactcaaactcaggaacaggccggtctcctga

SEQ ID NO: 45818 - DNA, 122 bp, Homo sapiens
tgacaaataaataacattccaagtaaatttatgttaaaatgtatgtcttgatgagatggacgaggttgggagttttttccaatgagtttttctgtgggtggctaatacctattactggaatg

SEQ ID NO: 45819 - DNA, 122 bp, Homo sapiens
caaacgcgcgctgcctgcagtaggagagaggaaaccgcgaagcgcgagaaaaggcgcccccgtccccaagcagcccgcgcgcccttccaggggccagacctgctccatcctggacggcgaaa

SEQ ID NO: 45820 - DNA, 122 bp, Homo sapiens
ccttgtactcaccaagtcttttagaagcacctgaaataaagcagtttgaaaccagctgggcgcttcaggatgagattagatgttttcagatgtctcctccaacaaaaaacaaacaacgtctg

SEQ ID NO: 45821 - DNA, 122 bp, Homo sapiens
agtttcttttggatgttagttttctaatctgcagcacagagtttgcaggaagaaagtccacgaagctggggctttctaaatgtcttccacatgggaaagttacctgaaccagtcaggacgca

SEQ ID NO: 45822 - DNA, 122 bp, Homo sapiens
ctcgggagcccgccccttgcctgtttcccctttgatgtgctgtggcctgaacacctgacgcgtctctgtctccagttctcggtccgagatggagaagtgggttgaggacatccagatggcca

SEQ ID NO: 45823 - DNA, 122 bp, Homo sapiens
tctcaggctgggctggcaaacgtcggggactttcccacagtcctggacgtcctctttcaccgggttgtagtactgattgctctctgacccgtggctttcattttggatcagaataggaggct

SEQ ID NO: 45824 - DNA, 122 bp, Homo sapiens
ttaataaaagctcttttctccaagcagcagaggagggagaagggaggtggctgtgtagatcgaggccaactgctggggagccgtgggcttgttaactagagcccaccactgaaaccctcacg

SEQ ID NO: 45825 - DNA, 122 bp, Homo sapiens
gccacacccgtagttaagtattcggactctgagattccagggtggggcccaggccatccgcgttttcacccagcatcgtgtgattcggcagcaggtggtctgtggcccgcactttgagaaac

SEQ ID NO: 45826 - DNA, 122 bp, Homo sapiens
tcgctgccgaagcccgggagaccacttgcggccaagacttcctggaggcgtggggggaagcggaggagggggcggcggccgacgggggaggggggctgtcgtttgagtgagcggcagactgc

SEQ ID NO: 45827 - DNA, 122 bp, Homo sapiens
gatctcctgacctcgtgaaccgcccgcctcggcctcccaaagtgctggaattacaggtagcgtgaactcagctcactgcagcctctgcttcccgagttcaagccattctcctgcctctgcct

SEQ ID NO: 45828 - DNA, 122 bp, Homo sapiens
tgttggagcgaatgcgcgagtctgacagtgaaccttttgggaaagagccagcattgtaaccgtgctcggtgacttctctggctttatagggaacagatgtgaggatagcaaggggcgcacac

SEQ ID NO: 45829 - DNA, 122 bp, Homo sapiens
aatcagcagagagaacacacgtccttgcggaagtgacggcagttccgagtccagtgggggcggtgggagcgatgagggtctgagacggtgggagcggttgtgtgaagatggaggtaggaacc

SEQ ID NO: 45830 - DNA, 122 bp, Homo sapiens
aaaatgcacttttctcagcggagggaaggaatctcaacttctgtgtaacgtagggtgaaccggaaaagtaaatatatgaattcagtgaaggtttcgacataccccaattttgaatctttgct

SEQ ID NO: 45831 - DNA, 122 bp, Homo sapiens
tcagtcctttcggtgaaatcggtgaaatcggtggttctcatcttctgtttcttgaacacacgtcttgttcccacccatcggttatggttggagaagcatttcaagaaaacacctgttagggc

SEQ ID NO: 45832 - DNA, 122 bp, Homo sapiens
gggcactggccctctgccccaggagaacggctgccggccttgacatcttggcgcctcccccgctccctcagccctgtcccctgcacctagggccctgtaggggcatcccaaactggcacctt

SEQ ID NO: 45833 - DNA, 122 bp, Homo sapiens
acccacggctccaacttcccggacttgcaggattcttggtacggctgactttgggctccacgagattcctccgcgcgcacctggctcacatctctgagtacgcagtgaccctggatagctac

SEQ ID NO: 45834 - DNA, 122 bp, Homo sapiens
acctcgtgatccgcccgcctcggcctcccaaagtgctgggattacaggcgtgagccaccgcgcccggcatgttgggccttttaagtatccacattttcactattaacaacaacgctgtgcag

SEQ ID NO: 45835 - DNA, 122 bp, Homo sapiens
ggccgttaccgttctactcgtcctcatccgggactgcgctgaccttctggccgttaaagccgttatccactgttatcaggaccaggtagtctcgcccaactgggacagagcggtcgcccgag

SEQ ID NO: 45836 - DNA, 122 bp, Homo sapiens
atcacacccgcaacctgggggcaattgtgactgcagcttaatagcctgggctgatggctacgagagctctgagcttggggagtgggggccgggggatgccgagctctgccgcaaacctgctg

SEQ ID NO: 45837 - DNA, 122 bp, Homo sapiens
gcagcagcagcagcagcagcagcagcagcagcaggcgccgcagctgagaccggcggccgacggccagccctcagggggcggtcacaagtcagcgcccaagcaagtcaagcgacagcgctcgt

SEQ ID NO: 45838 - DNA, 122 bp, Homo sapiens
ctctcacgttgcttgtgagactgcctcgcccacacatcctagatgctcaattaaagtggacgtaaaggaagatgctgtggcttcttcccaaaataccgaacgggaggctctgggtggggatg

SEQ ID NO: 45839 - DNA, 122 bp, Homo sapiens
gccagtgggctggcactgctgggggacccagtacaccctccgcagctgctggctcgggtgcgaagtccctcattgaccggggccagaagggctggccgactgctctgagtgcgggcccgcca

SEQ ID NO: 45840 - DNA, 122 bp, Homo sapiens
aatttatccacgttgaatttacacacatgtacttttatcttactagcctgggcaacgtggcgaaaccctgtcttcactaaaaatacaaaaaaatcggctgggcacggtggctcacacctgta

SEQ ID NO: 45841 - DNA, 122 bp, Homo sapiens
gcgggctcccagcccccgccccggggtgcggcaggaggctccgaggctgagcacctgctgcggggcccccgggcctgtggctccccgcctgcccgcctcaccctgaggttcagccccctgaa

SEQ ID NO: 45842 - DNA, 122 bp, Homo sapiens
gtgccggactgcgcctgctgcgtgagtcccgggatgcagaagtggcaaggccatggcctccggagcggcgggctctgactttttaggggaaatcgaggttcccaaggggtgtggtcagaact

SEQ ID NO: 45843 - DNA, 122 bp, Homo sapiens
tcgtggggagggggtgcgtggatggctgggcagtcctggcagcagatgtgtcctccagagcgggtaggcttagatgggctcagccccagctgctcccctgcccggtgtcttcctctcccgcc

SEQ ID NO: 45844 - DNA, 122 bp, Homo sapiens
acagtgcaactttattcagccatataatcattatgctgggtcctgccctctttgccaccccggttgccatttatccatggtctatgtctcagggttctaggcccccagcaggatgggggtcc

SEQ ID NO: 45845 - DNA, 122 bp, Homo sapiens
taaaggctttgcgcttctccagagcggctgctgtctcatgcacacccggcctggtgtgcccgccccacccagtgtgcccatcctgcccagtgagtgtcccccccgtgtgcctgccctgcgtg

SEQ ID NO: 45846 - DNA, 122 bp, Homo sapiens
agtgtagctgggtgatacagcctagaaaagatatagccctgcgactgcacacgaggtttacgagcagcttgggcagtgtcactgaagaataagaaatatccagacaagaaaggtttcccaga

SEQ ID NO: 45847 - DNA, 122 bp, Homo sapiens
ttattaagaaaatgacagaagaaattttttctatcttcctctttcgcttctctttttaaacgaaggttggttgacagtcgggtgatctcaggcctaaagtatttggctttccccattgttca

SEQ ID NO: 45848 - DNA, 122 bp, Homo sapiens
atcgcggatccaccaggggtgaggcggcactgagcacaagtgtgaggctctcgggagctacgcctccgcttccccagtgccacccgtttttacctcaggcggttctgaccgccatcgtttca

SEQ ID NO: 45849 - DNA, 122 bp, Homo sapiens
gatgaatttcaaaacgcctcggggagctgtttgagtctttctgtaatgctgtaatattttcgataaacctgggacagtgaaaaaaaagaaaagagaaaaagtaaaggctaaccaaacccatg

SEQ ID NO: 45850 - DNA, 122 bp, Homo sapiens
ttcagatgctaagtccaggctcttgacagctcactggagacgctggaatcaccttcactgcgcctgtatcagcacccgccacacaggcgcacaaataaaccttcccagagtgaatgaatgaa

SEQ ID NO: 45851 - DNA, 122 bp, Homo sapiens
aggtggtaagttttaagtttgtactttgagcttagtcggaagcatgcttgactgccaacccggggcacaaaggatgaaggcttttagaactggacaaacttctaacaaaaggtatttgcaac

SEQ ID NO: 45852 - DNA, 122 bp, Homo sapiens
aagggaccagaggtgattggaatattcattgagcttggaaaggggttggaatgagagaaccgtttggaagcactggaatacagctttattcctacacgattagacccgttaccccgtgggtc

SEQ ID NO: 45853 - DNA, 122 bp, Homo sapiens
gggattggagagcagagatcttagtctagttttctttctttctttttttcctttttgagacggagtctcgctctgttgcccaggctggagagcagtggcgagatcttggctcactgcaagct

SEQ ID NO: 45854 - DNA, 122 bp, Homo sapiens
aaaagtaaggcatccataagatcaaagccacatttctttgctctctgcaccccattcccgcgccggccaggttaagcctcctgcgtggccagcaccccttggcaggggcagaactccctgga

SEQ ID NO: 45855 - DNA, 122 bp, Homo sapiens
ggctccgacacgccacccctacactccaggccgtgtacacacatcacaccgtgccgggcacgggcggcatctgcacacccgccacatgtgtacgcgttgatcacacaccaaacgcaccaggg

SEQ ID NO: 45856 - DNA, 122 bp, Homo sapiens
ctccctgaccccttgcgcttcccaggtgaggcaatgcctcgcccagcttcggctcgcgcacggtgcacacacacactggcctgcgcccactgtcttgcactccctagtgagatgaacccggt

SEQ ID NO: 45857 - DNA, 122 bp, Homo sapiens
gtggggcggagggtctggccacggctccacgcccctgacgtggaggctgtgaacaggaggcggcccctccgaggcaggcatttgagtgtgctcagcggagctgttgcagaaggctgcagcaa

SEQ ID NO: 45858 - DNA, 122 bp, Homo sapiens
agcgcccgggacacaaggcgcagtcgatgtggagaccagcgtatgaatcacttcggccctcgcatgccagctagtgattgagtgtgctcggccccgtccggtcccgtcccgccccgggatcc

SEQ ID NO: 45859 - DNA, 122 bp, Homo sapiens
ccaccgcgtcattgtctcggtttatctgcagatacgtctacctagcagtcagcccagcagcgtaagtggtgaccagtgtgggcctctttgatcctgagaccgaaggctcggccactggccct

SEQ ID NO: 45860 - DNA, 122 bp, Homo sapiens
ccccccaccgcaagcgcaaccccccgccccagcgcaggcgcaccacaccccgccccctcccgggcaggcgcaccacacccgaccccctgccgcgcaggggcacccacaccccgcccccgcac

SEQ ID NO: 45861 - DNA, 122 bp, Homo sapiens
aagagcaggtcagagaatctcccaaaagtcatttgaccctaccctccctggaatcacgcacgtttctctgagcttctgaaaagtactgggaaggctaaaggcagcaagccactgaggctcct

SEQ ID NO: 45862 - DNA, 122 bp, Homo sapiens
gtcctgcgcgcggagattaacgcaaacccggaagcggatcgggtggagtgaaggtcacgtcgccatggtgagttttgctctgtgttgcattaagtctccgcttcccaggtccccgccgcttc

SEQ ID NO: 45863 - DNA, 122 bp, Homo sapiens
gcccggaacacgcggtccctcgcttttgtcccatgctgagttggttttatcagaggccatcgtaggccccacccttctagatcagatcacctgtccctttttctttacccacgttctgctgc

SEQ ID NO: 45864 - DNA, 122 bp, Homo sapiens
ttcccgcccctgcaatcttcctcctgccccgggcagggccttaggggccggcgatcccgtcgggggcaaggcacctgcaacccagaacgcagcagctcaggccagctgaactgccgcgcctg

SEQ ID NO: 45865 - DNA, 122 bp, Homo sapiens
tgacattattgaatatttgaatattgctgggtgttttttgttttgtttttggtgactcagcgtataaacctgctttctttgggggacaaaagaaaggtatggaacttaaaacgcagcatgta

SEQ ID NO: 45866 - DNA, 122 bp, Homo sapiens
tcagcgggccggcacgtgatggcggacggcaaaaggcgcggctcaaaattagacagaatgcgatcgcctgatttttttttttttttttttttttttttttttcttttccctgctccctctag

SEQ ID NO: 45867 - DNA, 122 bp, Homo sapiens
aatgggagagaggaggctctttggtccaagctgggcatcgctaaaagaggctaagggcctcgaaggaccgcagagaacaacactcatcatgcgagagtctgaagaggagattcctgaagtgc

SEQ ID NO: 45868 - DNA, 122 bp, Homo sapiens
gcctttgtcccagggactccaggctctttttcttgtctgagcctcacctggcacctggcccgagacactcctgagatgggattaagcaaggagcaggtggaggagcccaggcttctccctca

SEQ ID NO: 45869 - DNA, 122 bp, Homo sapiens
tatacgcatgcgacttcccggtggccatctttactgtgggctgaagcctgtgcgcttactcgcgcatgtgcaagccttccctcgctttcctcttccaagtagccttgcctagagcggagcct

SEQ ID NO: 45870 - DNA, 122 bp, Homo sapiens
ttaactcaaaagggatgaaagacctaaaactgtaaaattcttaggaaaaaacgggtcagtcgtcatactcttgggtgaggcaatggtttcttagatttgacaccaaaagtacaagcaacaca

SEQ ID NO: 45871 - DNA, 122 bp, Homo sapiens
aaatccagaggggcgcctggcggtggagatgctggctgttgctgtagatggagctgcagccgctcggctgcttctctgggaggaggaggaggagtaagaggaggaggaaggaactcgggctg

SEQ ID NO: 45872 - DNA, 122 bp, Homo sapiens
ccactcatgattggccctaagttccgggcctcagttttcactggataagcggtcgctgagcggggcgcaggtgactaaatttcgacggggtcttctcacgggtttcattcagttggccactg

SEQ ID NO: 45873 - DNA, 122 bp, Homo sapiens
aggaatgtggcaaatggaaagagacccagagggcattgaataggaaggaaatagtataatcgcatatgaatggatgattattgtgtgatggatcctgacttaggaaagttgtacagttaatc

SEQ ID NO: 45874 - DNA, 122 bp, Homo sapiens
aatgaccccatgcccaacatcaaaaggacggctaggttagcgcacggcagcccacccgcacggctgtattagtgcacggacggctgctaaggatggctatattagtacacggctgtattatg

SEQ ID NO: 45875 - DNA, 122 bp, Homo sapiens
ccggagcgacgcaggcgaacagcggccgctccgcgctcccgcggctcttaaggggcacaacgcgggccgcccattggcggctatttatagcccattcattccattggcccgcgccgcggggt

SEQ ID NO: 45876 - DNA, 122 bp, Homo sapiens
tcaggggctcaacccaatatgaaaggtaaacatcttaataaaaatactgacgatccacaacggtcttaggtagcgcaaccatgccaaggcgaggcaagatttttaagaagctacaggtttaa

SEQ ID NO: 45877 - DNA, 122 bp, Homo sapiens
ttctttgtaatataaaataaaaagctttaaaacctaagaatggactccagagagaaaatgcgtagtgtggaagtgaatttgaatcatagaatccctgaatttaaagataaaatgtaaaagaa

SEQ ID NO: 45878 - DNA, 122 bp, Homo sapiens
tcacggaactatgatctccataattatgcaactggtagtccgggccatttggatagcgaccgcaaaatgagtttacaaaataagagctcatttgttttttgatatgtgtgcttgatttgtgg

SEQ ID NO: 45879 - DNA, 122 bp, Homo sapiens
tcgttcctctcttccgtttgccttcactcttccttctgcgcatgtgctcagttcgctatccggctgcttgtacctggttcaggaggttcaggcagaggttgcacccactacgcctgcgcaac

SEQ ID NO: 45880 - DNA, 122 bp, Homo sapiens
gtattcacatgtgcttgtgtgtctgagagagagaggagagagaaaaagaaagagagcgagcgagcattatgggatttgggtagttttggaaactttcttttgagaatactgagaatgattgg

SEQ ID NO: 45881 - DNA, 122 bp, Homo sapiens
gaagcacttttctgttgttaagaatgttacactttctcttttccccactacacacatatgcgtgcacactcacacttaaacacacatccctgctctcacaaacactaggatgcatcttcaca

SEQ ID NO: 45882 - DNA, 122 bp, Homo sapiens
cccacgcgctaagccgtgactccctgtaacacacccgtgtcgacacaggtcacgtgggcccgaggtgctcatacatcacactccttgtccaggatggtccttcctggcaccatgtggtcctc

SEQ ID NO: 45883 - DNA, 122 bp, Homo sapiens
agggggagagaaagtctgtggctggatttaggccaaatggaaataagacattcccctgggcggggggcagagtggagatggggaaggagctggagggctgagaaggctctagccctgggagg

SEQ ID NO: 45884 - DNA, 122 bp, Homo sapiens
cccccgctccgctgccaagctgcttctggagctcctgcccctttcccattgaccaccccccgaactccactgcacacacaccttgtttaggacgtccttctgcgagcccaggtagaggtgag

SEQ ID NO: 45885 - DNA, 122 bp, Homo sapiens
gtctcccgaaatcaggaggtgcgtgcctctggcttgctgtgtgaacagacacactgggtccggtgatttaagctgtaaaatatgtgattagactgcaggtagtctaaatgtcaaaactgcag

SEQ ID NO: 45886 - DNA, 122 bp, Homo sapiens
ctgtcaccgcgtgcctcggcgttgttcccacggaaggcggaatgcattttctgcaaggcgcgtcatggctttcatctccgaggagctccggcagggtcagaagcgttgctctcgttcaccgg

SEQ ID NO: 45887 - DNA, 122 bp, Homo sapiens
acgggttagactggtgctgtagcagcatctcagactgggggccaagggcgcagtcaggtccgcacatcctcaggccgcgctgccccgcccccgctgccccgcccccgctcgggcctcaccac

SEQ ID NO: 45888 - DNA, 122 bp, Homo sapiens
aaaacggcacttatatcccttacctttatacaaatttacaaaactgtggctgaggatctccgtgatctcccccacatttagagctttgataggatgcacgggactcaacatatagttgaatt

SEQ ID NO: 45889 - DNA, 122 bp, Homo sapiens
ggggacgcgcccagacgtagaggccctgacctctgaatcttggcggggcacccaggagcccggcttcggggtgcttagcggggcgaagccgcccccggacccgcgtggctccagcctcctgg

SEQ ID NO: 45890 - DNA, 122 bp, Homo sapiens
acagccaggtctgcacctgactgggaaatttactagttcctcactgggattctggaggggcgtgtgtgtgtgcatgttgagaattacagaatcatttagacttaagcagtcagccattcagc

SEQ ID NO: 45891 - DNA, 122 bp, Homo sapiens
gaatttcagcaattccgaccatgggtaaaacccagtgcagtgacactctcatgttctcaccgaccaggaaaccacttactctgctttggggaggagttagtgcaggactgggcgtgggcaga

SEQ ID NO: 45892 - DNA, 122 bp, Homo sapiens
gttctttttctttttggtttaaaaacagaaattggaagaacttgttgagattatatgagacgagaaagctcaagaacagttagaggaattgtctccttgaaaccaagtttagtatggggaag

SEQ ID NO: 45893 - DNA, 122 bp, Homo sapiens
ttctctgattgatgatactttgcttcctaacattaccgcaaatataagtagcgaaagcggcggtttaggtgcaactgcaagctcagagcttctggcagcccagaagatccccaaggtgccaa

SEQ ID NO: 45894 - DNA, 122 bp, Homo sapiens
ttctataccctcaaggtaggtgctggaggaagagctgatcccgtctctgaggtcaagggccggactaggacaaggactggaatcttgagggatggatgtctgggttccctgagaagaactga

SEQ ID NO: 45895 - DNA, 122 bp, Homo sapiens
cacctttatttacgccacctttattaggttggggtccagatctgctccatgtcaccagggcgatcttaagtcacaatcccgcccaaggtccccttcccgccccgccccgctggaacacccct

SEQ ID NO: 45896 - DNA, 122 bp, Homo sapiens
ccgcaaccggcactgggagcggttgagggcggccggcctcacgctgggagcggttgagggcggccggcctcgcgctggaacctcacccgcctcaaggctcgtgtggcagcgcacggggcagg

SEQ ID NO: 45897 - DNA, 122 bp, Homo sapiens
cgtcccgccaggcggtgcacacctgcgccgcgcgccccttgtcccggacgtccaggtagccgaagatcatggccagcagctccgggaacaggcatgagatgtgggtctccatcttcctcctc

SEQ ID NO: 45898 - DNA, 122 bp, Homo sapiens
acagaccattgtctggcacggagttctaggggtgagaagtgtcccgggacttggatgccccgcaaaggcccaatctggcatgactcctaaattaataatgtatttagctgtgggaagagatt

SEQ ID NO: 45899 - DNA, 122 bp, Homo sapiens
gcggcggcctggagctggggtggtgagggcggatggcaggttggagaaatgcagccgagccgcaggtttctagaggcctctacagcccctgccatctgggcactgcacagacagacgctgcg

SEQ ID NO: 45900 - DNA, 122 bp, Homo sapiens
acccaagagtacaataatagccccgaaggcagctccactgtcatgctccagctcaaccctcgtggcgcggccaagccgcagctctccgctgcccagctgcagatggaaaagaagatgaacga

SEQ ID NO: 45901 - DNA, 122 bp, Homo sapiens
aatcattagcccaaagcagtaagtgcagcaggcctggccccacaccttccggaagagccacggtgtgaggctggcatccctggggcacgacacaaccaggatgtagacgaaatagatgcaat

SEQ ID NO: 45902 - DNA, 122 bp, Homo sapiens
cgtgataagcgggtggtgtggccagatggtaaaacaggggcggggctggaaagttaaggccggacgctgagtgtcctttactactaagcttaagagttcatactacaggcacctgggggcca

SEQ ID NO: 45903 - DNA, 122 bp, Homo sapiens
ccgccgggagatgtgctccagcgccagccccgcctcccgcccgcccctgtcggcccctcgcgccgcctccgctgcggcccgtcccctagctcccgcccgcccgagaacccagccccaggctg

SEQ ID NO: 45904 - DNA, 122 bp, Homo sapiens
cttcatgtttcataatccgtggcaactctcatttttaacacagcccatcataattcctaacgtgcgatgcgacaaccacacaaagggtgttttgcagctgctgggaggcagatcggtgctgg

SEQ ID NO: 45905 - DNA, 122 bp, Homo sapiens
cctggctatgttaaacccaggacctggctatgttaaacccaggacccttgccacagggagcgagaaagggtgggtggtttgtagtggccgctcttagaggagtggcaggtgaaaacagtgca

SEQ ID NO: 45906 - DNA, 122 bp, Homo sapiens
cctcaaaatacagcccagagaaactcaaaagaattaactctatttcttcaaattgtgtgacgccaccaaggccagatgacttcagcattgggaaggcaatatccagctgtcatcttcttgat

SEQ ID NO: 45907 - DNA, 122 bp, Homo sapiens
caacagcgccagcgggctcttcttggcatcgagctgcggggtcagacgatggggggggagcgtcacacagagaaagaagtggaaaccctttagaatcctggcttctggggttcaaatgcctc

SEQ ID NO: 45908 - DNA, 122 bp, Homo sapiens
ccttggttacaggactcacgtgaaagggtccctcaggagagtccagggtatgcagcagctcgagggaaagggaggcgtccttccttaactccttgggcccacacacactgcagtccaggagg

SEQ ID NO: 45909 - DNA, 122 bp, Homo sapiens
tctcaaaaaaaaaaaaaattcattcatcatcagccatcatggaaatgcaaatccataccacgagatactaatttatacccactaggatggctacagatatcaaagatagataatactgttgg

SEQ ID NO: 45910 - DNA, 122 bp, Homo sapiens
cctaagatataataggcagggtttcaggatttagaaacgatgcacgtagatttcagactgcgcctctctctgacatcagaaaacctacattgcctaaggctggcacagagttggccccaaag

SEQ ID NO: 45911 - DNA, 122 bp, Homo sapiens
cacctgggaggaggcgagaggttggcggtgaagggccaactggggctaccaaacaaacggcggttagagtaagtctgtcaggaagtggcctgaggagataaaatgtctgaatgaaacattga

SEQ ID NO: 45912 - DNA, 122 bp, Homo sapiens
gcgcctcagcagcggttggggatacagcagccaaagagagcagcgctcactgctgggatccgggcagccctgatttttgtggagaacgagcagggaaggaaggaagctgcctcgtggaaagg

SEQ ID NO: 45913 - DNA, 122 bp, Homo sapiens
cccagtgttatgcagaactgctttctttctcgtctgaattcttattctactttatctgaccgagtagtaatatgagctttataataaaaatcacaacatattgccttttgtggctgttactg

SEQ ID NO: 45914 - DNA, 122 bp, Homo sapiens
ccaccgtccccagcactcacccttgtgcggcatcagtgcataggtgaactcgtggcgccccgtgtcagcagtagcgtccggggctttaggcgcccgcaagctggggtgaggagggcgcgtag

SEQ ID NO: 45915 - DNA, 122 bp, Homo sapiens
cctgccgtattgcttctgagggcaattcccctcaccacgttcgcaacttcagttccttaacgtgttccaggagcactcaccctccatgcaacaaggtgaggctgccaatccttcctatacta

SEQ ID NO: 45916 - DNA, 122 bp, Homo sapiens
tatccagtacacagaagatatttgtaggtatctttattcttggatatagggtattactctcgggtattcttggtggcaccttggccccatactgcctaatttacaacatttgctgtaacttt

SEQ ID NO: 45917 - DNA, 122 bp, Homo sapiens
ctcctcccctcccgcctcgtcacccagcccagtgccacaatcctcctccctccccaaaatcgggtccaatcagctgcctgccaaccctgggactgctgtgctgtgattggcgggtggctcta

SEQ ID NO: 45918 - DNA, 122 bp, Homo sapiens
caccatgatgctggcgggggtgcggtgactccaccgtggagcagcagcgttcaactgtggcggttgcctggtccccggaactctcctcttttttttttttttaatgcattatggaaactttt

SEQ ID NO: 45919 - DNA, 122 bp, Homo sapiens
acacctcatcactgcaaaaagggcacaaaaaaatcacctgtgagctgtagattccggacccgtatattcctggactttggggcctggacctggggaaatcttccatttgccatctgcaggaa

SEQ ID NO: 45920 - DNA, 122 bp, Homo sapiens
ctggcaaccctactaaaggagctcaattaagtatttgctgacttaacagtctgaaggtctcgtttcacctgtaaaatggggctagtacctgtccctgcctctataaggttgatgggcagagt

SEQ ID NO: 45921 - DNA, 122 bp, Homo sapiens
agccatgccccctgtcctcatcactgcttctgtgtctcctacagctgctggctggtgtggcgtccaagccttggcgccttctacatccctgtggctttgattctgctcatcacctggatcta

SEQ ID NO: 45922 - DNA, 122 bp, Homo sapiens
aggaagaagtcagaacccaggggaggaggaagtcagaggcaatctcagtccttgtctacccgttcatccctcaaaaatctctgggttcgagggaagcagggaagaaataaggggcaaggggg

SEQ ID NO: 45923 - DNA, 122 bp, Homo sapiens
aattagagctcagatttaaaagaatttttttttttttttttttgagacagagtctcaccgcgcccggcctaaaaggaaattttaaaagaaggcatgtaaagatacaggagacctggccaggc

SEQ ID NO: 45924 - DNA, 122 bp, Homo sapiens
atttggtatagggcccggccctcctgggaccgactgccaggcctggccccgggcggccgccgctatctgcacctggctctggcggcccagttagggaagatgagtacttctgggtctgtgac

SEQ ID NO: 45925 - DNA, 122 bp, Homo sapiens
gcaaagagatctactcggataccttagagagcacgcccatgctggagaaggagaagtttccgcaggactacttccccgaggtacgtagcgaggctttctcactgacgtgtttacttctcaga

SEQ ID NO: 45926 - DNA, 122 bp, Homo sapiens
cggcggcgactaccggcccgagctctccatcccgctgcaccacgccatgagcatgtcctgcgactcgtctccgcctggcatgggcatgagcaacacctacaccacgctgacaccgctccagc

SEQ ID NO: 45927 - DNA, 122 bp, Homo sapiens
gaggggcggggtgaggaggcttgtcctcttttccgattggcccgctgagcgtctgtggcgcgcgcgcgcgcgccgccagcggtagcggaccttgagtggcagggggtggggggggcgccctc

SEQ ID NO: 45928 - DNA, 122 bp, Homo sapiens
aggtgggcatctctaaggatgtagccactgctctggaagcctcattctgagctttggggccggattccttgtccacagtgtgtctattaatataagcctttctgataattgaaagtaagtta

SEQ ID NO: 45929 - DNA, 122 bp, Homo sapiens
gccccacccttcctcagcagtgaggcctgcagtcattttcacatcagctgctagaggctgcgaatccttccagacccaccttcaaagcctctgagtttggttctcttagagtacttgaagtt

SEQ ID NO: 45930 - DNA, 122 bp, Homo sapiens
agtaatttggtttctgttttgctgacttcaaaaactgcatgcaagagctgagccagctcccgcactgctaggatcctgttggcttcctctggcacggctcggctgggttcctccctccctgt

SEQ ID NO: 45931 - DNA, 122 bp, Homo sapiens
cagccccgagtatttcccagagtgcttagggatgccaggcgggtcatcagggtagaatcccgactaggtgtgtgcgtgggaggagctgcgacccgtggggttcccaagctttcctgttattt

SEQ ID NO: 45932 - DNA, 122 bp, Homo sapiens
agtggggtgcaggtcgctcggggccacgcagcagtcggacgccggggacgcgccacgagccggttttgctgtgttgaacgtattccagaatacagtgtgcaatggtcagtgccgttgacctc

SEQ ID NO: 45933 - DNA, 122 bp, Homo sapiens
gtgcgcggaccccctggggtctccctcacccaccttaaggacctgctgcttgatgagcgacggcaccatcacgatcatgacagcgcccagcacagcgcacagtagccccgcgacgcccagcg

SEQ ID NO: 45934 - DNA, 122 bp, Homo sapiens
cggccctccaaggcccggttctgggctggccgagctggagcagttccccactggtggttacggcagagccaggctttggaaacccacggccggtgctggatcgtgccccgcgacaggcacgt

SEQ ID NO: 45935 - DNA, 122 bp, Homo sapiens
cgcggcccgctgcgaccaggacagcgcccccaaccccgtccccaggtccctccgcctctccgggacccccaggcccagcgctgacctctgactccagtcgagagctcactccccactcagcc

SEQ ID NO: 45936 - DNA, 122 bp, Homo sapiens
ggctggcggatcacctgaggtggggagttcgagaccagcatgaccaacatggagaaaccacgtttctactgaaaatgcaaagttagccgggcatgctggtgcatgcctgtaatcccagctac

SEQ ID NO: 45937 - DNA, 122 bp, Homo sapiens
gatggccaccttctgttcaggtgagaaacctgtttattctgtctttagtctttcagcagccggcttctagtatctcctggcaattgatggtaactggctggagctgctctctggtgttgcct

SEQ ID NO: 45938 - DNA, 122 bp, Homo sapiens
cgcgcgcacacgcgaactgacggctcgctggcgatgctggaggctttcacagcccccctccggacgcgttaagctctcccaggtcccacccctgacaccgtggcacccccagacccactgcg

SEQ ID NO: 45939 - DNA, 122 bp, Homo sapiens
gggtgttttcctgagtgtgaagctccctactgcttaatgagcccccactcctccactccacggggcaatggcaagaggggagacaaaatgactgaagggtcataaacaatacatctcagcat

SEQ ID NO: 45940 - DNA, 122 bp, Homo sapiens
gttttctggacaagaatggagggaggactccccacctccaacaggcagttctataaataacggctgctccatggtggcccctgaaatgcagcatttcagcagccttgaaatgacaaagcctg

SEQ ID NO: 45941 - DNA, 122 bp, Homo sapiens
aatagccggccgaatgctctttttccagttctggctaagctgttagctgcagccgggcggcgacgcctgccaggtacctggctccgtgagcaccgcccaaactggtcaggccagtccgtcct

SEQ ID NO: 45942 - DNA, 122 bp, Homo sapiens
cattgaatttcacatgggtagtccctttggaggtgcacagagtccgaaaagcgtttcttccgcccttcctcttatcaccgtatccttgcgctcttcctagagcagccgctgcagcagcatcg

SEQ ID NO: 45943 - DNA, 122 bp, Homo sapiens
aatgaaggtggtggagcctggcccaggggcatgccccttatctgtcagtgccatctctgccggccagaggtggccctatccagctggagtttctgagtcggagatttcgtctctcggctccc

SEQ ID NO: 45944 - DNA, 122 bp, Homo sapiens
gccagaatatgacaaaagcctgttacattgcaggtgcactatacacacttgagggatcaacggttggagagaaaaagaattccactgaactccatcctctccctttcctcctgtggaaaaaa

SEQ ID NO: 45945 - DNA, 122 bp, Homo sapiens
ggaggggatgggggttgggggagaagaggggagcctggcagccaatgggagggaggatctcgtttcaaaagggttaacccacagccaatgggagcctgggggagcggatcctgctcactcca

SEQ ID NO: 45946 - DNA, 122 bp, Homo sapiens
gcatcgtcgcctgcaacgagtgcagacggcgcacagaggccaccacactgccaggcacgccgggagatgtagtccaggcctctgctcggacaggtctctctccggagcaaaggatctgaagg

SEQ ID NO: 45947 - DNA, 122 bp, Homo sapiens
tgctgtgagtgggggccccgggcgggcaggcgggcaagtaggtcggggaggcagcaggtgcgactccaatgccgctggcctccccagctcccagcagctgcctgatgaccgagtggggcgag

SEQ ID NO: 45948 - DNA, 122 bp, Homo sapiens
agccatcgcccagaagcgagcccgcattcagacaccgcggaccggctccgcgaagggctgcgtgcagtcaccatgaatgctcagctctaggcttctgtaaaaacctcccccactgcatggat

SEQ ID NO: 45949 - DNA, 122 bp, Homo sapiens
acctcaggtgatccgcccacctcagcctcccaaagtgctgggattacaggcatgagccaccgtgcctggcccaagagtgttaaagtctggtgcagtggcctgtagtcccagctaccccagag

SEQ ID NO: 45950 - DNA, 122 bp, Homo sapiens
caaagtgtacgaaatcctccccacttttgatgttctgcatttcaaatctgaagggtacaacgatttgagcctctacaatctcttcttggaggaaaatataagtgaggtcaagtcatacaagt

SEQ ID NO: 45951 - DNA, 122 bp, Homo sapiens
acaactaggggtaaccggggcagccagaaagtggacattgcacaggcgatgttttgctatcgataggtactaatgtattgctatgtctgaatgcctgcgttccccaaattcatgtgtcgaag

SEQ ID NO: 45952 - DNA, 122 bp, Homo sapiens
ccttcattctcagaacccagtgctttttctgttgccctggccctctgggctgagtctttacgtggacggcggtcgatgcatctcagtttatttgtcaaaaccttcagctaaagccagttgtt

SEQ ID NO: 45953 - DNA, 122 bp, Homo sapiens
tgtgccgaagggggcaactagaaagtttagccaaaggagacgattagaaagcactgaccgcgcacttacattgggacgcccaggcagaggcaagactcgcgcgctcctaagccgaggcaggt

SEQ ID NO: 45954 - DNA, 122 bp, Homo sapiens
tatcatgtccatcatgtgacaccagagaggcctctctatggaaacttaaaggggctcccacgtgactgcagcagcaacaacagcagcaggactggcggcggcggccgcagcggcgtccgtac

SEQ ID NO: 45955 - DNA, 122 bp, Homo sapiens
cgcgtgcccccgctagaattatcctccctcccacagagtccggagtaacaccccagttttcgccctgttcaaggggattccagaatttctgggggtcgacccctcctttttccccgttccct

SEQ ID NO: 45956 - DNA, 122 bp, Homo sapiens
ttccttctttctctctctctctctttccttgcctttcctttcttttttgagaaggagtctcgcttttgtcgcccaggctggagtgcagtggcgcgatctcggctcactgcaagcttcgcctc

SEQ ID NO: 45957 - DNA, 122 bp, Homo sapiens
caccaggctggggagaggtgcgagcccgcgcgaagggaggggcccgcggcctgagggtgccgggagagagcgagactgatgaccacgaaaaaagaaacctggagactagaggcgaggaacta

SEQ ID NO: 45958 - DNA, 122 bp, Homo sapiens
agaaaccagaagcggatctgattggttgctggaagacgccgcgcccacctcacagaaggacgaaccagtgagctaagctgcggggcgcgggctcggccggggcaccggtgagtcgccggcgc

SEQ ID NO: 45959 - DNA, 122 bp, Homo sapiens
ataaaggctgtatctgaataaagtgacagttttccttgtttagaactatgtctaatgttacgttttcttaactgccagtgctggtctgtgaaacacagtgagtctttcaatgtactttggca

SEQ ID NO: 45960 - DNA, 122 bp, Homo sapiens
ggtggagcctccagagatgggcttctgaaacaatattacagattggcttgccagggtagccgctcatctgtcacactcgggaagggctaagaatcaggagtcattcctagaactgttgattt

SEQ ID NO: 45961 - DNA, 122 bp, Homo sapiens
cacaaactccacccacaaatgtacacacacaagataaatagtttagaacaccagcaacagcgaacagccgagcgtctcctcggccgcgcgccagcggcgcggacctcggacctcggggctgc

SEQ ID NO: 45962 - DNA, 122 bp, Homo sapiens
ccaacacgatcactgcagaggacggggcagacagacctaggtcagggccagggctggggccgggcatggcccagggcggtccttgggcagctggtggcttgggggtgggcaggacactcacg

SEQ ID NO: 45963 - DNA, 122 bp, Homo sapiens
cgaccttggaggccgccttccaggggcagcagtctcaggctgctgtgtgaactctccccacgcggcagtgttgctgggtccctctgccactcttttggcctccacttttggcctcctgtggc

SEQ ID NO: 45964 - DNA, 122 bp, Homo sapiens
tattattagttattgttgtgcttactgtataaattaaacttggctggatgcagtggctcacgcttgtaatcctagtactttgggagactgaagcaggtggattgcccgagctcaggagttca

SEQ ID NO: 45965 - DNA, 122 bp, Homo sapiens
accatatagaaacaatccataaatgttcactgaatcaccaaatgaatgaacattaattttcgtgcttttctctgcacatgtggtagaatatgaccaccctatgcataaagcttccagtctag

SEQ ID NO: 45966 - DNA, 122 bp, Homo sapiens
aggctggtcctgaccctcccaccagctgacaggtgtgagcgtggctggatgtgggcggggcgcccacgtggagcttagccggcaagttcccgaggaagactggagctccgcctttcctgaat

SEQ ID NO: 45967 - DNA, 122 bp, Homo sapiens
gccgggcggctgcggaggagccggctgcatggggtgctgtgtgtttttcagggcgccctgcgtccggcagaggaggcgagcatcccgctcaggtgatgaggaacccctcgcgcacccagcgc

SEQ ID NO: 45968 - DNA, 122 bp, Homo sapiens
ttcccaaaggcaagaggaaggacatggttaaaagcaacaggcagttaaaacccagaaaggcgcagatctccaagtggaaggcaaggagataaatagaggtcaagcaagaggaactcctctaa

SEQ ID NO: 45969 - DNA, 122 bp, Homo sapiens
gcaggtggcgctgtctcccgcgtggacggacagagacccatcaggcggggagggcctgggcggtggcggcgcccccttggtggggccgcagagcggaggagcagcagctgccaccggccgga

SEQ ID NO: 45970 - DNA, 122 bp, Homo sapiens
cagccgcgcggtgctctggctaggctggttcctcagctgcctcgggcccttcctgctcagcgccgcactgctggttctggtgctcaaggtgggcgcgcctcggcctgcccggctgcagaatg

SEQ ID NO: 45971 - DNA, 122 bp, Homo sapiens
ggggcccgcccgggggtccttcctggagctggaggtccccgggctggcttcgggacccggcgccgccgagggccagcctcccccccggggctctagtcctcgggcccgtcgtaacccggcgg

SEQ ID NO: 45972 - DNA, 122 bp, Homo sapiens
aaaaaaaaaaagacactgaggatgcaaattacctgtatacttggaagtgatttgcaaaagcgttttgctaaacaggcaacattcaagggcctgtaagaaaccagattgattgttttgcttag

SEQ ID NO: 45973 - DNA, 122 bp, Homo sapiens
ggggccggcagcgcctcccttcctgcccacagagcagccgccttgtgcccatctattccccggctctgcatggggcctctgttttaaagggttctgtggccaagacaagcctgccagcccct

SEQ ID NO: 45974 - DNA, 122 bp, Homo sapiens
actcatttcccaaaaccaaccatactttacccagaactacactacacgtacattcttttacgtgcacatctggcattttcagcacactatgagcatgtgcgtgtgttacaacttttcattta

SEQ ID NO: 45975 - DNA, 122 bp, Homo sapiens
ggcctccgctttctagaaccccgggaggggcttcgtggacgtggctgtgccgcaggggggcgccctcctcccgccgtgctcgggggtcgaaccccgagcgctccgggagggcttaagcaggc

SEQ ID NO: 45976 - DNA, 122 bp, Homo sapiens
gccgcacgcccgtgtggatgcgcatgtggttcttgaggtcgtagttgtgcacgaacttggcgttgcagtggatgcacaggtagggccgctcccctgtgtgcttccgcatgtggattttcagc

SEQ ID NO: 45977 - DNA, 122 bp, Homo sapiens
gagtttctccaaggcaaagcctgaaacaggaaccacaggctctccaggtggggaggctggcgctgaggaatgttctcctgaacaaagggctcggctcgcgcgcccgcacacccgcctccccc

SEQ ID NO: 45978 - DNA, 122 bp, Homo sapiens
ttcagctttagaaaatttattgttttaatttgccagccgtaagtacggtcagaaagaagccggacaacaggcccacaagccgccccgcagacgcgcacgggaacaaacacgaacacgttgtg

SEQ ID NO: 45979 - DNA, 122 bp, Homo sapiens
cttattcccaacacagaggaataagaaaacatgttcatctctgcctgagctttgagtgggcggagaggaagtcttccttgagaaatagaaagcttaagcctgccctttgtacagattggagt

SEQ ID NO: 45980 - DNA, 122 bp, Homo sapiens
tttcaggccaaaggaaggagagagctgctgtcagcagaatataggaaatcgggcaaaagacggtggggtttgcacctgaattagttagattcttggccagagctcaactgtgattctcgacc

SEQ ID NO: 45981 - DNA, 122 bp, Homo sapiens
cccccgtcccgctgctgctcacctccccgggtgaaactctgacgcagtcaccgcgggtctcggcagcgtcatagcggcgggcatcccatctgcacgtcacacctctttctcacctggacacg

SEQ ID NO: 45982 - DNA, 122 bp, Homo sapiens
gtggtctggggatgggactggatagaatccactgcaaccatctagatagtaagaagcagccgatttggggactggatttagggagcaaagtacaaggaggggctgacctttctggacggagt

SEQ ID NO: 45983 - DNA, 122 bp, Homo sapiens
ttaaaagtggctgttactgcaagggtccacatcattaataaaatagtatcagatgccaggcgcagtggctcctgcctttaatcctagcactttgggaggccaaaatgggtggatcacctgag

SEQ ID NO: 45984 - DNA, 122 bp, Homo sapiens
cccccacgcctcaggtcatctgtcacgatgccgtttgagacggaaagggcactgggccggcgtctggaactggcccccacgcctcaggtcatctgtcacgattccgtttgagagggaaaggg

SEQ ID NO: 45985 - DNA, 122 bp, Homo sapiens
taagaggggatgaactcaatggttaataggattggccatggcgaatccctcagcagggcacgcaccgcacaaagggccgaggagcgagggtagctcgaggtcaggattacagagactcagga

SEQ ID NO: 45986 - DNA, 122 bp, Homo sapiens
tccactgccttctctgctcccgccaaggcctttcctgactcggggccaaccctcccggtacgacatgccccggcaaccaagtcctggcctgggagcccaccctcagccccacttcccaaccg

SEQ ID NO: 45987 - DNA, 122 bp, Homo sapiens
cctgctgatgtacctgttcacgctgctgggcaacctgctcatcatggccactgtctggagcgagcgcagcctccacatgcccatgtacctcttcctgtgtgccctctccatcaccgagatcc

SEQ ID NO: 45988 - DNA, 122 bp, Homo sapiens
tcagggaccttgtctttgtcttaaagccaatctcctcctcctccccggccctgctaaacacgctccccaggggtggtctctgctacccgcgcacattgggccttgagtcttggtaaatgttt

SEQ ID NO: 45989 - DNA, 122 bp, Homo sapiens
attttacctacctacagttcaagcagttactgggatgtcctgactaatcgaagatgctgccgcgcgcgtgggtcgctctgcgcaagggcctcttcgaaaacccgactaggcgcaactcagcg

SEQ ID NO: 45990 - DNA, 122 bp, Homo sapiens
ttcaggttgatcgaatttcagagaagagctcccagtcctcgggctctgcttaaaccttgacgttcaggggagagaacgcaaggcaagcatcgcgccagatgctgtgagtttatcctgagagc

SEQ ID NO: 45991 - DNA, 122 bp, Homo sapiens
tccaacatcgccgtggacaatctggtggagcgcctggctctgtgtaagcagcggattctgcgcctgggacaccctgcccgcctcctggagtccattcagcagcactccctggatgcggtttt

SEQ ID NO: 45992 - DNA, 122 bp, Homo sapiens
cgagtctaccagtgttcttagctcagaatgacaccatcttctgccacctcccttttatcacggatcacgtgctctgagccctagtctctcagcttcatcatgtctaggctcatctcactcca

SEQ ID NO: 45993 - DNA, 122 bp, Homo sapiens
tctcgaacccctccccatctcccgggtttcgcttgcaaaggcttgggggagggagccaggcgcaaattaaatttaggaagggaaatcctgggtgaaagaagagcatttgaggaaaaatgaga

SEQ ID NO: 45994 - DNA, 122 bp, Homo sapiens
gcagtaactgtgaaattaggtgggcagtagggagatatgtcatcacatattcctgggatacgtaaactataactcaaactatataagaggaaaattggccaccttagatgcatgatgatact

SEQ ID NO: 45995 - DNA, 122 bp, Homo sapiens
ccgccaggtgcctgccggttggtgcgcagcgcctgttcgcgcagagtctggcctttgctgcgcccggccaagtcgtaaatctcctcctcgtagcttacaggcgacggcggccaggccgaagc

SEQ ID NO: 45996 - DNA, 122 bp, Homo sapiens
tcctgttcagtttgcctccttgatttcagggtccgcgtcaggcctaagcgacgaggccgccggcaataaagtatcttaaaaatgagaagaggaacgtgggagtgtagaaaataaagcagaat

SEQ ID NO: 45997 - DNA, 122 bp, Homo sapiens
cccttggcgatgctcagagtgaacgcgttaccccgccagcccccctctgccggctcctgccggtttgtgatttctgtgtcttcgtctgtggcctgtggatgtggccttacacctcgtggtca

SEQ ID NO: 45998 - DNA, 122 bp, Homo sapiens
ggcagggaatacgggctcttcctcgggaggagactggcttgcccctgggaagtcagcccacgggactgccctcctctccctcccgaggggctggggaccagcaactcaagccaacaccggga

SEQ ID NO: 45999 - DNA, 122 bp, Homo sapiens
cttaaaatagcctttcttcgaataagtgatacagcaaaaagccataaaggattccttttgcggttggatatgtaaaggtcatagcagcaactgacaagaagtgtgcaatatttacctggatt

SEQ ID NO: 46000 - DNA, 122 bp, Homo sapiens
taccatgcctggctaatttttttcatgttttgtcgagatgagtctctttagattgccccgcgtggcttgctggatatttgagccaaggaaacttgagtggatctcataacctcaagggacca

SEQ ID NO: 46001 - DNA, 122 bp, Homo sapiens
aactgggtcactaagagtcactacttactgcagggaatagcttcctcacccttcaccccacgtccctctgtgctccacccgggagcaccaggacactggcctctcctggttctccttatacc

SEQ ID NO: 46002 - DNA, 122 bp, Homo sapiens
ctcaatgtaatcaggaagggcctttaaagtgagagagggaggcagaagaggaagtcagagcgatgtgctgtgaaatctactaccgtttgctggttttgaaaatggagaaaaagagtgaggaa

SEQ ID NO: 46003 - DNA, 122 bp, Homo sapiens
gtggcggggacggaagaaacaaccacacgatctgtgacagcgaccaagctttagaggccccgcgtgcctgccaggcgcctgagcccacaccgtccacgcttccctgccccggcgggaaccac

SEQ ID NO: 46004 - DNA, 122 bp, Homo sapiens
ttcaggcactgacccaaggggaacccatttctcttctaggagtattacacaaatccttgtcgtaaatccaggttgatcctgatgaagaggagccaaatctggctcgggctgatggacgctgt

SEQ ID NO: 46005 - DNA, 122 bp, Homo sapiens
gagcaggaggaagtgctgaatgtgaatctcgaggggaacttgaccctggagggagtgacccggggccagagcgggacctatggctgcagagtggaggattacgacgcggcagatgacgtgca

SEQ ID NO: 46006 - DNA, 122 bp, Homo sapiens
attggcaagctttaatgaaataatgagtatatttgtttacttattttagagacagcgtctcgctctgtcacccaggctctagtgcagtagcatgttctcggctcactgcaacctctgcctcc

SEQ ID NO: 46007 - DNA, 122 bp, Homo sapiens
caactacatgtaaaagggagatgatactgctgcctacctacctacatgatagggctgttacggggattgaaggtgatcatacatgtaaagtgcttggcagagcactgcatgagtgtgttgtc

SEQ ID NO: 46008 - DNA, 122 bp, Homo sapiens
ggatgaggaggatgtgggccacgcaggggctggcggtggcgctggctctgagcgtgctgccgggcagccgggcgctgcggccgggcgactgcgaaggtgcgggatagggggccgggggccgc

SEQ ID NO: 46009 - DNA, 122 bp, Homo sapiens
ccggatgctccggtgagtttgtagtctcactgacttcacgaataaacccgcggaccctcacggtaagtgtgacagctcttaaaggtgatgtggtgaattttaaagcccttaaaagtggtatg

SEQ ID NO: 46010 - DNA, 122 bp, Homo sapiens
cctgctcactgtctctttgctcccacagaatctgtaccagaacaggtttttaggcctggccgccatggcgtctccttctagaaactcccagagccgacgccggtgcaaggagccgctccgat

SEQ ID NO: 46011 - DNA, 122 bp, Homo sapiens
ataatcctttttgttctccagaacaaatgctgtgcctccctttgttttcaaatgtatatccgacctcttttcaaatgtatatttggcattctctcaaatatatattatcagtactcctttta

SEQ ID NO: 46012 - DNA, 122 bp, Homo sapiens
tcgacaaggccctgtggaaagctgactgtgtttatacccttgtaaagtgctattattacccggggggaccttgggaagggcccctcctggtctgacctgaaatgtcactcccagacaggatg

SEQ ID NO: 46013 - DNA, 122 bp, Homo sapiens
ataaaccttccaaaacataacatgtgttttcttaagaatcatgaccacataatctcttcacgttaatgcaactgggaaaaaagagcaataccataccttgttggcagcaaccaagactttat

SEQ ID NO: 46014 - DNA, 122 bp, Homo sapiens
gtctgaagcacctgccagtctatctctgctgtaccctcccaagacaaaaatacaggaagccgagccataggtgactactggcaaccactgcctttgtgatttcctctttggtttcttctatt

SEQ ID NO: 46015 - DNA, 122 bp, Homo sapiens
gcagagatttcatctgctctgcccaccgctatatagccagccactagaacaggccggaagcgcagaaagagctaagtaagtatgtgttgactgactgacgaacaaatgaatgaagtgagatg

SEQ ID NO: 46016 - DNA, 122 bp, Homo sapiens
gcgtaggaccctccgagccaggtgggggatataatctcccggtgtgctgtgttttaagcccgtgggaaaagcgcagtattcgggtgggagtgacccgattttccaggtgccgtctgtcaccc

SEQ ID NO: 46017 - DNA, 122 bp, Homo sapiens
gcaggaaaacggggaaacaggtgcgcccgtttgtgcgcgggggaagctcgcagccacgagcgaagggacctgtgtctccactttggacaaatctcccgggaatttcccgggggttcagagct

SEQ ID NO: 46018 - DNA, 122 bp, Homo sapiens
gagcgcatgctaagctgaaatccctttaacttttagggttacccccttgggcatttgcaacgacgcccctgtgcgccggaatgaaacttgcacaggggttgtgtgcccggtcctccccgtcc

SEQ ID NO: 46019 - DNA, 122 bp, Homo sapiens
gctgtgccttccgagcctgctggtgtcgcactggcttttgccccaaagcagctctgtgggcggcagcagctccggggtgtcctcacggttgcagccacgctttgttggggagcagccagcct

SEQ ID NO: 46020 - DNA, 122 bp, Homo sapiens
aaacaaattagacccatttagaattatgagtaagtttgaatagagcattgacatcgaaaacgtgggttaaaatcctggattcatcacttactgactgggagactttgcacaggtaataaaat

SEQ ID NO: 46021 - DNA, 122 bp, Homo sapiens
agactttcactattccttctaccgctatctactacgaacttcaaagaggaaccaggagtacgggaggggcatgaaagtggacaaggagcatgagcattgaagcaccacagggaggggttagg

SEQ ID NO: 46022 - DNA, 122 bp, Homo sapiens
agagagagagagagagagagagagagagtgagtcccaccgggtgaagacagggtagaccacgaatgtgagcatcagctcccttgggtgggtgccctgaagcactgaagtagggaagcggaag

SEQ ID NO: 46023 - DNA, 122 bp, Homo sapiens
ctatgggtgtgcgtgcccgcgctcgccgccgctgccttcgcagaccggggagagagtcagcgactgccaaccgcagccccggctcttcagtctggggacagtgggagcccaagcccagcgcg

SEQ ID NO: 46024 - DNA, 122 bp, Homo sapiens
cccacgccttatcacattgcctctctacagatgtatttaaaatgacaagtgtgggatgggcgcggtggctcacgcctgtaattccagcactttgggaggcctaggcaggcggattgcttgag

SEQ ID NO: 46025 - DNA, 122 bp, Homo sapiens
gaaaatcatgcaatgagatgatcctgttgggccttcagcacagacccatcctctcttccccggctcccagcagtccagggcaggtttctgtcctcagcaggctgagttttgttcagtccatt

SEQ ID NO: 46026 - DNA, 122 bp, Homo sapiens
agtgcatattaaagttgctactgtttaaaagcttgtagttggatccagggagtgggtaggcggtcagagtaacccttgcttcttggtgtctccttgatgctcttagctgaatgtcctgtgta

SEQ ID NO: 46027 - DNA, 122 bp, Homo sapiens
tgtggaatatacctcctacacaatagtgcttcttatatgttattaaattttctcttgctgcgtttggatcctatatttgttttgggcctttgagagccactcttagtagccactgatttgac

SEQ ID NO: 46028 - DNA, 122 bp, Homo sapiens
gcagctgcctgggtggcatgttctgcttggtcttcagggaatcaacgagcttcttgagatcgttcaactgtggctcagtggaggcaacatagtgtttccccgcttccgttccctcatgaccc

SEQ ID NO: 46029 - DNA, 122 bp, Homo sapiens
cgccctctgtcctgcggatgagcatttctgctctggccccatggagctgggctccagacccgcctggcggagcttccagcaggagaatctgagtcaaagtacagccctgctgccagcctgtc

SEQ ID NO: 46030 - DNA, 122 bp, Homo sapiens
tgcgcgaggaccccgtagccgccagcgccaccgcctgagtcgcctgcaggtggctgttcgcgtctccctgccgtgcaggcagctcgaaagccactctgttgtggggtcctcgcttcccttcc

SEQ ID NO: 46031 - DNA, 122 bp, Homo sapiens
tacatcctattaaagagctacattaaatgcatgcaaattgccggagcgacggcgctctcccgaccagtgagggggacggattgcagccgaggcggcgatatcggggtcagactcaccctgct

SEQ ID NO: 46032 - DNA, 122 bp, Homo sapiens
cctggtccaccctcactgtgcctgcacatggtgccagaggaaggcctggccagggtgacccgggagcagggcccagctggtgtcagcaccacacctgctctgtgccccttgcagggtggggg

SEQ ID NO: 46033 - DNA, 122 bp, Homo sapiens
tgaaaacacaaggattaggtgtacagtcaggccaagtcagatcttagaaacaagacctaacgacactattatcaggaacatcaggaaaaggggaagaaggtcagaaacaagagttttctagg

SEQ ID NO: 46034 - DNA, 122 bp, Homo sapiens
attgtaagccccattgtacagatgaggaacacggggctcagaggggtgaagtgacttgcccgaggtcacaaggcaagtgcatgtcaactcttggaattgaagccagatctgtctcacagctg

SEQ ID NO: 46035 - DNA, 122 bp, Homo sapiens
ttctgtcacccaggctggagtgcagtggcacaatcatggctcactgcaaccttgacctcccgagctcaggtgagcctcccacttcagcctccagagtaggtgggaccacatgcgtgtgcctc

SEQ ID NO: 46036 - DNA, 122 bp, Homo sapiens
tctctagcaatagaagtcctcaattaaagtcacctgctggtctttgtcagcagagcttgacgctgtcaaataatgcggagccccttaagccaatacaagtcattaaggaggaggtgaattag

SEQ ID NO: 46037 - DNA, 122 bp, Homo sapiens
tcaacgatactgaatgagtcccgcggcgggttggctcgcgcttcgttgtcagatctgaggcgaggctaggtgagccgtgggaagaaaagagggagcagctagggcgcgggtctccctcctcc

SEQ ID NO: 46038 - DNA, 122 bp, Homo sapiens
cagctgtgcccctggcacctgcacagaggtgcacacaccacatggctgcactcaccccagcggcccgtgtgctgcgccctgctcctccatggcctctgtcacctggaagagcacagtccagg

SEQ ID NO: 46039 - DNA, 122 bp, Homo sapiens
ctccaagttggtgtgtgaccatttggaccggcccatttccagggcccctgagataagccccgtgggcttcctgtgaggcatgatggttctcaaatatcattctctgctacccactgtggaac

SEQ ID NO: 46040 - DNA, 122 bp, Homo sapiens
gcgcgctgagccttgcgggaggggcagttctcttgtctagcctgtgcgcgtgtgctagggcgccgcggtacgtgggcggggaaaggcgggtgcagtcgcccgccagaccggcagactcggtt

SEQ ID NO: 46041 - DNA, 122 bp, Homo sapiens
ctctgtggggtagagagggccagtgtggtgcgatcttgtgggaggagttgagattggatgcgttgggaagtgtcagttttgagagtcctgaatgccacgccagttttttgaactcttgtcaa

SEQ ID NO: 46042 - DNA, 122 bp, Homo sapiens
cctttagagatcggtggtgctgaagggcagggatcttattccaccttctgaagcttctgtcgaaccagttgtaaggagaatggagagagcagtgagagtggagtccggggtcctggtcgggg

SEQ ID NO: 46043 - DNA, 122 bp, Homo sapiens
cctggtctgcggagccgcacgctccctggctgctgtcgctctcactgccctcctctgccccgcagctcggcttcttcaagcggcaatacaaggacatgatgagtgaagggggtcccccgggg

SEQ ID NO: 46044 - DNA, 122 bp, Homo sapiens
gtcgccccaggttttatcctgggaggcggaatgccgtcagaccagtccccaggtggctcccgcggccaccccggctgtgggtcctgggcagagggcggggctgcggggaggaagccagccgc

SEQ ID NO: 46045 - DNA, 122 bp, Homo sapiens
tccaattttactgaggtggctgaccacgtccacgaccaaatccgcctctaaactggaattcggttgctgacccagccccagcctcggctttcttgtcggcaccaggtggcacagcactccgt

SEQ ID NO: 46046 - DNA, 122 bp, Homo sapiens
agggaattcaaagccaaatctcctagcccacccacccactctaaaaaaaaaaaatgaggacgcagccatcgccgatgtccttgtgttgcacggagcagttcctaggagccggctccgctggg

SEQ ID NO: 46047 - DNA, 122 bp, Homo sapiens
tgaggcctctctccttggcttgtagatggccattttcacagggtctttgatttttgcacacgtgtctatagccaatatgttctcttataagaacaccagtcagattggattagggcccaccc

SEQ ID NO: 46048 - DNA, 122 bp, Homo sapiens
tgcggacagaagggagttgggagagcttgcaagtgctgggcatgcgggggacacttgccacgtggtgctgctgacccccggtgggctgctgacccccggcgggctgctgccctgctctgagc

SEQ ID NO: 46049 - DNA, 122 bp, Homo sapiens
cccgcagctagcctggcgcggggaacgggttgcatccaggggtttggggatgcccgagggcgctggtcagcctggccagcagtgtcgcccccagtaacccgaggatcctcggcgctgtgtgc

SEQ ID NO: 46050 - DNA, 122 bp, Homo sapiens
tgtaagggtcgtctacgatcgggtaaatgtaatctgtggtttgaaccaaggaaagcccaccgtgcctcaaaggaatgacacaagtatccattccaatgcctgtggagatggaagtcattagc

SEQ ID NO: 46051 - DNA, 122 bp, Homo sapiens
caatctgtcttaggcccaggcgtggcagccccaccggtcgagtgggcgggtcgggcccaccggccacccaccttggcgtccagcgtgcgtttgagctcccgcatgtaggagaactgctcggg

SEQ ID NO: 46052 - DNA, 122 bp, Homo sapiens
cctgcgtggtggcctctgttttcactgaccctgtcaagcttgggtattcacagacagaggcggtgaggagggcaggggtccctgggggtccccctgcattcatggacagaggcggtgaggag

SEQ ID NO: 46053 - DNA, 122 bp, Homo sapiens
ggtcaacaggagccttcccctcctctgagacttataaaaaaaggaggcatggcagaaggccggaagcgtggggagctgctgtgcacggccccccaacctgcccctccaactcaccgtgccgg

SEQ ID NO: 46054 - DNA, 122 bp, Homo sapiens
cgcaagaactcggcgggggtttgtggtggggtcgcagagagcaagccctatatctccctccgcagacccaggtgctccccaaacccggcccggagcccgcgagaactgggggcggagggtgt

SEQ ID NO: 46055 - DNA, 122 bp, Homo sapiens
gggcccgtgcctcagcccacgatactcggctgctctgaaacacaaggccgccgctgagggcgttgggccagcctctccagcaggcgccatcctgccctggaccgccaggggttgtgtgggag

SEQ ID NO: 46056 - DNA, 122 bp, Homo sapiens
atacattctcactttgatacaacaaccctgcaaagtgcgcacggaaggtgttattaactccgttttacaggtaaggagatcgacccactgaggtcaggagtgactgaccaaggcggagccag

SEQ ID NO: 46057 - DNA, 122 bp, Homo sapiens
agtctagccagggcatttgtcgtgagctgccagcttgactccctagtgtactcgtctctacgcgcctgtagtttgactccatgatgtatgaaaataaacgcgctttgaccaaggaaaggcgc

SEQ ID NO: 46058 - DNA, 122 bp, Homo sapiens
cgcccgggctgctccctgccatccttccctctcagagctcgcgcgcgcgttccccctcgtcggggaaataaagtcaaggtagatacagaaaaaagactagatgcttttactggcggtggaga

SEQ ID NO: 46059 - DNA, 122 bp, Homo sapiens
agcgactcacggactctcacccggacgtttcaatttgctctgggttgagaaaagaggggccggaacctgcaggtctgtggggaccccacgtcccctatatagcagcaccagacaactaggaa

SEQ ID NO: 46060 - DNA, 122 bp, Homo sapiens
ctctggcttttagcgcgggtccttgtgtaggcgagctcatatactacgatggggcaggggcgcgacggtctggcggctccggggcattgtctaagcgggacggggcggggcttcttcgggcc

SEQ ID NO: 46061 - DNA, 122 bp, Homo sapiens
ttgggactgtcttccccattgttcgcaagttcttgcaagttattgttgtttaaaagtgtgcggcagcccatccaagccaggggccatgttatttcctctgcgcctgatggcagccgctggag

SEQ ID NO: 46062 - DNA, 122 bp, Homo sapiens
aaaataaaaatatcaatgcccattttatatagtgggtctatgtaggatctagtgaaaatacgcacttaagtcttttagaagacaggagagattggggtcatacaatttttttttgcatatgt

SEQ ID NO: 46063 - DNA, 122 bp, Homo sapiens
catgccctgggtcttaacatttctgcccacattttattggcaggtgcaatggcaaggccacgcctaatgcaaagggcgagagttcggggtgtgcggttcctccaggtgtccaggaagggcac

SEQ ID NO: 46064 - DNA, 122 bp, Homo sapiens
caggccctgtcctgccagcttgcaaggtgcgcggcttcgcctcctccttccatcctcctccggcaggcacactcaccgcatcctcccagttctgcctgttgtaggtgttggaacccagagag

SEQ ID NO: 46065 - DNA, 122 bp, Homo sapiens
gcccctcggggtgggggtggggccgctggagggagggagggggcgggcgggggcggggggcgcgtttgtctctaataagaaaagacaaagacatcccggcggccgcggctgttcccgcagct

SEQ ID NO: 46066 - DNA, 122 bp, Homo sapiens
gagggaacaggtccaaatctccgatttcccccaggctcccactcctgcctcgctgagtcacgaaaattacccgctggggccacccggccacccggcggcgggccctttacccagccagcgcc

SEQ ID NO: 46067 - DNA, 122 bp, Homo sapiens
tttcaagaagactgtcattaataaacacgaaaaacctctaacttcttcaaatatatttaacgtgactcagtagtgtgccgagaagatgcaatggaattctaaaacctacgtttgcacttttt

SEQ ID NO: 46068 - DNA, 122 bp, Homo sapiens
caaacaaaccgtaagaaacaggcaaacagctgccagaacagcgactgtctcagacctccacgcacaagccagacaccctgcgggcgggggtggggtgggtggcggggggtgggaggggggag

SEQ ID NO: 46069 - DNA, 122 bp, Homo sapiens
gtggtatgtacctgtaatcctagctactccggaggctgaggcacaagacacacttcaacccgggaggtggagtttgcaatgagttgagatcgtgccactgcacttcagcctgggcgacagag

SEQ ID NO: 46070 - DNA, 122 bp, Homo sapiens
ggtactgcctgcccacccaaatgggccagctggggactcgggcctggccagggcttctgccgtcccctccacgtcatccatgaagaacacgcgctcctcctcgtcactgcctgaccgcaggc

SEQ ID NO: 46071 - DNA, 122 bp, Homo sapiens
ttgttttggttccttcagcccacgctggagtccatgggttttttccttcactcatcatctcgcctcctgctgcttcagccgagaatgaagtaataattcagcaagctgttcaggacttccca

SEQ ID NO: 46072 - DNA, 122 bp, Homo sapiens
actctcccacttttggccaatctaagtgaaattccagtgtgacccaaagcgtagagataccgagtaagtagtgcattttaactaaagttaaatgattgtaaatactgattactctgaatgaa

SEQ ID NO: 46073 - DNA, 122 bp, Homo sapiens
tcaaaccggagggactgccgggggtgcgggggcggggagggggccggggtacgagcgtgtcggctcctgcctccgttgcggctgttgctgacctgaccagcttgaggcttgcgccaccctgg

SEQ ID NO: 46074 - DNA, 122 bp, Homo sapiens
cgtgatccgccctcctctgcctcccaaagtgctgggattacaggcgtgagccaccgcgcccggcctagactcagtttaacagcatagatttgtgtggttcacagtcacccttgggaacacat

SEQ ID NO: 46075 - DNA, 122 bp, Homo sapiens
cccctgcccctggtaccattgctgtcagcaaggaggaggctgccagggacggcaccccagcgggtcccctgcccatgtggggtgaccacagagtgtcctgtgttctggatttcagctccaag

SEQ ID NO: 46076 - DNA, 122 bp, Homo sapiens
tcagagttaacagcggcctggcctcacccttggccagcagttgcaagtccaaacaggcttcgcccacattccctggctgctctccagcccgcagcagagacaacaaagttcagtgactgaga

SEQ ID NO: 46077 - DNA, 122 bp, Homo sapiens
ggggggacaggaaggactggcacagcgcccgcgactgtcccctgaggaggaccctccctacgacttttggtcaaaagcaaaaagaaacacagacatgtgcgtcaccccgggaagcgcgcggg

SEQ ID NO: 46078 - DNA, 122 bp, Homo sapiens
gtccacctacaggaggagatgggcaaaggtccatgagtggctcccgggccagagcaagggcggccccgcacggctccccgcactgcaatggcacagagaagctcctgccagaccagcacatg

SEQ ID NO: 46079 - DNA, 122 bp, Homo sapiens
agcaggctccccggtctaagtgtgtaaatacattctatgatgtcctcacagcgagaagatcgcctggtgactcatttctcagaatgcatcttcgtcattaagtgaggtgtgaccttattttc

SEQ ID NO: 46080 - DNA, 122 bp, Homo sapiens
atgaagagacgtaagtatatgagacacatgatcttggactgaggtgaaaatagctataaacggcatgattttgacaacatggagaattttaaatgttaatagtgtatactggatgatagtat

SEQ ID NO: 46081 - DNA, 122 bp, Homo sapiens
ctcccaatcctgcactgtccgcggcggcgggggtggggagaggagggtgctttgcactcgcggttccccccccgggagcattgatacccccgcccctgggagcattgatcctcctgcccctg

SEQ ID NO: 46082 - DNA, 122 bp, Homo sapiens
gactgctggacacccccggccctcccctatccctgcaggtcctggtggctggcattgaggcgaacatacctgtgacctatggaattggcagccagaggggagacgagagcactggctgtcaa

SEQ ID NO: 46083 - DNA, 122 bp, Homo sapiens
tcccataactaaggcctgacctgtgagcatgccaaaaacaccgatgagtcatcaggaatccgaacaataaacacactccctggaacgtacaaggcaattatacacagatgtaattaaagaga

SEQ ID NO: 46084 - DNA, 122 bp, Homo sapiens
acaaggtcgggtcctgtcctcagcgccctggcctccacttgctcagggcgcccgcaggcccgcaggtcctcacctggtgtttttcacctgggacccgcagctgctctgatgaggagcctgct

SEQ ID NO: 46085 - DNA, 122 bp, Homo sapiens
gagacaccaagcccctgtgaagtgacattctagtaatgcttgtacataactcaggatgctcggacatgcccaaagggacccagggtcatccccagggccccagacacacccgtttattaatt

SEQ ID NO: 46086 - DNA, 122 bp, Homo sapiens
ggttcccgccattctcctgcctcagcctcccgagtagctgggactacaggcacctgctaccgcgcctggctaatttttttgtgtttttagtagagacgagatttcaccgtgttagccaggat

SEQ ID NO: 46087 - DNA, 122 bp, Homo sapiens
cgggttcgggaactgctggaagagctcattctccctggagaagacaggcactagggaggccgcaggagagcatggcgcggctgactcctggccccggggtccgcgggtggcgccactctcct

SEQ ID NO: 46088 - DNA, 122 bp, Homo sapiens
gggtctgggaaaggggcggagcctggccttcctagtttcgccccgccccaggaagtttcccggtctgtgggttatttttctgcccaactacatgatggtcctcatttgcagccatttgaatc

SEQ ID NO: 46089 - DNA, 122 bp, Homo sapiens
tgtgccaggggcaccatgtctaaaacacatccacaatatcccttgaaccttgtgacggctcgagactgttgaggtaggaactgtgatgcccatgtacagatgagaaaatagagactcaggta

SEQ ID NO: 46090 - DNA, 122 bp, Homo sapiens
gaaaaggtccatgttaaattcttcaaaaggcaaagattcacaagttttataaaaagaccacgtctctgtggctgttaattttaagaggagagtctagtttgtgatgttggcgggatattggt

SEQ ID NO: 46091 - DNA, 122 bp, Homo sapiens
cggtgccccttcgccagctgaaaatctctgtggctgccattacctctgcctgggttctcacgctgaccgaccagggttgctctcctcgctcggccctgcaggctgcactcgactcgtgccac

SEQ ID NO: 46092 - DNA, 122 bp, Homo sapiens
agtgaccaggctgaggcccgcaggtctaagaccaaggaagcacgcaagcgccgtgaagagcgcctccaggccaagaaggaggagatcatcaagactttatccaaggaggaagagaccaagaa

SEQ ID NO: 46093 - DNA, 122 bp, Homo sapiens
gagagacccgacaaaacaaacaagcgaaggcgacacagccaggttagcaccgagcagcagcgcaggagcgccagaagggcgggagcacacgggcccttccccacagccagcgcctccgcggg

SEQ ID NO: 46094 - DNA, 122 bp, Homo sapiens
caaacgccagctgcgcagggcagtcagggcagggggcagagcatgtgcgaatcagaacggcggtggcagcagttacaggggtgcagatccccaggacctgccatctggggaggagggcaagg

SEQ ID NO: 46095 - DNA, 122 bp, Homo sapiens
tctgttcttctgggagactgtgtgtctgtccatgggcggtggggccttctgtccccacaacgggaggttgtgtgcctgtctttctgggggtgtctctgtgtcttaagatctttatgagtgtg

SEQ ID NO: 46096 - DNA, 122 bp, Homo sapiens
cgacacagtaacgtcggcggtgcctcgaagtcaaaatgcgctctcttaactacgcctgcgcgcatttatatacgttgcccctcgtccctcgcgggaaccatagagtcctgaggccggaacca

SEQ ID NO: 46097 - DNA, 122 bp, Homo sapiens
ggcgaaaccccgcctcatccttgcgtgagacccaatccgatgtgaagaggcgaacgacggcgcgtaggaacgacctcggagttccggatcgcgcagagggacaaatttgttccggagatact

SEQ ID NO: 46098 - DNA, 122 bp, Homo sapiens
aaccacctgctttgcgctgcgtccggggaagtggggaggagacgggagggagggaggaggcggggagaggaggaaagaggcagcttacacacgccttccagtccctctactcagagcagccc

SEQ ID NO: 46099 - DNA, 122 bp, Homo sapiens
gccgcgggcctaggtgggtgtcccagagagcgggcggctgcgcgactgaggagctggaggcgcacccctccgcccgccagacggcccggcccgcgcccccgccccactcccctcgcgttctc

SEQ ID NO: 46100 - DNA, 122 bp, Homo sapiens
cgagcttaataggctcccctgagatggtcctcatgtgaaaggattgctctgtaaggtgtacgtttttcctctctccccatgtttctgctctaaaatatggcttgtcttatgcttagcatccc

SEQ ID NO: 46101 - DNA, 122 bp, Homo sapiens
atttatagttttagcatcctaggagcttctccttttgagtagtgtgaaaaagtatctttacgtgagagaggtatcaatgactcactaaaaaagagggtagaataacatataatatgtaagag

SEQ ID NO: 46102 - DNA, 122 bp, Homo sapiens
tcagctcccactcagcggtggcaagaggtgtaccccaactctccagcccccaggccaggacgcaggcaggttctttctggcttagagtcttctctgggcagggtctcagcagccctgccttg

SEQ ID NO: 46103 - DNA, 122 bp, Homo sapiens
gactcggcctcagggcacccacggtcctgggagctgacagggaattcctcttgtgcccgacgaatattccgtggacacacatttgctccgcacgcgctgtctgcaatgtaattcgacaagtt

SEQ ID NO: 46104 - DNA, 122 bp, Homo sapiens
caccagccagcctataacctatggagccaggacaggaaagcatgatccttcagctcatgacgccacccaggcttccagacaactgcagaatgaaagagtccctcagaggctccccagcccct

SEQ ID NO: 46105 - DNA, 122 bp, Homo sapiens
atgtttcttctattaaaccatcccgaccgctcctctatggacagattcaagattcacagacgctactctagctgcttaattctggagtaaaataaaaactttcagaaagactactaactaaa

SEQ ID NO: 46106 - DNA, 122 bp, Homo sapiens
caagttctataagatgacacacagaaaggaactctgttcataatggatcatgcctgcacacgtgtgatattttgtccacagactgagcctctaggagactgcctacagagtttggaggcaca

SEQ ID NO: 46107 - DNA, 122 bp, Homo sapiens
gtgtggtggggggaaggcgaagagagaactgatccaggacctggacgcgggggtctgcggcgcccctacgcccccacgcccccagccgtccgcagtgccggaatgagccggatagcgccggc

SEQ ID NO: 46108 - DNA, 122 bp, Homo sapiens
cgctccgcggcgggtgtgctcggcagtcacagacccactcaggacacctcccgttgccgacgggctagacctgcatccgaagggcctaagcggggaggaaccgctttccaccactctccagg

SEQ ID NO: 46109 - DNA, 122 bp, Homo sapiens
agaggagaacaggaaggacggccaagagctcctggtgcagctggctccccagggctctgccggctcaagagagaaggatcccgtatcaggggctgcttcctctttcccaaagcctcagctct

SEQ ID NO: 46110 - DNA, 122 bp, Homo sapiens
cgaaccccatctacttagcttcagtttaccccctcgatctggggttacccgacgcctgtgcgcctccccctatccccaagaccatctgcttctctccgtgaaactcgaggagcctctgccag

SEQ ID NO: 46111 - DNA, 122 bp, Homo sapiens
ctcgggccccaggccttgtccctcttctccgtgtcccaatcttccttcaaccgcccgccccgcccctgcctttggtggcctggagtccccaccagctctgggtactagggcgccgggcagcg

SEQ ID NO: 46112 - DNA, 122 bp, Homo sapiens
taccggcttctattctgcaggagaactttgagtctcgggagactcagggtttcttcctcccgcctctcgcagtgcatctttcatttgcttttctttgtaaagccagggctcctcgactgcct

SEQ ID NO: 46113 - DNA, 122 bp, Homo sapiens
cctcctcccgcccaggcaggaaacgctcagcagcaccatctgcttggctcctcagccagccgcgctccgggagccctgggggcgaggcggccgtggcgtcctccacgtctgtgtctccccgc

SEQ ID NO: 46114 - DNA, 122 bp, Homo sapiens
gtgaagaggtggaaaaagagaaggttaaaccctcacaggattggcccacccccgtcccgccgcgtgctgcgcaggcgcgttttacctaaccaccattttccgtcaagttttagccaatgagt

SEQ ID NO: 46115 - DNA, 122 bp, Homo sapiens
gtagcgtcacctggaaggcagatctaacagagaacctggactgtctcctatcatgattcccgggaaatatcgctctgtttctggccgggctgcgaacaacgtaagttgggccttctactttc

SEQ ID NO: 46116 - DNA, 122 bp, Homo sapiens
gcttttgcaaaacaggccgcacctagcccagattctggagctgattcagtccatgcctctcgacccacagtttgtcctgagccctgacaaaggtctggccccctcctgcactcggaacgcgg

SEQ ID NO: 46117 - DNA, 122 bp, Homo sapiens
gagacccggatgccccacctcccgcactcctacctgcaggaaacaagggaagagcgcttgcgcggagggctggtcttgcgcaagcgcagtcaccacgtcctcctatccccacccgccgcgaa

SEQ ID NO: 46118 - DNA, 122 bp, Homo sapiens
gcccggtggtggcgggcactgaggagccagccgtgcctctgtggcgctgagagaatgagccgatgattgcaggagggggactgttcctgccaaactccccactccccagggccaaagcagac

SEQ ID NO: 46119 - DNA, 122 bp, Homo sapiens
acagggctctaggtgccttaaagaacacgcggacacacttgtttggcttctgtcgcgctccgtagaatgagttccctgggcctcggtgggccacgcctccgcaaagaaggacaacgcgaagc

SEQ ID NO: 46120 - DNA, 122 bp, Homo sapiens
ggtgagcgtgattgggctgtcctacatcacgtgacggccagtacgcgtgggatttggctccgaggaggcggaagtgcagcacagaaagggggtccgtgggggacggtagaagcctggaggag

SEQ ID NO: 46121 - DNA, 122 bp, Homo sapiens
gctccttacccagatactcagctaaagaagcagcaagcaggaagaggaggctttctaaggcggtcgctccgggaaatccgggccctaggattgtccactcatcccagtatcagcgagatacg

SEQ ID NO: 46122 - DNA, 122 bp, Homo sapiens
acactttcacatgaggttattacaggactctaaatagcaaaggcaaacctgaatctaaaacgctttttaaaaaactaagtgatttccctttaatctactgcaccttaatttgccatctattt

SEQ ID NO: 46123 - DNA, 122 bp, Homo sapiens
cctgcctgcagcgcgccggctcctgggtttggccggggagccatcatgacagccccgccgcgcacattacggctgggccaggcgttctcaaatggctccgacatggtgtgaatacactcttg

SEQ ID NO: 46124 - DNA, 122 bp, Homo sapiens
gccaggccgaggctcacacgatggactcacggtccctgtccggagaaggggggaagtcggcgagatcttcactgtggctgtagtcagacccccgcacctggaggttatcgctggtggctcta

SEQ ID NO: 46125 - DNA, 122 bp, Homo sapiens
gccagcaggcgccagcaggctgcgtgggcagcctggcctttgttaaccctttaggaactgcgggcttcaggttttcagaccatccaaggtgaaggtggtcacaggagcctggaagctttccc

SEQ ID NO: 46126 - DNA, 122 bp, Homo sapiens
caccccctccgccttggaatatttttaaggactatcttacacgggggtggacacttcctgcgatgttgggagtaatagcattctcttcttccgtgaatattaggagcaaaatcaccgggtgg

SEQ ID NO: 46127 - DNA, 122 bp, Homo sapiens
acatccctgctgtgtttatccagaaggtggtgacctcactcctcgctggcctgagcattccgtcccacatcccaggcggtggccctagggaagtctctgcagctgagcacagggtggactct

SEQ ID NO: 46128 - DNA, 122 bp, Homo sapiens
ccacgctcgggctccgccttcgggcgcccccaaggggtctcctacccggatcgagctgggcgaacttggttcccagtagaaagaaaggtgggcgccccgtgtctcgggacaaggcgaggagg

SEQ ID NO: 46129 - DNA, 122 bp, Homo sapiens
cccgaggggaaagatgctcgactctcttgggggcaccggagcgggcgcaggagaggcctgcggggtgcgtcccactcacagggatcctctttcagttcatttagataggtgccctttgggcc

SEQ ID NO: 46130 - DNA, 122 bp, Homo sapiens
tcgaaatcctgagcccagaaataaagtgactgttgcttttgcgtccttgcacgtttgccccggctctcagcagaggcagaaggtgatgtttggaggaagcagatggcccggtctactgtaca

SEQ ID NO: 46131 - DNA, 122 bp, Homo sapiens
gccttactccctgcggcccccagagaaggagaggggcgggggagcggcctcgagggttggcggccaggctgcaggctggatgggaaggataggcttttccacagaaacttaggtgtttgcct

SEQ ID NO: 46132 - DNA, 122 bp, Homo sapiens
ccgcgtggctggactcacacctggacgcggtagcccccggtccgccgccggcaaagcctccgcacgcccacccagtacagcgtcaacatggccacccagtagcccacgtaggcgccggcccc

SEQ ID NO: 46133 - DNA, 122 bp, Homo sapiens
ccagcctgtcctctgctcccctgggctgcagttggcccagttgcctgcctccattagatacggagttgctctggggctgagatgcccatctcaagtgcattctgtcggaagggttctctgct

SEQ ID NO: 46134 - DNA, 122 bp, Homo sapiens
ggtccccaagaagatgcagcgggtgggctgtgtggagctgctcaacacggtgcagaggcgcgtccagccgcggttacatgtctttggccacatccacgaaggtcagtacgtagcggagacag

SEQ ID NO: 46135 - DNA, 122 bp, Homo sapiens
cgagttctgggaagggtcgatgctggagaagccggccgacgggcgggaagtggtgtgccacgcctcggcttgggacttctacaacaggaaagacttcaggttcagacatgggaagagcacgt

SEQ ID NO: 46136 - DNA, 122 bp, Homo sapiens
attttacagatgaggacactgagacagagcaagcactggcccagagccacacggtacggtcggaaccgcgtaaagaggcggtgagcccaggcagcagagctcctggccccaacgatctccag

SEQ ID NO: 46137 - DNA, 122 bp, Homo sapiens
gatgagaaccagaacaagtctggcagcgaggccggcagtccccggaggccacgaagacagcggtcagatcaggactcagacagtgaccagccatccagaaagagaaggccctccggttctga

SEQ ID NO: 46138 - DNA, 122 bp, Homo sapiens
ctgcgagcagggccctcgggcggccttgaccaaggcgacagtgaacacagtctgaagttccggcccaagacctgggcttgctggcaggagtcagctctgggcatctttggctttacggattt

SEQ ID NO: 46139 - DNA, 122 bp, Homo sapiens
agctgggattacaggtgcacactgccacgcccggctaattttttgtatttttagtagagacggggtttcaccgtgttccccgggctggtcttgaactcatgagctcaggcaatccacctgcc

SEQ ID NO: 46140 - DNA, 122 bp, Homo sapiens
gtgcacacacacgcataggcagtataaacacgtatgttaacatgggctccactgcagcctcggctgagcgttaaacatggacctacctgtgtgactggcttactgttgaggccaccggagat

SEQ ID NO: 46141 - DNA, 122 bp, Homo sapiens
tttcatccccatctcaagtcccaggcccgccccgtgggaaggaggatcttctagggggtccgggggctccccaaggagccttcctgcagccgggtcaccacctcccatccacagagacgtgg

SEQ ID NO: 46142 - DNA, 122 bp, Homo sapiens
gggctgacactacagggtacacatagctggcatccctaaatgtaaggggtttgcttcaaccgtatttaaaaactcaggacacattttcctctttccttctttcccccagtgtatcttttgga

SEQ ID NO: 46143 - DNA, 122 bp, Homo sapiens
gggggaccttacggagccctagagctggacggggctccggctgccgtgccgcctctcccgcggcggctaaaatgtgctgttcacgcctcagatgggcctctccgttacgtacaacaggtctc

SEQ ID NO: 46144 - DNA, 122 bp, Homo sapiens
actaacagtgaaaagaacaatgcttccaaaacggtcacgtcctcgctttttacacaagtgcgcgtgcgcactgggcgctaggcctctgacgtcaccaagtgcatccgcccctacaagttagc

SEQ ID NO: 46145 - DNA, 122 bp, Homo sapiens
aaaaaaaaatcctggtgcaatacctcatgcctgcaatcctaccactttgggaggccgaggcgggtggatcacttgagcccaggagttggagaccagcctgggcaacatgacgaaatcctgtc

SEQ ID NO: 46146 - DNA, 122 bp, Homo sapiens
caggcggtcgggcaggcggttgtgagcgcgtggggtgcctgaggagtagctgaggccgggcggggtgaaggctgggagggacagggaggggagggggtagcggagctgcaagggcagagtct

SEQ ID NO: 46147 - DNA, 122 bp, Homo sapiens
cccagaggcgcgcagtgcatgccgggccctgtagtttttccggggagtcggtgccagggccgagattcccgcgcttcaagtcccgcagccctggctgcgtcttagagaggcgtgaaaccgga

SEQ ID NO: 46148 - DNA, 122 bp, Homo sapiens
caataggggatgtgaagagaatgaaggggaggatgaggtgggaaggagaaagaaggccatcggtttcaactgggtgaagaacacttttgacttgagacctgagtggcaacaaggagccaggt

SEQ ID NO: 46149 - DNA, 122 bp, Homo sapiens
cgtccccttctgccccggagcccgcccgcgccgcacggtggccccttgcgctggcctgatcgtgggaaccaggcggggccccagcgtccctgcccctgcccggtcatccatctccctcccgg

SEQ ID NO: 46150 - DNA, 122 bp, Homo sapiens
gctggaaggcaaagaaatgagagtagtgtagtatactgtatgggagattgaatgagactgcgaaacagaaagtctgggctgtactccctatctgccatgaaaaaagtgatacaattttagca

SEQ ID NO: 46151 - DNA, 122 bp, Homo sapiens
aagccttctgtgtttgggcagtggtggggaggctgtcccgtttcttctttgcctttgcggcgaagaggatcattgagaacgctgaggacatgcacaccgatgtcgtggcctcccagcactgc

SEQ ID NO: 46152 - DNA, 122 bp, Homo sapiens
agcctgtaacataaacagctgggctgtcccctgaccccggcctgttgcaggagggctggccgcgctgatgtacacggacacggtacagaccttcgtcattctggggggcgcctgcatcctca

SEQ ID NO: 46153 - DNA, 122 bp, Homo sapiens
agagaggatcaggggaaaataaattatgtaggcaacagaaccatgcatcaaaagtcttttcgatttctaaactggcaaattttctccaggggaccatcagtcaaatgatgtcaaattgagct

SEQ ID NO: 46154 - DNA, 122 bp, Homo sapiens
tctgtgacttaaatagcccaggcaagctatttaatctatctgagcctcagagtttccacccgtaaaacaggattgaatgtgacgataagcaaataactgaaacactgtccagggcacaagcg

SEQ ID NO: 46155 - DNA, 122 bp, Homo sapiens
tcaaaatggagcacatgagctctgacattccgttgtcctggcaacctgtatagtaaacatcggcttaatgctgtttgatggggggaggtgggaattaggaactggggggtgttgaataaagc

SEQ ID NO: 46156 - DNA, 122 bp, Homo sapiens
aacccagccccacaacatcccaactgtgtgacgttaggcagttgctcaatctttctgattcgtagctatttgtcaaacatggtgattcagtgaggatccagttacaaaaataacactcatgc

SEQ ID NO: 46157 - DNA, 122 bp, Homo sapiens
gaggccagttgcagcccctcctccggccttagggggcagaccgtgttcctacgtggagggcggaaccctcacactgaggagggctgggtcacactgaggggaggagtcaccttgagaggagg

SEQ ID NO: 46158 - DNA, 122 bp, Homo sapiens
ggacatctgacagtgcctggctaggggggctcctgtggaagacaagggacactcactctgcgtcagtggacatgctgatgggatgtcctcaggcaggttagaaactgcagcaacagtttatc

SEQ ID NO: 46159 - DNA, 122 bp, Homo sapiens
ctgtcagggcatctctcgccagtttcattattcactgctcccactcgcacgacggacccacgtccgccgtccgttccagacataagccaacgctcgctctggcgttctcagaaaccgttccg

SEQ ID NO: 46160 - DNA, 122 bp, Homo sapiens
gagaccgcagggatttcctgagcagcaagtcgtgtgccccttggcacgctttatctgcttcgcccgggccaggagcgtgcctgcccggctgctgcccgcgccaccggccaatcagcgccggg

SEQ ID NO: 46161 - DNA, 122 bp, Homo sapiens
gggtcaggaagacggagtgggacgcggctgcgtggaagacagagagaaacgcgccacattcgtgatgccagcactggagcacacggggaacggaagccacacaaccccattccttcctaagg

SEQ ID NO: 46162 - DNA, 122 bp, Homo sapiens
tgtagttttattggaggccattttttatagcagacttgatgagatattattcaccgcctccgaactgctccgggtcgcaggtctgcagcatctctggccctgcgcgcctaccactactagct

SEQ ID NO: 46163 - DNA, 122 bp, Homo sapiens
aatgtcatatgcttgctgttgacattctagtattggggtatagatacctgttcttactggcgagccaatgttgatcgcagtagtcattacatgggttatgtttttcgcagaggcagggaagg

SEQ ID NO: 46164 - DNA, 122 bp, Homo sapiens
gaaggtggtctgatccgcagggacctgttgcggcactgcctgggaactcccggctgggctcgctgccccctcccccttccgctgtggccaccggctttgttttccggaaacgcacggatcag

SEQ ID NO: 46165 - DNA, 122 bp, Homo sapiens
cccgtgtccccgcgccccgccgggtcctaaagcccggcgcgcaatgggttagtccacgcccgcttcctgagaccggctcagaccacgattcccagcaagcatcgcaaagactacaactcccg

SEQ ID NO: 46166 - DNA, 122 bp, Homo sapiens
ggcgcgccgccccacccggccccggagaccgacagagccccgggcgcctcctgcctggcacggggggtagagcctcaggtggccttggcaagcccagggcacgcccaacccatggctcgtgt

SEQ ID NO: 46167 - DNA, 122 bp, Homo sapiens
gttttttttttttttttttttttttccaagacagagtctctgtcgcccaggccggagtgccgtggtggcatcttggctcactgcaacctcagacgcctggattcaagcaattctcctgcctc

SEQ ID NO: 46168 - DNA, 122 bp, Homo sapiens
cagagcaccaagtcccctgctctgtgactcgttgttcctttcctctgtcttcaagcaccacgcagaaatacactggatgttctctctttgcttcaatggagacccaaggagctgggaggtct

SEQ ID NO: 46169 - DNA, 122 bp, Homo sapiens
aggtaggggcggggcgcgaggcggagagaccttgcccttcagaacagacagagggcggggcgggggcggggccggggcgggacctgtgcgtctctcagcctggctcccagagcctcaatttt

SEQ ID NO: 46170 - DNA, 122 bp, Homo sapiens
tgcgatgtgggtgtggccgttcccatttaacgatgaggaaactgaggattgcccagaccacgctgccagtagaggggcagagctggggttccaaccccagtctatgtcccggcagaagctgc

SEQ ID NO: 46171 - DNA, 122 bp, Homo sapiens
cttgccttaaggagcccattgcctttcccgctgaagtctagatgttgacatgtaataaagcgggcagcaggatggtggtggatgcggccaactccaatgggcctttccagcccgtggtcctt

SEQ ID NO: 46172 - DNA, 122 bp, Homo sapiens
aaattttcttggaacacaagtctcactcatgcgtttacatattgtctgttactgctttcacgctataatggcagagttgagtagttgccaaagagaccacatggtatggacatcctaaagta

SEQ ID NO: 46173 - DNA, 122 bp, Homo sapiens
ctaaggacaagggaatggggagaccacagaaggccagcagaactgtaaaactgacagcaccgaactgtccttagaacacagccttgaaaactccctcttctgagggactgcttcccttaact

SEQ ID NO: 46174 - DNA, 122 bp, Homo sapiens
tgaggagcaaggacaaagcctgtgtgtggagacgccttgcacgtgtcagcagcatggcgtcggcgtgggagggaggaggtagcgtcggcgtgggggaggagcgtggcgtcggcgtcgtgggg

SEQ ID NO: 46175 - DNA, 122 bp, Homo sapiens
ctggatagtccatgaataatagcctctgcgctgttgcgggtcctgcagaagtcctcagagcggccgtcggggaaagctcggcaaagagagaaacagaggaactcgagcatccagccggcagc

SEQ ID NO: 46176 - DNA, 122 bp, Homo sapiens
gggtgacgggtgatcccagtcctcgcagtgaactctggggcgcagaattcaaaacgcttgcggtcgccgagcgcagccccgccctgggttatgtaagtgacagcgctgggccgtttctcttt

SEQ ID NO: 46177 - DNA, 122 bp, Homo sapiens
cctgccaagaggcggaggcctgggtcccgaccatcacagtgtttaaaggtcgggcctagccggtgcagacgttaagtcatggaggacaccagcaagaaccctgtttatggatgggcgtccgc

SEQ ID NO: 46178 - DNA, 122 bp, Homo sapiens
tcccaggctccggctccgggtcagcatcctcgcgctcaaggcggtcatgccggactcctgcggactacacatcccggcggcccatgcggccccgtcacgtgatgcaaggatcgccggccttt

SEQ ID NO: 46179 - DNA, 122 bp, Homo sapiens
ctggcctttgaatgtcctcaccacaaagaaagaaatcagaaatggatgaggtgatggtcacgcaaaatactgacttgacgcttggtgcagtggctcatgattgtaatcccagcactttggga

SEQ ID NO: 46180 - DNA, 122 bp, Homo sapiens
tgctcagctcagctttgcagatgttaatcggacacgatctgcagcggggagatggtttcgcggtgaattggtctctgaggcgatggtgttggtgcaggttgtgggcgtgcagtgtgagcagg

SEQ ID NO: 46181 - DNA, 122 bp, Homo sapiens
ttaggtttaagatctagtcagatgggtaatacctcagagggcacgtgtgtgcattctgctcgaaatgattgaaacttggcatggtcgtgggaaaaggagacttatgcgggaagagggctgcg

SEQ ID NO: 46182 - DNA, 122 bp, Homo sapiens
gcacgtgtagccagggcagggttgcatcatgagctcgttcgggttttctattgcacccttcgtttttctattgcatgtaatacctcagcatcagtctgcacaagcccagggagcccaggagc

SEQ ID NO: 46183 - DNA, 122 bp, Homo sapiens
caagccttccacgtgcgccttatagcctctcaacttcttgcttgggatctccaacctcaccgcggctcgaaatggaccccaactgctcctgcgccactggtaagggatgctaggtttctggt

SEQ ID NO: 46184 - DNA, 122 bp, Homo sapiens
ccttctttaatccggtgtctgaggagttttgtctgcggctcctcctgctacactacctttcgcacttagagatacaattgatctggagttcagagctgtgtgtgatgggaggtagggggcca

SEQ ID NO: 46185 - DNA, 122 bp, Homo sapiens
aatgcgaaccaaacacaaaagccacaggggaaagcttttcctctctgtgcttcccttttccggccgaggaacaccaccagccaagataaggggactgtgcggggccctctgcgcggcttcaa

SEQ ID NO: 46186 - DNA, 122 bp, Homo sapiens
cgggccgcgggcgctgtcaggccctgggcgggggtgccggggtggtgtggggcgggggcccgagctcggcccgccccgggagccggccccttggagcctccggccctgcaatgggacgtgtt

SEQ ID NO: 46187 - DNA, 122 bp, Homo sapiens
gcggtagcgcggcgctggggactggctgggtaccgcccgaggcgcggagaagcggggtgacggcacgggccaggggcggcagcggccggggggcgcgctcctctacgcgtctccgcagcgcc

SEQ ID NO: 46188 - DNA, 122 bp, Homo sapiens
agccgcccagtccatcccactttcaatcttacaggcccctgctgttgctgccgctgccgccgctcccagctgcccagtctggcgggctcagtcccgcgttgccatgtgtgggagaccgcgtc

SEQ ID NO: 46189 - DNA, 122 bp, Homo sapiens
ccctctttcttttctcccacggtcgggaccttagggtaggagtttcaagaggggagaagccggtggagcagtaacagccttcataatgtctccagtcccgcttccgtcacctccctaaggct

SEQ ID NO: 46190 - DNA, 122 bp, Homo sapiens
ttcgacgcggccgcttcagagcggcggggacaggctgcagcaggtggcgcagttagcagccgccgccgcagccacagagacctcctcgtcgggaacccatgaagactgcgcaacacagccgc

SEQ ID NO: 46191 - DNA, 122 bp, Homo sapiens
gactgccacagtgcctcaccatgtcgggcacgtagaagatgctgcggatgttgagcggtgcgtccgtcttatagtgcagggtgtagcggggcttgtcgtgagcctgcgcgacgtagcggtag

SEQ ID NO: 46192 - DNA, 122 bp, Homo sapiens
cgcaaatgcctcctggctaaggggcagcgcgcattagagctgggtctcctgctttcggagcggagggcgtaagggagctttctagctgattttttgctagaagttttccaacgctccaaata

SEQ ID NO: 46193 - DNA, 122 bp, Homo sapiens
tccctgctctctcctccagacaagcagatcgacctgagcacagtggacctgaagaagctccgagttaaagagctgaagaagattctggatgactggggggagacatgcaaaggctgtgcaga

SEQ ID NO: 46194 - DNA, 122 bp, Homo sapiens
catggcctcattgaagccccactacagctctggtagcggtaaccatgcgtatttgacacacgaaggaactagggaaaaggcattaggtcatttcaagccgaaattcacatgtgctagaatcc

SEQ ID NO: 46195 - DNA, 122 bp, Homo sapiens
ggcaacctgccacggtgccttccctccgcggaggctcgtctgcccctagggggagccaatcggctgtcagcctccaaagagtgcctgctcatgggatggcaagctggctctcttgcagagcg

SEQ ID NO: 46196 - DNA, 122 bp, Homo sapiens
gactgattgtagatgttcttttttttttgttccccagtgtgttgcctgtgagtgtgacctcggaggctcttcctcaggagctgaagtcaggatcagaaaccaccaactgtactgcaacgact

SEQ ID NO: 46197 - DNA, 122 bp, Homo sapiens
tgcgagcaggaggtgctgggccccgactgcgatgaactccgcaaggcctgcctggagatccgcagctcgctccggcgccggctctgcctccaggcctgagggtgcggcggccacgggggcgc

SEQ ID NO: 46198 - DNA, 122 bp, Homo sapiens
tagggagtttatagctgagtgatttggaatgtgaaatgtgatgaagagatctggtcctgccgcttattccttgcaatcttgggcagatctctgtgcctcaatttctgagtgaaatagggttt

SEQ ID NO: 46199 - DNA, 122 bp, Homo sapiens
cggccccggagaccaccctgccccggggaaagggcttgcggtccctgaggtccccctcctcgactggagtctgaggccccagacccaggagtgtagaaaagagggactgatggagagagacg

SEQ ID NO: 46200 - DNA, 122 bp, Homo sapiens
gtggacatcagcgcaggacgttttgtccgctatcagttcacaccggcatttctccgcctccggacagtcggggctacgtgagtaccattactacctgaggggagaacattctgtttgttcac

SEQ ID NO: 46201 - DNA, 122 bp, Homo sapiens
tcggatcacacagagcacgtcgccaaggcttgttttgtctgttcctttccacctgtcttacgtggataccaggagatccgccacgactcccgtggccccgtccacactgcgcggcgctctcc

SEQ ID NO: 46202 - DNA, 122 bp, Homo sapiens
atcggctgagggctggtttctgcctcgtgagccccctgagcccctcaggaagactcaggacgctccgtgcatgtttgctgagtaagggcttgaatgaatctgggtccagcaggtgtgggcgg

SEQ ID NO: 46203 - DNA, 122 bp, Homo sapiens
gtccctgccaattcactcctcactaaggggccccagggctgcaacctaagaaggaggcctcgtgggcccaccgcgcgcccagcaaggagtgccctgcgtcccacaagacccttccaggctgg

SEQ ID NO: 46204 - DNA, 122 bp, Homo sapiens
tcaggggccgtcgctcccctgatctccccgaggctggctgcactgtctttcacatgtccccgtctgggagctcctggggtggggaccctgcctcagcgctgctgttcctttgagctccgccc

SEQ ID NO: 46205 - DNA, 122 bp, Homo sapiens
ctgccttggctgtcttccagattatggggaggaaaatgcacttataaaagtggaagtacccgggtaaggtaaatgtgccaggcaaacaccagagactactgcaaagaataacgtgctgaatt

SEQ ID NO: 46206 - DNA, 122 bp, Homo sapiens
taaaaataggtagtggctgttggttgccaatccctgctttaaaatgcagaactaggaccacggggagtcaaagagaaccagattttttaaacaaagatgttattatggctgggagtggtggc

SEQ ID NO: 46207 - DNA, 122 bp, Homo sapiens
tcacacacccgaggcctggcatcttaatgctgaagacatttggatgccgcggtttcgacgcggccgtgcgtaagcggaaaagccccgctctatcagggcagtggcagtccccaagcccgccg

SEQ ID NO: 46208 - DNA, 122 bp, Homo sapiens
cagctcgatccagctggagtttcctggaacggtggcactgtttctgtcttcatggctgaacggacaaggtggcttccccagatgacagccctcaagattttacttcagagttagggaagggg

SEQ ID NO: 46209 - DNA, 122 bp, Homo sapiens
ttcaacttcctcttcctgcgaaagaggggcgctgccccgtgacctacacagactgagacacgatcgccatgaatggagacctctggaaaagctcaggagccgaggcccacggggcccagcag

SEQ ID NO: 46210 - DNA, 122 bp, Homo sapiens
ctaatacctatcactgatttaaatgttcatatttctttgtttaaagtctccctacttaaacgcatgctccaagacgtcagagtttttgttttgttttacagatttaaatgctgaattcttgg

SEQ ID NO: 46211 - DNA, 122 bp, Homo sapiens
tcccctgggtgaggctgggccggagctgcgcacccaagacgcagcctcagcaacactcggcgcaggcgacccagcccccaaccccaacccccagcaggggcccagggctttccaccaaaacg

SEQ ID NO: 46212 - DNA, 122 bp, Homo sapiens
atatagttgtcagcagtgtttgaaaaaactcaaccaggcttcactaagactccatgtatacgaatgaaagtccatccatcaagatctcattaaatttcaagtgagtttaaaagataaaaaca

SEQ ID NO: 46213 - DNA, 122 bp, Homo sapiens
taactagattataaattccttgaaatcaggatctgttattcatctttgtattctttataacgtctggccctggtcctggaatgggtaggacagtgagtaagtgttgattgatcttgtaaggc

SEQ ID NO: 46214 - DNA, 122 bp, Homo sapiens
tctttttgttttgcacctgtgttcttttgctgtcggcaaggtgggcccaggtaaagccagcgtaggtgagcaaggggtcgctgattttaattgagtagttattccagtaacaccatctattc

SEQ ID NO: 46215 - DNA, 122 bp, Homo sapiens
cctgtgaaatcctgcaagggggtgccggtgagcgaggcggagtgcacggccatggggctgcgcagcggcaacctgcgggacaggtacggccaagcgccggcgcggggcagcgctgatccggc

SEQ ID NO: 46216 - DNA, 122 bp, Homo sapiens
ttcagagtttgtaaataacactttctacactcactacagatgacgccgccgggccgccgtcgccctctaatgctagcgccgcctctcgcttggctgagctccagccgaagaagggggttaag

SEQ ID NO: 46217 - DNA, 122 bp, Homo sapiens
gccgcccccacgctctcaagccagaaggagccttggggttaagcgggggcgtgtgttccccggcacacgtgttcattcctaaggccaccccagccaacggctgcaaatgcagaggctgaaac

SEQ ID NO: 46218 - DNA, 122 bp, Homo sapiens
cctgccttccaaacacagcccaggggttatgaaaaattgtttgccacaacagagcgagatcgctattaagagaggcagatgcacagtatgacagattactgatgacctccctgcctgtatga

SEQ ID NO: 46219 - DNA, 122 bp, Homo sapiens
aaagaagaatgaacatctttgaaaatatcaaaaagtctatgttacagggtggatattctccgggctcaaaactattcattgctttctttttttttgagggcatataaaataaaaaacagaaa

SEQ ID NO: 46220 - DNA, 122 bp, Homo sapiens
gctcccacgatgcacccaggttttagagcggtcagaggggcggcttccggtttaggacagcgcggctgcgcacggcgtgtggtcttattggctcgaaccgcctcgtgcgatgcgcgtcacgg

SEQ ID NO: 46221 - DNA, 122 bp, Homo sapiens
ggttggctgattggatgaggcccatccacaccatataaagtaatctgcttcactttaagtcgactggttttaaacattgactaagtctcaactagtgtttgaccaggcagctggtcaccata

SEQ ID NO: 46222 - DNA, 122 bp, Homo sapiens
gagctgccatctggacggctgcgggatggccctctccccacccacacacatgtggggctccgggtcccacaccagggcgcagctgaagctggacagcagccaagggctccccggggccaaca

SEQ ID NO: 46223 - DNA, 122 bp, Homo sapiens
ggcccctcgggaggccacgccaggccttatcctcagtccgcacgcgacacagcagcactgcggagaagccagcctcctccagagtctgtcatggaactccccctgaaaacagaaaatctttg

SEQ ID NO: 46224 - DNA, 122 bp, Homo sapiens
gcctgcatctggctcggaacagagttaatctcaggagtgagaatatagccctccggtggacgcaactcgcgcctgcggctaacagaatgtctccaggggaggggctctgcgtccgttccgcc

SEQ ID NO: 46225 - DNA, 122 bp, Homo sapiens
tgtcctcactcagcaacttgcattgaggggctgagaggcccccctgttctccaagagaaacgctccataggcagggaaaggctctggggatccggggtcccttcccaggcttgggggaggct

SEQ ID NO: 46226 - DNA, 122 bp, Homo sapiens
ttaactgggtgttttctgttgttgaagatcccagaagagcacgacctggagagtcagatccgcaaggagcgggagtggcggttcctgcgaaacagccgtgtcaggaggcaggcccagcaagt

SEQ ID NO: 46227 - DNA, 122 bp, Homo sapiens
cggcgtccagggatcgcgtccggagctcccaaccggataccccccccaagcccgaaacggcgctgcccatcctcatacagtcacctcagtccagaaaacagcgattttaatttgaaagcgat

SEQ ID NO: 46228 - DNA, 122 bp, Homo sapiens
gcagatggggaaactgaggcttggcgccatgcaggtcggaagtggtggggcccacgttctcggctggcctatgccactgctgtggacagaagccagtgaggaggcggaggtgatgggcctgg

SEQ ID NO: 46229 - DNA, 122 bp, Homo sapiens
caaaccctccaccatgtcatgctaataacagcagacctaggaactgaccctatgccacgccgtctggacccgcatacagtcatagtgtccaggtggctttgtgagtcacccagaccctccga

SEQ ID NO: 46230 - DNA, 122 bp, Homo sapiens
gtctttcagttaaggaatgcagagtaaggagaaattagagtgagcctgcattggaccaaacggagaggagaggagacaattgttttaggttcaaacaacttccaagccctcattgtctctct

SEQ ID NO: 46231 - DNA, 122 bp, Homo sapiens
gctccggccgctcctcgctgcggctccggcgcagtcgctgcgcgccctgggcccggcgtgcgcggcacagcttgcccaggaggccctgagacaccacctcgtcgaagcgcgcccggtgcttc

SEQ ID NO: 46232 - DNA, 122 bp, Homo sapiens
ctccctggacccaaaacccaagggggtcccaggccaaaaacgcgaccactttggcagccccgcgtgcgcccccctcggccgcgctccccaaggaccccgacccagtgcctccttctcccacc

SEQ ID NO: 46233 - DNA, 122 bp, Homo sapiens
agacagcaccttctgcagcagcgacgtgaattttagtgaagttggaggccaccaaactaccgactccaggggaacagccagagaagaccgaggcctccgcctcagtggtccttgggagggag

SEQ ID NO: 46234 - DNA, 122 bp, Homo sapiens
atttcaacggacctgaccaatgtgaagattttaccccaagccccaggtcaggctcttttccggcttataaacatttcaaccacactccagtttcaccaaaaaaaacgacggcccctgctccc

SEQ ID NO: 46235 - DNA, 122 bp, Homo sapiens
atttatttatgtttttgagacttgagtttcgctcttgttacccaggctggagtgcaatggcgcaatctcggctcacggcaacctccacaggagaagcgattctcctgtcccagcctcccgag

SEQ ID NO: 46236 - DNA, 122 bp, Homo sapiens
cactgctgcgagtgagggctacggtcctgctggcctttccaggtggccttctgcctgctccgctcggcgactcctatctgtgaacggggaaggggcttcacggagggcccactacccaaggg

SEQ ID NO: 46237 - DNA, 122 bp, Homo sapiens
aggcggggctagaggcaggggccagagggcgtggctagagggcggggcggcaattcagcccggcggtgaggcaagggggcgggacggcgaggtgaaggggcggagagagagggcggggcggc

SEQ ID NO: 46238 - DNA, 122 bp, Homo sapiens
cagccaacagactttttctcattttgaaacttgcatttttccgattgatggtttatttgacgaactcagtcgaagttttgagcatggcaattttagttaggctttttctggttggaaggaac

SEQ ID NO: 46239 - DNA, 122 bp, Homo sapiens
tcatagggagaaggggaacttttcccttggcccctagataactaatctccagaacattctcgccttgcaaaactgaacttctatggctattacacaacttctcatttccccatccccctagt

SEQ ID NO: 46240 - DNA, 122 bp, Homo sapiens
gaggaagggaatgcagagacccaagcaggaagttcttactgcttcggcgaagggtatctccgaggagcagctttcaggcgctccctgggctctcgcagtccagcgcgttcagaagctccagc

SEQ ID NO: 46241 - DNA, 122 bp, Homo sapiens
cggagcggatcttgaagacctcgtaaaggccgaacttgaagaagccctgcagggagtagccgaagaaggtctgagcgcagccgcgagccaggccgcacagcccgtcgctgtgcaccgtcacg

SEQ ID NO: 46242 - DNA, 122 bp, Homo sapiens
tggcgggcagcaggtgcgggacggggaggggtcccagcgggcggagtcccttgacacttccggataccttcctctgcggtccgcccacaggtggtatcccgaagcctaatgagcaccgcgat

SEQ ID NO: 46243 - DNA, 122 bp, Homo sapiens
atcgtcctctcccttcctggctgccaggaacaatatcagagggtgggtgtacacagccggcgatattgcgagtaatatcaccctctccccctccggatattaggaacaatgtcacagaaggg

SEQ ID NO: 46244 - DNA, 122 bp, Homo sapiens
ccgtagaccaatttgtggagtactgccatcttaacaatattatactttccaatccatgaacgtggaatgtcttaccatttatttagatcatctttaattttttttttcaccaaagttttagt

SEQ ID NO: 46245 - DNA, 122 bp, Homo sapiens
gaggccgcaccgtgacgccaggttggccaagcagctgagctgggcagaacggcgctccctcgtgactctggactcgccgtggcagcccgtgggcgcccttcccctctgcggaggcctcaggc

SEQ ID NO: 46246 - DNA, 122 bp, Homo sapiens
actcaagcacatccccccaccccccgtcttcagagatttgaagttctattgggaaagtcacgaatcatcactgtgctctgagctgaggtggaggaagcgtccattctcctggtgacccagca

SEQ ID NO: 46247 - DNA, 122 bp, Homo sapiens
tagagaggcgaagcctaggcctgtgggaaggctatgtttgaaagcggcgcggttgtcacacgcccaggaagcgggctgagctgtaatgggcggggcttaggactggtataggcataggcggg

SEQ ID NO: 46248 - DNA, 122 bp, Homo sapiens
agagcgctcggccaccccctgccctgggcgcctggcgcatggggggcggggcggggctcgcggggtgacgtcacagcccgacgcgccacccagctgtttttgtgctcccagctctagcgaaa

SEQ ID NO: 46249 - DNA, 122 bp, Homo sapiens
catagctgcctacttactgggagcttggctcacttcctttctggatctaagaggcttccacgtgggacccagggctttttccttccctggcagggccatggaggggtggccaaatctctgtg

SEQ ID NO: 46250 - DNA, 122 bp, Homo sapiens
gcaccgggactacaaagggcttgtcctgctgggaatcctcctggggactctgtgggagaccggatgcacccagatacgctattcagttccggaagagctggagaaaggctctagggtgggcg

SEQ ID NO: 46251 - DNA, 122 bp, Homo sapiens
tgagttaacagctgaacagaaacctacctacccaacgtgctaacttctatacagcatggtcgtgcatccaaatcaaatggaaagcggtatgggagatctggaaaggcctcctgtgggtggca

SEQ ID NO: 46252 - DNA, 122 bp, Homo sapiens
cgctgaccttcgcgtgctgcttgcggctcttaccacatcgggctggtgtgttttttttcccgtttagcgctgtgcctgggcgtcggcagaacaccattgtggtgaaggtgccgggccaagaa

SEQ ID NO: 46253 - DNA, 122 bp, Homo sapiens
ggggcggggccgccgcggggggcggggctgcagggggcggaggctgcgcagggagcggcgcgcgagccagcgaccccgcccgggcctgcgggaggacggaaccccagccccgaggacccgcg

SEQ ID NO: 46254 - DNA, 122 bp, Homo sapiens
agagcccagctgggactgcgcacagtaattcagggttgccattgttcctctatgggagtccggagagcccagcctgtgcttcacaaggctatgtggccctaggaaggtccttttttaggcca

SEQ ID NO: 46255 - DNA, 122 bp, Homo sapiens
atggccgccgcgcgatggtcgccgaacccacaggaggccgggctgtctgcgccccgctcccggggccgcccctagtcgccccgcctccaatcaccgcggccctgccccgtccgggtccgaag

SEQ ID NO: 46256 - DNA, 122 bp, Homo sapiens
tcctggcccagcgtggggctggctgctgcggcggcggcgctgggctgcgttgctggtgctcgggctgctggtagccggagcggcggacggatgcgagcttgtgccccggcacctccgcgggc

SEQ ID NO: 46257 - DNA, 122 bp, Homo sapiens
aacatgcggcactcggacagtctcttcccaataccctcccttaacgagagcgcgcgcccgcgggggcccattaccatcctgcaggatgagggtgggctgcaccgcctgtacccggaactgtc

SEQ ID NO: 46258 - DNA, 122 bp, Homo sapiens
tactgggagtccagcgttctgtgcttgggacagtgggactcaaacccgactccttgttcccgagtctgatggggaaggtagacacgtaggtacatagttacaaccggtgtgataacgatgag

SEQ ID NO: 46259 - DNA, 122 bp, Homo sapiens
aacttgccctctggtcacacagctaggaagtgggcagagtacagatttacacaaggcatccgtctcctggccccacatacccaactgctgtaaacccataccggcggccaagcagcctcaat

SEQ ID NO: 46260 - DNA, 122 bp, Homo sapiens
agaagctgggaaatattttaagttaatcaggcccttaatgcggtgcctggggaatgccgccgagctgcctgctcctgctcctcccttcactatccttttcccatctcttcctctcttccctt

SEQ ID NO: 46261 - DNA, 122 bp, Homo sapiens
accgtgcctcagtttccccgtcagtgcagcggacaagacaatgccgaggtcccaggcgggcggcaggatccaattagtccgtgtaaaatgagaggcatctggcttctcccgggcaccccgca

SEQ ID NO: 46262 - DNA, 122 bp, Homo sapiens
ccccccaaccctcacacccacttgcaagtatctgccacacccaagatggcagggtgaagccggagaggagtttctcagggaggaaggggaggtgaggggccagggcgctggcctcaccggct

SEQ ID NO: 46263 - DNA, 122 bp, Homo sapiens
caatggaatccgaagacagggtcagctcggtacaccacgagccgagatccacgggacggacggtgtgcaggcaccaaagcgtggacaggccatgctttgcttaacagcatggggctggccac

SEQ ID NO: 46264 - DNA, 122 bp, Homo sapiens
tggcctctgtgagctctggggtcaggcggggactggaggagcgtccgcgccgggagggagcgcaccgcgccacgtgcccgcccggcgccccgcccccaccccggccacgcccctcgcgcttc

SEQ ID NO: 46265 - DNA, 122 bp, Homo sapiens
gcagcaaacccgatttctgttttttgaaccgaccgccgggcagcggcggtgcagaggcggcggctgcagacggagcgcggtgttgggggccgagtccccgcgtcccctcctacccaccctcg

SEQ ID NO: 46266 - DNA, 122 bp, Homo sapiens
cccggcggagcgttgaatggggcgcagcaaggctcggccgggctttgtgcagcgagcccgcgggcacccctcccgctccagcctcgccccgccccgcagcccacgacccctgctgccgggga

SEQ ID NO: 46267 - DNA, 122 bp, Homo sapiens
ggggcgggcgcgggggcagagcgaaaggcttgaggaccaggtcggggccgggttccgggtcggggagcggctccgggcggcagctatgaggcgggacgtgcgcatcctgttactgggcgagg

SEQ ID NO: 46268 - DNA, 122 bp, Homo sapiens
agatactaggttacaaagtttccataaagaggttaactattcaggttgccgatttaaaatcgcaattgaagcaaactcagacagccctagagaatgaagtgtactgcaatccaaagcagtct

SEQ ID NO: 46269 - DNA, 122 bp, Homo sapiens
ggcccagaagaagtttttaggatatatggaggaaaacacaacacaacacagctacaactccgtgacaactgagagcgtagtcttcgagtacccagttgcctactgacagccgtctcctctaa

SEQ ID NO: 46270 - DNA, 122 bp, Homo sapiens
tggacgaccggaactggctgtggcgcggcccgggccttcccgtgggcgactctgggtctgcgtaccgagtccctctggcgcagctcagcccttggtaccctcggcctcagggtggggctggg

SEQ ID NO: 46271 - DNA, 122 bp, Homo sapiens
tctctgatatacacgtgacagtcaagcttggcagtggcgtgggtaggcactgcagcctggcggccttgatttgaaacctgactccttcacaggctgtgtgacttgggacaagtggctaaact

SEQ ID NO: 46272 - DNA, 122 bp, Homo sapiens
tttaaaacgcaatgagctagaagtatcaaaagatgaaaactgcagagcgatttcaaagcccgtcagctgtttggcattgagacaactaaaattctgtaagaagggcaaatggggtcaaaaca

SEQ ID NO: 46273 - DNA, 122 bp, Homo sapiens
caccccgacgtgccctccagccgttgcgagtggccccagccccgggaggcacgcccggcacgacagcaagttgcatgcggctctctggaggtgctccctccttagaaagggctcagctcctc

SEQ ID NO: 46274 - DNA, 122 bp, Homo sapiens
ctgggccagcttctcctgtgagctgtcccacgaggatgaggaggtcgagtggtcgctcaacgggatgcccctgtacaacgacagcttccatgagatctcacacaagggccggcgccacacgc

SEQ ID NO: 46275 - DNA, 122 bp, Homo sapiens
gggcagaggccgttgctgacgggccggccgctgctgcacagtcagcttgggtgcggagcgcgatcctggaggatgagagaccacttgaccccaaggatgcactgtctcctgctgggaatgct

SEQ ID NO: 46276 - DNA, 122 bp, Homo sapiens
agcctctgggcggctcccgttcactctggctgcgggagcaggtcggtggggcaggagcagcgggtgagcagctaatcagaagcagcgggtctgcccgggctgcgccttgaccgcttgactcg

SEQ ID NO: 46277 - DNA, 122 bp, Homo sapiens
gaaactgtggctccggctgttaggggatctaacccccatctgcaaacatttacatttacacgagtggaactgggtgaaaaggtatgtgtggaggagggaaagtgaggaggtaggctagggag

SEQ ID NO: 46278 - DNA, 122 bp, Homo sapiens
aagtttcgctgttttccacggcatttccggaatgccagggcatgccctgtcaatcctgcacgccctgcggccgcgctgctttctccaccggggcagcgctgagtaggcggggcatgcgggtg

SEQ ID NO: 46279 - DNA, 122 bp, Homo sapiens
ccctgagctggagccagagcgcagcctgggccgcttcagaggccgcttcgaggataaggacgagcagttggaagaagaagaggagctagaggaggaagaagaggaggaggaggaggaggaca

SEQ ID NO: 46280 - DNA, 122 bp, Homo sapiens
ccgcggcgtcccgcgggcagaatcgggggcgcctcccgcagaacccccgcggcctggacccgggtgagaggagcttcttctgcgattccttcaaacctcagtgcctggccgacccgactctg

SEQ ID NO: 46281 - DNA, 122 bp, Homo sapiens
tatagaagttccatcacaaaagcccggcacctacctctgtcaagctttggctgctcagtccgcatgggctggatgtgaaaaaagatcccagtatgatgccttctctaaatttaccagaaaga

SEQ ID NO: 46282 - DNA, 122 bp, Homo sapiens
attccaaatttggttccagaattgccttaaattgtttttgctctgttcttaggttgggggcggctatgagcaggcagaggatgtggtgtcacccaattaggagctctcagcttacgaggcaa

SEQ ID NO: 46283 - DNA, 122 bp, Homo sapiens
agtaacacaaccagttctcataccaaggttatcaggcatttgaagtacacataggaaacccgtggagggggtgttggggaggtgaaaatatgtgtcatatgttgttcatttagaacaggcat

SEQ ID NO: 46284 - DNA, 122 bp, Homo sapiens
acttattcttgcatgttgctgtctgggaatggaccacactacagcaggtagttctgggggcgatactgccgaaaggcccgaacacatgtattttggctgcaattgaggaacttgggatgcta

SEQ ID NO: 46285 - DNA, 122 bp, Homo sapiens
cttcacaaggtttttgtgaaactttagactaaagttaatacatgtgatacatttagaacacggccaggtacatactttatgtgttgttattattatttttcgagacggagtctcgcactgtc

SEQ ID NO: 46286 - DNA, 122 bp, Homo sapiens
ctaaggctaaactctctgtaggtgaagctggactcacccacctgggctgccataggaaaacggaggagctggcagtgccccggcgcaggtagggagaggccctccttacctcggtcatcagg

SEQ ID NO: 46287 - DNA, 122 bp, Homo sapiens
ccggcggccgcgagtagcgggcggagcgcaagcagagaggcgctctgggctgtgcggcaccgcctctcctcggtgtctggggagggacggagggaccgggcgggagagagagaaagcctgac

SEQ ID NO: 46288 - DNA, 122 bp, Homo sapiens
caagttcctggagaagcccaagcgacggctgctgtgcccactgtgcgggaagcccatgcgcgagcctgtgcaggtttccacctgcggccaccgtttctgcgatacctgcctgcaggagttcc

SEQ ID NO: 46289 - DNA, 122 bp, Homo sapiens
ctccctgaccccttgcgcttcccaagtgaggcaatgcctcgccctgcttcggctcgtgcacggtgggtgcacccaattatctgcgcccactgtctggcactcccgagtgagatgaacccggt

SEQ ID NO: 46290 - DNA, 122 bp, Homo sapiens
ggcggaaccgatagtgtctggcacttggctcgcccggactctgaatcctggagcaccaggcgcccacgagaacgctgttctctttggcttccgggcgcacgctactctgtcgccgccgtcag

SEQ ID NO: 46291 - DNA, 122 bp, Homo sapiens
gcagccgcggggaccgggggcgaggccggggcggtgcagtaagggcttccctcctgggcgcggtcgccctcttacctggagcttcccctcgctggggttttgcccacctgacgcccccgcac

SEQ ID NO: 46292 - DNA, 122 bp, Homo sapiens
agtaactatttaaaaatggtgtttcctttggccatctgtattctaaatggtggctcctcccgccagaggcctctgtgagaactgaactgtagacgcagaggggcagggaggaggtcaaacgc

SEQ ID NO: 46293 - DNA, 122 bp, Homo sapiens
gccctgacctctcctctgagctccagagtcctccctggcctccctgctgggacatctccccggcatctccaactcatcgtggctaaagcaaaatgtcagatgctcccctgcctacacccggc

SEQ ID NO: 46294 - DNA, 122 bp, Homo sapiens
taggggtcactgtgtccttactacccaaacccacttacagtccatggcccacgcgatgctcgcctgtcactgacccgggacagcatgggctcactcgtgcatgaacaccagacgtgtgtaca

SEQ ID NO: 46295 - DNA, 122 bp, Homo sapiens
tgaccacagcttttgaaataagattaaggactgaggactggtagggactcataaacgatacgagtaaagtgttagccaaaatgaaagaaaaaggggtgcccaaacaagtcactttaaagttt

SEQ ID NO: 46296 - DNA, 122 bp, Homo sapiens
gcgcgggcccggaggaggcgcccgagggaccaggccttgcggcgggcaaggaccaggaggcgagccctggagctccggagcggacgcccccagggagctggggacacccccatgggacagcc

SEQ ID NO: 46297 - DNA, 122 bp, Homo sapiens
gtctttattcattaataatcaagatcttagcagaatattttgtcaaatttagattaacaacgtagggaaaaaactgaggattgacataaaacatgaggttaaaacagatacagaataactgt

SEQ ID NO: 46298 - DNA, 122 bp, Homo sapiens
gccgcctcccgctcctcgcctggcggatgtaggttgttggcctgaggggagctacgtagccgaggtttgcgctgccgccgccaggcccggtccggttccagcctctgcccggacgctagccg

SEQ ID NO: 46299 - DNA, 122 bp, Homo sapiens
tctgtgttttcacaggaattagtaggtttctctctctggccctgatcatattgtgtgtaacgtatctctctctgtgttacggaggcccatgtcctctcatttctgtattcttaccactctcc

SEQ ID NO: 46300 - DNA, 122 bp, Homo sapiens
gccgacgccaccatagaggaagtcgtagaggtgttgtccttcaggatccccttgaggggccgttgcgaggccgtggaggccgccattgccgggtgctccgcctgtcggctcagggtcgctgc

SEQ ID NO: 46301 - DNA, 122 bp, Homo sapiens
caaacactgtgttttgtttttgtttttttcctccagtgaaagggcaaatgaattaggcaacgcattcttcaagacgcgagttcagttaacttttaatccttgttcggtttaggacacttcta

SEQ ID NO: 46302 - DNA, 122 bp, Homo sapiens
gtggtgaccgtgtaggacagagggacaggtccctggtgcacctgtgggtggagagaacgccgggaaagtatgaaaaggaagctgaccgcgagggctactctcaggagaaatcatcctgccac

SEQ ID NO: 46303 - DNA, 122 bp, Homo sapiens
tgaactcctggcctcaagtagtcttcccaccttagcctcccaaagtgctgggattataggcgtgagccaccgcacctagttgttcagcttcttctgttacttgaaataagttaaggtccttt

SEQ ID NO: 46304 - DNA, 122 bp, Homo sapiens
caaagcccaggttttctcgggtgggggagatcctttcactctcttgtaagggggcggggacggccccagagatgctctggagatcctgactctgggctctggttgattcacagagtctgcac

SEQ ID NO: 46305 - DNA, 122 bp, Homo sapiens
tcctccactgtgagatatttcacagtttcacccgcagagggcaaccttattccaagttcccgagcgccctaggcctctttctcctccctgcctaactggtgaggtgggacttcaatgccttt

SEQ ID NO: 46306 - DNA, 122 bp, Homo sapiens
ctcccaggaccggcggctggagggaggctgctcccggggaacaaggacgcggcgcgggtgcgtctgggagagaccgggggagcctccaggagggaccctgcccgggaggacgaggcctcctg

SEQ ID NO: 46307 - DNA, 122 bp, Homo sapiens
ttacgcaaaatttattcgggaaggagaaagaaagggcatgcgagttcagaacctgtctcacgcctctaaaacttccaggccaccttcagtacaaagaatggggggaatgtccgggcgagcca

SEQ ID NO: 46308 - DNA, 122 bp, Homo sapiens
ggcccgctggctctgctctccctcagtttattcctactttgtttaaaattcgggaagtgccgggggaggggcaagacattaatcgctgcacttgtgcaaacggagtgccagctgatttatgg

SEQ ID NO: 46309 - DNA, 122 bp, Homo sapiens
cgtggtgttttaaaaccagctgagactcagttgccaacatttacaaactgggagatttcacgcaggaatccagattcctgatttctcatgagaactcagtgggtctggtgacattggatctg

SEQ ID NO: 46310 - DNA, 122 bp, Homo sapiens
tgcggttgctggtcccgagtccggaggaccagaaagtgagaccagcgacaacgctgggggcggcttgggggctgtgacccggcgtcaaacggtagacttcctgctcagtactcaccccagcc

SEQ ID NO: 46311 - DNA, 122 bp, Homo sapiens
ggttcctctttcctcgctcaagatggcgctgctcgcgaagcgttcttggcgttgggcggccgcagcggctgctttcgaaaagcgccagcacaatgagataccatctcacaccagctagaatg

SEQ ID NO: 46312 - DNA, 122 bp, Homo sapiens
ggacggaagtgggtgttggaggctttaaggtagctttaaattcgtgttgtcctgggagctcgcccttttcggctggagtcgggctttacggcgccggatggctctggacgtgaagtctcggg

SEQ ID NO: 46313 - DNA, 122 bp, Homo sapiens
agggagaggaggggttggagaggcagggaccccgtccgcctggacactcgggagtgaaggcgtgacaggcctcagccggccgtccctcctcgcgcctctgccccgggggacgcacgaggacc

SEQ ID NO: 46314 - DNA, 122 bp, Homo sapiens
agagccagagtttaccatatcccaaatagagcaaacagctaagtgaaggtacattgacctcgttgatcatgatttaaagattcgtattggaatagaacagcatccagtcttatccaagttta

SEQ ID NO: 46315 - DNA, 122 bp, Homo sapiens
agagaacacatacaatttttcccactgaaatcagtgataattatgagaatttgccctaagcggttttcaggaactacctaccttcctcagaagggaaagactgcagttatctctcattgtgt

SEQ ID NO: 46316 - DNA, 122 bp, Homo sapiens
ttatataatgtggatctctgggaagcatggtgccaaaaccaaggtgtgtgctagggtggacgccaacaccgttgaacctggtgctctggcctggccgggcctctgggcacgctccatgctcc

SEQ ID NO: 46317 - DNA, 122 bp, Homo sapiens
tgtcccttttgtgagacagctggtgacccctgctggcacatctgtgtcccagccgtgaggcggccgctccctgtccatgccggcagtgcaccgtgcccacgggaagctcggtgtgggggttt

SEQ ID NO: 46318 - DNA, 122 bp, Homo sapiens
ctggcatcagtccacacccctctaacaccttcgcccatgccctcctggcccctctcctggcgggcccttccctcatgggacacactggatgagtgaaggaacctatctgtggccttttgggg

SEQ ID NO: 46319 - DNA, 122 bp, Homo sapiens
gaggcggtccctccgggttcctcacccggatgggtgaggctttccgatcactcctaggggcggggcttctggcaactccctgtcgctccggtctgtcggctctgggtacctcgcgatctgac

SEQ ID NO: 46320 - DNA, 122 bp, Homo sapiens
cctttagaaagccttgctgggaaggtggtttggtggggaccaggttctggaaggacaggtcggcagggtagcctggagtggaaacacccagcaatcagcccacacgcggagcggagtggagg

SEQ ID NO: 46321 - DNA, 122 bp, Homo sapiens
acccgaggagtgagtatggcttttctttgggtccccgcagtaggggctcgtgtccggcagcgtgtctcattgcctgtgctgtcttacagatcgtgacgtctgcatccacagatctccaggat

SEQ ID NO: 46322 - DNA, 122 bp, Homo sapiens
ctgggcttcaatttctttatatgcacaaagggtatatttggaagaacagatctcacattgcgggggatgagggtttaccccctgagaagaggaaagtgtcattaattggagcacctactgca

SEQ ID NO: 46323 - DNA, 122 bp, Homo sapiens
tatttcttaatttccattaacctctttctcccataaaagcaaaatatatataagcaaatacgctatcttcttagcactccaaggacagtacagggaaataaaaccctaaatatccctcctct

SEQ ID NO: 46324 - DNA, 122 bp, Homo sapiens
ggcgcgaccgctctcggctttggggaccggatggaggagcggcgtgtcggcctcgggggacggttcccccgacctcagacggctctggggcgagggagggcgcgcggaggctcgcggggacc

SEQ ID NO: 46325 - DNA, 122 bp, Homo sapiens
tcacaggggaagcacaaacattttctaatttaagtgaaaccactagtgtcagcagacaaacgtgtgagctgaacttgacatccttttcttcaactgctcccttctcaaatattttcaaacta

SEQ ID NO: 46326 - DNA, 122 bp, Homo sapiens
cagccctcccccccgacaggggaaggccccttcccgggtgtcccaggccagaggccgtcgcgtccctcccacggccgaggctccacacctcccggaccgactccgggccagggtccgcctgc

SEQ ID NO: 46327 - DNA, 122 bp, Homo sapiens
cacgccccgcggccgggcgggaaaagcgcttccacctctttgggccgttacctcaaaaggcgcgtgcgcaaagcgaaggccggccgggcggggaagagaaatggcgaggcaggagtgcgggg

SEQ ID NO: 46328 - DNA, 122 bp, Homo sapiens
agccccactgtagttttttaaatgagccacatttaccttggggaagagcccctccccccccgccatcataatattgtgaatgtaaagagagattggttcacaatgagaatgtacagtaggct

SEQ ID NO: 46329 - DNA, 122 bp, Homo sapiens
ctctattgaacacggggatcatgtggtgaaagtaagaaactctgtagctctgggccagtgcgggagagcctagcttgagattgatctgctaaaaacaaaaggtttcatttttgagggttgga

SEQ ID NO: 46330 - DNA, 122 bp, Homo sapiens
gccactgttgttcttgtccagggaaacaccggtggccaacccagatcggatacaatggtgcggctctggactgagcctccaaccacattagccatgggcagcattgttgctgccgctgctgt

SEQ ID NO: 46331 - DNA, 122 bp, Homo sapiens
tcacttctaaccctggtcaattttacaggcaaagaaacaccactggaggcaatgaagggccgttctcacaattacatggttcacagcagagctgggatgaaaactcggatctaatatgaggg

SEQ ID NO: 46332 - DNA, 122 bp, Homo sapiens
acagaaatagagcccagattgttccaaacagtttctccttatctcaggatgctgtgttctcggcacattctatagctattccgaaaattacaagtgagatggcggaaagagctgggccagcc

SEQ ID NO: 46333 - DNA, 122 bp, Homo sapiens
gtctttggatattctggcaaagggggctgcagctctaggctccagctaaagggtctgggacggagtgggccagaaagccgccaaactgaggattcccccctcccccaagccggagccctagg

SEQ ID NO: 46334 - DNA, 122 bp, Homo sapiens
gaggctggagctctgtgctcccttagcaggggtagaatctgaattcaaagaagaaatggacgctcagatttgtagtccattataaggatcttggatttagttctgaaagaaatgggatatca

SEQ ID NO: 46335 - DNA, 122 bp, Homo sapiens
ccttgcaaggttgttctgttgaaacactgtccagagaacactgattgaacccctaccatgcgccaaactccggaggaggtgaaagacgctgacgctgtcctttttttttttttttttgagac

SEQ ID NO: 46336 - DNA, 122 bp, Homo sapiens
cccccacccagtgcagcagtgcgggcgggcgtgagcctcggtgcaccaggaggcacttcccgcgggaggcgctgggctcgcgctaattggggcggggggggggggcggcgggggaggaggga

SEQ ID NO: 46337 - DNA, 122 bp, Homo sapiens
taggcagggtccaggtttcgtcacagtctcctctgtccaatccctgtgcctggcgccgggcgcggctaccaatcagacggctgaaaccgcgttgggttgcatcatgtgcccctggcttggtg

SEQ ID NO: 46338 - DNA, 122 bp, Homo sapiens
gcggctaatttttgtaattttagtagagatggggtttcaccatgttggccaggctggtctcgaactcctaacctcaggtggtccaccagccttggccgcccaaagtgttgggattataggcg

SEQ ID NO: 46339 - DNA, 122 bp, Homo sapiens
actagaattcaaccttaccttccagttcgagagtagtttagtctgtagggtccaaactgccgcagattcaagtcaaagtgctgggaaagagaagagtgaaaaaaaagagtgccctgcagtaa

SEQ ID NO: 46340 - DNA, 122 bp, Homo sapiens
ggaacagaaaaccagctgtcagcgacagcgaggtggtgccccagagagggctgcctcattcgcctggctgcagggtccgaggtcgtcttggtagcatttggcaggaatttatttaggaagca

SEQ ID NO: 46341 - DNA, 122 bp, Homo sapiens
attgttactcagaatcagggtgaccgtgcggttgggcagagtatctgggggcaggacctgcgcgagctccaggatgctgcacaccaccttgccctcggcggcgcccgccgccctgccagccc

SEQ ID NO: 46342 - DNA, 122 bp, Homo sapiens
gagacctttaatttcatgcctcatgaccaaaaaacaacctgctcagaaccgtttggggttcgcccttttctctaagttcatctacttcaccaaacaatttttccacaaggtgcttctctggc

SEQ ID NO: 46343 - DNA, 122 bp, Homo sapiens
tttttctcacaaaaaagtgctagcttgtgtaatgatttttcagatgaaatgaaagcaggacgaggctgtcagccctgaatacttgtgacttttagactaaagtccttggcatcagccagcac

SEQ ID NO: 46344 - DNA, 122 bp, Homo sapiens
gcttttgttttatctccattactcccttcagttgccactggcgacaccactactcgcccacgcttcttactggaggaggcccgaccctccgtagaatccccgcagagccggcctgtaacccc

SEQ ID NO: 46345 - DNA, 122 bp, Homo sapiens
caagcatgaaccactccggccgacctttgtaatttttgaacaaaggaccctgcattgcaccggccccacaaattacgtgtgtgcaggattaagggaaaccagcaaggggtggtatagcacca

SEQ ID NO: 46346 - DNA, 122 bp, Homo sapiens
ccgtctcccctgctccggcgctcatgtttccagccgtgtgcactcaggtctcccggtatgcgtgtctgtaggcacctgtgtacgtgagtctctgtgttttaaaagaaaagtgatcagtttca

SEQ ID NO: 46347 - DNA, 122 bp, Homo sapiens
ctgtgccgtactgtgccaggcacctggacggacctggcttctccctgtgcctctgaagggcggacggcgttgtgtctgcgcagtcctgcaggcgggagaactggagtgctgctgtcttcatt

SEQ ID NO: 46348 - DNA, 122 bp, Homo sapiens
agtgtttggccagcaaacttggtgagtaaatggactagaactaatcctgtagctaaacagcgagggctttagaaaaggaaacacctcacttgcctaatagctcccagggaggggtgagatat

SEQ ID NO: 46349 - DNA, 122 bp, Homo sapiens
aaaaaatgcacatgagaacaatggagcctcagcactatctcccacaatttgcccacatgtcggacatgtccgacagtcaaaggtacaatcctcaagaaaaatcaatgaatttaacaaaaatt

SEQ ID NO: 46350 - DNA, 122 bp, Homo sapiens
cctctctgtgcggtactttcctccttagtaaaatgagggtcatactagtgcctgtgtcagcgttggcgtgagaattcttcttattactttttttttagagacaaggtattgctctgtcaccc

SEQ ID NO: 46351 - DNA, 122 bp, Homo sapiens
acctcgtgtcacaaacgactccaggaaccagttccttaacaacaaaccttgtgccacaaacggccccaggaacccaaactaccaaactgtgaatcacaaatgtccaccccttcccccaccat

SEQ ID NO: 46352 - DNA, 122 bp, Homo sapiens
gaaactttcagactctttacaagagtggccgtaccattttaccttcccatcagcaatgttcgagggttcagatttatccacattttttttcttattttcttttctttctttttttttttttt

SEQ ID NO: 46353 - DNA, 122 bp, Homo sapiens
acccaccacatggcttctcacagtccctgacccccattcaccgctggcgaagatccctggcgatgcggtccactggctgcagtggccacttcttcacttggctctggaagccgcggtggtag

SEQ ID NO: 46354 - DNA, 122 bp, Homo sapiens
accaggagactctgtgggctctggccctgaggctcagacccaaaccctggctcagagctccgatggggttttgctgctgtggtgcagtggggaagcccgaggctgaaaagaggggtccctgc

SEQ ID NO: 46355 - DNA, 122 bp, Homo sapiens
aaatatggacagaggaagggagtttgtaaattgaagtatatgtcaatagctactttacagcgtcctcagagagatgaaataagatgttttatgtgcattagagacattcagcgggtgcctca

SEQ ID NO: 46356 - DNA, 122 bp, Homo sapiens
aaggcctcgccggcattcttcccctccactgggtcctttgaacctagtttggctgggactcgccttcaggcggcgcggaggatttcgaggccctgaggcgcggcccttaatttccggaagtg

SEQ ID NO: 46357 - DNA, 122 bp, Homo sapiens
aggcatggctgggtttttgtttgcttttccctcacactgtcttaacacaggcagggtccacgggtggccggccctctgtgagtctcgcctcccagggcggccttggtcagtcgcccgccgca

SEQ ID NO: 46358 - DNA, 122 bp, Homo sapiens
aaaccttctaatcatcacctgtctgaaaggggacctgttgtaactgactcagctgagattcgccaagcaggcacgctgagtgagtacagatacctggttagcaggtgaggatgctggggtga

SEQ ID NO: 46359 - DNA, 122 bp, Homo sapiens
gctgggcaactagtaagctcactgagcctcactgtgctccactataaaaccaggagagtgcgcagcagaggagagggtctgggtttcagaataagaagcaggttttcttcctgctcagcaaa

SEQ ID NO: 46360 - DNA, 122 bp, Homo sapiens
cgagaggcccacggagtcaggggtcgcatctgtcacagtcagctcccccaggcggggagacggtttggtgtctggggctggaaaagacagtgaggtgcatggagagtgggatggaggcaaag

SEQ ID NO: 46361 - DNA, 122 bp, Homo sapiens
caccctttgggaaggataggaccatcatctagggcgtctctcggtggactgtggctgggccgggctgaatgggcgggcggaggtctcgaggtcgtctcctggctctcgattgctcccatcac

SEQ ID NO: 46362 - DNA, 122 bp, Homo sapiens
ccccagctccagctgtgactcaggcaggcggagttggccttctggggcggcgggagggcgcgagggcgtggggatgttggcagcggggtctcttgaaagcgtttcgccttccgctgtcccgc

SEQ ID NO: 46363 - DNA, 122 bp, Homo sapiens
agctgcacgggtgttttgcgtgttgctgcgtcatcgccagtggccggtttgaatgagactcgtcgcaccgaagccgccgccaccaccgcgcctccgcctcggccgccgccgcagctgctcct

SEQ ID NO: 46364 - DNA, 122 bp, Homo sapiens
cgaccaccagcagtggatgggcctcagcgactcggtccgctcctgccgcctcatcccccacgtgagtgcagtcccacccgggcccttccgtgccctccagtcgcatcagtgatccacatgga

SEQ ID NO: 46365 - DNA, 122 bp, Homo sapiens
gcggtcgtcaggttcgcctcctccactacctaccggggagtttagggcctgacagaagcccgcccccgctggcgctcgtgcgcacgcgtggcgggctctcggcgcactgagcaggcgcggcc

SEQ ID NO: 46366 - DNA, 122 bp, Homo sapiens
aggcatccgtgccggggtcgggaggagccgggcacggcaattcccgggcggtctgggctccgaggtctatccaagcctctccagagaccggggttatctccaaaggcttcctaggtttacac

SEQ ID NO: 46367 - DNA, 122 bp, Homo sapiens
tataaaaggaggcagtggcccacagaggagcacagctgtgtttggctgcagggccaagagcgctgtcaagaagacccacacgcccccctccagcagctgaattcctgcagctcagcagccgc

SEQ ID NO: 46368 - DNA, 122 bp, Homo sapiens
gccgaagttaggggccacctgagagttgttggcccggtgggaagtgtcccttcctgagggcgctctcggcttctcagggcaagctgccttccacgcttggactttgagggcggttgtctgtc

SEQ ID NO: 46369 - DNA, 122 bp, Homo sapiens
cctcccgttgcggaaggcgctctccccgggcgcggttctggtgggcatgtcttccaagagcgatgcgagtgtcagtggttcccgaatcactttggaaattggcctttcactcgctgacttct

SEQ ID NO: 46370 - DNA, 122 bp, Homo sapiens
gagccaggaggtgtgggtgagagccccgaaggcaagaggatcccaggggctggcccagcacggagctggtagacagcgcgctcacaccagggagggctgcaccctcctttctcccgtctgtg

SEQ ID NO: 46371 - DNA, 122 bp, Homo sapiens
taaattctctacaatagacacttgaacctctgcagatctcgaagatgctaaaatggaccacgcggtcctgaccacccgcccccggcccctcaacaaactcacgctatttctcagttcctgca

SEQ ID NO: 46372 - DNA, 122 bp, Homo sapiens
ctcaagggtcagatgtaatcttccaacatctgactttcgcgtcacccatttaggaagagacgcggtccctttaaggccctggaaagggtctaagtgttggtttctgtggggaggccacgccc

SEQ ID NO: 46373 - DNA, 122 bp, Homo sapiens
aactggcaatgttgtcccctgaagccggctcgggcaccaagctgggtgcggtgggggccgcgctaggtccgggtgcgcaccgagcgctttggagagggtcaggttcagcaccgcgaacagcg

SEQ ID NO: 46374 - DNA, 122 bp, Homo sapiens
caaggctgacgtgggacgacgtgggacgccgtgggccgcgagcacgccccggcactactgcggctaagtttggcctttcctggttgccgtcctcccctacaggctgtgcgccgtagcggctg

SEQ ID NO: 46375 - DNA, 122 bp, Homo sapiens
aacatgtataatgttagatcttggaacgactcactgctgccatcttttgcctcctgcttccgatagttcctatataaaggaatattctgaatcctcaaattcactatgagactagaacatta

SEQ ID NO: 46376 - DNA, 122 bp, Homo sapiens
ggacggtgggcgtaggacgtgcagacctgaagagttaagagcttgctcatggcagggcctcgagagcgccacgactacgtgtcccagaaagccgtgcgcccgggttgtccttccggctagct

SEQ ID NO: 46377 - DNA, 122 bp, Homo sapiens
ctgtgttcacccaccgcgggaaggacctgtgactgtgaccacgcagagagtgtgttcgcccgccacgggaaggatccgtgagtgtgatcatgcaggcagtgtgttcacccaccgcgggaagg

SEQ ID NO: 46378 - DNA, 122 bp, Homo sapiens
tctcaagcctggccacaaagaccccacctgatttgctgacctccgccacaccctgggagacggcccttgaccaaccttgtgttccagtcggtgggaaacactggtttttcctcaacgccacg

SEQ ID NO: 46379 - DNA, 122 bp, Homo sapiens
atgagaatagtgtgccttggcctgcaagatggggatgggatgaaggaagtgggacacttccgagactgtcaaggaagagctaggttgagggtgtccttgtctgtctagtcaacctaaaatga

SEQ ID NO: 46380 - DNA, 122 bp, Homo sapiens
catagaatagataaaaacattgatttaccttaaatgctaaccttttgccaccagttgcttcgaactgaaactatggacgctgtctcctgcatctaggaaaactggtccctcccaagccacct

SEQ ID NO: 46381 - DNA, 122 bp, Homo sapiens
aaaatgttagcaggctcgctaccaacagacgtagctgaaaggatgcataatttttttccacgttgacagaaatcacggtgaatccccaggtcaaaaggatgtagacacggcaaaggaacatg

SEQ ID NO: 46382 - DNA, 122 bp, Homo sapiens
catgaatgagatcatgtcaacttcctctgcttacatagtaatgctggccttctttcctttcggaaaaacaagtcatccatgcaccagagttcagggctgcattgtaaaatgtttccgaactc

SEQ ID NO: 46383 - DNA, 122 bp, Homo sapiens
gtcccaggagttccgccagctgccgggtttgaggtcctgagtccttctccaagcagccaacgctacccacaggtgagagctccctttaaaaactaatcttctgatgtgtgagccagtgcctg

SEQ ID NO: 46384 - DNA, 122 bp, Homo sapiens
gtcagaacacttccactttcagttgtgaaaaaaaaaattaaaaccaggaagtgaagtccccgagcacgttagaaagcctgacatggcctgactcgggacagctcagagcagggcagaactgg

SEQ ID NO: 46385 - DNA, 122 bp, Homo sapiens
gtgatttcctcagggaagccttcatcctttgccccttccaccagatcaggtcacttgttacgttataccctcacggacttgtcacgtgggtgtttatcggtatggctgtcgaattagcatct

SEQ ID NO: 46386 - DNA, 122 bp, Homo sapiens
cttgttctaagaattattctagagggccagaaagaacaggtattgctccacccgagtaaacgctgactcaactctgcagggctggcgcgctctttcctcacctcacccctcctgccaggcac

SEQ ID NO: 46387 - DNA, 122 bp, Homo sapiens
cacgccgttcagccaagcaacccggacctgagagtgcacagccaggactagcttagggggcgaggggttggtctttgggaaaccaagcgctcaggacagaggtggaaagtgggtcccgggag

SEQ ID NO: 46388 - DNA, 122 bp, Homo sapiens
caggcacaccccggccgtcccagagcagtgcccacacagtgcgacgtcccccccaacagccgcttcgattgcgcccctgacaaggccatcacccaggaacagtgcgaggcccgcggctgttg

SEQ ID NO: 46389 - DNA, 122 bp, Homo sapiens
tggcggcgtcagcaagaagttcgtgtgggaggcggcgcgcgactacgggctccaggtgggcggggcgcggggcggggctgggccccaggtcctggcccgagtggtggaggcgggaccccggg

SEQ ID NO: 46390 - DNA, 122 bp, Homo sapiens
ctgaatgggaatcagaatagaaatgttcagaaattagcgggggggcagatctgtggttggcgagtgctgtggactcccgtggtttcacaggggcatctgagaagtgcatccaaggcactgga

SEQ ID NO: 46391 - DNA, 122 bp, Homo sapiens
gtgagcacatccaggtcctgctggatgtttgcatggggaggggctttccccgggttgggtcgatgatgagaagcttctgttttcttgaagagaggtgatgacttaaaaatcatgctcaatag

SEQ ID NO: 46392 - DNA, 122 bp, Homo sapiens
tattgaatacatgaggccatactcttctagtctctctgcttctcatgctaggaactgaaccgaccagcctatactttaaggcttgttatttcactgactaaggaaaggctacttaagagggc

SEQ ID NO: 46393 - DNA, 122 bp, Homo sapiens
cgtacatcttctccgtgtcccgcttctgcacaatgcacacctggagggcacagggctgttcggcaggacgcctgaggacgcctggggacacgtggggacacctggaaatgcatggggatgcc

SEQ ID NO: 46394 - DNA, 122 bp, Homo sapiens
ttatttgtttattttgtaacttacactttcctcccactcctgatgttaaacatgcagcttcgcccaagtgtgaacttcagagagtattccatcagttactctccctctgtggtctgcacaat

SEQ ID NO: 46395 - DNA, 122 bp, Homo sapiens
cggcctccgtgcgcccaacgaccatgactcccaaccggcctccagtttccaactgtttctcgaacagggaagccgccatgacacagctgactacgcccttggtcacaggggacctgagatcc

SEQ ID NO: 46396 - DNA, 122 bp, Homo sapiens
aagccccgccgctcccacacccaggatggggccacatgggcactaaaaggcgggcaggagcgcccagtctcgagatggctggctcgcctttccagtccgggccctcggggtgcccgtgtgaa

SEQ ID NO: 46397 - DNA, 122 bp, Homo sapiens
aggcctggtgtgagttttgtttatgcaagtgcagcataaaaggaacaaatctaccagcaccggggctgttgccactgagtccttttgcatacatttttcaaatgataactcactctacccac

SEQ ID NO: 46398 - DNA, 122 bp, Homo sapiens
gaggccccgccactcacccgcgtctagaacggcttggggacaggaaagcgcagccgcgcacgggtttcctctcacgttggcgcaccactccgttacgctcctgaccaggctgttctagctgc

SEQ ID NO: 46399 - DNA, 122 bp, Homo sapiens
tgcccgaagttaccatcctcaaactattaagccattggaaaatgctagaggcttaatactcgtgtatagacagaccctcattcccctgaatatttgctatttggggttctgggtttttagct

SEQ ID NO: 46400 - DNA, 122 bp, Homo sapiens
tgagaaaccacaaagcaagctgctggaggtctgagtgcctgccctcccttcctgcacaaacggggccctttctaccctgaggatggcatctggtggtcaggaagatgcctggacagcagttc

SEQ ID NO: 46401 - DNA, 122 bp, Homo sapiens
acccacagacgtgtctgtagcatcctctgtcacactgggacccgtactggcagcaggagccgtagggaggactgggacacctggaagccaggaattggtgagtgtgcggggctgagggtccc

SEQ ID NO: 46402 - DNA, 122 bp, Homo sapiens
cagctccccagaagaggggagacaggagttgaaaactataaacacaccataatattttgacgggttagtttgaaatcacagtaactatgaattcatgctggttgaacacaaatttggagact

SEQ ID NO: 46403 - DNA, 122 bp, Homo sapiens
catgtcacatcatgagagcgccacgtcacatcatgagagcgccacgtcacatcatgagagcgccatgtcacgtcatgagagcaccatgtcacatcatgagagcaccacgctacatcatgaga

SEQ ID NO: 46404 - DNA, 122 bp, Homo sapiens
atattacccttttcagttgattagaacaccaggatgtcagaatcagaaaattcatggttacggccgggctcagtggctcacgcctgtaatcctagcactttgggaggccgaagtgagcagat

SEQ ID NO: 46405 - DNA, 122 bp, Homo sapiens
atgtgttgtccttgaatcgagtaggcatctagaggtggtccctccaggtcacgggtgcctcgggggtagcccacagccttgctgcaacgatcttggccgcccgcgcagatgactggggactt

SEQ ID NO: 46406 - DNA, 122 bp, Homo sapiens
cttcctgaaccgagggcaggatgaagatggtgaggaagaagaggagaggggagaggccaccgtccaggtctcttgcctctatagaccacagatgactcaagccatgccagaaccaagcagcc

SEQ ID NO: 46407 - DNA, 122 bp, Homo sapiens
ggcctctgggtggatggggatcaggggcgcagggtggctctctccttgaactcccctctccgtgctcagctactcttctgcaccggggtttccctgggccctccattcccaagaagggggcc

SEQ ID NO: 46408 - DNA, 122 bp, Homo sapiens
gttttgcttcaggtgttttgagaccttttacccgtggtgaaatattgtattgtgaaactgcgacaccatcatgataggggccgtgctgttttgtctttgggtcttcattggctaccacaatg

SEQ ID NO: 46409 - DNA, 122 bp, Homo sapiens
cagggccaggcccaggtcacccagtgggtcaggggaggagcaggcagtgctccgttctcccgatgccttggcctctgcccctaccgcctgatgtgggtgtcactgcagccgcaggaccctga

SEQ ID NO: 46410 - DNA, 122 bp, Homo sapiens
caggctggagtgcaatggtgcgatctcggctcactgcaacctccccctcccgggttcaagcgattctcctgcctccgcaggaggcctccggagtagctaggcctctggagtagtaggctgag

SEQ ID NO: 46411 - DNA, 122 bp, Homo sapiens
cattccttgagctcacagcgatggcgtgtgtgtctgtgtgagtctgtgtgtctctctgtgcgtgtctgtgtgagtccgtgtgtctctccatgagtgtctgtgcgagtctgtgtgtctctccg

SEQ ID NO: 46412 - DNA, 122 bp, Homo sapiens
gcaggctaacggggcaggccttgccctcgcgtggtacgacggggaacagcaggagcagggcgagagccagacggagtggacagggatgggtgggctgcccaggtggtgcctgcagtgacaag

SEQ ID NO: 46413 - DNA, 122 bp, Homo sapiens
cccgtccccttttcagagacctgagctccgcctccctggacgcgaggcaggctgggaagtcggccgccgtaaagatggcggcaaattgaaaaagttggagctgctcccgcgcgcgctcccgc

SEQ ID NO: 46414 - DNA, 122 bp, Homo sapiens
gtttgaatgttgctgaaggacgctggttttcaaacggtaaggaatctcctgataaaggcacgaatcttggtgtgcagataagccagcgattcttgcttctggctagttctacgttgttcctg

SEQ ID NO: 46415 - DNA, 122 bp, Homo sapiens
tcctctgttgaagcaagaagacaaactgtatggtggagaaagaagtgggaaggatctgcgcgggtgagtaaatgacaggcaggccacagtttttcagtcagcattgagtcctctgaagtgct

SEQ ID NO: 46416 - DNA, 122 bp, Homo sapiens
acgtgctgccggtgtgcggccagcaagtctctcgagcagagcaggtgaaagcaacgccgtcgcttcgcctcttcaaactcctgcactcgatggcggctttttaggagacatctgtgccttgc

SEQ ID NO: 46417 - DNA, 122 bp, Homo sapiens
actgcttgctgggtcccctactagcatgtagtcacagtagaccaggtactttgtcggcttcgttcactgcagcattctagcacctggcatggagcaagtgctcagcaaatccttgccagatg

SEQ ID NO: 46418 - DNA, 122 bp, Homo sapiens
aactcatcattactatgcaaacaaaggatcttgctaacataatcccataccagtaacacacgatttattccaaaccaattactttaattaatagcattcctaatgcaaggattttttttcca

SEQ ID NO: 46419 - DNA, 122 bp, Homo sapiens
attagacaatctcagaaaggttttatgacttgtgggtgcctttgtggtacttcacatgagcgggaggtcttaagactatggaccccttgggagaccagtgtctaattctactacttcctcct

SEQ ID NO: 46420 - DNA, 122 bp, Homo sapiens
catttctcctgaccgagcgcgggtaggactagcgactggcctctgggggtggtactggaacggagtatgtcgatcattcagaaaaattttgagtgcctgctaagtgcctcgtcttgtgttga

SEQ ID NO: 46421 - DNA, 122 bp, Homo sapiens
aggggtcagggagttccctttccaagtcaaagaaaggggtgacagacacacctggaaaatcgggtcactcccacccgaatattgcacctttcggaccagcttaaaaaacagcgcaccacgag

SEQ ID NO: 46422 - DNA, 122 bp, Homo sapiens
gtggccctgccctgctatccagccaggtgtttgcagtggtactacagctcctgcagaccccggtgcccgtagggcggatgctccagtgacttcctggccctacagttgtagcttgttttttg

SEQ ID NO: 46423 - DNA, 122 bp, Homo sapiens
cagggctcgggacctgcagcccgccatgcccgagcctcctccccgccgtgggctacgcgccgcccgagcctcttgaagtcagtgagaccaagaacccgccaattccggacacactattagaa

SEQ ID NO: 46424 - DNA, 122 bp, Homo sapiens
agcactttggggtattcaaaaataaatcacaactgaaaaattagagcctctcatccaagacgtcacaaaccaatggaattttaaaatgtagactgattgttgctacaggaaaggagttttga

SEQ ID NO: 46425 - DNA, 122 bp, Homo sapiens
aagaagactctcaaccagggtgacttctaggcgtcctcccggagctaccggggacactggcgttattgcccgcaacactgagatagggaatgctcgagaaacagaagcaggttttggggttt

SEQ ID NO: 46426 - DNA, 122 bp, Homo sapiens
tttccggctccaaaatggagggaggttggagaaaagacacagggaactcaggcctggacccgttgcagggtccgccctcagcagcctggggtcactgactgtgcccgcctcccgctgccttg

SEQ ID NO: 46427 - DNA, 122 bp, Homo sapiens
ccgcgactaccaagacatctgaaacgctcacccgggggcgggggcggagggggcgggggacgaaatctcccgctgtccagggagccgcccccggtcttcccctgggtcctaaacaccctgca

SEQ ID NO: 46428 - DNA, 122 bp, Homo sapiens
tcaggaagcttgctctgtccagctcggaatcactccccctctccagggtgtgtgcttacacgcctctcagtcagcgcaaaaatccgccaaactcaggtcagcctaacaggtttccttatata

SEQ ID NO: 46429 - DNA, 122 bp, Homo sapiens
tgcctggcccgcccggggatcttgcattgctgcgaccagtgatcctctctccatgtctgtcgctggccttgcccggcccgccaggggatcttgcatgctgcgaccagggatcctctctccat

SEQ ID NO: 46430 - DNA, 122 bp, Homo sapiens
gccgggaggccggggctgggcgggggaaatgccctcgccggtgggggcgctccaagggcgcgtcggccggatttcgccagcctggcttttgtttacatcctgcatctcagttgttttgttcc

SEQ ID NO: 46431 - DNA, 122 bp, Homo sapiens
aactagaatcttagaatgccagcgctggaatccagagggcaggggctgttttatccatctcgtatccacagggtgcagcacacagtataagctcaatcagtatatgttgcatgagtgaatgg

SEQ ID NO: 46432 - DNA, 122 bp, Homo sapiens
gacgggcggatgattccttccggacacacctctcaatgtgcacgtgctgctcctgccaggcggatgacatcaggaatgctcatcaacttgagggcgaagaaatgcttggcggtcttctcctt

SEQ ID NO: 46433 - DNA, 122 bp, Homo sapiens
ggagacgccaccttttggtcggggcgggtgaagagaggaggcctttggttaaggacaccgcgggaaacagaaaaggaaagcgaattctctctgacaccaagaccaacgctctagcaaagctc

SEQ ID NO: 46434 - DNA, 122 bp, Homo sapiens
ggaccttggagcccactgactgccgggaattggagtcacagagggaggaaggccgaaccgcgggagcctacagatcccagaagacaccgcgctaccgaggactgcagtctggagttggagcc

SEQ ID NO: 46435 - DNA, 122 bp, Homo sapiens
caagtgcatggtttgactcttgacttggggttttatctgttggcatgcttgtgaggtctacgtctcttctcccctgattcttccctgaggtgggctgtctgcatgcacagtggtctgccagc

SEQ ID NO: 46436 - DNA, 122 bp, Homo sapiens
ttttaaaatggcggcttgacttccccgcctcccagaaagccaaaaacaaatatgcggacccgagattttccccagcgacaacctagagctcagatttgaggatgagacagatgccgggggca

SEQ ID NO: 46437 - DNA, 122 bp, Homo sapiens
ggtttcaccacgttgcctaagctattttcgaactcctgggctcaagccatctgcccaccccggcctctgaaagtgctggggttatctgcgtgaatcaccgcacccggccaaacaagatattt

SEQ ID NO: 46438 - DNA, 122 bp, Homo sapiens
tcttaaatcttcccattcatttgtagacagcagtgggcctttttcttcctctgctctgcacgaccttctagcccaagtgctagtatcaccttttcctaaagacttttaagacaaactgtgac

SEQ ID NO: 46439 - DNA, 122 bp, Homo sapiens
ctgtcagggcagcagggaggatgaccaagccagccttcctcctgctgcttccagactagtcgggagtgttgagttaggaaccagggttggttctccagtgctgtctgcagggcctggctctg

SEQ ID NO: 46440 - DNA, 122 bp, Homo sapiens
gaagcacagctacttttgaaatcttcagaatgtgcagcagctctaattcattccacaattcgtcattcagggaatgtcagcaaatggctaccgtctgtacagtccttttgcctctactcaac

SEQ ID NO: 46441 - DNA, 122 bp, Homo sapiens
gccaattcggcctctactctggaatgccggcggggacaggtggtgcggacgggcgctcctcgctccggttgccgcggcggctcgaactcccggactgcacacgcaggcagtgccattccccc

SEQ ID NO: 46442 - DNA, 122 bp, Homo sapiens
cgttaactccagcctttaaaaccatctttatttcactgtggctagtatcacactggtttgcgtcgaggtctgtcttcccgtggaccggtagaggctaaaagaaaggcccaggtcagcctcat

SEQ ID NO: 46443 - DNA, 122 bp, Homo sapiens
gccccactgggcacctctcacaccaatgttggggacacagccaagacaggccccagtactcgggacctcagagacacagaggacgagggaggcgccccgaaggcatggcaccgggcaccagg

SEQ ID NO: 46444 - DNA, 122 bp, Homo sapiens
gcaattgtgagggtttattggggttatccacataagaccctaaaagaatgcctgtctgaccgggcccggtggctcacgcctgtaatcccagcattttgggaggctgaggcgggtggatcacc

SEQ ID NO: 46445 - DNA, 122 bp, Homo sapiens
aaaaaaaaaaagtccttgatcaagagggcttcgggtgtttccatctgtggagtgaggggacgggttaggtgaattctaggggcgcttccacctcacattatgaaaggtcctgagagtcagat

SEQ ID NO: 46446 - DNA, 122 bp, Homo sapiens
gcccgcacaagcccttggagcacaacttggtcagcgcagaatttggttcctatcagcttccgtagcgtccctaacgacttccgcctctggcgggccgcagtggtggaggaacttccggcagc

SEQ ID NO: 46447 - DNA, 122 bp, Homo sapiens
ggactaggaagagccagggcaacagaacaggctggccccggcagggactacttcgggtgccgccatgacaggctgtggccggaagaagaggctgggcgtcgccatgacagagagggactgga

SEQ ID NO: 46448 - DNA, 122 bp, Homo sapiens
agcagcaggcgcaggtggtgctcccgggcacgatgaggcacaatgatggctgttcgggagcggggctcacaacctgcagggcggtaccggccccctggttctacccggggattccgctccac

SEQ ID NO: 46449 - DNA, 122 bp, Homo sapiens
ataggggtagcaggaggcggcggactgacctaaagcagctggttctttgtgcgcatagaccgtaagggggaatgatctggacttggtcagctgcctcggggcctaggcagggatctgctcat

SEQ ID NO: 46450 - DNA, 122 bp, Homo sapiens
acaggactcctccccagccgctcctgtatatgacgtcaccgccgtaagaccacaggacaccgccccagccgcgcctgtagatgacgtcaccatcgtaagaccacaggacccttcccagccgc

SEQ ID NO: 46451 - DNA, 122 bp, Homo sapiens
cttcctacatctaccgcctgatgagtgaactctaccatcctgatgatcatgttttatgaccgaccacacgtgtcctaagcagattgcttaggcagatacagaatgaagaggagacttgagtg

SEQ ID NO: 46452 - DNA, 122 bp, Homo sapiens
agccacaccgtccgtggtgacgcacacgtccagcaggcgaggactgaatggcgttcctcacgaggaagggaaggcccagcgatgcctgtcaacacggaggagtctaaaagcagtgacgggga

SEQ ID NO: 46453 - DNA, 122 bp, Homo sapiens
agcacctaccgcctgcctgtggcttgcttgctccccccactgcctggctccctactgccacgtccctgctaggcacaagggcccctatgggacctgcccgggaagggtcagggcctctggga

SEQ ID NO: 46454 - DNA, 122 bp, Homo sapiens
tacgacaaggaactgccattagagccttaggcgaattcaccaactgttcccacttctcaccggtgtcaccttcccaccgttcccactcctcactggcgttaccttccctccgttcccacttc

SEQ ID NO: 46455 - DNA, 122 bp, Homo sapiens
ctctcccaagccagccacttaacatttctgcctcaaaattacctcttgaatccattgggtcgcctcaagttcccaccaccacaagagtcgtggcagcttttaggtcctcatgcctgagttac

SEQ ID NO: 46456 - DNA, 122 bp, Homo sapiens
gggcgggtcttagcttcactcggcaaccctctgcaaaagagcaggccctcccaggagcgccgagtcctgtctgcagtttgctgattttcccaccaggggccgctgcgcatgggcgacgaagc

SEQ ID NO: 46457 - DNA, 122 bp, Homo sapiens
tttctcttatattcccttcctctttgaataggtttccaagccagaaatctgcatgtcatccgattcctcctctgacagccgtaccaattaccaagtcctgggagttttgaaatacattggaa

SEQ ID NO: 46458 - DNA, 122 bp, Homo sapiens
ctcctggatattttccaataccacgatagaaaggttattagtacagcacccagaggtcttcggagcaaagctgttaaagaagtggggtccatttgagccccaactttgccttccttaggtcc

SEQ ID NO: 46459 - DNA, 122 bp, Homo sapiens
ggctcaggccgccgtgcttggcctggtctccgaaaatgagctctttggagctaccataagcgccgaggccttctacccggacctggggcccgagctttcaggggcagccatgggagagcccg

SEQ ID NO: 46460 - DNA, 122 bp, Homo sapiens
tatttctccatgcatcggcccagggatgaaccggtggattgaagcaaggggttgtacattcgttttttgcatgggcaaaaattgcatttggttaaccagatggaaaaataatcaccggtgct

SEQ ID NO: 46461 - DNA, 122 bp, Homo sapiens
gtgaactgctgttgggtccagtgtggagggacctgaagtgccaggatgcatgctctgctgcgagacagtcaaaccccaagcccacctcaggccccatggttacgctgggtgcatctcccgca

SEQ ID NO: 46462 - DNA, 122 bp, Homo sapiens
gatggctctctattgtcatcccgggaagagggcccgaggaccacaccacctgtgtggatgcggggcggcctggctggcggaggaccaggcacgtgaccacgggagagctcttcatgagtcta

SEQ ID NO: 46463 - DNA, 122 bp, Homo sapiens
gcgggtcttacccccggtcctccgcgtctccagtcctcgcacctggaaccccaacgtccccgagagtccccgaatccccgctcccaggctacctaagaggatgagcggtgctccgacggccg

SEQ ID NO: 46464 - DNA, 122 bp, Homo sapiens
ttattcattaggatgcttttggctgtgtagaataaaaaccctcactcagactgacttaaacgacaagagcttttattttcttagataataggaagcctagagctgggccagactccagcatt

SEQ ID NO: 46465 - DNA, 122 bp, Homo sapiens
gggggtttggggtaaggggcggggacgctgagcgcaccgagcagggcgcgggctgctgggcggggcgacctgggatcccagagcctggcggcgcgagccgggcacccgggccgacgaaaagg

SEQ ID NO: 46466 - DNA, 122 bp, Homo sapiens
tgggaaagaacacgtgggagcagtaatgtcaagtgacacttaaacccttagacgccgattcgttataacgcgaggaaatctagaagaaaaagcaggtaccatcagcgaattctaaaatctcc

SEQ ID NO: 46467 - DNA, 122 bp, Homo sapiens
caccgtgaggatgggcttggagttcctcttggacccggggcgcggtcgctaagccagaagcggagtcgcgggcgcggggcggggcctggacccgggcctggacccggagggcgggtccctgg

SEQ ID NO: 46468 - DNA, 122 bp, Homo sapiens
tgaaacatgtataaagaagagagaatggcgtgcacgccccgtgtctctctcaggagtgtgcgagttttcgtgtgcagcctgtttcatccctgcaccgcacaggagggacacacagtgccatc

SEQ ID NO: 46469 - DNA, 122 bp, Homo sapiens
tagggcagtgacggagctgagacagggcctgtgacaactgagagttctctggagtccacacggctccttgcccagcttctggtggaggttgagcttagtgacccaggatttcgtctgtgtcc

SEQ ID NO: 46470 - DNA, 122 bp, Homo sapiens
acagcccctttagagttgtgagcctttaaaagggacaggaattacttattcggggagctccgtttctaggacgtgagtcggccgacgctcccaactgaataaagctcttaccttccacaatc

SEQ ID NO: 46471 - DNA, 122 bp, Homo sapiens
ctcttcaggtcacatgtgttctccagcccctgcctagcctatcccacagatgggaatgtgcgctgcttgggggccttgttaccgcccccggagatggctgaactgctgcggtaaaatagtgc

SEQ ID NO: 46472 - DNA, 122 bp, Homo sapiens
aggaccctcccgcgccccgcgaggctccggggtctcgggcttccgccttcttgctgccctcgttcttgccagggccgcggttagtccctgctggccaccccactgcgaccatgttcgttccc

SEQ ID NO: 46473 - DNA, 122 bp, Homo sapiens
cagctctgccgggtctacttcctcacccgcggcaggcgcctctcatctcaggttgaaatccgccttccccactcgcggcaggcgcctctcatctcaggttgaaatccgccttcccagaggcc

SEQ ID NO: 46474 - DNA, 122 bp, Homo sapiens
cagattccactaatcagaaatgtaaggcataaagtagactaggatttatctttttatcaacgatgatgaaagatggcccaaggaaataaatgacataaacaagattaaagggggatgttttc

SEQ ID NO: 46475 - DNA, 122 bp, Homo sapiens
agtgggtggggaggaagctgccggggttggagccaaccctagcaacagcaggtttgcacacgcctagcagaggaagtcccgggcctaagcgtgcagcggtcacaagagcttttggcagtgct

SEQ ID NO: 46476 - DNA, 122 bp, Homo sapiens
ggtctctccgtccgcaactgtcctcctagtaccgggtatcccgcaggcggggctgcggaacgcacgtcccctgcgccgtgacgtcacaatagcgactcactggacccagcccttagcaacgg

SEQ ID NO: 46477 - DNA, 122 bp, Homo sapiens
gcgcggggctccaggttccgcccagggactaactccaggtctgcgcgcgtccaacgagcacggctctcaaccggcctcctggcgcccaacgaccatggcttccaaccggcctccgtgcgccc

SEQ ID NO: 46478 - DNA, 122 bp, Homo sapiens
ccccttgcccccgtggcttcctgggacagccgccttcagtgctgtatttagtgcagtgcccggcccgacccgcgggggtgccacagccttttgggatgggggtgagcgtgcaatggaggctg

SEQ ID NO: 46479 - DNA, 122 bp, Homo sapiens
ggaggccaaggtggaagaaccatttgaggcaaggaccatttgagactagcctggacaacacggtgagatcttgtctctacaaaaataaaaaaaaaaattagccaggtgtggtggcatgtgcc

SEQ ID NO: 46480 - DNA, 122 bp, Homo sapiens
ctcagactttagatgcatacctggctttgttcctatgattctgactgctcttacgtacctcgtataagtggaatcgtacagtatttatctttgtgtgattggtttatctcacattagcataa

SEQ ID NO: 46481 - DNA, 122 bp, Homo sapiens
aaaaaaaaaaaagaagatgatcatagacaccaccctgaaaactgtgcttctgcccctttgcgtgtatctgggactctgttaatctctctttctttacacctctgtgtctccatttgtgtctt

SEQ ID NO: 46482 - DNA, 122 bp, Homo sapiens
tatgaagttccctctttcccccattcagatttgggcagtgccacgacaactcaagaaatgcgcaagcgctccacggactaagcccggcggactaagcccggcagtgtcggagtcaggtggag

SEQ ID NO: 46483 - DNA, 122 bp, Homo sapiens
gttgatccacccgcctcggcctcccaaagtgctggagaaaagcgcgggtggcggcaggcacggaaaggacgccatgaaggcctcgggtgcactaaaagagtacaaggtggtggtctctcttt

SEQ ID NO: 46484 - DNA, 122 bp, Homo sapiens
tcctgtcaaaagggaaatcccaaacagtccaggtcccacagctcagaaatgtggtgacaccggccccagctctcacctgtccttcccaatttttagggaaagtgcataaagacggccctacc

SEQ ID NO: 46485 - DNA, 122 bp, Homo sapiens
gtgatggcggggagaggcctggctgtctacgggcagattgcttgggctttcacagaagcccgctgttagagcagattcccggccttgggtctctctgctccagctggacgccctgagcctcg

SEQ ID NO: 46486 - DNA, 122 bp, Homo sapiens
gatcacttttcacgggctctggcagctgcctttgtgtgcagttggggggtctgtgtgcagcgtgaagcggagcagaactggcggggagtgcgctcaatggcaaggggccagggcaggggcct

SEQ ID NO: 46487 - DNA, 122 bp, Homo sapiens
gccaggaactgggactcgagctttcagattctcaactagccttggcaaaacagctgtaggcggcctccctgacaacagacactcagccctccccaccctggctctccttgcatttccccatg

SEQ ID NO: 46488 - DNA, 122 bp, Homo sapiens
gtgggtactcgagtccccgccacctgccggacttcgccaactccccggatttcctgtcctcgggccctgacactcccaaggaaagctctgaattgcgctcgctgtttggtttttgcttgttg

SEQ ID NO: 46489 - DNA, 122 bp, Homo sapiens
cgggaaggtatcggcctctcatttctccttccctcgtcctgggtcccggggtcctgggtacgtttggctagcctgctctgggtaaggacaagaagccccaagctcttctcttcgtattgcag

SEQ ID NO: 46490 - DNA, 122 bp, Homo sapiens
atgcagcccctggttctaggacacccaagagttccttcgctgcctgatggaccagctgcacgaggagctcaaggagccggtggtggccacggtggcgctgacggaggctcgggactcagatt

SEQ ID NO: 46491 - DNA, 122 bp, Homo sapiens
tgcaacttcatgcatttgaagcccatttccagagagctgcggcgggagctgtgtgggcagcgtcgcaagaagcatagatcaagatcccgatcccgggagcgtcattctcggtctggagaccg

SEQ ID NO: 46492 - DNA, 122 bp, Homo sapiens
tagtgagacacccatctctacaaaaaaatttaagaataagccccacatggtggtgtgctccgcttgtagttctagttactgaactcccacctcggcaacagagcgagaccgtcttaaaaaaa

SEQ ID NO: 46493 - DNA, 122 bp, Homo sapiens
agcttgcagaacatgccctccaaagccttgcccgctgccaccaggtcatacttgtactggcggaagctactgatgcgacgcagggttagggcctccacatggtagtgcaggaagaggccacg

SEQ ID NO: 46494 - DNA, 122 bp, Homo sapiens
gggaggccgggagcagcgccccggaactggcgcctcacagacagcgcggggcggccgccacggtggcgggaaggccaagcgctggccctgggttgttcttcacccataaccccttcacctgt

SEQ ID NO: 46495 - DNA, 122 bp, Homo sapiens
gaggaatgcagaggagtaacattggtcactggcaggtaagtgtgaagggacgactcaccacgtcaagcaagcagtcaccctgcccaatgcctgctccagaaccttaggaaaaaggcagaggt

SEQ ID NO: 46496 - DNA, 122 bp, Homo sapiens
gaggtggccggtattctggatcactgcgtgtcttggggagcttgggattccgcagcttggcggccgagagcctttgtttgcctttttgagacagggtttccctctctcgcccaggctggagc

SEQ ID NO: 46497 - DNA, 122 bp, Homo sapiens
atcatgccccctcgtgggaaccacaattgaggtctctccacaggctgtatttttaggtgacgcacccacatctaaggcagccaggatggtcggaaagtgtctgccagcagactggggatccc

SEQ ID NO: 46498 - DNA, 122 bp, Homo sapiens
gtgaggagaagaccaccacgactcttatcgagcccattcgtcttggaggcatctcttccacggttcgtgggctcttgccttaaccctcagaacttcccagagccctccctctgttctctggc

SEQ ID NO: 46499 - DNA, 122 bp, Homo sapiens
cgctccatgtcacgtgaacgcaagaggagaactcgatccaaatctcgggagaaacgccatcgccacaggtcccgctccagcagccgtagccgcagccgtagccaccagagaagtcggcacag

SEQ ID NO: 46500 - DNA, 122 bp, Homo sapiens
atcacacgcgtccctaaaccttgtcactcgagcattcttgtctcccaaactctgatggtccgcagtgggtactgggctccctgggccctgggaggaagacggaggagtttgggtgaaagatc

SEQ ID NO: 46501 - DNA, 122 bp, Homo sapiens
tgttctgatatggagctacaaggggcccaagaggacctgggcatttccctctctagtccccggaggaaccatgaaaccaggccaggaagcaaggctaagggcaggagcagcatctgtctcca

SEQ ID NO: 46502 - DNA, 122 bp, Homo sapiens
gggccagcagctgctgtgctggatttctggggtcttagctgtcccagcggggcagggttccggacctgcacccggccatggccatgcctgagcctccccctgctccccccgctccccccacc

SEQ ID NO: 46503 - DNA, 122 bp, Homo sapiens
ccttgtcattgatccttgcatttaaggataatcatttcaaagcacatatgtaatcctcctcgttttttcctttaaaaatatttgtcttcctttacctctctgaatatgcacatagtttacca

SEQ ID NO: 46504 - DNA, 122 bp, Homo sapiens
cggccggagccccgtcctcggcgagtcctcgcccgctgccgccacctcccagtcttgccgcgcccgcctcccaggaacaggagaccatacttcttaataacactttttgtttaaagaaaata

SEQ ID NO: 46505 - DNA, 122 bp, Homo sapiens
tgtcaatgctcaggatcctctgccttgtgatatctggagataagtcaacgccttgcaggacgcttacatgctcgggcagtacctctctcagcaacacctccatgcactggtatacaaagtcc

SEQ ID NO: 46506 - DNA, 122 bp, Homo sapiens
gttacacagaggaaggtggcagagccggaagtggcagaatccagtgcacgggcgggatgccgagtgtgtcgccaaactccaccactttagtcgggggcgtggtggtggctgcgctatctgct

SEQ ID NO: 46507 - DNA, 122 bp, Homo sapiens
gggttctgaattaggtcacagatgcagacgtttgctcgaagtggctgccgagctcagacccggcgagatggtggcaggcctccacccacagcctcccttggtcaccagaaccacggaaccga

SEQ ID NO: 46508 - DNA, 122 bp, Homo sapiens
cggccactgcagggacccagggcagtcctgggcccacatgggccagatggtcaatggggccgaggtgttcgggggcccaggggagtgagaaccccctccaccccaatctacatctcccctgg

SEQ ID NO: 46509 - DNA, 122 bp, Homo sapiens
gtttcaggagcctgtgggcgtggctagtccgggggcggggcctatggtttgttcgaatgacgtcacacttgccgcagcgtataaggcgctacgcagttctggagtgaaataggttcgaatcc

SEQ ID NO: 46510 - DNA, 122 bp, Homo sapiens
gggtcctaaccatcttgtcctaacctacaagtctagggctttagtagctcccacatttgtcgactttataatgcaaagccctgtcctgagaatttccaaagtctcataaacctggagcacat

SEQ ID NO: 46511 - DNA, 122 bp, Homo sapiens
agaagaggtgggacagggtggctgagtgtgtggggaccagagaagaggcaggagtgagtgcgtgctgagaacactcgtgggtggggtgatacccccaaatacttaaccatgggccctgaccc

SEQ ID NO: 46512 - DNA, 122 bp, Homo sapiens
aaggctgggaaaaataatgtttcagtggacagcttgccaaatcctagaatacagggattccgtactaaaaaggaaaggaaggattatactggttagagacctaaaatttttgcaaccgtaag

SEQ ID NO: 46513 - DNA, 122 bp, Homo sapiens
ggccagagacaagcattcaaaacaaaatgaaaaaggtggagaaatggatttccaaagagtcgcaggtccaacagcctcagagatgacaaagtcttcacaggtaccactgaagccactaccca

SEQ ID NO: 46514 - DNA, 122 bp, Homo sapiens
tcaagggaagtataaaatgagattctgggattagcaagcatctgtgcgcgtgagggggcccgaagcttaagcttcattagcttcacgtctcaaactgcctctgcaatgttcttcatgagatt

SEQ ID NO: 46515 - DNA, 122 bp, Homo sapiens
ttctaaggaatattttctctttcctttctgctctattttaagtttctgctaacttgtccccgaccccacaactgctcacgaccttcgtgaaggtcaacctttcctaccgcgtggagtgagtt

SEQ ID NO: 46516 - DNA, 122 bp, Homo sapiens
cacgcggctgtgctggggctctgaatacagtactgcaaggctttagatgtggttgttttacgaaatactaaagtagtattttattccttaaggcatccaacagagaaatagagggaagccca

SEQ ID NO: 46517 - DNA, 122 bp, Homo sapiens
agagcaaataattcctagtttttacactttttctagtttttacacaatttttagtgagtacgatacctctacacaattaactcccagtaaacttaatgggaaggttcaagttcctttagaag

SEQ ID NO: 46518 - DNA, 122 bp, Homo sapiens
acccacctcatagggttattggaagggttagctgagtaaaagcacgttgagtatttaacacggtgctagaaagacagaaatcaactaaaataatagttattaatactagtaatatttttcga

SEQ ID NO: 46519 - DNA, 122 bp, Homo sapiens
gaaccttgttgtttaggtatcatttcaggtatggcgggcttttcttccccggactgtgaacgtacatccgtgttctcgtttgaagagttacagtggaggcagagaagacaaaccctcccctc

SEQ ID NO: 46520 - DNA, 122 bp, Homo sapiens
agagtctctaacgcaaagtaatgactacctacttaatataatccagtatttatggccgggcgcagtggctcacgcctgtaatcccagcactttgggagactgaggtgggtggattacttgag

SEQ ID NO: 46521 - DNA, 122 bp, Homo sapiens
tgagtggatggaagacttggttagcacagaacttctccatcaaaataaaaatagcctccacgaaggaaggatacctagaatttaaatccactgctttgctcccaggggcagtgctgtggact

SEQ ID NO: 46522 - DNA, 122 bp, Homo sapiens
ggcgcctgacgcggaggcagaggcagacaggaacacgacattaagggccgccggacaaaacgtgcctcgctgcgggactgctctacaccccctgcccgcagttccccgcaccgggacctgca

SEQ ID NO: 46523 - DNA, 122 bp, Homo sapiens
acccccaggacaggctgcggcccctcccccgtcctggaggttccccagccccacttaccgcgtaatgcgccaataaaccaatgaacgaagcagcgtccacctggtctctgttgtccgtgggc

SEQ ID NO: 46524 - DNA, 122 bp, Homo sapiens
tcatctttccgctcttagctgggagtgctccgcctagtcacttttcttaaggtggctcgtcgaggcctgacttcttccccgaaatcacgtccctagacagcctcctattttaccactaactt

SEQ ID NO: 46525 - DNA, 122 bp, Homo sapiens
gatgtaatccaaagcagtcagagagttttcctttggtaggagtgggacatggaataagcacggattcatgcatagctgtagtcttgtgagatggaattctggcttgaccagtggaaattctg

SEQ ID NO: 46526 - DNA, 122 bp, Homo sapiens
caagggtgtcagaccacgcagggacgcctgccttggtccttcacccttagcggcaagtcccgctttcctagggggcaaggaccccccaatcgcttatttccgcaccccaacctcttatctct

SEQ ID NO: 46527 - DNA, 122 bp, Homo sapiens
tgttcacttcactgtattattataattggatcaatgaaataatttatacgtatacatgtacgtatatgaaggggatgaagtattgtccaattataaaataagtggtgaggcaagatgtatta

SEQ ID NO: 46528 - DNA, 122 bp, Homo sapiens
gcagaggaggagagggcttcccagaggccggcctggctgggctgcagcagattctcaaggcgggaccgtggccgaggcctcgaaaagggcgacccggaggcagagccggcagggacagagcc

SEQ ID NO: 46529 - DNA, 122 bp, Homo sapiens
gagtggccgaaagggagccgcctacctcccttgccaaatccctggggctgatagagatggcgggcggaaggccggccaataaggctcccggaaccgggctgggcgggaccccgggggtgcct

SEQ ID NO: 46530 - DNA, 122 bp, Homo sapiens
atggatctcaggttgttggtttagcgtccctgataagcataaatgatgtttactacgtggcgttcaggaaaaggatgagaacagcaaacaggcaaaggagttctttctccagcccacccact

SEQ ID NO: 46531 - DNA, 122 bp, Homo sapiens
tgctgcaatcacctaaggaggtatttctcagaaccatcctgtgattaagagaggcatgatcgtacagtcatcatctccctgaaagctcagtcaaccctgtgcagtgctactgccacactccc

SEQ ID NO: 46532 - DNA, 122 bp, Homo sapiens
tggaggggaggagcaacaggcacaagcctgacacagcggcccgggagaagcagggagccccgcagccagcagagcagataattgcacaggaaccacgccctgcacattcatccctaacctga

SEQ ID NO: 46533 - DNA, 122 bp, Homo sapiens
tccaaatcggaaccagcaagtcttagggctggcacgcatctgggcctctagctgagaacccggactctcaggcacctcagtgcccctgccccagggcagaggcccaccccgtgggttggtgc

SEQ ID NO: 46534 - DNA, 122 bp, Homo sapiens
acgtaccccagcactgtgctgaatgcattgaaatcactgcccagggctccgcgagctgcacggcccggctttgtcaatttcattgctgttgatgccaattaggggtgacgctgtccctcccg

SEQ ID NO: 46535 - DNA, 122 bp, Homo sapiens
ggggcatcttaatctgggaaaagatcggaatctcttgggacgctaatctgagacccgggtcggaggtgtagagtaggggtgtgtgagcaggaactcggacctgagttacagagtaagaggga

SEQ ID NO: 46536 - DNA, 122 bp, Homo sapiens
agggcctggaaaagacccaggccagggtccataatttaacacacgggaggctctgaagaacgtacgttcctctccaaaacccacctagccagtggctgatgtggatcatttatgccctccac

SEQ ID NO: 46537 - DNA, 122 bp, Homo sapiens
ttttctagtttgttttcagaaatggaggtattgtggaggcattttctctaccttctgaagcgttagaatcctatgatctcatgacttgatttaattgcaagagaaatgaactaggaatctag

SEQ ID NO: 46538 - DNA, 122 bp, Homo sapiens
cggtttacatggaacagaaatggcagggccaggatttaaacctagatctgcctggctccccgcccggctccatcccctgccctcccccaacacacatagtatttaccgggtgctaccctgtt

SEQ ID NO: 46539 - DNA, 122 bp, Homo sapiens
ctgtcctcatcctgagctggcgcaagccttccggccgggtcctcgggcgcacgcggctcccgccccgcctgctgagcgcggcctgccccgcccgcacctctgtctaggcctctgggggcgcc

SEQ ID NO: 46540 - DNA, 122 bp, Homo sapiens
gtcgctcacgctgggagctgtagaccggagctgttcctattcggccatcttggctcctcccgatctcctgacctcagaccatagatcctaagtgtgcagtaggctttcgcgtctaggtttgt

SEQ ID NO: 46541 - DNA, 122 bp, Homo sapiens
cgcagctacgcccagcccgcgtccatcccggaccatcctgttgaaggcagtcccctggcacgcagggctgggagctcttagctgaggatggaaccgactgcaccaggagccgctgggaggaa

SEQ ID NO: 46542 - DNA, 122 bp, Homo sapiens
tccctcctccggggttaggagtggcccaggagaggcggcggtgacacgcgctctgcggcccggccgtgtccctctcggcgccccgggaccccgcgtgtggagaaggagaggcccggcggagg

SEQ ID NO: 46543 - DNA, 122 bp, Homo sapiens
tgtgtgtagagatgaggttttaccattttgcccaggctgggtctcaaacttcacccgcctcggcctcccaaagtactaggattataggcgtaagccactgcacctggcccagccattgtttt

SEQ ID NO: 46544 - DNA, 122 bp, Homo sapiens
gaaactaggagaacaacaacagaaagctgtgtttgtcttttttctctcaaatatatctcccgtatgagatttcaggtccccatgttttcaccaagcaatctgctatgtcagccaacccaaca

SEQ ID NO: 46545 - DNA, 122 bp, Homo sapiens
ccgccccgtccagccccgttccgccccgccgcaggctgggatccaaggggcgtgatccgacggctgccttgtttgggcatgctccaccccgccctgctccggggctcgtcacgtgacagcgg

SEQ ID NO: 46546 - DNA, 122 bp, Homo sapiens
ccgggagcgggctccggggaaggggtgcgggtctgggcgccggagcggggagcggggccgcgtccctctcagcgccagctctacttgagccccacgagccgctgtccccctggcgcgctcgg

SEQ ID NO: 46547 - DNA, 122 bp, Homo sapiens
cgccggcgtccgggctgcagagccgtgaacaggcgctgctacctcgctgcttttgggtgacgatgaggtgacctgaggacacagaaggccccacaattacctgagcggagagcctcagcgta

SEQ ID NO: 46548 - DNA, 122 bp, Homo sapiens
ggggtgggtggcgggggcggcccggttccgggactctttggaatgggctcatccatggaccggatgtgacgagaaagggaagcagcaaggtgacttgcattgtttgggttgagcaggtgaag

SEQ ID NO: 46549 - DNA, 122 bp, Homo sapiens
ccgggagctgaggcccgggcagcgccttacggggtcaggctttgcggccgagaattcatccgagcagtcatcttcacctgcgggggctcccggtggagacgatcagacatcctggcccacga

SEQ ID NO: 46550 - DNA, 122 bp, Homo sapiens
cctctttctccggcaaagtcttccctttctttgccgtctggaaaaaaggttcctgccttacgctgaaaggctgaagtggggcgcgcgaagggcggcgaagcggagacggcggctctccggga

SEQ ID NO: 46551 - DNA, 122 bp, Homo sapiens
ggcgccacccaaccgcgccgggaggggggacagcaggcatcaccaccgccccttccacgccgtcccgcctcgatgtaccgggattctgtcaagtgcctgagaacatgttcaaaaagctgctc

SEQ ID NO: 46552 - DNA, 122 bp, Homo sapiens
cagccgacttagcacgaagagtgcgatggaagggctgcttttggcaaaccgtctcaaccccgggcgacggcgggcacgggaggtcagggagcgctggaggaaacctgcactggggtagaaat

SEQ ID NO: 46553 - DNA, 122 bp, Homo sapiens
ctgctcttagcagctgactacggcggcccgcgcggctcactccccgcagttcgtcccgtgcgcgaccggagcctggagtttgcaaagtgagtagctagggcctcagaactataatcagagaa

SEQ ID NO: 46554 - DNA, 122 bp, Homo sapiens
gcctgcgagctaagcccagcgtgtgcagaggtggtgtggcgctgcggcaacacgcagcttcgggtgggcaagcgcttccagatggtggccgaggggcccgtgcgctcactcactgtgttggg

SEQ ID NO: 46555 - DNA, 122 bp, Homo sapiens
atctcaaaaatgaaatgtcaggaattgcagccttttgttagagtctgatgcaggagatctcgaacacgttttccagagccgtccccagctccaggtgctcttagatcagcgaggccaccttg

SEQ ID NO: 46556 - DNA, 122 bp, Homo sapiens
ctttcagggatcacaatcctgtactggctgctaactaatttctgcaaacagatttttccacgtattttctccagtttttccagttgtttttaaagagagggcaagtctagttttagccacaa

SEQ ID NO: 46557 - DNA, 122 bp, Homo sapiens
caggcataacagtaacttttttattggatagttgtgaggattaaagtaagagcatgtcaacgtgtagaaagattatatacgttctacagttcagaaacattggcgtgtagattataaatatt

SEQ ID NO: 46558 - DNA, 122 bp, Homo sapiens
gcagctgagcgcaggcccttctgggtctcagggacattcgaggcgggcgggcggacagggcggtgctcgagcccacgtgaccaccagaaccccgcaccctccccggcccggccccgccccgc

SEQ ID NO: 46559 - DNA, 122 bp, Homo sapiens
ccattggagagacagcgcagagcagggggcggcttgctcgctgggggcgggggacgatggcgagaggggagggggagcgagttcgcatctctccttttcctggttagactctgttcaaccac

SEQ ID NO: 46560 - DNA, 122 bp, Homo sapiens
agccccgggccgaggtggctcctcgtggggctcggcggactcagacagcggccatgacagcggcgtgaacgtgggggaggagcggccacccacgggcccggccctgccctccccctacagca

SEQ ID NO: 46561 - DNA, 122 bp, Homo sapiens
tggcctggagagcgggtcccaggagccgcaggccagctccaccaggctccgcgggcatcccgcaccggaggccgctaactctcgcccactgttgttctttttgctgaaataactggctgttt

SEQ ID NO: 46562 - DNA, 122 bp, Homo sapiens
gacttgaacttggcggtgtcactcagtagccaggaaagacggagaaattgatagagccttcgaggagtcccttcgaagcccacgtaagactttgttttagaaacatggagagaagtagtggc

SEQ ID NO: 46563 - DNA, 122 bp, Homo sapiens
ttatttgtggaactagctgatcatctgtcttttccgttattgtaactagatgacatgctccgggaggtggacatgtttgttttgtgtaccactggattccagggaactctcaaagagcctgg

SEQ ID NO: 46564 - DNA, 122 bp, Homo sapiens
agtcctactcatctcagtaaccttcagaggatctggcacatagaaagagctggaatcaaacgtgtttcataaataacaaactggaagagtgggtaaacttgggacccaggagctggttcaaa

SEQ ID NO: 46565 - DNA, 122 bp, Homo sapiens
ttcgcttcggtccctgatcccagtcggggtggggctaagctgaccaccctgctgtggctccgcctctttctcctgtatttccctcacttgtgtcccatccccgggaggctctcgcttgcact

SEQ ID NO: 46566 - DNA, 122 bp, Homo sapiens
tgaggatcagggtgctgagcaggagtcccgtctcgaggatggggcacccacctgctaacccgtcccgccctctgtctccagtctgtagatggacggcagatccgagtagaccaggcaggcaa

SEQ ID NO: 46567 - DNA, 122 bp, Homo sapiens
agagggcagttgggattgccagatggatactcatggggatgtgtggccaggtaatcaaatcgcattgtccaaaagggacatggaggccatgggctaggaccaggcttttggccatactcaag

SEQ ID NO: 46568 - DNA, 122 bp, Homo sapiens
cttagcgatttacctgtccttggctcatttaaaacagttggagtgttggtggttttgtaacgaactggtcagagcaccttccgtgagaagggccttttcccccagttcaccggggctcccct

SEQ ID NO: 46569 - DNA, 122 bp, Homo sapiens
ccgtcgcagaggggtgaggaaatcaactcaccgagctctggtcgccgacaagaggagccccggacgccggctctcgccctgcccgaggctgcaaagttgtggactcggcccggctggctcgc

SEQ ID NO: 46570 - DNA, 122 bp, Homo sapiens
gcagggctcagtgagcaggacccctgcaatgtgctgtgagcactgtggggagatagggcccgggctgaggctggaagccaggactgggccgagtgacctgggggacagggtggtgaggtcca

SEQ ID NO: 46571 - DNA, 122 bp, Homo sapiens
cggggcagcggcgccggcatgtcgtctggcaccatgaagttcaatggctatttgagggtccgcatcggtgaggcagtggggctgcagcccacccgctggtccctgcgccactcgctcttcaa

SEQ ID NO: 46572 - DNA, 122 bp, Homo sapiens
acgcacacacataaacacacgcgtgtgcgcacacacacaaccacaaatatcgtgagaccacgcagccctgggtttgagaaccaaaaagccaagaaatggtgcgtgggctcagcagaaatgac

SEQ ID NO: 46573 - DNA, 122 bp, Homo sapiens
tggggtggcctccgcgcggtctctggcggagtcggggaatcggatcaaggcgagaggatccggcagggaaggagcttcggggccgggggttgggccgcacatttacgtgcgcgaagcggagt

SEQ ID NO: 46574 - DNA, 122 bp, Homo sapiens
acacggtgacttctaaatctagacgtctggaaggggccatgagagccagacaactgggcccgaaccccgcccgggagccagggtttgcaaggggctaaaccggctggggagcctccctctcg

SEQ ID NO: 46575 - DNA, 122 bp, Homo sapiens
agagaagccaatcagcttcgccgcgatcccggcactacgatcccggcactacagtcccggcgcaaccacccgcactcagattctccccaaacgccaaggatgggggtcatggctccccgaac

SEQ ID NO: 46576 - DNA, 122 bp, Homo sapiens
ccagagctctcaggatcctacagaaggggcggacaactcttcccttccaaactggaaagtcggcctaggtttccgaggataatgaaaggcacagcgttttttgacctcgacttcaggcctga

SEQ ID NO: 46577 - DNA, 122 bp, Homo sapiens
tctttctgggggcggaggggggagggggtggggagggggcccacaagcacgcccagcccccgccgaattcttttagcttcgtaattggaacctttgacctgatctaaagtggactttgtagc

SEQ ID NO: 46578 - DNA, 122 bp, Homo sapiens
acccagcgctaacacacaagacaaattaaagaaaggggcaaatcggaggaggggctaaggcgagggtccaggcatttcgggaaaagatcaaggacaaggagagttaagaaactgaccgtggg

SEQ ID NO: 46579 - DNA, 122 bp, Homo sapiens
aaatgtggttagggctctctctgaagcagacagcatcgggctacagaacattttctcaaacgctgcatgctggctgctcagagcggagcagttgtaggggaagtgtaagtgtgtatatcaca

SEQ ID NO: 46580 - DNA, 122 bp, Homo sapiens
cactgcgccctacgtgggcccatagcaatggtgtcaccaccgtatctggggtgatgtctacggggaagggctgggcaagaggtccgagaggtggtcggaaggtaataaggcaacagggggga

SEQ ID NO: 46581 - DNA, 122 bp, Homo sapiens
aattctgagtacctggccccagaatgtggtgatctgggctaggtcatctacctcggggtgcggtagctcatctggtctcagggattttaggtctgtagaagtgttattatccacagtcccag

SEQ ID NO: 46582 - DNA, 122 bp, Homo sapiens
cacttttaactttgtgttgataaaatactattttctaattcagatttttcaaaaaatgcccgttgggcatcaagtagcttttacagaatgaggtgttcttagcattattatgaagcaaggac

SEQ ID NO: 46583 - DNA, 122 bp, Homo sapiens
gggaaagtcactttttagataaggctctgaagccccaggtctagtttcaatccactaatgcggccagcggcgagcaggaggagggaggattggtccggcgggggcggggccagagcagggct

SEQ ID NO: 46584 - DNA, 122 bp, Homo sapiens
ccgcagcggtccggcgggcctgctgggtccgcagtggagtctctttgtccccctagaagccgagcagacggacgaggagctgcgggaggagatccacaaggtacccgtggtgcgcgggacga

SEQ ID NO: 46585 - DNA, 122 bp, Homo sapiens
gcgtctgtatgtgtgtgggggggtggggcggggttgggtctgaatctccagcgggggcagcggaacaaagggctggatgcccatcccaggaggtagattcatcagtgctccctatgcgagag

SEQ ID NO: 46586 - DNA, 122 bp, Homo sapiens
ccaggtggatggcccttctcatccttcaattggccaaaggaagttgtggaattttaaggacgttaaatatgcatggcagatgctgtcagtgccctgcccatatccccttagcattcactggt

SEQ ID NO: 46587 - DNA, 122 bp, Homo sapiens
cgtctgcttttgctgtgcaaaggtaagggtggaggccgctccactttcttcaaaaggccccgctctgggacttgtgaaattgtgctctcttaagctggtccttgcaaccccatggacgatat

SEQ ID NO: 46588 - DNA, 122 bp, Homo sapiens
actgccgcggcaggcagggctcgggcacctgtaggacagggcggtcagggcgctgggcaccggggcccctgagctagatgccccaccgcccgtgcctgacgcccggtggggcatctgtcagc

SEQ ID NO: 46589 - DNA, 122 bp, Homo sapiens
gccgcggaaaaatcctctgcctccgctggaaatcgatattaggccggcgcgggcgcgggacgtcggggccgcagccagtaggttgtgcacgtctcatcatttagctaatcgagtcgaaaagt

SEQ ID NO: 46590 - DNA, 122 bp, Homo sapiens
gaatttaggtccatttggtttgtcccggagtgcttgtcaacccgtcagagggcctgggaacggagcatcctgggaaagatagttcccagacgggcttcccgcgctgcttcccggcgccttcg

SEQ ID NO: 46591 - DNA, 122 bp, Homo sapiens
ggcgcggctgcttcccggccgtgccgacagtgccgcagagatcgctctggcgccccctggcggccacatgtggagcggtgggagctgctccagtacctgcttctccgccaccccatcgcggc

SEQ ID NO: 46592 - DNA, 122 bp, Homo sapiens
agggtccgcgagcgcggcgcagagcgcgggccgtgggaagtttctccggcgcgccccgtgcgcccccgccccccgcgcgcccccggcccatccccgtccctggagagctgtcgcttgcgccc

SEQ ID NO: 46593 - DNA, 122 bp, Homo sapiens
gagacgctcatgccgaggtttgctggatagctgcaggtgagcagaggcaagacagcctggcgtcagagctgggcccaaagaggccagagcaaccatgtctccagccagttgaaatgtcagtc

SEQ ID NO: 46594 - DNA, 122 bp, Homo sapiens
ccttcagccactccgactgcctgggaagtcccagcccgcgctctccggaacccggctcgccgtctcgccctggacatggaactacgcatctgagacctgctggacgttttgctggccgtttt

SEQ ID NO: 46595 - DNA, 122 bp, Homo sapiens
cccagcagggcagaccggaccggggacgggcacggtgaagggctgcagcctggggtctgacgtggcccctagtgctgtctcaggagaaggctctggaggacttgaggcatgctgggcctggt

SEQ ID NO: 46596 - DNA, 122 bp, Homo sapiens
taaaaatgtttagggtttctgtgcatcccactgagggtccccatcatctcagggggagcacgaggagttgtgaaaagtaacgcacaactggtcatcagaataattcattccctccaccttct

SEQ ID NO: 46597 - DNA, 122 bp, Homo sapiens
gcacccagggacacactgaagcccaggcctccagcacgcaagggctgctctgaagaaatacgggaggtcctcactggagggtctggggccacacggtgggtccggagacagaaacgaggaga

SEQ ID NO: 46598 - DNA, 122 bp, Homo sapiens
tgaggtggatgtcatcaggcctgggttggcatcctgttttttaccatggcaagtcatatgcgcccttaagcattcctgcttttggtccaagcttcctgcgtgggaatactgcggtcctcctt

SEQ ID NO: 46599 - DNA, 122 bp, Homo sapiens
actttggtccctttcctgctgcccttccccctgcctggcactatgagactggcctcagcccgccccatcgccatggttaccactccttggttactggtgggaggcggggcacagggcagatt

SEQ ID NO: 46600 - DNA, 122 bp, Homo sapiens
tctgggtcagaatgtatgtaattatcagaaagtagaaaatgcacatgatgatataaaaagcgagggttgattgaggcattcattccctcatgacttgtagaaccctgccatagctcagagac

SEQ ID NO: 46601 - DNA, 122 bp, Homo sapiens
ggctctcagcagcagggatttatttatttatgtttgcagtttaaaaggtgggggtgggggcgccgaggacatgtaggatctgctcacaaagcaccagctcaggtgttgtgtgcttttgtatt

SEQ ID NO: 46602 - DNA, 122 bp, Homo sapiens
ccacaggcaccacctaaggggcacgtcactaaccttcaaacacgggaccctcaaaccttccgacccctggtctagacacctaatccccgatgccccaagcccaggctaaatgtcctgtggga

SEQ ID NO: 46603 - DNA, 122 bp, Homo sapiens
aggcagggcggggctgcagacgtgggggcggagctgcgggcgcgaggcggggcggggctgcgggggtgggggcggggctacgtgcgtgggggcggggtggggctgcgggcccgaggagggac

SEQ ID NO: 46604 - DNA, 122 bp, Homo sapiens
cggtaggaagagtcagaggggtgaccagagagcccaacgcctggtgctcaagactttctccgaggtatgaacaagaaccaggcgtctgggccctttccgctcgccccatcgctcagccgccg

SEQ ID NO: 46605 - DNA, 122 bp, Homo sapiens
aatcaaagacaggaatcaagtatagccagccacctgtggaaagttcggagcttggggccccgatgtccttaaaaacaaaaaatgcggagggccagtgtttgaggccttggcgacattctaga

SEQ ID NO: 46606 - DNA, 122 bp, Homo sapiens
ccatcccagacctacaaaatcagaacgttccaaaatgtggcctcccaatctgtgctgtaacgagtcctccaggtaaacaaggaaagtttgtttccttgtttcctggtactgaggaaagtttg

SEQ ID NO: 46607 - DNA, 122 bp, Homo sapiens
aaactggtttcgcgcagtggatcccagacaggggttgcagctggagctgtttgccagtcccgcgccgtgcacccgcactcctcagcccttgggtggtcgatgggactgggcgctgtggagca

SEQ ID NO: 46608 - DNA, 122 bp, Homo sapiens
aaatagcagagttggttctgcctcacttcaccctgtgcagtgtctggcagcttctgctttcgatctgagtcacgcctggtgggggcaggacggggcagccagtgctggcagaggccactaga

SEQ ID NO: 46609 - DNA, 122 bp, Homo sapiens
ggaccgtgcgcagcggctggaggtgagtgaggggcgctggcctggcaggggtgcgggcaccgcgcgagcctcgccccttcccacctgcgctattcccggcgccgcccaggaggaggtggcac

SEQ ID NO: 46610 - DNA, 122 bp, Homo sapiens
cccgccccctctggcaccgcccacccgccagactaagccactcccccactcaccaggccccgcccctctacggaggccccgcctctagttcggcctgttttctcagtcccggcacccgccgc

SEQ ID NO: 46611 - DNA, 122 bp, Homo sapiens
gaagggtgccacggcggcggcagcagcgcacgggctggaaacctgggttcagccctccagcgcagacacacatcacgagtcagttaaagaaagcatcaggttgatgtgggaaattccaaata

SEQ ID NO: 46612 - DNA, 122 bp, Homo sapiens
agccaggggaagcctgttcctgaagtgtaaggaaagatcgggcttggagcctgggccagccgaggcaagggggtggcaggcagccagtgtcaattaaagataaaatttctcctccggtagtg

SEQ ID NO: 46613 - DNA, 122 bp, Homo sapiens
cccaataatctgcctggttagttgtctatttctttatcttccctgatagatcataagactcgtgtaaaaggaactattttattcagcgttgggttcccttctctgcttcacaactatttaat

SEQ ID NO: 46614 - DNA, 122 bp, Homo sapiens
agctcaggagcctgattaggtgcataaaatcgctgtagccagaagggacctccccgcccccgggccgcgccccgccccgccccctcctctggggcacaccccgccccgccgcccctccccct

SEQ ID NO: 46615 - DNA, 122 bp, Homo sapiens
ttcctgaggctcttccgcctggatttgtttattggcctcatagatgatgtttctgacgtgcgcccagagctcctcactcagagccccttcacacacgagctgaccctgcacactgctttgtg

SEQ ID NO: 46616 - DNA, 122 bp, Homo sapiens
ctggagtctccagagccatgagggaatgaactggtgtggtttggagcccctgctccttggcggccacaggatgtgaactcacctggagcctctgggcctcccccaggtgcaggtgggaccag

SEQ ID NO: 46617 - DNA, 122 bp, Homo sapiens
ggaggctgccgagagcgctcctggacttgggcgcacggaggcaccctgtcctgctcctggcgttcgcctgtccacatgtgtccacattcactggaacccggggcacagccgaccccggccag

SEQ ID NO: 46618 - DNA, 122 bp, Homo sapiens
tgacctggagatgctcacagggcaggagcgcatggccctggccaaccggaagcaggagtgcggcagtgcccactaccagtgggcggacttcatcctggccgccaactcctatgaccttgcca

SEQ ID NO: 46619 - DNA, 122 bp, Homo sapiens
ccttaactttaattaaatctacttaacatattcatgttccagggtttatagtatggaaatcgtaggggagccattctgcttaccgcagtctgccttctggtttccaaggattcatctctctc

SEQ ID NO: 46620 - DNA, 122 bp, Homo sapiens
ctgcggagttctcatactctgttacccagcttcctttgtatgagtgctgttgcgcacttccggtggaagcgctgaagcgagtgggtggagtttacggagccggtgggcggtaggcggtgcta

SEQ ID NO: 46621 - DNA, 122 bp, Homo sapiens
actctcttttcggactcagcccgcctgcacccaggtgattaaaaagctttattgctcacacgaagcctgtttggtagactctcttcacacgggcgagtgtgacatttggtgccgaagaccca

SEQ ID NO: 46622 - DNA, 122 bp, Homo sapiens
tcataagctgttctttataaatatttgttcttattattatcctctactcctagcaacaatcgtaagtctcattccaaactagtaatctaatttaaaattcagctttctccctattaaaatgc

SEQ ID NO: 46623 - DNA, 122 bp, Homo sapiens
ctctttcacatgaagcccgggccgggcggggtggcgggcgcgtgaatcctcgcagccggccgggtcctcctggcgctcctcggcacttctagccgctgcaaccccgaggcccgcgggaactg

SEQ ID NO: 46624 - DNA, 122 bp, Homo sapiens
ctagcctgggcaacacagtgaaacctgtccctaccaaaaaaaaacttaggaacagtaacacgtgcctgtagtctcagctactcagtaggctgaggtgggaggatcccttgagcccaggagtt

SEQ ID NO: 46625 - DNA, 122 bp, Homo sapiens
acgtgagcttggacacacccacactgggcggtctggaggctacgttagtgtggcgtcatccgagctgggcagccgttctgccttacagggttgggaccccggaagcttatcggcgcggttgc

SEQ ID NO: 46626 - DNA, 122 bp, Homo sapiens
tagtatcacacattctgacaaatctctttggaatcctcacttcattcaaagattcaagctcgcctggcagaccggtgggacaggccagcaggaatcctatttgccttagggcctgaatagct

SEQ ID NO: 46627 - DNA, 122 bp, Homo sapiens
ggcccgccctcctcccggtcttcggatccgagccggtcctcgggaaagagcctgccaccgcgtccccgcagccaccctctccgcgtgcccggccctctccagtggcgggggcacgtgggcgc

SEQ ID NO: 46628 - DNA, 122 bp, Homo sapiens
gtcaagttctctcgccgggcagctgaaaaaaacgtactctccacccacttaccgtccgtgcgagaggcagacccgaaagcccgggcttcctaacaaaacacacgttggaaaaccagacaaag

SEQ ID NO: 46629 - DNA, 122 bp, Homo sapiens
ttggctcctgggccccagctccgtgcagtcctggactggggctccaggtccaccagggggcgcccgctgcccaagctgggtatcgctgcggagaaaaggggcccagagtgattgttcctcag

SEQ ID NO: 46630 - DNA, 122 bp, Homo sapiens
cttttgtcaaattctcaaaggagactgtgacctaaataaaatattttttaaaaatggttacgagtccttgatctaattccagtatctagagaaaatgggagctatgtttggctcacacagta

SEQ ID NO: 46631 - DNA, 122 bp, Homo sapiens
ttccgtcctccgcgccttccgtcggtcggtccttgcttcctgcttcgcctccgcgcctcgcgctatgggacagagcccccgatccgccagcaccacctgaggatccagaaaccgccccagcg

SEQ ID NO: 46632 - DNA, 122 bp, Homo sapiens
gagagcggtgagtgacctgcttgccgttggcgcgccctcgggatactcgcccaaggagttcgccacccccgactacactcccgagctcgaagccggcaacctagcgcccatcttcccctgtt

SEQ ID NO: 46633 - DNA, 122 bp, Homo sapiens
actactctgcgccggccacagccggcgcgccgttgggggagggaaaaccgctgagtgccgcgcacagcgcctgcgccgccccgccccgcaacggcaaccccacccctgcgccagccccgccc

SEQ ID NO: 46634 - DNA, 122 bp, Homo sapiens
aataaaatcactgggattctttagtcccatctccaaacaacaaatgagagcaagacaaaacgctggcacaggaaaatgaagtctctttaaaagccctccaaatcagagacatgctgagaaga

SEQ ID NO: 46635 - DNA, 122 bp, Homo sapiens
gctcccggttcccggctggcttttgggactggtgtggatggaatcccagctgcaaggcggcggcgttttgagagcccatgcaaagcacggtagcaggtcagctgggggacacttaaggacgg

SEQ ID NO: 46636 - DNA, 122 bp, Homo sapiens
ggcgcgttcggtgatctctcttcccagagagaaagtggcagtggacttccatcagatgatcgcttgctgcgtgaacccattgataaaccaatacgccggaatccgacttcaaatgacaaaac

SEQ ID NO: 46637 - DNA, 122 bp, Homo sapiens
cacccggatttggctcggtccgccagcaacccagctccttgctaaattcccagccctaagcgcaggggcctttacccagccttcccagtgggtcctgcttttccatagccgacacccttctt

SEQ ID NO: 46638 - DNA, 122 bp, Homo sapiens
tgggctgctccggcccgcagcccgaggggagcggcgggcccgggccggggccagggctcgcggggagaccccagaccaccacctcactcttcgctgctacgtgcaagcggaccgtgcggatc

SEQ ID NO: 46639 - DNA, 122 bp, Homo sapiens
agctgggggcggggaggcgggcaaggaggggcagaaagttccggaagcctctgcatcagccgccccgttcagacaggctgctggagacccctaagccaaaggaactgatgatagcacagaga

SEQ ID NO: 46640 - DNA, 122 bp, Homo sapiens
gtggcatctgggagatatctcgaagggcaacgtcgaggggactgcaagcgtcaaccctggcgcggcagcacggcgcccctctccgcgggcggggagcgagcgcgtgtgcgcgagagcgccgg

SEQ ID NO: 46641 - DNA, 122 bp, Homo sapiens
cggatgccgatgacattctcatggcggaagcgcagcaggatctggatctcccggagcgtgcgctggcagtaggtctgatgttcgaaggggctgatcttcttgatggccacgcgagtcttgcg

SEQ ID NO: 46642 - DNA, 122 bp, Homo sapiens
ctgcagctcttttcattttgccatccttttccagctccatgatggttctgcaggtttctgcggccccccggacagtggctctgacggcgttactgatggtgctgctcacatctgtggtccag

SEQ ID NO: 46643 - DNA, 122 bp, Homo sapiens
tgcggactcggagcagctcggggctgcgcagcgggaaggctcgcctagtcggtccgcatccgtgtcgaccacctgtctggacaccacgaagatgccacccgttgggggcaaaaaggccaaga

SEQ ID NO: 46644 - DNA, 122 bp, Homo sapiens
tcctgctgggataagatcagggctccagaataagtgacaggtggggtctgccatcagggccgctgggggaggggacgggaagggtgggggtgggcaagagaggccatgccctgggccccagc

SEQ ID NO: 46645 - DNA, 122 bp, Homo sapiens
ttaggaaatggagaacaagcaatgcatgaataaataatcactcctgtccagccccatcagcgcatggtcctgcaattgttctgcgaggctggattctcctgtgggttttaactcactcttat

SEQ ID NO: 46646 - DNA, 122 bp, Homo sapiens
ccctctctccctttctcttgttctggccaggtaagttgtgtctgcttccccttcgcctttcgccatgattgtaagtttcctgagacctgcacagaagcagaagcagctatgcttcctgtaca

SEQ ID NO: 46647 - DNA, 122 bp, Homo sapiens
aaattaattataaaaaaagaagacagagaaaagcattcaccactctaggcggcatctaggcggcgtctgccagcacaggagccctgccagcaaagccccatctgacctttgtcaagttattt

SEQ ID NO: 46648 - DNA, 122 bp, Homo sapiens
aaggaattcaaagcttggaggaggagatgcagttatctcagtacagtctgataatttacacgtagcggtggctggggactaagacaggagctcttcttagatgatgccattcttgaagatta

SEQ ID NO: 46649 - DNA, 122 bp, Homo sapiens
gccgagttcagctgccttcccacaatccctaagattactttgaagtcacagtcgacttcgcgccggggcaggcgattggctgcagaggttagtgggcgggcatcaaggaccattgtgcgctc

SEQ ID NO: 46650 - DNA, 122 bp, Homo sapiens
gtgaggaatgacccctcctgcccctactctgatcccaggaactctgtgcggctggtgatccgaaaggtgcagttcgccccggagaaacccggcccccagccttcagccgaaaccacacgcca

SEQ ID NO: 46651 - DNA, 122 bp, Homo sapiens
ggaagcgtgcacagccgcgtgcttgcttcttctgagttatctggcgtgctgctgtgcagtcgtccgtggcgtctgcttagcaaagtgccctcgttctttcaccattctggcttctgagtctt

SEQ ID NO: 46652 - DNA, 122 bp, Homo sapiens
agatgctgtgctagactcagcaccctgtctggtgaaactgctccttggggtgacatcggtcgaatgtgtgagaggcttcagcggatgccctgacttttacaccatggaagggctttctcctc

SEQ ID NO: 46653 - DNA, 122 bp, Homo sapiens
taaggtcagtggcctgcggggacgcagtgagcgccgaatttgcctggggcaggggaaatgcgctctggcccatgtctgcgcactcgtagttccacccctcagccccagtgtttgttattttt

SEQ ID NO: 46654 - DNA, 122 bp, Homo sapiens
gtgggccgcgccaggcgtagcacctttggagagcgagcggtcacctcctcgaagttggtccgagctaccctgcctgcagcgggcccgggaggcggccgcctggggctgtgcacagggagaac

SEQ ID NO: 46655 - DNA, 122 bp, Homo sapiens
aggcccaacctggttttcatgacagctgtggttggggaaacccctgttgcctgcagaaaccgagttgactttgaaaaggaagagacagaacccagggggtggctgggctactccctgtgggg

SEQ ID NO: 46656 - DNA, 122 bp, Homo sapiens
ttgtgtctggcagggtggcccgaggcagggcccggcaggcagccccagcagattcaactccgtggccggccacttcttcttccccctccttcagcgctttgacaggtgagtgggttttccgt

SEQ ID NO: 46657 - DNA, 122 bp, Homo sapiens
gctacattctcaggcagacccccgacctggcgctcctagttcgcccacccacctgtgctgcgtgttcccaggcgtccgccacctgcagcaggccacccggtcacgtctccctcctggcgcgc

SEQ ID NO: 46658 - DNA, 122 bp, Homo sapiens
ccgccgctgctggttgtgcgtgagcgtgtgtgcgcctgtgtcctggcgagtgtgtgtctgcgtgcggcgcccggcctttactatatacaccaaggggtgggaggaggcggggaaggggaggg

SEQ ID NO: 46659 - DNA, 122 bp, Homo sapiens
agtcccaggtctgtcttcactgctctgtgtcctctgctcctagaggcccagcctctgtggcgctgttaccagcaggtattggagatccacagctaagatgccaggaccccctagaagcctag

SEQ ID NO: 46660 - DNA, 122 bp, Homo sapiens
atcaggaaactaaaagtaccaaatacccgtccgggccgccctctcccaaggcagtgtccccgatatccggctgtccgtgcaacccaccctccacagccagcagaccaaagggcctctgccct

SEQ ID NO: 46661 - DNA, 122 bp, Homo sapiens
accacttccggtttctaacagcgcagcagacgcttcactcagttatctacaccgcagggacgaccaatcatttccccagatgcagaagaaaatgcctctctgatgcccgtggcgccctaacg

SEQ ID NO: 46662 - DNA, 122 bp, Homo sapiens
ctgctcctcaccacccccaagggtgggggcacagtcctggcctcagtccagccttccagacgtggcccccgggtccaggccagagcacaaggggctgtgctctcccctgccaatctctccac

SEQ ID NO: 46663 - DNA, 122 bp, Homo sapiens
tgttattctagttccccactatcttgcaaggattggcagtaaagtcctagtgatggacaacgcggcagtggggaaagtgacagccgtggctagatcatcagatgtgtctgtagaatccggtg

SEQ ID NO: 46664 - DNA, 122 bp, Homo sapiens
cattcggtgcgacggcatccccacgccgcggccggccggaggggtctcagacaacacgtacgttaccttcagtcacatagctgtggtcccgcaggaagctgtggttaattttccgcgtgtcc

SEQ ID NO: 46665 - DNA, 122 bp, Homo sapiens
ctgatagtgtgaccagcacctcctcctcagcacccatcgctcagcttggcctatggcccccggagtttgaacagtgtccccaggagagaagttgaggtgctcgaaccccgtctgggcttcct

SEQ ID NO: 46666 - DNA, 122 bp, Homo sapiens
catgttgggaagtgggatgtgggaagacagaccccagctctgagtccggtggaagccaggcggaagggggggccctgcctggaactgggatacagaaacacccacgcagctggcatggctgg

SEQ ID NO: 46667 - DNA, 122 bp, Homo sapiens
ccacgtggggaaaaaggaacccttgtggcgggtgtggacgaatgtaaatacagacacccccggcgggcaggcagaggcccaaacaagcgggcccgcctgggggccggctgcggggcggacct

SEQ ID NO: 46668 - DNA, 122 bp, Homo sapiens
agcagggaccacatcctccctaatgcctatcttgattcttggaacaaaaacctgtataaacgaataaaggaagggagggagcaaaaaagaagggagagaaatgcttagaattccacagttcc

SEQ ID NO: 46669 - DNA, 122 bp, Homo sapiens
ccgcctcctctgcgctgcccatacgagaaggaagccctggagccgggccttccgtcgctgcgccctcctgcaccctccgagtgtctcccccgcccacgtcggaggcacacacctgctgtcac

SEQ ID NO: 46670 - DNA, 122 bp, Homo sapiens
ataaatacttgagggcaggggtggggagggagggctcagcctggcccacagctggcctagcgccaaggctgcttcccagggcaggcccccctcaaaggaagaagaagcatgcacacccctag

SEQ ID NO: 46671 - DNA, 122 bp, Homo sapiens
ccctgcgggatcccctggcactggacgtaggacctggggcgggaagacacaggtgagagacgggcagggcatgtgctggacatgcgtacactcaaaccgagccacacacagacacagaacct

SEQ ID NO: 46672 - DNA, 122 bp, Homo sapiens
gaaagggaaaatctttttaaaatagacatcacacaaccaacagggtcccctaggttcaggcggggaggtgaggtcgagtgagaggaactgcttagcatacgcggggatgctcctcccatctc

SEQ ID NO: 46673 - DNA, 122 bp, Homo sapiens
aattctagcttctccaatgctgtcaaagatggggatctgtgagtgctggtctactgcctccgaggactaatcctgaccaggtcccccggtccttgctggcccatggtctggtgataatatca

SEQ ID NO: 46674 - DNA, 122 bp, Homo sapiens
cacagtgtggccgcagggctgaaacgaatttcacgggaaacaagcgcacgtgaggaagcccggagcaggcccatcaggattctatttatactaaagaccttcagctaagtgagaagaggacc

SEQ ID NO: 46675 - DNA, 122 bp, Homo sapiens
ctaaaggcgctggctatccccttagggcccagctgtctgggcagggcgaggctgcgctggcgatcaaaccctcgaacggtcaggcgacggcgtggacacccaagacggggccccagccggcg

SEQ ID NO: 46676 - DNA, 122 bp, Homo sapiens
ggcggttcatcttgtacagcccgtcccgatccaccagcagggtcaccagccggatgcccgcgcccagcacgtccacatcgtgcacgatcccgttcaccgctgcttccgaaaaacagtttgga

SEQ ID NO: 46677 - DNA, 122 bp, Homo sapiens
gaattctgtttttcaagaagtttggtaaggtaggcacattaaatgcgaaacatccaagggcgaacccatgatattcacacctcaccccaccctcctcccacatctcctatcacatttcctat

SEQ ID NO: 46678 - DNA, 122 bp, Homo sapiens
ccagaaagtattgactgcatcctcctggatataatctatgtgcgttgcaagcgctaacaccgcctggccagcgagaatggctgcttgcacatcctgtgggctttatgatttactctcataga

SEQ ID NO: 46679 - DNA, 122 bp, Homo sapiens
cagccagccagtgagggcgctgagctggtttgaataagaaagctgtgaatgacagaggggcggatggatttcaaggaagccttctgtcacggtgaccatgctagcatgatgaagcactgctc

SEQ ID NO: 46680 - DNA, 122 bp, Homo sapiens
taatctatttcttggcctctgttgtaggaattataaatcactttcccctttctctttgtacgtatgctttcatagcacatgtgctaaatgtattttttaaaagttttgaaggggtgtgttac

SEQ ID NO: 46681 - DNA, 122 bp, Homo sapiens
aattctgttgggttctacagcacaggtgggacgcgtgtcagtggctttgcccacctgttacggccaccagcgggttggtccttgtcacccagaccctcgccacagtcagaagtggcttggct

SEQ ID NO: 46682 - DNA, 122 bp, Homo sapiens
ggcacccgagccacaccctccccccgccccccaccccggccgcctgcgacccgggccgtgcgtgctgccgcccgcgccccggccccgcgtcgctgcctagctcttatcctataccggctgca

SEQ ID NO: 46683 - DNA, 122 bp, Homo sapiens
gcatgggcgggtctgtgggggggcttggcctgatggtgggcggggccccgcccacagggccgaccccaatacaccagcgactcaaccttgatgccgctgtgtacgtgtggttactgctttcc

SEQ ID NO: 46684 - DNA, 122 bp, Homo sapiens
ggacagcggcagggactcgccacccgcagccgtggagccgggccatgagcgcctgtgcggcgctgggtcgctgtccagcagatgtctgcgcgggagacccagatatgtattacttgcatgaa

SEQ ID NO: 46685 - DNA, 122 bp, Homo sapiens
gccgtgcttcccagacagccctgcccctcccgcctcagcgtcccgccaaccaaggctcagcgccacgcccttcccaggaaggcctcgcccaccaaagctcagggccccgcccctcccgccgc

SEQ ID NO: 46686 - DNA, 122 bp, Homo sapiens
taaagcatgtgtgttttcggtatgaggaagaatttaatttgattcaattgcagtggagaccgaataaagattttataacaggagtggggacaatatgatgaatatttcagttgtctcttgct

SEQ ID NO: 46687 - DNA, 122 bp, Homo sapiens
ggtggtaggcggtcgggtgggcgtgagcgggctctccatctcccagcccagtctgcaggtcgccacctcaggattttcttcctgagtccgggtggcaggattccatcccaggtcagcccctc

SEQ ID NO: 46688 - DNA, 122 bp, Homo sapiens
ccagagctgctccacttccttagaggtgtgcaggctgtggtggagacagccctctcaggccggtatccaggggactcctgtactggggactggccaagatgcctccagtcccttcgcactcc

SEQ ID NO: 46689 - DNA, 122 bp, Homo sapiens
tcaggaatggggtcggggctggggcgcatgtattcgtattcctcagatatccctgttgcccggtctgccttggtgcgggagaagacgttccggctgcaccccatgagttccggggggggaag

SEQ ID NO: 46690 - DNA, 122 bp, Homo sapiens
cccccgagagctggctgcggggcccgggcccgcccccaccggccccaggcccggccgctccgccctccgcccgcctgcgcccgccctcagcccaagatttctagggcattggccgcgctgct

SEQ ID NO: 46691 - DNA, 122 bp, Homo sapiens
tgccttcatacaaatggctttcgctctaaggatgttgatcccagcaacacacagggaatccgtgggaaatatctccctggaatcagtacttgaaataattgggcttcttttgagaaaaaaaa

SEQ ID NO: 46692 - DNA, 122 bp, Homo sapiens
agccgatggtcccgggaggtgggggtggggtggtggtggcctagccacttcccataatgccgcgttccggaagttattgctttccaggggtcactctggcttcgactccgtcgctctcaatt

SEQ ID NO: 46693 - DNA, 122 bp, Homo sapiens
gttggcggtctcgatgtggcatagcccgtcggggtcactggaggagagcagcagaatgtccgcagggaagatttcgttgcagcgaagacgcacaaagtctcccacgtggatttctttccaga

SEQ ID NO: 46694 - DNA, 122 bp, Homo sapiens
ccttaccgtataactgactttatgcttgccctgcccccgtataaaataacttaaaagcagcgtgcctggttacagctgtttccacgtgcggtgctcgtcgggagtgatcacctaccctacag

SEQ ID NO: 46695 - DNA, 122 bp, Homo sapiens
taatgaattatttaagacaatatatcaggatttcatgatggtctgtgcctttcagaagctcggccattggagatctggttccatcagatggaaatagggaatattcctgaggaaatctcccc

SEQ ID NO: 46696 - DNA, 122 bp, Homo sapiens
ctggctccgactcgcgcggcgcagaccagcttctgtggttgcactcaattgaacaacaggcggatttacgttaaactttgttttcacctttcactaagatgtttccaatttaccaaggggat

SEQ ID NO: 46697 - DNA, 122 bp, Homo sapiens
taagagggcagggctcttaaagacctctgagtcagacaccagcagagagccaggaggccacgttcccagctcaggctgtgcccaggaatgccctcacttggtggcctgcctcagaaaagcct

SEQ ID NO: 46698 - DNA, 122 bp, Homo sapiens
tgccgccccgactgcagccgcgggcagcgggtccatcgcgcggccagtcatgtgagcccgcgctcccacgtgacttcctcccgcgccacccggccgcgcagccctgccgcgccgcgccctcg

SEQ ID NO: 46699 - DNA, 122 bp, Homo sapiens
tgcgcgtttctttcattctctccagcgggaagggcaaacggcatagcgggacccgccttccgtctgctgcattcttcaggcagttagacacactctttagcctaatggaattttagtcgcca

SEQ ID NO: 46700 - DNA, 122 bp, Homo sapiens
ctgagagcggggctccctcgaccggcacctcccgcccccgcctcccgccctccagcgcgacgcacacactctcccaccagggtcctgggcgccgccctccaactccgaagcgcgcgtccaca

SEQ ID NO: 46701 - DNA, 122 bp, Homo sapiens
ggaggctgacgtctgaggtctgtccatcaaatacagccatgtcctggtgaggcagctcaccggaggctctgaggcccgaagccaaggaaggaaagttcctcctagttcctactggctcctca

SEQ ID NO: 46702 - DNA, 122 bp, Homo sapiens
accggccgtggagcggtgcttggaggagctggtcttcggcgacgtcgagaacgacgaggacgcgttgctgcggcgtctgcgaggcccgagggtgagggaggccgcggcgcgcgggctgggcg

SEQ ID NO: 46703 - DNA, 122 bp, Homo sapiens
taaaaaaaaaaaaaaaaaagaaaaagcgatcacaccatgtgccagtgagggtgcggggtccggcctcagctgtgcttgcagtgcgaacgcaaaacggcacggccactctggagaagcgcagc

SEQ ID NO: 46704 - DNA, 122 bp, Homo sapiens
gcccatgaggatgctggcgtagcgcggggctatgtccaggtggttcacgttgaaccctggcggagagacaagtcggaaggcgtcacaccggaatctcactcgagtgattcccactgggacgt

SEQ ID NO: 46705 - DNA, 122 bp, Homo sapiens
gatccccacgcatgcgcaccgcgacagctcacgatgcccgcctactggcgccctagcaaccgggttgcgaaccatgttctatcccgactaagtggccgtcctgggagttatagtgccactag

SEQ ID NO: 46706 - DNA, 122 bp, Homo sapiens
gctccttaaatattaatcagggtcattgagatgcaaatgcgtgcccaccacagaaggccccgcagctgcagggctggcactgaacatcctggtggcccagatgcagccctgaccagagccag

SEQ ID NO: 46707 - DNA, 122 bp, Homo sapiens
gatgagagtgagcctcctgagaacccgccaccggtccttatggagcccaggaagaaactccgtgtagacaaagccccactgactcccactgggtaagtggagtcctcacttggccctctcag

SEQ ID NO: 46708 - DNA, 122 bp, Homo sapiens
gggacccgagtccgggcgccgctacaccgcctcgggcgctaggcctgggagctttgaggccggtaccgtgaaacacctttaggagcaaggagggattccaggtgtcctccctttgtacccca

SEQ ID NO: 46709 - DNA, 122 bp, Homo sapiens
atctcagctcactgcaacctccacctcctgggttcaagcaattctcgtgcctcagcctcccgagtagctgggattcaggaatgtgccaacatgcccggctaatttttgtatttttagtagag

SEQ ID NO: 46710 - DNA, 122 bp, Homo sapiens
ataacctggcaaatgggacgcatgatagtgacgtaattgctggagtagctcctgagtttccgcagatgagccgcgggaaaggagacgaggggcggtggccaggcggttgccctgacaacggg

SEQ ID NO: 46711 - DNA, 122 bp, Homo sapiens
acttgctgaaaggcataccaaaagtcagtgacagagccagtgcttgaatcaggtatctgacgttaagtcaagtgctgtttccattttatcccatgctcatcatggtgactggaggctgcaaa

SEQ ID NO: 46712 - DNA, 122 bp, Homo sapiens
agccccagagagacctgggcgagggagtgagggggagacttggggtttggggcaatcctgcggtcaaagtggggttctccccagtgcagaccaatctctcacccatgccagtaggaacaggc

SEQ ID NO: 46713 - DNA, 122 bp, Homo sapiens
tacctccgcggcagggtactgtcaaaccgtacaccagtctttagaaaatgaaagcggagacggtgcgcccgctgtaccctgctccctaatatccagtccctgacaatgcctgagctgtcaga

SEQ ID NO: 46714 - DNA, 122 bp, Homo sapiens
ggacctcacggtgagaagcgcattctcaggaccgcacggggagaagctcgttctcaggaccgcacggggagaagcagggttctcaggacggcacggggagaagcagcgttctcaggaccgca

SEQ ID NO: 46715 - DNA, 122 bp, Homo sapiens
ccatgtcttatcacctcagtgaacagcaagccacttgagggcaaaaacatcttctaccatcgttgtattcccagtacctaatgtaatgcctgatacttaatattcaataaataattctttga

SEQ ID NO: 46716 - DNA, 122 bp, Homo sapiens
cgggacgtgccctctctctccgctgggccgctttgaacttccctatgactcaggtgatggcgcagaagggggagagaaaaaaggaagcagtgatgggaaacttctccccaactgagtttagg

SEQ ID NO: 46717 - DNA, 122 bp, Homo sapiens
gagtgaggccagcaggggtgggtctccaagtgcttcctttgacagctgctctggatgggacgtggcttggggtgggtgagaacccttggctgagtttggattttcctgcagggtttcattgg

SEQ ID NO: 46718 - DNA, 122 bp, Homo sapiens
caagagaggacaaggaaagaggctgggccagtaggtgagagataatggccgcttttgttgcgctcctttattaagtcaggccctcagctgggacttcccgtgcatccatgcgttcattccac

SEQ ID NO: 46719 - DNA, 122 bp, Homo sapiens
gaactaaaacttaacttacctctctcttcacatagcattagagcacagagaagattactacgacccttgggcatctgtgactactccattcaaaggttccttagaatgtttgctggaagcag

SEQ ID NO: 46720 - DNA, 122 bp, Homo sapiens
atcaaccctgtgaaatggatgttatcctcatttattagatggggaaactgaggcctgaaacgtggagaaacagggactcaactaggacttctggctctagcatcttggaaatctaagaatga

SEQ ID NO: 46721 - DNA, 122 bp, Homo sapiens
agtttcagtttctttttctttaaaatgggaatggcaatgcttagcttatgagggtcattacggggctgaaatgttggtaaagcagcacatgatatataggtaagtatgccctgcagatcaat

SEQ ID NO: 46722 - DNA, 122 bp, Homo sapiens
cggaggaggtggagccaatggaggttgatgaaggtcaacctttaataaagaaatccgactcgcgcctgtaatcccagcactttgtgagtcctaggcgggcggatcaggagttcgagaccagc

SEQ ID NO: 46723 - DNA, 122 bp, Homo sapiens
tccctgggccggaggctaggcaggaggcaggtgggggctgtgggggccactcacccttcccgcccgtgtgccacagcacatgctgctcgaaggatgtgtcccgggagttggcgaagctggtg

SEQ ID NO: 46724 - DNA, 122 bp, Homo sapiens
tgtgtgtgacaacccctctctgcacacccaactttccccgggccggctagtgactcaaagcgacagcccagatttaagaaaacgaaacctagtgcagctggggcacttccgggatctcgcta

SEQ ID NO: 46725 - DNA, 122 bp, Homo sapiens
cgcaggaagggagtgagagggcctggaggccgataactttgccatagtctcctccctccccggaactgcccccagcgggtgactggcagtgtcaaggggaattgtcaagacaggacagagag

SEQ ID NO: 46726 - DNA, 122 bp, Homo sapiens
tagcaggtgccggccggccgcccgcggagcccacgcccaaccggaacccgcgccgtccagcgagtaccgctcgcggccccggctcccacctgtgcctctacctccacatctccccgccaaca

SEQ ID NO: 46727 - DNA, 122 bp, Homo sapiens
ctggggcctcagtcttcatctgagactgaaatgagaagcctctaaagtctcatccagctccgatgatttgattcttggagggtgaggcctgagatccgggcatatgttcggtgtgggcctcc

SEQ ID NO: 46728 - DNA, 122 bp, Homo sapiens
tatatcattatttcctttaagtagaatccttgaagtagaataattgagtctaagggagtgcgcgcctgtgtgggaatgtgggcagatgttttccagcttctagcacatacgacttgtttgtg

SEQ ID NO: 46729 - DNA, 122 bp, Homo sapiens
cgtgactgctaaaccggttgccagaggcgcggccatttttggggcgggcacccaatctctcgccctgtaaactgcggggtgacgggacgctgttactaggactcaagatggccaccgcgccc

SEQ ID NO: 46730 - DNA, 122 bp, Homo sapiens
ttccacttctccctgcctttgggcgagggggtaactaaaaccgggggtcgctgggggggacgcggacactcccagtccccgccttgacggcccagcccggggaagcggggacagtgagccag

SEQ ID NO: 46731 - DNA, 122 bp, Homo sapiens
tccacctccccagggctgctgctgctgaggtacccataatactggccatggtggaagggccggggggcagggggccgggcctggcctgtggcctgaagccgaccttccaggccaccggggcc

SEQ ID NO: 46732 - DNA, 122 bp, Homo sapiens
gactttagaaaatgatttgttactatctagtaaagttgaggatgcataaacctcaggacccggcaattctacttctaggtttccacatttgaaccaccagtgtatgtgggatcaaggagata

SEQ ID NO: 46733 - DNA, 122 bp, Homo sapiens
gcgctggaagcagcagtcaagcggccaaatgcgggctgcaggggctgagcagcagcagcgcgcacccctaaaagtagcaaggagccagcttcaaaacctctagtgcgggtgccccctagggc

SEQ ID NO: 46734 - DNA, 122 bp, Homo sapiens
tgggtcttgccccgcagacccttgggacgacccggccccagcgcagctatgaacctggagcgagtgtccaatgaggagaaattgaacctgtgccggaagtactacctgggtaaggcagatcg

SEQ ID NO: 46735 - DNA, 122 bp, Homo sapiens
ctctttccgtgttagctcctgccttgctttggctttgtaatagcagtatcaagctgtgcccggcatgcttgagcattgacacaggtgtcagatttaatgttgaatcactttcaggctccagg

SEQ ID NO: 46736 - DNA, 122 bp, Homo sapiens
aaggtctccgattggacgctctgtaccaatcggaggctggagcgggccctgagaggcgcccgactccgcccccgcactggccctgcccactgcccggtcagcctcgttgctatggggactgg

SEQ ID NO: 46737 - DNA, 122 bp, Homo sapiens
gcctgtctggaccatttcacctcctacatacaccacagctacatgctgacatcctggggccggttatgggattaaccagactgaagctgagtagggtgggactgggcctggctggctcccat

SEQ ID NO: 46738 - DNA, 122 bp, Homo sapiens
tctaagcacgtgctgggctctgacagctcctgttcacagagcttccctctcccatggcttcgcttcatgcaatctgagttgccatcccccacaactgtcaacatctgcaaaataccagagta

SEQ ID NO: 46739 - DNA, 122 bp, Homo sapiens
gctttttctttccatgtgcaaacctaagaacgggtttgaggctttgggggagaagtcatccggcctcttgctttgtatgtaaaccactgtaggcagggttgtgttgagagtgaaacagcagc

SEQ ID NO: 46740 - DNA, 122 bp, Homo sapiens
ctcggaatgttagcgggtgggaggtgcggctgggttgctacagccagagctgggcggtggcgggcgctgctgaaggagtctcgctgagctcgaggaggtggcgcgatggagggactggaagg

SEQ ID NO: 46741 - DNA, 122 bp, Homo sapiens
tccttattcttattttgagacggagtctggctctgcctcccagactggatagcacgatctcggcacactgcaacctccgcctctggggttcaagcgattctcctgcctcagcctcccgagta

SEQ ID NO: 46742 - DNA, 122 bp, Homo sapiens
tgggcctcagcctcccaggccggtcgctccatccccagcctcaacctctccgagaccggccgcaccttccctggcctcaagggtcggttccttctgcaccagaaaacggggtgtcactgtca

SEQ ID NO: 46743 - DNA, 122 bp, Homo sapiens
ggctcagcagtcgcaggaaggcctgatcctccttggcttgagcttggcggcttgcttggtcgactgtctgctctgggtgggtggccatcggatgacctctaagtcactggggcacccaagag

SEQ ID NO: 46744 - DNA, 122 bp, Homo sapiens
gcaagacctttctcaaaaaaacagaactaagctgagtgcggtggctcacgcctataatcccgatactttggtaggtcaagacaggaggatcacttgagccctggaattcaagaccagcctgg

SEQ ID NO: 46745 - DNA, 122 bp, Homo sapiens
gaaaaaaatgcattgattaaaaggtgcgctgcgtgcaggattatattgcttcaacaatcgcgctgccaaattgcattgcaacaaaactgcattgccaagtagagaagtgtatgagtgagtga

SEQ ID NO: 46746 - DNA, 122 bp, Homo sapiens
ctctcagttacatttgtaactagattctggtgtatacctactgttcatctaatgccctttcgacaccaacacaaattaactatgatgtttaattctgataaaaggtgcttcgaaaaaaagtg

SEQ ID NO: 46747 - DNA, 122 bp, Homo sapiens
cagtaacacagaaacatctggcaagatggaatggttggtggaagacacttctgatgaggtcgaatgttttgcagaagagctatgtgatcggatccccggtttggcagagtagacatgcgaga

SEQ ID NO: 46748 - DNA, 122 bp, Homo sapiens
ctgctgccggctgggagcccaggagagcctcggctcgaagtagggcggggatgatccccgcgcgccggcgtcgcagctgggcggccgagggtgaactagggagcctaggggctcggggtgct

SEQ ID NO: 46749 - DNA, 122 bp, Homo sapiens
gctccgacatctgcgagagctccatgttggtggaaccactgccacctcagctagtgagtacgcgggcgcccgcacggctctgccgggccgcgcacgcacgcgggggcgcggcctggccgttg

SEQ ID NO: 46750 - DNA, 122 bp, Homo sapiens
ggtcaaacaggaagaggaggagaggagaggcctatgaccttcatgtcctggtggctcccgcgggagcatgggaggtgcctgccctgagctcccatagcctcccgacccctggccggtagctc

SEQ ID NO: 46751 - DNA, 122 bp, Homo sapiens
tcgcctccactacctcctccgggcagtggttggaatcaaggtctgaaagcaccgagttcacggaaagggcaggggcgccagtcgggatgggcgcggtgggcccgggttcccgcctccgggag

SEQ ID NO: 46752 - DNA, 122 bp, Homo sapiens
cggcgggaggtccgggtgtcccgagggtctgggcgggaggtccgggtgtcccgagggtctcggcgggaggtcccagtgtcccgagggtctcggcgggaggtccgggtgtcccgagggtctcg

SEQ ID NO: 46753 - DNA, 122 bp, Homo sapiens
ctttcctggacaaagccaagaaccctgctggcctaagccctggttgtggactcatctgcccggcaccatcagggccgcaaccagcaccgccagactcagggaggggccgcaaccagcaccgc

SEQ ID NO: 46754 - DNA, 122 bp, Homo sapiens
cgccacccgggctggccacctggactgcgtcaagttcttggtgcagcgggcccagctgcccggcaaccagcgggcccacaacggggccaccccagcgcatgacgccgctgccacgggcagcc

SEQ ID NO: 46755 - DNA, 122 bp, Homo sapiens
agcggtgcatttcgggacctgtagttttccccggcaggacggtagaagtcgtggtttgtgcgcggccaggcgctggagcctccgctgccgggagcagtaagtgtgtgacgtcggggtagaag

SEQ ID NO: 46756 - DNA, 122 bp, Homo sapiens
cccccgccccccaccccaaggtgttgtttcctagggtcttctggggacatccctacctgtcgagggcctgccctcctcgggctaaaagttcagcccttcgacagagccatggaataagaggc

SEQ ID NO: 46757 - DNA, 122 bp, Homo sapiens
cagttacttccgcacacgcgtagtaggacggtagccggtattcaatcttcaaatcagcgccgcgggaagtgcgggcgggtgttgctcccctgtctctggacgacgctgtgactgatcccagg

SEQ ID NO: 46758 - DNA, 122 bp, Homo sapiens
taaagttacaggcggcagggtcctttttagtcacctccacgtggttttcccagagtgcgccgcgcgtgacaacctttggcgggaccgacgtggtggagtggacccaaaaatagcgtctaggc

SEQ ID NO: 46759 - DNA, 122 bp, Homo sapiens
tagaaccctccgagccaggtgagggatataatctcgtggtgcgccgttttttaagccggtcggaaaagcgcagtattagggtgggagtgacccgattttccaggtgccgtctgtcacccctt

SEQ ID NO: 46760 - DNA, 122 bp, Homo sapiens
cgcctgtgtatggccttaatctccagtcctcaacaagtcatcctcctgcctccacctccacggaggtgccttcccaagtcccaggggtcttcttgtgttgcaaaagagcaggaacctgcagt

SEQ ID NO: 46761 - DNA, 122 bp, Homo sapiens
cgtgaggctcagccttctgatgcccggtggtgaacttgcccagagagcacctaaataccgcggagtggccaaaggcttgagcgcccagcgacagacaagtgtcctaagaattggtgcctctt

SEQ ID NO: 46762 - DNA, 122 bp, Homo sapiens
ttctttatgtattttgaagctatgctattaggtgcatacaatttagaattattaacttcccggtcgatgagccctcttatcattatgaagtctccgttatctctagttgtttttttatctga

SEQ ID NO: 46763 - DNA, 122 bp, Homo sapiens
gccacagtgtggcacgataagctttgtgacggtgaacgcagaggagcaagagaagcagttcgtatcttccaggaccaagtaatgtattgggaagaagggaaacttgattacaacacaatgtg

SEQ ID NO: 46764 - DNA, 122 bp, Homo sapiens
ccccaccagggtgtgaatcatccctttctctagcatatccccacctgttagtcacttaggcgccatcttggttttcagatccactgtcatggtatcacaatgtttatgttcaagtaaccctt

SEQ ID NO: 46765 - DNA, 122 bp, Homo sapiens
gtaagtcagaaacagcccccaccctccagagtcagaggacagggcagcgataagccacaccgccacacaaatactatgcaaggcgagagatgagaaccgagtcagtgccagaagggctgagt

SEQ ID NO: 46766 - DNA, 122 bp, Homo sapiens
gtttcccttctattcaaacacttccttcaattaactccatactagatttcgaaaacaagtcgtttccttgtttcattttattcccttttcttagaaagtcacctctcttcttttcccttatt

SEQ ID NO: 46767 - DNA, 122 bp, Homo sapiens
gtggcggagcatatggaggcgggatgaccgggccgcgccgggagctgcggcgggactgggcgcaggctgggaactgcgccaccgccgcgccgtggccccggctccccgaggcttctggtgca

SEQ ID NO: 46768 - DNA, 122 bp, Homo sapiens
cagagcccagggtcggtggcacgtgatgaggcgcaggcctggctcagggggtggtgcccacggccctcggctcctcccccggggccgccccgccccgcgcgggaggggacgggcggggaccg

SEQ ID NO: 46769 - DNA, 122 bp, Homo sapiens
tactgacctctggagagtgtatcacctgggcttgcccactggcttattatgttctgccaccgggaggcacctccaagaggatggagcactgaaagcataggaggcagggtatttactcccct

SEQ ID NO: 46770 - DNA, 122 bp, Homo sapiens
aacaggcaccagtataccctcctcctgctgtgcatcttcccctgaccacagcttcctgcccgtgcccagtacgcagatgctgtgccagcttcccccatgcccaccggcaggggctctgctgc

SEQ ID NO: 46771 - DNA, 122 bp, Homo sapiens
ctcaggaagatgcgggcaggtttacaagcaagggcctactttatggcccaggctataaaacgcaaatcccacctccctttgaaagcgccctccgcccgggactcaccataaaaggaagagaa

SEQ ID NO: 46772 - DNA, 122 bp, Homo sapiens
acgtatcctaagatacccaatggtggtcgagaatagttgagcactttactagtcaagccgcggagtgggcggggccccctgcccagacttgaagccacacaggcaggtcgggcaggcgggtc

SEQ ID NO: 46773 - DNA, 122 bp, Homo sapiens
tgatattcacatctaactgggcatcctgtattttatttggcaatcctattccctctccctcgccccctttctaaaccgtcagcaactcctgttagttatatctccaaaatctatttcaagtc

SEQ ID NO: 46774 - DNA, 122 bp, Homo sapiens
tggggccaggcagcccggatcccagccgaggaggtgcgcggtgctgagaggccgtgggagcgaccatagagaacgcgcgggcggagcgagcggccggatgcggtcaccatagagacgggtga

SEQ ID NO: 46775 - DNA, 122 bp, Homo sapiens
acacacagctgtagaggcagcgcccggcgcctgggctgcacagtgggtgaggcttcccttcgcctcagcctatcccaggcctcgcttccggtgacatcatgtctcctagcaaccgcgggaag

SEQ ID NO: 46776 - DNA, 122 bp, Homo sapiens
cagcctgaccgtccaaggaaagcagcacgtggtgtctgtggaagaagctctcctggcaaccggccagtggaagagcatcaccctgtttgtgcaggaagacagggcccagctgtacatcgact

SEQ ID NO: 46777 - DNA, 122 bp, Homo sapiens
tccagggattctctttcccagcagcgccagtgcgactccatgggaggtggggccggggcgcgtctttgagagaaggggcgggtgcctacgcctttaagcgcgggtgcgcgcggagcctgcgc

SEQ ID NO: 46778 - DNA, 122 bp, Homo sapiens
ctcaggagcctggggaaaaccccagaagcccagagaaggctcaaagctgccagactccgccgagagcctggcctatttcctgttctccccaccacctgcccctgccccgccaagctaaactc

SEQ ID NO: 46779 - DNA, 122 bp, Homo sapiens
aagaaaatccattgacctttgtctactggccatctattttacttgttaaaaatctccatgcgttctgatcaaggcatgtgatggtgggctcgatttcagttgaaatttccaaaatcatggcc

SEQ ID NO: 46780 - DNA, 122 bp, Homo sapiens
ctgtatgagtttcagtatgttgtgtgtatgtgtgtgtgtgtgtacatttgctgcagttcgcgttcccatgctctgtgtcttaacagctgtgtcctgggatgttcttgcaatccaggttcttg

SEQ ID NO: 46781 - DNA, 122 bp, Homo sapiens
gttgagattgtaagtgctacttgtgcctggaattctatttcaacacagaagagagctttgcggaaactgcctggtgtcatctcagcaggaacagcttctttgcatgatgatgaacttgtggt

SEQ ID NO: 46782 - DNA, 122 bp, Homo sapiens
ttgcttgtagtcctctttccttttcacctttccattgttcctgacgagtagaaatggcagcgggaaggcagcagatggactgcgactcccgtcaggtaccacacacgcggagggttgtggac

SEQ ID NO: 46783 - DNA, 122 bp, Homo sapiens
ggccccaccgccccccaggcctgggttccgaggcggcggtggaggtggtggtggcggtggcggcggcagcacctagaagccgcccctgcgtttccctacagctcacgtgggcccgaggagga

SEQ ID NO: 46784 - DNA, 122 bp, Homo sapiens
ataccaacgagacggcgccgggaactcggcgatcatagagagggagcggctggcgccgggcgaagaggaaggcgacttgccagtgctagagaggacaccaaagtaccatagaagcttgggcg

SEQ ID NO: 46785 - DNA, 122 bp, Homo sapiens
ctccctcaaggcggcggtcctcttctatccgcagtcccggacctggagcgggtcagaccccgacttccgcccctgactccccaggcggtcacatgaccgaagcggctgggagcagggagggg

SEQ ID NO: 46786 - DNA, 122 bp, Homo sapiens
aatcaagctgcaaagggggtcaacaaggagttcaccgtgaacatcatggacacgtgtgagcgctgcaacggcaaggggaacgagcccggcaccaaggtgcagcattgccactactgtggcgg

SEQ ID NO: 46787 - DNA, 122 bp, Homo sapiens
tcggggcggggcttggggctggatctatgagccgggagcggggatccaggagcgaggagccgggagcggggaacagggagtcggggagccgggaaccagggctggcagcggccgccatgagc

SEQ ID NO: 46788 - DNA, 122 bp, Homo sapiens
gagtgtgaccattccttcattattttgtcatgcttcaaatcatcagcctttgtgttagggcgctggctctctcagcctttaatatttaacctaaccatttagtcaatgctagaacagttctt

SEQ ID NO: 46789 - DNA, 122 bp, Homo sapiens
caccctctgaattctcataatgggcatttggctactttgatcacagggctcttagaactgcgctgtccagcattatgattttaccagaatatatcactcctcaactactttagaaacccctc

SEQ ID NO: 46790 - DNA, 122 bp, Homo sapiens
aggcagccactgactctttaaagggggctgaacataataacacttggcccctcagcatgtcgcctttccttgcaggcagtggatgggtctgagaaatcagtaacaggctggctttcctttgg

SEQ ID NO: 46791 - DNA, 122 bp, Homo sapiens
gctattgggggaaggggctcagaggagatacccaccatgtacactgctgaccttatacaccgctgagctagaacgactggaagaaccttattagtgaggtgattaaggaggtggatgacaag

SEQ ID NO: 46792 - DNA, 122 bp, Homo sapiens
ccaagggctgcggcgtcgtccggctctccggtcctccaaagggccgaggggtgtacgccccggaaaccctgcaaaccctacatccgctccaatggccggaagttcgagcgcgcgagagaccg

SEQ ID NO: 46793 - DNA, 122 bp, Homo sapiens
atttgaagtggggaggatgtcagtcgtcctcctcattctcgttgaagtcattatcctcctcgtcgtcctccccgacgtaagacaccggggtctccaccctggagctgctgtactgagaccca

SEQ ID NO: 46794 - DNA, 122 bp, Homo sapiens
tccctgctcttcaaccggctgtcttctggtggggtttcttttcctctggaagaacagaaccgtaacttaccactctcacctagtttttgactctgggttccttggtgcccagtgactgttgc

SEQ ID NO: 46795 - DNA, 122 bp, Homo sapiens
aggtgaggggccggaattagtcggggaagctgtgccagacgtcccgaggggacaacgggacgaggggataacagcagccaggacccttcagcagggctgggcgcgctccaggcccggggcag

SEQ ID NO: 46796 - DNA, 122 bp, Homo sapiens
gcaccaggggccaccatcttccttacccatctcccatccttgtctgaaggtgggttgaagcgtcgccctttggtcattctctccaggaagctgaatgtggctgagattggctccctcacctc

SEQ ID NO: 46797 - DNA, 122 bp, Homo sapiens
caaactcctggcctcaagtgattcgcccacctcagcctcccaaagtgctgggattacaggcgtgagccactgtgcccagctgaccaggcctttttggataggttgctgtgatctcctgtttt

SEQ ID NO: 46798 - DNA, 122 bp, Homo sapiens
tggcaattagccttactgactccatactggtcactcaggctaattgctggggcccagagtcggagctcagtccaaacaacagcctgccataactgtgtttagcagaggttgccattcctttc

SEQ ID NO: 46799 - DNA, 122 bp, Homo sapiens
acagagagaaactgagtcaggccacctagttcctcatcctaccttcattaactagcttcccgttgaccttgggaaagtcactcaacttctgcaaaactaaaaaaaaagagttgataggagac

SEQ ID NO: 46800 - DNA, 122 bp, Homo sapiens
gtaacagcgtgcctgatgtgtcgtcagcgcactgtgtttgctgctgttgctgttcctccccgccctccaaaccccatccccatccccagcatagtctccctcttcagtgcaccccacccagg

SEQ ID NO: 46801 - DNA, 122 bp, Homo sapiens
cgtggagccagagatggaggcagtcctgccatgtcctaatgaccccatcatcacttgggtcggatgcaaccagacttgaggtaagattccttaccttaacttttcaacaaggaaccaaaaat

SEQ ID NO: 46802 - DNA, 122 bp, Homo sapiens
tattcagccacctcatccaggtaaccactctttgacttctctctccttagtccaagtcagcggtgggatctcttcagccttcctctctgtcagtgggtttccctctttttcctctaacaccc

SEQ ID NO: 46803 - DNA, 122 bp, Homo sapiens
gcgcctcagtttcctcatctataaaatggagataatgcctccgcgcgctgagcccgagcgcggtcgtgctgttacactattgctgctgctatgtcgttaatgacggcacagcccttatggaa

SEQ ID NO: 46804 - DNA, 122 bp, Homo sapiens
ttggcacaacctaggagacgcctgtcctggccccagcagccgaaatctggtgaacttccccgctgactggcaggtagcagaggcctatggtgggcaggacttgcccaaggccctggtggggc

SEQ ID NO: 46805 - DNA, 122 bp, Homo sapiens
cgcggaaccgcacggtggccgagaccgggcgggggcgggggcgctttgggagttaggatacgctttgtgcccgcttgctgcttttttcctgcaagctgcgcatcaattaaagtactcgggtt

SEQ ID NO: 46806 - DNA, 122 bp, Homo sapiens
ggggtccatgcctgtggtcccagctactcgggaggctgaggcaagaggattgcttgagcccgggagacaagttacagtgagctgagatggtaccattgtgctccagcctgggcgacagagcc

SEQ ID NO: 46807 - DNA, 122 bp, Homo sapiens
gctggaggggagtggggaccagggtgacctggcggaggggcccaggtacgccagggagggcgaggcgggggagtggccgggctgggcggggaggcgggtaccaggaccgagcccttggcccc

SEQ ID NO: 46808 - DNA, 122 bp, Homo sapiens
aggatccgtagatgaggagcgtgtctaggagggcggcgagacaggcaaagaggaaggcagcggcgtccccaccgcttggctcgctagccctccgcctccctgctggcggtggcggcccctca

SEQ ID NO: 46809 - DNA, 122 bp, Homo sapiens
tttaatgtagcctggattgtatttgtctttataccaatacaatcagaagctgtaattttccgtatttttatggaggaaggcgcccacaaaagcaacagtgctcggggctcacaagtcagaat

SEQ ID NO: 46810 - DNA, 122 bp, Homo sapiens
tccccattgtacagcccagcctgtagaggcaggtgaggtccaggccatgggcctgtgggccgtgccacgtcgctcagattttgtggtgtcggtggtgggagccgccggggaaagccgtcatc

SEQ ID NO: 46811 - DNA, 122 bp, Homo sapiens
ctgagatggaagcaattgtcgcaggggtcaggcacgactttgccttgatgacggcaagggcgcaaccgggagaggagaggagagctgttccctcatgggcgaggggaggaaggatgagggcg

SEQ ID NO: 46812 - DNA, 122 bp, Homo sapiens
gccacggtaaccacggagccgcacagcctagcaagccgcgcgatgattggaggaggcaagcgtcaatagcaaccaccgccccagctgctaggtgcaaaagaatttggtttccaaggattctt

SEQ ID NO: 46813 - DNA, 122 bp, Homo sapiens
ggcaaagcagccacgtcccctgactacggggtcaccattcacctcgcaggccatgtgaatcgcacccctggaactgtgcagggcccacctgtgtggccacacgcagtgaccctgagcaaagg

SEQ ID NO: 46814 - DNA, 122 bp, Homo sapiens
catttgggtttggtaagagaaaaaaggagggcgaaaaccccggacactcctcctgtctcccgacgctcgttctggccgtctggccctcagtactaagcaggccctgacctacttgtcttact

SEQ ID NO: 46815 - DNA, 122 bp, Homo sapiens
tacaaaagaattttaaagtgaattctgttatcttaggtgcctaaaagagcatttaagtagcggatatagttgatgcagacaaaaattttttgttttacaaccttattgataattttgcagct

SEQ ID NO: 46816 - DNA, 122 bp, Homo sapiens
tggttcacagctgagctctggatccagactggtgacctttgttaaagattctacgccaggcggccgggtgcagtggctccagcctgtaatcccagcactttgggaggccgaggcgggtggat

SEQ ID NO: 46817 - DNA, 122 bp, Homo sapiens
tagaagctgcagcatggcacccaggcaggagttgccagggaacgcccactgggcaatgcacgtgtcttacagcaggaactctcctcccctggtgagcactggatggaaaagcagcagggtgt

SEQ ID NO: 46818 - DNA, 122 bp, Homo sapiens
gctgcttgcagggccatgttcgcaggagtttcgctcttggtgcccaggctggtgcaatagcgcgatctcggctcactgtgacctccggctcctggttcaagcgattctcctgcctcagcctc

SEQ ID NO: 46819 - DNA, 122 bp, Homo sapiens
cctctacctcagggtccctccttcacgcttcccactttcccgagttagccaatggcagcgcgagatcgcgcacaaaggcagtggtggccaataagacgcctacttttgacccacgctcgttc

SEQ ID NO: 46820 - DNA, 122 bp, Homo sapiens
atgggagacataagtgtgcatgtgtgtgagagtgtgagggtgtttgtgcaactgtgtgcacgtactgttagccagaccccgtgctaggggctttatctgcatgaagccatttatcctcatgg

SEQ ID NO: 46821 - DNA, 122 bp, Homo sapiens
aattctcgctgatgacctcaagaggtaattcatgctctatggttacaaataatgacgatccgagaatcgttagggccgattcaatgcgagcctccgagagagggggaaaaaaggagaagggg

SEQ ID NO: 46822 - DNA, 122 bp, Homo sapiens
aggggtacctggcctcgtctttcagaggtcagagatctcttggaggaggtgacatctgcccggagtagaaatgtaggacacagcttttccagcttgcagttcgggccttcccagaagcccct

SEQ ID NO: 46823 - DNA, 122 bp, Homo sapiens
aggagatcgtcatgtgagcgcgggcggagggggcacgaggggtccttccctcgcagggaccgggcccactcaccagctggttaaccctgcagccctccccagacgctctggagcaggaagag

SEQ ID NO: 46824 - DNA, 122 bp, Homo sapiens
cgccgcgggggcgggcgaggacatggacgagtcgtcgctgctggacctgctggagtgctccgtgtgtctggagcgcctggacaccacggccaaggtgctgccatgccaacacactttctgcc

SEQ ID NO: 46825 - DNA, 122 bp, Homo sapiens
cgagcaatgcggggttaggactggaggacaacagggccatcttgtgacagggtagactggcgtgccagaaaggtccctgcctacggatgtgcagagccggctgggcccgggctgtgaacgag

SEQ ID NO: 46826 - DNA, 122 bp, Homo sapiens
agggttctggtgcctaatgactcccagtgctaggccttgtcatatccacctcacagaggacggaactaggccaccagactgcatcacaaagccctcctgtttcataaggtacatgtagtagg

SEQ ID NO: 46827 - DNA, 122 bp, Homo sapiens
gaggccagccggggcggaggttggggggccggggctggagccggggtcgggggggggaggcgggttctggaagcttgcttcacattcctggcgtctgggctggggaaaaaacagtggggagc

SEQ ID NO: 46828 - DNA, 122 bp, Homo sapiens
ctgtttgtccctcagtaactgagcaacaccccggacacgaagggctccctgtgacttctgcggtttttcttgcacttctccgcgttggttcacttccaccctcgaaactctccagaagcgag

SEQ ID NO: 46829 - DNA, 122 bp, Homo sapiens
gaggggaggccccccggctcggggtttcgcgcccccctgaggagcagtgcttctcccgcccgcattggaaggtgataagtgctatggagaaaaataacacagggaagggggaagaggtgtgg

SEQ ID NO: 46830 - DNA, 122 bp, Homo sapiens
tcaggcatccggtgtccctggaggggtctccacaggctcaggcagagcccctcccgggggcggccccacggtgacacccactccagggccatggccgtgtcccctgaggcaccagcgtttca

SEQ ID NO: 46831 - DNA, 122 bp, Homo sapiens
aatgtaatcaatgcgggagggcttaaggataaaatgcacatccgtgtgcacgcacacgcgcgtgaggccatgcacactacccacacgaagctacgagaaggacccagcggcttgccagggct

SEQ ID NO: 46832 - DNA, 122 bp, Homo sapiens
ctctgtccactgggtgtgcattgatttaaacttctccactgtggggaagctctgtgaaatcgtctgatggtctgtgtggaagaaaagaaaaatctgtctgccgcctatttcccattggtgtc

SEQ ID NO: 46833 - DNA, 122 bp, Homo sapiens
caagacagcgcccgccactagcagtggcagcagcgggacgctgggttctggaggctccagcggctcccctaagagcaggaagcagagggcggggcttcagccgagggcggggctttggcctc

SEQ ID NO: 46834 - DNA, 122 bp, Homo sapiens
cctgaattaacatacctcagtgcttctctttgatggctactaaattagaaatttaaacaacgtaatggaaagaagtctttagtgataaacaaactgtgttgctgcgggcaagctcaaatcct

SEQ ID NO: 46835 - DNA, 122 bp, Homo sapiens
ccccgatccccttggaagaattcgttctctcggtcagagcgacctcgcacgctgatcggtcgagggacccgccatgctcagggctcagcacccccgagttaaggagacaagagcagccatct

SEQ ID NO: 46836 - DNA, 122 bp, Homo sapiens
ggactaatggattataaactgtgctggggaataaggacaatgcaaactctctccccaggccgatcatattataggagaatgagtttcccatgtttgaagatgactatgagtattgtagggga

SEQ ID NO: 46837 - DNA, 122 bp, Homo sapiens
ctcgatctctggacctcgtgatccgcccacctcggcctcccaaagtgctgggattacaggcgtgagccaccacgcccggcctagacttgtgtcttttaaagttcggttaagagctccgactg

SEQ ID NO: 46838 - DNA, 122 bp, Homo sapiens
gggcggttggtcctgaaagctcgggccacggggctgcccagcttggagaggggcctttcacgccgcagtccccagctgcgagaggaagggctgcgcccgcctcctcacctacctctcggaac

SEQ ID NO: 46839 - DNA, 122 bp, Homo sapiens
attttcagaggcattagaaacactccacaaggcagtggcagcaagacctccacctggcatcgcacttcctgaagcagccaggcagatgccagcagtggagcctcaagtggacatctctggca

SEQ ID NO: 46840 - DNA, 122 bp, Homo sapiens
cagaaatgacaggctcactggggacacggcagataggtccccgcatgtgcacacggtgggcgcacactccatcccgtcccccctcagcctctgcgctcctcgaaatgagatttctgaaaatt

SEQ ID NO: 46841 - DNA, 122 bp, Homo sapiens
cagtttttaatgggagtggttatgaagctaccccagattcagaaaagtctgatctcgtaccggctctttacactattacagaaacaaaacacacctagtgctcagaggaggtgctttgtgtg

SEQ ID NO: 46842 - DNA, 122 bp, Homo sapiens
aggcaggcaggtggacgagtccaggcagcggctgagtcagtgtgtgtggaatgttctggccgctcccagctgcaccctgcccctacctgccaccacctcaccttcatcctcaggcgctgcgg

SEQ ID NO: 46843 - DNA, 122 bp, Homo sapiens
tccctgtagctggcaggattggggtgagtgtgcattgatccggaagggtgcccaagtgtgcgtcagtgctagggcctgcttgacagaactgctgggctggttctgctgggaacatgtgctac

SEQ ID NO: 46844 - DNA, 122 bp, Homo sapiens
ggcggccacggctttgctgggagagtgtcctgaggatcccacattagtgccactgggggtcggaccaggcatgctggagatgagggtggcaaggagctgacgctgacggaaggaaagttgcg

SEQ ID NO: 46845 - DNA, 122 bp, Homo sapiens
gggtcagtggctgcaggaggctcaggccaccgagcagacatgtggaaacgtcacgcgcagcgctggggcgcctccctgcccacggcccagctcctcgagggcagcagatgggcacccaggca

SEQ ID NO: 46846 - DNA, 122 bp, Homo sapiens
tgtctccatggcaacctcctccacccatcgctctgacttgcttgtcagcctgcgaggttccgaagggaacttcaaagtttccccgggcagacgcaggtctggtagacgtcttggaggccagg

SEQ ID NO: 46847 - DNA, 122 bp, Homo sapiens
acgccagggcagaagcactgggtaggacccggagggtgccgggtcccaggtctcctcacacggagcggcctaagccgggcacccgggctcaggggagggtagctggcggggcggagtgacag

SEQ ID NO: 46848 - DNA, 122 bp, Homo sapiens
cgggcgggcatcggagctctggggcggggcggccgggctcagagggcgggcgggagcaggcgggcggcgagggcgggcagcagcagcgggagcaggggcgccccgggcgccggggccgctgg

SEQ ID NO: 46849 - DNA, 122 bp, Homo sapiens
gccagcgtcccgaccccagggacctgcagcctgggacttgtgaaggcccactgtgtagctcgaggtttccagggcctcggccccgaatgggcgattttctttaaaacgccgaagcgcgctat

SEQ ID NO: 46850 - DNA, 122 bp, Homo sapiens
cctagacgcccgagccgagcgtcccgtctcctagtaaccagccgctagcccccttttccacgactcatttcttaatctctgcctgaggctgccgcacctggatggaacgcgcatgcgcaagg

SEQ ID NO: 46851 - DNA, 122 bp, Homo sapiens
ccagcccatttctcttgctttgcagctggagctctttcctctgaactttgacagttccagcgtctagactctaaacgtactagatccctccagaggaggcaaccaaatattccaactataca

SEQ ID NO: 46852 - DNA, 122 bp, Homo sapiens
taagaaagtctaaggaattcaataagcaagataaacgctgtgatggagaattacaggcttcgttgtgaagctgtcaccctcttgacataataatggttatactcatagctacattcagtccc

SEQ ID NO: 46853 - DNA, 122 bp, Homo sapiens
cagtcatggctagcatcattgcacgtgtcggtaacagccggcggctgaatgcacccttgccgccttgggcccattccatgctgaggtccctggggagaagtctcggtcctataatggccagc

SEQ ID NO: 46854 - DNA, 122 bp, Homo sapiens
ctggaatatatcctcatgggaaggtagagctccagaattctataattaaataaaagtgaacgacttgaagaaataagacatcatctgcatgggtgataaaaccatagtactgagatcaatac

SEQ ID NO: 46855 - DNA, 122 bp, Homo sapiens
accgcccggaggagagggagccacagagaggcgcccgcacaggtgagggcctcggccgtgcgccgccacggacaggtaacggccggtggggactgcgatgcttggctgtggccggccgagat

SEQ ID NO: 46856 - DNA, 122 bp, Homo sapiens
ttgagggcgtagggccgagaccgtcgcgggtactgaggcgcctccgtcgtctctcccactcgccgcccgctttccaagacatatgtcccgcttgcagcccatttcgatgctgcgaaacggtg

SEQ ID NO: 46857 - DNA, 122 bp, Homo sapiens
tactgagcacttaagatgtggctagtccaaactgagatgtacctcagtgtaatggtgaaacgatcggatttggggatacattaggttaaataaaagacattgctaaaattagttttacctgt

SEQ ID NO: 46858 - DNA, 122 bp, Homo sapiens
tcgagcgcttgttgtagtgcgccaggcgggaagcctcgcttgcgatgcgctcgaagatgtcgttgacgaaggagttcatgattcccatggccttagaagagatgccggtgtcggggtggacc

SEQ ID NO: 46859 - DNA, 122 bp, Homo sapiens
ggaagtgggacctggacgcttgatgttgaaaccgtggtgcctccaggatgccctgagcgccgtaggagagctccacttcccagccacgcgggcatccaggattgcatttaccggggctggag

SEQ ID NO: 46860 - DNA, 122 bp, Homo sapiens
tatgccgaggactcagctggaggcacaggccctcagtggccactactgggtcccctcctacggcccaccctgcccctgtctggccaagggctaaaggacaagcacttccaccgtgtggccgt

SEQ ID NO: 46861 - DNA, 122 bp, Homo sapiens
gggggcggaaggtctgtgtgtgacaagagggacggtgggcagcggccctgggcaccgggccggcactgaacccccactccccacagctcgcggctcacggcgctcctggggcagccccggcc

SEQ ID NO: 46862 - DNA, 122 bp, Homo sapiens
gggcatgatttgaagggcaacagagaactcatgctccaacatatcctcgccagtctcaagcgacaaccccatcaatctccattagtcgtccttcagcatgaagacacgtaaaatgggaatat

SEQ ID NO: 46863 - DNA, 122 bp, Homo sapiens
ctgtgtttcttagttctctacagcttattggcatatttgtgagatgtcttctctcctcatcgtctataacatctgtgttattttctcaaacagttttaaccagcttatgtgaatttgcatga

SEQ ID NO: 46864 - DNA, 122 bp, Homo sapiens
ctactgaatcaagcagaccttcatttccaactttgtagaccattgtgccctgtgggtcggcgtcttttctaggcagggacttgtgatcacatagacgtgtgtctgataagaggggagcggga

SEQ ID NO: 46865 - DNA, 122 bp, Homo sapiens
aatactaacgcgtgctacaacggtgatgctgagtgagagaagccaggcgcggaggccacacggcataggattccatttctaggaaacgtccaggacaggcagacccgtggagaaagaacgca

SEQ ID NO: 46866 - DNA, 122 bp, Homo sapiens
agacataaggatgagtgtgccagagtctttttcctctaagtttattctctgggccgggcgcgatggctcacccccgtaatcccagcactttgggaggcctaggcaggcggatcacaaggcca

SEQ ID NO: 46867 - DNA, 122 bp, Homo sapiens
caactcacaatacacgttcacgtacattgctgggatagaccctagggtctggattataatcgaataaaggaggtcaaggcccagagaggtccagtgacttgctcaaggtcacacagccaatc

SEQ ID NO: 46868 - DNA, 122 bp, Homo sapiens
gcgccaaacagaacacaggagtgtggctagtcaaggtaatgttcgcgagtctcccacttgcgctcctcctaacacaagtatagtttaagtaacttgagcctatcccgctccgtgcgcctctt

SEQ ID NO: 46869 - DNA, 122 bp, Homo sapiens
cgacctcgggcgggctggcacaggtgatgttgttgtaggtgtacgcgggcggctggcaatcgtccccctcacagatggcctggacgaagcggggcacagcactggggttctgcagggcgaag

SEQ ID NO: 46870 - DNA, 122 bp, Homo sapiens
tgagggcgtatgtgtgtgggtgagggcacgtgtgcgcgcgtgtgggtgagatggcgtgtgcgtatatccatgtatgactgcatctgtatttgcatgagttcatgtgtgagtgcatgtttata

SEQ ID NO: 46871 - DNA, 122 bp, Homo sapiens
caggaggctgggctggtggccagctgcgcagggagaccgggaggtggcagatctgcggggcgcccagtcacttcctccacgttctcgtgctgggcgggaggagcggatggggcttgggaggc

SEQ ID NO: 46872 - DNA, 122 bp, Homo sapiens
atccagcagccagagcaagctgagtccccagaggacactaatgagcaagtgaccggtggccggcctgctcccaccctggggacgcactctgagccaggtctgggcccagcactgccatacac

SEQ ID NO: 46873 - DNA, 122 bp, Homo sapiens
taattttcctctccctctgccaatcgggtgctgggcccgccaccactgtcctccacagaacggctacacgcctttgcaccaggccgctcagcagggtcacacgcacatcatcaacgtcctgc

SEQ ID NO: 46874 - DNA, 122 bp, Homo sapiens
tcaccaagagggcagccgggacccctgggctgcagacaagaaagggactgtggggtccaccgggtctgggccacatcaagaagtgtggttgaagacccgcccctaggggctgaaagccaggg

SEQ ID NO: 46875 - DNA, 122 bp, Homo sapiens
ccggcggcctaggcggtagtgcagcagctcgcggtagcacggcccgtactcctcccagcgcggctcctggtagcgcttcatgtactcgctcttcaccccgctccccggggacatggtgccgt

SEQ ID NO: 46876 - DNA, 122 bp, Homo sapiens
aggctagagtcacgctagcacacagagccctaggattggggcgatggccccggcctcttccgttgtgaaggggaagcggaaactcagtctctggctcaggaattccacactgtggggtccct

SEQ ID NO: 46877 - DNA, 122 bp, Homo sapiens
ccagggtgcccctgagctggagcaggaacgccggcaccggcagattgtgtcctggttcgccgaccacccccgggccccctttggcctacaccggctggtggagcttgggcagagctcaggca

SEQ ID NO: 46878 - DNA, 122 bp, Homo sapiens
tgttgttggcagccatacatctctcatcagagtaatcagtaccccagtctgaggaccacacggggcaagtctgttaatgcttagttaatggataagaagtatttgcccagacatgctgtcaa

SEQ ID NO: 46879 - DNA, 122 bp, Homo sapiens
gcagacctgcgtcagcacctgggagatgcgcacctcgtggccaggctgctgctgcggcctcgctgctcctgacgcccccgggcaagcgcagcctccggcagctccaccagccactgcccaca

SEQ ID NO: 46880 - DNA, 122 bp, Homo sapiens
aacacaccaacgcatttttttttcctaaacaaagtaggaaagcggactttgcatgaggggcgggctgccgacccagcagtcttcctcggacagtccgtcctgattctctctggttggccgtg

SEQ ID NO: 46881 - DNA, 122 bp, Homo sapiens
tcccggcaccttgggctgttgtgagtggcgcgtggcgctcccactgtgcacccccggggccggttccccacttccacgacaccggcaggggggagccatccgccaggcacaggaggcctgga

SEQ ID NO: 46882 - DNA, 122 bp, Homo sapiens
gtcagcggcgggaaggcccttaggcgctcagagcgggcgggccctgtgaggcggaagtggcgggctctgtgggcggaaggggcggggcctgggagtgtcgtgtgcggactgaagggaaggct

SEQ ID NO: 46883 - DNA, 122 bp, Homo sapiens
cacgtgcctcctcttggtctcgctgtagatgtccacgaggcaggagccgatgcagacgggcgccgccttgtcctcacctgcgccggcccccacagcccccgccgccgccggcccgggctccc

SEQ ID NO: 46884 - DNA, 122 bp, Homo sapiens
caccagggcgaggcgaggagcctgtctcagggcctggccttgggtaggcgtccaggctctcggagccgcggccacccacaccgactttggattagtgatgaggaagggcgggggagaggatc

SEQ ID NO: 46885 - DNA, 122 bp, Homo sapiens
gaaatgatgccggccccgtaagtcagggcaattaccggcagtgcgaggagaattactgtacggggcggatctcccacaggcgctgtcaacacgcaaccccacccgtgccccgccgcaggacc

SEQ ID NO: 46886 - DNA, 122 bp, Homo sapiens
ccctctgaatgcagagatttgtactgggccaaccgaggggcagggcaagctcagtgcacccgggctgtgtgggtgccacgacctctaccaatggagggcaaccctgggcacctgtgtatttc

SEQ ID NO: 46887 - DNA, 122 bp, Homo sapiens
aaagggaaagcaggaaaatggctcaaaagagaaagggatgtgtgtagatgtgggaatgaccgtgatgtttggaagtcactgcgagcagccggtttctatagctggaaagagggagggaggtg

SEQ ID NO: 46888 - DNA, 122 bp, Homo sapiens
aggacttgatattcataattcagtgctgtggaaatgaaaaaaatgattgaagaggtggaacggaaatgaccttagggggaaaaaaaaggaccaaagaagtctgattaaaagttgaaatcagt

SEQ ID NO: 46889 - DNA, 122 bp, Homo sapiens
ctctggggcccttctggagcacccgggagccacctgtgcacttctcagtcgccacggccccggtgcaggcctggcaggagaaggatccccgcggaaatgcctctactaactcagcccctttc

SEQ ID NO: 46890 - DNA, 122 bp, Homo sapiens
aggagtgctgagtgaagcaaaggaaactggctggagctgagccaggttgccagtcttggacgcggctccatcttttattcagagaatgacctcatccttggtcctggttctttaaaagaaag

SEQ ID NO: 46891 - DNA, 122 bp, Homo sapiens
ccgaaagtgagggagcaagtggtcaccccaggagggtaatgggatccgcggcgcaggaggcggctcccgggtgaggatccctccgcggccagcaggggacgctgtggggctgcgccgccagg

SEQ ID NO: 46892 - DNA, 122 bp, Homo sapiens
agtggagggaggacccggtggcctggggcacctctagggggaccagggagccgtgttttgcgcaccccacaggctggaggactcggggagttgggggaggaggccaaagccacaggagcgga

SEQ ID NO: 46893 - DNA, 122 bp, Homo sapiens
aagaattaaaaatcctccttccggggtgcaccagaatcctcccatcgctcggtcctgtcacgtgaccacgcctactacaccagccacgtgagcttctgagccggcttccgcgcaggcgcagt

SEQ ID NO: 46894 - DNA, 122 bp, Homo sapiens
taatcatttcaacaagtatttgctaagtggaagccagaagaggaggaaaatgttttgccacgtggatgtgaagatttcctctaaaaggtacacatggactaaattgcctttaaatgttccaa

SEQ ID NO: 46895 - DNA, 122 bp, Homo sapiens
tcagagtctggaagttaactggggagaggtcaggtgggggtggtggtggcgggaataagtcgtggaggggtctcaggagaaataaccggagggttcttcagtaacaccatcgcgaattcatt

SEQ ID NO: 46896 - DNA, 122 bp, Homo sapiens
cctcaaaaaaaaaaaaaaaaaaaaaaaagtgaaatcatggcagactccagctaaactgtccgggtttccagagtgtttctgggtgggacagagggtgctacttttcattatcagttggatcc

SEQ ID NO: 46897 - DNA, 122 bp, Homo sapiens
gccccgagcgcccttctttgagccagacgccaacttgaccctcaccagcattatcaggagcgcgctcagcaagttggtagtttcctcccccctttcccggcgcccctcccgcccccattcaa

SEQ ID NO: 46898 - DNA, 122 bp, Homo sapiens
ccaggaagtgtctgaagcctgaagccaccactctataaacaccaaatgtattgctgagctcgagaataaaaatgatatgtgttaactgtaggcaagggacacataagcaaggcaaagtatta

SEQ ID NO: 46899 - DNA, 122 bp, Homo sapiens
acaaaaacaaacatgtatggagccatcgcacagaaaatctgataactatacagaccctgtcggcaggaaccatctgttttaatgtgtgtgactgtctatggttgcactgtacaactaacaaa

SEQ ID NO: 46900 - DNA, 122 bp, Homo sapiens
tgtgcacttaaattttctctgtgtctttttatggcttgacagctggtttcttttcagtaccgaataatattccattgtctggatggaccagagttcatccattcacctattgaaggacatcc

SEQ ID NO: 46901 - DNA, 122 bp, Homo sapiens
cggcactaaatgcagaagttcctctggttgccaccggacgcaactgtcaggtgacgcttccggcgcagaaaaatggcagccgccgctccggactcacgtgtgagtgaggaagaaaacctgaa

SEQ ID NO: 46902 - DNA, 122 bp, Homo sapiens
cgaggtcgaccgggccaggcccccgcatgctgctgaattgggcggttcaccagggctaggcgtcccagagacaggtttctggtattgatcctctcacacctcttgcctggggttccctggga

SEQ ID NO: 46903 - DNA, 122 bp, Homo sapiens
aactgggaattgctcgggcttcccccgaaagcctcagctcagtgccgggggagaccccaacggagggccagactcccccaaatccagtggccgaagacctggatttcctgggaggatccccg

SEQ ID NO: 46904 - DNA, 122 bp, Homo sapiens
tgcacaggccccttcctctctccccgcacctcctcccacaacgcctgcagatctcagatgcgtttgaactacagtaaccccaacccagctcgcggcaagcaggcagcgcagcagcagtagca

SEQ ID NO: 46905 - DNA, 122 bp, Homo sapiens
gtttaaacaacagatatttactttttcccagttctagggactaggaatctgaaatcaaagcgtcagtggcaccttctgagggctgtgaggagcctgtcccatgcctcttgactagcttctgg

SEQ ID NO: 46906 - DNA, 122 bp, Homo sapiens
gggtgccaagacagtggctggggaggcctgcttggagaacaaacagcctaggactttcttcgttcttccctttagatttggtgtcaatttccagaaattaatgaggaacaagactcagaaag

SEQ ID NO: 46907 - DNA, 122 bp, Homo sapiens
tttcaagttcttaggcctggacttcctgaaaggctccacagtacattcagggtaacgtagcggtaacatccttgctttaccaaaatgaccactgagaggccctttatttttgcactgattgg

SEQ ID NO: 46908 - DNA, 122 bp, Homo sapiens
tatggcccggttcccgctaagtccccggaccgcgtactccccggcccgcccccgccccgccgggtccccgcgcgcgcccacctcctgcagcttgcagtcccgcaggctcagcgtggccagga

SEQ ID NO: 46909 - DNA, 122 bp, Homo sapiens
ctgtccctgggcccgcctcctggccagacttccagaaacattgtccacatccccgttgcacgtccccccgtcaccggaaactgcagcccacagcactgggaagaacccgggaggcaggcgtt

SEQ ID NO: 46910 - DNA, 122 bp, Homo sapiens
tcatgacaaagtatgagaagggcttcataaaactcctctgtttaaactgcactcagaaaacggaggtattgtgcagtccccatcctgccatctggctcctcagttagtattttcactccctt

SEQ ID NO: 46911 - DNA, 122 bp, Homo sapiens
atcctgggggatgaggctggagatgggaaccaggggggaggctgaaatggacacagggaacggtacaggggcaggagtgccccaggctgcaggccccaaggtatttcgaggctgtggagaca

SEQ ID NO: 46912 - DNA, 122 bp, Homo sapiens
gagcagcaaggctgtgctcagagcagacaagtgtgggtcttgtggctaggggccagtattcgtcagcaacattatgtggtgctgatgagaggccacaaatggccccaaagacaccacttctc

SEQ ID NO: 46913 - DNA, 122 bp, Homo sapiens
caaactcctgaactcagatgatccgtccacctcggtctcccaaagtgctgggattacaggcgtgagccactgcgcccagccaaatgtgagggttttaatgaacatctcatatcttctggttg

SEQ ID NO: 46914 - DNA, 122 bp, Homo sapiens
ctgtcctgaggcccagagggcctgtcctgaagcccaagatgaagccgtcagaagcagtgacgcaggactccaattcccctgggtctggttccaaatcaacccgccaagctaccgtctctcaa

SEQ ID NO: 46915 - DNA, 122 bp, Homo sapiens
ggcatgtgttggaaattccccggctggttatgtagggtatatatatatatagtacatcagcgctggttcaaatggttttagaaaatgttttttgggttcttaatatttagatgagccaatat

SEQ ID NO: 46916 - DNA, 122 bp, Homo sapiens
gtagtattatatttttagttgggtggatggatggaagagtgagagagaggctgcggctgccgctgccttttcgggtgttgcttagattaaggctgagacttggctgcgattgggacgcgaca

SEQ ID NO: 46917 - DNA, 122 bp, Homo sapiens
ctttgcccagactagtaactctcccctgacgttccgcatttcccttgcttctcccggaaacgtggggcgcccaggaatcctaaacttccaatccctaagcttccaaaccccgcccctgggag

SEQ ID NO: 46918 - DNA, 122 bp, Homo sapiens
tgatccgggctctggagaacagagtcggtatctactctcctcatacagcctatgatgctgcgccccagggcgtcaacaactggttggctaaagggcttggtgagaagcctctttcatatttg

SEQ ID NO: 46919 - DNA, 122 bp, Homo sapiens
agcccagagaagaccgccaggggcgcgtggaaatggtgtccctcgtctccaaggcccagacggagcttagcttcctcttgaaggagccatatctgtatttctggtgaacgtcgtgtttgaca

SEQ ID NO: 46920 - DNA, 122 bp, Homo sapiens
acccgtcccgttcgacgcctctggccgccccgtccttgcttctcatctcacagggcactgcgagccgcctgtcgcaatcagcattgagagccaaaacagctgtttggtgactgtgcgaggtt

SEQ ID NO: 46921 - DNA, 122 bp, Homo sapiens
tgcaagaagtgatgaacatctctaacataagtgatctcctccttccgtttctctcaccttcgtgtcattccagagcacctagtaggggactggggatttaaatggttttctatctatcagtc

SEQ ID NO: 46922 - DNA, 122 bp, Homo sapiens
ttagaagtagaaagacaagatcgagctcctcagaacccaggtcgatggctgcagagccttcgaccttccgagagcgaatggcgatcactctttccggttctctgcgaattccagctggaaca

SEQ ID NO: 46923 - DNA, 122 bp, Homo sapiens
ccagagagcacatcttgccggttcgcaggacgtctgcagtcggcaaactcctggccggaacggcacagaccgcactcccgcaactcggttcccgggctagattcgtatgcggacgggtaccg

SEQ ID NO: 46924 - DNA, 122 bp, Homo sapiens
gatccagacaagtgagagtcaccctctgagacagttccatttcacctcctggccagaccacggtgttcccgacaccactgacctgctcatcaacttccggtacctcgttcgtgactacatga

SEQ ID NO: 46925 - DNA, 122 bp, Homo sapiens
cctcgctgtgccccactctgggaaccggaaacaggaagcgccaagaggccgctgggcaaccgctcctcccaccagaccccgcggcatgtgaccatagaaccatttcgcccctttccccttcc

SEQ ID NO: 46926 - DNA, 122 bp, Homo sapiens
gtgattcccgcgctcccctgaggagcatatgaagtacgtcggttctgccaggttggaacgcgctgctggacactcggccgtaaggcggatcccggatcccctcccactccgacccttccctc

SEQ ID NO: 46927 - DNA, 122 bp, Homo sapiens
ccccgaggagatccaggtctcccctggagacacagagatccaccgagtggagcctgaggacgttgccaaccacctaactgccttccactgggagctgttccgatgtgtgcatgaggtgggga

SEQ ID NO: 46928 - DNA, 122 bp, Homo sapiens
gggaagaaggtgcagtcgagccttttcaacaatttggagtcccagtgcggttcttcctgccggtcggggtgcgctgtgcctggggtagtccactggttgctgactggcttcaagttggaatt

SEQ ID NO: 46929 - DNA, 122 bp, Homo sapiens
cacctgctggccgcacttctggggacaagccatggtggggagaggatgtgggggagaagacgggcctgggcattcaggggcctgctccataccagcctctctatctgctccttctttccctg

SEQ ID NO: 46930 - DNA, 122 bp, Homo sapiens
tccaaaccaggcctgtaaggaggagctgaggtttcggctgagcccccagcctcccccgaccgcacagcctcgggcatgaacccgcgaagccagacgcttagttgcttatcaggccatcgctg

SEQ ID NO: 46931 - DNA, 122 bp, Homo sapiens
tttgcggtttctctttccagccagcgccgagcgatgggtgagtgtcgctctgcattgaggcgggtgaagggaggttgagctcaatcaggccccatcctgcttcacagcctactgaggagtcc

SEQ ID NO: 46932 - DNA, 122 bp, Homo sapiens
agcgcgtgcggcggaggccgagcgtctctatgatcctggcttctggcaacgtcatcgtcacgcgccggatccaacccccaaccactttagccagctctagaggcgcgcgtggccgggacgga

SEQ ID NO: 46933 - DNA, 122 bp, Homo sapiens
tgccccttcgcgagcgaggccctgggatgccggtgcgagggtgtgagtagtccctttgtgcgcaaccccccgctgcccgtgcctcggccggtgcgtggctgacacctccgctgggtggaggc

SEQ ID NO: 46934 - DNA, 122 bp, Homo sapiens
agccagactcaccacgcagggccgctagccgtcccgcagcgccgccatcttgttgtcacgcggtttcctaggcgaccaggacccgtgcacttctcattggctagtttgagggaggcctgagc

SEQ ID NO: 46935 - DNA, 122 bp, Homo sapiens
aacgcggatcactggcctgcgagcaggggccaagttcccaaaaaatgctcttcttaagtacgtgggtctcccaggatcccaagagatgcccactccctgagtggccctgaggctgaaggagg

SEQ ID NO: 46936 - DNA, 122 bp, Homo sapiens
gacagaagtccggccgcctccactcgccgagctgggccccagcggcctgacaggctgccacgtaggtagccactgcaggacagaggcctccaggatggccctgaacttggcaggcgtccagc

SEQ ID NO: 46937 - DNA, 122 bp, Homo sapiens
ttgggagttcttcgatgcctcttcccccctccccccaggattccctccccataggccacccgccttccagcagggcgtggtctctacagaggaggtcaggtctcccaggcttcctcagcgtc

SEQ ID NO: 46938 - DNA, 122 bp, Homo sapiens
agttggagcaagtcatacacggatctggagacagagctctcgaggcaggagcgggtgctgcgatttcaaatattataaggtggctttgtctggggcagagcatgccaggggatgagaggtag

SEQ ID NO: 46939 - DNA, 122 bp, Homo sapiens
tccctaagggaaggctgggataggggcacccctgtcccagcgggaccccgcacccctcagcgccccacggagacctgcaccttccagactgacagtgctcggggccctctctccctcttgcg

SEQ ID NO: 46940 - DNA, 122 bp, Homo sapiens
gaggtgattcttggcctcaccctcacccccaggaaagattcttaaccagacccaggatggcgccttctgctactgggagatctgtggccccaacgggacggtggagaagcacttcaacatct

SEQ ID NO: 46941 - DNA, 122 bp, Homo sapiens
ctctgataggataaatcctgatgattctctcagggacctctagtagattagctcaacactcgagaatcattgcagcttcaaggtaaaagaaaaattcccagggaatcagtgtcccccattcc

SEQ ID NO: 46942 - DNA, 122 bp, Homo sapiens
gatgagcgcggctccctctcctttgtgttggatctggggccctggggagagctgggcacacggctggtgtgtagtagcggctcactgctgggacactgctgtctgctgagggttgctcactt

SEQ ID NO: 46943 - DNA, 122 bp, Homo sapiens
taggcaacggctgtgccggtggtggggtaggggaaccccgtcactgcaggaaacggggcccgagacacgtgtgagaggcacaaggggacccacctggcaccccctccccgtacacctagccc

SEQ ID NO: 46944 - DNA, 122 bp, Homo sapiens
gggagccggcggcgctgtgagcgctggtgagtttgccggcggggtggggtggactccgcgcggggggcggagaggacgtagcgctcggcccggcgcccgccccctagtgctgcccccacttt

SEQ ID NO: 46945 - DNA, 122 bp, Homo sapiens
gggccgcgggcgggttccgcgtgcccctccctcgccgcaccgcgcagtcccgccagggggcgccaggcaccggccccccgctctctgtgctccctgcgcaggtccagctgtgctccaagatt

SEQ ID NO: 46946 - DNA, 122 bp, Homo sapiens
aatggaaaactttgaagtaagtgaacttaaaagaagaactgaaaagtcagcccgatgccccgaagtcctgtgggcagcctagccacagtaacttggtggaactcattagcgcaggccgttct

SEQ ID NO: 46947 - DNA, 122 bp, Homo sapiens
actcctggctccccagggcctggcctactcaatctctcccacctcatcctctggcatggacgcagtcagggagtctgctccaagcagacactggtggtcccgctccactacaacgagtccta

SEQ ID NO: 46948 - DNA, 122 bp, Homo sapiens
gatctaacacagcagtgtgtaaaaacagcgccaagcgtgtcctcggtgggcgctcagaggcggttgtgagcagtgcagatgctgttggcctagttctgacagggtggcccaggggtctcccc

SEQ ID NO: 46949 - DNA, 122 bp, Homo sapiens
ttccagggcagagggcggcgcgagggagggagcgagggagggagcgagggaagggaaaggcgagcgtgagctgcctcaaatgcttggaataattccgcttccgtttggaaagccgcagcctc

SEQ ID NO: 46950 - DNA, 122 bp, Homo sapiens
gatgtcacagcacaaccaggcatgcagcttacttttttttaggtttcccaggctcaaaaccgcaaagtaccattgtttttgccagttagaacactccagaggtttctagaacaagcagaaaa

SEQ ID NO: 46951 - DNA, 122 bp, Homo sapiens
agccttaacatctgtatgctaattacagacacggtggccgacgctaggcacacacaaatccgtcttaatccctcccttttgcgtggatgaaacctggtccaacattcgtaaaagcatgcaaa

SEQ ID NO: 46952 - DNA, 122 bp, Homo sapiens
gatccaaaaatattgcagagtttcccgaggcaggccctacgagatccctgaaacgggatacgccgagctgaacttggccacataatgccgctctgtttgggaagggcccggagcactggggg

SEQ ID NO: 46953 - DNA, 122 bp, Homo sapiens
actctcttccaaccaacatcgaagcatcctgaatgagacccggatgaagtctgaacagcacgtttcccaggttcagaaaacttgagtggtgggaagagaaaaagaaacaagcagaaatcagg

SEQ ID NO: 46954 - DNA, 122 bp, Homo sapiens
ataagtaacttcagaaacaggtcccaagtggcctgagaatgtctatgcacttttcaaaagcgctgccagaaacgtttactgcacggctcccttggtagggagaaggttctttcatttgcaaa

SEQ ID NO: 46955 - DNA, 122 bp, Homo sapiens
agagcgaggtgctaagacttagagtggacccagaggctctggccctcctgtctcccaccacgcactccatttttgtcacatttcaaacctatcgcttttacgatatatgttcaaaaattgtt

SEQ ID NO: 46956 - DNA, 122 bp, Homo sapiens
cctgactcggagcgtgcagctcgccgaccggcgctgggactccgggccaacgggaagaggcgcctacccgcggcattcagcgaccccggctgacgctctcacccgcggtccggccgggacac

SEQ ID NO: 46957 - DNA, 122 bp, Homo sapiens
cagggtgctgccagaatccagtgccttgcggctgtgggtctgagggttccgattccctgccggctgtctctcagctcttagaggccgctcatggctgtggtccccgtgtcctcaaagccagc

SEQ ID NO: 46958 - DNA, 122 bp, Homo sapiens
cacggggcagaggccgacgaacccatggcacctctcaggccccggatctgcgctggctcccgtccactgccttgctgtgggcatgaggaatggaaacgcttccagagcagggcctgcctctc

SEQ ID NO: 46959 - DNA, 122 bp, Homo sapiens
cgtccgctgttcctaaggcaccacggggccgtagacagaatcatgaacgacctcagcgggcgagccctggacgcggcggccggaataaccaggaacggtgggtgctcgcaggcgcctggctg

SEQ ID NO: 46960 - DNA, 122 bp, Homo sapiens
tccgcgaaatgatacgcctctctgcaatgctattggtcgaaatgcatgtcaatctcccagcgtctttatccgtgttccttgactctgggcaacttaaaagccctaatacttttactttcgcc

SEQ ID NO: 46961 - DNA, 122 bp, Homo sapiens
ttgcgagaggccgagcgaaagcctgggaagggaggaatagggagggacatagaagggccccgccctgccttctggggcaaagcggagagtggtcggttctgccccacagtaacgcgaggaaa

SEQ ID NO: 46962 - DNA, 122 bp, Homo sapiens
ctgtccccagatctgatcctttgagcatcagggctggaaagtcgcctccggggtggtggccgtggcagcctcagaggtttctgcccgtgctccccgagacacttggccatggcacctgcctc

SEQ ID NO: 46963 - DNA, 122 bp, Homo sapiens
actcatttttgggggagaaagcaagtgctgggctcctgggtgcccacgcagctgccatcacggcctatgccctgacactgaccaaggcgcctgtggacctgctcggtgttgcccacaacaac

SEQ ID NO: 46964 - DNA, 122 bp, Homo sapiens
ctgtgaattcattcactcagcttctgacacagattctgacccacacaggccctctataaacgttgagctgaagagaaatattcttgcaaacttcaattctgattcctttttctttacaggaa

SEQ ID NO: 46965 - DNA, 122 bp, Homo sapiens
ccgggggatgaacccagaagggccagccttccctgttttcacaaaaaccagaaaccacatcgcaaagagaagaacaaacaattttgaaagggaaataaatttaaaaaaaaaatgggaggaga

SEQ ID NO: 46966 - DNA, 122 bp, Homo sapiens
tttaggtccacagcacattatcaccgtgtacgcgtgtttaggtccacagcactttatcaccgtgcacgcgtgtttaggtccacagcacattatcaccgtgcacgcgtgtttaggtccacagc

SEQ ID NO: 46967 - DNA, 122 bp, Homo sapiens
agtggtctgtgtgccacaggtctttaaagatgatccagagttttgagagctatcagcgctcggagctctcattttaacccacacagacagagaggaattccaagtccacccccgtaacacac

SEQ ID NO: 46968 - DNA, 122 bp, Homo sapiens
taaatcacagagctgatcagtggctgagctgggatttgaatctagattctctaacttcagcggatttctgcagaaaaggcaggtttgtttatgaaggggcttattatttatgtcatagatac

SEQ ID NO: 46969 - DNA, 122 bp, Homo sapiens
ttcatgcattaacatcctcttcacacactatacacacacgcacgcgcgcacacacacgcgcgcgcacacacacagcaaaaggaaaaaagaggcagcagaaatctcagctgtacttctagccc

SEQ ID NO: 46970 - DNA, 122 bp, Homo sapiens
agggagcagctggaattcaccaccttccttgcagggttcctgagcattaccatagcacaacgctcccctcagccagaacccaggcagaaggactggagttcagaaaacaatggtctgtttga

SEQ ID NO: 46971 - DNA, 122 bp, Homo sapiens
cgtcggcctctttcccgctctgctgtgtctgcctagctgtttctcacccttttccttcctcgggtcagcgtctgcatcaagagtgagtcttcaatcgtctgccggatgttttcatgatgcgg

SEQ ID NO: 46972 - DNA, 122 bp, Homo sapiens
aaagcgcttggtattgagtctgtggccgacttcggttccggtctctgcagcagccgtgatcgcttagtggagtgcttagggtagttggccaggatgccgaatatcaaaatcttcagcggcag

SEQ ID NO: 46973 - DNA, 122 bp, Homo sapiens
gccttctgggatttgtagttctttgaacaggagtaccgtttgtattctgaccagaccaagcggttatcaaggaataatctcttcagctagcaacaaatgcataactcgatcgcttatatgcg

SEQ ID NO: 46974 - DNA, 122 bp, Homo sapiens
cccaccatgtgctcttgcccactactgttgggtaggaccacaatctagtgttgccaaacacggtgaaacttgtgattcttggaagaaatcaggaatctcaattttacatgaattttcccagt

SEQ ID NO: 46975 - DNA, 122 bp, Homo sapiens
gaccacacctctcccgggggcgtttctgtccctgctcacaggtgcatgaggatcggactccgcctcccatcttggtttcgagtgaagtgacggctgagccaagagcttgctttcagctttag

SEQ ID NO: 46976 - DNA, 122 bp, Homo sapiens
ggccctgggtcgcacgggagacccccttcaagaatgggaaattgaggcctgctgggagtacgggccggggccactacctcctctgcgccctaccggaagcgcgcgcgggctaggtggtccca

SEQ ID NO: 46977 - DNA, 122 bp, Homo sapiens
tacaaagtgttatcttaagtagagcaaaggcctcagtactggagaagccttctaataccacgcccctcccagtttaaatcttatttaacacatagctgatgaagcccatcgttaacgttccc

SEQ ID NO: 46978 - DNA, 122 bp, Homo sapiens
gagcactgattaaccagccagccagcgaagagccaactctcaggtgatgattgaccctcccggctctccgtacttcttttgggtttccattgcctactgggaaatgtagttctcggggccag

SEQ ID NO: 46979 - DNA, 122 bp, Homo sapiens
ccactgtggtgcagtactccaacctgcccaccaaggagcggctggtgcccagggaggtgccgcgccgcgtcatcaacgccatcaacgtcaaccacgagttcgacctgctggacgtgcgcttc

SEQ ID NO: 46980 - DNA, 122 bp, Homo sapiens
ggaacccataatcatcccaaactggcgcaaatggtgggttttactgtccagaggtcatttcgtctctgcgtttccaacctcctcgcccttttactttttttgggctcactcaggaaactgga

SEQ ID NO: 46981 - DNA, 122 bp, Homo sapiens
ggggattctgtgcattctataggttgagtctaccttggggagagcccggctgggtcagagcgggtccaaccctgaatatttgtgatctggagatcttggcctgtcagtgggggccccccacc

SEQ ID NO: 46982 - DNA, 122 bp, Homo sapiens
tgcacagaggtggcagatctgcacaagacaaatttaccccaaagaacaagttaatgcattcgtggttccacagggttgcaacttaacacaaaacacattagctgtggatgttgtctgtcatt

SEQ ID NO: 46983 - DNA, 122 bp, Homo sapiens
cggtatagggctggacgatgggtcactggacagacctcacgaacagggacttttgggggccgcccttgggggaaccattcctcgaaagttgcatcatcactaaaagtgatgaaggtacgtga

SEQ ID NO: 46984 - DNA, 122 bp, Homo sapiens
aattaactgtacactatttaatccaccagttccggttcattagaaaaatgcagttctcgccggacatggtggctcacacctgtaatcccagcaattctggaggccaaggtgggcagattgct

SEQ ID NO: 46985 - DNA, 122 bp, Homo sapiens
cttaaaattcccttgaatgattcttcaagctccacgcatctgtggggacgttccaggtaccgccccacaatgctacctcctctttaaaagaagtcgttcagctggggcgggctggcgctgcg

SEQ ID NO: 46986 - DNA, 122 bp, Homo sapiens
aggatgggggagccagtttgaaccggatatggtgtgcttcagctgctgcgtcagtgagagcgggcgccatcgcagccattcagcacagagagacaggaagtccagcctctcccgatgccgag

SEQ ID NO: 46987 - DNA, 122 bp, Homo sapiens
ccattgcttccgacgctactcctgccgggtcaccacaggcgcacgtgttccggcagggcgcggcttccggtgacccagctccgccctaagccccatcccaagccccgccccttgactgttct

SEQ ID NO: 46988 - DNA, 122 bp, Homo sapiens
tttgcctttctacgcatctgcgcccacctcggcccagaacaaggatttcaaaaagtgccccgcattttgatttcagaaggactcaccccaagccgcggaagcagagagagtggccaggataa

SEQ ID NO: 46989 - DNA, 122 bp, Homo sapiens
cgcctagcggtccgggctcagggtcgggggcgtaagtcacttggcgctgaccagcggagtcgggccggggggaaggcgctagagggagcccaggaggagccggtaccgggctgcgggcgctt

SEQ ID NO: 46990 - DNA, 122 bp, Homo sapiens
accagctggagccggaagcggaggtgcagtgtggctagccggagaccggaagcggaagcgcgcttgtgtcttgtgagaagagccgcgcttgcagcgtctgggagaatctttcggtctccgcg

SEQ ID NO: 46991 - DNA, 122 bp, Homo sapiens
gagagccacctcctccccggctttctggttcagatgtcttgtctcaacagacggcagattcgcagggaagcaggccgagcctgatcttttctccgctagaactgctcaacaggtgaagaatc

SEQ ID NO: 46992 - DNA, 122 bp, Homo sapiens
agctggggccctccgttcagttcactcctacctgggggctgcatcgggcaggacaggctgcgggctcctccccacgtacctaaccccacggcccatgccagtcacaagccccaggctgtgtc

SEQ ID NO: 46993 - DNA, 122 bp, Homo sapiens
ttgctgatttgtgacatagtctcatgttttgctgatctgtagcgtagtctcatgtgtgtgcgtcttggtttgttgtcattctctataggttgtggacacatcgaaaggaatcgcagatgtcc

SEQ ID NO: 46994 - DNA, 122 bp, Homo sapiens
agctgcttactgtctagcttggtccttactggaataggttacatttacaactgcagtttccgagtcagtgttcactagaggaagagaaaaacgaagagaataaaagttagttttctttctac

SEQ ID NO: 46995 - DNA, 122 bp, Homo sapiens
tgagcatgtccagggctggggtgggaaggaatctatgttttcccctcctcccagcacatacgtttgctgggtgctcgagagctgtggtcttctgatatagatgtggctgaatggcaggaaca

SEQ ID NO: 46996 - DNA, 122 bp, Homo sapiens
cacatttaacagtgatgccctgaaacctggagagagaggcaaatagagaatcacagcttacgggagcagaagtcagtggagccacgtaaaccctaattgatgaactgctggagacagtgtgt

SEQ ID NO: 46997 - DNA, 122 bp, Homo sapiens
ccgtcatttgggattcagaagacaaaagacatgattcaaaaccctgccccttgctcttgacgggcgatccctgcccagccctgaaaagtctccctgttgtcctggcccctgtcccaaagctg

SEQ ID NO: 46998 - DNA, 122 bp, Homo sapiens
gagagcgaacagcggtgagtcaggagcaggagcgtgcggaccaaaaatcctcagcccttacgaccgcgtcttcctcaaaaagaaaggggtgggacttgagcaacgcttatatagcacgcttg

SEQ ID NO: 46999 - DNA, 122 bp, Homo sapiens
aagttcatctaccgccgcgattgccctgattcaaagaacaacattaaatggtttgattatcggatggtcatttccctcttccctccacccctgatctaatttctaaacgccagtctctcgcc

SEQ ID NO: 47000 - DNA, 122 bp, Homo sapiens
gttgtgctctcttctttcactctgggctctagttatctaacccttggctagttatgggggcgggggtgtggtgccctgttggccaacagggcagtgggactgggtttgagctgggcttatcc

SEQ ID NO: 47001 - DNA, 122 bp, Homo sapiens
ctcccctcccccaccacagccaagctcatagtggagacggacacgtttggcagccgggttcgcatcaaaggggctgagagtgagaagtacatctgtatgaacaagaggggcaagctcatcgg

SEQ ID NO: 47002 - DNA, 122 bp, Homo sapiens
tcatttgtctttgctgcctccacgttctcccctctcctttgctcttgaacccactctcaccgggttttaatttccagtgcttcactaaagcagctctagcaaaagtcatcaatgacctctgc

SEQ ID NO: 47003 - DNA, 122 bp, Homo sapiens
agccatcgtctctagcccagggaaagccatcgtctctagcccagggaaagccatcgtctccggcccagggaaagccatcgtctctagcctatgttattgtgacactcttaacctcatctcat

SEQ ID NO: 47004 - DNA, 122 bp, Homo sapiens
agtggtgaccgggcgtgggggggcatgccgcagccctgggacacagtcgggcaccttccccggacccccaggccttggctgtgcctcaagtcagagagggtcagccttcaggccccggagac

SEQ ID NO: 47005 - DNA, 122 bp, Homo sapiens
gcaccacagcttggtccagctcttcagggtgccgcggatctgcagggaggatgctggcgtcgatgcccaccctctggggccgccatccctggggcatcttgatggcttggcggggagccagg

SEQ ID NO: 47006 - DNA, 122 bp, Homo sapiens
tgggactccaggaggcctcgagcccccgctgaccctcaggccccgctggccccagatggtcgggggtggagctctggcttatctctccagctgcccagttccctgccactttatcatggagg

SEQ ID NO: 47007 - DNA, 122 bp, Homo sapiens
ttcagtatttttatagccagagaatgttgatcattatagtcatcaacttgggaggttgtgcgcttattccagaactgttgccagtacatacaaccttataggaattccttttgtgaatacct

SEQ ID NO: 47008 - DNA, 122 bp, Homo sapiens
gggctgttccactgagccctccactttctgaaatgaatggggacacgttctattgttattcgaattgtgggaaattcgacagttattcgagttgtggaaaagcaggctccagaacgtcttgg

SEQ ID NO: 47009 - DNA, 122 bp, Homo sapiens
caacatagtgagattccatttctacaaaatggaagtcaaggctgtagtgagctgtggtcacgccactgcacaccagccttggcaacagaatgagatcctgtctcaaaaaaaaaaaatttttt

SEQ ID NO: 47010 - DNA, 122 bp, Homo sapiens
ggtttgagccaaaccttggattcagagccctatgcttaccctgaccttaggccttgggcacggtgctccataagggcagaaggctgtgcctaccttcatccgtgaagaagggtggaggggct

SEQ ID NO: 47011 - DNA, 122 bp, Homo sapiens
acttagcacatgcagggtatacagtcagtgctcaataaatattggctggcatgatatttacgttcagttcacaccgccatacctatttctccactgcctatacaatttgtacctctgaaaac

SEQ ID NO: 47012 - DNA, 122 bp, Homo sapiens
cgggatcccgcggctggggccgcgccctttcgcttcgttgcgcgccccgtgcgcttcccgcgggagcaccagttcttcgaggtgcgtgagcaaaagagggaaaaagtagttgtaggatccag

SEQ ID NO: 47013 - DNA, 122 bp, Homo sapiens
accagaaaaaaaggcaataggtaacgaatttttctttttttaaagaaacagattattggccgaggaaaaaccaatttcgctctaaaggataagcaacaaaatactgaggggggaaaaagcct

SEQ ID NO: 47014 - DNA, 122 bp, Homo sapiens
aaaggggccagcctgggtgaagatgggtgaagagtcagagccagtccttttcctaccaaacgagtcagatcccaagtgcatgctgggatttgtggacaaacatctttacagaggactacaat

SEQ ID NO: 47015 - DNA, 122 bp, Homo sapiens
aagagattgaggtgaggcaggagaatagggtctgcaggcagggaacataaagctgattcacgctgacttcttagaactaaataaaatggacacatttcagctatgacaggaaatattttctt

SEQ ID NO: 47016 - DNA, 122 bp, Homo sapiens
tttaaataccttaggcataatcatgtcacaattttaatcaaaagtcactagagattcattcgtgatgactgccacgatgaacctcctaaacctgagttcaggcaccctgtgtctaagcctac

SEQ ID NO: 47017 - DNA, 122 bp, Homo sapiens
gagcctcagcactaagaggtcagtgggttattctcaaggacactcaagaactccccctgccgtttcttgcaaacgtaggacacccactgcattatgtcaactgaggaaagaatattaaaaga

SEQ ID NO: 47018 - DNA, 122 bp, Homo sapiens
cgtcctgtcgccgcacctcggcgtcccccccctcaatccgcctcagccgaccccctcccgcgttcggctccacacgctaccgcctttggggttggtcggtctccggccttccccatcccacc

SEQ ID NO: 47019 - DNA, 122 bp, Homo sapiens
gagcacatgcacactgtcagggctagcctgcctgcttacgcgcgctgcggattgttgctccgttgtacctgctggggaattcacctcgttactgcttgatatcttccaccccttacaaaatc

SEQ ID NO: 47020 - DNA, 122 bp, Homo sapiens
gaggaaggagtcaaggagctgccggggaggctgacagagccagaggctggagctcccctacgggagccgggagcataaccctgctcctcccgccaatgggggcgacaaaagccgtggaaggt

SEQ ID NO: 47021 - DNA, 122 bp, Homo sapiens
tacccactgtcctcgggcatctgactctggtctctgcactggcatcaagagaacgctgctcggtggtttaaggctaacaccttacagggtaacactgtaacactggccctggagccaggtgc

SEQ ID NO: 47022 - DNA, 122 bp, Homo sapiens
tgtggttcgagcaagcgtggctggaccaggatgggcacgggcagggctcccgtgagctgccgtccacactcacccggcatcgggctccttggcgatgaccaagttctttgttgatctctgtc

SEQ ID NO: 47023 - DNA, 122 bp, Homo sapiens
tttctggcccgaagggaggaccccacagctctgggcgctctaggaggagaagccagaacccggagcgtttccagcgagttcccaggtgatactgatgctgctggagccagcacttcactttg

SEQ ID NO: 47024 - DNA, 122 bp, Homo sapiens
cgcgctcctccctcggtgccgcccgtgatgtgtgttagtatataatcagagaaactcacacgcggagttttaaataatgcctgccctgcctaaggtgactcatctgaggccgtgagttcctg

SEQ ID NO: 47025 - DNA, 122 bp, Homo sapiens
ggcctgcgggggctgtgaaaggatgggaggactcggctccccaacccacctttacaaagccgaagtgtggctggtgaggtacccgacacgcacacactgcaccgtgatactgaaccatgcct

SEQ ID NO: 47026 - DNA, 122 bp, Homo sapiens
cccggcagagtcaggaagcgcaggcctgggctgccagtgaggtgtgggcccaggcaggggcgagacctatgggcaggaggggcgtcaggagagggggccacaggcttgtgtagccccgtccc

SEQ ID NO: 47027 - DNA, 122 bp, Homo sapiens
acttctggtgatccgcccgcctcggcctcccaaagtgctgggattacaggcgtgagccaccgccgccgacccgggccctgtttgattatgtctgctgctgccttggccgttttttcccccac

SEQ ID NO: 47028 - DNA, 122 bp, Homo sapiens
gtgggtgagagtgtgtgggtgtgtgtggggagtgtgtgtgtgtatgtgtgaatgtgtgggcgtacacaggcatgcacatgcacacatccaagcacattcaggggtatttctgggcgtgtgtg

SEQ ID NO: 47029 - DNA, 122 bp, Homo sapiens
agtgtgaacccatctgatgttagtccccagtagggaaaatgcccatgggaaacggggtgtcgggggagcccaagcctgtggcccggacattctgcgcagtgagttgctgccagtccatgatg

SEQ ID NO: 47030 - DNA, 122 bp, Homo sapiens
tctggcaatgtaggttccccacgccgggagttcccaagctgggttggagaactcgagcttcgggcattcagtggccagctcggctttataaaggaccgtgcccttaacagcagggctcgagt

SEQ ID NO: 47031 - DNA, 122 bp, Homo sapiens
cgccgattggctgggcccgagcgctcccacggcggccgggggccccagggcggcgccggccgcgcccgctccgcggtgactcatccagcaccccacctctggagctggacgggcgcccggcc

SEQ ID NO: 47032 - DNA, 122 bp, Homo sapiens
catcctaagaacaaagtgtccacaggttcccaccagaacaaaccagttcaatgcattgctcggaggaaaaagcaagttaactcaagcacacaattacctgtagttgcatattatacgtaagt

SEQ ID NO: 47033 - DNA, 122 bp, Homo sapiens
tcctggagtattcggcctgaaattgggaatttgggaattgctgctctagagcgctccctgcggagctcggccgcccgcctctcccccaggtctctcctggcgtccccacgcggggcgcaacc

SEQ ID NO: 47034 - DNA, 122 bp, Homo sapiens
aaaaaggaagccatgaaaagcaggctctcccagaactgtgggcctgggactttgggagcccgtgggacttttgggagtacatggcatggacaggggatacacagtgtccttcctttatttcg

SEQ ID NO: 47035 - DNA, 122 bp, Homo sapiens
gggcaggggcggggagaagccatgcctccagctgcagaggttgcacacagctggcatgatcgcggtcacctgcgcggcgccggtgcccttgcgctcgcgttgcccggcccgcggccgcggac

SEQ ID NO: 47036 - DNA, 122 bp, Homo sapiens
ctgcttccgccctgcgccgggcacttccgcccgcacccaccaggcgccggccccaggccccgcacttccgccccacgccggcagcactgccgctgggcgttctatctcaggtggtgtcccgt

SEQ ID NO: 47037 - DNA, 122 bp, Homo sapiens
gtggattaaaccagtaatttctaaccttcctgtgtatcaagcttgcaacacagtcagacacgagtggagatgtgtgcagtatgctgcttgccttgtacccacaggcccctaaatctctagag

SEQ ID NO: 47038 - DNA, 122 bp, Homo sapiens
ccggaaatattcctccacctcccctttgccgtcaaagtgcgcggcggccaatctccctgccgtcagcttcttgatgttctccaggccgctgtagaccacatagtggaggcccaggcgcctgg

SEQ ID NO: 47039 - DNA, 122 bp, Homo sapiens
tgcaggtctgggaggcaggacagaggtgtgaccacctccttcccacagtatcttcctgaccgctgccctggggctgcctgaggccctgatcccggtgcagctgctatgggtgaacttggtga

SEQ ID NO: 47040 - DNA, 122 bp, Homo sapiens
ccgtgtcgctgtgtgggctgtttgggaaagctgggctgagggcttggttcggagagcccgcggagacccgggtgggagtgtgtggaagtggagggagcggggagacagcagcatcggcgctg

SEQ ID NO: 47041 - DNA, 122 bp, Homo sapiens
tccaagtcagccacgaagacacttcaggaaatacaagaaaacgaccctgccactgactttcgaatgtgtctgcatccacgcccctgtcccatcggaggggcacagggtaatacatagcactg

SEQ ID NO: 47042 - DNA, 122 bp, Homo sapiens
gcgccctctcttgtgaaaccctgcggattccgcttgcgggaagtggagggcggtggcctccgccttttggggcttctgggctgagggaagaggatggaggggcagaaagggagtgaggtccc

SEQ ID NO: 47043 - DNA, 122 bp, Homo sapiens
ggagaacacgcagtacactctaacatgggcagtcttcacctaacggatccagaagagctgcggggtcagtgcacacagttgccgaagcagctaacttagatcaagaccccacaaggcacaag

SEQ ID NO: 47044 - DNA, 122 bp, Homo sapiens
acgaccgctcccggagttttgcttccgaggtcaaggcgagtagcatgtgcgggagactcacgttgccggcgaagtgggagagagaaaagtggtaacctggggctgggggccggcgcggcgga

SEQ ID NO: 47045 - DNA, 122 bp, Homo sapiens
ggatagtgtcacatcttgggaaccacggaaatccagaccagactcctggggtcaagccaccgcagtccatccctgtgcatgccagactcagatgccctgcgctggcacaaaccacccgaccc

SEQ ID NO: 47046 - DNA, 122 bp, Homo sapiens
tctagtgataagggctattttctcaccctggtactgtgagggtacccctcccagaggactcgtaatggtttgctgcatgcagaagacaggtcagctagccctttctgaaactacatatttac

SEQ ID NO: 47047 - DNA, 122 bp, Homo sapiens
cacaataactggcatcaaaagagactgtccttaaaacaggtgaatagagtttaccgtaaacgtgcagtgtattttatatttcaaaatgaacttttagaagcagtcagctcccccctcccttt

SEQ ID NO: 47048 - DNA, 122 bp, Homo sapiens
gtgggcacttgcagctgccgatgtggctggatctggaacttctcagacggctcctgtcagcgccaagtttcaccaaatccaggcctgcgggctcctcccccaggacccccactcgcagtccc

SEQ ID NO: 47049 - DNA, 122 bp, Homo sapiens
catagttcaagtcctcatttactaatgaatttcagaaaagcagttagaaaacctgggtgtcgccaccatctccactcctgccaagcaagcctccgccacgcggtcggggacccgggtgggcg

SEQ ID NO: 47050 - DNA, 122 bp, Homo sapiens
ctccggggtgagggagggtggcgggaattcgcacggcctcagaggacggggccagctagccgggaaaggaagcaggagcaggctccccaggcggcgcagtgggaggaccccaagagttgcgt

SEQ ID NO: 47051 - DNA, 122 bp, Homo sapiens
cacacatgcagctccccgctcctgccccagacccagcccagcctcctgctatttatgaggcgggcaggaagacaagaggagagatgagattatgagaattggtgagaaccgtgggacttggc

SEQ ID NO: 47052 - DNA, 122 bp, Homo sapiens
ggcttcgggaggggattgccctgagaggtccgggaggacttgctgtggaattcaagcgaccgtgggccttgagggaaccggggggcaagacacccacccagcattcgcggaatatttcctcg

SEQ ID NO: 47053 - DNA, 122 bp, Homo sapiens
tggggtgtccaggcaaccacttcacccctcccctggcctgccccgactgagggctctccacgccctggcccagggctccctagatagtgaggagccctcttgggaggtggcacagagctgat

SEQ ID NO: 47054 - DNA, 122 bp, Homo sapiens
gtctcgggcctcacattgacttcctggggaggctgcatcccagcagcagtgcttgcagcccgagggtccagcagccccaggtgggcacctgagggaggggctcctcgacgagacgacagcct

SEQ ID NO: 47055 - DNA, 122 bp, Homo sapiens
gtcgcgattggccgtcctgcagccgttgagatttgaactcggtatttgtggctttgcccgcgcgttgccagactcagaggcggccctttgcctctgcctgccggggattggccggattctcc

SEQ ID NO: 47056 - DNA, 122 bp, Homo sapiens
aataagtttaactactgacaagttaatcagctcttcaagtggcagtgaaaacaggtaaagcgtgttcttctaatagttgcctggctgaggagcaagatatgacaacagcgttttaacctaag

SEQ ID NO: 47057 - DNA, 122 bp, Homo sapiens
cagcgcgcggctaaccagtagctgcggcggcccgggaccctgctcttcggtgcccgcgtccggcccctccagggctgccaccagcagcgccggccctgccgggctctcccctgcaggcctca

SEQ ID NO: 47058 - DNA, 122 bp, Homo sapiens
taatgatcagagagatgaagagtatgaagtcaatgatgacgcaaaagcatgaataagtaacgtgttcattaagcaagaaataagagggtaaaaacgttttctgttaggttttcacctgtcaa

SEQ ID NO: 47059 - DNA, 122 bp, Homo sapiens
ggaccgaggcagccctcccctttaaaagaagcggaggacaggattgggatccttgaaacccgaaacccagaaacagcatcggagcggaaaccagaggggaaaccttgaactcctccagacaa

SEQ ID NO: 47060 - DNA, 122 bp, Homo sapiens
cacatgaaatgaagaaacctcatttcaagcgcggctccgccacactgcgctagtctctgtcgacaacttcaagtggctagcctcacgcacaaacgtgtggcaaagccacactttccagcttt

SEQ ID NO: 47061 - DNA, 122 bp, Homo sapiens
ttgcttttttttttttttttaatacgtacgcagctcaggagggaaacgggcgggggcgggcggcgagggagaataactgtttggtcctgcaaagacatctgtttctcatctccgtttgctgt

SEQ ID NO: 47062 - DNA, 122 bp, Homo sapiens
ggcgggccgggctatgcagaaacaccggggcccgcgggacacaggacgctgccccactgccgcagagctgaatctggacccccgggctttgctttcctggggcctgtgctcctccctccccg

SEQ ID NO: 47063 - DNA, 122 bp, Homo sapiens
taaaaggattgaaaaaggagaaccaaagtaaaataggattttgtaggtcaatgaaaaagccgaaaacaaaagctctgtcacttggactgttccaagttctcaggcaaggatctgagaatttc

SEQ ID NO: 47064 - DNA, 122 bp, Homo sapiens
accagctgtgagagggtcccaagcatggagcttccgtgccctctccctgtggaatcaagacgtttcacccaccctgcacatcaatgtgtgtaccaaccaggaggttccatgactctaggagt

SEQ ID NO: 47065 - DNA, 122 bp, Homo sapiens
aatgccccaaagagtgcttaaaaggtgcaccaggattaataagtacatggagacagcacccgtcaatggaaagggcagcaaggagggccacttacggccacaggggttgggggtgggggtcg

SEQ ID NO: 47066 - DNA, 122 bp, Homo sapiens
tcgccttggtcttgttcgcagtgagaaggcctcaggacagcgcgttctttaaaggacccccgtaccctgggtaccccttcctgatgatcccggacctgagcagcccgtacctctccaacgga

SEQ ID NO: 47067 - DNA, 122 bp, Homo sapiens
cggagacgccgcccgcccggaggcggcgctgtgacccaggttggagagtcaggagcccagcgccgcgctgcggggcctgctgggacttgtagttcgcaggttcggggtgcgcaggcgcagtg

SEQ ID NO: 47068 - DNA, 122 bp, Homo sapiens
gtcatgttggccaggctgctctcgaactcctgacctcaggtgatccacccgcctcaacctcgggcccatttttctatagctgaacttgaaccatttcttggggacttctcactacactaaat

SEQ ID NO: 47069 - DNA, 122 bp, Homo sapiens
caacttcaataaatccggtaactggaggcaaaaaatagactccgagggctgggtctggtccggatgaaacgctagggctccttcccttccttgaatcttgggcgctggaagccagccacggg

SEQ ID NO: 47070 - DNA, 122 bp, Homo sapiens
tggacctgccggccctccctccaggaccgaggggctcccaagggaaactcaggtgagtgtcgccctctcccagggaagatgggaatcagggcttggagacaactggctatcctgcatgatcc

SEQ ID NO: 47071 - DNA, 122 bp, Homo sapiens
acacagtaggcgctcaataaacgcttgctgtgttcataatgaatgactcaatcaggcccacggtgggggtgaaggggggctccatactgtgcctaaggatacagtgaatgagcaagtgacac

SEQ ID NO: 47072 - DNA, 122 bp, Homo sapiens
tctgtggcccccaacgtggggtgtgtgttacaaagaaaaatatttatcctgtttgtgtggcgctgggtccctgaatggtccaccaataaaacaacaccataaagggcatttcacagctgagc

SEQ ID NO: 47073 - DNA, 122 bp, Homo sapiens
ttctttccaggccctgacccagcctctgctcccgggcgaggaaactatgggcctcccgtgcgcagggcctccgaggcacgaatgagctcatctagccgagattcagagagctgggaccacag

SEQ ID NO: 47074 - DNA, 122 bp, Homo sapiens
ggcaaaatctcattacatctgctctaatcgcttagcaacacaaagccggggcttgtgcggcgaagggaagccattcacagagctctgacaggccgcattcagcgcgcgttagtcagctccat

SEQ ID NO: 47075 - DNA, 122 bp, Homo sapiens
cctaggggagcttcagcatctgcaggggttgcttgttgagctgaacagctgagggaacagcggagccctgtgcgccaaatgatctccgagccacaagcctgacaaaacacaggtggattcca

SEQ ID NO: 47076 - DNA, 122 bp, Homo sapiens
cagcaggggtctaccagttggggcctggttggcggaatcaggcagttgggacctggttgtcgggggtccaacagttggggcctggtcaaaggggatccagcagttggaacctggtcagcagg

SEQ ID NO: 47077 - DNA, 122 bp, Homo sapiens
ggcctcctcccccaggacaccagcccagcgccacccacacgccgcgggtggatgggactccggacacgcggtctacatcccccatcccgggctccccggggtctctcggtgtggggggagcc

SEQ ID NO: 47078 - DNA, 122 bp, Homo sapiens
aatggtatcttttccaggtagcttttcttgaatgcttctttctgctccaatggctgcttgcgatacatttttcttattataatattttcctacttatgctgaaataatattttcatctacct

SEQ ID NO: 47079 - DNA, 122 bp, Homo sapiens
aaaccccaccagggaaaggtagcacctgagcctcccgggctgcgcggacacctgtctccccgcgggtgccgcctactactccggtggactccagtccccaggttccgccccacggggactgg

SEQ ID NO: 47080 - DNA, 122 bp, Homo sapiens
tccgggcggcagagcagtgggacctgcgagtgtcctctctctgggctgctcagagcacaccgccctctccccacaggcccggccaagccccggccgtcccacccaggagggtcctcacctct

SEQ ID NO: 47081 - DNA, 122 bp, Homo sapiens
gggaaacggagctgtgcgccacgcttgcgggccagtgcgagttccaggtgggcatgggctcggtgcgccctgcactcggagcggccagccggccccgccggccttgggcagtgaggggctta

SEQ ID NO: 47082 - DNA, 122 bp, Homo sapiens
gccctggggttggcgggcaacctgctggttctctacctgatgaagagcatgcagggctggcgcaagtcctctatcaacctcttcgtcaccaacctggcgctgacggactttcagtttgtgct

SEQ ID NO: 47083 - DNA, 122 bp, Homo sapiens
cgggggcgggggcgggggcgggggcagatcctatttgcgcctgcgcgggactggaggattcggtgttgccctttccccctgctatttccgtttccgcgcttcaagcggatctcttccggtta

SEQ ID NO: 47084 - DNA, 122 bp, Homo sapiens
cccagtttcatttcagggagagagattaagaagaggaaatgtttgtttggtctccatgctcggatgcctccccctgtggagccccctactggagatggagcactcaccaggtcactggtcca

SEQ ID NO: 47085 - DNA, 122 bp, Homo sapiens
agtgaccctcccgcctccgcctcccaaagtgccgggattacaggcatgagccgccgagtccgccgttgagggtttaccgcctactcatccttcgcggcaactttcgggctgctgcgatgcca

SEQ ID NO: 47086 - DNA, 122 bp, Homo sapiens
gaaagcactttggcagaagacggggtttccaccctcctcggcatcaaccagtgtctgggacgggaactggcggccgctgcggcctggcttcccagctgccgcccgggtctgcccctcccaca

SEQ ID NO: 47087 - DNA, 122 bp, Homo sapiens
cactgacacccggagagagggacgcacagcggctgtgggtgaagcttcacaaaacccagtcgatagacacacgcacgagttgtacacaaagccttggggcgcgcagatacgcacacgcaggt

SEQ ID NO: 47088 - DNA, 122 bp, Homo sapiens
gaggagcgaagaggcggagtcctcactgttgttggggttttctgagtgagacctcgggtgcggggccggggggaggggtcccgctctgttccccagcctgggtcttcgcactcggaacccgg

SEQ ID NO: 47089 - DNA, 122 bp, Homo sapiens
ggaaattcccttactgccagccctgcccctccgtctggcactggaatggagcaggatactcgccctcttccggcctcagtttccacatctgcactctgaagggtgggacagcagctcaggct

SEQ ID NO: 47090 - DNA, 122 bp, Homo sapiens
gccaacctgttaatgttcgttttcggattctggacttcgggttccgctgaggacggatttcggaataggcacagtggctgccccgaacccctcaaggcggcctccgcgggctgtggctgaag

SEQ ID NO: 47091 - DNA, 122 bp, Homo sapiens
ggctctataaatatatatgcatttatataaagatatatgtaaaatctctctactgaagctcggtataatcctctcttgtgtaatgggacacactgcctgccatgagacttgcttttctgtac

SEQ ID NO: 47092 - DNA, 122 bp, Homo sapiens
gaagatggacctgttctacactgtgacttattgttaaatgatgcttacatgtgtggaagccgttgaatcacaataagcaggcaagctttgatggaggcttgaaccagggtgatagggaaagg

SEQ ID NO: 47093 - DNA, 122 bp, Homo sapiens
taagaggaaatcatagaccaaagcaggctgtgcttcctcggatgccttcccgtttttcatcgtagaagataagaatgtatatacacatcttcgtctaacctaactcctctctccttccaggt

SEQ ID NO: 47094 - DNA, 122 bp, Homo sapiens
agagccctggcagggtgctcctggtggggaccagtccgggctggcccgacacttcctgcacgccggcctccctgtccctgtcctttcgcctgcagcctctgcctctgcctatctccctcttg

SEQ ID NO: 47095 - DNA, 122 bp, Homo sapiens
ggtggagggacaggagacacagagacttatcccttttctgagtgtcactgtccatagacacgctacaaatatctgggcttgtcaatgctatatgactagaaccaagtactaaagtgtgtgta

SEQ ID NO: 47096 - DNA, 122 bp, Homo sapiens
gatggtcattttggcgatgtcagctacttttaaaatttcaaaggaaggctgggtaggtaccgtccctttttatagagggaaaaggaattcacctagtaagtcaaggtggcacctaacctgtg

SEQ ID NO: 47097 - DNA, 122 bp, Homo sapiens
ctgggttcaagtgattctcctgccttggcctcccaagtagctcagattaaaggcgtgtgacgccaggccaggctaacttttgtatttttagtagagacggggtttcaccatgttggccaagc

SEQ ID NO: 47098 - DNA, 122 bp, Homo sapiens
gggggacttgcctcctgagccccttaccctgggcaggtggtggctgctcctttccctcatcgcggagcactttacacaactgtatgatcatgggtgatctggggcccatgggggcagcttcg

SEQ ID NO: 47099 - DNA, 122 bp, Homo sapiens
cctgggtcctgtctttcatctctgcacccttccggtctgaaacagcggccagttcttgttcgatgtaaggaacactagtacccaagggctcaggagttccgcctctcttccccagttctggg

SEQ ID NO: 47100 - DNA, 122 bp, Homo sapiens
gcgcggaagccctgtccagggcccgaacgtgggtgcgggctgggggcgcagcggcagaaacgcggccttagacgcgcgcggggggccggtgtcccccccgcccccacggcaccgggagccgc

SEQ ID NO: 47101 - DNA, 122 bp, Homo sapiens
tgagtaagggccacaggacctgatgagccagtttaccagactgggtggtggcaactggtccgtcagaatgcagggtatgaaaaacacctcaaacacaaatcttaagttttacaatagtggtg

SEQ ID NO: 47102 - DNA, 122 bp, Homo sapiens
tgatccatccccgtaggcaaggagatgtgtatccacacacaaaatagtaccatgtccagtcgctgagtctgagagctgggtctatgcccgtgtggacaccccaccgtccactcacattcacg

SEQ ID NO: 47103 - DNA, 122 bp, Homo sapiens
tcagaacacctccctcggaacttggccatggcctaaacgtaaggctgctgcgtgcattcccgcagagctccgtggcctcatggccgcgcgcaatacaacgcgcgcgcacgccgccagagctc

SEQ ID NO: 47104 - DNA, 122 bp, Homo sapiens
attctggcccgtgccacagatccagaatagctggtgaccctggtgtgctgccaccatttccggccaggaatttggccttcctaaagcacagtttgccaggtgatgtccgttccaggtaaatg

SEQ ID NO: 47105 - DNA, 122 bp, Homo sapiens
ttgttaacccatctagggaaggaaagagatgggctgcctggtaaactaaggtaatggaagcgtgagagtaaacacaccccacatacccccttggggaaataaacaggagtaacagtatgggg

SEQ ID NO: 47106 - DNA, 122 bp, Homo sapiens
gagagaaaagctggcaagacagttttttgttgttttggggtgagtcggtagtaaacaaatcgtcccaaatcaatgcactttggatttggctaggtgagggaataattcacagtaatttgtat

SEQ ID NO: 47107 - DNA, 122 bp, Homo sapiens
gagccggatcaacaggaagtgtggcgcgcccggcagggaaaccggaagtgtggtgagctccggtcccgacaccggaaatgtggcgcccgcgcttccgcctgcgctcgccggctcgcggggag

SEQ ID NO: 47108 - DNA, 122 bp, Homo sapiens
ccagtgacctgacccaggactcaaaccctcatcctccagagactgcacgtttaaaagagacggcactgctttccccaaatatgggtgccccatactcctcacccacagccacaggtgcagat

SEQ ID NO: 47109 - DNA, 122 bp, Homo sapiens
ccaggcacaggcaccaatgggaggtgcctgggctccacaggcccgtcggggccagagggtcgccggtagcgtcaaccaagtgcacgacagcccacgggtggctaggcgcgtgggaagagccg

SEQ ID NO: 47110 - DNA, 122 bp, Homo sapiens
tccagccatcggctctgcttacgtgattccccgcctccacaggaggaactgaggcgggagcgccacggacaccaggtcctggaaggacccagcagtctcttgtgttttgaaggttttcttat

SEQ ID NO: 47111 - DNA, 122 bp, Homo sapiens
tgcccggcggacaccccagtgcgcgtgcgtgggcgctatgcgcgctgtaaatgcagtgtgcgtaaccgggcgcgagagcatagattcttaccgcaaaccctgggagcagtgcgcatgcgtac

SEQ ID NO: 47112 - DNA, 122 bp, Homo sapiens
gcgtggctacgttgcttccggtgcctggctccgtttcctgcttttggttcttacagtagtcggcgtaggccttaggtgggttcgtgcgccttctacctcgctgtttcggttttcctggctcc

SEQ ID NO: 47113 - DNA, 122 bp, Homo sapiens
ccaagggcggtgcatgcaaattgactcccgcatttggcttttccccgggctccgtctccgcgcgctgcaacccgcgacttccaagaactccccgcgtagtcagctgcccgggccacgccccc

SEQ ID NO: 47114 - DNA, 122 bp, Homo sapiens
ccccgggttcgcgcccacccctgttcgccggggagtggccaacagcgcaggaaatacgggcgaaggagatgcccattttatttcgtgcagaattctgaatcaccaacgaagacccttagtaa

SEQ ID NO: 47115 - DNA, 122 bp, Homo sapiens
gtgtctgcattccttctatctcccggcattctccactcctgtctctgtgtgtttaaaaaccggtgtgggaagtgtgcacgcctgtgacgtcagactccagaccatgtatttcctgactccca

SEQ ID NO: 47116 - DNA, 122 bp, Homo sapiens
caaggatgggggcgagggcatccaacctggccttggaatgctggtagaagtcacagacgccgatgtgggctgctaaatgtctttgcccttgttcaccctcaggtggtctttgtttaagttct

SEQ ID NO: 47117 - DNA, 122 bp, Homo sapiens
tgatggacacgtccgggacccagggacccggagaccaggaatctgcaggtctcagggagccgcagaacctgaaacccaaaaataccaggcttgatcgcctgctcttcggtagtgtcgccatc

SEQ ID NO: 47118 - DNA, 122 bp, Homo sapiens
tggagacgttgtgagttggagatgttgtgaggtggagaggttgtgaggtaggagaccgggcggttcctcttcacaagaccacaaggctggctgttggctctcagggcaccatctgccgacac

SEQ ID NO: 47119 - DNA, 122 bp, Homo sapiens
tgggatagggtccaggttcaccaaaggaggcaacaccagcaactgacgaaaccatagcgacggctgaccgaccatgactcgaggtacaagacgtcaaacctaaggctactaatcaacgtgcg

SEQ ID NO: 47120 - DNA, 122 bp, Homo sapiens
aaagcatggtctaagtatggctttgatctgatgctgctgcagtgacctttctagtacaggcgccactccccctacctctagtaacatggggctcactacatcactcctacttctgctcccat

SEQ ID NO: 47121 - DNA, 122 bp, Homo sapiens
ttcctctccctaccccctttaattatacaagaaattcatccacccctataccaccggtcccgaaaggacaggtcccactattctcagaccctacaagacacaagttcccgttctgttactcc

SEQ ID NO: 47122 - DNA, 122 bp, Homo sapiens
atttgtccccagaccctactacctggcacagtaggcgctcaatactgttgattgaataaacgactgctactttggaaatcatgtattatttaaatcacatgtttaaacgcacataaacttct

SEQ ID NO: 47123 - DNA, 122 bp, Homo sapiens
ctgaggctccaggcggcgaacaccctgccctgtggtcacccagcacaggtccggagactccgattgtcacttctgtttattgagttacaagttgagatgtgcaggttcggtggcgccagccc

SEQ ID NO: 47124 - DNA, 122 bp, Homo sapiens
gccgggttggcggggcggcccggacctcccggctgcccgcgctagcacctgcccaaggctcgggtctctcagaggcacggagctttctctgcggaaatggccaggctcctgggcgcgctggc

SEQ ID NO: 47125 - DNA, 122 bp, Homo sapiens
taattaaatttaaaacccagtttcacaggtggctagatgcaacattttagacagcccagacggtgaatatttccatcagcataaaagctcaattgcatagaactggtccaaacaaaatattt

SEQ ID NO: 47126 - DNA, 122 bp, Homo sapiens
ggcctcagcaagccacatggtgcaaatgccgccccacgccttaggcctcagcaagttgcacggtgccaggctgaggtcaagcacatctctgctgtcctctggcatttccagtgccctgggct

SEQ ID NO: 47127 - DNA, 122 bp, Homo sapiens
gtatctataggcaaattttcccatttccctttggaaagtgctgttttcttgctttttttccgcctttccattgtgtcagacttataaggcaatcagccaactgtgggcatgaaatccttggg

SEQ ID NO: 47128 - DNA, 122 bp, Homo sapiens
tcagttaatttttgtctcctctaaaacagaccccgttgctctgggaggagagccgagctgcggctcaggggccgtcactggtcatttttgccctgatgtatttttgcctctacatttcttga

SEQ ID NO: 47129 - DNA, 122 bp, Homo sapiens
ctcacctttcagaacctgcaggagcagatcaatcccctcttggtaacacaccagagcctgcggataccgcgactccgaatctagttctactgcccgctttagcacagtggctgcagctgtgc

SEQ ID NO: 47130 - DNA, 122 bp, Homo sapiens
gaatttctgctctctgaggtctcctcgctccttttcccatctgggtgttggaggcggagccgccggctgggttcggagccccacccccagctcccatccaatcaccgtccctccctccgggg

SEQ ID NO: 47131 - DNA, 122 bp, Homo sapiens
ggtagacggggtcgcccacggcagggcgcggagcctctgcagcccgaccctcccggcaggcgagccccgcagcctgccagccccggcccatgccggacgaggacgccacccagaacgcgggc

SEQ ID NO: 47132 - DNA, 122 bp, Homo sapiens
tggcctccagagggccggtcgatcttcgctttaactccagggtggtttccttgacgttgtcggcagtagataagaaggcctcttctgagctggtgaatctttaacctacctgaatctttaac

SEQ ID NO: 47133 - DNA, 122 bp, Homo sapiens
ggaagacacacatgctctgttaagagctttggattttttatttttttcccctagaggcaacgagagctatggaaagtttttgagcagagagaatagcttaataagtcacatttttggaagag

SEQ ID NO: 47134 - DNA, 122 bp, Homo sapiens
agaccctaagacatataccccgtgggcgcctaaagcactaagctcacgacgctgggaaagcggggccgagaaggagggactcggggcgacccgacagcgccagacagggcggccggcgccga

SEQ ID NO: 47135 - DNA, 122 bp, Homo sapiens
ggcattttttaatctatttacctggagtatatgttgcattgtcccccagtgggatcatttcgttcaagtcagacacctttggactctacagcattgcatttctcgagttgcacttgtcaggg

SEQ ID NO: 47136 - DNA, 122 bp, Homo sapiens
ccgcgtttgggagagagctgtgacttcgttgccttgtgtccggcccctgtgcatggttgccgtcgtgggcttctggccttgtctgcatgtccacaggcctgtgtggctggcggttttcctat

SEQ ID NO: 47137 - DNA, 122 bp, Homo sapiens
gagggagaaagtccaattttaggattagtattcttgtttgtgtaaaatgagatagagatccggttttattctcctgggtgaaggtccacactttaaagattttactgtcattccacctcccc

SEQ ID NO: 47138 - DNA, 122 bp, Homo sapiens
ctgttgggcccgttcatctagtctggctacctgtgctgctagccaagacctgcctgcacccgcctgggggaagaagagggggcagagtccagagggtggggttgactgtctggtgtcttgat

SEQ ID NO: 47139 - DNA, 122 bp, Homo sapiens
actcgcgcctctgggaagccgcagccccagactccagtcgcgcttctcgcccggcgccgccggaaagcagcctctccaacgcctgccggaaagcagcccggcccggcattttacgacgttcg

SEQ ID NO: 47140 - DNA, 122 bp, Homo sapiens
ctgggctcctgggtgcccacgcagctgccatcacggcctatgccctgacactgaccaaggcgcctgtggacctgctcggtgttgcccacaacaacctcatggcaatggcccaggagactgga

SEQ ID NO: 47141 - DNA, 122 bp, Homo sapiens
agagaaaggcggggaggcaagggcgggctgggcgtattccacgagcgcctcggcggttggcgaagcggacggggtgcagcctccccggtgcgaggaacggtctccgctgacagataccctcc

SEQ ID NO: 47142 - DNA, 122 bp, Homo sapiens
ctctgcggttaaggaaggacccaggctggggcgaacgggaccccagggcggggtttccctcgcgggggcggggcctcctgaccggccggagccggtttggccaccggagacccccatcggtc

SEQ ID NO: 47143 - DNA, 122 bp, Homo sapiens
ggagggacaacagcttctgtgaaaaggtgttttgtttccacccacagcagggggagagcccgggttctgagtcaacccagatgggcttctgattccctcatgcacactcatctgtgtgactg

SEQ ID NO: 47144 - DNA, 122 bp, Homo sapiens
taggtaagcgctgagcattatataaaccattcagcattatataaaccatataaacgttgccggcacacagcaagcacatagtaaatctttttaaagcctctgaacctgcattgcctcctctc

SEQ ID NO: 47145 - DNA, 122 bp, Homo sapiens
gtttggtcgccatctttcggagcgtcctttcccgcgagtgctgcagtcccggatctcaggcgtccgttagctacagaggccaattcctaacccgcgcggctcgaatcccgggggtcccatcg

SEQ ID NO: 47146 - DNA, 122 bp, Homo sapiens
tgtaaaaggatattgtctgtagtgaaatatacactagcaaaaccagaaacatcccacatacgtgccaacagaaaaaatttaaaatatgatagttacatggcgaaatgttaagcagctattaa

SEQ ID NO: 47147 - DNA, 122 bp, Homo sapiens
gggccaaaccaggagggtggagttttctttgccctcggccaggagcacatctccctgttgcgttttttgggggagacagagaggggcgggcctgagtcgagtatccctctcctcgcagcgcc

SEQ ID NO: 47148 - DNA, 122 bp, Homo sapiens
gcctgggggaagggcggggtgccagtctcacctgacagggctgcggcggggactgatggccgtgatgaccgggttctgcatgtaccagaaggtgaggttgccgtgcacgcagccccgacgct

SEQ ID NO: 47149 - DNA, 122 bp, Homo sapiens
agggcggatacggattcgaatagtggagggcgggccggcggcttctgcgcaggcgctttccgaacgagggaggggatggtggggagcggagagaaagtggggctcggtaattttgtgcggtt

SEQ ID NO: 47150 - DNA, 122 bp, Homo sapiens
ccgaaccctcaactggggtgggggctacacagatgagcctgtgtccaagatcctctcccacgtggaggaggggaacgtggtacagctggaccgctgggacctccacgctgagcccaaccccg

SEQ ID NO: 47151 - DNA, 122 bp, Homo sapiens
gaaggcagcaacatgttaatcagtcccccatccactcggtgcctggcacaggaggggccccgcctcccgccagcctcttcctagtgcagacatcactgctgcctaaggatgagtccatcacc

SEQ ID NO: 47152 - DNA, 122 bp, Homo sapiens
ctggccttcttcaacagctgcctcaaccccatgctttacgtctttgtgggccaagacttccgagagagactgatccactccctgcccaccagtctggagagggccctgtctgaggactcagc

SEQ ID NO: 47153 - DNA, 122 bp, Homo sapiens
cccccttaaaaagtgatccgaattctcttaaagaacatacctgatttttggctgcaactccgattgttctattttttgatccaaatgatatgactgacctagaaaaaaatatattccaaaaa

SEQ ID NO: 47154 - DNA, 122 bp, Homo sapiens
tgtcttccggtaaacggaccaagttctcacttcccatcctcctccccagtctcacccacccgtgctcccaagagagcaattcatcatgtcagtgtctggtgttttcttgaaggcctgtgcta

SEQ ID NO: 47155 - DNA, 122 bp, Homo sapiens
cgcacgggactccgctgccccaggttccgggacagtgactacatttcccaacagcccctgcgccacatggtggtcagtcagcctgcaagtcccagcatgcccgagtcaatcgtggggtgggg

SEQ ID NO: 47156 - DNA, 122 bp, Homo sapiens
tccctcgggcgcatccccagaagctgcgggtgtccccggaggacttgaagtcctcccgtgcgtctcgatgccaccagtttttgtttctttggtgaggaatcggttcacggtgaaacttcatt

SEQ ID NO: 47157 - DNA, 122 bp, Homo sapiens
ttgagttggatcctgaaggacctgatggaggtggggagggaggtgggcggcaggtccacgcgatggaggaggcacacagctgtgcgtggccactaaggcattcgcacgcatttggtttgtcc

SEQ ID NO: 47158 - DNA, 122 bp, Homo sapiens
ctcccaaccttcttcctggatacttgtgacataatcccacttctcactcccattgggtgccgggtttttagagaagccaatcagcttcgccgcgatcccggcactacgatcccggcactaca

SEQ ID NO: 47159 - DNA, 122 bp, Homo sapiens
ccaagctatcattgcttttcctaaaagcacagactaaatgggagccgcctgcagccaaagcgttttgagatgaaagaaaattggctccacttgtaaactacagatgagaattttgtagagaa

SEQ ID NO: 47160 - DNA, 122 bp, Homo sapiens
gtgggaggtccttatgctaggagacctaatgtctgtgcctcagtttctctatcggagaggcgatgtctcaagaggcctttcagggctcagagttgagctttctgagttccacatggaagtga

SEQ ID NO: 47161 - DNA, 122 bp, Homo sapiens
atctctctgagcttcggtctcatctgcaaagcagggtaccctaataatggtaaccggaaacgtccccgaaactaccttctcgtaccaggttcttggtgaagcacttggcacgcatcggagct

SEQ ID NO: 47162 - DNA, 122 bp, Homo sapiens
gttggaactactgagaatgagctcattgaatttatatgcagtgacttgtggggttgtctgcgatattctattaggttaagaaaaggcagctatgcaggtgaggtaaggtgtgtgtaacgtat

SEQ ID NO: 47163 - DNA, 122 bp, Homo sapiens
aaggggaaggaaagggagcctgccaagttctgcttctgcgaggcagctgccaccaaaacccgctccgagggccccgccgggccgccctggcagctggaaaagcgcattcctgctcgcccgag

SEQ ID NO: 47164 - DNA, 122 bp, Homo sapiens
ttctcccgtcagtcaggggccgtatttcttagccatcctcctctgaccttcatttcaaaccgcctgctgacgcatctaaccttggcccgttccgtgggaactccagactcagggtgaccaac

SEQ ID NO: 47165 - DNA, 122 bp, Homo sapiens
gggtaccagaccaccggccccaggaaaaggaccgcaagatgggcgccgccatcttggtagcggcacgaagggaatgctgggattgcagaggctcccaccacacccacctacttacagctcct

SEQ ID NO: 47166 - DNA, 122 bp, Homo sapiens
gactgtaactttaccaacacttctagattcttcgcaagttacttaacaggcctaagaagacggggttgtgaatgtggatgtctgtaagtatgtgcagcgtgaggcaggaagtaaagaagaaa

SEQ ID NO: 47167 - DNA, 122 bp, Homo sapiens
cagggtgttattcacagatccagagaggcagctctcagaccaacttgttttgactcctggcgggaccagcagctgctgcagtggcctagggggtgagcccaagcatagatgtcattctactg

SEQ ID NO: 47168 - DNA, 122 bp, Homo sapiens
gtgtgtgttcatttagagccacacacatttgtgagagccagcaggggctgagaaccggtacgctaacacacggtagatgctaatacatggtagacaaaatactccaaaacctagggcctgtg

SEQ ID NO: 47169 - DNA, 122 bp, Homo sapiens
ttcattaactttaggtgagttccctgaaagaagcacaaatgagcctcagttaacatacctcgaagaaatttcttaactcacacacacaaaaaactttctctttcaccaggttctcatagctg

SEQ ID NO: 47170 - DNA, 122 bp, Homo sapiens
gtgtggttcagaggccacaggctgggaagagggatggcgggcgagtccaaggaaactggccgtgtcaccgtgcacctgccacttcagccccacgggtctataaaatgggcatgattatcgtg

SEQ ID NO: 47171 - DNA, 122 bp, Homo sapiens
gtttcatgggccaggcatactgacttgtgcagcctcaggacactgctttctgcacactggcgggcgactctagttccagctccagccgggctcaaatggtcccaggtacacctcaagctgcc

SEQ ID NO: 47172 - DNA, 122 bp, Homo sapiens
agatgctcaagttgatgccaccccacgcacgtgaggctgggaccaggggtggcactgacacggctggggagcccactcccgaggttcgacccggggatgtgcacagccacattccaaaggcg

SEQ ID NO: 47173 - DNA, 122 bp, Homo sapiens
actctctcagctgagtcaggggacacctcaggcactgggacagttgggcatttggaggcccgtgtgtgaattcctgctcctcatgctggagtgcctcccatttccttcccctttctctgtca

SEQ ID NO: 47174 - DNA, 122 bp, Homo sapiens
ctcgtgcccagcccagcgtgggtgcaagctatctggtggctgctcggatgatgatgatgacgatgacaacgatgacgtagcaccccatttccagctcacaccatcgggatcaccgccagcat

SEQ ID NO: 47175 - DNA, 122 bp, Homo sapiens
gattcagaagagtaagaagtgggtggaaaggatgatggtgaggggatgaggagaaagaagcgacagcggagaattcccaagggagagacaagcagagactggctgaggccaggccgaccccc

SEQ ID NO: 47176 - DNA, 122 bp, Homo sapiens
agtgatccgccctcctcagcctcccagagtgctggaattacaggcatgagccaccatgcccggcctctccttatgtttgaaacctcactgtgaataaggaaactgaagtaccagcattagat

SEQ ID NO: 47177 - DNA, 122 bp, Homo sapiens
atgctctgaggtgccctgacataactctcgttagaatcgcgtgatctgaaacaagagttccgctgcttctctcgagttttcccctactcagacagctgcttttattcatttctattcctgtt

SEQ ID NO: 47178 - DNA, 122 bp, Homo sapiens
cctgagggcctgcggtttcctgcgggtctggggtcttgcctgacttggcagtggagactgcgggcagtggagagaggaggaggtggtgtaagccctttctcatgctggtgctgccacacaca

SEQ ID NO: 47179 - DNA, 122 bp, Homo sapiens
ggaagatattgtttaaaagcaaatccacataaatttgacaataattactgagacctgtaccgtgtgcttggtggtgttctagtctttgggaatacagcaatgaacaaaacagactctgcctc

SEQ ID NO: 47180 - DNA, 122 bp, Homo sapiens
ttcctccacagcaggccagttgtagccatttgttgattgaatttgcagggagtgcacaaacgtcgctcaggtggaagcaggggcagggctgtgctttggcacggagggcctcgggcttttac

SEQ ID NO: 47181 - DNA, 122 bp, Homo sapiens
agcactgtgtagtatgaggtctgagcacatattctcagcttttgaggagaatgatgataacgctggttcacttcttttatcagatgggtgatgactgggtgaatcaattagccattttctac

SEQ ID NO: 47182 - DNA, 122 bp, Homo sapiens
agctgacgggctgaggggcagctgcgtaaacctctgctttgggcgccacaagccacaagccggaccaccacgtgcgtacaggggcagcgccgggggcgtggcgggggcgtggacgcccaccc

SEQ ID NO: 47183 - DNA, 122 bp, Homo sapiens
ctccagcagcgggttggactgcaggataatgtccttcacgtgctgtcccagcaaatagaccggaggttaggaaggtgtgaacacctaccacacagtgtacgccaaactttctctaaggacct

SEQ ID NO: 47184 - DNA, 122 bp, Homo sapiens
cttctcactgtgtatggggggtacctctgcagtgtccgagtctaccactatttccagtggcgcagggcccagcgccaggccgcagaagaacagaagacctcaggaatcatgtagaactgggg

SEQ ID NO: 47185 - DNA, 122 bp, Homo sapiens
cggcgcgctccgtggtcctccctcgctcgtctcctatgctcatatttggactcggctgcccgtgcccaggaatttcccgtcatgcctcccgccgccccgtccgtcgcccggagccggggagg

SEQ ID NO: 47186 - DNA, 122 bp, Homo sapiens
gccgcgggagggggctggctgtctgcgctaacctggccgggagtggggtgctcgctgtagcgcgagatgtgcaggagcccggaaggccggctgggtatgcttctttcaaggctgccagcttt

SEQ ID NO: 47187 - DNA, 122 bp, Homo sapiens
acacacacacacacacgacacacacacgagcgcgcgcacacacacacacacacacacacacgcacacacacaccgagaagtggaatgcataggagcaacaataggaacctggctaagaatct

SEQ ID NO: 47188 - DNA, 122 bp, Homo sapiens
gtctcgttcactcagtgctcaatggtgcccaggctggagtgcagtggcgtgatctcggctcgctacaaccacctcccagccgcctgccttggcctcccaaggagccgagattgcagcctctg

SEQ ID NO: 47189 - DNA, 122 bp, Homo sapiens
aaacagctcacagatctcacactttggagacatacccctaagtagaccagaggcatcacacgctagaataaagatccccttaatacttggtggtttttcagtattattattattgagatgga

SEQ ID NO: 47190 - DNA, 122 bp, Homo sapiens
aggctgaggcgagagaatggcgtgaacccaggaggtggagcttgcagtgagccgagatcgcgccacttcatagctctttgacttcatagctttgacactttggcttgtcgtcttatctccta

SEQ ID NO: 47191 - DNA, 122 bp, Homo sapiens
cgccccgccccgcgcccgctgccttcccattggctgcggccgcccagtccccggttcctccgccgtggttggggcagcctagctggccgtctcgcaggtccctctcaccccctgcgccgccg

SEQ ID NO: 47192 - DNA, 122 bp, Homo sapiens
aaaggcagtttttctattcaacacacatatcatgtagacatcaatgatcatgactggacccgaaaaagtcagcaatatgatttgaatgccctacataaggcgacaaaatcaaaacaacacct

SEQ ID NO: 47193 - DNA, 122 bp, Homo sapiens
ggctgctggtcaccgagagtctccttttggtttctcactccgtggtcatttgggtccctgcggcctcactgtgacccacgccggagcaagcctccgggtcctcctgtgccatcgcccctgcc

SEQ ID NO: 47194 - DNA, 122 bp, Homo sapiens
acctcctagcgtcaagtgattctcctgcctcagccttcccagtagctgggattacaggcacgtgccatcatgcctggctaatttttaatagagacggggtttcaccatgttggccaggctgg

SEQ ID NO: 47195 - DNA, 122 bp, Homo sapiens
ttcacctctctcccagcctcccccacgagcaggcagttactataatatgctcgcgcagttcgctgggtcatattgaattttgcgtaggtcattacttgggaaaaaaatgacagagcagaaat

SEQ ID NO: 47196 - DNA, 122 bp, Homo sapiens
gggccaaaacgacccaatgtccacacggagacagtgagatgtggacctcccctcacgccacgaacagaaccagcgggataaggggcttagtctaaggtcgattcaacactggggtcagcagg

SEQ ID NO: 47197 - DNA, 122 bp, Homo sapiens
caaccatgagacaggtccttgatataaaatcaacaaaacgtctgggattaaaactaatctcgagcaatgaaataaaactgcacatagggatcattataccattctacttttgtacgttgcac

SEQ ID NO: 47198 - DNA, 122 bp, Homo sapiens
cactgtgaaaacttcaacctgctgctcccggtgcgtctgggcatgaacgtgggtggcggccgcgctggggctggcagaaggcagggcagggagagaacaggctgtgttccggcctccctgtg

SEQ ID NO: 47199 - DNA, 122 bp, Homo sapiens
aaatcccggaagccgtcctgtccgctccagctgcgtgcctgattggacgggtcccagccccgcgtccctgattggataatgtttagggcgccaccccctaatgccctgagtgacagaatatg

SEQ ID NO: 47200 - DNA, 122 bp, Homo sapiens
ccaagccagcggcaggaagtctcaggaactgccccagggccgaaagggcgccgctgcgagcgcctggctgacagccacagcggtggtgacggtgctgggagaccccgcgtgcgctttcccct

SEQ ID NO: 47201 - DNA, 122 bp, Homo sapiens
tagcacagagggggcaaacacctccaggggcttgtgccaagtaattaccaagcaaattcccggcgatttcctctcctccccccgcccccccgggcagtgcccgctgcgtgttccctgattcg

SEQ ID NO: 47202 - DNA, 122 bp, Homo sapiens
gcctaggtcttctttggctttccccaaactcccttagtgcctagacaggtctacttctggcgactgccctattagaattgacttttatgtttcacaaaaacaaaaccgaagttactgttatc

SEQ ID NO: 47203 - DNA, 122 bp, Homo sapiens
gctgtggtacggcggcgccggctccggctctttggccccaaagtaggcctcggtctctgtcggggggatgcccatccgctgcatgtagatattcaccaggaagtccagcttcttctccatgg

SEQ ID NO: 47204 - DNA, 122 bp, Homo sapiens
cgattgtagtcctagaggcggagtcctcgccagagttcagcaaaggttcgctggccgaggcgggtcccagaccggcgaacccgacagtggagggcgtgaccagttgtgcaaaaactacagat

SEQ ID NO: 47205 - DNA, 122 bp, Homo sapiens
cacagccccctccacaaaaagaccacttccgggactcagtgctcctttgggggcaggctccgccagctctccgccactcagggctccggtcccacggtcggagtgcccgggacggagacggc

SEQ ID NO: 47206 - DNA, 122 bp, Homo sapiens
aagaacgaggcgagtaagaccagtgaagcaggaatgcacacagatatggaaagaagtccccggcatcatgataaatggaagcaactttcagaacagcctgtgtaatacaattctatttatga

SEQ ID NO: 47207 - DNA, 122 bp, Homo sapiens
acatcatggcttagacttgaaatctgaaattgcatgtattcttaggatgctaaaccatttcggggttttattttagctcgtagtcttctaaggcataaccactaagatgtggtttaaagaaa

SEQ ID NO: 47208 - DNA, 122 bp, Homo sapiens
gagcttagttgtatagctgttgccgatgtgcgtgtttcctcctttgtcgttctgcctgtgcgcgtgtattccccttagcgccctctctgggattccagactcacacaggaaacaaacactgc

SEQ ID NO: 47209 - DNA, 122 bp, Homo sapiens
ggacgctgggcggtgggatggggaggtgttagggaaagtggagcggaagggatgggggttcgcatccttggtggacgcgttagaagcctcctatggatggtgctaatattttttttctcttc

SEQ ID NO: 47210 - DNA, 122 bp, Homo sapiens
agcagaatgttacagttctttaacaatttgcgtaacaaaccgaggcgtcctacgccatctcgctgaaatgaaattcggatgtagacacccttgcgcttcaggactctacgctcttgcagcag

SEQ ID NO: 47211 - DNA, 122 bp, Homo sapiens
ccaaggcatgggggacactcgtggctgcttaagtaactggtatgtgcacagccccctccgcggccctaatcttgagccagccaagcagtgttcacactgcaggtgcctgggaagccccaagt

SEQ ID NO: 47212 - DNA, 122 bp, Homo sapiens
gggttcctcagggagctgcctgttaacttttttcccaagagcttggggtttctatgctttcggtttgtcaggtctctccccggcccagctgcaggctatgcagtgagggaaggagagtctgt

SEQ ID NO: 47213 - DNA, 122 bp, Homo sapiens
taacaaagaataattaattctattatatagaaatcaacaacaaccaccacaaaacattggcggtgggtccactggttgtgaaattatagtgtagttttaatctgcttaatcttatggaagga

SEQ ID NO: 47214 - DNA, 122 bp, Homo sapiens
gggaggcagggttagagggtttctttcttttttccttcgtctacccgccccccccccccacgcccccgcccgcctgttaaaaatgggagatcaaggaggagggtccagccaaaagaagcaaa

SEQ ID NO: 47215 - DNA, 122 bp, Homo sapiens
ttcatctagtattttcctccctttttcaccagtgcatctgttgtcaaagattattaaactcgcacagggattcttgattttccagatgaaaagtttatagaatcccggctttttctaattcc

SEQ ID NO: 47216 - DNA, 122 bp, Homo sapiens
tataatgccaatttttattaataaagcatcgaaacaaaacaaaaccagtgaaagaattctcgaaagatgactaagtaggaagcactaggaacctgtgttctcacgaaggcaacaactgcact

SEQ ID NO: 47217 - DNA, 122 bp, Homo sapiens
atccgggagcggtggaacccggagcctgtagaacttgaatctagaggaacctgacagcggcgccgagggggccacccggactctgtttggaacggaagcacagtgtccgccgcttcctggtt

SEQ ID NO: 47218 - DNA, 122 bp, Homo sapiens
agggcgcggcgccgggcgtggtcctgacacctgccctgccgggaaggggacggcgttccacgcctgggcccttctccactgcgtacaggagcctgggtcacctgctcggcccaagaaaaggc

SEQ ID NO: 47219 - DNA, 122 bp, Homo sapiens
gagggcgccgttagggatcagactatctcccgctcctcggccagggtcaccagcgagaggcgtgatccccaccttcagcagcccggggaatgagctaagagcccggctcctcacgggatcag

SEQ ID NO: 47220 - DNA, 122 bp, Homo sapiens
tggaggcccaggaccaatccacagcgacctgcacgttcagagcccgccccaccctcccgccgactgccagccaatcaggcgcgagcctggccggggcagcccaaacccctcgaggctgagcc

SEQ ID NO: 47221 - DNA, 122 bp, Homo sapiens
gctccgtgtactgcgtggagagcgacctgcccgaggcccccgcctcggagcagctctcgccgcccgcgtcgccacctggggctccgccagtgttgaaccctcccagcacccgctcttccttc

SEQ ID NO: 47222 - DNA, 122 bp, Homo sapiens
tccagcaatttgtcaactatgtagctgatatacacacttgatttttgaccctcacaacaacgttgtgaggtgggtatgactatttatcagagggtcactttgggaaggtcccaagcttatta

SEQ ID NO: 47223 - DNA, 122 bp, Homo sapiens
ctttcctttataaggacttgactctaaaattacccagtcttgggtatgtccttatagcagcgtgagaacagactaatgcatccagtgacacacatgatttcctctatgagggaaaagaagtc

SEQ ID NO: 47224 - DNA, 122 bp, Homo sapiens
tgaactcctgaccttaggtgatccatctgcttcggcctcccaaagtgctgggattataggcgtgcagcctaattttgtatttgttgtagagatggggttttaccgtgttgcccaggctggtc

SEQ ID NO: 47225 - DNA, 122 bp, Homo sapiens
catgcacgcacacacacacggacaaatacatgcccacacatacaggcacacaaacatacacggacgaatatgtgcccacacatactcacacacacacacacacaggcacaaattcatgcccc

SEQ ID NO: 47226 - DNA, 122 bp, Homo sapiens
ctcagctgggtgggggtgggtggttggagaaggggtggctccaagtcctgaaatcagcctcgtcttttgccaggagcagttgggaatgtggctctctctataaaccttctccttccacaagt

SEQ ID NO: 47227 - DNA, 122 bp, Homo sapiens
ggctgcaaccccaggagctggcagatggcggagtccgcatcgtctccagaggtaggatgccgcttttcgctctgaatcctagaagtggcagcttgatcaccgcgcgcaggatagaccgggag

SEQ ID NO: 47228 - DNA, 122 bp, Homo sapiens
ggctggggtcgctgtgcgttgagctcacctggcgcggctggtccaccgccttctgcgggtcgctcttgaccttgttgctggggtggttggtaatcttggtcaccggctgcttgaagatggac

SEQ ID NO: 47229 - DNA, 122 bp, Homo sapiens
catcttgaagctctgcgtgttggtcaaagcgacaacaccttcgctgtactttggaagcaacggccgctgctgaccagatgtcggctcctttagtctgtgacggccaccaaaaccatcccaag

SEQ ID NO: 47230 - DNA, 122 bp, Homo sapiens
atgccaggagttagggaatatagtgcaccgtgattggacttgcgaatagccactgcactgcggcctggacgacgtagtgataccctgactcttataaataaataaatgaataaacacaatta

SEQ ID NO: 47231 - DNA, 122 bp, Homo sapiens
gtggaatgttctagtgctgtcgtctgggatgatccaacccttagtgctgagtacattgggcgcctgtgctgggaactgcattgcccactgggacttcagtggtcaggagtgtgttgtgagtt

SEQ ID NO: 47232 - DNA, 122 bp, Homo sapiens
tgccccgctgaccaggctgcttctggccgcggcggcgttccgctgcagaggacgggagtgcgaatctgggaagcagggttctggttgaactccagcttcgtctgcaacatactgtgtgactt

SEQ ID NO: 47233 - DNA, 122 bp, Homo sapiens
tgttgcagaagagcagaacattaaacagtgagtggactatgcagaaacgctctccctctccggctcttttctccctccctgcctctttttttttttcattcttgcctctccttctcttcctc

SEQ ID NO: 47234 - DNA, 122 bp, Homo sapiens
ctgggattgcaagaggacattcagtctggtactctctctttaccaataaggaaatgggctcggctcaacaaaccttgttaggcagagcaaatgccagcagtggactgggcacagtaaacacc

SEQ ID NO: 47235 - DNA, 122 bp, Homo sapiens
ccaggcgctgtgccagcacgggcttagaacaccagtcactcagaggacgctcaatgcatgcgtgcatgaacgagtgagggtgtgaatgaatgaatgagtataggtgtagtttgaaatagagc

SEQ ID NO: 47236 - DNA, 122 bp, Homo sapiens
ctgtaaatagtcccttatctgggaaaagggtttttgctgctatgactaagttaaggatctcgagatgggaagattatcctgaccctaaatacacaagtgtcctaagaggaaggcagaagaag

SEQ ID NO: 47237 - DNA, 122 bp, Homo sapiens
gcatccctcaaaacccagttcccacatcaccaactacaggcatccccagaaagagcacttcgcatgctcttcctgtgagcagtcctctgctacccttccagatgggccttcctgaggggagg

SEQ ID NO: 47238 - DNA, 122 bp, Homo sapiens
ggcgattcccaggcccgcgtggtcctcgaaggcccccgtcctcctgcgccatggagaccccggcctcgcgacctacccccccggcgcccgcgtcatcccaccccgtcctcccgggtgcgcct

SEQ ID NO: 47239 - DNA, 122 bp, Homo sapiens
tgggttttaggaggggtcagtttaattttcaagtcgccccccggctccccccactacccacgtccctttaccttcgtttagtgagtcagttaggtgggttccccacaaaccccctacccccc

SEQ ID NO: 47240 - DNA, 122 bp, Homo sapiens
aatggggctgacgtagcctgcaggcctctcctgttttctatcacattgcaaaacttcacgcgtgcctctctgtgcaccgggcaggagggttaggattagcagaatgtctctgcccactagga

SEQ ID NO: 47241 - DNA, 122 bp, Homo sapiens
accacaatcattggcaacattaacttgctgtcatggggcacctactctgtgttgggcccacgtttgaccctggagacacagtgggtgatggatgagacagccatggccccccagagctcagg

SEQ ID NO: 47242 - DNA, 122 bp, Homo sapiens
cttttcccccagtctctatgggaggagtcttgaggctgagagcactcaccataaaagagtcgctggggttcctcagtcaccccacaaggcagcatgacaccttggctgggggaggctgggct

SEQ ID NO: 47243 - DNA, 122 bp, Homo sapiens
tgtacatcgggacctggccacgcggaactgcctagttggggaaaatttcaccatcaaaatcgcagactttggcatgagccggaacctctatgctggggactattaccgtgtgcagggccggg

SEQ ID NO: 47244 - DNA, 122 bp, Homo sapiens
ctctgacgccgcttaaaccccccaaagaagtgcgggggagcgattctgacttgatgccctcggcggggcctctctgctgtcctctttggggccccttgctcatcctcacctgctttctgtca

SEQ ID NO: 47245 - DNA, 122 bp, Homo sapiens
atgagaaatgactttgaaacttcttttttcagcagtggagccattcaaaagggatacgagcgaacgtacttgtatcctgactcctgagtcgatcccacttaactcaagttgtcaacggtgat

SEQ ID NO: 47246 - DNA, 122 bp, Homo sapiens
cagttttgctttttcggttttgtcatagctgtgaagtcagaccctaagtgaatgccaccccgttgcaggtcacagtaaacggcacaatcagaaaaacacagggttgccgacgggtgccgctg

SEQ ID NO: 47247 - DNA, 122 bp, Homo sapiens
gacctactcctggccttaaagctcccaagagattatgtattttgtatttggctgtcagggcgggtagagaaagatcatcaggtaggggcaggattgggtgtgtctgagctcatactctcctt

SEQ ID NO: 47248 - DNA, 122 bp, Homo sapiens
gagctcacggcctccgggaggggcgcggcggccgcccaggtgttggagaaggggtcgtagcgctccacgctgtgcaggcgcctcaggccgtcgaagccacccaccgcgaacagctgcaagtg

SEQ ID NO: 47249 - DNA, 122 bp, Homo sapiens
gaccctgtgggacagacaagtctagtggtcatctcttatatggcttatttagcaatcattcgggtggtcacagcacctcatcatttgaattttgagggccactcttctattttcaggccatg

SEQ ID NO: 47250 - DNA, 122 bp, Homo sapiens
aggggctggccgcagcggggaggccagaggggctcgggcgaggctgcagaggcagctgggcgcgcggtggccggagccaggggctgcccggcccggccccggcagctccgcaggcctcggcg

SEQ ID NO: 47251 - DNA, 122 bp, Homo sapiens
cacatggtggaggccctggggagaggaagggacatagccaaggagacctggagcctgtggcggcctaagcctccagcagaggccagaaggcaacaggctttgatgtgctgccaggctaagaa

SEQ ID NO: 47252 - DNA, 122 bp, Homo sapiens
gcgggatgggcgcgggggtgggcatggactctgctggctcggacgatgggagagggcgggcggctcaggaaaggggatcctagccgtgacatttgtgtcatccgcggcccaggggttgtgcc

SEQ ID NO: 47253 - DNA, 122 bp, Homo sapiens
ctggatcccatcttccttcttccttgctcctgagtatcctttccctctgttctgctggctcgttcctatcagcacacatatccacagctttaaggaaagcttcctttgacccccataaccca

SEQ ID NO: 47254 - DNA, 122 bp, Homo sapiens
caggctgcccacctcgcccgcaccctcccccggcccctcctgctcggtctcggccctatgcgtgctctgtctgtggaaagaggttttcactcaagcatcagatggagacgcactaccgagtc

SEQ ID NO: 47255 - DNA, 122 bp, Homo sapiens
gctgcccgagggctgcgcacgccgctctggattgggctggctggcgaggaggtgggctcccgacacttttgccctgggccccagccttgcccgggttcccctccctgccccttcctgccccc

SEQ ID NO: 47256 - DNA, 122 bp, Homo sapiens
gttcctccgggacacaggaggccacgcccaccacgggggaggcgccggggtcccgtgtgccggggtctctcagtgacacgggagctccttgtccacaagggcaggcacctcagagccacctg

SEQ ID NO: 47257 - DNA, 122 bp, Homo sapiens
tgtgtgtgtgtgtgtacataacggtacaaccccaagaaaatttattctgcttttgcaaaccgcagactgaagcccttcacagtgatgcaatgtatccagttttcataatgcacctattgact

SEQ ID NO: 47258 - DNA, 122 bp, Homo sapiens
gtttactagcatgcacttgaagatggagttcagatatccaggacgctccaggctttgacccgcgatggtgagcaagggttcctcttccttttcctatgctgggcttctcagtcagtttcatc

SEQ ID NO: 47259 - DNA, 122 bp, Homo sapiens
aaaaaaaaaaatctgaggttaggaggaggcctagggccctgctcatgtaatccacgtgtccgtgagcatggaatggttcaactgcaggtcctagggagacagtgtatgaggcctgcagctaa

SEQ ID NO: 47260 - DNA, 122 bp, Homo sapiens
tatatttcttgtacggtgctactctaagcatggcgccttcccaggggtacacaggcctggcgtgtgaacacaagccctccacaggacaggctaagcagcgaaaacactgcaccagtgcatct

SEQ ID NO: 47261 - DNA, 122 bp, Homo sapiens
ccctgtgtggatggtgaattcggcttccttacactgtgggagcgtcactcttgctcccatcggcggcctgtgtggacagtgaattcggcttcgttacactgtgtgagcgtcactcttgctcc

SEQ ID NO: 47262 - DNA, 122 bp, Homo sapiens
ctcctcagatattgcggccttccccgacagcgtgaactccctggagggtgtgggcggggacgtccgcaccccagacaagctcatcgaccaagtgaacgacaccagtgatggccggcacatgt

SEQ ID NO: 47263 - DNA, 122 bp, Homo sapiens
acttctataatcccagcactttggaaggccaagtgggcggatcacttgaggtcaggagttcgagaccagcctagccaacatggcgaaaccgtgtctctactgaaaataacaaaaattggcca

SEQ ID NO: 47264 - DNA, 122 bp, Homo sapiens
gcacccgcgcggggggtagtgcctgcccgcagcccaccaccgaatgcgctggcgcgcggacggcccttccctggagaagctgcctgtgcgcatgggcctggtgatcaccgaggtggagcagg

SEQ ID NO: 47265 - DNA, 122 bp, Homo sapiens
ccgcggtcagggccacgggcccgagggtgggaggctgcgctggaatgctgtgtcgggccccgctctgaccctgttccggccagatttcccatctgggcatgggccccgtgtcggtggctacc

SEQ ID NO: 47266 - DNA, 122 bp, Homo sapiens
ccctgtagcaccgcacggagctgctgcagctgctcgtccgccatcttaccactccagctgcgcttcagtcgctgtcgtcgcagccaatgttctaattggatgagagaaaacctctaggctta

SEQ ID NO: 47267 - DNA, 122 bp, Homo sapiens
catcaggccacaaagcaactaggcaactgctgactattgttctccaaacttctaaagtcccgaagaacaaaaaagcaagtgcccagtactcagcttttcaaaaccattaaaatacaaacttc

SEQ ID NO: 47268 - DNA, 122 bp, Homo sapiens
acaccaagtctcttcacctccacgctccgagaccaacaccaagtctcttcgcctccacgccgagagcagctgcgaaacggacgctctggggtttcagccgcaccaccactttcctccaccgc

SEQ ID NO: 47269 - DNA, 122 bp, Homo sapiens
caggtcaaccctgcagaccagccaccagtccgggaactgaccgcggagttaacagacagccgtccgcacacgcgcagaaccacatctcagcctccaaggcctcaactccgcccacagctctg

SEQ ID NO: 47270 - DNA, 122 bp, Homo sapiens
ggcttcaggagagtaaggggcagctgggtcaggagagggccagctgccgtggaaactccccgtggtgggccatcctgcagcagacctgagtggctctcaaatggttcgttttttaagcacct

SEQ ID NO: 47271 - DNA, 122 bp, Homo sapiens
cagaccacttggtgcagccacgacgcgggggagagtgaagacgggcaattccggggcggtcgtgtcatctttctgggtgagtacacacgtgacaccgagagaagagaaagtggtttcccagg

SEQ ID NO: 47272 - DNA, 122 bp, Homo sapiens
tttaattgagcaaaacacaactcatgaattgggcagcactcagaaccaatgggggaggttcgagagctccactctgtaatgtgggcaggaagtttttatagatagaacacagaagtgagata

SEQ ID NO: 47273 - DNA, 122 bp, Homo sapiens
acgactacttccggagccgcaccggaaccccttggcggattatgtgggttcctgcgggaacgatttaagaataggactacttcctgcttctggatatgggccggtgaagggaaaggaaatag

SEQ ID NO: 47274 - DNA, 122 bp, Homo sapiens
gggctccacccagcaggcctggctggccacaccccacacatgccaaagagtggtagaccccggctgagctcctgagaggtagcctctgagcccttggtacatcctacccgatgggggtgtca

SEQ ID NO: 47275 - DNA, 122 bp, Homo sapiens
tctcacgttgagtcggggtgacaggtctcagtgagaactgcgctagctgcagtgccgcaccgcccttataggcggggggggggcggggcccgcgttccccgctcgcccactagaggctgggc

SEQ ID NO: 47276 - DNA, 122 bp, Homo sapiens
agaaatgagcattcccaggggtcaagtgacctgcccacggtgacatcgctgtatgccaagcgtctaaaatagttcctggcgcaggacgacccaccagtaaatgtgtgttcgatgaatgaaca

SEQ ID NO: 47277 - DNA, 122 bp, Homo sapiens
cagcctgtaggcctggccatactggacccatgagatcagccaccctgtcagctggtacctcggggtcctacagtcctcctcgctcaagccctggtcctctaactcggaggtgatgaggtgtt

SEQ ID NO: 47278 - DNA, 122 bp, Homo sapiens
gaggtatcgggcgaatggtgctggcacgtgcctctcagaaacccggatccctttgcgctccggggccagcctaattgatccagctattaaggtggagaaaccgcatgtacctccctcctttc

SEQ ID NO: 47279 - DNA, 122 bp, Homo sapiens
aaaacacacacacacacacacacacacgcacgcacaaaaaattagtataaaattatgtatcgaagtctcagaagtttatgcattatagaagtcatgagtatcaaaattgtggctcaagttgg

SEQ ID NO: 47280 - DNA, 122 bp, Homo sapiens
atgtatgctaggaaaagcctacattgccatgaatggactgataaggacaattctggttagcgctcagaaatagagaataagaactgtagagaaaacatcaatcttgttagagcatacctagg

SEQ ID NO: 47281 - DNA, 122 bp, Homo sapiens
ctcgctgtgaaaaactcttggaaatttcctttctttttccccttttgccctagtggcggtcggagcagtgagatgcttaatttttctatgtgtgtgcacagaaagctgtggatttcgaaaag

SEQ ID NO: 47282 - DNA, 122 bp, Homo sapiens
aactcccagcagcccccaggtacggggcgtggcgggagagctgggcgagccagaggcgaccggaaggatctttctagtccagcccctcgctttacccggacgaaagacacgggcctgattcg

SEQ ID NO: 47283 - DNA, 122 bp, Homo sapiens
ctaccccctcgtgtagaacatttggtcagatggctctttgagacagaaataagacagggacgtggtctctgcttgtagtgtgggacgtctcagctgcacctaagaggttgtcacaggagtac

SEQ ID NO: 47284 - DNA, 122 bp, Homo sapiens
aagcaaacgtttaatccaggtagactgaaacacactcatagcgacgtggcctttccccagcgcgatctgcttccgggtgtgcaggaaactgggcgcggaaagaaaaactgggcggcctgggg

SEQ ID NO: 47285 - DNA, 122 bp, Homo sapiens
ggaaaacatttatctgaaggaaatttaaatttacccacttggaggctacaaagctggtgtcgagttagctgtaccgcccttagccaagaaacagagaaggaaacaaatgcagttttctcctc

SEQ ID NO: 47286 - DNA, 122 bp, Homo sapiens
cttcttgggcttgcagcatctctcctgtcctccttgtcaggctccagagctgggggtgcccggactagtacatcatctatactgtagtgtctcatcgcaaacttacagtatatgatgatatc

SEQ ID NO: 47287 - DNA, 122 bp, Homo sapiens
tttttctctctgcattaataaccactcagacattaatgggtgtcagtgtccttatccatgcggagaaggggttgaattcaatcattgctaagttttcatacatctctaaaatgctggatcat

SEQ ID NO: 47288 - DNA, 122 bp, Homo sapiens
ggttaatgcatctctaccaactaacctagaagtcagcaagcccatcatctctaaccaccacgttttggcaaaagggacattactatttgcctaatttagtttagatggtaagcctaaaaaag

SEQ ID NO: 47289 - DNA, 122 bp, Homo sapiens
tcatccaaacagaaaaaaacacaagcataattcaaagcacccaaccgtagtaccatacttcgcttgtatccaccttaaaactaccagatataaaatagcttttagggacctagcttttgaaa

SEQ ID NO: 47290 - DNA, 122 bp, Homo sapiens
tccatgctggtctggtccttgcatactaccctacagcaaggagccagacctggtgagccccggggctggatcattttcatttcctattctgccccctgaggcagcagtgagttctaaaagtc

SEQ ID NO: 47291 - DNA, 122 bp, Homo sapiens
ctctgggggcccggtcccgactgggcagggggacctggacagggccccggagcgtggagacggctgaggaaagttgggggtcggggccttggggcggggagcgcggaacccggcgccgatgc

SEQ ID NO: 47292 - DNA, 122 bp, Homo sapiens
tccgcggggacctctcctctcctcacctcgtccgctctggggcgccgacttgtcccccgccgcctcgaatcttccgagtcgctgcaggggaggctccgaattcctagaagaaactgggatgg

SEQ ID NO: 47293 - DNA, 122 bp, Homo sapiens
ttttgaaactggacgccagagccttgtggggccacgggcaagcctcgggtctatgactgccgcctgagctccgcttccttcctctctaaaatgggaagattagaccaaaataacaagactgt

SEQ ID NO: 47294 - DNA, 122 bp, Homo sapiens
ggagaggagcaagggaggggccagcgcgcagaagtgcggacgcaacccggcggccgcgggcgaggcttatgcagagcttcaagaaacagctagggagaccgcaggagtctccagagcgcgcg

SEQ ID NO: 47295 - DNA, 122 bp, Homo sapiens
agactgaggcttggtggagaatgttcgctcagaggcgtcgctctgcccggcgactggctgcgggcagacataaaacttgctcttactgtaaggatggatgatgtttcctagagcagttacaa

SEQ ID NO: 47296 - DNA, 122 bp, Homo sapiens
ataaggcggcctcggggagcccgggccacgctatataagggccggtttgctttataaagccgggctggtggcgtggggggcggcagggccagggccaggtgagggggccgcccctcccacct

SEQ ID NO: 47297 - DNA, 122 bp, Homo sapiens
tgaacccagacgttgccctcctgtcctccccaggagacaagcattgggtgtttgatgaggcgtccctggaacctggctaccccaagcacattaaggagctgggccgagggctgcctaccgac

SEQ ID NO: 47298 - DNA, 122 bp, Homo sapiens
gatgggattctccagggtccccgaggaactgtatggagcagaaactttgccaactggcatcgacatgttatataaacaagacagaaatttttgcagtgttgagtcactggaatttctaggtt

SEQ ID NO: 47299 - DNA, 122 bp, Homo sapiens
tttctcctctggcacctagaaccaagtcaccctgagccagcgccagagttcctgcccactcgtgagtaggacaacatacccaggagatactgctgcagctggacatggacttgtatgtaaac

SEQ ID NO: 47300 - DNA, 122 bp, Homo sapiens
agacggcaccaggcagctgaatccagccccttgttacgggggaaaatgctctcattgaagcgccggagcgcagcttctgccttttattgcaagcggcgccaccggattccatttgtaaactt

SEQ ID NO: 47301 - DNA, 122 bp, Homo sapiens
tcagtttttgccgtaattgttttcaatgtgtgttataaaaaataaattccactatgttcacgaatgtacaacttataatctgaccaaaagtgagagatgggtagattttcctacttgggtcc

SEQ ID NO: 47302 - DNA, 122 bp, Homo sapiens
tcctaaaatgtccttctgctgatactggggttctaaggccgagtcttatgagcagcgggccgctgtcctgagcgtccgggcggaaggatcaggacgctcgctgcgcccttcgtctgacgtgg

SEQ ID NO: 47303 - DNA, 122 bp, Homo sapiens
tgctcgccacgccagcctgcgcctgctcagcgatccccgctccggggagcctctggaccgcgcactggtgctctggttcccaggtgagggtccccaggttccgagcctcctgtaggtcccat

SEQ ID NO: 47304 - DNA, 122 bp, Homo sapiens
cccgtccctgtcccccaactcacccctcccttctgaacacagaagcctcttcctggaggccgcctgccatgactccgattccctggagcccttgaacctgtcatcgggctccaagaccaagt

SEQ ID NO: 47305 - DNA, 122 bp, Homo sapiens
cctggccaacatggggaaaccctggtctactaaaaatacaaaattagctgggtgtgttggcgtgtgcctgtaatccctgctgcttgagagcctgaggcaggataattgcttgaacccgtgag

SEQ ID NO: 47306 - DNA, 122 bp, Homo sapiens
caggggagcagtgagccacgttccttatcccaagcagactccttggagatctggagaggccggagctgagggccgggaccccgagggcctcggaaggagttgtttcagcctcttggggcaac

SEQ ID NO: 47307 - DNA, 122 bp, Homo sapiens
acccaggtgatggggacccccgggaggtgagggccagagtcactagccgaagtgctgactcgcccagcccgacgggggagtgtgtgtgtgtgtgtgtgtggggggggggggctgtccgtggt

SEQ ID NO: 47308 - DNA, 122 bp, Homo sapiens
ccctgcttcctcccccgtccctgggcctcagtgtccttgggcttaatgacagggccatgccgggtgggggatgcaactcccatccctcttcattcccgtatgacccactctgccccttcctg

SEQ ID NO: 47309 - DNA, 122 bp, Homo sapiens
tttgaggggcccagcaatccagggcaggtagagctctgtcttccagcagaggaacagcagcgactgcctgggttaacgagacagatgcgggcagagccagcagctcttcggaccaagaggct

SEQ ID NO: 47310 - DNA, 122 bp, Homo sapiens
tgctttgaagggggcctccctagtccctccggatctccgggacgccccccacctccgaagcggcctcggcagaacctccctcgcttggctctgcgggcaccaccctccctcgcctggggcga

SEQ ID NO: 47311 - DNA, 122 bp, Homo sapiens
gccggaagaggcggggatgccggcgactcagtagtaaggcaagtcctgccacctcctggccggcccttccgctggcgtggccctctctctgcaagccctggggcccagcgccagcagcggcc

SEQ ID NO: 47312 - DNA, 122 bp, Homo sapiens
cttggctctctcttctattctttctcaagcggttctttgcaggaaacccagagaggtctccgtagggcacaggcctcccctggaatgccttcgaaagaaagaaagaaggagagagacagaga

SEQ ID NO: 47313 - DNA, 122 bp, Homo sapiens
ttgttgataaaaacgccaagatcacacaatgggggaagggcagtctcatcaataaatggtcgtagggaaactgggtgttcacttgcagaagaataatattagactcccatctcacatcatat

SEQ ID NO: 47314 - DNA, 122 bp, Homo sapiens
ggtgactgtgtgagcaggagcgagagggcgccagctcctgcgggggaggttcctactgcgcgccccaccctgtgcaagaatgtcaggctttagggcagctgccataggccccaggggcatca

SEQ ID NO: 47315 - DNA, 122 bp, Homo sapiens
acctgcgcctccgcctaactccggccgccggagacgccgtgcggaccccaagccagtgcgcggaagacaccgtcctaccctcggcatggctgcctcccacccggtcacgtcggtccccgcgc

SEQ ID NO: 47316 - DNA, 122 bp, Homo sapiens
gccgggacctcggtggagcgcttcccgccctcggcacccctacccccggtggcccagacgcgcccaggtcctcgcctgaggaaactccgaggacacccgacctcccgctctctctcaaaccg

SEQ ID NO: 47317 - DNA, 122 bp, Homo sapiens
gtgcacacgccctgcatcgagcagctggagaagataaatttccgctgtaagccatccttccgtgaatcaggctccaggaatgtcctcgagccaacctttgtatggcaccactgggtacacag

SEQ ID NO: 47318 - DNA, 122 bp, Homo sapiens
tgttgtttcgaggctgttttaatttagatgttaacatttctgtagcatcgttttcttttgcgtggtactaaaggcctcagaacttgaatttgtttgtgacctcagttacccaaactgcatgg

SEQ ID NO: 47319 - DNA, 122 bp, Homo sapiens
tggggaggcggtggcggcgggagctgcctcctctccgggcggcggcgctgactgatctcgcgaactgggcttctgtgtaaactgaggctaaacaaacacagatggagcgcagcgggcgttct

SEQ ID NO: 47320 - DNA, 122 bp, Homo sapiens
atgggctattaaagggggttatgccattgccatccttagaaattttaaggtaatagtgggcgaccatctgtcttgagtgttatcaaagcaggtaccaggccagctgatctcctaaattccat

SEQ ID NO: 47321 - DNA, 122 bp, Homo sapiens
ggggccacccatccgccttaaggaaggctggcggggatgcgcgggcccgggagtccagggcgccgccaccgggaacgcgccgcctggtttctaaggaactgggggctctggaaagggagggg

SEQ ID NO: 47322 - DNA, 122 bp, Homo sapiens
ttgcggatgcctaccttagctgcaggcttaggcccacacctgacgcgtaagctgcctaaacggcagctaacgtagatccacccagacgccggaaacgggggaagctcctgctttgcatgggt

SEQ ID NO: 47323 - DNA, 122 bp, Homo sapiens
catctttggcatccagggcagactttaatctcttcactaaatctgagttgagtgggtagtcgggaaggtaatccgagttggacattgttacgtcgtttctgcagtgaccagcccttcttttc

SEQ ID NO: 47324 - DNA, 122 bp, Homo sapiens
aaccagagggcgtccaaacccagcggccgtgcggagctcaaggtcccgccgctgctgttgcggcaccagcctggctcatggacatcaccacgcacctgcaaggtcaggtttctctctggtgg

SEQ ID NO: 47325 - DNA, 122 bp, Homo sapiens
ctggctggtcacgtgggtgtgaggaggcacagggtactgggtagatattaccacagctgccgtattacttctgtgctcaggactcagggtggggacagaggccaacccagcctgtccctccc

SEQ ID NO: 47326 - DNA, 122 bp, Homo sapiens
aaacccattgtgctgggcccctattaacctatagggcttatttaggggttacttacagggcgatccactgtcagcaggctggataggagaactgtaatcgcttgcaaaaaagcttgcagttt

SEQ ID NO: 47327 - DNA, 122 bp, Homo sapiens
tccaccatcctccagtcgttgccctcattgggagagatgcttgctactctgctagtaccacgccttggttccggtctttactgttggctggtaggtcgggaggcacctctagcatgagacag

SEQ ID NO: 47328 - DNA, 122 bp, Homo sapiens
cctccaggacggctactgtgcctgaggctgggctccttctcagtcatcccagggcctctccgtctggccccaccctcgcccctccaggggatccacaagttgaatcgcagctctccagggtt

SEQ ID NO: 47329 - DNA, 122 bp, Homo sapiens
tttgaacaggctggcaattgtttgctgttgtttttgcaggggttgtgtttcactacagggcggcaaccagcaggtacacactgaattttgaggctgctcagaaggcttgtttggacgttggg

SEQ ID NO: 47330 - DNA, 122 bp, Homo sapiens
acaatccgcctgctcactggacaagcagcgacacaagctctggaagcttccagttcatttcgagattcacaatgcggaagaaaaaggccggcagccccgctccgcggtgcgcaaagatatgc

SEQ ID NO: 47331 - DNA, 122 bp, Homo sapiens
cgagtccccgtcctcggtgagctgctgcttccagggctccgagccgcgcggcacctcctgcggctcgaggcggatctcctgcagctccttgaccatctgctcgtactcctcgtctttcatgg

SEQ ID NO: 47332 - DNA, 122 bp, Homo sapiens
agccacctgttgcctggacgccggggcatggcttcaaagggcagcactgtcctggggacccgggcggctctcgtgcccagtgcctgtgccctttgcagggacagccagggcactgccatgca

SEQ ID NO: 47333 - DNA, 122 bp, Homo sapiens
cggacccctgggcagcttcacagcagcctgcctccagtgctgggaaaagagcttctgacgcgtggggcgcagtctccaccaccaagcccgtgtctgtctctggtgagcccctcactcaccca

SEQ ID NO: 47334 - DNA, 122 bp, Homo sapiens
ggataaaaaacaaggaactcgacctggattgtactaaaccagttccaagattctgtttttcggctgtggcgtccggcgctgcatccactacggagtcgccttggaagccaccggaagtcctt

SEQ ID NO: 47335 - DNA, 122 bp, Homo sapiens
attctccacgcctgcaccccttcacctctatttgatttccaaggggtcttaggggtggagcggggcggagacccgatgtgggaggagtgggcgtctccgggctgctcattccgtggattccc

SEQ ID NO: 47336 - DNA, 122 bp, Homo sapiens
aactacttattcaaagactgcaacaaaaggtgttcacagtgtggtatctttcaaaacatacgctaaggcaaggaacagataaggaaatggaagtacatccaattgggatccaagcaacccaa

SEQ ID NO: 47337 - DNA, 122 bp, Homo sapiens
atccacagacgaatgactaagcgaaatgtggcatgtccctgcagtgggatattattcagtcgtgagaaggaatgaagctctgacacgtgctacatagcaggtgaaccttctgcaacatgaaa

SEQ ID NO: 47338 - DNA, 122 bp, Homo sapiens
gaggtccccacggcccaggccccgtccccggacagccccgggtgccccaggagctccggccgcagctcacctgggaccggcctcccgtggagccaccccttgcccagccgcccccaagttcc

SEQ ID NO: 47339 - DNA, 122 bp, Homo sapiens
ttttgaattgcttccaattttgaaaaagggattgttttttgaccctgaattttggaacttcgtaatgattaagaaaaactgtgtagcattattgagtgataaatcagcagttagatttctaa

SEQ ID NO: 47340 - DNA, 122 bp, Homo sapiens
aagcggccggtgtcctcgttgaggtgcgaacggcggcagcagcagcagcagcaggaggggcgcggcaggcggcggcggctacggcggggcgggggccgggggctgcgggaggacatggtccg

SEQ ID NO: 47341 - DNA, 122 bp, Homo sapiens
caggagcaaagcagcgcgccaggctggagctgttccgtcattaccgccacgtctgcgcttcggttgtgagaaccgattcgttaccctaacctcttaggactaagagccagtcttctggtggc

SEQ ID NO: 47342 - DNA, 122 bp, Homo sapiens
ttagctttgttgtatcagatattccataaagccatttctgggacagtcccctctgtttatcggaccacaagcttctctgtcctcatcaagcccacctttatacttcatttctccagacttca

SEQ ID NO: 47343 - DNA, 122 bp, Homo sapiens
cgcggcagggttatcaccagatctgggctttccccttcttgccgtcaggtgctacggccacgtggcccgcggcttcccgctcgcgcagtctggcagcccggagccttccgcggtcccccgcc

SEQ ID NO: 47344 - DNA, 122 bp, Homo sapiens
aatctgcatactcaaaggccacatcacctagtttccacctttactttgtccagggtagcccgctgtgctctcagttcagtttagatgctttcttatgtggacatatcctaacatctgtagat

SEQ ID NO: 47345 - DNA, 122 bp, Homo sapiens
cgaagtcgggggccgggggcttcccgtcccggcgcttcccatgcaaacccctgaaggaagcggcaggcgcagccgcgggctccgcagcccaggcccacttcctgtcactccaggaaaacctc

SEQ ID NO: 47346 - DNA, 122 bp, Homo sapiens
ttttctcctttggaaagtaaatgctgagatctacctggaaggatatgaaagcgatggaatcgcaggatgtcctggcacctagtgggtgctcacataggatgtctccttttccaggacaaact

SEQ ID NO: 47347 - DNA, 122 bp, Homo sapiens
gtgggggtcctgcaacagcccaggcttgtgcctttaccccatttcacagagaagaaaaagcgaaaaactagagaaaaaccacctctccaagaggtaaccgcacgcagcgcggaaggctgcta

SEQ ID NO: 47348 - DNA, 122 bp, Homo sapiens
ccgagaggacgccttggcgccttcaggtccctcctggatttaccagcccattgtttatttcgcgcctgctttagcgtggtgtcgtcgggaactagcgactgcagagtccttactgtgtgcta

SEQ ID NO: 47349 - DNA, 122 bp, Homo sapiens
cacccagggctcacaggacacctgatatttaggctgttccccaagaggctaaggacagcgcggccccagctcccccaaccacagctgcccaagtttaggagcccgcactcgtgagcgatggc

SEQ ID NO: 47350 - DNA, 122 bp, Homo sapiens
ggaggcggagcttgcagtgagtcgagatcgcgccactgcactcccgcctgggctacagagcgagactccgtctcattaaaaaagaaaaagaaaaagaaactgggtcaacttcaagactttaa

SEQ ID NO: 47351 - DNA, 122 bp, Homo sapiens
agtgatgaacaaggtgcattaacaaaagggcggggctccttcccacagctttttgggaaccgcccacttcccaaagaggtgtaactgctacctccttgtcttcatctgccaagaaacttgaa

SEQ ID NO: 47352 - DNA, 122 bp, Homo sapiens
aactcgtctgcccctggggagtgtttgtttccaaagcaacccaaggggatgtggtcactgcggtgaggaggcttttcctggggtaaggtggggctggaatgggcaatggttctgttgaactt

SEQ ID NO: 47353 - DNA, 122 bp, Homo sapiens
tgggggcctgactggggttggtggctctcaaggctacctcagggctatgcctctgcctcccggaacaagctttcccaggcctccttcccagccttgtctctttcccgtctctccccccacac

SEQ ID NO: 47354 - DNA, 122 bp, Homo sapiens
agaagcaggtgcaggtgccttagaggggtcaaaaataagaggaacagggttcactctaagcggtctcccagggaaggctgcgggttggagcaagggtccaagattctaagggccaggactca

SEQ ID NO: 47355 - DNA, 122 bp, Homo sapiens
gtgctgggattacaagcgtgagccgctgcgcccggccttttaatttacattttagccttccggttactggaatctttgatggggaatgagttatagtgaggcaagagcctctaacattctag

SEQ ID NO: 47356 - DNA, 122 bp, Homo sapiens
caaaggtaaagttatcagttaataccagctggtccttatcacagccatttcaaacctgtacgttcacttttggccttggctcctgcctcctttagaatagttttcgtaagagtattagaaat

SEQ ID NO: 47357 - DNA, 122 bp, Homo sapiens
tgaggatgcgacaggcaggtccttgccctcgtgggctgccaggccagcgggggagatgggcggtcagcggcagccacagacgacgtagggctcaggaagggcatggagggaaacgctgggca

SEQ ID NO: 47358 - DNA, 122 bp, Homo sapiens
aactggtttttgtttttgtttttttttttcgtttttaaaaataatacaaaataaccaaaacgcacagtttgctttttttgtgccttctgatgcctggttatattttgcaagagttcgccttc

SEQ ID NO: 47359 - DNA, 122 bp, Homo sapiens
ctccatctttttcccttcatccctcctcccccatcaccgcccaggactgcccaaggcgagcggcccagcctccgggagtggcgagtcaccttccttggtacgattttcccccggtgcctcgc

SEQ ID NO: 47360 - DNA, 122 bp, Homo sapiens
gaagggcaaaagttctgtaagttcgtcccgacaggccaaagaaaccccagagccgtctttcgactgactacagcctggaagagaggccaagaccactccctgcctctattgctccatttctg

SEQ ID NO: 47361 - DNA, 122 bp, Homo sapiens
ccttgtcaggggcccctggtggcggtgcgttctgctctgggggccggatcacaggcctcccgacatccacaggcttcatttccggccctggaacataaacagccggtgggccctggcccacc

SEQ ID NO: 47362 - DNA, 122 bp, Homo sapiens
cgcggtgtaattccctggtgtttgcttgtcttcagtggcatcccttctctgagaagcgggcgcccggtagggcctccaggcgctgttgacacgcgctgaggagaaaggcgaggggtgccagt

SEQ ID NO: 47363 - DNA, 122 bp, Homo sapiens
tgacctcgtgatccgcccgcctcggcctcccaaagtgctgggattacaggcttgagccaccgcgcctggcccagcctatgcctttctaattgctctagcaaactcccggtggggctgcgggc

SEQ ID NO: 47364 - DNA, 122 bp, Homo sapiens
gccgctatatgaactattccttttgtttagttttcagcatgggagcttctggcacttttacgtactttccagcttctggggaccggctgcctagaataacaggcatttgccccagaggccgt

SEQ ID NO: 47365 - DNA, 122 bp, Homo sapiens
gagacctcgcagaatgcatggagttgtccgaggggagtgacttgcaagtgaggcagcggacgaagggggaccaggaagacactagatgtgaccttccgtggtccctttccccttctttcgca

SEQ ID NO: 47366 - DNA, 122 bp, Homo sapiens
cgggtgggcggagtgctctcctcccctgcgccctccctcccgtgcccctgcagggctgcacgggttccctccctagggaaccaggctgcctaacccaccagccggcccctagcacctcagcg

SEQ ID NO: 47367 - DNA, 122 bp, Homo sapiens
tgacattgctgggggttgactgttgggcactgtgccgggtgctgggagtgtggcaggggacgagatccacagagcccctagcctcagagggcactcagttccctggtgggagcagagtggaa

SEQ ID NO: 47368 - DNA, 122 bp, Homo sapiens
gagctgcagtggtggtggcagtggctggggtgataagcacagcctggggctgcccctcctcgggggccatgctgcattgcactgcatgggtagccacgagcgagtctaggacgcaacgggaa

SEQ ID NO: 47369 - DNA, 122 bp, Homo sapiens
gtgaaatctggcaccatcccattcagtcccacgagggacatgaatcatctctttgtccagcgtctccacactgtcttccctcccctggtgtgagtcacttggtagccgccttgattttcaga

SEQ ID NO: 47370 - DNA, 122 bp, Homo sapiens
gcaacattgtcttctgacctttccctagggtcttgcatactttgatatggcagaagcaggcgttgctctgaagttataaataactaagcaacttgagagttacactctagggccccaagtta

SEQ ID NO: 47371 - DNA, 122 bp, Homo sapiens
tctgagcaggactcacttgttctggggcagatatcacaggccatggatgtcccaggctgccgccctgggcagaaagcttagctggtacagcagatttgggggtcggtgggtgagtggtgtca

SEQ ID NO: 47372 - DNA, 122 bp, Homo sapiens
gcgagagggcgaacactgcgcctgcgcactctccgtagccggatccaccttcagcgtctgcgccacgtgactccgatccaccctcgaggttccagtggaataacccccttctgaaaaatggt

SEQ ID NO: 47373 - DNA, 122 bp, Homo sapiens
ctggtcttccgcttcggcatgtccggctcttttcagctggtgccccgcgaggagctgccacgccatgcccacctgcgcttttacacggccccgcctggcccccggctcgccctatgtttcgt

SEQ ID NO: 47374 - DNA, 122 bp, Homo sapiens
aaagaaccaacgatacctgggacgacaaaacaacaggctttcctgtttccatctccggcacgacctgttccacggctctgtattcatcagcctcctcccggccagcagcagccaccaagaca

SEQ ID NO: 47375 - DNA, 122 bp, Homo sapiens
cctctgtcagcttatgttattttatttatcaacattcagtagcgtgtggattcaagaacacgtcctcgagtggaacgccaaagaagatgcctgctctaggggccagagcgcgctccgagcag

SEQ ID NO: 47376 - DNA, 122 bp, Homo sapiens
cttgggcggttgatgggaccgggcgctctggagtatggggcggcgcccattggggaggctcgggccatgtgggggcccacggggtaggggtatagggcatggcgggctgcaggtcctgagcc

SEQ ID NO: 47377 - DNA, 122 bp, Homo sapiens
tcaaccttcagaattgggattgtaaaatgcatgtactctgtgaccagtgagctgctgtttcgctctccctcttgtaagttcactgggtctttccaaggcccgggacccactgtgtgtgctgc

SEQ ID NO: 47378 - DNA, 122 bp, Homo sapiens
gaagcagggattatacatattcttttaatgtgggaggagtgggctcagaggtgctggaggcgtgttcattattgaaagagtaaatttcttattgaatgggactcccactggccctataggct

SEQ ID NO: 47379 - DNA, 122 bp, Homo sapiens
gcccggcggctgcgtgggttttaaatccacgtggtggctgcggggcggggcgcggggcctcggtgtttaaaggctttgggtccgccggggctgcagcggcggcggctccgaagcgcttgttc

SEQ ID NO: 47380 - DNA, 122 bp, Homo sapiens
cctcctcttcctccgggacaaggatggaggatctctttagcccctcaattctgccgccggcgcccaacatttccgtgcccatcttgctgggctggggtctcaacctgaccttggggcaagga

SEQ ID NO: 47381 - DNA, 122 bp, Homo sapiens
aatcataacagtatgttgtatcattcctcctttcctgtggtttctattgcgtttgggcttcgtgtctgtcgcgaggtggttatgcattgattggaatgccccggttccagcaaagctgagtt

SEQ ID NO: 47382 - DNA, 122 bp, Homo sapiens
cacgcgtccctcgggcccaggcggtggggaaggtccggggaggcccgcgggggccagcaccgctcggcggcgccgcgccctccgcgctctggggctcctgaggatgcccggcgcgggcggtg

SEQ ID NO: 47383 - DNA, 122 bp, Homo sapiens
cagatctcgggacgcccgcgcggatcccgcagcgcgcgtcacagcctttagggcatccggcggccccaagacactgctgcctcggtaagggagtgaagctactcaagggtggacgagaaagg

SEQ ID NO: 47384 - DNA, 122 bp, Homo sapiens
gcctccgaagtgcgcggatgacaggaaaagatcttcagttcttctgccgctagagaagtgcgggatacaagcctctattggatccacaacctggagtcctgccttcggactttgccaaagac

SEQ ID NO: 47385 - DNA, 122 bp, Homo sapiens
tcacaggtggtaagtgtttgtagctggaacctgaactaacgaaggagaccactactactccggctgccctcctcccaccatcttgcctagttcacaagacaggaggaaagagagaaagcaaa

SEQ ID NO: 47386 - DNA, 122 bp, Homo sapiens
gaagcccaagtgggaggttcatttgaacccaggagtttgagaccatcctgaggatcatagcgagatcttatcccaaaaagagaaaattaagaatatagggcaggccgggtgcggtggctcac

SEQ ID NO: 47387 - DNA, 122 bp, Homo sapiens
gtccgagccaggtccgtccaccaccccacagggcctgtaggcacccggcataggaaaggccgagaaaggggtccagtcccacagccctccaccccagcaaattcccaggtgctgggtccctg

SEQ ID NO: 47388 - DNA, 122 bp, Homo sapiens
gccgcgctcccggcccggctcagccaggtgcccccacgcggcagcgcccggtctgcccgccggccccctgcgaacccctcgcctcacgcccgcctgcctgcgcgcacgcacgcgcacgcacg

SEQ ID NO: 47389 - DNA, 122 bp, Homo sapiens
cccctagttaagcataaactctgtttgtttccgtcctgtacaattagtgcctatattattcgacaaacacacatggttcacccattctgtgccagccactatgctgaggggttccagaggta

SEQ ID NO: 47390 - DNA, 122 bp, Homo sapiens
tggcagggtctagagtgggatgtcccatggcccccatccaggcctggggatatcctcatccgcctcccagaatcgggccgtgggggacagaaggggcctgcgtgcgggcagggagagtattt

SEQ ID NO: 47391 - DNA, 122 bp, Homo sapiens
aatccattaaaataaaaaatgtcctttagcatgccaccccaaataaccctccttcaccaccgatgctacacatctcataagcagcagcaagcactggtctgctggttccctcaaaacccttc

SEQ ID NO: 47392 - DNA, 122 bp, Homo sapiens
ctggtgtctagaagaaagcagcgtgggcagcagtggggactctggggacgacagtgacagcgagcatggagatggcacagacggagaagacgagggggcgtctgaggaggaagacctggaag

SEQ ID NO: 47393 - DNA, 122 bp, Homo sapiens
tttagaaggggcagaaacagcgcagtgtcctcagccctgagggctgagtgttggaggtcccgacgctcctgggttctcttctgcccgggtgcagactacagcaggtgcgcagggcttcgcac

SEQ ID NO: 47394 - DNA, 122 bp, Homo sapiens
gtctgaaaggctgagggcttcgatacctggacccgctgccgccgcggtggcacctcccgccgtctcctgggcaaggcgaggctcgggctgcctatcgatccctatgatttggttactggtgt

SEQ ID NO: 47395 - DNA, 122 bp, Homo sapiens
ggttcccatctttctaccataaactggtagattctgggaggatgaggagtaagagagaaacgaggagagaagatagtgatactaaacacaatttgatcttcagtgttgtctcatcttgaaat

SEQ ID NO: 47396 - DNA, 122 bp, Homo sapiens
aagataatttggctaatgaactcgttaaagggcccctggtgacccgccccggcttcccctcggcccatctgggaaattccattgaaaggctggagaaggttcctcagccccgccgccttctg

SEQ ID NO: 47397 - DNA, 122 bp, Homo sapiens
cagttacaccactccattccccaccttgatatgactgaatcatgtccccccgcaaccaaacgcatatgtttaagtcctaacactcagtatctcataaggtgactgtctttggagacagggtc

SEQ ID NO: 47398 - DNA, 122 bp, Homo sapiens
cgcgcccgtccgcccgccgcccgagccgccgcccgccctggacgtggcctcggcctccagcgcgcagctcttccgcctccgccacctgcagctgggcctggagctgcggcccgaggcgcgcg

SEQ ID NO: 47399 - DNA, 122 bp, Homo sapiens
caccccttccgaggattactcgtcctttgcagagtggacaactagggggcctgagaaaggcgaatgtcaccgatgaccgaacatgagtctttatcattattattatttgagacaaggtctcg

SEQ ID NO: 47400 - DNA, 122 bp, Homo sapiens
gcaagtacagccaagccttttctgaggctatttttaaacttacaaatcagaggacaatcgcgacattagaggaaaattacccaggtttacgccatcactaacgatgatagcttacgatgata

SEQ ID NO: 47401 - DNA, 122 bp, Homo sapiens
aaataatttaaatagaatgttttgttgtatatatattgtaacacctagctatgtgactcacgtatatgtcacatatataggttggctaagaagtaaaatcctacagggtaaggcagaaggtt

SEQ ID NO: 47402 - DNA, 122 bp, Homo sapiens
actcacagagtgctggccggctctatttatacctactctagttacatgctaactaaggagcgggtttttcacaaactttctggaaaaggggccaggagttcctggaaccatctaaggtagct

SEQ ID NO: 47403 - DNA, 122 bp, Homo sapiens
ctcctccgattcgggcttgtacttggtcatctcctcctccagggtgatgaggcgcacggccgggcactcttccttcttcaggccaaagaactcgaggatgcgctggttgtcggtgtggtcgc

SEQ ID NO: 47404 - DNA, 122 bp, Homo sapiens
tcactaacaaaatccctgcctttgtggattctgtgtcggaaagggaaacgataaagaatacggtttgtgacagcactactctcaggagacgaaggagagatgctaagatcttggaaaggaga

SEQ ID NO: 47405 - DNA, 122 bp, Homo sapiens
tccctgcccgccgcccccgccgggcggctttcccccttgtactggagaagctcgaacacccggtcacagctctctttgctatgggaactgggacacttttttacacgatgttgccgccgtcc

SEQ ID NO: 47406 - DNA, 122 bp, Homo sapiens
attagaaatcagtgtttaccagataggagaataaagtaatcctataatgctgactttatccgtgactagttgtaatcctgcttgaggtgggaccagataaatcagcggaactaaaaatacta

SEQ ID NO: 47407 - DNA, 122 bp, Homo sapiens
tgggaggtggtgcccggccactctgggccaggggacaaggacaaccccagggacatgcggcggcagcacaggacaccctggccagcctcgtcagagccgagacagcgctcctatctgccctg

SEQ ID NO: 47408 - DNA, 122 bp, Homo sapiens
tctcgttggtttaatccttactctatttttacttctaagtatgctgtgtattatactttacgttcattgtctgggaataagggcaagtgtttagaatatacatatgtgcatttgtacaaagt

SEQ ID NO: 47409 - DNA, 122 bp, Homo sapiens
ctcggctcggctcgctctcaaaatggcggcggcgtgaaatgtcacatccgcatggggggccgcggagcgagcgagcgagcgaggagagcaagcgggcgggcgccgagccggagggcggagcg

SEQ ID NO: 47410 - DNA, 122 bp, Homo sapiens
agcggcagcggagaccgggtgagcaccggctggttcctcgcggtgttcctgcaggcttggcggccgcggtggtgcgatcagcaaagggcaccgggatgccggttgtgcgtgtcctcaggtgt

SEQ ID NO: 47411 - DNA, 122 bp, Homo sapiens
ggttcgaactcaacctcttcattcttggcttgttataagacaccatggcaacagagaatacgtaggacatgtttctgccctcagggaggttgcagagggtggaggagacaaaacatccacag

SEQ ID NO: 47412 - DNA, 122 bp, Homo sapiens
ctgcgttttctccatgataacatagacaaacagttgcctccaaaggtaaaaacccggttccggagggtattcttgctgtcctctaagctacagaagaaggtggggtggaaagcgctcccaac

SEQ ID NO: 47413 - DNA, 122 bp, Homo sapiens
agtctgtcaaacacatagattttctggccccagctaggatcaactgaatcagttgttctccgaatcttaatagtttcacaattttctgaagtaatctgtgattctgacacacagaaattgga

SEQ ID NO: 47414 - DNA, 122 bp, Homo sapiens
atggtgagtctcccggctttcggctttcggctttcggcggcagccgggtgtgaggttccacgggcaaagccagccagagggttgacagaaataactggataaatctgtgcccctgcccctgc

SEQ ID NO: 47415 - DNA, 122 bp, Homo sapiens
tctttgccttcgctggccttcctctgcggagctacgcccgcgcccagggtggcggagccgcgcatcaacaccctctcgcctcgggacagtcttccgactcagccttctagagcaaggcgagg

SEQ ID NO: 47416 - DNA, 122 bp, Homo sapiens
tcatgtgtggcatgatcaaaagaataattatacagagaggaattctgcagacaaaaattgcgtgtgatcctccttacataaggaccttagtgtgttgctggaaactgtctgattcattctgt

SEQ ID NO: 47417 - DNA, 122 bp, Homo sapiens
ctggaggtgaggcccgggccccagcccggctgggggccccgcagcacccgcagccctgaccgccctcccctgcgttgccgcagtgatgcattcctggcccagcacacgatgcttaccctgga

SEQ ID NO: 47418 - DNA, 122 bp, Homo sapiens
gggaggcggcggcttccggtctgggacggagctgtagcggcactgtaactgcgagggcagcgccgcgtgtgtaacggcgggggcgtgtcggcgggaaggacaatcgggccgggactcgcggt

SEQ ID NO: 47419 - DNA, 122 bp, Homo sapiens
ccccatgtacttcttcctctccaacctgtcctgggttgacatctgtttcagcacttgcatcgtccccaagatgctggtgaacatccagaccgagaacaaagccatctcctacatggactgcc

SEQ ID NO: 47420 - DNA, 122 bp, Homo sapiens
cccgagcgctcacgcttgtgcctggactcagacacctccggcactaaaggtcctcacctgcgatacttgcaaagatctcgctgatcccaatcagcaagtactgcggcacctgccaccacagc

SEQ ID NO: 47421 - DNA, 122 bp, Homo sapiens
gcttacctgcatctggtgtcaagaatcagaatgggagagacagaacctggagaaaggctgcgtcttcagagtggggctccactcctccagctccagggctggacctgaaggttgtctttcca

SEQ ID NO: 47422 - DNA, 122 bp, Homo sapiens
cttccaacgtgagaatctcagaggctgggactgccatctgacaatatgtatcatcaaccccgggcccaacgccaggctgggatttggccagctggccctgggcctgggttgttctttcttat

SEQ ID NO: 47423 - DNA, 122 bp, Homo sapiens
ggccttccctgaggagagcgtctcagccaaatccaactgcctctagctcaagtttccttgcggggggcccgctggcctcatcctgttaggtcgtcttagagccacaggagaatcaatgttcc

SEQ ID NO: 47424 - DNA, 122 bp, Homo sapiens
agacataggagtcaccttctaaggggcttcctggagcacattttcctgcccagcaacaggcggcagcattctctccccactaatcctctccaaacagcagtgagagagaatgcctgccgctt

SEQ ID NO: 47425 - DNA, 122 bp, Homo sapiens
ttaaccctcacggaagccccgtggaggagctgcagttttatctctgccgtacagatgcagcgtttaaagcgtagagagaagaggtgacttgttcagactcacgaggtgagagcagggcccag

SEQ ID NO: 47426 - DNA, 122 bp, Homo sapiens
gcgagcgagacgcccgtgtgtcttgacttttcaatgcagggtacgtctgatcttacatcacgcaagaggggcagtgagagatgccagcggatgggaattcactgattaatcaccgaatccac

SEQ ID NO: 47427 - DNA, 122 bp, Homo sapiens
cagaatctctcctaccctttccaatgcaaatgcccaccagtaagtgggaaggaattagcacgccagaggacacatcctgactgacctaggatgggatctagtagataaacattgcctttgtt

SEQ ID NO: 47428 - DNA, 122 bp, Homo sapiens
ccagatcccggacatataaaccacgccaagaagacaggggctgtctctagcacattctctcgagggagtccggggccccttcccagacgcaactgcaaaaggaagggctaacgccatggcgg

SEQ ID NO: 47429 - DNA, 122 bp, Homo sapiens
actgctttattgggatataattcacataccatacaatctacccatttaaagtgtaccattcgatgtcttctagtttattcacagggttgtagaaccatctccacaatctagttttagaacat

SEQ ID NO: 47430 - DNA, 122 bp, Homo sapiens
tatggggtagtctggaccctggcttatctggttcccttaatcctttaggtacttacacgacgttgggtgaggggagctggaagatcagcgggtccccgatcctctctccctaggggtgatag

SEQ ID NO: 47431 - DNA, 122 bp, Homo sapiens
cagttcttcgaggagcgacggcgcagcctggagcgcagcgactcgccgccggcgcccctgcggccctgggtgcccctgcgcaaggcccgctctctggagcagcccaagtcggagcgcggcgc

SEQ ID NO: 47432 - DNA, 122 bp, Homo sapiens
tgttttataggagaccttggacgttacaccacattctccccataacagaggcgggcattacgcagagtattgcttctgtctctccagggacttttcaccccgtcaaacctgtttcactccag

SEQ ID NO: 47433 - DNA, 122 bp, Homo sapiens
acgccctggatacacggccaccaccctgtccctgacgccctggatacacggccaccaccccgcccagactgaagggtgacaccagaggcaaaaagagtgaactagattcacgtaaatcaaca

SEQ ID NO: 47434 - DNA, 122 bp, Homo sapiens
agggagatgtgaattgcctggctcgtagtcacttagcaacaatgtcccagctctgcagctcgagagtgagggccccacgacagagtttattccgtccccgggtccccgcgtccccaagcgcc

SEQ ID NO: 47435 - DNA, 122 bp, Homo sapiens
ggggcgcggctttgtggcggcagcggaccgtggaggccgggtgcagccccgtcggctgcgcgctctctgcagaaaaggattttctacgctccccgcccatcacttggatctcgtctggggag

SEQ ID NO: 47436 - DNA, 122 bp, Homo sapiens
ctggaaaggaggaagcggggaaggaaggttgtcctgtcgggctgggggctcccgggaatccggaggccagcagtggaaccgcaaggctctacagggcagatctgcctcccgtgctgtctcag

SEQ ID NO: 47437 - DNA, 122 bp, Homo sapiens
caggaccacccacaggagaggggcagtgtccatctttctgaagggaccctttggagatctcgtcctaagtgtggagaggactgacgtggccctgtcatctcaacacatcccagggtcaggca

SEQ ID NO: 47438 - DNA, 122 bp, Homo sapiens
cgcgaattcgggcaggagggttcgtgtgtgtcctcacctctgggacgcgagctccggggacgggggacctcgtctggcgtgggaggcatttagtgagcgccgtggactgaagccgggacggt

SEQ ID NO: 47439 - DNA, 122 bp, Homo sapiens
catgtgtgagttaaaaatcttctctgtaggcctcacagcacatcatatcactcatcaaaacgctggaccctttcccatgactcaaagtggctaccacaggctgttcattgttatcatactct

SEQ ID NO: 47440 - DNA, 122 bp, Homo sapiens
gcccgtgcacttccagatgctgtgtgagagcagcaagctgtatgacccaggccagcagtacgcctcccacgtgcgccagctgcagcgggaccaggagcccgatgtgcactacgactttgagc

SEQ ID NO: 47441 - DNA, 122 bp, Homo sapiens
acttggcttcccgtaacccaggcagctggggagcctgggctgtggccctaggagggggcgcggcggcgggctctctccttttgttgttgtttcctcagcctggggagctgaaggggagacgc

SEQ ID NO: 47442 - DNA, 122 bp, Homo sapiens
tatagtgaggtatgaaggaaagggtgcggagcttccatactccttcccctttgcaccccccgaccccaggtggcaccctccagtaacatccatgtgttcaggtatccagaagctctctgaac

SEQ ID NO: 47443 - DNA, 122 bp, Homo sapiens
gggggacaaaatggagaaatcacaacaagttggcagaggtggaattcgaacccatgcctccgaagacaccggcgccttaatccggagccttagaccgctcggccttgctatctttctcctgg

SEQ ID NO: 47444 - DNA, 122 bp, Homo sapiens
cgacccctccctgttttataatatagaactttgcaaattgtagatacaaatagtagcttgcgaagtgaatgcataattaccatttctctgcttgtagctgtattgagaactagcatttgctg

SEQ ID NO: 47445 - DNA, 122 bp, Homo sapiens
aggtgcagagagacaattagtagtgatgttatttcaagcaaaatccttgttctggaattccgtcctgatctgcttttctcatgttgcattatcttaagcaaattaattaatcctttgagcca

SEQ ID NO: 47446 - DNA, 122 bp, Homo sapiens
ccttctcctaccttcctttcacctgctcctttctctccccatggcaggatcttctcctgccggtctgtcttggagctggccataagtaagttctctcacctacctcgtgtaattgtaggtca

SEQ ID NO: 47447 - DNA, 122 bp, Homo sapiens
tggtgggggtgggagaattgcctcaggggctccctgtttcccactcatgcttttcctcgccgggaagatgccgcaggatctcagcagagtcctcagtggaaggtcagagccacctggggcag

SEQ ID NO: 47448 - DNA, 122 bp, Homo sapiens
cttgggttgaataattttttgatgttcagcccttttaggagagctaatgggattctggaacgacagtttctaaaagtgcgtttcagaatttttagcttgagtggaacaggtcgtggaaatct

SEQ ID NO: 47449 - DNA, 122 bp, Homo sapiens
agtccagtagtcctgaaaatgagctcttcaattcaggatatgctgaatgatccaagaaagcgccaggtggatgagtcctatgtttttgttcagaaacataaaagtgaaatatatttaaaaaa

SEQ ID NO: 47450 - DNA, 122 bp, Homo sapiens
tgcaggttgtcttctgatcccaactgactttctattttaatctcccctacaggttgctcccgttaaaccgtctcggccaaaaaggcacttctcttctgctggcaccatcgaaagtgtcaact

SEQ ID NO: 47451 - DNA, 122 bp, Homo sapiens
ctggaatgtccacagtctagcaaagatgtgcacacacataactggagcaccagtgggaagcgaagcctgccccagaaggattcaggggaggggatttggagggggaagagatcctgctagag

SEQ ID NO: 47452 - DNA, 122 bp, Homo sapiens
gcgggccaggcgggttggaattgacaccacctgtggtctcactaaccccaaaactgcgctcgacccggctgcgtccagggtctctagtccccccactagagactgagaagttgcctcgcaaa

SEQ ID NO: 47453 - DNA, 122 bp, Homo sapiens
gggtctaacggttaaggggacccacataccagtgccaagggggatgtcaagtggtgatgtcgttgtgctcccctcccccagagcgggtgggcggggggtgaatatggttggcctgcatcagg

SEQ ID NO: 47454 - DNA, 122 bp, Homo sapiens
ggccttggagtgggaaatctaaaggaggggacacactacatgtcccagcacaccttgcgacgcccagcgaccacaattcccagaacgcactgctcgtcgcacgcaggttttccttgttgccg

SEQ ID NO: 47455 - DNA, 122 bp, Homo sapiens
gcacgcgcaggaggggcctcgccagtgcaccgggttgcaaggactgggtgggaggacaagcgcacctgtcggaaggctctggctcgggaatatgtatgagggggcggggctgggggtgtgga

SEQ ID NO: 47456 - DNA, 122 bp, Homo sapiens
gagcacgtggggaaaacatctgattcgagagttaaaaagatgaagaaaatactatgccttcgggccttagaaatgacagctgggttgctcacacgccacatttgttatttcacatctcatct

SEQ ID NO: 47457 - DNA, 122 bp, Homo sapiens
gaggaggggatcggaatgtggctcaagttgggaggcgttacctgcggagggtttgaggcacgcccaggagcgagcccacggtcggccgacgcggggccaggggcgggccccaggatccggag

SEQ ID NO: 47458 - DNA, 122 bp, Homo sapiens
gccacttcccggggggctgtagagcacggtcacaggaaggcctctgctgggccgagtctgcggtccctgagccatcacagcactggcgtcttcagacacaccctggctgcaaggcaggacac

SEQ ID NO: 47459 - DNA, 122 bp, Homo sapiens
tggctgagaacggagggtcaagtgccggggttctaatctcaattactttatccaagcatccgctcgctcatttacatgtttccctgggctctccactctgcgccaggcccggtacctggagc

SEQ ID NO: 47460 - DNA, 122 bp, Homo sapiens
ccccgccctgcctcttctcccgaattagttttgtccgcgctcggccgccgtgcagtcggtcgttccacttccgccttcgcccacgtggtccggctccggctcagtcagccgcgtcgcgaatg

SEQ ID NO: 47461 - DNA, 122 bp, Homo sapiens
ccctttgggcttggaaaactcaggactgcctttgacttgaaaccctccactcacttggcccgccagcctgctcctgcagacactcttctctttctctgggacacaggaccttttttctgaga

SEQ ID NO: 47462 - DNA, 122 bp, Homo sapiens
tgaacaggctccctcgcagcatccgtagatcattcttcaaagagtaagaggagtaaaatgcggttctggcacttagcacccaagaagtcttgggcaagttacttaacctctcattgacgttt

SEQ ID NO: 47463 - DNA, 122 bp, Homo sapiens
caaccgccgctgcctgagcgccgcgcccgctctcgctcgcgcctaagccacgcccaccgccgctatcgccagccaacccgtgtattgcaccgcctacagacacgccccttcatctccgtcag

SEQ ID NO: 47464 - DNA, 122 bp, Homo sapiens
cccattcagactgcccagggagggctggagagccctcaggaaggcgggtgggtgggctgtcggttcttggaaaggttcattaatgaaaacccccaagcctgaccacctagggaaaaggctca

SEQ ID NO: 47465 - DNA, 122 bp, Homo sapiens
tcataaaaataatgaagcctcacatgatttaaacaaaaccgtctcagtagagctgcagcccgagtgaaagttgcagtgcggagctgggttgcagctccagtttatgcctcattagcagaggt

SEQ ID NO: 47466 - DNA, 122 bp, Homo sapiens
cccgccccgggggtggggcggggagtggtcacgtggaggggcgccccgtccgccgagccccgccccaccccgccccgcccgcccccgcgctcggggccctccgcctagtagagatctggagc

SEQ ID NO: 47467 - DNA, 122 bp, Homo sapiens
gagtatgacggggctgtaagagctggtgtggcgggtgctgcccccctgctctgtctgcaccgcaagctcacctcctggctccgcgttcggttcggcacttggaactggatctggcgactgtg

SEQ ID NO: 47468 - DNA, 122 bp, Homo sapiens
gttggagcttgtggccagcatttcatccgcaccattggtcaggtcactggcagagagcctcgtgccgttagacgtggaacctgccgttgtgatgaacacgcctgcaacaattgtctgcgcca

SEQ ID NO: 47469 - DNA, 122 bp, Homo sapiens
gatggaggcttttaacgctgtcccctcctcgggactcaggtgattatgcgggccttcagccgcgaggcactcgaatgctacgtgccggtgatcaccgaggaagtgggcagcagcctggagca

SEQ ID NO: 47470 - DNA, 122 bp, Homo sapiens
tttgtccggtagctgtgtgctcagcactgcgtctgcgcgggggtggggtgagcagggagacgtttccggttaaagggcagagctcgcgtcacccttgagggagtcggactcgggaccggccg

SEQ ID NO: 47471 - DNA, 122 bp, Homo sapiens
taaaaagaaaccaaggaaagtttccgcagagggctgcctgggtgtgcgctctcctccttccgggactcccaggcgcttcctgcttgtgcaggtacctggacttcagagaaggaagatgtgga

SEQ ID NO: 47472 - DNA, 122 bp, Homo sapiens
tggtaatattgtcctcctcctcattacatttgaatatagattgccactgtgcaatgccttcgacctcgctctctatttgtgaggtttaggagttcttcagacaaggtgatgtccacgtgcac

SEQ ID NO: 47473 - DNA, 122 bp, Homo sapiens
tcacttttacgcggttgagtccggcctccagccggagctgttgaaccactttcttcatagcggcgacgctggaggagccagacatggtgcacgcgacggccgggccgattcgtgggtcggtg

SEQ ID NO: 47474 - DNA, 122 bp, Homo sapiens
ggacggggctgacactcctgaggaccgactccccaaagctcttcagcaagttcttgctctcgtgcagccagttcaggttggtcagctcttcatcttccatggccccctcttctaatcggatg

SEQ ID NO: 47475 - DNA, 122 bp, Homo sapiens
ttcccaggaaaaacatgagtatgacattgacaagcaggaggactacaatcacggcaaaaacgactacagtttgcacatccagggtcatggtgcaatgcagaacactgtagtgttccaggtgg

SEQ ID NO: 47476 - DNA, 122 bp, Homo sapiens
gttttcacgatgcacccttgaggctaggcacgctgattcaacacacttggagagcttcaccgaaacacactaaacacacagtgatgaactgtgccctggcagagatgacctggcaaaattct

SEQ ID NO: 47477 - DNA, 122 bp, Homo sapiens
ggtaatgattattaaaacctcactgaacctcaaatagacattcacgaaagccagagttaacgtctccacccttcctatgtctgtgaaggcaagttgtgggcagagtgtaaaaatctggagaa

SEQ ID NO: 47478 - DNA, 122 bp, Homo sapiens
actccatattgaaaatcctttgaagaaggtattgtcatctctattctacagatgatgaaacgggctatcagaaatacagaaataacgatgaaggcatggagtggatgatcaagctcaggtca

SEQ ID NO: 47479 - DNA, 122 bp, Homo sapiens
cggagcccaagcccctttttcatttatcccttttttgtcccggcatggcaggagtcagagcgccttctgtttgtcttgattaaagtcagcctccaccttcccccgagcccagttgcccttct

SEQ ID NO: 47480 - DNA, 122 bp, Homo sapiens
cgccctgcacaaggtgggccagatcgtgtttgagttcgtgggcgagcctgagctcatggacgtgcatgtcttctgcacagacagcatccaggggacccccgtggagagcgacggtgagtctc

SEQ ID NO: 47481 - DNA, 122 bp, Homo sapiens
cattaacctggggtccggggcctttgaggccattgtggagccagtgaatggaaaattcaacgacaacgcctggcatgatgtcaaagtgacacgcaacctccggcaggtaatggctgagggga

SEQ ID NO: 47482 - DNA, 122 bp, Homo sapiens
attatgttaagtaaaacaaatcaggcacagaaagacaaatactgcatgatctcactcatacgtgggagctaagaacatgcatctcatggaggtagaaagttgattgctggttaccagaagct

SEQ ID NO: 47483 - DNA, 122 bp, Homo sapiens
tgagagcatggcctctccaggggcaggtagggcgcctccggagttaccggagcggaactgcgggtaccgcgaagtcgagtactgggatcagcgctaccaaggcgcagccgattctgccccct

SEQ ID NO: 47484 - DNA, 122 bp, Homo sapiens
ggagaagacaaggcaggaatcagctctcagaattccacaccaaggccttctgggctcccccggtcttcccacggacgagacacaagtgacccttggaaacttctagagaaatgaaaggtgaa

SEQ ID NO: 47485 - DNA, 122 bp, Homo sapiens
tttctgcctccctggtgctctgcagatttggggaatcttccagcagggtcggcttccaggcgggcgacagttagattcaaatcacttctgctccccagctcagcacttgggcccaggtacct

SEQ ID NO: 47486 - DNA, 122 bp, Homo sapiens
tacgaccttccctggggaccgggaagggcacaaccacctcttgcaactccgccactaagacgccttgggtcaccaggcccgggggaaaactcgtccccgtcccaggctctcgattcgggccg

SEQ ID NO: 47487 - DNA, 122 bp, Homo sapiens
tttacgccggctgaggaggcagaagtcagcgaccccagtgggaagtggaagtagagggggcggggagtggcctacagggtcagtctactcccttcacaagggttaccaactagcaagacagg

SEQ ID NO: 47488 - DNA, 122 bp, Homo sapiens
aggatttactattaaattatgataaagaaatagaaagtgcatagaagaacccagatattgcggaagtaattcatgtaatcattaccttttgaagccacatgatgtcgctgtctaccaagaag

SEQ ID NO: 47489 - DNA, 122 bp, Homo sapiens
accgagggcccaagggcaggcgtgcagaccgctacgactttggctttagggagacgccttcggggcgcagggcccgcccgaagacgcgggttagcatacagctcagctccaggcaggcgatg

SEQ ID NO: 47490 - DNA, 122 bp, Homo sapiens
ggggctctgggcttgtgatcccatagtctagtttcctcgttttaataaactacaacaagccgggcgcggtggctcacgcctgtaatcccagcacttcgggaggccgaggcgggtggatcaca

SEQ ID NO: 47491 - DNA, 122 bp, Homo sapiens
gagggacagaagggtcggcggaggcagtgcggcgtcccttgttccctggcagagagaatacgagcccaccacggggggattgtgggtggggggcaagggaagggaagccccaggaactgcga

SEQ ID NO: 47492 - DNA, 122 bp, Homo sapiens
ccccagcccatacttaggacgcctatcagttgctcctttaatgcctctttggaaatggcccggccacgccagcactcctacgtcacctcccccgcttccggtccgcgagcccttcccaacct

SEQ ID NO: 47493 - DNA, 122 bp, Homo sapiens
tgcgtccctagtgggtctcatcgatccacgcatttattcccatttgtaacagatggctgccgtcaaggctccgtcacccctatttgcttaaccacatcagccaagggagcaggctagggagc

SEQ ID NO: 47494 - DNA, 122 bp, Homo sapiens
cacactggggcatccaatcatattgcattgtaattatccatgggctccagacgaagtcctcgaggcagaggctgtgtcatcacacctctttccccagctcctagcacggtgcctgaccataa

SEQ ID NO: 47495 - DNA, 122 bp, Homo sapiens
actacaggcctttctacaaagaatgcctctttcacatgccaattatctcaaccctgtttgcgagaagtaaagtgttctaaaatacagagattctttgctttcactgagagagctctctattt

SEQ ID NO: 47496 - DNA, 122 bp, Homo sapiens
cgcagcgagcgccccagggaggggctggttatgacttggctggaccagctccatccctgtcgccccctccccccggccctgtcctgtcctgtcccatccccgtggttcttcctgttgcattg

SEQ ID NO: 47497 - DNA, 122 bp, Homo sapiens
cacccagcagggacaggaaggagacgtccatctgagcagcccgcgcggccgtctggagtccgcgagactgaaaggacctgtgcatcttactgtaaccagggggccaggccggctttcttgct

SEQ ID NO: 47498 - DNA, 122 bp, Homo sapiens
tgctgcgcacgatgaagctggccctgctcctgccctgggcgtgttgctgcctctgcgggtcggcgctggccaccggcttcctctatcccttctcggccgcagctctgcagcagcacggctac

SEQ ID NO: 47499 - DNA, 122 bp, Homo sapiens
ccatggttgtcttagaaaccagtccctgaggcttggcaaagcaggagtcctccttggcagcgcttgggtgtcgggattccgaggtttcagtctgacctctccacggggtcgacaggaatgtc

SEQ ID NO: 47500 - DNA, 122 bp, Homo sapiens
gcggccggtgccccggctttttaggctgtgtgcatcccaagccgcctctagttggcttctcgggcttccggggcaggagggcgcgcggctttgtgcctacgaattgagaactggagagccag

SEQ ID NO: 47501 - DNA, 122 bp, Homo sapiens
aaactagtttttcatacagcattatctgtagacttgtattagcagcatactggtcatatgcgttttgctttcctcaaatatgatgaggtaagctaatttaaagtgtgttggggctttctgcc

SEQ ID NO: 47502 - DNA, 122 bp, Homo sapiens
tcagccgccccacctgacatccgcgcaggaccaggtgaggggcggggcctggggcagatgcgggagggctgagtggtgccggcctgcctgcctgcctgacggcaccgtgtcccctgatcccc

SEQ ID NO: 47503 - DNA, 122 bp, Homo sapiens
cagccaccgcgcgccttccccctgcccatgccgcagcccccgtggcttttgttctggactcgggatgccaggttgagacacgtcctgcaaacctctggcagaaatgggcgcaagggggtgga

SEQ ID NO: 47504 - DNA, 122 bp, Homo sapiens
gtggggaaaggggaagggggcggcaccgctgacgtcatttccggggtcggggtatataagcggggcgcgagggcgctgctgctgccaccgctcctgccactgcagtgctcgagccccgtgca

SEQ ID NO: 47505 - DNA, 122 bp, Homo sapiens
gaacctagttattcaactaaacactaatctaggtgttgctgtgaagttattatgttgatgcggttaggttagcacgtctacagttgcttgactttaaaaacaggacatgaccctcaaggatg

SEQ ID NO: 47506 - DNA, 122 bp, Homo sapiens
aacggaggaggaggagggtttgcttgaggttggggcgagagtcgctctggctgttcttcccgctgggcgttgtacacccctcctcctgaaccaagccagaggtcagcatggggaagggagga

SEQ ID NO: 47507 - DNA, 122 bp, Homo sapiens
tgcctggaaaaagtttcctgtggaacactcgccagcgggggcgggggcaggggcggctggcgcagcagtggacgtgggagggggcaggagggccgggggaggccgcgaagggcctgctcgca

SEQ ID NO: 47508 - DNA, 122 bp, Homo sapiens
tgattggaagataaaaggagataatgggcaagaaagcaaattacataataatgacattcacgtctatacactttactgacacaatcatggggatgggtgaccaccttctcctcctctcgctg

SEQ ID NO: 47509 - DNA, 122 bp, Homo sapiens
agcctgctctgatgactggcggcgccagggagaaggctcacatcgcgaggtccccagcaacggctcaaggtgactcacagttgcttggataagccagtggacgctccctctacactggcccg

SEQ ID NO: 47510 - DNA, 122 bp, Homo sapiens
ccccccgtggtcccatttcctgttatttttagcgcaaatagctcacgactttaaaagatacggttttaatgaagtaaaaaattatgctcccaagttaatacccagcttcttgcaattttaga

SEQ ID NO: 47511 - DNA, 122 bp, Homo sapiens
tgcaacttggcaaattgggtggaaacagaccccggggtgagaatttccccaatttgcattcgcatccatctcccaatgctccagcctctactaggacgtctcgcagggactgtggcctccta

SEQ ID NO: 47512 - DNA, 122 bp, Homo sapiens
cgtggtttcacaggggcatctgagaagtgcatccaaggcactggaaaagtcagtccagggcgagaaaagggcactgagaagtcggtccggttgcagacatccgctaatctgggcagagcagt

SEQ ID NO: 47513 - DNA, 122 bp, Homo sapiens
ggaggtttttctccggagattccacagctaggaccactgatcgccaggaccgtgatgggccggggcctggttcttggtgacggtctgggaccagacacaggagcagaaggcgtccgggtggt

SEQ ID NO: 47514 - DNA, 122 bp, Homo sapiens
ctaggtgttgagtccttggggcccctgagagatctgagtccctgagtccttggatctccccgcccttccgtacctttccacatcaaaagggaagcagaatttaggcaccatctgcatagctt

SEQ ID NO: 47515 - DNA, 122 bp, Homo sapiens
ccgccccaggatgatgtggccgcagggcccggggcgcccggctgccaagcgcacatgcggcggcacggtccagcttttcaggctgaagctggaaacgatgactctgctactcgctccccggc

SEQ ID NO: 47516 - DNA, 122 bp, Homo sapiens
cgggggtgatggtgcaggacgctgcgcggaggtttcccccaagtcaaggtgctgcgaaagcggaggaggagtcgcctccgtggtccccgcggttcccggggctggtgccatccgtggtggtg

SEQ ID NO: 47517 - DNA, 122 bp, Homo sapiens
tgcttcatggtgggaagggatagtttacttttgggtattcaactcacgaggtattctaaacgttaggtttcccataacacaaaggcagaggctaacatgtgccaaaagtagtgccacgttta

SEQ ID NO: 47518 - DNA, 122 bp, Homo sapiens
aaaagaaatgcacaaaataaatattacaaagggcctgagtgatgctgaaatccagctctgcgttcacacttgagttgggggatggcaggttccccagcaccgtgtgctcccaggttcccagc

SEQ ID NO: 47519 - DNA, 122 bp, Homo sapiens
gcgatgatgacctcacagggaacagctgaccgcagggctgggagaacagctgtgccccttcgaggctggattttagtggagggacacacgccaaagaccccctctctgctgagccccgtttg

SEQ ID NO: 47520 - DNA, 122 bp, Homo sapiens
ctccctcattatttcacccatcattgaactttttcaccaatgagagaatccacctgctggcggtgaggcatggcaggatacgagaaagtaagtgggggtggggatgtggcaggtgccagttt

SEQ ID NO: 47521 - DNA, 122 bp, Homo sapiens
ctgctccccacccctgacggcggcactggcgggctggggcaggggccgggaggcagttaccggggccacgagcgccgctgtcgcgttccccgagcgcagcggatcctcgtttgcggcgggcc

SEQ ID NO: 47522 - DNA, 122 bp, Homo sapiens
ccacgtgcgagaaccaagctctgctcctcaagtgacgggggctctgctctgccaggtgaccgcgcaccatttctcgtgcctggcaagctggtccccttctgggtccgggaccaccacgtccc

SEQ ID NO: 47523 - DNA, 122 bp, Homo sapiens
tcttcttgatgttggagtcgtcgtagggcatggagccgcagaccatgatgtagaggatcacgcctaggctccagatgtcgtacaccttgggctggtagggaatgccctgcagcacctctggg

SEQ ID NO: 47524 - DNA, 122 bp, Homo sapiens
tgccgtacggcactggctacgcccggactccggtgcgcagccagtggagctcttttcacccggtgcttctacgactccgccaatcagaaacttcctgcctggggcccaaccgccggagagta

SEQ ID NO: 47525 - DNA, 122 bp, Homo sapiens
taaaggtagtttggcttgttactgaaattcttaaccacttccgggtggtggttacagctccgccttcccttgtaatgtaaatctttacctgcagaatcttgtctggaaatactcatggactg

SEQ ID NO: 47526 - DNA, 122 bp, Homo sapiens
ggttcggaggctaagtaagtatttaccttccagtttggggctgacggggcgggggcagcgcgaaacgaaaattgcgtctctcttcctctctctttctcctcacaaatatttgggggtcacgg

SEQ ID NO: 47527 - DNA, 122 bp, Homo sapiens
gctcccaaagtggtttttttgttgttggttgttgttgttggtggtggtggtggtggttgtcgttgttgttgtttgagacgatatctcgctatgttaccaagactggagggcagtggttattc

SEQ ID NO: 47528 - DNA, 122 bp, Homo sapiens
ccaccctgcaccaagggacgcctcggaagcctccggccaaggcggggaacggcggagaaacgcggaatacctgtgcgaattcgcgcggccgcgtcgccactaacccggcgaaggctgacccg

SEQ ID NO: 47529 - DNA, 122 bp, Homo sapiens
tctgaatctcagggggaggggccggggcagctggagcgtggccctggccagtcgtggtgacggaattccgggagccttgggcctggagtcctgctcttcctagctgggaagtctgcagagag

SEQ ID NO: 47530 - DNA, 122 bp, Homo sapiens
ctctggcccccatccccttgtgtgtgtccctctgcccagctcctgctgtaattagctccacgtgtacccccttcactccctcccaccagctctgcagccagcctatggcaattatattttaa

SEQ ID NO: 47531 - DNA, 122 bp, Homo sapiens
ggtcgaggacatcagtgacatcctggaggagcacgctgagaagcacttccacccctacatcgcctactgctccaacgaggtctaccaacagcgcacgctgcagaagctgatgtgagtgggcg

SEQ ID NO: 47532 - DNA, 122 bp, Homo sapiens
gggcatgccccttttgacaacccctccacctgcccaggtgattgggcagtggggaaatcccgtctccatgtacctggcctgggcagctccctccggagggaccctcacgccacaccatcccc

SEQ ID NO: 47533 - DNA, 122 bp, Homo sapiens
gggcagctgctgtgcttgtgtctcctccaccctgagagtccgatccagccaagatccggacgcagttggagtgtgtcccagacctttgtcctctcgctgggcgaaagctgtgagtttccgcc

SEQ ID NO: 47534 - DNA, 122 bp, Homo sapiens
tcacaggttacattttacatgagtgggaaatttccagaatctgcctacccgttctatgtacggatctggaattcaggagggaggtctgactgagttataattttggaaatcatcagtatgtg

SEQ ID NO: 47535 - DNA, 122 bp, Homo sapiens
tggctcacaggcaccgggagagctggaaggctgcggggaagccgaggaaggccaacacaccgcacaacacggcaggtgcctggccctcctctgacagtggccctcaagctccaggagggccg

SEQ ID NO: 47536 - DNA, 122 bp, Homo sapiens
gctggaggccgacaggcgcttgccctctgccggggcttcacgttcagctgggggaggcaccgcatacacaccactgtcgaccacgccaccatcagccacctcaggaggaagcacccgttcac

SEQ ID NO: 47537 - DNA, 122 bp, Homo sapiens
actacctttaagaccaggactcgaagcagagtgagaggcctccctccacccacctcggggcgagtgaagacacagcttacagaggcgttcaaagtagtgacgcagtgaggtctgaatgaaca

SEQ ID NO: 47538 - DNA, 122 bp, Homo sapiens
ttagcccaaaatgaaacagatcctcatgctgtatctgggtttttctcgtctgtctccccccgggtctgtggctggggaaagcagagagcttgtgcctccccggcagctatgcctgccttgga

SEQ ID NO: 47539 - DNA, 122 bp, Homo sapiens
acaggagcaccacaggtgccaagtgaccctcacaggtgccaggtgatcctcatggcccggcggcgaggaatcagacggcagaaacccactccccagcccaagggaagatggagggagcctct

SEQ ID NO: 47540 - DNA, 122 bp, Homo sapiens
ttacaggtgaggaaatcagagcttatttaaataaattgccgaggtcacacaactagtaagcgacaaaatctcagtcaaaccgaggctcttttggttcaaagatgtgtattgagctctactct

SEQ ID NO: 47541 - DNA, 122 bp, Homo sapiens
ctctaggtcaagagctcactgggggcaaaccctgtggccatttttttgtgggccaaaaagcggcttaacttcattttgctccacctcttccccaacagaagaacccagttgctactaaacaa

SEQ ID NO: 47542 - DNA, 122 bp, Homo sapiens
aacctgccttctgtggtacaatgctccataatgacattagctgtacagatctttaaatcccgtcagattttgaaaatgagattctagaactgacagagggcatgggtcagaggttcccaaag

SEQ ID NO: 47543 - DNA, 122 bp, Homo sapiens
cccaaaggcagcccctctgcaaacaaagtcttattctttgaaacaggaaccctcaggggccgcctggggactggtgccgactgtcaaacccagcagatgggcttcatccaggcctcaactgt

SEQ ID NO: 47544 - DNA, 122 bp, Homo sapiens
ggcgcagatgggcgaggggtctttctgcggcgggatctgcgctcctgggcctttgagggccgcaccaggggaggcattgccccaccccgagaagaaaacagaaatccacgagtgtaaaacat

SEQ ID NO: 47545 - DNA, 122 bp, Homo sapiens
tatgaaaaggcgctcaacatcactaatcatcaggaaaatgtaaataacaatgatatatcacgttagaatggctgttatcaaaaaagaaaaagtagcaaatgttggtaggatgtggagaaaat

SEQ ID NO: 47546 - DNA, 122 bp, Homo sapiens
actaaggaatgtaaaaacaaatatgggtcagtcatacaatgagcagtgaaaattatctagcgattgaccaaatggataaatcttgagagtataattttgagagaggagaaaggtgcacaatg

SEQ ID NO: 47547 - DNA, 122 bp, Homo sapiens
gtcaggaggcctgcgtttaccctgggcacgccctggcactccagggagacgcactcaggccgcccttccttgggcagaaataaaagagttgtgcctcgtggacagccccgaacacttcgcga

SEQ ID NO: 47548 - DNA, 122 bp, Homo sapiens
ggggttttatttccttttgtggttttaaatcttggtatattcacaagttaagctctactgcgtctggcaacacaaaaacccatctgtatctctttctaatttggatccagtaaccttgtaaa

SEQ ID NO: 47549 - DNA, 122 bp, Homo sapiens
taccaagacaggagtataagccctgacttatccaagccaatatggcaagagttataaggtcgccaaaactagcagcaatgggtgtagcaacattatcaggatttataccagtcttctttgaa

SEQ ID NO: 47550 - DNA, 122 bp, Homo sapiens
agggcagcctggccctccttacaccgcgaagtgtagacacaggcagtcaggctcaggggccgggggctaagccaggccgaccttggcatgcttcctgctcaagtgtaagtcatgttcagatg

SEQ ID NO: 47551 - DNA, 122 bp, Homo sapiens
actccatgggaaattttgttcccatgatgaccctcttgtctcctaaatcatcctttccttcgtggggatgtccaatctccatgttcatggacgatttctccccattctcatttctccaagag

SEQ ID NO: 47552 - DNA, 122 bp, Homo sapiens
cccgcctgctcctgactcccccaagtcccaaagcccgaccccaagtgggtgctgcgcggccggtggagcaaaactttcagtgcccacagcttttgcacttggctttgtttttctccctctat

SEQ ID NO: 47553 - DNA, 122 bp, Homo sapiens
tttcacttctccgaaccctgaggcagtgtgtgaagctgggacgccagccatgttccagaccgcttggcgccaggtgagtgagcatcctctccctccctcccaccctttagatgtcaagagag

SEQ ID NO: 47554 - DNA, 122 bp, Homo sapiens
gggttgaaaggaagagagcacatagcagtgctgggaagaccccagcaccacctccaggagcggggggatagagaagccttaaaaggcaaacatggcccccaaaaacgtttgggaggaaccag

SEQ ID NO: 47555 - DNA, 122 bp, Homo sapiens
tatcctagtatctcgcaactacgctactcctcccaggactaaaagtcaaataagaaaaagcgcccatgcagaggaggacgagctctctgcctcctgcttagcctgactcagaactgagagag

SEQ ID NO: 47556 - DNA, 122 bp, Homo sapiens
catggccgagttgcaggcacagcaggctggggccgggtggaaaccgagggccagcagggccggaacagcgcatctccgcggacggctccccataggcccggccagcgcggagccaggagggt

SEQ ID NO: 47557 - DNA, 122 bp, Homo sapiens
cgcaggaggtggaaggcgtgaaaggcgtggagcagcccggcttccctcttgccagtcctgcgcactccctggcagccagtgtgggccctttatttaaagggttctttctttgaccttagctc

SEQ ID NO: 47558 - DNA, 122 bp, Homo sapiens
aggagtggtgaccctcacctcacagtcacctcctctctggatcctcgtgaggtataaagacgagtcctccaccaccagtcaggcacactctaccaccatgaatccactcctgatccttacct

SEQ ID NO: 47559 - DNA, 122 bp, Homo sapiens
ggcggaggcgcggggagcgtgtttggggcgccgcggcggggagggtggcggccgctggtgcgcgcggggcgctgtgtatgcgcgctcccccgctcggggaggaagatggcccaaaagggaaa

SEQ ID NO: 47560 - DNA, 122 bp, Homo sapiens
cgcggccccgccgcctcccccgcgagtcccggcgatgcggcccggcctgtgagcggccggcgaccctgggacgccccgccgcacaactacctcaacgccgtgccgcccccctcccgccccca

SEQ ID NO: 47561 - DNA, 122 bp, Homo sapiens
ggagagcggctgagtcaggctctggcagtgtctaggccatcggtgactgcagcccctggacggcatcgcccaccacaggccctggaggctgcccccacggccccctgacagggtctctgctg

SEQ ID NO: 47562 - DNA, 122 bp, Homo sapiens
cggacgcggcggggcctagatgcggtcacacgcaggggggcggggccgcggcgggagaggcggggcctcactgggcggtagctccgggaggggcggaactgcggtgggaggggcggggcctc

SEQ ID NO: 47563 - DNA, 122 bp, Homo sapiens
ggcacaggctgaggcggcgccagcacaactgccgccgcgcgccccgaggagacccgggcacgaggaaacaaggagaaatcaggactccttccccggaaccgaccggcagctccgcgcccccg

SEQ ID NO: 47564 - DNA, 122 bp, Homo sapiens
cagcccctggctctgcagtctgtgtggcagagtccacacagagcaacatggtctcaggaccgcagcagccacacaactctcagatctctgtggtctttgtgcagctccactgactcctctca

SEQ ID NO: 47565 - DNA, 122 bp, Homo sapiens
tttgcccgcttgggaacagcaagctccttaagggcaggactactaccgcgctctcagaggcgctgcactggaacatcgcgggcacagggcagcgttggtcactgctcctgggtactagggca

SEQ ID NO: 47566 - DNA, 122 bp, Homo sapiens
ttctatttacgtagcacctttacacgtttcagagcactcttcttcctatctttttctaaccgcatcaccttgtggttgcaactgattatgttatcgccatttcgatgggtaaatggagctgg

SEQ ID NO: 47567 - DNA, 122 bp, Homo sapiens
caatctaggagggacaatgattatgtggtaatgacaggcactatctgggttcggaacccacgctgcctccgccctcctcccacccgcgctgcagttcccaggcgcatttcccagcctcagga

SEQ ID NO: 47568 - DNA, 122 bp, Homo sapiens
tatccacagatccgtgatcatgatactgaatattcttcgatctgattttcctttttaattcgcataggccagagttcagcaaactgtttgttgtaaaggaccagacaataaatactttcggc

SEQ ID NO: 47569 - DNA, 122 bp, Homo sapiens
ctgggggatgagcactgggccaccgacccagacatgtacctccagagcccccagtctgagcgcactgacccccacggcctctacctcagctgcaacgggggcacaccagcaggccacaagca

SEQ ID NO: 47570 - DNA, 122 bp, Homo sapiens
cgcgttttccagcatcctcatgtagttgctatcagagaacttgatgacagccagtttattcgccttctccatgttcttaatccatttattggcctgcccgtgagggtcaatcattaaggccc

SEQ ID NO: 47571 - DNA, 122 bp, Homo sapiens
gaccgcccaccaaaaccctttttccggtcggagaggcccggcaggctctcaggtcatttgcggagcaaacgtgattgacacgatctgcgtctaatgaatgttcgtctgcttcccagctcgga

SEQ ID NO: 47572 - DNA, 122 bp, Homo sapiens
actgtcgcgccgcgcccggggacgcacaggaggtgggatccaggagcgaagcccctgcagcgtcccagactggacgtggccctgcacccccagctgctgggctggccgggacatgcatgaga

SEQ ID NO: 47573 - DNA, 122 bp, Homo sapiens
tctttacttattctcttcttggaaaatccatgtgacctccccgcgcttaaagtgtttccacgttacaggcgacttaaaggcagccctggagcctgacgtataattcgagcgccgatgcagaa

SEQ ID NO: 47574 - DNA, 122 bp, Homo sapiens
tgcatggccggaaagatgggtttcattgccctctgtcggccatgaggtggcagcacaggacgtttggccttagcggtggacctgagtctgaatcactgaaattcaggtgtagattattcagt

SEQ ID NO: 47575 - DNA, 122 bp, Homo sapiens
gaataatgccatgttgtgctttggccaaaaatcctcagttgctctagtatttctcccacccgcacatgatgtcaaggttctctatgaaagaaaatttgtttgaagagagtcttgagactaaa

SEQ ID NO: 47576 - DNA, 122 bp, Homo sapiens
cctgctgagcgacagtgagagccggagccgcggcaacgtgcagctggaagcgggcgaggacgtgggtcaggtacgggccgcgggggcggggccagcgccgggcgcgggggctgcacggggga

SEQ ID NO: 47577 - DNA, 122 bp, Homo sapiens
cttggctgtttctctggagacccctgactaatatgcataggtatgactcctggcacagtgcgtgctacaaagaggagaaggcactacctgtgaatcagaccatctgtgagtatttgcaattg

SEQ ID NO: 47578 - DNA, 122 bp, Homo sapiens
gcagccacaggcgaatctgggacgatggcagattgttaatatctcagagccccagagactcggcgtctccgaccctgagcccacatgagtagcagaaccccggcccgagcacccaacgcttc

SEQ ID NO: 47579 - DNA, 122 bp, Homo sapiens
gtctactgcaatctgtgcgagtcaagcattggtcttggcaaacagggactgagctgtaaccgtgagtaatgggagctgggaggtaggggaagagggtcagcccagctatctgtgggagcttg

SEQ ID NO: 47580 - DNA, 122 bp, Homo sapiens
tccctatctcagaatgagcctcgcaggcagtcaccgttctgtcaactgagaggaggagcccgctttggtagtgctgtccttatggcaagaatatatagaagttggagggaagataaactctc

SEQ ID NO: 47581 - DNA, 122 bp, Homo sapiens
ggggcggatgccggggcttcccaggatgtggagtgtggggcagtgagaggccccccgccccgcctcttcggaaaagcctgagcagcagctcccggggcgcggaagctctgacacctgagagc

SEQ ID NO: 47582 - DNA, 122 bp, Homo sapiens
ctgactcactggggttttgtgctcggactcaaagagctccattgacagcggggctggggtcggtttctctccacacagcctagcctgctgggaggcacaaccaggcaaatgtcacagggccc

SEQ ID NO: 47583 - DNA, 122 bp, Homo sapiens
ctggccttcctgagccgtgacgaggaggattaggcggacggagaccacgacggccgaagccgggacggcctcagcccccaggccaggcatgacttagactccaggctggcgacggggccctg

SEQ ID NO: 47584 - DNA, 122 bp, Homo sapiens
ccgtttgtccatccgcctgcctgcaggggagctgggcggcttgtttttacgtaaccttcacgcatgagcggtttgtaagcccgctcaccccgttggcagggtgttgggccaagcactgctct

SEQ ID NO: 47585 - DNA, 122 bp, Homo sapiens
tcaacacatttaataaagtccatctttcaatattcattcaataaacatccatgcatccaacgggggccaggcaatatgtcaggacctaagaatatggagatgaaaaatgaggtcactgccct

SEQ ID NO: 47586 - DNA, 122 bp, Homo sapiens
aacatcccctgcccagctcttctgcctgggagggtcctgtgcagaggggggtggcccacacgtccgcagcctcagcctctccatgttgttatccctggatctgggggtgggacccccacagc

SEQ ID NO: 47587 - DNA, 122 bp, Homo sapiens
cctttgggaattcctctgtagaagtcaggcttgagatggcagatgagctctctgcctggccggtcctcttttccccaaccctggtgcctcctccgacgcccatggtgattctctttaggcag

SEQ ID NO: 47588 - DNA, 122 bp, Homo sapiens
tgccccgcccctcgtccccctgctgtgtccatatatcgaggcgatagggttaagggaaggcggacgcctgatgggttaatgagcaaactgaagtgttttccatgatcttttttgaggtaggg

SEQ ID NO: 47589 - DNA, 122 bp, Homo sapiens
ctgtacccagtctcggacgctttggaggtgctctggcactggaaggcctagaccgtggtacggcgcagagtagggggttcagctcttttcagcccgaggtgggctctgtttggcttctcaat

SEQ ID NO: 47590 - DNA, 122 bp, Homo sapiens
tgggcgcggggcgggctggcgggcgggcgccggcggcgggcgcggctccgggccgccccgcggccgcttggaagctccttatttgggcagtgatgtcaggggaagtcgcaggggccggacca

SEQ ID NO: 47591 - DNA, 122 bp, Homo sapiens
agagggcagggctgctctctggggtcccttttctttagggtctctagtgagattagggaccgaatcacatttttgagggttccccctcaggccctaaccacctccctgaggccccagctctg

SEQ ID NO: 47592 - DNA, 122 bp, Homo sapiens
ctaacctcagtgaaacaagctggagccctgttaagttatttatgaaacaatattcaggaccgccccccggaggcaagttagggaataatgaatgggaagtgccgtggtgccctttggagagg

SEQ ID NO: 47593 - DNA, 122 bp, Homo sapiens
ccgctagactgtcagctttgggaggaagcaggccgcatctgtcttgtccccagtgttgagcgcagtgtgtgctgcagcatggaagttgttccctaaatacccacagtgagatgaggctccca

SEQ ID NO: 47594 - DNA, 122 bp, Homo sapiens
cgcctctgaattgcagcgtgggctggtggctctggccctgtggccttggagggctgccagcgtacctgggcaaggcccggcagacccgtgtggtagcaaagaccctgactttggctcctcgc

SEQ ID NO: 47595 - DNA, 122 bp, Homo sapiens
aaatcatggagacaaaatagaatagtggttactgggaagaagggcaatggggacttaaaacggccatagtttcagttttataagatgaacagagttatggagatggatggtggtaatggttg

SEQ ID NO: 47596 - DNA, 122 bp, Homo sapiens
catcccagacatactgaatcagaatctgcagtttaacaagattgccaggtgatgtgcatgcgcaattaaagtctgatgagcactgccccgcgttacgctaatgtcaaacagcagggaaagga

SEQ ID NO: 47597 - DNA, 122 bp, Homo sapiens
cctcccccggggactggccctgcgttggacatttcttaacagcagggccaccaggcagagcgggacagccaggaggaagggcagcttggcagagcctcaggtagagtatcccggggaggctg

SEQ ID NO: 47598 - DNA, 122 bp, Homo sapiens
ctagggaacctgcagggacaatcttgccttccactaagacccaggcacaaggcgggcctccgtttcttcagcgggagacatcaccaagtccccacctcagacaataagccgtgtccctgcga

SEQ ID NO: 47599 - DNA, 122 bp, Homo sapiens
ctccagtcactgagctggcatccagatctccaataagacaagatagaggtgagttctcagcgagtcctatgttgaaatctggaatgtctcctgagcagagcaggttccagtctgactcttct

SEQ ID NO: 47600 - DNA, 122 bp, Homo sapiens
ggtctccaagtgaatgagcggcagagtcccatcatgcgcatcagcctgcgtgaaccagtgcgcagcgcgcctttcccgggcaccctctaggtgctggcagctggcgcccagatcccccggct

SEQ ID NO: 47601 - DNA, 122 bp, Homo sapiens
cagcggcggtagccgagcgagggcgcggtggcctctgacaggaatgactctgcgcacgtgcgtttcgcagcagtggaagtcttcacacccggaaactcgactttggccgtttctccatttct

SEQ ID NO: 47602 - DNA, 122 bp, Homo sapiens
agcctcggaacgatgcggctgttggtacgacacagagggattctgggattaaatagtgcgcgcggggcggggccaggtcgcccgccggccgcacatgcgccgcctcgcctccagcagcgccg

SEQ ID NO: 47603 - DNA, 122 bp, Homo sapiens
ttattctacaactcagattgtcccctaattcagacaacttcctgttgtcctgattttattcgaaattaatgaagttacatgataaatcaagcagcagattgccattatggataaatgctacc

SEQ ID NO: 47604 - DNA, 122 bp, Homo sapiens
ggtggctgctggactcggcagggctggcgggtggggctcacccgggcccctgccctccggcgatgctgtcctcagtgccccaggaggacgaggccccccagctactgagcttcccagcgagt

SEQ ID NO: 47605 - DNA, 122 bp, Homo sapiens
gcgtagctatctatctctttgggaagatgaggttgttacctgctgttggagaaaccaagacgtgggtgacacacagtctttatcagcacaggactgaccagtgctcatcattctgcagaagg

SEQ ID NO: 47606 - DNA, 122 bp, Homo sapiens
ctttgagtctctcctcttctccagggtacagccaaccctttctccaacgtagccggagtccgagagtcccagttccgcccctccagcccgccccaggccaggtggggatgcgcccggcccgg

SEQ ID NO: 47607 - DNA, 122 bp, Homo sapiens
taaagtggtattttgcatttctaggattgtcattgtctctaaatttatacttatatacatcgctgatgaggttcttcccttgcaaaaagaaatttcagccttcctccaattcaagatacagg

SEQ ID NO: 47608 - DNA, 122 bp, Homo sapiens
ccatgacagcaggcagagcttggggttcaaagcagaatctgaggaaagactctaaaaagacgagcccctgcccaagatatggtgccttttctagtctcatagcacattgcaccccctcccct

SEQ ID NO: 47609 - DNA, 122 bp, Homo sapiens
cccgctccacccccactcgcgaactctactcgggagtggtttggggggtgggggggttcgcgcctgactcaattggaagctcccggaggacagctggtctcacctaaaaacggaggctttcc

SEQ ID NO: 47610 - DNA, 122 bp, Homo sapiens
gcttggtcacgatgcgctgaagacactccagcctgcagcagcagcacagggaaggggccgcgttggccgggtccggcacagccctggccacagactgcagctcgcctcccgctccggtctcc

SEQ ID NO: 47611 - DNA, 122 bp, Homo sapiens
aacgcagagcgctcaccacttggtactgaccgccttagatggtggggaccctccccgaagcggtactgctcagataagaatcctggtaatagatgccaatgacaaccccccagtgttcagcc

SEQ ID NO: 47612 - DNA, 122 bp, Homo sapiens
ttaaataactgccagagcaggatgactcagcagccggaggatgagatgctcttgatctgccgtcctctttaagtgacaaatcacattgccctgggtgtctgtggcaatctctgatatgacac

SEQ ID NO: 47613 - DNA, 122 bp, Homo sapiens
gcgggtggggctggaagaggcattctcttttctgtccaccccgtcacacactcctgcacgcgctgttgctcgatcatccaaagctccttcctgaattcctgtctgagctggctctgggggag

SEQ ID NO: 47614 - DNA, 122 bp, Homo sapiens
gcacacgagctccggcctaagtgaggataaatctccatgacaaatgtctcctcgaaagcccggaacaaaggccgcggcgtgtttatccaccctaaaggccgcgcagacagcccagaccccgg

SEQ ID NO: 47615 - DNA, 122 bp, Homo sapiens
gatgtaattcttgagctcctttaggagctcacagtttagccaggaagagagacaaagaaacggttgattgcaacagagtagaatgccaaattagatctaaatttagggtactatggaagcaa

SEQ ID NO: 47616 - DNA, 122 bp, Homo sapiens
gactccctctcacctacattctttctgctgcacctcctgtgcctgggtccatcaggagctcggcctgtctccctgcaccgcacggcaccgagcggccaacccctgagcggctgctggctcgc

SEQ ID NO: 47617 - DNA, 122 bp, Homo sapiens
ggataatgacatggcaggaggatcagactgagaacaggctggtcccttcctagcggtcaccgtgtgacttgggggccagcctgagcagtgtacatgaagtcaggccttggggcccccagtgt

SEQ ID NO: 47618 - DNA, 122 bp, Homo sapiens
gacttatgactgccttctcctggatcctgggctctatggatgcaatcattgatgctgtagcgacattttccttctcctactgtgggtctcgggaaatagcccacttcttctgtgacttccct

SEQ ID NO: 47619 - DNA, 122 bp, Homo sapiens
tcccctgaactggaatggttttgtttttgtctggcccctctatgagtcccagatggaactcggaggtcttctggtgtaccgagttcccctccaagggatggcaggtctctgaaatcacatac

SEQ ID NO: 47620 - DNA, 122 bp, Homo sapiens
tacccattcggatgtgcacggtggcggaggccacgctgctgccatagttgaagtcgtcctcgatcgaggagcgagggtaccgggggtcggggtcagccatgatggcaacagcacccctaccg

SEQ ID NO: 47621 - DNA, 122 bp, Homo sapiens
agtttaatgatgagatggttgacaaccagcctggaagagacgttcaggagtaagaacgagcgtcactctgaggacgtgaccagctgctttctgtcgtcagtgggcagaaacgagacatgaag

SEQ ID NO: 47622 - DNA, 122 bp, Homo sapiens
tcctagcgactagagcgtcagggatcaggaaccgcggaaactggagaggtggcaccccagcgagggccaccatgggggaccagaggccgcaggaccggcccagttccccgggcatggactcc

SEQ ID NO: 47623 - DNA, 122 bp, Homo sapiens
gaattccactgctgccaactatatcctggaaaatgccaggctgtacatgatgcacataaacgtctgttgttgtctgtcatagacagtgcagtatccaccctacaggtcaactaccagatgct

SEQ ID NO: 47624 - DNA, 122 bp, Homo sapiens
cggggcagctgtcagtgaagctctacggtatgtgggggccagcctctgtgaccaggcaggcgctcaagctctgcacactcactgggccaccccgaggggctgggtgagcccatggggacaca

SEQ ID NO: 47625 - DNA, 122 bp, Homo sapiens
gcaagacctcttcactgattctccaaagactatagaatgttctctttcaggagcaagctgcgacatgtttaactagtttaggtaaaacaacaataactgttatttaccagggaacaggcttt

SEQ ID NO: 47626 - DNA, 122 bp, Homo sapiens
gctgctccgcgtcctgactttgatgaagttcccctgctgcgtgctggaggtgctcctgtgcgcgctggcggcggcggcgcgcggccaggagatgtacgccccgcactcaatccggatcgagg

SEQ ID NO: 47627 - DNA, 122 bp, Homo sapiens
tggggagagggagcagccaggaaaggggaggggaggaagggcagctgttgcacccacgggcggtgcatgtgccccatgcctagggagactgctggacccaccttggagcccctaggaggaga

SEQ ID NO: 47628 - DNA, 122 bp, Homo sapiens
ttccaggtacatcagagatgattaacttctgctcacctccacctccttctggcttttccacgatgctacagccggctttcattttcacccgcctgctgagagacacaagccacacaattact

SEQ ID NO: 47629 - DNA, 122 bp, Homo sapiens
aaaggtgtctgcaagtgtttcttctggttggcctggaagtttcccgagtccctggactggcgacccaaactcctacacttcctgcccggtgctgggaagaaacccagatcagcagacaaatc

SEQ ID NO: 47630 - DNA, 122 bp, Homo sapiens
ccctgccttcctgccctcctaccctcctgccaggacatataaggaccagacccctgcccccgggcgcaacccacaccgcccctgccagccaccatggggctgccactagcccgcctggcggc

SEQ ID NO: 47631 - DNA, 122 bp, Homo sapiens
ctacaaacgtgtatacaaatgtatttccagcatgaaccaagtgactgcaaccagaaagaccgtgggcttagctagacaaaaacaagaaagtgatgagtagccaggaaataagagattctata

SEQ ID NO: 47632 - DNA, 122 bp, Homo sapiens
ggagctctggtagagagtcaggactttcaccaggactcagtagtaaccaggctatgtcctcgcagtgtcactggaggccatgttaggagtagtagcaaggattccttttccctccaacccag

SEQ ID NO: 47633 - DNA, 122 bp, Homo sapiens
agaaataaagcgagcagctgtaaacgtccgtggggagaagtggagaccgaaagagctgggcggcagcaacccaaaacctggcctccaagggcttatactccgggagggaggccggggccgga

SEQ ID NO: 47634 - DNA, 122 bp, Homo sapiens
tccactctgctgctgacaaacatggggactgtttccaacttcaggcgttcgtgcacgaagcggcgctgttctgccgtgtctcccagcgcccaccatgggcccctgcgtggggcactcctcgg

SEQ ID NO: 47635 - DNA, 122 bp, Homo sapiens
cttgcttggtaaaactacctctaataatttaggaatatatttgccttctgtgaaagccatcgcaaagtataaaaatagtgtaagtacaggtatttaggctcacaaaatatcgttatgactga

SEQ ID NO: 47636 - DNA, 122 bp, Homo sapiens
cagcctcgcactgtccgcagagggactgagcacttgaaaagcccaccgcgttccgtagggcgccccggcggggctaacttgttcggctgcggggcacagctttaggggaactgggctagcag

SEQ ID NO: 47637 - DNA, 122 bp, Homo sapiens
gtattatctttcattgtaaatgagtaaaatgacatcagtctcctgtgaggatggggcatgcgagtcacccagagtctcttaaatcctggactcactggacctgcagtgctaaagagcagagc

SEQ ID NO: 47638 - DNA, 122 bp, Homo sapiens
tcccgctgatattcataggaatgccgatagtctgtgtcatagtaggcatctccccgatcccggctataatcgttgcgtctgtagctgccacagtatcgccggtcatacaccctccggtcgga

SEQ ID NO: 47639 - DNA, 122 bp, Homo sapiens
ctgtcagggttactgacaggcagagggactggggcacagatgttcaaccagtgcagcccccgcactgcctcttcctgtgtttctgtcaacaggaaatctgcaggacaatctctgggaagcca

SEQ ID NO: 47640 - DNA, 122 bp, Homo sapiens
tacaacatatttccacatgtgtgcaccttgtggcatggctaaatcaagctaactgacatacgcattaccttacatacttacggttgatttgtggtgagaacacttaaaatctactctcttag

SEQ ID NO: 47641 - DNA, 122 bp, Homo sapiens
caagcagcccccagctcggaaaggatacaatatgtgcggccgcattcgtgaccccctggccgcagacgcggcgtctctgcccggacctggcgcgtgcgctgggggagctccaccggccggag

SEQ ID NO: 47642 - DNA, 122 bp, Homo sapiens
attgtgctccgccattcatcttcattcgcgccacatccgcgcgctatccccggcgcttctcgcccaggctcctggtaatgggttcccggacgctgacaaataggattctcggaggcagccac

SEQ ID NO: 47643 - DNA, 122 bp, Homo sapiens
atcgtcccttccccagcagccgtctgtccagccacactgtccctggctgaccccagcgggcggctgcctggaggcctgtgtacttgtcttccccggcgcaactcccttcccggcaggatcct

SEQ ID NO: 47644 - DNA, 122 bp, Homo sapiens
agtctttatgtagcatctcctagttcctagcactaggatgcaacagacctggagtctgaccgggaatgcgagtaatgactgtataacagagaagagagacgaggggcttttaaaaagttact

SEQ ID NO: 47645 - DNA, 122 bp, Homo sapiens
cctcttgtctcctaaatcatcctttccttcgtggggatgtccaatctccatgttcatggacgatttctccccattctcatttctccaagagcgctcatctctaaggggaaagctgtacctgg

SEQ ID NO: 47646 - DNA, 122 bp, Homo sapiens
gccacccagggagctctccagttcccctgccccgagggctccagcgaaaaacgatgcaggcgccctccggaagccataatacatcatctggtctttgtattatgccacacgataattaatca

SEQ ID NO: 47647 - DNA, 122 bp, Homo sapiens
ttttttgcaatatgaccccgtctctctgaagtgggacattcggacggatggagccctcagcgtgtcttttcagcaggagcagaaccgatgagagccgcccttaccgttggtctccggatccc

SEQ ID NO: 47648 - DNA, 122 bp, Homo sapiens
cttcatgtcctatatcagacagaggccaagttgtggggcgttcattttattggtgtatgacgtaagaggatgctgtgtttccagacttaagtagactagatggttctcaaagaactgttttc

SEQ ID NO: 47649 - DNA, 122 bp, Homo sapiens
gacctcctgattttactccctcactcagacctacagcatctcttgcttggatgcctgccacggcttcctagtctgtctccatgcctctggtctttttaactctagccagcaatccccaggcc

SEQ ID NO: 47650 - DNA, 122 bp, Homo sapiens
gtttctcaataactatctaatgcatggccacccttcccaggatttagaatatcaaagggacgtgttctttcctcccaaatcacctgcctgcgcttcccccagccgggtgccccagccttcac

SEQ ID NO: 47651 - DNA, 122 bp, Homo sapiens
aaacacaatgagctggcaatggaggatgcagttaagtcattccaataatatgccaggctccgaataacaacatctgttcctgcagggcagctagcagaggataaaaaacaagaaagaaacct

SEQ ID NO: 47652 - DNA, 122 bp, Homo sapiens
gcatgcagcgtagaaggaacagctcaaataaaggtatagaagtaggatcagaacctagtgcgttcagggcatgtgaccagagccccgtttgtcttctctgtgcttggggaccatgtccagcc

SEQ ID NO: 47653 - DNA, 122 bp, Homo sapiens
gcccttgaggctgggctgtgtgggctgaatcccctggggccagggtccaaggttctggcacgaggtacagggtgatcaggtaagtagtctttgaaaaacaaaactgcgatggggtgggggtg

SEQ ID NO: 47654 - DNA, 122 bp, Homo sapiens
cggttgggttgagcgcccctgcccggggaaggtagcctgcgggctcttgccccgagcccgcggagcaggaggtctcttttccaagcgcactcacattattcatgcaaagttaatccccgccg

SEQ ID NO: 47655 - DNA, 122 bp, Homo sapiens
atgtggcctaacctccagttctatgttggctggaaaatccaggaatgggaagctcactcccgtagttcccactcattcccaccacggttggacagctctgaaggagggaaaattctttcttt

SEQ ID NO: 47656 - DNA, 122 bp, Homo sapiens
gtgtgtctgtctctcccagcaatggaccagagctctggaaaggtgaatgtgaaagccacccgcgcacacaggcttagccctttcttctctcttagtccctgctagactgtgaacttcttgag

SEQ ID NO: 47657 - DNA, 122 bp, Homo sapiens
aattattgttatgaagacacttcatgaatttctctttaaagcttttacattcacctagaacgagaaagaaaacagcatgttcttttcagagtgaaaagtgatgcaaccacacaacagcctta

SEQ ID NO: 47658 - DNA, 122 bp, Homo sapiens
atgggaaaatgcacattccaggtggcaggggcagcacgtgcaaagcccctgtggtgagggcgcgccggacagacatgctcagggcacagcaaggggcctgcagactggcccatgtaggaggg

SEQ ID NO: 47659 - DNA, 122 bp, Homo sapiens
atgtgactttgaaacagatgttcacttcaatgagaacatacggacacagggtggggaacacgcactggggcctgtcgggtgagggcagcagggagagcattaggaaaaagagctaatgcatg

SEQ ID NO: 47660 - DNA, 122 bp, Homo sapiens
agggcaccgtgcgcctcccgcatccaccagcccggtacagggatcccactcggaggcccccgactggcttgagtggtttactctgtgtcccctatagaagaaacaaactcccccgtcctcat

SEQ ID NO: 47661 - DNA, 122 bp, Homo sapiens
cctgactcctcctcctcctctaataagcagcttcttgtcacagacttctggatagcttcccgctctcctggagaaggcagataacagggatgaaagatatctttgggagtgatttcttcagc

SEQ ID NO: 47662 - DNA, 122 bp, Homo sapiens
gtcgttcagagaatcttcgcttcccggagagtgtgtcccctcccccagccccggtgggcgcggaggtagctaatagctgtctggggtcagcagatcttggttccccgctttgggccattctc

SEQ ID NO: 47663 - DNA, 122 bp, Homo sapiens
ccgacttttgttttttaagtttttggaacagatggcacagatggcgctgccgggggcggccggtgcaggggaggcagagagacggacgtgcgagaagagccttggaggagggaggaggcggc

SEQ ID NO: 47664 - DNA, 122 bp, Homo sapiens
caacgcccgccctcgaagctccgcggccgccagctctgcggccgcagcagctgcgccccgcgccctccgcccaccgggcgccgagcagccctcggccccaggcttcttcggctcccggctgc

SEQ ID NO: 47665 - DNA, 122 bp, Homo sapiens
gaaaaagaaaaagaaaaaaaacaggtgtgctggtgacaagcactctcatattcttagcttcgttacttctgtttgtttgtttgtttgtttaaatcacatgggactagaaaaaaatcctacag

SEQ ID NO: 47666 - DNA, 122 bp, Homo sapiens
cgctcccgcccccttccctcctgcccgcccactcccccttccttccagtcccgctcagcccgggcacatcctccggctgcccgcgcacctctccacgccggccccgttccgcggctcgccct

SEQ ID NO: 47667 - DNA, 122 bp, Homo sapiens
tgcctactcctctctgtctgtgcggtggccccgagtccagctctgctgctgagggccatgcgtgtggacgccgagggcatgggtgcctactcctgtctgtgcgcccgagtccagctctgctg

SEQ ID NO: 47668 - DNA, 122 bp, Homo sapiens
gtgatgtcacactcctctgtgacacgcgaggctcctcagttacttagccaacggcagaggcgggaagtgagaggagtctggggctggggctgccttccaggcccacggggcggccccgctct

SEQ ID NO: 47669 - DNA, 122 bp, Homo sapiens
acctctacgtcatcagggcgcgtcctcgtctttcccctcccatctcctcagatcggtggacgtgctcgcctccactcggggccaggtctatgtcccggtttcccgcagtcgcgggcagggcg

SEQ ID NO: 47670 - DNA, 122 bp, Homo sapiens
agccgactatgactactcagaagagtatgataacgaaccacaaatacctggctatattgtcgatgattcagtcagaggtgagtaggggataaagcaaaaatatggcctgtgagatgtgggtt

SEQ ID NO: 47671 - DNA, 122 bp, Homo sapiens
taccacccggctgaacccgtagcaggtgcttagtagaattacgtgaggagccagcatccccgctcccagccacctcccctcgcccgtctcagctcagtctcccccgtgcctttcccaccctc

SEQ ID NO: 47672 - DNA, 122 bp, Homo sapiens
acctgtgaaatggacgtgattatttctatctcctaggaaagctgtgaggatcagagatcacgtgggtagatgctcccttaacttcagttcttattctcacttgggatggttgcaggttttgc

SEQ ID NO: 47673 - DNA, 122 bp, Homo sapiens
catgcccgttgagcagctgaatcccgttctggacgaggtgcgtctccccgtctggaaccacgtctggcaaggggagagtctggggtctgctactgagttcgtcttgtgctttctgtttttgt

SEQ ID NO: 47674 - DNA, 122 bp, Homo sapiens
tggtggccctgtcccaggcctcctctaggctccgcccccgcgcccgaggacggcgggaggcggggtccgccattttttttaactgcccaatggaaggggctcccttagccaggaggacgagc

SEQ ID NO: 47675 - DNA, 122 bp, Homo sapiens
gtggtggccatggactgcgagatggtggggctggggccccaccgggagagtggcctggctcgttgcagcctcgtgaacgtccacggtgctgtgctgtacgacaagttcatccggcctgaggg

SEQ ID NO: 47676 - DNA, 122 bp, Homo sapiens
gagaaagcagctccagaattacctgcgcagcgtcatgaacaaagtcatccagatggtccccgagttcgctgccagccccaagaaggagaccctcatccagctgatgcccttcttcgtgtaag

SEQ ID NO: 47677 - DNA, 122 bp, Homo sapiens
ggggctgccatcggtactctgagctctgtgagtaccgggctgggtgcgggagggctgccccggcaagtcaagggtgacaccttcgctctccctgtccctccgcgtccccggggtgtgcatcc

SEQ ID NO: 47678 - DNA, 122 bp, Homo sapiens
tgttaatcatttgcctgagtgccagccactcccccaccctcagctcctcaatgccgatcacgtggcacatgcactatttttaaatctgcagtcccccaaattcagggtgacaccctggtcgt

SEQ ID NO: 47679 - DNA, 122 bp, Homo sapiens
cggcccccgctgctcctcacactcccggcttgactgactcagcccgaatatcccccaccccgtagctcaaaaatgcaaacagccacacactttggcccaggcatgggcgctgcgggagaaag

SEQ ID NO: 47680 - DNA, 122 bp, Homo sapiens
tgataggtagcattttccagcactttgcaaggaatgttttgtagctctagggtatatatccgcctggcatttcacaaaacagcctttgggaaatgctgaattaaagtgaattgttgacaaat

SEQ ID NO: 47681 - DNA, 122 bp, Homo sapiens
ggtacacactggaagccccaaatccagcaatgcagcagtgtgctctttccttctctaaaccgacttagcttctgtttctagctgggtccccccaggtggtggtaagtggtagactggcatct

SEQ ID NO: 47682 - DNA, 122 bp, Homo sapiens
cgatgccctcccctcttaatgctattttagcttttcctcttgtaaatttcagagccagctcgaaggttattgaggacacttatccgaaagaggcaaataatagaggtgctgagagtgttttt

SEQ ID NO: 47683 - DNA, 122 bp, Homo sapiens
tgggaatcctgggctggaaccggaacgttccccgagtacataggaatcctgggctggaaccggaaacttccctgagtatacggggccttgtgtgtggaggggccctacggtgaatcgttttc

SEQ ID NO: 47684 - DNA, 122 bp, Homo sapiens
cgaggctgctgcgaggaggtggacaggtgagcacatgctgaagagtggggacatgtgcgacggtttcagtccaggcacagccgcaggtcctggctgccccactttccctggcccgagaagag

SEQ ID NO: 47685 - DNA, 122 bp, Homo sapiens
tcctgcagccacacgctcagccgtccgcgggactgtgctgcctgcctagccagtgtgggccggctctactactggccactgccacgcccctgggacctgctgagcctgccgctgggctggct

SEQ ID NO: 47686 - DNA, 122 bp, Homo sapiens
ccctgcgagggggaaggtaatggtttcaagctgcccgggctgggttccgaatctctaggacgccatggctgcgatctcctcgctttcctggacatcttacctccggatgtactccagtctca

SEQ ID NO: 47687 - DNA, 122 bp, Homo sapiens
ccaaagatggctgaaaaagatggatgcttccaatctggattcaatgaggtaccaacttgtcgcactcacttttcactattccttaggcaaaacttctccctcttgcatgcagtgcctgtata

SEQ ID NO: 47688 - DNA, 122 bp, Homo sapiens
atccggccaccaggcctgagggaggagctgaaggaggggggtgctcttaaaggggcaggtcgcctacaggacttcatgtcgggtgctagcccaggctggcagttggggcagttaggaccaga

SEQ ID NO: 47689 - DNA, 122 bp, Homo sapiens
ttgtttggatagtatgaaaggacaaagtatcagcactcagaaatgtcaacctttgaacctcgaacactttctgatttataaaaagaatccttccaaaaagatgcaggagccctaatgtaatc

SEQ ID NO: 47690 - DNA, 122 bp, Homo sapiens
aaaggtggggggccgcgttgtgaaagtgggggttgggggggagagagaggtggtaataatcgtttaaaaactgattaaagccccccaaacactgatacatagaaagagggggaaaggcgggg

SEQ ID NO: 47691 - DNA, 122 bp, Homo sapiens
ggagtttctggtgtctttgcttggaactgacctagctcgtggcagggggaactcggctagcggccccacagcccctgctgactcaaaacaactgtgagtggggttgggcgagtgattgcaaa

SEQ ID NO: 47692 - DNA, 122 bp, Homo sapiens
aaggatatggagtgaggcgacaagatggcgaccacatacggtttgagttctagctgtcaacgtcccgatgaattctttctttttagaggtgctttccccaggcgattcttggtcagcctctc

SEQ ID NO: 47693 - DNA, 122 bp, Homo sapiens
agataagtggtaccggaaggtgtctcattgcagggacagtgaatggtgacctagaacctccggggaggctgcaggagggaactgcctctcccaagtccctcggtctccggtaggagatcact

SEQ ID NO: 47694 - DNA, 122 bp, Homo sapiens
ctaggcctgtgacagggagcagacctctggtgccaccacaatcaaaactccgctgagcaccggtgactaggcggggtgctccacacacagagcacttgtgtcaccttcctagggatcctgca

SEQ ID NO: 47695 - DNA, 122 bp, Homo sapiens
tagccccaggtgaggaagaatcctggaaggaggctttcccgcccagggactgaacactgtcgcagagtgtcttccaatcaccagctacggagcaagctgggaatggaatgggtgcctctgcc

SEQ ID NO: 47696 - DNA, 122 bp, Homo sapiens
taataaaaatattaacacagtccatttattgaatatcttctatgtgtcaggtattttacacgccttatttcatgtaatactgcaaggtagagatgtttctgtcccatttcacagatgcaaaa

SEQ ID NO: 47697 - DNA, 122 bp, Homo sapiens
gacctggagagcagaagacctgggccgggagcggggctttgccagggtccattgtactcacgctggggggctagagaccttcttttactggttctgcttatcagccaaacttcacctaacct

SEQ ID NO: 47698 - DNA, 122 bp, Homo sapiens
taaggtgtctttagtataaaactttattaagtatagatggtagtgcaggggacctaacgccgcatgtatttggaatttagatctgaaacaggttgtagaaaatataagtaggtgtcactttt

SEQ ID NO: 47699 - DNA, 122 bp, Homo sapiens
ctaaggggcaatgattattttatagatgaaatatctgaattttcagatattaaagtaactcgtccaaggttataaaactgtacatttaagtgacaggttaggatttgttccaaggctataga

SEQ ID NO: 47700 - DNA, 122 bp, Homo sapiens
ggcaagctcaggcaggtccaggcctgtcaggagccacaaacaggaagagaggtcagagtgcgaggtgagtaagcaattcccacgaagaaacagcagtccctctgcttgtcaaactgcatatc

SEQ ID NO: 47701 - DNA, 122 bp, Homo sapiens
ctctctgatcaggtgatccgcaggattgtgcacccagcagaacttggcttctggccacagcgaagggggaccttgaacagagaacttgttaggaattgggtaattcagtagggggaggagat

SEQ ID NO: 47702 - DNA, 122 bp, Homo sapiens
gagaaactcgacatattcctctactagcaggaccgtacgtccttctcctagtagccacgccgggtcactcagccttactggcccggcgggaaacgctaacacccaagcaggacagttcctag

SEQ ID NO: 47703 - DNA, 122 bp, Homo sapiens
ctacacgaggagatgatgcagtcaggactccgggactcctccatgtgtgagacctgacgtcgcctctccaatgccagcctctctcactgtgggcactcagggacagaggcagggcagaggcg

SEQ ID NO: 47704 - DNA, 122 bp, Homo sapiens
cggcgaggtgcgcagcgccctgcctctctctctctaatggctgtgccccaaccccgagcccggagcatgctgggattgtagtcctgtagtcctgcaaacaaggggctgggagcggttaagag

SEQ ID NO: 47705 - DNA, 122 bp, Homo sapiens
aacagtatttcaaactcttcagtcaccagaagtacagttatcaaaaatgcagacacttcacgtggcatctccaggaccttcagctttctgtgcctggtctgttttgtcatctccattttctg

SEQ ID NO: 47706 - DNA, 122 bp, Homo sapiens
cagaatattcccttttgctactttcctgcacccatcgagttgatttttccatctcctccccggccctgcacagagcattttccccttccccttccctgcctcaccacccctgaaccagcttc

SEQ ID NO: 47707 - DNA, 122 bp, Homo sapiens
cacacagtgccttctccccagatgagttcaaagctttaagtctatccagttctgtccagacgcgtctgttcatctccaacaggcccactagagaggcgggttttccaaagcctggcacggcc

SEQ ID NO: 47708 - DNA, 122 bp, Homo sapiens
caacgacaatgcgccacgggtgctgtaccccgcgctgggtcccgacggctctgcgctcttcgatatggtgccgcacgctgcagagcctggctacttggtgaccaaggtagtggcggtggacg

SEQ ID NO: 47709 - DNA, 122 bp, Homo sapiens
aaatcccagacgtcatatcatttcatccataaatacttcagtatgaatctctaactcatacggacatttaaaaaaccccaaagactctatctttattataactaacaaaactaacagcaact

SEQ ID NO: 47710 - DNA, 122 bp, Homo sapiens
ttacccacagtctccgaaagtctggcgcttcgaagcagttggccctgacaccagggcaaacgcttaaccgcagcccattcttccctccggagggaggggagtagacttcgctggaagtaagg

SEQ ID NO: 47711 - DNA, 122 bp, Homo sapiens
atgaaattaccattactcgactgcaggcagccgtgtccttgcaaaaagaccatgtgatgccgcctgtgaacgcacagggataggcctcttaaggcaggactgtagcgctggagctaaagggc

SEQ ID NO: 47712 - DNA, 122 bp, Homo sapiens
aaaagccctggctggaatagacacatttttgtgcgtgtcattgccagtttatctaataatcgcatctcgcttttcctcaggttttgagtctatgatgagaaccagagtctcttttttcccaa

SEQ ID NO: 47713 - DNA, 122 bp, Homo sapiens
tttgtgtgtgtgacaatgtatgttcttgaacatcatagattccactttggatgctcctgtcgggactgtgtgtccctgtgctggaactcaagtgagagttggctgaaaatccattgctgttc

SEQ ID NO: 47714 - DNA, 122 bp, Homo sapiens
ggctgggcaggtctccagcgagccttttagctctgagatcctgtcatcccacaggaaggacgtgttctgcctgcaggtggctttattctgtcttgctgctcatcgggtgagtcagaatcagt

SEQ ID NO: 47715 - DNA, 122 bp, Homo sapiens
ggttccctgtggctgggacctccatcatgaccgtggcttctggaggggcctctcagttcccgctgccactcttggaacagtatgaggactgcagcagaggccaaaaactgagtgaccggccc

SEQ ID NO: 47716 - DNA, 122 bp, Homo sapiens
ggggtacataaggcggagggggtgaggcgactgggcggagttctgtcgccgggatccttccgctgggctcagccgtttccggagtctgcgctgcgcccggttccgccattgcggctctcctg

SEQ ID NO: 47717 - DNA, 122 bp, Homo sapiens
ggatggcccgagctgcgggctcgaccgaccctcccagacccagacacctcgcggatctcgcgggaccctcacagccctccacgaaacccccaggtttgctgcgaccctcacgggcctctcct

SEQ ID NO: 47718 - DNA, 122 bp, Homo sapiens
cccacagagggcgcgcgggcagggcgcgaggcggcaggcccctctcttcctcccgaccctcgcaggctgagcacatcaaaaggcaggcttccttatgggtgctttcgttgaaattcagcatt

SEQ ID NO: 47719 - DNA, 122 bp, Homo sapiens
cccgggggagcctgaggacccgctccagctaggcacgccaggccccgccctttgaggacacgccccacaccagcctcagagctctgaggtgcctgggctgagcttcccttcagaccagaatc

SEQ ID NO: 47720 - DNA, 122 bp, Homo sapiens
gaggggcccagtgcaaaatgaagatgccaggccccttgttaagtttttgagaatttcacacggtaacagcagagtattcaacctggtgcggggtccctgacttgcttgcaggactgtagtct

SEQ ID NO: 47721 - DNA, 122 bp, Homo sapiens
atagtttaccttgtccgttgtttaactgcctatgagatgctaagttgaaatattgtctaacgttctgccagtaggagaaaaaaaataacagcagatgggccaagcagaaggcagtgccaaat

SEQ ID NO: 47722 - DNA, 122 bp, Homo sapiens
cccaaggctcccggctctgccccaggaaccaagggtcaggatgcacggagctttgctgcccggctcagcccatccatcagcaatatgtcctcaaaggccgtgtgtgcagaggtgctggcgga

SEQ ID NO: 47723 - DNA, 122 bp, Homo sapiens
agtcccactctgttgcccaggttggagtgcactggtgccatcttggcccaatgcaacctccgccttctgggctcaagtgatcctcccgcctcagcctcacaagaagctgggactacaggaca

SEQ ID NO: 47724 - DNA, 122 bp, Homo sapiens
ggtaatgaaatcgcggcagccacagccagcagccccgacgccttcccgccgttgccagggcgaccattgtcataacatccctggcgcttggcggcccagctgacgggggagagaattatttg

SEQ ID NO: 47725 - DNA, 122 bp, Homo sapiens
attgagacctcccatgtggtaatactgaaatatttacagtgagccaagcatggtgctgagcgaggcatagttttcacaacaatcctgtgaaggagatattattcccattttctagacaagaa

SEQ ID NO: 47726 - DNA, 122 bp, Homo sapiens
cagctggcgttgaggtctcaacttcggctggactcttaaatcctggggtcatgcccttcacgctaggcaggtggaagtctttacttgtactgggccggacttgagccccgacccttcgccag

SEQ ID NO: 47727 - DNA, 122 bp, Homo sapiens
tccaaatcagagtccctattatcttgggcccttgcaaacttgagcactcacctttggccacgtagctgccccttttcaccctgccagcagaaacaaagtgaacgctcttcttttctctgtaa

SEQ ID NO: 47728 - DNA, 122 bp, Homo sapiens
tgaagcagagctaccctgctaaatctagctgactcccagacatgtgagtgaacccagctgcgatcacagagctttactggtggatgtgtagatctgtgagaaaaaaaattcatattgtaata

SEQ ID NO: 47729 - DNA, 122 bp, Homo sapiens
gtccttagggcccaagccgtgaggcgggggtcactgaggcagcgaaatgtacagggtgaacggtgctagccctaccgggaccgcacagccccagggtggggtcgctgggcgcggggtggggg

SEQ ID NO: 47730 - DNA, 122 bp, Homo sapiens
tgtctgggagatcaaagctaagaggccctttctgcaaaccttgcaaacgtgagggcttcacgtgattgcaggactgacctcgtcctgaggttactggtgaccgggagagagagaagccgggg

SEQ ID NO: 47731 - DNA, 122 bp, Homo sapiens
tgctgtgtgccaggcattgtgtctaatccatcacttgattaacagacacacacacacacacgcacacaagtacatgtcgaagaaagagtcagaaagcagcctctggtttttcattttggttg

SEQ ID NO: 47732 - DNA, 122 bp, Homo sapiens
gccggtgcttcatgggggctacgaaagtccacgtctctgtttccacatcgtagcgctccacgctgttcagctggtcctgaccatcatagcccccagcagcatagatacagttgtgcaggacg

SEQ ID NO: 47733 - DNA, 122 bp, Homo sapiens
tgtcgctgttgcagccgagttcagccgggagcagagcgaaccgcaccggcccgagcggagcgccgcacgttcccaaccgcgaggccaggtaccgcttcgggagttcatcccacccgcacagg

SEQ ID NO: 47734 - DNA, 122 bp, Homo sapiens
ctctctgcgttaggcctcttcctaggcttcacctacccagccatatacagcaagtaaaggcgccctggttctggaccacttgcacacatcgccagccgctgaccatgtaaacgcagtatgta

SEQ ID NO: 47735 - DNA, 122 bp, Homo sapiens
gggtgggaggtgggagtggctgcagggacccctagtgtccctggtctatctctccagcctcggcccacacgcaagggagtcgggggacggacggcccgctgctggccgctctcttctctgcc

SEQ ID NO: 47736 - DNA, 122 bp, Homo sapiens
cgaccacgcaagctgtgacacacagcggaggctaaccgtgcagccggcgtggtgcacacccgcatctcaagcttatgggcagggcaaacctacaaagtgggcactgttcctggcgcctccct

SEQ ID NO: 47737 - DNA, 122 bp, Homo sapiens
aagagtgcccgccccgccgcttggcggcccctggatcgagatgagcgcctccgcgtcggtcgggggccccgtcccccagccacccccgggcccggccgctgctctgcctcccggttctgccg

SEQ ID NO: 47738 - DNA, 122 bp, Homo sapiens
aggccccgccccttcatctggccccgcctccaggcgctgaggcacctggtgacctgccggcgttgagtgggtggggctaaagtcgccccgcccctccgatcctcacttctatcttcagactg

SEQ ID NO: 47739 - DNA, 122 bp, Homo sapiens
acccctctgctctgataaattcctagtcttgggctgcctgggactcgcacatcaccaacccggcagctggaagaacaagcacacgaggaaataaaaggtgcctgaagtcccatctgctttat

SEQ ID NO: 47740 - DNA, 122 bp, Homo sapiens
cagccctgtgcaccaccctggacacgccggcggacattgcttcgtctttatcttcatcgccgggctgtttcttagactagcagccttgacgttgggcttcccgacgatgctatccattacac

SEQ ID NO: 47741 - DNA, 122 bp, Homo sapiens
tgatgcagctggctggcggctgctgggagttctctttgttcactcactttaattctcagtcgagctctacacgcggtgctccctccccacccccagcccgggcggagtcatcagatgtcgtt

SEQ ID NO: 47742 - DNA, 122 bp, Homo sapiens
ggtgattggttaagagacgccgtcactcgcggcataccgaccaaccttgggacagacaggcgccgtggggacagtggttgtttgggaaacagacacgccttctctggcaccacagcactctc

SEQ ID NO: 47743 - DNA, 122 bp, Homo sapiens
gatccagggccctgtctcctgctcagcctggggacactgctcccctgcatccctgctgttcgatcaccagccatgacacacagggtcccaagtacagcttgggccaccactccagagggtgc

SEQ ID NO: 47744 - DNA, 122 bp, Homo sapiens
ttacgtgaggcagtgtccggggcttaacgtttccgccgagctaatagatttgggaggctccgaccctgattttcacactagcaggagggagggcgctgggtcaccctcctatgcagaagggc

SEQ ID NO: 47745 - DNA, 122 bp, Homo sapiens
gcgcgctccaggcctccagattggcccgtttcgggggcagggcgggccgtggggcggggtcgcagcaaggcttcccctctaccctctctgggcctctcacaaacgctgagccccgccccgct

SEQ ID NO: 47746 - DNA, 122 bp, Homo sapiens
tccttcctgtccaagacaatggggcaggaagcaggtgctgggggcctagaaccactcggccgcctcctctgaggctggaagggggcataacagcgcccctccgtggcacacgcagcagcact

SEQ ID NO: 47747 - DNA, 122 bp, Homo sapiens
tggccacagggacccagcctctgctgcgttcagggccccgctggtgcctgcgccccaggccggggctgatcccatagagtgggtgtgaacatgtgccctaccctcggatgggcaatgcccta

SEQ ID NO: 47748 - DNA, 122 bp, Homo sapiens
acacgctggccagcctctgtggctgaggaatagaataaagttaagtgaactgaccctacacgtgggcccctatgaccttcattgctcttgaactaactgagctgaccagccagcctgaagca

SEQ ID NO: 47749 - DNA, 122 bp, Homo sapiens
ctgtttctctccaaggggaaccacagtactaatattttgcttctccctcatgcagacacccgctagggacgagggtgtcctagaggttattattcccttattcaccaagacattttcagttt

SEQ ID NO: 47750 - DNA, 122 bp, Homo sapiens
gcaaaggtactgaaggagaggtacttctgggtggggtacatatgaatgccattccaccaacgtgatgccaggcaccattcagcgtggatgggtgacaatcacctgcactcctgacaggaact

SEQ ID NO: 47751 - DNA, 122 bp, Homo sapiens
acacagttttcagaagcagcagcgggagaagacaagatggctgaactctggccggggcgacgaagcttccgaggaagggcagaatggaagcagtcccaagtcgaagactaaggtgtggacga

SEQ ID NO: 47752 - DNA, 122 bp, Homo sapiens
ggagcccctagcaggaagagctcttcccttccccatcatgtggtgtctagacagtcttcccgccccagcccaacacccgatttcagaagctcccaggagctctgcatcctagtcctccggga

SEQ ID NO: 47753 - DNA, 122 bp, Homo sapiens
gagcggccttttccacccccgcggtctcttgcgccctctggtggcctctcgcgagaacgacgctgaacttgttcaggtgggacgccaataaagatttcttattcaaaaaacaggaagtgcct

SEQ ID NO: 47754 - DNA, 122 bp, Homo sapiens
gcgctgcttcccaggagctcggctccccgggatggaagggactgatacccagttaatgggcgtggagcctgagcccctgagggtcgtcgctaacgggggtcgctcagcagggccggcctccg

SEQ ID NO: 47755 - DNA, 122 bp, Homo sapiens
caggaggttatgcatttgactttttacaagaaaggggtgatgagtagtatttgaaactaacgtgagtttgtagggccgtagtgtcctccggatgttgggagctattgctctggggcattgtt

SEQ ID NO: 47756 - DNA, 122 bp, Homo sapiens
agatgaggaaatggaggaacaggggttaagcagtttgcctgaggttgcacagctggtgagcggcaggccacagcaggctccagagtccacccacttaaccaactaggccacactatctgctc

SEQ ID NO: 47757 - DNA, 122 bp, Homo sapiens
ggaggagatcagggaataataaatatttccttcattgaaaattatatcctattggccaggcgcagtggctcacgcctgtaatcccaacactttgggaggccgagacaggcggatcacctgag

SEQ ID NO: 47758 - DNA, 122 bp, Homo sapiens
agcgaacgtcttcaagcagccaccggccaccaccaccggagcggccccgccgcagccccccggggccctgagcaaacccatgagcgtccacctcctgaaccaaggcagcagcatcgtcatcc

SEQ ID NO: 47759 - DNA, 122 bp, Homo sapiens
ctcagtagccaccatagctaggggtcaccgtattgaacagtgcagggctgcagctactagcggagggctcctgcgacggacacaccgggtactgactctgactcccccacccactggctgtt

SEQ ID NO: 47760 - DNA, 122 bp, Homo sapiens
tcgcagcggcttcccctacagaggggcggggtggggggagcggggagggagaggggagggcgggagagggagttctggggaaagcagcaaactgaaaactgacactggcaccttccctcgcc

SEQ ID NO: 47761 - DNA, 122 bp, Homo sapiens
cagtggaacatttttgctgttgtgggtaatgcacaacgtagcagcgtaggaaggccgggccgcgagagggaaccgagggtgttggaagcaccgaagacggcgtccgttgtcattttaacagt

SEQ ID NO: 47762 - DNA, 122 bp, Homo sapiens
gcttttcagtcaaagcatttttaataccctctcctttccatgacaaggagacacatgcttcgcctccttctcccctcagcagctgagcaatggatccctcctctagcttagtcagtaaagga

SEQ ID NO: 47763 - DNA, 122 bp, Homo sapiens
ataaacttgccctaaggcagtccagataacttccacttgagcagcctgagacatcaagggcgggggcactttccccctcgactgcgcctaccgcagcctttctgagtttcttcctagcgagg

SEQ ID NO: 47764 - DNA, 122 bp, Homo sapiens
agggcccctgcagcctcaggaggatcagcagtggcctggtttactcgtgtcgtcattcgtcgtgggcaccttgtccccggggccggccagttacttggcctcctggctcatcatcctgccgg

SEQ ID NO: 47765 - DNA, 122 bp, Homo sapiens
cggaacaaaagcattcggtttttttccctgtgtgttggctgtgttctcttatgactgtgacggcaaataaacaatcattcccagcacctttagactttgaacatttgaaataaaatcaatac

SEQ ID NO: 47766 - DNA, 122 bp, Homo sapiens
ctttgcccattttctcatctataaaatgggagtggatagtattgatagtatttatctcaccgaattgttgacaaagattgggataatttatatagaatactggtacacattagggactcagt

SEQ ID NO: 47767 - DNA, 122 bp, Homo sapiens
tccagcttctagaggccactggaatccctggaatcattcctctttgtccatcttcaaagccgggaagaccatatctatctccacagaagaaagaagttctcctttttaagaacttggatgat

SEQ ID NO: 47768 - DNA, 122 bp, Homo sapiens
cgtgcgggcacccgagtctctcctgccgtgcgggcacccgagtcactcctgccgtgcgggcgcccgagtcactcctgccgtgcgggcacccgagtctctcctgccatgtgggcacccgggtc

SEQ ID NO: 47769 - DNA, 122 bp, Homo sapiens
ggggagtttgcaaagccaagttaggataaactgcagcgaccagcccgaagcgtgcgttaccggcactgcagcgttttaccaactgcctggatgggaggaggaaaaagtgatgtgtgaagaga

SEQ ID NO: 47770 - DNA, 122 bp, Homo sapiens
ccctactagaatgaggtctgaacactcaactaaagtgagccacagcctctttggctagaacgactaaggtttctcttaaagggtgcaccaggctggtcctgcttgctccagaagtctcctgt

SEQ ID NO: 47771 - DNA, 122 bp, Homo sapiens
tcactcagggacctaggctgatggaggcttcaccaccttacaactatgtcatctggatcacgtggaaacttccagtgctacagcaggggaagagggagagagagtgtaaaggctctcactta

SEQ ID NO: 47772 - DNA, 122 bp, Homo sapiens
cctaattcctgctcttcctccgcctctcattttggtttaggtgtcctaagaggacggggacgcaaaaacacccccccaccaaaggtggggactagccaagtttaggagcgaattaggttgta

SEQ ID NO: 47773 - DNA, 122 bp, Homo sapiens
ccccagccaccccgctcccctttcactcttaatataatcttcacttcatttttaacccagcggaggttctcttggaatttttccccttcttccaaaaatacatgtgcgtgcgtgtgtgtttg

SEQ ID NO: 47774 - DNA, 122 bp, Homo sapiens
ccacaggcctccctagaatattagaatattcctcctcagaatattaattagaaggtggggcgggctagcatggcttcctggtttccaaatggagacagaggccagccttggttggggatgga

SEQ ID NO: 47775 - DNA, 122 bp, Homo sapiens
tctggcccgtcaatcattgcccatttaaacaccacgctgttcccccagttctgcaggtgccggtcctccagctagccccggccccctcccgcacttctcaaagctcccctattccaatggac

SEQ ID NO: 47776 - DNA, 122 bp, Homo sapiens
ggagctgcggccggggaaaccacccacacagtctgagaggacagctgattctgagcggaccgacggaaggagattcgcagagccccttcccggaagtgactgttgtcgcggcaactgccaaa

SEQ ID NO: 47777 - DNA, 122 bp, Homo sapiens
aatactttgacaattatttttgccattgtgtttgatgaatttctaaattgcgaaaaatggcgaagtatgtgtgttttatttatgtgagcaaagtgaaaatgttggctgtttgtgataacact

SEQ ID NO: 47778 - DNA, 122 bp, Homo sapiens
gtgattggctgcccggaaggaggcggagacagcctcgcatggcgcgcgcgtccacctcgccgttccccctcgcgcagctccaaccaaagagagacatccaaccccgggggagtgacaagggg

SEQ ID NO: 47779 - DNA, 122 bp, Homo sapiens
ctgctttctggaatgttactgtacagcatctcacctccattttaaatagcccttcataagcgagacatcgtcttctaagattttggtaactccctctccccatgtcagtgtcaccaatgact

SEQ ID NO: 47780 - DNA, 122 bp, Homo sapiens
gcctcccattagaggtcagcaggtcctacttgaacattttagtagcttacttttttgtagcggtagaaatgaaatgttcccatgttaagtgcaaaatgttaatattaactaaaggaaaataa

SEQ ID NO: 47781 - DNA, 122 bp, Homo sapiens
tatctgcacggatgacctgcctcacctgggagctcagaggagctcagattccattactatcgcaccaaggacagatctcccagcaagaatgacagaaaagactaactgcccccaaaatctcc

SEQ ID NO: 47782 - DNA, 122 bp, Homo sapiens
ctgcagctttggcaggctgatgtctttcagggagaaaatgggagtacagccagcaggcagcgccagcatggcgttgaggcccagtgggcactcaggtcctagggtgcaaggagagccaagca

SEQ ID NO: 47783 - DNA, 122 bp, Homo sapiens
acgccaagggagggcgcgccaagtccttcccactcgtgcacactgggggcgccgtcaggacgcaacccagtccaacttggatacccttggctttagttctcggacacttcttttttctctcc

SEQ ID NO: 47784 - DNA, 122 bp, Homo sapiens
gccgcggcgatcatggtgcgggcgaggcgagggcgactcgacggcggggctggagggcggcggcacaggcacccgcgctgggcgcacgccgggacggcgggcacgggtgagcgcggctcagc

SEQ ID NO: 47785 - DNA, 122 bp, Homo sapiens
cactcacatcctatgtagtaaacacagtgagcttcggctgggaaaagcggctgctccggccgaggaaatcctggtcgtgaatgaaaatgcatctctgtgggccctcacaggcccacgcagag

SEQ ID NO: 47786 - DNA, 122 bp, Homo sapiens
ggggcttgtgcaggaaaaccggtccggattgcccgaggacggtgaccggcctcggtcttccggcctgacttgcggcctgggaatgagagggaaagtccagccttcccgcaaggagatcctgg

SEQ ID NO: 47787 - DNA, 122 bp, Homo sapiens
agatgtttctaaagtgacacccccgtcagcacagtttatattcaacctgatgattactagcgaagcaataaaaaaatatttaacaacctcataggcttgtggcaatgagccaatggtaactg

SEQ ID NO: 47788 - DNA, 122 bp, Homo sapiens
ttggaatggtgaaaatgttttgaatctgtttctggtgtgatcgttaggtccaagatttcacgtgacgttgtgtgccgggtgttgtggtcaacacacaggaatgctcctttattctctgtacg

SEQ ID NO: 47789 - DNA, 122 bp, Homo sapiens
taatcacttggaatgtgtttagcttgactgaggaattaaattttgattgtaaatttaaatcgccacacatggctagtggctactgtattggagtgcacagctctagatggctcctagattat

SEQ ID NO: 47790 - DNA, 122 bp, Homo sapiens
tcgtgtccagcaatcccgggagcaggcggcggcacttcctccatgccccggcctcaatcacggtctcagtccccccaaccccgtcctgcaggaacaagtgtggtagaggctcggggtcggag

SEQ ID NO: 47791 - DNA, 122 bp, Homo sapiens
aaacacacggagctagccaccccgaagcactggaagggcgcaatagtttttaggtcaccccgcaaaggccacaggtggcgccacccccctgcccccgcaccgccgccctccgccccgcgccc

SEQ ID NO: 47792 - DNA, 122 bp, Homo sapiens
cactccccctcccatcccccttaactctttcagctgggttagagctgagaaagcatttgtcgccgccagccccatccaccacgcaaatccatctgagacagaaaggaaagaaaaaaaagcac

SEQ ID NO: 47793 - DNA, 122 bp, Homo sapiens
tgcttaagggttaagggagcggttcgaaccggcccgagcgttgggggattcggaggagggcgcgggaggcaggaggcgccgccaagcgcgcgcacagaccctccaataaacacaaaggaggg

SEQ ID NO: 47794 - DNA, 122 bp, Homo sapiens
tcttccctatttccctgcatttctcttctgtgctcgctgccacacgcagctcagcctgggcggcacagccagatgcgagatgcgtctctgctgatctgagtctgcctgcagcatggacctgg

SEQ ID NO: 47795 - DNA, 122 bp, Homo sapiens
acctcacctgtgttgtcagcacaattgattacagctcctaccggaagacccaaggaaatccggaatttcgcaccagaggacccaccacgtcctgtggatataaagggaagggaaacaggata

SEQ ID NO: 47796 - DNA, 122 bp, Homo sapiens
cgggggacccagcgtaggtccttcccgaaaccaacaccttgggtgcggtggggcagaggacggggatgaggcggccggaaccgccctacgaggagaggctgggaggctccgaaaacctgggg

SEQ ID NO: 47797 - DNA, 122 bp, Homo sapiens
ctatgatactgaggctggctatgtcactattaaaaaaaaaaaaaaagaaaaaaaaagatacgaaaagataaaggaagttaaatcattttatgaggtgactattatcatgactggcatcaaat

SEQ ID NO: 47798 - DNA, 122 bp, Homo sapiens
ccttttgtggccaccccaggtgtccagatacacacaggagactgtggctggggggcgatccggacagggaagtgctcaccacactctcgactttcatctgggtcatgtgggggatgggctcg

SEQ ID NO: 47799 - DNA, 122 bp, Homo sapiens
tctccccggtaggatgctcactgcgctagcgggaggggaccgttaagtattttccggaaccgtttatcagctcggccttggacatatgtccttttacccttcagcaataaaaacatggccct

SEQ ID NO: 47800 - DNA, 122 bp, Homo sapiens
taagggtctcggcagaatattctgacaccaaatgttcagcttcattaatgacgtgtttaccgtgtttttctcaccttctggccaagtgatagcctcatgctattcctatctctgttgcttgc

SEQ ID NO: 47801 - DNA, 122 bp, Homo sapiens
aaattctaagagtctcacgttgtacccactctcctattttgtgctgatgggtaaggaatacgacaaggagtgagacgatccagtgagacagtggaggtagcccagcatggtggtgggctcct

SEQ ID NO: 47802 - DNA, 122 bp, Homo sapiens
gtgggccacgatggggacagcatgagttctttcaggctgcccttgccagctgtgaggaagcgtacttcctgtggttcactgttattcctgaagccttttaagagtgtaaatgtaggaccacg

SEQ ID NO: 47803 - DNA, 122 bp, Homo sapiens
gcggggcgcgacgctgcccggcggcaccgccagcagctcgaaaggaacgtcagtccccaccgggggaaaaagttagaaggcatcccggccacgccaacttcccatccagggccagactagaa

SEQ ID NO: 47804 - DNA, 122 bp, Homo sapiens
cacccctgtgccacgccaggcctgggccggccacgtgtcagtgggtgagaggtcagtttccgggtcaaggcctggacatgagggagcgggcacaggttttcagggggcccaagagcggcagg

SEQ ID NO: 47805 - DNA, 122 bp, Homo sapiens
acgttgtggggggtcaggcttgctctggggctgggaccccggggggagcagtggggttgacgccacagcgatgacttgggccacgggtctgggggctctcccgcggggcgattgggctctgt

SEQ ID NO: 47806 - DNA, 122 bp, Homo sapiens
tctatccaccgcgacctgcattttctggcctcctccgagttttgttcacatcttccctcccggatttgatattccaagcatcttctccagggaagactcccagaagccttgcttgtctgtgt

SEQ ID NO: 47807 - DNA, 122 bp, Homo sapiens
cagctcggggtcgctgtcagccggagcccaggggtaccagtcttttgcagctttagggcacgaccgagagcagcccttaatcctccaatcggaaactacagccttgtcttggcgggtagacg

SEQ ID NO: 47808 - DNA, 122 bp, Homo sapiens
gcttttctcaagtatgtgcatttaaacttttaaaaatgtttaaaacaactgtgagcaaatcgaaggcttgctgcactctatatagggtcaatgtttcattaagtgctttatcacaaagattt

SEQ ID NO: 47809 - DNA, 122 bp, Homo sapiens
aaagcccggaacggatgaagctccggcgcctctgtccggaagaggagagccaagaacacgcgagcatgtccgaagcagaaagtcaacaactaggctggagtttccccctcgcgcatattcag

SEQ ID NO: 47810 - DNA, 122 bp, Homo sapiens
tgaacttccacctgcatgtctcgccacacccttggcgtacacacccactccaccgtccaccgtccagcaaaccacacgcaacaggggccacccccgctctggtccgtgctttcccttctcag

SEQ ID NO: 47811 - DNA, 122 bp, Homo sapiens
gctgacagttctttgttgtgggggctgtcctctgccttgttggatgttcagcagggatcccggacccctatccactgggtaccaatagtattcccctgctctagttgtgacaactagaactg

SEQ ID NO: 47812 - DNA, 122 bp, Homo sapiens
ttctcctgaatcctgcggtcccagcgtcgctccggacgctgccaacctgttctccaccgtcgctcgacttccacctctaagactcccacgtgagtgcgggcgtctcccagttcctgggccgg

SEQ ID NO: 47813 - DNA, 122 bp, Homo sapiens
tctatttgaatatgattttgacataattatttctgtggccagaaagagcatcttgagctccgttttggagaagaggaaactatggcccagagatgaagaatggcttgcctagagtcacagtt

SEQ ID NO: 47814 - DNA, 122 bp, Homo sapiens
gggactccacgttggtgatcagtctctgcacctgggacagctgggagctgtagcgggcctcgctctctgtcagcgtgttttccagagagtctcgctgtggtggggaagattgagagtgtcag

SEQ ID NO: 47815 - DNA, 122 bp, Homo sapiens
ccgtgaggccgcacagccccagtctcgggaggcgtgacacaccctccccgcgcgctctcgcgttaccaagtctgcgcagccgcacacccccagtcccggcgggccccgcgcgccaggcccct

SEQ ID NO: 47816 - DNA, 122 bp, Homo sapiens
gcggcgggcgcgcggcgcccagacaaaagctcgggccgtcgggcccacgggccccgggagcgctccagccccgaagccgagggtcctggcacaactttgcgaacgcagaggcaggaggtgcc

SEQ ID NO: 47817 - DNA, 122 bp, Homo sapiens
ctaggcatgcgggagatggggcgggggcttgagctgccgtggggcgcttagttttgagtccgggtggtgcgcctggctttggggacagcccggggcacgcgggcccgggggtgccggcggga

SEQ ID NO: 47818 - DNA, 122 bp, Homo sapiens
gggcgggaccgaggacacagagccggggcggagcccaaggtgaaaccaatgagaagcctccgggtgggcggggcatcggcctaaggccaagggcggagccaatgagaagcagcgccgcgttc

SEQ ID NO: 47819 - DNA, 122 bp, Homo sapiens
gcaggccgtgggtggtgatgggggcgtcgggagcccatgggaagcagggcgggaagcaggcgtctctggaaagggccttgctcctccagggaaggccttgaatccctggcctgactgggaac

SEQ ID NO: 47820 - DNA, 122 bp, Homo sapiens
catgtgggtgaggtaccttggaaacagatctcccagcactaagcaagccagaagacatctcgacagcaatcccgtgagaaactgtgggacagaaccacccagctaagcagctcgcagattcg

SEQ ID NO: 47821 - DNA, 122 bp, Homo sapiens
actgcagagagaagaggtgccaagttcaggaagcccaacagagaccaaatcagagccagacgctggggaactccaggtttaatatgccttccactactcacttccacactccaagaaatgtc

SEQ ID NO: 47822 - DNA, 122 bp, Homo sapiens
gctttttaaaaaagaagaacacagaaattacttacatctgagagttccaccgtgaggcctcgcctctccactccacagacctctgcctggccacggatccttcaccctggcttgacagctgg

SEQ ID NO: 47823 - DNA, 122 bp, Homo sapiens
gcagcaggtgtgggcagtgggtcctctggggtggactgaggtgaggcctgggtgtgaccacgcggtggcactggtggctgccggcagctgtcgtctgcagagtgggtgagaccgagtgtggc

SEQ ID NO: 47824 - DNA, 122 bp, Homo sapiens
gcctcctgccctattacaagcagctcacaccttttggaggctctggagacgcctgtccagcgagctccgagattccgggtgctgaacttccggttttacttagcctagttgctgtaattact

SEQ ID NO: 47825 - DNA, 122 bp, Homo sapiens
gagtgaaaaagaaaaaatatccttttttaaaaagcccctaagctttgaatttgtagaaagcggggccctggggagagagcagggatgcatctctaaagagaacagggcgctcctgcggcgcc

SEQ ID NO: 47826 - DNA, 122 bp, Homo sapiens
aactatccttttcaattatcttctcctgtctggtagtttcccatctagaattttaattcacgaagactggaaacaggacttcacaaaatgtcatcctggcacattttccaggaggaacggtt

SEQ ID NO: 47827 - DNA, 122 bp, Homo sapiens
gaccacacactgctgctcccccagaagcagcaaagcagagcatggttaatcacttcaaagcgtttcccaaagacacagagcaggtacccaaacaggcctcccttccccaggaatatttgggg

SEQ ID NO: 47828 - DNA, 122 bp, Homo sapiens
agccctccagcagccgatcccggtcaaaggggaggagtcttgggcccaggagcttcgtcccggtgacaggcccggccagacaccggtgcacactcctgatgctccctgcggggctgctggag

SEQ ID NO: 47829 - DNA, 122 bp, Homo sapiens
gaagctcacccaatcattgtgttcagagtttgtagtggggcttcatcacacaggcataatcggttgattaaccacatggttaatctctatctccaagttgatggataccacgtgacccaaag

SEQ ID NO: 47830 - DNA, 122 bp, Homo sapiens
tggtcttgaggagagagaccctggggtctcagactgccataaacacccaccctcccagctcggctctagggagctgtcccacaaagggacagaaatgaggcacaggctagaagcaggaagag

SEQ ID NO: 47831 - DNA, 122 bp, Homo sapiens
agcactaacgctacctaaaagaaatttctcagacaagttcagatagtaaccatatttaagcgcttaacataatcggctccattttccatgagttaggaatggaatttaacgttcatagaaaa

SEQ ID NO: 47832 - DNA, 122 bp, Homo sapiens
tgtgcctccacgtaggaccgagggatccctgccgggccgacagcactgaccctcacgccccgccccacccagacccatcaagagcctccacaccagtgggttctggagctagtctgcctgag

SEQ ID NO: 47833 - DNA, 122 bp, Homo sapiens
catctggctcagtaaataacagcttccagagaaacagcttcacgtgagtgcaccatggaacggatgcaaggttgtgagctgctatcagtccatcagccccactcgccatgtcagcaacgccc

SEQ ID NO: 47834 - DNA, 122 bp, Homo sapiens
ttcacgtggcgaaaactgtgggctctccttgggtattctgttggaatagattcgggcagccgacaccagctcttgtacggctgccaggaaccacagctgatgataaaagccattaaaggtca

SEQ ID NO: 47835 - DNA, 122 bp, Homo sapiens
ctaacttgtagtcatgtgataaacaaatggagaaaaattggaaataaccattaatgagggcggcagaaattataacattgagcaagggtcagaagattgcagagcagttacccattcttggc

SEQ ID NO: 47836 - DNA, 122 bp, Homo sapiens
gcactgaagagggtaggaaagacagtcttgaattgccaacaccactactccctcatccctcgggagtgccactcggcaaagagagacagttcatgtgcctaggggagggagaggagagtgag

SEQ ID NO: 47837 - DNA, 122 bp, Homo sapiens
gtcatgttccgagagcctccgcggcttccaacttgcacagctccatcaggccgtcccccgcggtggccagtgagttggcaatcagctcggttgccttggagtcgccctcagcagagatcacg

SEQ ID NO: 47838 - DNA, 122 bp, Homo sapiens
tgtgttctcattgcagagctcctctgacaaggagtccatcctgaccatcctcaaggtcctcggagatctgctttctgttggtgagtaggccatgctctcatgctttcatatggcggatgtgg

SEQ ID NO: 47839 - DNA, 122 bp, Homo sapiens
gctcccgcctcgacccacccggagccagccccctctgcggacacgacatccccatggggacggtggcgcgaaacgccccactctgccgcacccaaactctgcagacccccagcttccctggg

SEQ ID NO: 47840 - DNA, 122 bp, Homo sapiens
ggacgcgcttagtacccagttcctgggctctctcttcagtagctgctttgaaagctcccacgcacgtcccgcaggctagcctggcaacaaaactggggtaaaccgtgttatcttaggtcttg

SEQ ID NO: 47841 - DNA, 122 bp, Homo sapiens
aacgcaggctctggtttctccacgctgtctttaataacatctgtcatacaaaaatcagcccggctcggtggcgcgtgcttacaatcccagctactcgggaggctgaggcaggaaaatcgctt

SEQ ID NO: 47842 - DNA, 122 bp, Homo sapiens
tttcctctagctgaggtcacggaggagcttcttgcccctctgtgggtttcttcccttccccgcgcctttccagcgccggccagttctcccccagttcccttccagccgtcccaggtccgctt

SEQ ID NO: 47843 - DNA, 122 bp, Homo sapiens
attgtagtattatatacaatagcaaaagaccacctaatgctcttcagtaggggattaacccgaggttaagtagcaagctgtggtgggaccaggatttgaatccaagctaactccacatttat

SEQ ID NO: 47844 - DNA, 122 bp, Homo sapiens
tcaaagactctgcatcttgatatgaaaatctgagactcatgtgaacatcaggaacaagagcgaggctgacaaactttaccacatgtgctgccttcctgggcctggtcagtcgctgggctttg

SEQ ID NO: 47845 - DNA, 122 bp, Homo sapiens
gggctcccctcccgggacctcacagccacaccccaatcacgaaccatcttccctgccccacgaccagtgtgtgtggagagagcagccatccggctggacgttccatcatgcacgtgtgacac

SEQ ID NO: 47846 - DNA, 122 bp, Homo sapiens
tcttagcaaacactgtcaccagtttgccctctactaccgcaatctttaggtctttgatcacggattaattataccatgggcttcaagtaggcattcctaggttcctagaacctgcttggtgc

SEQ ID NO: 47847 - DNA, 122 bp, Homo sapiens
cccgacgcgcgcgtctccgcaagagcacaggaagtagggaacgtgctttgggcgaaagaccggaagttggtttatcacgtgaccatttttagcccctgtaaaccaggtcgccgccatttttg

SEQ ID NO: 47848 - DNA, 122 bp, Homo sapiens
gcgtgagcttcgccctttctgaaagggcctccgcctgggcaggcgccggggggcagtcctcgggtcccatggcttaggagcacagcactgacggctgcagtggctcgaaaggctgaaactac

SEQ ID NO: 47849 - DNA, 122 bp, Homo sapiens
aaattctacaaacattgcacacagatttaacgttcccttattttccaggtgaggtcagggcgccctttggtttcgcgcttctgtccctttaagaaagtggaggagaaagaaagcgctgctgg

SEQ ID NO: 47850 - DNA, 122 bp, Homo sapiens
ctcaaagcacgacagactgaccattctgagatcacatattgtaaggcaaccctggtcctccgggaaaaggatgaattcagaggcagagagacctggctaacatgctgtgctctgccactttc

SEQ ID NO: 47851 - DNA, 122 bp, Homo sapiens
ccctgacgtcagagggccgtgacgtcaaagatgtcccagagggggcacttccggcgggggcgtgggggcggggcgggacctgggaggccccgcccccccggtcctgagaggacagctccgct

SEQ ID NO: 47852 - DNA, 122 bp, Homo sapiens
ccgccgcccactgcttgcagcggtacctgcagctgttccgcggtgaaggacgtccgcgcgcgcttggccggcttgggttgactgtcctgttccgagggcactgccccctccaacgtgaggcc

SEQ ID NO: 47853 - DNA, 122 bp, Homo sapiens
cacgggaaatagggtcaacaacgccggaaagtactactggaaaagcttccccaggctccgcgaagaaaagttccgaagcccggaagaacgcaagccagacgtggaggcggtgctacgagctt

SEQ ID NO: 47854 - DNA, 122 bp, Homo sapiens
aatgtcataagttttcccttctttgggattgtcaggatcctctcctttgttcactgtggtcgatagaataatgtctgttgacctccccagtgttgtctatgtcctactccctggaacctgaa

SEQ ID NO: 47855 - DNA, 122 bp, Homo sapiens
cagaacctccaggagcagggtggctaatgctgagtgccgtggcctggcactgggaagcgccggtcctcagtccctttccctgctcctgggcatcccaggccccttggggcgttcttacactg

SEQ ID NO: 47856 - DNA, 122 bp, Homo sapiens
aaacatgctaagcaaaacagtccctgcccttgagaagcttagaatctagtaaaagaaatacggatgagaaaatggataatacatttctctgatctcggcaaactatcgcaaggacaaaaaaa

SEQ ID NO: 47857 - DNA, 122 bp, Homo sapiens
aatagctggattctagaactgactcctcaccagtggtatattccacaacagtgtcacagtcgtctggcccctttggtttccgtgtcatcctttttggtgtgtaggacaaggagccagggaat

SEQ ID NO: 47858 - DNA, 122 bp, Homo sapiens
acctctggccctgccagcaggaggtggggcgagggcaggacagcttccatgtggaccctccgtgggcaggagagcccagagagtaagggtctcctccttggctcaacaggaccatccatgcc

SEQ ID NO: 47859 - DNA, 122 bp, Homo sapiens
aattcaggtgccacagtggccattctccggtgaccggagcgtgttactcagaaacggatccgtcagaggccaatgggagctgccggccttcagggcgcgcctggtggcgccgagcatcctgg

SEQ ID NO: 47860 - DNA, 122 bp, Homo sapiens
gctaagggattcacgctgtaactgggaccgcagcagggaactacaatttccatagtgctccgcgccctcccagctggctctactgccggcgacggcgtggtacacgctgggatttgtagtct

SEQ ID NO: 47861 - DNA, 122 bp, Homo sapiens
agaagaaactaacctcaaggccgaagctatttatggtggagcatgacgcgggaaagtacacgcgggaaaataagatgttgggaaacacagtggaaacaaccacaaggaagacaacagttgtg

SEQ ID NO: 47862 - DNA, 122 bp, Homo sapiens
ctcttagtctctggcagctcacatgtgagtgcagactgcactttccaggccttgggcctccgtgcacctgggagtggccccccgtgtctgttgagtccagggggggctgctcaggagggttc

SEQ ID NO: 47863 - DNA, 122 bp, Homo sapiens
tgcctgaggttacacaacttgtgaaccttaagtccaggaggacctagaagatggagaaggcggtaccttctgcctggaactctgaaacttttaacagaaaactgatccctcggtcccgaaga

SEQ ID NO: 47864 - DNA, 122 bp, Homo sapiens
ctggcatccaccgcagcaggaagcttggccagggctttgagggatcctctgagagtacagcgtagaaacgtcattggtgcaagactgtgacctgccctgcgttttggggactgctccttcac

SEQ ID NO: 47865 - DNA, 122 bp, Homo sapiens
cctgtaaaataaaacaaatgggccttgacaaagaccttcccggaccaagcttgcgtccaccgctccgagtcccctcccctctgggaccaagcttgagtccacccctccgagtcccctcgtgg

SEQ ID NO: 47866 - DNA, 122 bp, Homo sapiens
cctgaagaccacatcttcctctcctcccactgcctgaaacagctgttgtgtgagggccctcggctcctcagtggtgaagcagatagaggctgcttgttgtgccttggtgaatgctgctctgt

SEQ ID NO: 47867 - DNA, 122 bp, Homo sapiens
caaagaccatcgcccacacaccgctcacatctgctgccgagagcttccagaattccaggccgcgtttaggaagcttcagcggaggcatgcaggctgccctacctctgcaaaaggctcccagc

SEQ ID NO: 47868 - DNA, 122 bp, Homo sapiens
aaggaagggacagaggctagggacaaaggcagatgaagcagggcattagagtgttaaaaacgggaactcactgggttcccatagcctggctccaccccaggatcctctgacacaaggtgctc

SEQ ID NO: 47869 - DNA, 122 bp, Homo sapiens
aggcgtcctgcactcatccaagccgtccaggatcaggagggccctggctgggactgccaccgccaggctgggctccccgacgtgcgggaagaccgagcagatgagtcggtcggcacacagct

SEQ ID NO: 47870 - DNA, 122 bp, Homo sapiens
ccacagaggctcctgctaggtttcctgctaaagggggataaactgtccagccggttccagcgctggcttctactactgaagatgcaagtaggagtagaaaagatggggggagaagtcagaag

SEQ ID NO: 47871 - DNA, 122 bp, Homo sapiens
attctgagtgacagcatcggctgcctacagagctctgagaaggactcataaagctcattgcgagttaccgagtacaaaatcgattatcaatgtctgccatgggcagagaatggtaaatggca

SEQ ID NO: 47872 - DNA, 122 bp, Homo sapiens
agacaggtctaggctggtaagggccgggaaggcgcgaacctgttcgcaggaaaaggcaggcgagtgtgcttgggcaatgctcagtaccttgaggcctggcttgagccactgctgcagctcgg

SEQ ID NO: 47873 - DNA, 122 bp, Homo sapiens
gccaggggcctcttggcaacatgacctggcaggtgctgtctgtccattattcccctctcacggatgtccccggcctctgtggacatgaccgcctagccctgaaactccaaatgtacctttct

SEQ ID NO: 47874 - DNA, 122 bp, Homo sapiens
acacctccacgctctgaagagaccttagaacttgggggtggggtgggagcagggtgacgtcgcccagctggtggccagagctagctctggctcttcaggccacaagttcacagtccttcgct

SEQ ID NO: 47875 - DNA, 122 bp, Homo sapiens
gttgacttcagacattgtggtcaggccgacttgtgtttaaacctaggctttgacaccggtcgatcgttcagccacatgcaggttacctaagcatgtcccacgtggcacaaagcagttgcctg

SEQ ID NO: 47876 - DNA, 122 bp, Homo sapiens
tggagaggaagcgcctccctctccacccactctcgccggggttactgccggtcacagacccgggccttcaagagctatttacacctacaacagcccaccagcgcctgaccacgccggagcca

SEQ ID NO: 47877 - DNA, 122 bp, Homo sapiens
caaactggacaccggggattctagtcctcggccctcccaggggcagtgagggagtctcaccggaatggaggtgggcgggaatggaggtggccggggcaaggcctggcttttcttacatggtg

SEQ ID NO: 47878 - DNA, 122 bp, Homo sapiens
tcctccctgctggactcgatgaacgctgagatccgcatccgctggctgcagattgtggtccgcaacgactactatcctgacctccacagggtgcggcgcttcctggagagccaggtgcggtc

SEQ ID NO: 47879 - DNA, 122 bp, Homo sapiens
ctcaaacagggtaatcggaggagggtctaataaaggaactattttcaacagcggagtaggcgttagggactccagtaggagtagggctgtgtcccaggatactaacagcagggcgccttggc

SEQ ID NO: 47880 - DNA, 122 bp, Homo sapiens
aagcagaagcataggagtagctgagggaagatgacactcagcctggaccttgtgctaattcgccactctgtggccacaccacgatattgagatgacttttgtggggcctggggtgtttcatt

SEQ ID NO: 47881 - DNA, 122 bp, Homo sapiens
aggcagtcagagcggcttttatctcgatgctacctacaactggggctcaggaggggttcccgattgaccagtgcaagactaacagttaaagctcttcagacaaaaattttatgcagtgatga

SEQ ID NO: 47882 - DNA, 122 bp, Homo sapiens
tattggcaaactctcctgcttcctgtccgcgagcaccacaccgggctcccgaggctgcgccgttccgtactgggcggttttgcccgttccgcatcttcagaggctttgttcaggaagcaaca

SEQ ID NO: 47883 - DNA, 122 bp, Homo sapiens
gtagaggcgaggccgttgctcacagaccttcattgcgagctcaggaggtgcaaaacgccccgcccacgtggagttgacagttaagtggagaggtgaaggtggtcaggcgaatacctataata

SEQ ID NO: 47884 - DNA, 122 bp, Homo sapiens
aagatacaggtcatacagaccttgctgataaaacaggttgcagtaaagaagctggctaaacgccaccaaaaccaatatggcaatgggagggacctctggtggtcctcactgctcattatgca

SEQ ID NO: 47885 - DNA, 122 bp, Homo sapiens
tatccgtgcttactggctgggccatgcagcctcccggcgccccggggcccctgattggctcgccagggctggcctgccctgcgcagcacatggccactccagatgtttgggtatccatatgt

SEQ ID NO: 47886 - DNA, 122 bp, Homo sapiens
tttccctaattgatggccagtgctcctcacattatatagaaatgctttttcacatgtacacgttagggtcttacatgaattattctgtatactgttagatttattcatgtcaaaaatatatt

SEQ ID NO: 47887 - DNA, 122 bp, Homo sapiens
gcagtgagcgggtctgggcggctgctggcagcgccatggagacggtacagctgaggaacccgccgcgccggtgaggggccactggctaagaggacgggcatggggtcaggggaagaaaaggc

SEQ ID NO: 47888 - DNA, 122 bp, Homo sapiens
cagctggaaacatctccatctcagaaggaggggttgtaagaattaaagaggagagaaacacggagggtggctcaatagtcagcaggtttatttcaaacctgggagggacttttgtccaagtt

SEQ ID NO: 47889 - DNA, 122 bp, Homo sapiens
gggccgtggtgggaggtgaaaggtcatagtcctgtttggcggccatttctcttgaaactgcggctcgggacctgcggtacctgctgtagtcacgagggacgggcggcggcctggtcggcaga

SEQ ID NO: 47890 - DNA, 122 bp, Homo sapiens
ggccagaaaggccccggacgccgccaggtgccgacaccgacgccccccgggcccggcgcgcgagtctgggcccctcagcagccccgggccacccgcctgtattgcctcctagtgctgagaag

SEQ ID NO: 47891 - DNA, 122 bp, Homo sapiens
tgaccactgccgagagcgccacggtacaggccgctgccagcgccgcatggatccctggcacgtgccaggaagtgtccatttcacaggcagggaactagcccgaagacccagcgtgggcaggc

SEQ ID NO: 47892 - DNA, 122 bp, Homo sapiens
aagctcagggcacctgtaggcggcagcgagagcccctcctcgccccgtgaggaccccgaacgcagcctcgtgctgtgatgaccctgagcccgtcccagcaccagccccgcccccggcggact

SEQ ID NO: 47893 - DNA, 122 bp, Homo sapiens
ggcccagctgtgggttcttctgcagcagccactccagggtctccaggaggtacgacatgccgtagtgctgggcaatgttccggaatattccgatctgttccatgaagacctgcaggaataaa

SEQ ID NO: 47894 - DNA, 122 bp, Homo sapiens
acccacaggtggaaaacaatttgtcatctctcctactaaaaccacctagaattttgtaaacgtatcccaggataaaatcagtcacttagtgaaaaaaatatatattatcagagtgttgtcta

SEQ ID NO: 47895 - DNA, 122 bp, Homo sapiens
tggaggattttggatagttgcctggagttaagtcaacattttcctcattcttctgctcctcgcctttcagcgctgcttctaagtcttcctcaggcggatgaattactactgtgggaatatca

SEQ ID NO: 47896 - DNA, 122 bp, Homo sapiens
ctttcctccctggtggggctggcggtgggtgaccacggccgcatctgggaggcgactcttcggattcaagatgaccaacaaaaaaccctcttccccaaagggttagactgagcgaaacttca

SEQ ID NO: 47897 - DNA, 122 bp, Homo sapiens
ccaaatcaggggtcgtggacaaaggatgcctggggcctgcggccctacgccaggaccccgcgccgaatactctgattcttcgggctccctccaagggagtcccaaagaccccaatggccaat

SEQ ID NO: 47898 - DNA, 122 bp, Homo sapiens
gaggatcagtagggactgagtctcctcattgagacttgtaacaacttcgcatttgacaagcgaggaaacaggaagtagggggcttagatggaaacatggggcgggggatggtatatttaaga

SEQ ID NO: 47899 - DNA, 122 bp, Homo sapiens
cattttttggcttataagcttcacccactcacccccaacccacaccccacatccccctgccggcagcccctcaacctaagaaggccagagcatatttattttcggagggagcagattacttc

SEQ ID NO: 47900 - DNA, 122 bp, Homo sapiens
caggtgatgaaattgtaggttaagctgggatttgtaaccttctctacatttgctatatagcgtctatgtaatctttctattggtctgagacattgcagaggaaacctatagccatgcctgga

SEQ ID NO: 47901 - DNA, 122 bp, Homo sapiens
aaggtggggtgagtgcaggtgtggtggtgaggtcttttgtgctgtgaatcaccccacgttcgcctggccagggtttctaacccaggttcgcaaggcccatgtggacacgtctgcagccacac

SEQ ID NO: 47902 - DNA, 122 bp, Homo sapiens
ctggaggccttaaatgaaagctataagacgttaactgcgcataatagtaccaatgaattccgtagtcagtacagaaaaggatgcatatcccaagatatcttcatgatggggccttaaaacaa

SEQ ID NO: 47903 - DNA, 122 bp, Homo sapiens
gaagaaaactgagaaaacccatgccactcagtctcatttgcaggctacacacacacacaccgcaagataccagcctcaaggaagaacacctgttctaaccctgtgcctgccgggggcggcgg

SEQ ID NO: 47904 - DNA, 122 bp, Homo sapiens
tcagagaagagccaagaactaatggagcccagtgcatcctggaaacaaggcccagggggacgtgcagggccccatgctctggaatgcatgcacctggagccagaatctggcctgccactcat

SEQ ID NO: 47905 - DNA, 122 bp, Homo sapiens
aatgtatttaaatggacgaattcattacgcggggccgtgtgaatggggcgaggccgcgagcgcggcgcgatcagtagcgcccactaacagttcgttctgcacggcggagcgcgagaccgcgg

SEQ ID NO: 47906 - DNA, 122 bp, Homo sapiens
cgacccgttgccaaggcgactggaaccgcggcccgaggtaactggagggcacggcgggggcggggcgctcatcccaggcggcttctgattggcctcggccgcctcgtgcgtcacagccccgc

SEQ ID NO: 47907 - DNA, 122 bp, Homo sapiens
gctggcgttggactacaagtcccggcaggctgcgcgagagggggccggggctcgcatgcgcgccgcgaggctctctgggacccctagtcctgctcccgaaaggtttggactgcgtctcccgg

SEQ ID NO: 47908 - DNA, 122 bp, Homo sapiens
ctgcagtgacagctgaaggccttgactccgcctgcaggttcgaggacagccggctggatgcgtgcgtctatgagctgcatgtctggctgctggcggccgaccgccgcacggtcattgctcag

SEQ ID NO: 47909 - DNA, 122 bp, Homo sapiens
gcaaaccacagccaacgtccaggccccgcctttcactcgaagctcagcccttgttctggccggggaatctggtgcatcctgctgtgtccagggcccttgctatggtccctggagtggtctca

SEQ ID NO: 47910 - DNA, 122 bp, Homo sapiens
ccgttgcatgactcctccaggtcttggagtaggtcattgggtggatcctctatttccttacgtgggccactggatggctcctccatgtcttggagtagatcagtgggcagctcttccatttc

SEQ ID NO: 47911 - DNA, 122 bp, Homo sapiens
cccggcgcccgcacgcgggggactgggcgggggctggagagcctaggtcgccactgccggcgccccagtgcaggagagggcactgagtgtgagaatcacacacggctggagtgggaaggggc

SEQ ID NO: 47912 - DNA, 122 bp, Homo sapiens
agtccctggaaccggcctattacgactgccggttccctcagagcgtgggcaggagccatgcgctggtgtacgggcccggcggctcggcgcccggcttccagcacgcttcgcaccacgttcaa

SEQ ID NO: 47913 - DNA, 122 bp, Homo sapiens
gcgaggtggagtgagcgccccgccaggcatccgtggctgttagggactgccctcccacctcggggagcctggccatgaccttgcgttcatttctgccacaatccctttaccacgtgccgggc

SEQ ID NO: 47914 - DNA, 122 bp, Homo sapiens
tggaagaccgcatttgagcatttgatgcagaaaaaacacactcccggttaccagcaagatcgctgtggggaatgaggcactcgagaaaatctacatttggctctgaattttctcaacttctt

SEQ ID NO: 47915 - DNA, 122 bp, Homo sapiens
cgcgcccggccctccatcagttatgcagccctcagccggctgctggcgttcccggatgtgcggtggcggtgctacttcccggctgcagcctctccggcctccgccctctcggctctagcagg

SEQ ID NO: 47916 - DNA, 122 bp, Homo sapiens
cagtatcacgtgcacctggaagtacgtgggtgggacctaaagcgcccacggaagtgacgtcggtcgccccgagtcgcatgatgtggcaaaatgaaaaaaaaaaagtggggggagaaagagaa

SEQ ID NO: 47917 - DNA, 122 bp, Homo sapiens
ctatgcggtgctggtgagtggtcctccgggcagagcagaaggaatgagatacctcagagccggtgtgacacgttctcaggatacggctgcagggagtttcagtccgaccctttcattcctta

SEQ ID NO: 47918 - DNA, 122 bp, Homo sapiens
tatcatcctacagatgagcaaactgaggcactggtaacttgcccaaggtcacacctagaacgtgatgcagctggaatgtatgcaggctctccggccccagagtacatgtccttcaccattac

SEQ ID NO: 47919 - DNA, 122 bp, Homo sapiens
caggaacaaagagaaaacaagccaaccagcatatattcagcacatcacaacgagttgtcccggtagacatttcattcaccaggaccagatgctgaccttggaaaagtcaggtttacccagtc

SEQ ID NO: 47920 - DNA, 122 bp, Homo sapiens
agcaacaacgtagaggatggattgatgagaagatagagccaggaggccaggtgggaacggcggccctgtccatgtgatgtaagaagggcatggcctatgactattgctggagttggagaaag

SEQ ID NO: 47921 - DNA, 122 bp, Homo sapiens
tcaccagggtcaactcaggccgagtggagccgctcaacacggctgcacccagcccacaagcgctagaagccaggcacgcagtgtttgagcatctccgtgacaaaggaatcagccgtgtcact

SEQ ID NO: 47922 - DNA, 122 bp, Homo sapiens
ggcgcacgcgctcagagggagccgggccgccgtcgctgccgccgctgtccccgcgccctgcgcccggtggccccccacctccgccccgcggccgtacctggcgccccctggctcccccggcc

SEQ ID NO: 47923 - DNA, 122 bp, Homo sapiens
ctagctgccctggaagatcacctgtctgatagcttgcaatctgaggtgtgtgtgcgcgcccgcgtgagagagagggagcggaacgtgcctgagcatggggggaattgggccatgccccagga

SEQ ID NO: 47924 - DNA, 122 bp, Homo sapiens
cagctggaggttctcagctaaccacattccttgaagctgggttgctaagtcctttcttggcgagagatctgagtgctgtaactctgggtctgccagaaatatctctgaggattccaagcagg

SEQ ID NO: 47925 - DNA, 122 bp, Homo sapiens
gacccctccacgtgtacactactgacaaacgggtggagtgctggggagaagtcactgtgccgcccacctagtaaaccttctgtctgtgctcatggcatctccaagatggggcactgctgtgt

SEQ ID NO: 47926 - DNA, 122 bp, Homo sapiens
tccagagcaacaggagtatgctcctgggagatctgtctcagggactccacagccttgtcacgaacaacagtctcttccacagttgccagattttccaaaggaggctgaatggattaaaaagg

SEQ ID NO: 47927 - DNA, 122 bp, Homo sapiens
agcggtgggcgggcagtggcctgccgggtggcctgcggagatcacaggggctccagcccacgcttgggggtcagcctgtatggtctaaacagctggcaaccttgagactctgcaagtaggag

SEQ ID NO: 47928 - DNA, 122 bp, Homo sapiens
ctggaaaatcgggtcactcccacccaaatactgcgcttttccgatggacttaaaaaacggcgcaccacgagattatatcctgcaccgggctcggagggtcctacgcccacggagtctcactg

SEQ ID NO: 47929 - DNA, 122 bp, Homo sapiens
cacgacccttctcacctcttccctaacattcctagcattcatgttacaagcaagggccaccgcgccccctgcttgagcatgttagccgggcggtagggacggagacagttctctcatgacgt

SEQ ID NO: 47930 - DNA, 122 bp, Homo sapiens
tactggagtgagtggcccccctaacttaatgacgggtgtccttatgaaaacggccacatgcggctgggtgtggtggctcatgcctgtaacaccagcactttgggaggttgaggtgggtggat

SEQ ID NO: 47931 - DNA, 122 bp, Homo sapiens
ccagccgcgccgctcacgccccaacttgggcccgcgccccccagcccccgcccaggcccgcgccccccagcccccgcccaggcaggcgcctgcgcccaggtgagggccccgcccgccgccgc

SEQ ID NO: 47932 - DNA, 122 bp, Homo sapiens
aaaacagaaatagtttctttgatgagttggaaagagaaggaaataaaagtctaaggtaagcgccagtttcaccctcaattcttaggcttcagaaaagcctaattaggcagggaaaggaatct

SEQ ID NO: 47933 - DNA, 122 bp, Homo sapiens
gattatcaatcactagataacgctcaccgtgagtgctgttgggagacaccgctcagtctgcggaggacggcagagccagtttgctctggcttggcctgaagaagacgctgagagtcgtcgaa

SEQ ID NO: 47934 - DNA, 122 bp, Homo sapiens
ggcgctttggaggaggcggcatcggcgctcgcccaggggaatgaggtgtgaaccccaccgcgggcattttccacctgggtaacctcaggccagttccttaacatccctgggcttccgcgtcc

SEQ ID NO: 47935 - DNA, 122 bp, Homo sapiens
gcaggccggctgtgagacacaaaagagatacccttgacagctccgcatgcacagatgtaacgctgcgccccttggcgggcgggggccctgctcggcagatggcgagaagccgaattggtgag

SEQ ID NO: 47936 - DNA, 122 bp, Homo sapiens
cctcactcccaccagttcccccggacacggaagatgttcgacaagggcccagagcaggtacgggagcccggctgcctggtgatctggacactgagagcgttgcttctcagatgggggctcat

SEQ ID NO: 47937 - DNA, 122 bp, Homo sapiens
cccctgaacctgctgccctagcctcctagactaagcaggcctgagaggttgggggagatgcgctctagagagactgggggagcagccactgagacctttccacacatacacactgtgctggg

SEQ ID NO: 47938 - DNA, 122 bp, Homo sapiens
gggtcccgcgggaggggaggccctggcggcctgaagagggctggctcgagctctttaacccggggcggatgtcgcgtcccgcgcagggagccccggcggccgggcgcgcggtttaaatgccc

SEQ ID NO: 47939 - DNA, 122 bp, Homo sapiens
cccagacctgaggggcagtaggcccagctactcctgattagtccagaggccatatgcctacgtgttttgtttggctaacaggatgttttataaacttaaatcaagtttatgaactttttcta

SEQ ID NO: 47940 - DNA, 122 bp, Homo sapiens
gggccgcggtcggggtgggggggcgggtgggcggggcactcacctgctccagccagggcacgatgcagccgtcgtggaacaggtggttgcagggcagctgccgcacacgctcacccagcgcg

SEQ ID NO: 47941 - DNA, 122 bp, Homo sapiens
atatatgagagttgtgttggctttccatatttgcttaaagtgggaaaatggattgtgtggcgatttggataactcctgaaaccaatgtgctcagccaaatgtaaatgtggggttgcaacact

SEQ ID NO: 47942 - DNA, 122 bp, Homo sapiens
ttcaacgagcattacaaagccagggagcccaggctccgcgtgtctctgggtaccagggggcggcgcagctcccacacgtgaagctcgcggtcctcccagggagctgcgggtgatgttcgttg

SEQ ID NO: 47943 - DNA, 122 bp, Homo sapiens
ctccggtctgtgcacgtgtcccccgctggagtgagtgttggctgagctcgggtctgtgtgcgcgcccccggctggagtgagtgtttgctgagctcgggtctgtgcacgtgtccccggctgga

SEQ ID NO: 47944 - DNA, 122 bp, Homo sapiens
aatatcagtcgttttatcttaaagcttgtcctgggtttaacaaagtttaactcacatccacgcgttgtctctccaaacacagcaggcagaaattctcctttgattggattaagatagataaa

SEQ ID NO: 47945 - DNA, 122 bp, Homo sapiens
caatgtttgcaaatcaataaggagaaagcctgaacaatgcgatgacgttggccaggaacccggcccgagtcacccaggaggcggctctgcagtttctcaggtacagcctatccattctctaa

SEQ ID NO: 47946 - DNA, 122 bp, Homo sapiens
tctgcccccacacaccgtcctatctgacttcatttacaaaacacaagagtcagataaaaacgataagataagcaaattcacagcagtgacagcagagtgttaaaacaagcacagggcctctt

SEQ ID NO: 47947 - DNA, 122 bp, Homo sapiens
aatcaagcccctcaagaagtacctgctgctgggcaacgcggaggactctccggaccagagcggcatcgtggccgataaaagcagcctggtgatccagtggcgggacacgtgggcgcggcggc

SEQ ID NO: 47948 - DNA, 122 bp, Homo sapiens
acagtgtctgggcctgctgaggccggggaccctcacatctgtctcagggcccagcgcctccggtccacagcagcccctgtccagccacgtgtgtgagcccaggtcctcctgcatagacacga

SEQ ID NO: 47949 - DNA, 122 bp, Homo sapiens
gaactacaggcacacacctccatgcccagctaattttttttccttttgtggacacagggtcgagctatgttgcctaggctggtcttgaactcctagcctcaagtgatcctgcagccttggcc

SEQ ID NO: 47950 - DNA, 122 bp, Homo sapiens
tcggtgagtctgaacactggctcgcctggaaggttggagccaccctgccaatcaagcagccgtgctatttcgcgccctcgactagaggggccagaattaattttaaaagcttttctttgttg

SEQ ID NO: 47951 - DNA, 122 bp, Homo sapiens
caaactcccccatgtgggaggactttggaagggaccacatcctctggcagacacagacatcgctggagctgtgaggtccaggaacatcctgagacaggatgtggaggttttgctgatcatgg

SEQ ID NO: 47952 - DNA, 122 bp, Homo sapiens
aatgttagcttaaaggtagtaggttgtgtggttgaaggaaatgtcagtaacaacaggaaccggcatttgcagcacttggtaacaccagactggcatacacatgtgcaacttttaaacctcct

SEQ ID NO: 47953 - DNA, 122 bp, Homo sapiens
caggatttgtctggcagtaacgtctgtcccaaagggcgacacaatcctgaggcagctgttcgcaaactcgaggcctcaatctttgacggaagcggttttcagagaaaagaagttcgaggcac

SEQ ID NO: 47954 - DNA, 122 bp, Homo sapiens
actactgggcggggctcggcgcgggggcggggcctggcgggagtagtctcggggtcggggcggggcccggcgggcggggctcggctaagcacagtcttggcgcagcggcggggcctggtggg

SEQ ID NO: 47955 - DNA, 122 bp, Homo sapiens
tcattcccaaggatgctggtttctctctgggggaagagctgctctgtgatggagcccatgcgtgtcatctgagcctctggcttccctgccagtgcagccctggcagtgtcctacttcccagg

SEQ ID NO: 47956 - DNA, 122 bp, Homo sapiens
ggtcctcccacagacctggagccggcggagagcagccttcgggaagtcctgcaggagccgcgttccaggagggcagctggcagccgccccaggcccccgggccgcctgcaggtgattaggct

SEQ ID NO: 47957 - DNA, 122 bp, Homo sapiens
cttcctcctccagcccttactgtctgctcaggggcttcctcttggccccggatgtgggaccggagggttgggggcccagggacttattagccaagccaggaagccccaccccaagaggcctc

SEQ ID NO: 47958 - DNA, 122 bp, Homo sapiens
ggcattgtttgaagtaaatctgtaaccagatgcccagctctggattgcgaaaggggggcccgggcagaggtaatgtattaactctcactaggacagtaaaagccacccaagcctctgccaca

SEQ ID NO: 47959 - DNA, 122 bp, Homo sapiens
ccgggggaggaacagaggcgcccattgagcggccgctgcgcagggcggtgcccacagccccggatgcctcggccaggacttggctcccccggctgcctctgctccagtctcagcgcgggcca

SEQ ID NO: 47960 - DNA, 122 bp, Homo sapiens
tcaaagccttttctcagctgatcttggagaaaggcgacactcttgtccccgtcatcttttcgagctgtgctggatgcagggaagcgtatggagagctgggcgctggatgcagggaagcgtgt

SEQ ID NO: 47961 - DNA, 122 bp, Homo sapiens
actgtgaagccacctcaaatgttctacgtggaggcgcagttggcgttatggagtaggtcacgtgaatacatcacattcagcgatatgcactgtccaaacaaagagcagggaacaacaattca

SEQ ID NO: 47962 - DNA, 122 bp, Homo sapiens
gaacagttactgcttctgtgggattcaagctgaaaacagagcccacgctgcacagcaccgcgcctcctccggcaaaagcgatgttcaggcgctctgcgagcagcacccgtggggagctcagt

SEQ ID NO: 47963 - DNA, 122 bp, Homo sapiens
gttcatgtagagtgccctacagtagtccagcacctgttttcaagttggaaattctcatttcgagaattgagagctcagagcatgatcttttggtatcagacagacccatgcacttgatgctt

SEQ ID NO: 47964 - DNA, 122 bp, Homo sapiens
tttcacggccagatgcagacagggacacagacgcagcagcacccaccacacatgaacgttcgggggtcactgcctcgtcttcatgtcttgggagttgctgtttctgtctttaaatccgagcg

SEQ ID NO: 47965 - DNA, 122 bp, Homo sapiens
cctccgctcccgcgagggtggctgctgctgcagagagggaggggagcagaatgcgggctccggacttgcactggctggtccttgggatctcgaaaagctgctcctgccccggtgcgtcctca

SEQ ID NO: 47966 - DNA, 122 bp, Homo sapiens
aagcaagatgttgttaaatttcagaactgtctttgaattatgcatttctgtttcctcccgcgctgctctttgtcagtatttttacataatgattcttctcgggagcctgaggcttttcttga

SEQ ID NO: 47967 - DNA, 122 bp, Homo sapiens
gtgagagcattagagtaaactgccagagagcagtaaggtcatgggagttgatgtcaaagacgtgagatgaggatgtttttgatgcactttaacactgaactcacccagactaactgtggtgt

SEQ ID NO: 47968 - DNA, 122 bp, Homo sapiens
atcggtccgcagaagccggggtcttctgggtggttggttgggggtgagctccctgtaccccgatgcccatgtgggggccccaggctttagggaacctgcgaaaaggcctctttctttcctcc

SEQ ID NO: 47969 - DNA, 122 bp, Homo sapiens
agccacctgccaggttatcaggggacttgataacaatgtctgcaaattacaaagagaacccgtgccataaataacaagtcttattaataaaattagttcaagacaagtgccaaaaacaatat

SEQ ID NO: 47970 - DNA, 122 bp, Homo sapiens
acacccatgagcaccttttaaccacgtttctttcctccagcaaaaaggcattgggatgaacgagccgctggtggactgtgagggctacccccggtcagacgtggacctgtaccaagtccgca

SEQ ID NO: 47971 - DNA, 122 bp, Homo sapiens
tgctaggcactttcctaggttctaggtatacagctatgaagccgtctaagaccctgccctcgtggggcctgctttccagtaaggcaaatgaaaagtaaacaaagtcaatgcttgtggtatca

SEQ ID NO: 47972 - DNA, 122 bp, Homo sapiens
actcaaatgcacggtccggtccgtcaacacctcttgtccacgttccctgggctgcacccgcgtgtccagagctgcaaaagccacgggcaacctctgcttttgcagccaggggctcggggagg

SEQ ID NO: 47973 - DNA, 122 bp, Homo sapiens
cgaacgcggaagaaccaagcccacgccccgcgcccgcgcccaccaatggaagcgcccgctcgtcttgatagacgtgccaccttccgccaatggggacgaagggaagctccagcgtgtggccc

SEQ ID NO: 47974 - DNA, 122 bp, Homo sapiens
acaactgcttcctgcttcgtccctctccaaaaactctatgctcatggggccattgccactcgcccttcccagcagtgttctagtggggtatttaataggtaacccagactcccagggagaac

SEQ ID NO: 47975 - DNA, 122 bp, Homo sapiens
aaaaacgtcaatttaatagattccattgtaaagcagagcttccagatttcagtagcatcccgaattaggaaagcacatttcatgtaacttcaatgtcttcagcaagtaaagtcctgctagat

SEQ ID NO: 47976 - DNA, 122 bp, Homo sapiens
cagtgcaaccccacatagcatccaacccgcctccccacccagccactggcagtccgcccccgataatgtcccatacacgctcctggctgtgggcagtgcagcccatgggtagcgcccccaac

SEQ ID NO: 47977 - DNA, 122 bp, Homo sapiens
gttttgctgcttgtttcctaatgcctaaggctgttccaggcacatggcagactctcaaaacgtatttgcagcatgacataatttctgacataattaaagtgcacaaatatctataactacag

SEQ ID NO: 47978 - DNA, 122 bp, Homo sapiens
gctgtccagagtggagtttcttaggacccctgcaagccagccaagtccaaatctctgggccggggcctggagtccgccctcctcgttacctcctctcctctcggggtgactgaagctcgtgg

SEQ ID NO: 47979 - DNA, 122 bp, Homo sapiens
ctcccatctctgtctccctggcccatcccaaacaccagggtgggggctaggccgcgctcccggcatgctggagagacagaggcccattgaggcattgcagcaggcacagagcgcccccttgt

SEQ ID NO: 47980 - DNA, 122 bp, Homo sapiens
cctggtgccgcgtgcaggtcggtgcgcgcttctcccgaggtggaacgggcggcagtcaagcgccggcgttctctgccgtcaccctttccttgccggccggcacttcggctgcagagttttgc

SEQ ID NO: 47981 - DNA, 122 bp, Homo sapiens
gataaagaaatgacacaaccgtctcccctcttgtctccttttgaaagccctcattccacgcgtatgagcttcctacggctgctgtgacaaatgacacaaacttaccagctacaacacaaatg

SEQ ID NO: 47982 - DNA, 122 bp, Homo sapiens
tcaacagccccgcttgccttgaaaaggcgcccttactccgctcagggggcctgtcccgcgcggctggcacaggcgctcacaataacctcctaaagcggtgccagccgcacctccgcgcggcc

SEQ ID NO: 47983 - DNA, 122 bp, Homo sapiens
attagttatttttagagatgggggtcttgttgcgctgcccaggctggtctcaaactcaagcgatacttccaccccagcctcccaagtagctaggattacaggtttacaccactgcacccagc

SEQ ID NO: 47984 - DNA, 122 bp, Homo sapiens
taatatttcataaaaatgtctaaagagtcctattatccaagggtttcactagcaaggtcacgatgggggaaaaggcaaatattcaacaaaaataggttttcagatatgagttaaaaattcag

SEQ ID NO: 47985 - DNA, 122 bp, Homo sapiens
agagggcatcattctggtccacaatctggaggatgtcccccttctggaaaggcaatccagcgtccatgcaggggatgtcgggatcctcctggggccagtactcagtcatggcacggacgtac

SEQ ID NO: 47986 - DNA, 122 bp, Homo sapiens
cccttcatgcggttgtgtaactctccatggcacaaaaacccattgccatgcataaggttccgtgccaaaataaccactttacgccattgcataacactctatggcacaataaccactttaca

SEQ ID NO: 47987 - DNA, 122 bp, Homo sapiens
aactcctgtgacttcctcaaggcggtgcccagcctggccctccctcgcgggggcccaggacgcactccctgcctgtgcctcttaccacgagccgggtgctgtccctccagctcctcctgagc

SEQ ID NO: 47988 - DNA, 122 bp, Homo sapiens
tggacaggttactgtgtcccatggaggggctggggagactaaagcacaggtcagggcctccggatgacctctgtgcagtcccttgcatagttttctgtccatccctgtgatcctttccctta

SEQ ID NO: 47989 - DNA, 122 bp, Homo sapiens
cagaggtgagcagtcccgggaaggggccgagaggcggggccgccaggtcgggcaggtgtgcgctccgccccgccgcgcgcacagagcgctagtccttcggcgagcgagcaccttcgacgcgg

SEQ ID NO: 47990 - DNA, 122 bp, Homo sapiens
accgccccccgtttccctttgtttcattgacttttgtgaatggaaccccagggctgggcacgcccgccaatccggagagtcgtccggcctggccggggggcggagtttcccagccgcggggg

SEQ ID NO: 47991 - DNA, 122 bp, Homo sapiens
gcacgccccacctctgccgccgccccgtcccggacccgaaaggagcctgaaggatcccgccgaccacccagccagagagcggttcggctcaggtcgcccattcggagctacaaaactctgga

SEQ ID NO: 47992 - DNA, 122 bp, Homo sapiens
ccccgtgcaaggactgtaggccccactgcaaaccccctcacgtgaggtggctaggctgagcggattgttagggtgcaggccatggtggcaccaggcctcagtctgcaccccccctctctcag

SEQ ID NO: 47993 - DNA, 122 bp, Homo sapiens
cctctcctagtcaaagaaaggggtgacagacggcacctggaaaatcgggtcactcccacccgaatactgcgcttttccgacaggctaaaaaaacggtgcaccaggagattatatcccacacc

SEQ ID NO: 47994 - DNA, 122 bp, Homo sapiens
cacagacctgctcggatgcggaggggccgggtgggctgcgctccttcccaggggtgacctcgcgtagggggcgccgcctgcaggggttccgcctgtgaactcgctgcggcttggccctggcc

SEQ ID NO: 47995 - DNA, 122 bp, Homo sapiens
cccaggcggttcccttgctggccgtggaagacatctggcggacacctggctgcagaggctcgacttggagtccagctggggctcaactaggctcgctggagggcaggggaccctggaaagaa

SEQ ID NO: 47996 - DNA, 122 bp, Homo sapiens
ctcttccgccctcaggagcccctgagtgctgggaagaggccggaaacccgaggagtgtaccgggaacccaagggggcctccaacattgccattgcctgtgcccccattagcacccctggacg

SEQ ID NO: 47997 - DNA, 122 bp, Homo sapiens
tctgggcccacacgcagactccttagagcatagtatgctctaaacataccctggggaaggcggtgctgggtgcatgtgcatgggcccagagttagctccttggataaacagaaggcatttag

SEQ ID NO: 47998 - DNA, 122 bp, Homo sapiens
tggagaacgtctcctttgtgacgtggagactgagaagggtgcgtgaatgtgttgtgtgaccgggacatagcgtgagtgtcctttgaaagcgtgctttgctataactctgtggtgtcactgac

SEQ ID NO: 47999 - DNA, 122 bp, Homo sapiens
acagaatcccaagaggggagcagaacagcgagcgtcctaatttcagtgggaccttgggaacgcgatggtgagggaggttgatgaggctgaaagagctgctgcagggtttccagagcatctca

SEQ ID NO: 48000 - DNA, 122 bp, Homo sapiens
ggacacacggggcggggactgggcgggcacgggcagggtggcagtaccttggcctcccgccgccggctctcctcgtcctcctcgtgctccaccacgccctggctcaggttggtgtagttggc

SEQ ID NO: 48001 - DNA, 122 bp, Homo sapiens
atccatcctcccaagggtgcccgagaacactccatcgtcgcggaatgcccgcgcttctttcgttaaagctgtctttgagtttgcctcctctggtggtaaaagttaattccacaagtattgac

SEQ ID NO: 48002 - DNA, 122 bp, Homo sapiens
aaccccggcgtcccggagctgaggcgcacgtggctatgcttggggaggagagggcggggccggggaggaggcgcttgcaagtctgtaccgcaatgcctctactggcctctagagggcgcaat

SEQ ID NO: 48003 - DNA, 122 bp, Homo sapiens
tcaacacctgagctcaggcaagcctactgcctacgcctactgagtggcagggactacaggcgtgcaccaccacacttggctgattttttatttttttgtagagatgtggtcttgttatgttg

SEQ ID NO: 48004 - DNA, 122 bp, Homo sapiens
gactgaatgtaacaacttacacatgttgcttctggctggattctctgccctttgcccgaacgctgaggattctgctagctgttccgccctgagttaattatagctataaaatttcgcgacca

SEQ ID NO: 48005 - DNA, 122 bp, Homo sapiens
ccccgccctttttccagagccttccacggccccgcccccccagcccctatcccgggctcacgcctttgtccgcagcccccgccgctccggggtgtcccctgtggcccgaagggtggtcccgc

SEQ ID NO: 48006 - DNA, 122 bp, Homo sapiens
aaagtgctggaattacaagcatgcctaggtgcctggccaggtagaaacattagtcactcgcgctccaggaaggttgtcaggcagcgctgagcagtaatgtgtcctactcacctgctgtttat

SEQ ID NO: 48007 - DNA, 122 bp, Homo sapiens
ctcctgaccttgtgatccgcctgccttggcctcccaggctgatagctttttctactccttcgtggcatagctggtttcattaattcctaggaaagggcttcagaaaataagtagggaagaga

SEQ ID NO: 48008 - DNA, 122 bp, Homo sapiens
aattttatcaaagtctccagagactctccagctgtaaatacaaaagatatctgctatattcggatcagagtagagcgaaattatacatggacaagagcctgctccaaatgccattttacaca

SEQ ID NO: 48009 - DNA, 122 bp, Homo sapiens
ccatctgtgcctgtgtgcatcgtctgctgtgtgtgtgttgtctgctgtgcatgcatgcgccgtctgctgtgcgtgcatgtgttgtctgttgtgcatgtgtcatctgctgtgcatgcatgcat

SEQ ID NO: 48010 - DNA, 122 bp, Homo sapiens
gcgtggctgagaatcttgaatcacccaatagcgaggtgtgccaaggcgctgtgcaaataacgtgccttttattgggcactggctctctttgagcccggagtcccgcccccgccctctctcga

SEQ ID NO: 48011 - DNA, 122 bp, Homo sapiens
acaccgcccctacagcagccctggcggaccccgcgcagccgtgcagcgatccaccagcttcggggtccccaacgccaacagcatcaagcagatgctgctggactggtgtcgagccaagactc

SEQ ID NO: 48012 - DNA, 122 bp, Homo sapiens
caggggtgaactataaactgcctggagcgatatcccctgtatactgtttcaatcaaactacggataaatattggacggcagtaacttactgctgggataatgacactataatccaggaataa

SEQ ID NO: 48013 - DNA, 122 bp, Homo sapiens
ttaggagatggaactcaagcattaactcaccagacaccagtgagaccagctacactccagcgggagcaagtccgaagacaacaggccaggagctctgcttaggagccacctagggcgtaaac

SEQ ID NO: 48014 - DNA, 122 bp, Homo sapiens
gactttgatgggtgagcagcagctttcggtatagaagaaatgctttgagttgaggaagtccgggaaagcttcttggagaaggagacacatttctattgagagatgagtaagagtttgccggg

SEQ ID NO: 48015 - DNA, 122 bp, Homo sapiens
aaaagagaagtaaatttacaccaggagatattaactgtcctgcttaaggttgtttggccccgaagcaaatgagctctgccttcaaaccaggtctgattcattccacagcaccacgtcatgtt

SEQ ID NO: 48016 - DNA, 122 bp, Homo sapiens
gagacccacttggccggacccagcgccgtgtttgtactttgctcttctcggtatgttttccgtcatgaccgccgtgtggagcttccataggagctgcaggatacagaaccttgcccacccca

SEQ ID NO: 48017 - DNA, 122 bp, Homo sapiens
gacgatgtgtacttttctcccggaactgtagttctattgccccaacctgggctcaggtagcggccagtaaactaggagacagccctaaggctcgcgtccgggccaggcgggtacccctagta

SEQ ID NO: 48018 - DNA, 122 bp, Homo sapiens
tcatccccgcagctgcccggctctcgtggaggagacggcgctgaacgacgtctacacgggcgtctggggagggccctactgtccggctgccaccgcccgaaggcacaaccacagcggccagg

SEQ ID NO: 48019 - DNA, 122 bp, Homo sapiens
gcagccagttcatgagggctccaatttctccacctccttagcaacactgattttctgtatcgttgttatgaaagccttactagtggatgcaaagtggcatctcatttgggttttgtcttgca

SEQ ID NO: 48020 - DNA, 122 bp, Homo sapiens
atggcaagggcagctcgtgggcgaaatggatccacccgaccccagaaatgatccccgatacgtggctctgcatagaccacgacagagtccagtcaaagacaacccgtgggtgtgggtgtttg

SEQ ID NO: 48021 - DNA, 122 bp, Homo sapiens
ctcgccatccaccactactgttagctgccgtcgcagacccgctgctgactcccatccctccggatccagcagggagtcagctgtgctcctgatctggcgaggcacccattgcagctcctgat

SEQ ID NO: 48022 - DNA, 122 bp, Homo sapiens
tgcagatttaactttcgcctctgcctctgtgtgcctctgggctgtaagctttagtttgcacggttaacggggatggcctctcccatggtcggttggagtgtgttgcacagcgtctggtccag

SEQ ID NO: 48023 - DNA, 122 bp, Homo sapiens
tcaggacccctaaagacccaggtgattctacacagggcactgtgtaggtgccatccaggccgtcccagggcccgtgccgctccccccgggctgaaccagggtactcacacggaattgaagag

SEQ ID NO: 48024 - DNA, 122 bp, Homo sapiens
gattgtggttgaactgttcggggacaggagctgccggggagccacgattgaaagaagactcgcccgctgcccttcctccatgacaatgcgctggaaaatctccgcggatgtggaggccgtgt

SEQ ID NO: 48025 - DNA, 122 bp, Homo sapiens
gatattgtccttcctaagctattggaaacaaaggttctgttgggtcactacagtctgcagcgcaccgattttccctgtggggagcgctgtgccaaatgaagctggtcccagcaagccttgcc

SEQ ID NO: 48026 - DNA, 122 bp, Homo sapiens
ctgccccctcccgcggccgcatccctagtcagtccctgagaccgtccagagttcagtccccgggatcaggcttgcagtgttgggccgccctccttgccagatgccgccctggagagggcaag

SEQ ID NO: 48027 - DNA, 122 bp, Homo sapiens
tcgcggtgagcgttacaattcttaaaggtggcgtgtcgagagtttgttccttctgatgatcggatgtgtccggagtttcttccttctggtggagttcgtggtctcgctggctcaggagtgaa

SEQ ID NO: 48028 - DNA, 122 bp, Homo sapiens
ccgacgggacgaaaccgtcctccccgggactgcccttgtccgaccgcgccgccaccgcagcgccaccgccgccgtcagcgcccgagctcatttcgctccacgtcctggacggccgttggggc

SEQ ID NO: 48029 - DNA, 122 bp, Homo sapiens
ggaccccatctccgtctctcccaatccattagaacatgcatttccagcatctgtggggtgcgcagatgaggggacgcacctccaagttgtcctcaggagattcccaattgttcgtggatgtc

SEQ ID NO: 48030 - DNA, 122 bp, Homo sapiens
gaagaggaccttgaggaaggcatgggtgccacctgtccactgcacacacagcccttctaacgaacacggaccctcacggggcccggcggggctcagacaccgattctaacacagaccctcac

SEQ ID NO: 48031 - DNA, 122 bp, Homo sapiens
aataaagacggtttaaatctgagctgggcttgttttgagacggaggtcgggggcccccagcgtctctagactggggtggagccgggaagggtcgtgcgtgagtgggggacagtgtgtctcgc

SEQ ID NO: 48032 - DNA, 122 bp, Homo sapiens
gggcagaggctaagaccttttaaataggccagttttaaaggtgagtcaatcaggtccctccggtcctggagttactttctcttaggttaactgtgcaagatgacacaaaggcattttatatg

SEQ ID NO: 48033 - DNA, 122 bp, Homo sapiens
ttgaagatggtcaagatgtcctgcttgctggggtcccccatcgtcagctgtgagccgcggcgcagctggcccagccaaccggtaagagtcgacgaaaagcggctaccgcctcagcaggagcg

SEQ ID NO: 48034 - DNA, 122 bp, Homo sapiens
tatttgatgctccctgccctccttcaagccacctgcttccatacctgcctgtgcaggtagcggtgctcatattggggaaggggcttcccatccaacagcagctgtcccccggtgggctggta

SEQ ID NO: 48035 - DNA, 122 bp, Homo sapiens
tttcagcgttaatttaaccaggacagttgctgttttaaaagggtttgctagccagcctgccggatctgacagaaagagtagctgcctcccctggtgtgatttaaagggcagtaaaagttcag

SEQ ID NO: 48036 - DNA, 122 bp, Homo sapiens
caggctggagtgcggtggcacaatctcagctcactgcaacctctgccacctgggttcaagcgattctcatgcctcaacctcccaggtagctggaattacatgggtgccaccacacccagcta

SEQ ID NO: 48037 - DNA, 122 bp, Homo sapiens
gccaaatgagtccaacgctgaacatttagtgtacttgacgatcgttgagttcattgaagacgtttcagctcgtacaggagtccagttgcccattcttggggggccccagtcggtaaaactct

SEQ ID NO: 48038 - DNA, 122 bp, Homo sapiens
ggcacccgtctccacctccccagcagctgttccctgtcatgtcggtgcatttacaatgagcgccagtcgcctgtctccaggtggtcagaggttgaaatcccttttgaaaagttctttaaaaa

SEQ ID NO: 48039 - DNA, 122 bp, Homo sapiens
gcacctgtcctgtggatcgatgatgactactggtggcgtatgagtcatctacagtgaatacgtctctggaactctgaggtctgtcacaaaagaaatctagcccattttctatgtttgataca

SEQ ID NO: 48040 - DNA, 122 bp, Homo sapiens
tatgaggagtttcttgctgcttttgaaggaagtgatggtaataaagtgaaaacatttgtgcgagggggtgttgttaatgcagctaaaggtaagtttataaagtataactgctaataaagcat

SEQ ID NO: 48041 - DNA, 122 bp, Homo sapiens
ttccccctttgccctctctctcctgctctgccatgtgaagatgtgcttgcttccccttcacgttctgccatgattgtatgtttcctgtggcttccccagccatgcttcctgtatagcctgca

SEQ ID NO: 48042 - DNA, 122 bp, Homo sapiens
ctcatcccataatcagccataccaccttggccaggctgagcttacatttgccttctaatccggggccgctggtcacccacagtctttggcccacgtgctgagggcgcggcagatcctgacgg

SEQ ID NO: 48043 - DNA, 122 bp, Homo sapiens
tttggcctgtgacccatcatacgaggtcatgtgtggaattttccacttgtgataccatgccggagcttaaaagttttcaaactttggagcattttgaattttggattagggctgctcaatct

SEQ ID NO: 48044 - DNA, 122 bp, Homo sapiens
acaggccccagccagcagctggaaggggtgggagccacccacgctcttcccaggtctcctcgccccaaagccccgcaggggggctccctccagaaccagatcctctccctctctcttcgagg

SEQ ID NO: 48045 - DNA, 122 bp, Homo sapiens
ccaggagtctcggctcagcccagcacatgctgccctcttcttcagatcagggcatcaggccgttcagtttaaataaaagactccaagacactgaaggcagctttggagaaacctgacaaggg

SEQ ID NO: 48046 - DNA, 122 bp, Homo sapiens
tatccaaatggcggttactctagaagacataagtgaaaggtccttctcagcagctcaaaacggctaccagtaaccgggtcttttttattttttaattaagcttaaatggcatttgcttaatc

SEQ ID NO: 48047 - DNA, 122 bp, Homo sapiens
cgccccgccctcaccaacaactcggaggggcccagcaggtccaaggtgagtgactgcatgcgcgaaaagcgcacgcccagttcgcggtggacgcccgagcactggatgcaggtgagcacgcc

SEQ ID NO: 48048 - DNA, 122 bp, Homo sapiens
ttgacgattagaactctcgaaagtctcaagacagagacttaggccattcggcaagacaggcgggagcctcagctgctgcagacccagcctcagaagcagcaaccgggagacctctggctcta

SEQ ID NO: 48049 - DNA, 122 bp, Homo sapiens
aataggcattgccgtgactctcgtagagtgactgtccccagtggctctcagacgaagaggcgagaaagacaagtgaatggcaatcctaaatatgccaagaggtgcaatgtggtgtgtgctac

SEQ ID NO: 48050 - DNA, 122 bp, Homo sapiens
tgtccgtctgtgttctagctcgccagacttaaacagtggactagcaaggcgggaggagcacgtgtttggagtgtggccccacgtccccgcccccttctgcgtccccgcccccttccgcgtcc

SEQ ID NO: 48051 - DNA, 122 bp, Homo sapiens
aagactagtgattttgttgttctgatgtactacgacaacaagtcacagccggcctcatagcgcagactcccttcgaccttcgccttcaatgggctggccagtgggggagaaccggggaggtc

SEQ ID NO: 48052 - DNA, 122 bp, Homo sapiens
ccagtccggactcaccgcccgccggagctgccccggagccgccgctcggaacatggtctccgcttccgccgcaacctcggccttacagcagccccgtgcccggccaactggcgccgcctcag

SEQ ID NO: 48053 - DNA, 122 bp, Homo sapiens
cgggtgagggctctctcccagctgggtagtgcggtagaggtgaatgaagacattccaccccgtcggtacttccgctctggagttgagattatccgaatggcatccatttactctgaggaagg

SEQ ID NO: 48054 - DNA, 122 bp, Homo sapiens
aatttcaggagcatgtaacttcatttataatgacaatgtttttgaaaaaataaattaaaccgacagtttcatttgtaggattgactttaataacacgcctctactgaacaaatggcgattaa

SEQ ID NO: 48055 - DNA, 122 bp, Homo sapiens
ttgtctcggtcccaagttccgtggttcgctggtgcgggcgctgcagtgtcagggcgctggcgaggctccgcgtgccgcgatgcaaagaaatacatcaataaaaacagaagcagagtgggggt

SEQ ID NO: 48056 - DNA, 122 bp, Homo sapiens
ggactatatagctaattgtgtgttttatgggatgtcttaatgaggaaaagcaccacatctcgtcatcatgtcacttctgttgtgtcttgttaaagtgacctcattcacaaagcaaatgctga

SEQ ID NO: 48057 - DNA, 122 bp, Homo sapiens
ctgtgattgccttgctccggacccctatgtctccagcaccaagagtgtcagggtagacgacggtgtggagctcagtggaggcggataagggggctgtagtcattttgaaaccttacggtatt

SEQ ID NO: 48058 - DNA, 122 bp, Homo sapiens
ccttcctaccagaggcaaccaaggcctttccaggcaacagcagacattatttaccccttgcgaattgattccacaatggaagactcttgggtccaaggagctgtaagataattaaggagaaa

SEQ ID NO: 48059 - DNA, 122 bp, Homo sapiens
acagccaaagccccatccccagagcaggttaaatgtcactgtacagccatgtgcggtggccgggtccgggtgctctggctgtgatgttgcgtgccccgcctgtgtgtgtgcgtgagcgtggg

SEQ ID NO: 48060 - DNA, 122 bp, Homo sapiens
ataattaaaaatgggtataaataagagtgtagaactggctctaagctgctactctgggcacgctgcctatggggtagccctgctctgcaaggatcagtactgcctctgtggctgcctacact

SEQ ID NO: 48061 - DNA, 122 bp, Homo sapiens
cctataaataagttcccccattcacatgtgtttcctttagactagtcaatccacaacccccgtggaaaagactaagggataaaaggtcatgaaccttaagagaggcacaatccaacaggttc

SEQ ID NO: 48062 - DNA, 122 bp, Homo sapiens
gaaggcgctgccttgaccttaggcatccacaggatggatgccaggaccctggggtggggacgtcttctagggacaatggactcgtgctttgtcctgggggccccctggagccccggccaggt

SEQ ID NO: 48063 - DNA, 122 bp, Homo sapiens
gatgagggttaaccagtatgccatttttatgcaagtcagtacaggtttctcagtaaagtacgggcaaatagaaatgtaatttatgaatatttcatcattctttgtcatataggccagccaga

SEQ ID NO: 48064 - DNA, 122 bp, Homo sapiens
gggagacggcctggggcaagcgtccactgatgcattcttgggttggggtgggcaacaggacgctgtcaaacatacaaatacatttacgctttgagctgggaattccactcataggacttcat

SEQ ID NO: 48065 - DNA, 122 bp, Homo sapiens
gtcagcacctttcagacggccccggcctgcgcatcggtggaaggtgccgtgcgaatgtcacgattcaggtcaagcttccggagctggggagtgcaggtgtgatctagaacagggctcacagc

SEQ ID NO: 48066 - DNA, 122 bp, Homo sapiens
gtggcatgatctcagctcactacaacctccgcctcacaggttcaactgattcccctgcctcggcctaccaagtagctggagctacaggcacttaccaccactcgcggtggattttttgtatt

SEQ ID NO: 48067 - DNA, 122 bp, Homo sapiens
gtgctcggccgggcagcctgggctgctgcactgcgaagctgtccaatggcttgatgaatccgtgccgccgtcgctttgtgtttcaaagataaggatccgcgcttatcggtgggaattacact

SEQ ID NO: 48068 - DNA, 122 bp, Homo sapiens
cccacattcttctttagggatattaaggtctctctcccagatccaaagtcccgcagcagccggccaaggtggcttccagatgaagggggactggcctgtccacatgggagtcaggtgtcatg

SEQ ID NO: 48069 - DNA, 122 bp, Homo sapiens
tcagggggctgaaatcccggtgaggggtcgcaaggccccgcagtggattccagggtttggcgtttggaggggtgaggggcgacccgcagcgcgactcgacggcgccccccaggggccgcccg

SEQ ID NO: 48070 - DNA, 122 bp, Homo sapiens
ctggctgacttttatgtgagcgtgtataacacgggtacacacacacacaacacctctctccggagggtaaaaacaagacaaaaagtgaaacaggccccccgatgccgaagagatgacggcaa

SEQ ID NO: 48071 - DNA, 122 bp, Homo sapiens
tgcaactgaaacagcagcctcacctaaaccaagaaacctccaactctgggttcctagtcacgaactacattaccctagacaaggatttaaacttctctgagcattatttttctcatagcaaa

SEQ ID NO: 48072 - DNA, 122 bp, Homo sapiens
ccgttctatcccgcagtggtttggggagtgcaggtcatcactcccacccgccaaggcggacgccggaccctccattgcgcatgagcgcccactgcggcgccgttgctgcgcatgagtgtgct

SEQ ID NO: 48073 - DNA, 122 bp, Homo sapiens
cagcagcagcagcatgcggggagggttgcatgtccctcagagtcactaagtgtagcgaagcgaagggggcggcttcacgcagcccaaagtcccctgcatctcttgccaccagtctgcgtcgc

SEQ ID NO: 48074 - DNA, 122 bp, Homo sapiens
tagctgcctgaaaacatgacgctcttacgcttgtccttccatcaggaaggtgtccactcacgcccacccatgagggggcttgccgtatgccctggcctttgggcatatttatgtagagttcc

SEQ ID NO: 48075 - DNA, 122 bp, Homo sapiens
caacctcaagcccccactatagatgagaagccaccagtccttagtgagactggatacaggcgctgccactcacttcctggggcagcaaaaagtgcacatgaagcactttgggttctcacggc

SEQ ID NO: 48076 - DNA, 122 bp, Homo sapiens
agtcctctggtagctctggtttccagttaattccttaattacggtatctacctccaattccgcaagcatttcctgagctaaacgctgagttggagataggcaagtgaaagacatgacctgtc

SEQ ID NO: 48077 - DNA, 122 bp, Homo sapiens
gctccgacggagacgcagtgcgcctgcgcaagagccggtgcgtatttgcctgtacctacgcgcgatgccagtacttctggtcagtttccaggagcggcaagtgaggaatatgaaataacctt

SEQ ID NO: 48078 - DNA, 122 bp, Homo sapiens
tgtgtgtgtgtgtgtgtgtgtgtgtgtgtgtgttggagaacaacaaaaccagaaacagttcgtattgcaaatagcaagtggcaccctgcgatcctgtccaggatggaaacctgacctcgagt

SEQ ID NO: 48079 - DNA, 122 bp, Homo sapiens
gccaggtggggctgtcggctgccagcagtgcttatgctttaagtgcggagcgggtggctgcggagccaggcgcggcgcaggatggtggacagcgtgtaccggacccgctccctgggggtggc

SEQ ID NO: 48080 - DNA, 122 bp, Homo sapiens
ggaagatcctgcctccttacaccttggagaacgctgggcgacgactaaagcgccttccgccggcctgtcactccatgtgacacaggagccacgtgagacccagaagagtccagcgactcgcc

SEQ ID NO: 48081 - DNA, 122 bp, Homo sapiens
cacgcctgaaagcctcgcgtgttaaaggaggaagtggctgcggagaccctcgagtctgcacgggcaagaggcacaaacagctgctacccggccccttcagttccaagctggctctttaggac

SEQ ID NO: 48082 - DNA, 122 bp, Homo sapiens
ccccccgccggcttgctcacctcttcctccggctcctcctcctccttctcccgcagccgccgccacagccgccgggagcgtcacttccgctccagcaggcccatctcttccgcattgcgccg

SEQ ID NO: 48083 - DNA, 122 bp, Homo sapiens
agtcccgtgagtgacaggtccaccccctccagtttctaccctctccctccggaaacttggcgctctctcgcaggctgagccggggagtccagtacccctgtcccctcattcttcccttctgg

SEQ ID NO: 48084 - DNA, 122 bp, Homo sapiens
gactagggggcccacgtgtgctgcccctgcccaagagatgtgttccccacctcagtcactcgaaggacagtcactggtcatctatgcatgtccctgagctaaatgctgggaaggtcaaaggt

SEQ ID NO: 48085 - DNA, 122 bp, Homo sapiens
gtgaggggccagcctgtttattcaacatgaccaaactccatgctgctgtctcccctgctccgctccgcctgccaggggctatcagctgagtacatgaccagctcacagcagctctagagccg

SEQ ID NO: 48086 - DNA, 122 bp, Homo sapiens
gttcttaaggaagaacaacaatggtgcctccctcaccaaggactgaatggaagaaattagcgagccatgtaacaaactaagaacagaacctgccctgagcaaagaccctgctagtgtctgtg

SEQ ID NO: 48087 - DNA, 122 bp, Homo sapiens
ccaggagaaaatcatgggaggggttgagtggacactgggtaaggaaccagcagcacctaccggaactgactttggccacacaggacgatgatcggctgctccctggagtgtgtaggggaact

SEQ ID NO: 48088 - DNA, 122 bp, Homo sapiens
tctttgcctttttacttttaaaaatctaattttgacataactgctgtaaccatccagaaacggcattgatgttgcttcacgttgctgatgcttaagcaatgtatattgtgtaatatacaatg

SEQ ID NO: 48089 - DNA, 122 bp, Homo sapiens
ggccggtccggcggggagccgcgcggcggaggactgagctggcgggaagctggttccagacgcgactcctttggcgggagggggaagtaggcggggtaactggcagctcggcctgtaccact

SEQ ID NO: 48090 - DNA, 122 bp, Homo sapiens
ccccggccggtccccggtggccctgagtggctgcggcgcctgagccaggcccggcctggccgctcccagcgccctgcaccgcaggcccagcgctcgccccaccgaaattgccgaacctggtt

SEQ ID NO: 48091 - DNA, 122 bp, Homo sapiens
gcggttggtttctgtgtggaagagcctgccgcttcaggaaagtcttaggatgtgaactcccgccttcacctgcccctgacctgctcgttgtgggtgattcacgccatgggaatggttcttta

SEQ ID NO: 48092 - DNA, 122 bp, Homo sapiens
aagtttggtaacagacttagagcctcacgtaaggagcggacgcaccctgctctggaggcacggcatctgttcccccagctcaggtctcaggtatttcgaggtgatgggatggttcttggtga

SEQ ID NO: 48093 - DNA, 122 bp, Homo sapiens
aaaaattattgtgtgcctgtagaggccaaggaaaaactttccctttgccctccgaagtttcgctgaaaaatcaactcacaaaatgcagattacctggagaaaagataaacaaatgtattaat

SEQ ID NO: 48094 - DNA, 122 bp, Homo sapiens
gaaagatcaccccgctagctgtggcgcggctagacgaggcggaaggtgggcggaaatctgcgaactggggaggagagtgcagaggagcagagggcccaaccggggaagaagaggaagttaca

SEQ ID NO: 48095 - DNA, 122 bp, Homo sapiens
tgaaatgtggctaccatgaatgaggaaagctttgtcatcaaagatggaaacatcgtttcccggccggttctaatctttccaaatcacagtgagtggtcaggtgtctggtggaaagaaaatac

SEQ ID NO: 48096 - DNA, 122 bp, Homo sapiens
aaggcggggcagcccgtggcgggatgggcgcgctgggcggggcctcgggagggtgggcagcgggcggggcgccgtcgtggggtccccggagtatgactgcagctccgacgcttggccgcgca

SEQ ID NO: 48097 - DNA, 122 bp, Homo sapiens
tccccagcagctcctccgtgaactctgcttgggagtcctggcggggtaactggcaggtcacggggaagaatagaccctgcctggaggcccaggcagaggagcatccgtgtggctccgcaatg

SEQ ID NO: 48098 - DNA, 122 bp, Homo sapiens
cttctgggtcctttgcagattttatggcagagaatctagaatctggctcaggggtcagtgcggaggcagctgccagcaatacagatcactcccaggcctcagacaagcccaggaccatattc

SEQ ID NO: 48099 - DNA, 122 bp, Homo sapiens
aaggaccgccctgccccggggagttgctgctggagccggcagcctccccgccctcaaggacgtcttcccagaaccagtccaagtgtttgggagacctgaaggcttttccctgtgaataacaa

SEQ ID NO: 48100 - DNA, 122 bp, Homo sapiens
gctagcgctagctgtgctggggaactgggggagggaggagctcagactccaaaaccatcacggttcccttctgaaatgttcatcgccctgtggttttccacagagccaaagatctcctttag

SEQ ID NO: 48101 - DNA, 122 bp, Homo sapiens
gagcaaagaagcaggcatgctaccttacagccaaattcagcagccagccagccagccatgcgacaggcccaggatgccagggagatgctgacatttgttcaacagctgcttataggccaggc

SEQ ID NO: 48102 - DNA, 122 bp, Homo sapiens
aactgtgcacaggaccgcgctctccgacccctttgtggcctctcccagaggtacgggctgcgccccaagccagcagtctctcgtagggcctacagccggcagccgctggagcaggaggagga

SEQ ID NO: 48103 - DNA, 122 bp, Homo sapiens
ctcgatctcctgaccttgtgatccgcctgccttggcctcctaaagtgctgggattacaggcgtgagccaccgcgcccggccaagtcctagattcttaaatgaaattattagctacatttttg

SEQ ID NO: 48104 - DNA, 122 bp, Homo sapiens
gtgccgccttaagagctgtaacactcaccgcgaaggtctgcagcttcactcctgagccagcgagaccactaacccaccagaaggaagaaactccgaacatcagaaggaacaaactccagacg

SEQ ID NO: 48105 - DNA, 122 bp, Homo sapiens
ttggataatcagaatattaaaaaggcaattgaggttcaaattcagaaaccccaagagggacgatctacagcatgtcaaagacagcaggtattttgtgatgaagagttgctaagtgaaaccaa

SEQ ID NO: 48106 - DNA, 122 bp, Homo sapiens
gctgaggcaaggagactcacttgaacccggcagggggacagggtggaggctgcagtgagtcgagatcacaccacttcactccaacctgggagaaagagcgaaactccgtctcaaaaaaataa

SEQ ID NO: 48107 - DNA, 122 bp, Homo sapiens
catggaaagtaaattgagtctccgtgggggagtgagacagggagtgaggggtgttggacgcggcacgggaacctggccagagtcagcggacccaattggctgctctctctcagatgcagttc

SEQ ID NO: 48108 - DNA, 122 bp, Homo sapiens
ttgaggaacatcagtgttctctaagtatctatttgtgtgaaccagctcgcagaaagtgagcgtttctggtagtcttcaaagaagaaacgggtgctaacttgtaagcagtttaagccaagtga

SEQ ID NO: 48109 - DNA, 122 bp, Homo sapiens
aagtaggttggggcaaatcgtgaagggtctgtacccactcctcccaaatgattgtcatgccgtactggtttgatgaataacagcaactctgagattcttagtatgttctggtttttccttca

SEQ ID NO: 48110 - DNA, 122 bp, Homo sapiens
atataaagctgctaatgttttgtacatttatattatatactcacatacatttttatatatcgtcttaggcagctcctgcttccataatgaagtactgtagactaggtggcttaaacaacaga

SEQ ID NO: 48111 - DNA, 122 bp, Homo sapiens
caaagcagtcgcccgtcctggttctccaggatgcctgggtcagagcatgaataaccaccccgctccccacgcacggagcctcgcagtggctcgagctgagaatcaaagcggccgatccaggg

SEQ ID NO: 48112 - DNA, 122 bp, Homo sapiens
gcctcctggggtgcacgattccctcagctctgggtttaatgtattatatttatttggggccgacagtgccccaataaagggtcagaagtggctgtggctgtgcctgtggggccctgggagtg

SEQ ID NO: 48113 - DNA, 122 bp, Homo sapiens
ccactcagcctctgctgctatttattgctaggcctgaagtttaacagatatttatgggagcgccccgacctgggtgccaacctcacctcctcccttctcttcctccacatagctcgttggtc

SEQ ID NO: 48114 - DNA, 122 bp, Homo sapiens
ggaggcggaagggagatcagccccagctcagccggcggcccttagagacgcgggtccctccgtttggcatcttgcctgctgtccctcacaggctgtggcatcaacaaccttgtcgtcacatc

SEQ ID NO: 48115 - DNA, 122 bp, Homo sapiens
actgccagtactgcagtgggaaaatgagctttcaaaggtacgtttcttttatagagtgtccggtaggaattccctggggacatttatctcatggaaataggagaaggactgactgggtatct

SEQ ID NO: 48116 - DNA, 122 bp, Homo sapiens
agaagttgaaggcttgaaatgaaaccaaaatggacagtggtaacggctgcacattgtgaacgtacttaatgccactgaattgtacacataaaaatagttgaagtgattttaaaaaagtaaca

SEQ ID NO: 48117 - DNA, 122 bp, Homo sapiens
ccagtgacctacaaggaaacctttactgcccacagggaaccagaactgacaattcctctacgggagatgctgcaggtgagagcaggagcaaccagacctgcactgcccctgctgtgggtgcc

SEQ ID NO: 48118 - DNA, 122 bp, Homo sapiens
attacttgtacccatacaagaatgagccatgtacctccttataaagtgcccacgctatcccgcaaactacagacctgcctatggatttcacatggactcattagctactttaattgatgaaa

SEQ ID NO: 48119 - DNA, 122 bp, Homo sapiens
gttctgtagtgagaagaggatcatatttagaaatacaaaaaccaacttaaatcccagcttcgctttttacttgctacaggaccttgggcaaatcccttcttcccaagcctgcatttcctcat

SEQ ID NO: 48120 - DNA, 122 bp, Homo sapiens
tgcctccttaagctgtgtgctctagatgccccacctgcctcacaatagccccagccctgccggtctactgggagaatgacaggctccctgtttcagcaatgatgaatggaaacagtggacat

SEQ ID NO: 48121 - DNA, 122 bp, Homo sapiens
tcccttcccacccgccgcccggagagccccccaggtggggacggccccttgcactgcagacgaggaagccccagctgaggggccgcaggacaagcctcacggctcctggcagtggggacaga

SEQ ID NO: 48122 - DNA, 122 bp, Homo sapiens
cccacttccgacgccttcttctcgggcatcaggcggatcctcagtcgcccttcgccttggcgaatccaccaactgaacagctcgctgagattgaactggagcagccccacagccgcctcccc

SEQ ID NO: 48123 - DNA, 122 bp, Homo sapiens
gcggttcctcggccactctgctcttaaataaggtgatctcatccaggtgcaccagggggacgtcccggatgacgtcggtcaggccctcgtggagcagagggaagatgacgacgtttaacgcg

SEQ ID NO: 48124 - DNA, 122 bp, Homo sapiens
acgcggtctcggcggtggtggcgcgtcgcgccgctgggttttatagggcgccgccgcggccgctcgagccataaaaggcaactttcggaacggcgcacgctgattggccccgcgccgctcac

SEQ ID NO: 48125 - DNA, 122 bp, Homo sapiens
tggcgttacactcatccctgtctgggttacctgcacaaagtcccagggctatagagttgccgcagcaggagagctctgcggtctgactcccctggtctgagcatttttgtgggggtggggtg

SEQ ID NO: 48126 - DNA, 122 bp, Homo sapiens
gatgcagatttagtctcctgtgtcagggactgcatgattctccagtgggaaagtggactgcgggaagacccaccctcaccctctcatactggggagtcactcccagttcccagccactcttg

SEQ ID NO: 48127 - DNA, 122 bp, Homo sapiens
tggtagttgcccctcggggttccgggtgggtgactgacagttgcagcagctctggggaggcgaaggataggcaatgacttggggctcccgtccactcggctttgaggtccccgcggcccgat

SEQ ID NO: 48128 - DNA, 122 bp, Homo sapiens
aggttcccgggccgtggggaggctgcagccggcttccggggagcgctgcaggccgggtgacggcggcggggctgctctggcgtgccacctgtgcgctgtgtgctccaggcagagatggggct

SEQ ID NO: 48129 - DNA, 122 bp, Homo sapiens
ggacttcaggaccgcggcagtctcatcattgtgggtgggcgagtggacagggagtacccacggcctggacagctgatgccaggacttgagggtgaaggataatgctcagacagcatcttctg

SEQ ID NO: 48130 - DNA, 122 bp, Homo sapiens
gggtgtcagaggggcacaattgcccgctcacaacccctggtgttgatttaacgatgaggacgccttggagagcggctcggagtgatcgtatctgttagtgtttccgttatgaaatgcctctt

SEQ ID NO: 48131 - DNA, 122 bp, Homo sapiens
gcagggaggagggagggggcccgcccccaggcccccgcgcactgttgctggccagccactcgttaaggtcaatctcgcggggcagcaccaccagctccttgaactggaagtcggtgatcctg

SEQ ID NO: 48132 - DNA, 122 bp, Homo sapiens
ccaaatatgggggagcctccagagctctgagaaatcaatgtttgctgtttcagccacccacgccatgtgatttttgtgacagcaactcgaacaagagaaaaattggcaccgggaagtagcag

SEQ ID NO: 48133 - DNA, 122 bp, Homo sapiens
cactcacctcaaatatttactcgtgatccacctgccaaagccctcaggagaccgtggggacgtcggctcggtctgcgggccctcgcttcggcctctgtagaccctgccaggtgcagccccca

SEQ ID NO: 48134 - DNA, 122 bp, Homo sapiens
gcaacctctgatccatctggcccttggcctatggaaaaggacgttataagccagggtgaccgggaagatggtcaagggaaagggccctggggcggagttccgcggctgtaatcccagtgctt

SEQ ID NO: 48135 - DNA, 122 bp, Homo sapiens
caccagtccccactctgacgagaagaccgcccagctccaggcaccgtagcgccccagtgacgtaggcgaacacccgcgcctctgacgtcgccaaaggcccaccgctatggtgtcggcgaagg

SEQ ID NO: 48136 - DNA, 122 bp, Homo sapiens
cgaacctgcagtgggaggggtcgccaacaggaccgactggccggggcggagggcagggcgcggctggcgcgcggcaggtggtcggagcagtcgggcgagggagagctgggcgctctccaggc

SEQ ID NO: 48137 - DNA, 122 bp, Homo sapiens
tcaccaagaacgttttagagcgcctccaggaggcttatcggatttacaccccttttgacccggcagctcccaaaaatagccgtgctcttaatttagcatttgtggctcaggcagccccggat

SEQ ID NO: 48138 - DNA, 122 bp, Homo sapiens
agacctggcaaacccaagacgatgcgctcttacttgtgttgtttgaaggggccctgctgccgcgcagttgtcattaatgccaccctcacctcccaggaactgcaccactaggacggacgaca

SEQ ID NO: 48139 - DNA, 122 bp, Homo sapiens
gtagccacgaccctttccagttcagtgggcggctactcacggtgttcggtgttaaggagacggccggcgggaggctgacgagagccgggaggcgttagcgaaggaagagaaaaaccgaagac

SEQ ID NO: 48140 - DNA, 122 bp, Homo sapiens
cccttaaggcgtccgtgctctggtgtgtgtcccagaaatagacacgaccctcggtctgagcgcccctgcaccccagcctgcccaccgcgcggaacacctgcaagctccggtccgggtgccgc

SEQ ID NO: 48141 - DNA, 122 bp, Homo sapiens
gtgtgctggccctgggctgtgtggatatccgccgactctggagattccactgaggtagggcgggatttatttcagaccagatgatttctcaaaggtgcaggagaacaatgctccccacccct

SEQ ID NO: 48142 - DNA, 122 bp, Homo sapiens
ggggtaagacttgcacaggcccaaggctaggagttggggtttcgggcctgaattggggcccggagcacccctttacgtggcgccccgggtcccgtccgaccctggggagacgcgggtggctg

SEQ ID NO: 48143 - DNA, 122 bp, Homo sapiens
ttaaacatttaaatattggttatttgccaaggcacacactgaaaataagggccacttggccgagagcagaattgagtcttggatcccaggatgctggttttaggcttgctcccggaaagagg

SEQ ID NO: 48144 - DNA, 122 bp, Homo sapiens
atttgtggtttatctgaattcaatcttaactgggcatcttgtatttttacttgctaaatccggcgactctaccgccggggtcggacgttgtttgctgactgcattctattcgtggccgcgga

SEQ ID NO: 48145 - DNA, 122 bp, Homo sapiens
acgcgcctcaataccaccaggccgccacttcgcggaccgcctcaccggcgccattgcagccgactaactgcgtcatcagaagaccacgacggacgcccacaaaatacgtcaccaagccgaag

SEQ ID NO: 48146 - DNA, 122 bp, Homo sapiens
agtagatgtttttctgttatgtaagcaataatttttccgtgtcttattgagtatggctagcgattatttattacatgctagatgggttctttgcatgtgggttccatataggtgcagaaatt

SEQ ID NO: 48147 - DNA, 122 bp, Homo sapiens
tttgaatgttctctattcaagttattgcatttaattcttttgcagctacagtgcttacaccgcccagcccactcaaggatatgcacagaccacccaggtaatctttaaaataattacatgta

SEQ ID NO: 48148 - DNA, 122 bp, Homo sapiens
ggtgcctggagatgcctgggaacagaacggctgaggggactccattatctgtactcttcccggggtgggtctaggtctggctcctcctgaggtcggttgtccacctcaggggcaggaggcca

SEQ ID NO: 48149 - DNA, 122 bp, Homo sapiens
cttcaaggtgatatagacgctgcccgacgtccggcacttctggaaaagtctggtcagctccgtcaggaactggaaaacaacaggcccagccccgttagccagccccaaatcctcgtcctgcc

SEQ ID NO: 48150 - DNA, 122 bp, Homo sapiens
cagtccaataaaaatattttaaactagtgattctcctaaagcaatcagtgatttaacacacgtaacttggctgcagtccctgcagtgacacaggccagattgtgtcataatgtggaaacaac

SEQ ID NO: 48151 - DNA, 122 bp, Homo sapiens
tactgccgccgccgggacatcagaattcttgtgcttgatgacaccaaccacgaacgggaacggctggagcagctctttgaaatggccgaccagtaccagtaccaggtggtgctggtggagcc

SEQ ID NO: 48152 - DNA, 122 bp, Homo sapiens
ccacaggaagtgaggatacagcaagagccaggcaagccgcgcagatgccactggctctcacgctgcaggtccctcgacagaggccataaatctttccctccgagcacgtccaacttgggggt

SEQ ID NO: 48153 - DNA, 122 bp, Homo sapiens
aaagacactgaaaatagtaaatgcccactttcaaccatgacagcccttttaggatagtaacggtgagcagtattaatcctatttgaccagaactagggcagaattgaagcccctggagtaga

SEQ ID NO: 48154 - DNA, 122 bp, Homo sapiens
gaggatgccatccttgataggggtctccagagggtccatggtcacggccaggagcagggccgccgcttcaagacctggggagactgatgacaggctggacgggaactcctcacacttcccct

SEQ ID NO: 48155 - DNA, 122 bp, Homo sapiens
gaagctgagagcgcgttctggcatccgcgcgatttccgccgcggcgccccaagacctggacggcctgggaccctgggccaatgaaagaaagacttaaagtcacgccctcacttcccattggc

SEQ ID NO: 48156 - DNA, 122 bp, Homo sapiens
gcgcatgcggcaaagtaatgcggccggtccggggtacacggagaccgcgcgtgcgcggggcgatgcactcagtcgccactagagggcgatgtaatatgtcatcctgcccccggtggggtggg

SEQ ID NO: 48157 - DNA, 122 bp, Homo sapiens
ggagaacaatgttggtgaacgtcgcagcgggtgtccgagtgctccgtgtgcccctgagagcgggtgggagcggaagcctgagcggcctgcggcctccggcgatagtgtgctatctgccgctg

SEQ ID NO: 48158 - DNA, 122 bp, Homo sapiens
aaccctgcacctatcagttaattggcacatcgtcctcaatcatttgggtccgcaagggggcgtggaggcaccttgtcgggctgccttgaggctgtgccaactccccgggctcgcacgttttg

SEQ ID NO: 48159 - DNA, 122 bp, Homo sapiens
gaccaagaggcgacttccggtcggggacgctgggagacgcgaaaccttttggcttcagtgcggaaccccaacgtggctgcgacaggctcagtgtcatcctctggaacccaggaccaggaaca

SEQ ID NO: 48160 - DNA, 122 bp, Homo sapiens
tctttccttttggagttttccctgatcattgaagttatgcccttgtcccttctgcacccgcgcttctgggcaccgagctcctcccgctgaagtgatcggcttgcactgactgcgcttgggct

SEQ ID NO: 48161 - DNA, 122 bp, Homo sapiens
cctcccagcgagatgctaccacgttcagtcccctaactgcgcgccaacctctggagataccggctgtccccaaccgcgctgaggaaagctgggacccacggactccctgccctgcgcgtccc

SEQ ID NO: 48162 - DNA, 122 bp, Homo sapiens
tcctgcagcgtgattggcccgcggctcagggaggcgaccaatgagtgctctcgcggagagcgacggggcaggccaatatggcttcctgcacctggtgacgcttggcgaaactgaggtctcat

SEQ ID NO: 48163 - DNA, 122 bp, Homo sapiens
tgcgttcacgcaggggctcacccagcggccacgggcttctgaagacccgggtgggaagtgcggcccgggaaagcgcaagcgtctccatggcaacgagggcggacggcgtcagagcgagtcgc

SEQ ID NO: 48164 - DNA, 122 bp, Homo sapiens
cagcgccgggtccattgcgtcgggagctgcgcttagctgcggggtcgcgggtgttatgagcggcggcgctggatcccgggtgcctggaggctggagctctgggaggagctcgtagccccgcc

SEQ ID NO: 48165 - DNA, 122 bp, Homo sapiens
gtaacttaaatcgtttgccatcttttcatccactttcagatttgcattttgcttaacttccgaaaggccctcagtgcttttagacagtcttttctcctcatctctgaatggtaccctgtcct

SEQ ID NO: 48166 - DNA, 122 bp, Homo sapiens
acacagattcagagtcacattttaagaaacctgatgaccaatggggacgcggcggggcaacggggcccgcccccggagcgactttcctcccagacccccgggcgccgggccacctgttgccg

SEQ ID NO: 48167 - DNA, 122 bp, Homo sapiens
cgcagagtgatggccacagtgggacgaacctccagataaataagaacagtccgcgtgagccgggctcatcttaacactaagcagaggggcctggggccggacttgaaagctgccggctgaga

SEQ ID NO: 48168 - DNA, 122 bp, Homo sapiens
aagtctgccccatacctcccacctaggaagtgccagagctgggattcaggctgccttggccgtttctattgcctgacctgtcttagcttttgaataaaagtaggggaggtattatttggatg

SEQ ID NO: 48169 - DNA, 122 bp, Homo sapiens
tggtgaaagtccaagcctcctcaccttctagtcaaggcttgctgataacattgtccctaacgaacagccgcagcagcgcgtcaggcagaatgagcctctgtttagagttggtaacgaccgcc

SEQ ID NO: 48170 - DNA, 122 bp, Homo sapiens
cgcagccttcctgggcaccgccatcttcattgaggccgaccgccggcgggcacagctgcacgtgcagggtcagttaggagctgtgcccggcccagcttcttgatctgcctgtctgtctgtcc

SEQ ID NO: 48171 - DNA, 122 bp, Homo sapiens
gtacgtgtacacccaccggtgatattgatccaaatataatctccagggggtggagtatgacgttactcacaatatagcactgggtgtgcatccacccggtgaatttgctcctaatattcaca

SEQ ID NO: 48172 - DNA, 122 bp, Homo sapiens
caaagtccaccccctccctagcgtttcatcatgcagccaaggctcaggagctgaaaggtccgggctcagaacttgggactgccttgggtcaggcctcggctcccccacttgccccgtacctt

SEQ ID NO: 48173 - DNA, 122 bp, Homo sapiens
gggctctgacccgggagggcaaatgcgcaggctctaagcttggactagctaggagttgaccgccgaccacgcacacagggaactcacctttgattctcacacactcctccccgcagtcctat

SEQ ID NO: 48174 - DNA, 122 bp, Homo sapiens
atgaaaggaagcagagtggtgggtgacggtggctgagggagagggtaacggaggagagttcgtgtttaatgggcacagaatgtcagtttggaagatgaaaagagtttggagccggacacggt

SEQ ID NO: 48175 - DNA, 122 bp, Homo sapiens
ctaggctgtggggctggaagctgggatgaggctgttgtttcaagttcagggcccctcccccgagctattgaagcaagccaggcagtgactctgagggagtacccgcaaggcctctgcaaagg

SEQ ID NO: 48176 - DNA, 122 bp, Homo sapiens
attgaagcaaccctcacaaggtaggcattattatcatcccagtttcacagaggaggacatcgaggctaccaagttaagtagcttgtcctggtttcacagccagcaagtgacagggtcaagag

SEQ ID NO: 48177 - DNA, 122 bp, Homo sapiens
tcagtgcctaccaaagacctattttctgactcttcttgagagtcttccttaggaccggaacgtaccctgtaagtggagaacccagtttgctacaacttggcagaggttcctcggagtgtcaa

SEQ ID NO: 48178 - DNA, 122 bp, Homo sapiens
tgaatcttaaatggcaagtagaaatttgggagatagatagatttatggggtgaaagataccgtgagaaaagagtagtgtataagtaaaaccaggaccccaaatttaggtatcaataagtgtt

SEQ ID NO: 48179 - DNA, 122 bp, Homo sapiens
ttgagtactgtcagaacaacttcttcacattgtgcccatgtgctttagttctgatgggaacgtgttaaagtcagacatgggtgttgaattcatccacgaataagggctgtagttaaaatcct

SEQ ID NO: 48180 - DNA, 122 bp, Homo sapiens
tgcgatctcggctcaccgcaacctctgcctcctgaattgaagtgattctcattccttagccgaccaagtagctgggaccacaggtgtgtgccaccatgcccagctaattttttgtattttta

SEQ ID NO: 48181 - DNA, 122 bp, Homo sapiens
gggtgggggggagccctggttcggtggccgccaggtgtgggggggccctggttcagtggccgctgggtgggggttctctccacagcatccccagtttcccgcgggcctggaggtgacagatg

SEQ ID NO: 48182 - DNA, 122 bp, Homo sapiens
tgcaagaggtgctctcccccacccgcagccctgccctcccctggagcctgctgccccctccgctggctggctgctgccccgcacccccagcacactcctgtgctctttggggggtaagacag

SEQ ID NO: 48183 - DNA, 122 bp, Homo sapiens
ccgtagttttgccttttccagaatgtcatccagatggatcctacagagtgtggtcttttccgatgggcttcttccactgagcagtaggcattgaaggcttctccatgtcctcccaaggcctg

SEQ ID NO: 48184 - DNA, 122 bp, Homo sapiens
taagaatttctttccaagaaatgtgctcgggtcaaacacaaggcctttctgtccatgatccgcctgaaaccatggtttccttgttttcgcctttatcccttctgccttgccagtcctccccg

SEQ ID NO: 48185 - DNA, 122 bp, Homo sapiens
tggtcggttacgatgtgcgccaggcgctgctcaagggcctcgtggcgctgctgataccgtcggtcaaggagatctccaaactgcaggccaagatcctcagtggtaaggacctgctcaaatgg

SEQ ID NO: 48186 - DNA, 122 bp, Homo sapiens
ttatcacccagtctagaaacagataaaacattgtaaaatttcctcaaccctggctgggcgcgatggctcatgcctgtgattcctgaactttgagaggccggggtgggtggatcacttgaggt

SEQ ID NO: 48187 - DNA, 122 bp, Homo sapiens
ctcgccgcggcttcgcgccgggggccctggacgggtgcccggggtctgggggggtcctggcgcccccgccgccgcttcccggcttcccgtcctgggggatcctgaaggagagcctgaggggt

SEQ ID NO: 48188 - DNA, 122 bp, Homo sapiens
cggctcccttccctcctcatccacatgctttgttgcctcgtagcttttgagtgaaaaagtcgtccatttccaagacccgccgactgggggctttgggcctgtgactgcgccttcactccgtg

SEQ ID NO: 48189 - DNA, 122 bp, Homo sapiens
cgcgcgtgtgaggcggggccggggtgcgcgagggggcggctactggcctgggtgaagcggcggtgcctcggtgaccagctggggggctcgaagcgccccgggggtcggagtccgggcccgcc

SEQ ID NO: 48190 - DNA, 122 bp, Homo sapiens
tgactgggcccagtactgggagctctaggtgaaatgtttcggaaggagtccgctcctctgcggagctcctgcagcttcccctgtggaactgtgagcactgaggtttgagggttgcaggaaag

SEQ ID NO: 48191 - DNA, 122 bp, Homo sapiens
gtgtgggtggtgctcgggcacggtgctgtgcggggacttggcgatctcacgaggcgtcgacgtcagctttcggtcctgggatgccttgctggacgaaaggctgcctgtggacgggcaaggtg

SEQ ID NO: 48192 - DNA, 122 bp, Homo sapiens
gataaaaatattttcctgaataattcgataaaggtattatagaatgggcttgcagatttccgtatgagatgcattgctagacagatttccagataggacttccattcatgggctttttaaaa

SEQ ID NO: 48193 - DNA, 122 bp, Homo sapiens
gggccattgtggtgtgagcttcagatggtgaagcattctccccagtgtatgtcttgtatccgatatctaacgctttaaatggctactttggtttctgtctgtaagttaagaccttggatgtg

SEQ ID NO: 48194 - DNA, 122 bp, Homo sapiens
actgaggctgagatctgaagggtgagtgaaggtgcaatagcccattccaggcagggccatcgatgagtgaagatctgcttaaaagaccacttaggtgactaccccagatggatagatctcaa

SEQ ID NO: 48195 - DNA, 122 bp, Homo sapiens
aggtcatcatgacgcgctggtcagcattggccatgagcagccaaatgggatcctggagcacgtacttaatcacctggtccccaggctcagccccgccccgagcagccccagcctcagcctcg

SEQ ID NO: 48196 - DNA, 122 bp, Homo sapiens
ccagcacaagccagagtgggagcacacttttcagagaggagacggtgcccccagccatcgcgccagcgggaaaggcagggcccccttaagcgcaaccttgagccactcccatgaatcaccca

SEQ ID NO: 48197 - DNA, 122 bp, Homo sapiens
tttcattacatcctggttgaattaccaaatggaaactgatttaggaatactgagtgtgtacggcacagagaaaaaatatcactgcgaaatttataggcctgtgtaagactgtcagggccctg

SEQ ID NO: 48198 - DNA, 122 bp, Homo sapiens
gaagaacttcttgatctttcgggcgttcacgatctgggctggagtgacgtggggcagccgcgtccatggcaggcccggctcgttgcacacaaagtacaggtacttgttggcgcctgagcggc

SEQ ID NO: 48199 - DNA, 122 bp, Homo sapiens
gaggttttccctacttccgggtcctctctgtcttcgctttgggccttctcggcttcggagcgtgaaaaagggaggggctggagaaccctggaaccgcaggttttaaactggagcgggtggga

SEQ ID NO: 48200 - DNA, 122 bp, Homo sapiens
gaatcatcaaggttttcccatcttgactgtgttgaggtttatcccagcttgacttcccttcgtgtcttagcacatcctggtccactttccctgctatcagttgttaagtatttagagaatgc

SEQ ID NO: 48201 - DNA, 122 bp, Homo sapiens
gccttctccacaagggtcaggtttgtggaggagaaaggggaagattctccacccaccaggcgcctcctggactgtcaagaactaacagggactagatcacccgaaatagcagatcaaattga

SEQ ID NO: 48202 - DNA, 122 bp, Homo sapiens
ctccgctcccccgtcgtatcgcctgccctggatcgaagtgatgggggatgccaaggaggccggagccgagggtccgccggccggggccgccgctcgaggagggctcagcctcctgtcccagg

SEQ ID NO: 48203 - DNA, 122 bp, Homo sapiens
aaggaatcatcctctcacttccatgtgaaccatgaacattaaacatggagaaatgaggagcggaggcagatcagtttgggatgcatcttcaggggatgctgaaacaacaacagcatttggtt

SEQ ID NO: 48204 - DNA, 122 bp, Homo sapiens
caacgcgtggacactggagactgttgagacgccgactggagtcacacacggcagtcaacgcgtggacactggagactgttaagacaccgattcttcccaacatgtattcaagacattcagaa

SEQ ID NO: 48205 - DNA, 122 bp, Homo sapiens
ttcagatctcttcctttagtagcaagacactcacctttcctggccaaggaggatatcggccgagtttccccctagagaaaacacaaagagtcaacacttgccctgcaaaagccagtccatct

SEQ ID NO: 48206 - DNA, 122 bp, Homo sapiens
gcgcctgcgcgggctgtgggaacccggggccgtcctgctggtgctggtgggcacccaggccgaccgggactccgagcgccaggtgctgatggcgcgggcccgcgaggggccctgcccgttcc

SEQ ID NO: 48207 - DNA, 122 bp, Homo sapiens
atcaaaagatactctccccatcttctatagccttaagttttgcgaaggtaagtttctccccgcttgaaagcgcccccagggacaagaattcatcttgaccaagcctaaggccgtggcatgca

SEQ ID NO: 48208 - DNA, 122 bp, Homo sapiens
cgccgctctccggaggcagaagttgtggatcggccggcgggggcgagcgggcccgggggccggggccgcgctgcccgggccgcgaggacgaggcggcgccgccgggctgtggaggtgagtcc

SEQ ID NO: 48209 - DNA, 122 bp, Homo sapiens
ctcccttcctcgcaggctggagacctgcgtgttgcgacttccggcatagcagctagaggccgggtgctgcttcaaaccctggcgggtcgcctgtgtccaactcagctatacgtgtctttcag

SEQ ID NO: 48210 - DNA, 122 bp, Homo sapiens
ttggattcaaaaggaagcctggcagtggcggggcctggacaggcagcctttgacctgaggcggggcggcgctctgcgctggttcagaaaagccgtggggcagcctctctggcaggcactggc

SEQ ID NO: 48211 - DNA, 122 bp, Homo sapiens
tcctgtctgtaaccagtgaaatcccccacaagtgcgctcagaatttttagaaacacggcacgggctgcgtttacattttcactgtattagctttatgcgtggagtgcgtgatgtgctgtttc

SEQ ID NO: 48212 - DNA, 122 bp, Homo sapiens
aagccatttacaaagaccttgctatttactataaattaggcactctttaagagaccagtgcgtaatttcacacactttacaactggggctgcattttaaacacccgggaaaacaagcttgtt

SEQ ID NO: 48213 - DNA, 122 bp, Homo sapiens
ctcccgggctcaagcgattatccagcctcagccacccaagtagctgggatgacaggggtgcgccgcctcgtccggctaacttttgtatttctagtagagacacggtttcgccgtcttggaca

SEQ ID NO: 48214 - DNA, 122 bp, Homo sapiens
acgaagaggggcccgggccgggcccgctggcggaggtgagagatttgccgggctcagcaccggctaaggaagatggcttcagctggctgctgccgcccccgccaccaccgcccctgcccttc

SEQ ID NO: 48215 - DNA, 122 bp, Homo sapiens
aagccattttagactgaggagtttgctgatgttaaagaagtgcaaatatattcaatcaatcggtgaatggtggggagaagtgtctgcctaatattgaattccttcagattattattatttac

SEQ ID NO: 48216 - DNA, 122 bp, Homo sapiens
actcgcgcgtgtgactgcctagtaacagtgtctcgagtcggaagcgctcggagcgaggggcggggtgggagagctggcgcgcgcacgcgtaaagtctttgcagcctcgctacggggcggagt

SEQ ID NO: 48217 - DNA, 122 bp, Homo sapiens
cattactaagagggaaattctgctttagctgccgggaatccccaggggtatctctagaaacgcgggatatccccgctgctctcttggcggccagttcagaaaccgctcagaactcagtccag

SEQ ID NO: 48218 - DNA, 122 bp, Homo sapiens
ggaggcctggggctccttggcccggcctgaggtatggtcttctcactgcctgggctcacacgccagcccctgcctgtcccagcccaccgtcctctccggcagtgcccacccctcctctggga

SEQ ID NO: 48219 - DNA, 122 bp, Homo sapiens
actccctaagcatctccctcacgcattccaggggctaaggactaccagggtgggaactagcggagaaagctgatacctcacccaccaccgagcagccacagggcgagctccgccccttccca

SEQ ID NO: 48220 - DNA, 122 bp, Homo sapiens
atcttaattccgggttccgggatttgtcgatccgggctccgggatttcctaatccaagttcgcgagttcctcacagacccggttcgggacagattccgctcctgcccgggagattccggatc

SEQ ID NO: 48221 - DNA, 122 bp, Homo sapiens
ggctctgcgtactagactgaaatagggggtgatatcggcacctgctgcatagggtggttgcgaggcctgtgtgaaataatttaggcctgcactgaacgatttctctcattattaaatataat

SEQ ID NO: 48222 - DNA, 122 bp, Homo sapiens
taagtgtcacagtccgatgtaactgctacgttgtacccggatggcctttttctggatcttcgtgtcttccggccagggtaggtgtcttcccccggctctcttcctgcttctgctatcgcgca

SEQ ID NO: 48223 - DNA, 122 bp, Homo sapiens
tgaagcacatatttcccaactgctagtaaggttaggaatgttatcttgcagagagtgctccgttgttagccctcaccaataattgcctcagccataaagaactgcctctcaaattcttgcct

SEQ ID NO: 48224 - DNA, 122 bp, Homo sapiens
ctccatccagacgccgctgtggcggcgggacggcaccggccactacctgtgcaacgcctgcgggctctacagcaagatgaacggcctcagccggcccctcatcaagccgcagaagcgcgtgg

SEQ ID NO: 48225 - DNA, 122 bp, Homo sapiens
cccggcaccgaggaaagcacgctcccccggcccccaggcagccctcgcccccggcgccggcgccgccccatccccactggctgcgctcactccgggacaggcgtcctctccctgctgcccca

SEQ ID NO: 48226 - DNA, 122 bp, Homo sapiens
ggcccccagctgccagcagaggggaccagggagctggcgacggcgcatgtgcctgctggccgggacaggccagttggccatcctgtaccctgattatcaacagcagctggaataacaattat

SEQ ID NO: 48227 - DNA, 122 bp, Homo sapiens
aaatgggtgctgctaggagttgctgtataattacttacttgattccctctaaggagcttacgctaagaattgaggaaagaaagcagattaaccatttgaatacatgccacggcccatccaca

SEQ ID NO: 48228 - DNA, 122 bp, Homo sapiens
cataatcactactgcttaatatcccgccccaggcaaagtcaataattgctctgggtagttcgagcaggtggtgtgagcaagccgtggtggcatcagaaagcacagtcctgggaaggggacgg

SEQ ID NO: 48229 - DNA, 122 bp, Homo sapiens
ggcccagtcgtccttcgggctgggggcccagtacctggatgacctctcctgggtgggggccgccgagcctgggggaaaggccggccggacgcaggccaggaggtctgagatcatctccgtgt

SEQ ID NO: 48230 - DNA, 122 bp, Homo sapiens
ttccctttgttctggagaatgttctgcctgggcggagcattcggtgcggttacgtgggtgcggttctccagggagagcgcgggggtctcttcagggtaatgccaacctcaccgccaaatgca

SEQ ID NO: 48231 - DNA, 122 bp, Homo sapiens
tcctgggatccaccacgcggcttcccccgttgctgccaacctctgcgacccggcgagacacgcacagcacacacgtgaggttctacccgccgagacacacacagcacacacgtgaggttcta

SEQ ID NO: 48232 - DNA, 122 bp, Homo sapiens
ttctctggacctcagtgtcctcctctgcaaaatcgggagaactggactcgttctgcgaggcgccttccagctctgagcctgtaggcttagggcggggatcatccacgctactgaggactgag

SEQ ID NO: 48233 - DNA, 122 bp, Homo sapiens
cagcctccttggttggccatgaactggttggtggccctggcctgtgcccagtagctctgtcgtaatcctggggtcatgcgagggagccggcatgggcagtggaggtgctcgtgggacctgcg

SEQ ID NO: 48234 - DNA, 122 bp, Homo sapiens
gagtgtgatcatgcaggcagtgtgttcacccaccgcgggaaggacccgtgagtgtgatcacgcagggagtgtgttcgcccgccgtgggaaggatccctgagtgtgatcatgcaggcagtgtg

SEQ ID NO: 48235 - DNA, 122 bp, Homo sapiens
cctccgagggctgcggcttccccgggcttgcttctttgccgctcctctttccggctctcgcgctcactctttaattggcactggcccctaagtttgccaggagctcgctgcccgctcggagc

SEQ ID NO: 48236 - DNA, 122 bp, Homo sapiens
ggtcaatgaaccctgaaaagacgacactgagtgaaaagagttggacgccaaggacccactcgtactgtgcgatcccattgaaaggacatgtccagaacaggccgatccacagagcagcccgg

SEQ ID NO: 48237 - DNA, 122 bp, Homo sapiens
accccagccccgggaacagggtgctcccactaggggtccgaccctaccagcacccctggacgcggagacgcgcgcacgccctcggcccccgccggaggcccgcgcgcaggggaggaggcggc

SEQ ID NO: 48238 - DNA, 122 bp, Homo sapiens
cacacacacacacacacacacacggatagaaactaagcctcagcaaagtttaaatttccccgagctgttcaactgcaggggtagaaaatgcattatctacttctgattcattgcatatttta

SEQ ID NO: 48239 - DNA, 122 bp, Homo sapiens
tgtcggggaagggcggggctgggggactgcggggccgcggcgaggctcagccgggaactacgcttcccagcctgctccgctgcagccgcgcgccccggcgccgcgcccggccgggagccgcc

SEQ ID NO: 48240 - DNA, 122 bp, Homo sapiens
gtgagggtgcaagggagagggtggagagggtggcagtgagggcgcgagagggtggaggggcggcatgagggagcaagccacctcgggcacaggtgaaggacaggtgtccacaccttgggtgc

SEQ ID NO: 48241 - DNA, 122 bp, Homo sapiens
cccgccgctctccaactgctgctataaaagcgctgcaatccttacccgggccccgggaagcgctgagaagctgtttagcgccagtagatgtgggcccagcagctcctagctcctcaaacccc

SEQ ID NO: 48242 - DNA, 122 bp, Homo sapiens
ctgaaaaaaaaaaaaaaacaagaaagaaaagaagtcatagatgacacaaacaaatggaaacgcatccccatgctcgtggatgggtagaaccagtattgtgaaaattaccattctgttaaagg

SEQ ID NO: 48243 - DNA, 122 bp, Homo sapiens
aataggcttaggctcatcctactagtcctcacttagactcattctcatgtagaaacaaaacgtgattaatcacctcagtaagtgcaatttccaaaaacatccagggaaatctagggtccagg

SEQ ID NO: 48244 - DNA, 122 bp, Homo sapiens
tcatcggggaggctcgggctgcataggagcccatggagcaggtgggaggctcaggcatggcgggctgcaggtccccagccctgccccgcgggaaggcagctaaggcccggtgagaaatcgag

SEQ ID NO: 48245 - DNA, 122 bp, Homo sapiens
atctccgaagatttttctttaatgaaaaggattcgtttttccaaattctatttccaaagccgaggagattgccgggctggagcgcatcgttggtgacgcttgcccgtcggaccctggcagcg

SEQ ID NO: 48246 - DNA, 122 bp, Homo sapiens
caacacatattgggggaaacggggcacggcacgcgttgggttcaggaaaaaaaccgggaacggaaaaagaggctggtttggtcctcagcttcctggtcaggtttccccgcggcctccgctgc

SEQ ID NO: 48247 - DNA, 122 bp, Homo sapiens
gctggaagcagggtactggtccccgcctcctgcagctctgcccagaggacttggggagcccggatggagaggcgcaggatctcccacttcagtcagcatttggcgttgcttccaggagtcgt

SEQ ID NO: 48248 - DNA, 122 bp, Homo sapiens
aattaagaaaccaagtacctgtacaaatgtacacctttatagtggttcaatttggccacacgtgcttctacttagagaaacaccatacatgaatattcaggcacatatacatatcactatat

SEQ ID NO: 48249 - DNA, 122 bp, Homo sapiens
ggatttgaacccacgctgtctggctccaaagtctggtctctgagctgccacactgctgcccgtgcagctggggctttccaggctgcccccatgaggccagcagatctccttctcagccacca

SEQ ID NO: 48250 - DNA, 122 bp, Homo sapiens
tgcctgtggtcacagctgctcatgaggctgaattgggaggatcacttgagcccaggaattcgaggctgccgtgtgctatgatcacaccactacactcaagcctgggtgatagcatgagacca

SEQ ID NO: 48251 - DNA, 122 bp, Homo sapiens
ttcagaaactcgattgtgctcgagcgtccgtaaagaccactggagcctctgccttccccgcggctatttctaactgcccaggcatccaacgagcaaacagggccagcagcaaattatcccgt

SEQ ID NO: 48252 - DNA, 122 bp, Homo sapiens
gggcggtgtcgcccggaaccgcagcccccctgtttcctccccgcctcgcggcccctcagtcgcccctatttccggcgcgggacccccaccccggtacctgcacacctcatgcgcccgcagtt

SEQ ID NO: 48253 - DNA, 122 bp, Homo sapiens
ccccctgacgtcagtcagatcaggcccccaaggaagatttgaagggggcgactgcatagtcggggtatctcccatatacccaaggagatgggtttctctaacagcacccacgtcagtcctaa

SEQ ID NO: 48254 - DNA, 122 bp, Homo sapiens
cactgataatctttagctattggtgagtgcctttttctcttttctgcccatcaggcgatgcgtctgcaactactgacagcagtaggggcactggcaggcacagcctgtgcccttctcactga

SEQ ID NO: 48255 - DNA, 122 bp, Homo sapiens
ggcaggttggtcgtgaggggctggtgccttccaggatgcgagtgtcgggggaactgtatgcggcggcccccctcccggcgcccgtctcccctcttcatcgtttctctctcagactccgctga

SEQ ID NO: 48256 - DNA, 122 bp, Homo sapiens
cgtaccctctcctttcccgccgcgctgaggcagtgactggggcacagaatccaatatggccgtgcacaggtgctccctggacggacccgggcgaaggcgcgctggcaggggatgcggacgcc

SEQ ID NO: 48257 - DNA, 122 bp, Homo sapiens
taatgaaagagaaagtttgaataactgattttttttttaagttgaggtcctgtgcatgcacggacatgagtcaaatgaccagtgtagcaggatcttgggaggggcaggcagacattacaatt

SEQ ID NO: 48258 - DNA, 122 bp, Homo sapiens
ctctcgggccagagatttgcccctttgtctctgatacgtacaaacctccctcaagaaggacgagtgactcgtccaaagccgcgcagcggagccgcggttccctctcctgtaaactaagcaga

SEQ ID NO: 48259 - DNA, 122 bp, Homo sapiens
ctttcatgccttcctgtatcccctatgagtctgactgaatcttttaaggaactgacctttcggcttggtgttgaataagtggtctaaattgtctatgtgcctgtactttgtcttttgcagca

SEQ ID NO: 48260 - DNA, 122 bp, Homo sapiens
tctaccacctcatggccaggggccgctgcgggctgtgggtctgcgcagctcgggagctcacgcgcagcttcggtggggatcctcgggaggactcgcgggagcagggtactcaggccggctgg

SEQ ID NO: 48261 - DNA, 122 bp, Homo sapiens
gacccacgcggatcgggggccgcgggtacctccgtccagggcgcttccctcccggaccagcggctctcccaggccgcctcgctccaggcgcccctggaggctgccccgcctgtgccgcgccg

SEQ ID NO: 48262 - DNA, 122 bp, Homo sapiens
aggtaacccctcgccatcacattccaccaaagccttctccagcagaacgtggacggcccccgctcagggtccctcaggatgagtggctctccaggacgtcacagcctctgtggcaccagcag

SEQ ID NO: 48263 - DNA, 122 bp, Homo sapiens
tatgtttatagttggccgggtacagtggctcacgccagcactttgggaagccgaggtgggcggatcacaagatcaggagatcaagaacatcttggccaacatgatgaagccctgtctctact

SEQ ID NO: 48264 - DNA, 122 bp, Homo sapiens
taacagaagattcagactccctagacttaggggacctgggggaggcctccttacacctctcggctgctgcatgaacataagtgtcctgatttgttccagtctgaagccactgactcactggg

SEQ ID NO: 48265 - DNA, 122 bp, Homo sapiens
ttgataaatgaagggccaccctgacagccagtatctaactgacacaatagggaagacaaacgtgaatttgtttctaatcttaaggtattctgaaagcaactgattgaatggtattcaacatc

SEQ ID NO: 48266 - DNA, 122 bp, Homo sapiens
ctggagtctgggacgagcggcggtccgaggagcagcccaggtggggcgagggtacggagacgctatttccctccgaactctgaagtagccaggtcagtgtcggctccgcgagggctggagtt

SEQ ID NO: 48267 - DNA, 122 bp, Homo sapiens
agtggaatctgacaacctacaggccaggtaccgtgctgagtgcccagcaaaggcagtgagcgtgctattttggagatagcatccttttgtttaaggcgcattcaatcccctacaatgtatga

SEQ ID NO: 48268 - DNA, 122 bp, Homo sapiens
aaaatgaacatgagattgtttgtaatgatgtgaaaagttgaaaacaacctaaatatccatcgatagggaattggcaagcaaagcaggagacattcattcagtaaaatattatccagacatta

SEQ ID NO: 48269 - DNA, 122 bp, Homo sapiens
tggactggtacaaccgcagccacagctcctgaacggccttccagtacccagcgtagtgggcggggctcctcccacacatctccgtcaggtccaggccggccgagaagacacccgggcggtcc

SEQ ID NO: 48270 - DNA, 122 bp, Homo sapiens
gctcaaatgtctaggcatggtacgggtccaggtctgggccacaggccagggctgcagacacgtgcaggcttttctggtaatggctatagataaggcagtgacctctggttgttctggagaag

SEQ ID NO: 48271 - DNA, 122 bp, Homo sapiens
tggccacagctctcctcccgccgccgcaggtcttcctcaccgctttgcgcgccccgaagccgaccctgcgctacttcaccaccgagcgcttcctgcccctgctgcggatgcgcctggacgac

SEQ ID NO: 48272 - DNA, 122 bp, Homo sapiens
gtcccggccgcggtctcggtcactcgaataacccgacatggcgtcaatggttgcggttggcggggaacgaagtatatagaaaagcgtgcgacaagtcgctggaaatggcctcgatgacggcg

SEQ ID NO: 48273 - DNA, 122 bp, Homo sapiens
ttcacacaatactgaccatcggactgacccctccttcccccaaccaccgttacaagcacgcgttgtcctgtgctcacagggtcatggacaaggaatgtcatcctctcccaactcccagggcc

SEQ ID NO: 48274 - DNA, 122 bp, Homo sapiens
gatgaacacagtgaatcatgggctcctcttgtctggagtagagcatcgggagaccggggccgtctgagcagttgacacctttgctccccagctctgtgaaaaaggaaaaacaatacaggcag

SEQ ID NO: 48275 - DNA, 122 bp, Homo sapiens
cacttcacttgcttatctctctgccttggcttttctccctctgctctgttttctcttccccgacacctcggttcctcttctccctggtgggaggctcgtgccaccccacaccctggatcttc

SEQ ID NO: 48276 - DNA, 122 bp, Homo sapiens
acggcagatcactctcaccgcacggcagctcactctcaccgcactgcagctcactctcaccgcagggcagctgacactcaccacacggcagctcactctcaccgcgccgcagctcacactca

SEQ ID NO: 48277 - DNA, 122 bp, Homo sapiens
gggctgagcccacccagggctggcgttgttcccaggagcgggtgccctcacccaccaactcgaggccgctcactcactgtgcagctgtatggcaggcccagcagtgcctctcccttcgtaca

SEQ ID NO: 48278 - DNA, 122 bp, Homo sapiens
ctggggcttccaggacacgggggctgtggtttgagcaatagttttcccagcagctgtccccgtctgctcggaagtgggctccccgaactctgccgctgggaaggaaaagagcaacatcagca

SEQ ID NO: 48279 - DNA, 122 bp, Homo sapiens
acacatactcttttgaatgcccatgtttggttgcatctgtgtctagctgtatgcactctacgaataagggtgaaaatgactttgaatctctgtatggcagtgttcagtccataaaacttaac

SEQ ID NO: 48280 - DNA, 122 bp, Homo sapiens
ctgcacactcatccatggagtggcactgagaggtgacagcgtgctggccgtcctcgtagccgtcgcttgctctcggcgcctcctctgcctgggctcccactttggcggcacctgaggagacc

SEQ ID NO: 48281 - DNA, 122 bp, Homo sapiens
agcgctcgggaatgtctcctggccaggcctggagattgcaggaggccgggcgaggagccccgcgtctcccccgtttccgggccgttgttttcttggctggattttgaggagggttaagtgtc

SEQ ID NO: 48282 - DNA, 122 bp, Homo sapiens
tgggaggccagacgcacgacccccaacccctagcgcacggcttcgggagccagaaaaagccgcctcttccaggaagctctccagataggcaggactctgcttggcctgacctcgcctgcctg

SEQ ID NO: 48283 - DNA, 122 bp, Homo sapiens
agccctgggtccctgccctggcccctcctcgccagcgtggccaagggtggagcaggcagtcgctctcagatctctgagcccttatgtttagaacctaggggcgatctagggagttgggagct

SEQ ID NO: 48284 - DNA, 122 bp, Homo sapiens
gctcagaattgaacacaacatttaagatgtgatgatcattgcaaactataatagggcatccgtttgtgggactctattaagtccaatttaacaacgcttaacttttgcagccacgttccatg

SEQ ID NO: 48285 - DNA, 122 bp, Homo sapiens
ctcagggctgggagggcgggctgtgcagagggcctgggacgcctgggtcctgcatgggaccgagcacttgggatcagtccccaagctcctgacaggcctggggtcccactttcacagcccac

SEQ ID NO: 48286 - DNA, 122 bp, Homo sapiens
gcccacttgcaagatggcggcagcctgggcaaagcacgcttcccgccgcctgactcgccacgtacccactctcaagatggcgtctcccgcaaagccacgcgccagctgactggctcagacgc

SEQ ID NO: 48287 - DNA, 122 bp, Homo sapiens
gcgagtgtgtgtgtgtgtgtgcttgtgaaaatgtgccgttcctcccagaaaaagtggaaacgtaggtggaaagctcagcacatgttggcgacacctaaaaaccatgttctcggtcctgaacc

SEQ ID NO: 48288 - DNA, 122 bp, Homo sapiens
agtgtgatcagtgcgggaaggcttacggccggagctgccacctcatcgcacacaagagaacgcacaccggagagaggccctacgagtgtcacgactgtgggaaagctttccagcacccctcc

SEQ ID NO: 48289 - DNA, 122 bp, Homo sapiens
gctgccaaggacagctgcacaggagcgtttcctgggcaggtatcgcctctcagagggaagcggttggctgcagagcgccactctgcctcataggtgctgtgctcgtcgcctcatccgcccac

SEQ ID NO: 48290 - DNA, 122 bp, Homo sapiens
ccgtgcccgggaccccgcccgccgcgcgtcacaaagcgccgccgcctcaccctcgtaggacgagcgccactcggccttgtgcttcttgtgcttcttgcccatggcggcgccggcggcgggcc

SEQ ID NO: 48291 - DNA, 122 bp, Homo sapiens
cctcattctgtccagcttgtgctcaactatccactcccatgtatctcttatatactgggacgatgaaaataggggtggtggaaacactactgcctctctccttctgaccccagatcactatc

SEQ ID NO: 48292 - DNA, 122 bp, Homo sapiens
tggaagccctgtgaaagcgatgctgggcccgcaagcaggcggggtgggcctggagctaggcgtttctcccacatgccccgggacgctgctttggaactgtgccgagtcccctgcatgccagg

SEQ ID NO: 48293 - DNA, 122 bp, Homo sapiens
caacagaaatgtattgtctcgcaggcctgaatgctagaagtccaaaatcagggtgtcagccgggcttcgcttcctctgaaacatgtaagagagaatacttccttgcctcttctggcttctgg

SEQ ID NO: 48294 - DNA, 122 bp, Homo sapiens
agtttcatgtcctaaaaaccttttactaatccaaaaagcttatctctttcagaagaggcacgctgcagaagtacttcttcctacactcaaatgcaaaaaaaaagtcatctttttacacatgg

SEQ ID NO: 48295 - DNA, 122 bp, Homo sapiens
ttggcgtggcggcagataattatattcctataattataaatgaagctcagagaggccaaacgtctcacaagaggtcacacagcagtaagaggcagctggtttttctgacttcaaatttcaag

SEQ ID NO: 48296 - DNA, 122 bp, Homo sapiens
ctccctgcgggggtgggggcggggccgcgctactgatgaggggtttaggacaccgtgagacggccaggccatttctgcctcggccccagacgcagaaggggtcccatgcaggcccgagccag

SEQ ID NO: 48297 - DNA, 122 bp, Homo sapiens
gggtcgctgtgcctgtccccgtgtgatccgaaaagtgctggcaaaatgcggctgctgcttcgcccgggggggacgtggtgagtgccaggtcgagagggtccagtgttgagtggggggcgggc

SEQ ID NO: 48298 - DNA, 122 bp, Homo sapiens
ctcctggggctctctcctcttcctctgagtggtctcctgtaccttctccagggagagccacgaggcttagctgggtctctagctgttggttctggtggctggcagcttctaggtgctcctaa

SEQ ID NO: 48299 - DNA, 122 bp, Homo sapiens
tcgccgcgaccacgcacgtgactagtgggccaccatcttgaatttttttaacctcctcctcgcccccaccttcgcacttaaagggaccgcagccatagtcaaaagcaaggggcggggccgca

SEQ ID NO: 48300 - DNA, 122 bp, Homo sapiens
cttttcaagtaaatactgagcaatctctttatgtcctttgtaacatgaaatcatcaagcacgtatgcccatgtcggtttgacacttccaaatcagctttgtgttctacaaggtacttcacta

SEQ ID NO: 48301 - DNA, 122 bp, Homo sapiens
ggctgcacctacctggtctgtacctttaacttccttcttctggccagattaccctctgaacgttgacccccatctgttcaccatgatattctgccatccttattccatcctgatcctaagca

SEQ ID NO: 48302 - DNA, 122 bp, Homo sapiens
ctcagtcctggccttgctctgagggtaaaacgccaactccttccagggggccaccatgaccgtctctgtctccttcctccccgggacctccgcgctctcgcggcgcttctggattcacatcg

SEQ ID NO: 48303 - DNA, 122 bp, Homo sapiens
cggacactttttatcaacaacacctccccgctatgcccccctctctggcgaggagacccccgtgctttccttggtgcacctgcatactctgaaggcctccatggggtcaacactgccccaag

SEQ ID NO: 48304 - DNA, 122 bp, Homo sapiens
ctttctaggaaaataaactttaattctagttttctgttgtatccacatccatgcaaacatcgattctttcaaaaattatttatagtttaatatcttcatgatttgttcatttattctttgga

SEQ ID NO: 48305 - DNA, 122 bp, Homo sapiens
ctggcgttcccactgcccactgacctacagcagccaagccacgcatcaccacggcaaccccggctacaacgggagaggcaacacgggccctcacatgcccttggacgcacccatccccctga

SEQ ID NO: 48306 - DNA, 122 bp, Homo sapiens
aggaggaatgaataaaggggataaagtccttatgtagtaaatgctagcccaccgtaatagcgaattttatgtgttaacttggcaaggccatggtaaccagtttttggtcaaacatcagtctg

SEQ ID NO: 48307 - DNA, 122 bp, Homo sapiens
ttaacccgacttgcctctgtcttctttgctacagtttggtgaagatgtttatgcttccttcgggaggagctgaatagatgctaggcagctagctgtgcgcttagaagaaacgagtgtattgg

SEQ ID NO: 48308 - DNA, 122 bp, Homo sapiens
tgaaagcccgcagccatgctcctctcccctcaggcttcgcaccttggtattcttcccttccgccgcctcctctcaatgtcagtgtgttcagccttagtgcgcacgctgcctctcccataccc

SEQ ID NO: 48309 - DNA, 122 bp, Homo sapiens
gattatgaaactcccaccctgctccttgaggttgatgagccttggtggggggacacccagcgagggaatgaggagtgggttggtgaggagggcaccctaggtgcccacctgggcagctgggg

SEQ ID NO: 48310 - DNA, 122 bp, Homo sapiens
gcacctggtacccgctattaataaataataggactgtctgacatttataaggcactttatcggtaataacagtgtcatctccataagccattctattagtggtaacaaataatagccccacg

SEQ ID NO: 48311 - DNA, 122 bp, Homo sapiens
acccctaaatgtggttgatgggcactaatattggaaaggtttcctggaaaggatagatggcggggaggcctagaattccaagcttagaatgttggaatcttttttcagcaagcaatgggaaa

SEQ ID NO: 48312 - DNA, 122 bp, Homo sapiens
actgggaagtcggggcagtgaaacgctgcagacttgtgaagccctttttttcacagtctacgtgtaggtccccttctatctcattgcaggaacagatcttctctttgcaaacgtcccctgta

SEQ ID NO: 48313 - DNA, 122 bp, Homo sapiens
cgcccagtccccgaagactggggcgagtttggtagggccatcagggccccagcccgcaggcgggcagcctcctcctcggttaccgcacctagagccaggctcatgctccgacccagctcggg

SEQ ID NO: 48314 - DNA, 122 bp, Homo sapiens
ggcggggccgggccgccgtcggttcccacggcaaccgactcaacagtaaggccccgcgggcgtcctggccgccatgtgcaccgtagtggaccctcgcattgtccggagatacctactcaggc

SEQ ID NO: 48315 - DNA, 122 bp, Homo sapiens
agtttgctggatggaacagcagtagcagcatgtacaaatgcaaagcttcatggaagagtacgctgtgctaagggaaggcaaatgtgcctgcagtgtgaccaagctagaaagaagaaacttat

SEQ ID NO: 48316 - DNA, 122 bp, Homo sapiens
ccccaccccacggcacccaagcacgcgctcaccccactcaggcctcaacgtccttgtttccgggacacacaagaggagatgaccgctaaggcctcctcagccaagaccaagtggacaggact

SEQ ID NO: 48317 - DNA, 122 bp, Homo sapiens
gttttaacccctgtgcagtgctaccttcctgagggggacacccagccggccataatgcagcgtggtgagtagatgagctgcaagtgcgggggaacacaggaaagagaaactcggcttgggca

SEQ ID NO: 48318 - DNA, 122 bp, Homo sapiens
ccgaggtgagggccaacctggccacaggggcttttccccctgagatttcttcagcgccttcgcccgggcctttgcccttctgccactttcctaccattttccacttactccatccaaactgc

SEQ ID NO: 48319 - DNA, 122 bp, Homo sapiens
cagcttttctaggtgcccaaagcagttctccctccagtgacagactccagggaatcccttcgattcactgccctctgtatgtcccagggcaactccctgggtcccattcctcaacatggatt

SEQ ID NO: 48320 - DNA, 122 bp, Homo sapiens
ggacttcatgcagactcttcagtcagaatacctgcattcgtgtattttctcagtcagcttcgcctcggatgcattacttcacttctgtgcctccgtctctcagctgtgaaataggatcctac

SEQ ID NO: 48321 - DNA, 122 bp, Homo sapiens
atagtaggggcttcgtaaatgtttctgcaatgctgtttgcgaatcttgaacttattctggcggtagagggagagtgggatgggcgcagggtcccttttaaagaagggtcaaaagagagaaga

SEQ ID NO: 48322 - DNA, 122 bp, Homo sapiens
aatgagagtccttttgcattcttagagtctactgtgatggtcttcctccttctagtttgtcgcctgtgtacaacacaggctaggtgctaggcgacccttctgaaacatacctctgccatgat

SEQ ID NO: 48323 - DNA, 122 bp, Homo sapiens
agtggggcgggggaccgggccagaagctaagagggcgtcctcgtccggggcccgggggggcgccacacctgtgcatgtgcaggtctagggggagcactaagaccagccgcggcgccgggagg

SEQ ID NO: 48324 - DNA, 122 bp, Homo sapiens
ttagaagccctggagttcaacaggtgttcaggagggtcccggagaggagtttcgtctttacgcgttgctttggcatccaccccaacttcattaaagtggttagcctgttttcctacaggtaa

SEQ ID NO: 48325 - DNA, 122 bp, Homo sapiens
ggcccctccattccagctatttccgcccggggaccgaggaaatcctcaaaagccgggccacgcattcccagcccgagaggccccagcgcagagcgcagcagcccccgcgagcgcaggtcctc

SEQ ID NO: 48326 - DNA, 122 bp, Homo sapiens
gggaaggggccgggccgatggccctgactggaactcactgccctgctgggtgaggccccacgccggtggcaggtggacgcgtcgctgcctgcttagggatccccttcctggaatcttggcct

SEQ ID NO: 48327 - DNA, 122 bp, Homo sapiens
gcaagtgggccgagcgcagacattgcgcctgcgcagcaatgccatcggttaaagcgcatgcgcaagatgagctattgcggaagtgaggggagggagaggccgagagaaatttcggtactgcg

SEQ ID NO: 48328 - DNA, 122 bp, Homo sapiens
agtttgaaaagctcttggactccggctgcagcgtcagcctccctcgggcctcggcagcggcggcggctcgctcgcctcagccccagcgcccctcggctaccctcggaccaggcccgcagcgc

SEQ ID NO: 48329 - DNA, 122 bp, Homo sapiens
atcttgacattttcccaaaggcgctcaagcgggtgcagacctaccaatcaggcgcagtgccgtctgcgtgagggccagcatgccggaattgagcagaaggtcgaggttgtttgcgccgtgct

SEQ ID NO: 48330 - DNA, 122 bp, Homo sapiens
acgtagaagtacactgagacttcgtcacacataaaacaagcacgacaaagaaagagggcgcgaagggactcctggaagaaattgagtctacatttaagatcaccctaaaagtagtgacggcc

SEQ ID NO: 48331 - DNA, 122 bp, Homo sapiens
gggacagtacaggctggcaaatcctatttctgaaagagcatcccacacacggaggaggttcgctctccatctccatcgccaccaggaagaatgaggtaaaaagcaggaggaggctccgtttg

SEQ ID NO: 48332 - DNA, 122 bp, Homo sapiens
cggtggcagagggcgattctgggagagattgtcggggagggggccagctagagtttgcatcgcttttgacagctaattagctgtgtgtctttgcaccggggggcctctcagatggcaggcat

SEQ ID NO: 48333 - DNA, 122 bp, Homo sapiens
cctacaggtttaccaagggatttctcatgaacaaagtgaggggacccctgttaaccaaatcgcagatcccagtgaatgagagctcctagtctccagcctggccctcagacttccaactcacc

SEQ ID NO: 48334 - DNA, 122 bp, Homo sapiens
gtgaacctttctgtgcatgctgcagggatgctgggtggatgggttggcagtgttcggcttcgtagttgcccacaggccctctggaaagtgcggagaccagtggctggtgtagttgcgtgagg

SEQ ID NO: 48335 - DNA, 122 bp, Homo sapiens
taatctcattttctgtttctgctacaatgtcaaattctggggaaaaaaaaggacctgcatcgtgcaaactcctattgtgtccgagcctgctcctgtgtcaatctccagtgtggcatccatgc

SEQ ID NO: 48336 - DNA, 122 bp, Homo sapiens
ctgtacgcaggtgacctgctgtatgaccctgcggaagcccctgaccccatccgagttccacgttctctctggatgagcctggcattcctaggcctgccggacgaggcaggaagcctgaggca

SEQ ID NO: 48337 - DNA, 122 bp, Homo sapiens
gggggcgcaggggggaggaggtgacttctagggtttcgggctccgggacggggcgtaacgcggtgactgaccctgggagagagagagccagcttgttttgacgaaggaatatgtcattaggg

SEQ ID NO: 48338 - DNA, 122 bp, Homo sapiens
cgcagcgccagggagagcgaggctgcagggcgaggcctggtgaggcgctcgacaactggccgggaggagaagtcaagctgcccacccgccatggcagcctccggcgcacgcagagcttcact

SEQ ID NO: 48339 - DNA, 122 bp, Homo sapiens
gcctttctgcaggcacaagatagcagagaagtggaggaagccggtggtcccgggcctgcacgttccccgaggcaggcctttagtactgggagccctggaccagagacagcaatcatgaaaca

SEQ ID NO: 48340 - DNA, 122 bp, Homo sapiens
tcaagcttcgctgctgggcagttggctggaggggctgctgctgggaacacctggagtctccgcgggcaggtgagcttcagaggttcggggagctttcggaacgagcattcctggccggtgcg

SEQ ID NO: 48341 - DNA, 122 bp, Homo sapiens
accatggcatattggccgtagtgttcatatagtcatggtgaatcactgtggcatattggccgtagcgttcacgcagtcatggtgaatcaccatggcgtattagccatagtgttcatatagtc

SEQ ID NO: 48342 - DNA, 122 bp, Homo sapiens
gggcatccttcctggtgttggtctcctcggggagcggcaggtcctcaccgaggaaactggcgctcggaggggaggacttaggtcctgggagaaaccaccagcccccaccctgaaagctgccc

SEQ ID NO: 48343 - DNA, 122 bp, Homo sapiens
aagccggtgtccccagcagggcagcctgcgagaagcgctgagtcatggcaggagatcatccgagccggcgtgtgaggaggaggaggaagagcgagtcctggcagcgctgctggtggcggagc

SEQ ID NO: 48344 - DNA, 122 bp, Homo sapiens
ttttttaagatcatccacgggcttcattcccgtaaccgctcttctagctggccaaggcggcgggaagaaaccccaccctcttgcgcaaacgcccagtagcggaatccgcggggtcgagggct

SEQ ID NO: 48345 - DNA, 122 bp, Homo sapiens
cctgcagccacttggacggctccgggactgattgcctggggcaggggtggcagtcgaggccgccggggccgaggtgaggctgcagctctccgggcggcggtagcgctggggaggaggaggag

SEQ ID NO: 48346 - DNA, 122 bp, Homo sapiens
atcatcacttccaacacatctgctagtcacacacaacaaccctggtagaaagtgaacgggcgtgttttgggaggctgaggcaggagcactgcttgaggctaggtgtttgagagcagcctggg

SEQ ID NO: 48347 - DNA, 122 bp, Homo sapiens
gaatgttttcgcaaatgttgctctagtcagtccagctcatctgccaaaatgtagggctaccgtcttggatgcatgagctattgctagagcatcatccttagaaatcagtgccccagatgtac

SEQ ID NO: 48348 - DNA, 122 bp, Homo sapiens
cgcccggccttagctggtttttcaaaagtcatggcgtgtaattgtccgaacagtgaacttcggagatccaccggaggggcgaggccacagctcgaccgcgagcacctgagcatcctgcaccg

SEQ ID NO: 48349 - DNA, 122 bp, Homo sapiens
gggactacaagctacttgtctacgtaactgatgacaacttgatgtctgacaggaagaaagcggaggctcttgttgagacaggaacagtgacactgagtattaaagtcattccccacccaacc

SEQ ID NO: 48350 - DNA, 122 bp, Homo sapiens
gccacaaaatatgcttgttataagcaattaaaaattattcttaaaaagacattaccgacccgggttctcttgtagcctgaaaggttcagctggttggttttactatactaccaagacaaatg

SEQ ID NO: 48351 - DNA, 122 bp, Homo sapiens
gcgtcgctcggtcgttggggtgccggggacgtcgtgatgagaacggcgtcccagagacggcggtgacagagccgggacacgtgacagtcacagggtcacattctgcggtccacgagtttggg

SEQ ID NO: 48352 - DNA, 122 bp, Homo sapiens
cattgcaaggaggttattcaggttgaggatatttggttcgttgctattcctctctcctaacgcgtgtactttggttgttttacagctgatttgactctccaccaactgaccagcatagaaag

SEQ ID NO: 48353 - DNA, 122 bp, Homo sapiens
tccttgtgactcgctgctcttgtttattcctgaggatttacttaggtcctgcataactgccgaaatgtgctggaacacgtacatctggcccgaggcacaggaacaatcgcgaaatcctgcgc

SEQ ID NO: 48354 - DNA, 122 bp, Homo sapiens
gttattgctcaatctcaggtggctgaacgccacttgtccctctaagaagttgggggatgccgaccgctccagggtcacataactagttggcatgccagagtctcgttcgttattggaattag

SEQ ID NO: 48355 - DNA, 122 bp, Homo sapiens
ctaggacattctgggaaccacagggatatgcactaccctttccttccttttgcagggtggcgacagggaccagggccacactcactgggcctaggggcaaccctggttcagacactccaggc

SEQ ID NO: 48356 - DNA, 122 bp, Homo sapiens
catagggcggactcgggcccagccgctggaggcgtgtgcatgcctgtgcgcgcttgtgcacgtgcatctgagttcgggtaaatataggactgcagttggtggatgaattgcgtttgtgcatg

SEQ ID NO: 48357 - DNA, 122 bp, Homo sapiens
gcacgctgtgggcgtggctgggcgcgctgggggccgctgggctgccgctggaggtggctgcgctgcgggagcggtgggcgcgcacctgcctcctgcatggcgaggcctgggggcggggcgcg

SEQ ID NO: 48358 - DNA, 122 bp, Homo sapiens
ggcgagggccgggaggtgccaggtctggggtcccgggtcagggatcttggatctgggtcccgaggcaggggccggggtagggacggggcggatgcgggtctggggatccagtgggcagagtc

SEQ ID NO: 48359 - DNA, 122 bp, Homo sapiens
aaagagggaaaataattgctgctgttctgattttccaagaacaggtgaaatacattctgtcgtgactaaaacaccccgagccataacttttgaggctatttcacatttctccccctggcaga

SEQ ID NO: 48360 - DNA, 122 bp, Homo sapiens
aatgctagcaggcaatgccaggactggtgtggaggggtctgtgtgatggcccgggtgtgccgagtggagaatgaagggcaccaggatacccccagaagtctctggctaaggccttttgtggt

SEQ ID NO: 48361 - DNA, 122 bp, Homo sapiens
cctgtgatctcaaggacaggcccgactgtggacccgtgggctactctcttacctgagagacgtcctcacggagagcagaacctagcagcctcaggggctgcctgggggtgactgtttccgtg

SEQ ID NO: 48362 - DNA, 122 bp, Homo sapiens
cacaattaaagctgtgttggttaggttgctttcaaagaagttttttttttttttttcctccgaagcctcctgaatctctcacatgctagttgagctttaatagggtggggagtaatggagaa

SEQ ID NO: 48363 - DNA, 122 bp, Homo sapiens
ctggcctggcagggcacgagtgccatgaatgggtctcaggacagtggcttttcggtcccccgtcctcgctccctcaacacctgagggctcatcacccccgtgaagatatatccaataattag

SEQ ID NO: 48364 - DNA, 122 bp, Homo sapiens
agcttaaggatttatagcctggcattcaggactgagctgtggctttccaaaatattgaaacggcaagatgtttatcgcctagctcacgtgactgcagaagacattagtaacgtggctgagta

SEQ ID NO: 48365 - DNA, 122 bp, Homo sapiens
ctccggggctcccggtccctcaggtcccgcgtgcccggccctgggcatccgcagcgtccccgtggtatcggacccccatcgtccctgacacctggcgtctccgccccccgcccccgtccccc

SEQ ID NO: 48366 - DNA, 122 bp, Homo sapiens
cagggggccgcctgctgggaagtgctacctcagctaagccgctcaggtgtcccgagactccgggcaagggaagacaggcggcgagacggagccagaataagggatgcggacgtctgacctgt

SEQ ID NO: 48367 - DNA, 122 bp, Homo sapiens
acaaaagggcactgagacgctgagggtttcaaagtcacatcttggctaactcctctgccccgcccactagagggaagaaaaaaaaccttccttaggaggaaaaaaaaaatacacacaaagag

SEQ ID NO: 48368 - DNA, 122 bp, Homo sapiens
aggaacagcactcctggggctttgctggaaccatcggcgtgggaatgctgtctcttccctcgccagaaatacgacaagttcccggcgggtagcagacttggttctaattttcctcgccccag

SEQ ID NO: 48369 - DNA, 122 bp, Homo sapiens
aacaaaaaatggcactgaactttgtctgaaggagtacagtttagttaagttggtcagattcggcatttgaataatgactgtgctttgagccctaacattaaagccctgtagtcttccttcag

SEQ ID NO: 48370 - DNA, 122 bp, Homo sapiens
gcgtcgctcccacggcgcccagggtacccccgccgctgtctgcctgtcttcctccattaccgcgcaggcttggtcaccgcattaaggcattcccgctctccgcggaactgctctgccgtctc

SEQ ID NO: 48371 - DNA, 122 bp, Homo sapiens
cgcatcgcgccgccctcctgctctcgcacagaacccacgagcacgtggcccctgtggccccgtgagggctctggcgtgtctaagtagccagtcactcccgggagcaacacaagtgactgtgg

SEQ ID NO: 48372 - DNA, 122 bp, Homo sapiens
ccttcccttcgctaccaagaaagatctcgcagtggaagaggattcgacgctggggatcaccgcggagatccacactcgtctgcccagacccgtccccgctctcagcgaccctccttatgtcc

SEQ ID NO: 48373 - DNA, 122 bp, Homo sapiens
ggacgagtacaatgagatgcccatgcctgtgtagccgccaccgagggacagccgagggaccgatggacgaggggacaggctggtgggatggggttccccctcccatgcccctccctcctttt

SEQ ID NO: 48374 - DNA, 122 bp, Homo sapiens
ggagatgagtgcgcatagtgaggcgccggctggtgtctgagctaagaacccatggggacccgggagccatgaactgcgctccacagccccttcccccggcctcacccctacccatcttctgc

SEQ ID NO: 48375 - DNA, 122 bp, Homo sapiens
aagaatgaccatgagacacagtggccatgggtggatctgaaagctggtgttgagcctgggcggcgtgagctctgtgttggacccacggaggagggagtcactgcagggaaagagggacactg

SEQ ID NO: 48376 - DNA, 122 bp, Homo sapiens
aggcagcacctgagggatgaccccgggccagactaaggtggagcttggtggtcagaggtccgggtgggaatcctggcatttctgggcgtgggcgatgaccctgagctggctgccttacctct

SEQ ID NO: 48377 - DNA, 122 bp, Homo sapiens
gtgtgtgcattctttataatgaagcattttacaaagtggtttcacatacattactgcttccgtttctcattacagccccattaatattccccacctgatgaggaaactttcttcattctcct

SEQ ID NO: 48378 - DNA, 122 bp, Homo sapiens
ggccgccgcaggtcagcgctgacctcctgctgccgagaggaccgaatgccgacgtccggacgctgtcatttccatccagcgaaggcacctgggctgcacggtctcgtctccctccttcgcgc

SEQ ID NO: 48379 - DNA, 122 bp, Homo sapiens
agggcgctagcccgcagccaatgagcaacgagagcccgactgggagtcgcgccggccaatcgcaggggccgaggaagccttgaatctccgggcaagttaagtttatctccgaggctcggaac

SEQ ID NO: 48380 - DNA, 122 bp, Homo sapiens
taagttgtgccaagctctctctgctgtatccgaaagtctggcgccttgcgggtcagcccccgagggccatcgagccgccgtctcccaatactaagttcacttcgtgtctctcatgacaggga

SEQ ID NO: 48381 - DNA, 122 bp, Homo sapiens
gaacagccggagaggtctatacaatcacttaattaccaaaactgtcagtcaggcgggacgcggatccgcgtcccgggctgcgctaggcattccagcactgggccgcgcgcgtgattgatcgg

SEQ ID NO: 48382 - DNA, 122 bp, Homo sapiens
cctcctccccggtggctgaaagcaccagctcagagcaaacgtgtccaatgctgggctgcccggcgacttccgcgaggtgctccagcagcggctgggggagctggagaggcagcttctgcgca

SEQ ID NO: 48383 - DNA, 122 bp, Homo sapiens
ggcatttccggggtgtcttccgaccaggattggaacagctactgcgctgcctctgtgggtcgcggaacattgccttgctcccagtgtgccactgcccctccctgattgccccaggcctgctc

SEQ ID NO: 48384 - DNA, 122 bp, Homo sapiens
cgggcgcgtgcacaccccccgggcgtggacgtgttcccagctcccgctcctggaggacggcgccatcttgtcttgtggctttgtgaagtgaggacgtcagtacttttgttgtttggtcccgc

SEQ ID NO: 48385 - DNA, 122 bp, Homo sapiens
gatggtgccgaagatctcctcgcccgtcttcaaggtcaggtagtcctccatgtagaacaccgtctgcttccagtgcgtgtacagggactcgggtatggtggagaagccggtccctccggtcc

SEQ ID NO: 48386 - DNA, 122 bp, Homo sapiens
ttcccttgatcctgaaggaggaggccagcgctgatggccacgtgctcagcttttctgatgcgcagtgtgttcccatctgtgccgcagtgacctgggagaggccacgctgaagattgtgggcg

SEQ ID NO: 48387 - DNA, 122 bp, Homo sapiens
ctgtgggcagcggcagagatcagcgcacgtggggcctgcgcaggtcctgctggagaaccgcgcgggacccgggccggcagggcaccttcagggccaggaggtcgctctccaggctgtgtccg

SEQ ID NO: 48388 - DNA, 122 bp, Homo sapiens
accctactgtccgcactcctcactccacagtccataccccacactctgcagtccgcactccgcagtctgcactctgcattccacactccgcagtcctcactgccgcagtccacactctgcag

SEQ ID NO: 48389 - DNA, 122 bp, Homo sapiens
tttggcagttttcgtgctaatgtttttgctaaggaagataaactctgaaccattaaaggacgagtttaaaaacacaggttggtttgatggtgaatctttgaaatctatttccaggggatggc

SEQ ID NO: 48390 - DNA, 122 bp, Homo sapiens
cggcaggagagaccagcagcaagttctgggtaattacagccgtcatcaggtgagcctggacgttacccggaatcagccctcacacctgcaaggggctccgcgctttctgaagggcttctgcg

SEQ ID NO: 48391 - DNA, 122 bp, Homo sapiens
ccacgcccggtgagtccccggggctctggaaccgtggattttctcggaattgccgttccacgcccggtgagtcccggaggctccggaacacggtttctaacgcgcaggctgatgatttctaa

SEQ ID NO: 48392 - DNA, 122 bp, Homo sapiens
tataataataatcactattattcctgaagggaggctattgcacccttccaattattcagacgatttgctgactgtctggataattccgaagcctttaacccctccctaacgttagaggcggt

SEQ ID NO: 48393 - DNA, 122 bp, Homo sapiens
ccaactgggtacctggatagattccagagacaaactttccctacatcctagattgtctagcgttggtaggatgtgggttaactcttttcaactttagcagatgggaaaagtttgcctctgga

SEQ ID NO: 48394 - DNA, 122 bp, Homo sapiens
accaagaactggaaggaggacaagagctccgagaaggagtcaggtagggcgtgatctgtgcgctttacatctaagatcttccagctcccagggagcccgtttcatagagcaggagatagagg

SEQ ID NO: 48395 - DNA, 122 bp, Homo sapiens
cacctccctggggaccccagcctcccgcaccgtgtcacctccctcgggaccccagcctcccgcactgtgtcgcctcccccaggatcccagcctcccgcatcgtgtcgcctccctcgggatcc

SEQ ID NO: 48396 - DNA, 122 bp, Homo sapiens
ccctttattccccaggtgtttgctctatcacagtatctataacatagtaagagctttattcgggtgcttagtctggtacctgaaatgcattagtgaatgttgaaaatcacattgtcttgact

SEQ ID NO: 48397 - DNA, 122 bp, Homo sapiens
ggcgcggcagggggcggggggcgggggcgggcggcggcgaggcggcctgcagggagcagccgcgagccggccgggcgcgccgagcccgagccccagccggagcggggcgggggagggaggag

SEQ ID NO: 48398 - DNA, 122 bp, Homo sapiens
ggaaggaagagcccatcccctgcacagcccactggcacttcgggcaataactctgtggcacgtgggcatcacgtaagcagcacactaggaggcccaggcgcaggcaaagagaagatggtgct

SEQ ID NO: 48399 - DNA, 122 bp, Homo sapiens
gctccttgttgtcgcagcctacagagcctggggctgcagagcggggcaggggcctcttggcggcctgggcgcccggctggggagagcctgggcgtctccctttgtttttccagcagttggaa

SEQ ID NO: 48400 - DNA, 122 bp, Homo sapiens
ccccttcctgtttgtgctggagccctctctccattcgtccatgcatccagtgccaagaagcgccacaggtcaccttgttagcagcagggcttatggattctttctgtaggacagctgtgact

SEQ ID NO: 48401 - DNA, 122 bp, Homo sapiens
ccctcggcgagcatcaggtggtcggccatggcggcaggccggctgcctgcggggacagcgcgcggtggtcagcgccggctcccccggcccgggccagcggctgctctgcggcgggagacccg

SEQ ID NO: 48402 - DNA, 122 bp, Homo sapiens
ggggctccgggcgcgggcggggccgggggcggggcgaagagcggctttccagggtgacttcgtgacgtcaggaaggcgcgagtagtttcgcgagttcgaatcccgcgctaggtgagctggtt

SEQ ID NO: 48403 - DNA, 122 bp, Homo sapiens
gaccaagctcatgactcacaatggcctatttaggcccataccatatctcacgacagtctccgcagatgaggctactgcctcacaacagcctccacaggcacagctccatcgttacaatggcc

SEQ ID NO: 48404 - DNA, 122 bp, Homo sapiens
tccccggtgcccacctgcgttcagatcagcccaagccatcgggtccccggtgcccacctgcgttcagatcagcccaagccatcgggtccccggtgcccaccatttgagcagctcagggccca

SEQ ID NO: 48405 - DNA, 122 bp, Homo sapiens
tcctcaccagaaccctctaaggtaggtaccatttctatccccatttattgatgaagaaaccgaggcctggagaggttgtataccctgctgataaacttgtgataaagcagctctgtggaagg

SEQ ID NO: 48406 - DNA, 122 bp, Homo sapiens
cgagatagcagtatgttagcatctgtggtgttctgtctaccgcagagtcctgtgagcctccgggtgctcgtgtccgtgcactgtgacggcctttgtctcttttgttttgttatttcaggggc

SEQ ID NO: 48407 - DNA, 122 bp, Homo sapiens
aaagtattgccctccttaataaaagaaaacctagaacttcaaggctgacattggccttcgcgtagcccaatcagagcgctttgcccttgctgcagaggactaaaggacgccacgccgccgtt

SEQ ID NO: 48408 - DNA, 122 bp, Homo sapiens
ctaagcagtgcacactgtgcacactctgcacacgctcaggcggtgacacgttgcagacatcgctgtgcttcagaaagagctgggcggcaagattcacacaagtaagcatgttgcagactccc

SEQ ID NO: 48409 - DNA, 122 bp, Homo sapiens
agaccctgactcttaagggaaaaaaaaaaaaatgaaggaataggaacagagttgcataggcggcaaatggtgaaacaagaattcaggctgggcttggtggctcaggcctgcaatcccaatac

SEQ ID NO: 48410 - DNA, 122 bp, Homo sapiens
cggagcctgcgggagggagcaggctgggcgcgtggtggggggcgcgcgatgcggagggggcggcggcgcagccaatccgagaggcggccggcgccccctcataccgccccgcggcctcgccg

SEQ ID NO: 48411 - DNA, 122 bp, Homo sapiens
gttttttctgaggaagtcgaggagggcgaatatctttctggaaaggccagagcaaatgcacgcaagagctgagaaaagattggaaaacgcctctcaaaataacagtcccgcccttcccggga

SEQ ID NO: 48412 - DNA, 122 bp, Homo sapiens
cgcggccggtggggccggctggcggctccgagtgcggggtcctcggagcccatgcccacccggaactccctcaagcacggcgcacagcccggttcctgcccgcgtctgtccctccacacctc

SEQ ID NO: 48413 - DNA, 122 bp, Homo sapiens
gggttatgagcgggttgggaagtgtccccacgtggttcacacctgccctctccatgctcacggaaccacacgctcgctccatcgtttgttgggggttccgtcaagtgccaggtcctcagcgg

SEQ ID NO: 48414 - DNA, 122 bp, Homo sapiens
tttcatggggggaaggggctccagttaccagccccgcaccaagccggaaggcgccgcccgcgcctgctgcccaccctggggaccctcctcagaaacccagcacaggctcggccccaggccag

SEQ ID NO: 48415 - DNA, 122 bp, Homo sapiens
ggtttagttgtgctgatgacaaatggacctttagaacccctggagacctcctgggacaaacgagttgccctttatgtgttggtcgtgaatgttgcctgttcatgtggtggtgggtgccatct

SEQ ID NO: 48416 - DNA, 122 bp, Homo sapiens
gaggaggacaggggtggtggtggacgcggagcagcgccacagttaccaacccacgtgccacgctccgggctcgcgagacttcggcgacaccgtccggaggaggtgctaaggcggcggccggg

SEQ ID NO: 48417 - DNA, 122 bp, Homo sapiens
ccccgccaccgggaaggggctggctgtgggcagagccatttggtccagtgccaccaccaacgctgctgccacctctgcaggtgctgtgagccaagctgctggtaccagccaaagagggcctt

SEQ ID NO: 48418 - DNA, 122 bp, Homo sapiens
tatatgataatgaaaccaaatcaatgtctctgctcagaccccttctgacaaggtctgtggcgcccaccatggcgttagggccacagcctcctgccccatgtgccaggcccggctctgcccag

SEQ ID NO: 48419 - DNA, 122 bp, Homo sapiens
ttcctcagcctggaagaaacttctcagcaaacccttctcacacaaaggccagacagaatccgacagttttgtaccttggcccacactcttggtctgagtgctgaacatgtgcttcagatttc

SEQ ID NO: 48420 - DNA, 122 bp, Homo sapiens
accagcccagggtgctacaggaagggccagctcctcccatggcctcgccctccacaccagcgggttactctgacttaggggggatggccctgctatgcccaacattcactgtgggtggagcc

SEQ ID NO: 48421 - DNA, 122 bp, Homo sapiens
tgataatgcgctgccgaagtcgggtctcctgatgtcgctcctggttgtgatcttcatgaacggcaactgtgccactgaagaggaggtctgggagttcctgggtctgttggggatatatgatg

SEQ ID NO: 48422 - DNA, 122 bp, Homo sapiens
gtgaggccaggagattcacatctgcagatgccacagtgaggatacagcatttagatccctcggctccaaacaggcggttccgggggaccggtagctggggaattgggtttagcactttccaa

SEQ ID NO: 48423 - DNA, 122 bp, Homo sapiens
gggtggtggaggtgagaaagaccctgggctctggcttgggcatggtgagaacagagggtccgcccacagagagaggccctgggaggatccacacacagatatggtgcttaggagagggggcg

SEQ ID NO: 48424 - DNA, 122 bp, Homo sapiens
taacagaatatcccaaaccccaaggtgtgacagagtaaggcctgtgcagctgcagcgtggcgctgagcaggaaggacgcgtggagatgccggctgtggcgaccgcgtgatttgaaggcacct

SEQ ID NO: 48425 - DNA, 122 bp, Homo sapiens
cccaaatccctggataggaaacccctttctcctcctgctccttgtccccttcatccctgccgcccagcatcctactggcctcagcacctgtggccagaccgtccaagatcctctgaaggccc

SEQ ID NO: 48426 - DNA, 122 bp, Homo sapiens
gaccttaagtgatctgcctgccttggcctcccaaagtgtgggattgcaggcatgagccaccgcacccagcctgaaagagtattagctatgaacataccctgacacctctcttttaaaaaatt

SEQ ID NO: 48427 - DNA, 122 bp, Homo sapiens
ccgcgcgtgctggtgttctcctccccaggtccaggaacaccggtccaggaagcctgagagcgctggcagtaggaagggtcgccagtgtggacctgagggtggaggtgttgccacccggggcg

SEQ ID NO: 48428 - DNA, 122 bp, Homo sapiens
ctgggccctccaaagaaagtgtgctgtccttctgaagagaagaaatgattgcatggcttccgaggggctgccatattcatattactgtagtagagtgtccagagtcacccagaaagattagg

SEQ ID NO: 48429 - DNA, 122 bp, Homo sapiens
gctgtaacttagagatcataggcaaaagataactgcaactccttctccaaacactcccttcgcaatcaacaaaagatgacattccaaaaacaaattatatataagcctttgaattcctaagt

SEQ ID NO: 48430 - DNA, 122 bp, Homo sapiens
agcacaggtggtctcacatctgggaacgaagcctgagtccccagggaaggactctcgccacggttaacggcatctttacggatgtcaaagaatagcttgggagggtcaggaggaggagcagg

SEQ ID NO: 48431 - DNA, 122 bp, Homo sapiens
gggctccccaacccagtgctcccagcgcccacctccccagccgacgatttccgcccccaacgcctccacttctgacgctcctcgcaactccacggctgctgcaagttaacttccacgcgccc

SEQ ID NO: 48432 - DNA, 122 bp, Homo sapiens
gccaagcacattttgcactgtaaggccaagtacggccgccggtctgggacttagtgtcaccgggaggaaaagagagagatctggggctggggtatggatgatggggggaagggcggtcgcct

SEQ ID NO: 48433 - DNA, 122 bp, Homo sapiens
gtagtccagagcgggacccacgccgattcctgtcagctcctcgcctgggcccacccgaaacggctgctccctcaactctcaacatccagccgagcctcggagttgcgggtcgccgtagcgct

SEQ ID NO: 48434 - DNA, 122 bp, Homo sapiens
acaaattggaaactcattaaatcacctggaaagtacagtaagcacagcacaggtatatcacgttctgcaccgtgccaaccatgagagaacaatacatttcgctttcccatcccccactatgt

SEQ ID NO: 48435 - DNA, 122 bp, Homo sapiens
agggtaacgtgataatgagcgaagagcctgttgctttagctggagtggtccagaatcgaccgctctgggaccctcaagtgcaaagccctgaggtggaaggagcttggcgtatttgtagcagg

SEQ ID NO: 48436 - DNA, 122 bp, Homo sapiens
ggtaacaaccagtcgcctgaggcgtggggccgcctcccaaagacttctgggagggcggtgcggctcaggctctgccccgcctccggggctatttgcatacgaccatttccagtaattcccag

SEQ ID NO: 48437 - DNA, 122 bp, Homo sapiens
cccctcctactttcacccctcttctttattttcctgcgaaggaatccatctgtacagatccgccaggcgggaggtggaggagggtgcgcgagggtgcgcgcgtgtgtgtgtgcgcgcgtggc

SEQ ID NO: 48438 - DNA, 122 bp, Homo sapiens
cccgggtgctaagcctctcattgcccggggccggcagggctggccggctgctccgagtgccgggcccgccaagcccacgcccacccgaactccacctggcccgcaagcgccgcacgcagccc

SEQ ID NO: 48439 - DNA, 122 bp, Homo sapiens
ggcgtggcaggtgcagggctgggcaggtggctggggccagctaccctcttcctgctgagccgcctgggtctggggaggccccatgtccagggctctttatgcagatccaagctgcggttgct

SEQ ID NO: 48440 - DNA, 122 bp, Homo sapiens
cagctgcgggagcggctcggaggggaccccgtggcccggttgtcataacaactcagcgggcgcctcgggagggagactctgaagcttatttttagagcaccgtcgccctaacaaccaggctg

SEQ ID NO: 48441 - DNA, 122 bp, Homo sapiens
tccccagaatttgaaccttaataacaggtcttggtcattgttcatcataataacgtatcccgtggtctccatcagtggaattactgagctctgctggagagataacatgttccctgaaaaca

SEQ ID NO: 48442 - DNA, 122 bp, Homo sapiens
gttggagtgtacattaatcaaattatgtaaataaacacaaaattgcaactgtaacaaatgcgatgaagcagacgtaggaaacgccaacaaacctgaatctgacctagttaagaggtgaagga

SEQ ID NO: 48443 - DNA, 122 bp, Homo sapiens
cgctacccgtccccagacagcagggtggagagcatgctcatacccacctggattggttctcggggccctgggggctcctgatctcccactcagcaccaggctacccagtgtaaggtggcgtc

SEQ ID NO: 48444 - DNA, 122 bp, Homo sapiens
tccagcgccagcagcgcctggcagtctccctccagtgcagagaagcggtctgtatcaaggcgtatcagagtggtcaccctgctcctcggaatattcacgggcatttgcaaactctacagttg

SEQ ID NO: 48445 - DNA, 122 bp, Homo sapiens
ccacatgggtcttcatcaaagcagaggtgcacagctccttcctcgaactaaagcccagctcgtttgagggggagaacggaagctggcgcaggaaggctgtgtggattccccaaggcctgatg

SEQ ID NO: 48446 - DNA, 122 bp, Homo sapiens
tggcgctgccactcgcgctggagtttgcgggagtttgttgggtcgactttggcgccgccccggggccgctcgcgcgctgccagggccagggccagggccggagccggcgcaggggcgggcgg

SEQ ID NO: 48447 - DNA, 122 bp, Homo sapiens
gagagtcccgtggtcttcagaacagcctttctaagccacagtgtactcattcaatcaacacgtaggcctctactatgtgccaggctttacaaaacaggtataacagtagctgaaatggtagt

SEQ ID NO: 48448 - DNA, 122 bp, Homo sapiens
tgcattttaaaaagatctccagatgtttgtgtccatatgtacattaaaggttgagaagtccggctctggagagttccttcacttgctttctgaagtgatggactccttggattgggcctgtt

SEQ ID NO: 48449 - DNA, 122 bp, Homo sapiens
ggggagcccaaagtaggctgtcagcaaatacagcctatcatgaatagtcctctcatacgacggtgaaaaccataaataaatggcgcaaaaacctctttgcacgaaaatacgcccgttttctg

SEQ ID NO: 48450 - DNA, 122 bp, Homo sapiens
gccccggtggccgcgtcccgcccgcggtcctttctatacgagtagctttgaaggtgtcaccgagctgtgcccaaatctagaaaagaatgggaggagaactgcatgagcttttaattttcttc

SEQ ID NO: 48451 - DNA, 122 bp, Homo sapiens
gcccagatgataagggcctcagtctgggtgtgaatgaacttggcctgacttctttgctgccgtcatatgaaccggaaggagacagcttagatagagcaagcctgctccttccagaagcacga

SEQ ID NO: 48452 - DNA, 122 bp, Homo sapiens
ccgggtgtcccctttgcccacagacgcggatcttggtcacgcacagcatgagctacttgccgcaggtggacgtcatcatcgtcatgagtggcggcaagatctctgagatgggctcctaccag

SEQ ID NO: 48453 - DNA, 122 bp, Homo sapiens
tgttttgaaaacaatcaaagatatataagacatcaaaataatcatttaggaaaattcctccgaggcaaatcgggtgtatagagcttttagcttccgtgacgaagtctttcaaaccatgagct

SEQ ID NO: 48454 - DNA, 122 bp, Homo sapiens
aaccgaaacacggctccctggagggacgcagggcccgtggctggcggtgtccgcggcccacgtcgccccctggactcggacccgagcccccgccagtcgctcaccgagcccggcccctcccg

SEQ ID NO: 48455 - DNA, 122 bp, Homo sapiens
tcaaagactagagcgaaggtcactgaaatgacacaagatcagcgaggcccagggcgctgccgctcacagaatgcggagacacggctgcctcgcgtcccttccctgacctgccccaggcggac

SEQ ID NO: 48456 - DNA, 122 bp, Homo sapiens
ggctggctgataaagttaacggaactccccattttggaggcagacttagtaatggtcaaacgaagaaactgttgtggtctgttcttaaaaagctactagtatttagtgcttcacagaggaag

SEQ ID NO: 48457 - DNA, 122 bp, Homo sapiens
ttggaaaattgaaaccgtatttttgctcctggagctccccaaaccatttgcacctggactcggaaagctcatttggacacagaagccgtttctccccaggagatttgattttccctggaatg

SEQ ID NO: 48458 - DNA, 122 bp, Homo sapiens
ggaccgggcgcgggacgcgtgcgtccagcctccggcgctgcggagacccgcggctgggtccggggaggccccaaacccgcccccgccagaaccccgccccaaattcccacctcctccagaag

SEQ ID NO: 48459 - DNA, 122 bp, Homo sapiens
ccccgcctcatccctcccatttcctgttgtctctctgggccggttgggcgatcacctgggcggacccccttgcctgcctgagtcctgcacttcgacggccctgaactcaggagccacgtccc

SEQ ID NO: 48460 - DNA, 122 bp, Homo sapiens
ttggcaaacagtggcatggaggccaccagcttccgacagttaaagttgatgatctcctgccggacagggtggattgggacacgggaaggaggtggtgaggggagctggctgccaggaaggcc

SEQ ID NO: 48461 - DNA, 122 bp, Homo sapiens
gggagccgagccgggcggggcgagggcagctccggtgagtgtggcggcgcgggggcctggcgcggggagcggggtccctgcggctgggggggccggaattggaccggggacgctcggcgggg

SEQ ID NO: 48462 - DNA, 122 bp, Homo sapiens
cccctctgtggttaccagtgggcaggtacagcccccaaggggtgcaagtttgaatcctcacgtccctgcctcacccccagttgtcacaaaccaaaaatgctgtggttttcctgtcagagaga

SEQ ID NO: 48463 - DNA, 122 bp, Homo sapiens
gtctgttcactgctgtgtagctactggacatttttaaaaatgacttcagctgtttactcacgtgttgagtgtacagaagtctttctgcaaagattacaattctgcagcaatttctcttgcta

SEQ ID NO: 48464 - DNA, 122 bp, Homo sapiens
ggacaggacggggctcagggagaaccgctgcttttctcgggtgcgatcatggtggggtgtcgggacatgaggtgaaatgtgctggggcgtgtgagggtgcctcagtgtgcttcccagcattc

SEQ ID NO: 48465 - DNA, 122 bp, Homo sapiens
gggagggcagtggtttccgcgagcagagcgatgttactgagtgagtccctgaatggggagcgctgctgtccccaagccgattggtacttcttgtcaggaagaaacgccaagaggtgggagtg

SEQ ID NO: 48466 - DNA, 122 bp, Homo sapiens
tgcccacctgcagcggctttctctgtaaggaaagataaggccggaaccctcagcgaagtgcgggaggtactgaaggctgtaaaagggagaggtcattctactcagagggctcctagcagatg

SEQ ID NO: 48467 - DNA, 122 bp, Homo sapiens
caaaaagaaattccaacatgtcctgctttaatgatagttcacttgttttacccatgcacacgcctgtgttcagaagcaaatatttcccccagtgcccccaaaaattcctgattttatttaaa

SEQ ID NO: 48468 - DNA, 122 bp, Homo sapiens
aatgatttgggggtgggggtagtaggaaatcattaagctgccccttcttaaaactggctccgctctgttctttcaggaaaccttccaaatgttacccttggaaatttaagactgattttgga

SEQ ID NO: 48469 - DNA, 122 bp, Homo sapiens
ggccgaggtcacctcctgggctgcctggcggccatcgtggctaagcaggtgctgctgggccggaaggtggtgatcgtgcgctgcgagggcatcgacatttctggcaatttctacggaaacaa

SEQ ID NO: 48470 - DNA, 122 bp, Homo sapiens
gtgcccaggggccctgcagtcttacctggaacatctccatccttggtgtgtcccctgcctcgtgtacctggctttaaacctcggggttgtgggggcggcaaggccaccaggaggttgtagga

SEQ ID NO: 48471 - DNA, 122 bp, Homo sapiens
cttctttcagcattttcctccccagttcatggtctgtgggatgggctcctttccctaccacgatctgctctctagaacccagagcagtggaggaggtagacaagctaacaggaggccccaac

SEQ ID NO: 48472 - DNA, 122 bp, Homo sapiens
caggcctgaccaggtgtctgcggtggacagctactactacgatgatggctgcgagccctgcgggaacgacaccttcaaccgagagccagccattgtcaggttcttctcccggttcacaggtg

SEQ ID NO: 48473 - DNA, 122 bp, Homo sapiens
gggcagggatccgggatgcaggaagctgtgagcgaggccaactagagggggcgggagcagcgcacttttgagacgctccctagagtggaacccgggctcggctcaggctccgcgggcggggc

SEQ ID NO: 48474 - DNA, 122 bp, Homo sapiens
gacaaaagtctacaaaagcaagcatgtgaagcaactccaaggtccacccgctgaagaatgcgtgagcacagctcggcctcttcacacaggggaacgccactcggcagcgaaagaggaggaag

SEQ ID NO: 48475 - DNA, 122 bp, Homo sapiens
attttaaggagaaggggagcttcactccatagcaaatagaatagaatatttttaaatccacgtagtttagacagtgaataaactttttggctgtactgtcattacttttgacattatttgcc

SEQ ID NO: 48476 - DNA, 122 bp, Homo sapiens
ctggatttcattcattagagcaaaaatgggatccttatgaggcttctggaaccatgggtacgacgagattggaaacttccattgagaaactaaatatgaccttcaaaagtaaaacttcaaag

SEQ ID NO: 48477 - DNA, 122 bp, Homo sapiens
cgctgttcactagagcccccggctcgccccgccgcttctctaggcgccaggccgcgcctccggacgcccagccacgccccctacgctcactgtcattggctattgcaaagggcgaggcctac

SEQ ID NO: 48478 - DNA, 122 bp, Homo sapiens
gctgggagtgactccgcggctgaggtttggattcggggagagcagttgcgcccagctgtgcgatttaagaacagtttcaggccagggagccctgagtcatgggggcgtgaagaggtacaagc

SEQ ID NO: 48479 - DNA, 122 bp, Homo sapiens
atgtggactttcttttagggtctgtctcttctctataagtttattattttcttttcaagacgaaaattcaaaatagatggcagtttagggagctaggctaaaaatggctgtgtactggaagt

SEQ ID NO: 48480 - DNA, 122 bp, Homo sapiens
ggaatctagcgccatgcaccgctttggtttgcatctgggctccgcggtaaggtccctccgcgctccgggaaggagacccggttacccaggccagcgaccttcatacatgggggttccacgtc

SEQ ID NO: 48481 - DNA, 122 bp, Homo sapiens
ccaagtctgggagtgagggaaggaggcaggggtgctgagaaggcggctgctgggcagagccggtggcaagggcctcccctgccgctgtgccaggcaggcagtgccaaatccggggagcctgg

SEQ ID NO: 48482 - DNA, 122 bp, Homo sapiens
cagggaactccaggagtttcatgccaggagtgcagagagggttggagtagtggagcagtgcgtcaatcagacaatcaaagagggaaggcaaggaggaaggggagagaagaagagttattgcg

SEQ ID NO: 48483 - DNA, 122 bp, Homo sapiens
ggtcacaaaaagacatgctgtacttttccacttgtatgagggacctagagaagtcaaattcgtagagacagaacgtagaacagtggttgccaggggctggggaggtggaaggaatagggagt

SEQ ID NO: 48484 - DNA, 122 bp, Homo sapiens
ttttagtcagttgaggaaagagatttgagattgatctcccattttcctcagctgcagcaccgaataaagccttcatccctgacaatactcattgtcttgctgactggccttctgtgcagcaa

SEQ ID NO: 48485 - DNA, 122 bp, Homo sapiens
gcctccctccaattggctgatgcacatgtcactcattattcaattggctttcggttggtgcgctctaccgtccatcagtgacattgcacagacctattggtcaaatcaacgtcgctctagac

SEQ ID NO: 48486 - DNA, 122 bp, Homo sapiens
atgcttccagccgaccacagctgggaaagcaagatcgttatgaattgaatgtgaaagcagcgccatcggtgacaatggacgaggctccctgctggcctctggcacaattattcaacgcttca

SEQ ID NO: 48487 - DNA, 122 bp, Homo sapiens
gggccaaaatggcgtctgcccacgaccctcaaaggaatgcagcgcgcaggcgccgcaacccgtcaaccggccaatgagaagacgcaacagcaatgacgccaggcacggccggaaaggagact

SEQ ID NO: 48488 - DNA, 122 bp, Homo sapiens
tgatctgtgaattgggcagcatcctgagccagagtaggctcagagactccagcgcagccacgtggtggaagaagatttctggacagaaaaacgaaaacgaagtacagaaaacggaagtgagg

SEQ ID NO: 48489 - DNA, 122 bp, Homo sapiens
tctcctccttggcagccgtggcatccttcttgccctctgtctcctcggccttgccctccgcgtcctggtcagacttcttgccctccatggcctcggcgggctctgcagctgcctggggctca

SEQ ID NO: 48490 - DNA, 122 bp, Homo sapiens
aatcatatttagctaagttgccacaactaaaaaaactacctttcccagactcctttgctgcgatgtgtggccgggtgaccaggtgctggccaatgagatttgtaagtagaagtgttgtgtgg

SEQ ID NO: 48491 - DNA, 122 bp, Homo sapiens
ctctagtactacttcccactgcctccctgctaactgcaaagtaccagattcctaagctgacgtcatgccatggcagcctctctggtagacaggatgtgtagtagcaagaacactgtatgatt

SEQ ID NO: 48492 - DNA, 122 bp, Homo sapiens
aggcgcccgggcctcctgccccgccggctctgctcacaatggcgctcgccgcctgcagctcgggtgctgacggcctgaaagactgacagactgacagccccgaaacttcgcggggaggagag

SEQ ID NO: 48493 - DNA, 122 bp, Homo sapiens
ttgtcttgttaatgattcacttggctttgaactggagagtagtcaggtgtccccagacggcggcttttgagctggtctaggggagggggcagggcgtactcaggccccggattacagaggcc

SEQ ID NO: 48494 - DNA, 122 bp, Homo sapiens
tgcattatacttactgttttcagtagctgcagagagacctctagcgctgcctcaataagccgagtttgcaaatagtacctgctaatgtcaccttaatgagacaatggcaacatgctgagtag

SEQ ID NO: 48495 - DNA, 122 bp, Homo sapiens
ccccgacaaatctgcgtaaatcacacttccatagttacagaagcctcacaaagggaggcccggctcaagatgctgattacagcttcttaaaagcaacatacctaagaataaatacccatgcc

SEQ ID NO: 48496 - DNA, 122 bp, Homo sapiens
gtgtggggaagagaagctttaattagcctccttgcttcgcggggtcacccgcagttcaaccgccctgcctccgcatgctcccaatcacgtagtgggaagccagccctgccgcgatctcgcca

SEQ ID NO: 48497 - DNA, 122 bp, Homo sapiens
gagctgatgctggtagagttgggccaggtccgcaggcagaggctccacaggtcccagctgcgggggtagctgagccggcaaggtctgcagcggcatcgtctgcatcatcagcggcgagaaga

SEQ ID NO: 48498 - DNA, 122 bp, Homo sapiens
ggacttgactggagatcagaaacaaattgcagtgaagcaaaaacatcagggccacagtgccgaaagctgtgagcctcccaaacggccgtcgtgtgtgccgcgctcggccgtctggcgcctgc

SEQ ID NO: 48499 - DNA, 122 bp, Homo sapiens
acccaggccttccattctctggagagctgagagccccccaccccgccccccacctaagagcgacggggacctcccacccgctgcagtgtgcgggcctcagattcccattgactccggaagcc

SEQ ID NO: 48500 - DNA, 122 bp, Homo sapiens
cagttcaagaaagatctattttgggtttcttcgatccctttgctggcttttgttctgccccgcagtgaatagctgggtctgtgtcagtaacagataaagataagatcagctgccattctttg

SEQ ID NO: 48501 - DNA, 122 bp, Homo sapiens
gtgatgggaaccgccggcagctggctaatgggcggatgctggggcttggctggatgggaacgccgcggtggggtgtcggaggtggctggtggggctggaacgctgggaacgtctgtctaggc

SEQ ID NO: 48502 - DNA, 122 bp, Homo sapiens
gcgggaactaatagatggtctccttagggtgtatgaggtgtcccttgacccttctctccccgaagtggacatcaaggtgatcctccccccatgacctcctacccgtggcatcctgcgacccc

SEQ ID NO: 48503 - DNA, 122 bp, Homo sapiens
caagcgacgaccgctgtcgcaaaggcgccgtcacgtagataggcggcctctaccaactcacgacagctaggcggggagcgccgcctcaaagggtgcaaccttgatttcccagaggacgagtc

SEQ ID NO: 48504 - DNA, 122 bp, Homo sapiens
acggtatgcaacgagtaacaatgcaatttacagcttcctaaacatttcttcattgctcttcgaaaccactctagggggtagctgagcgcggagcacacttatttccatttgaatggaggggc

SEQ ID NO: 48505 - DNA, 122 bp, Homo sapiens
tttgtgttcaaattttcctgattgtttcataaatatactcttacagttggtttcttttagcgagattcaaatgagacccacctgttgacctttgcccttagggtttcccagggtctgaattt

SEQ ID NO: 48506 - DNA, 122 bp, Homo sapiens
ctccccatctttattttctggcagacccatgcttcatgtagagcagcatgttcatacccacgacttgagaatcctgtccggctcatctgttctgggcctcatcctatgcaaaccactcttgt

SEQ ID NO: 48507 - DNA, 122 bp, Homo sapiens
ggcagggggccgtgccttggtggggcggcggcctgcagccagcaagatgtaccactgcagcgagtgcctgcgcttcttccagcagcgcaagagcctgctgctgcaccagcgcctgcacaccg

SEQ ID NO: 48508 - DNA, 122 bp, Homo sapiens
aacttttgccatcccgggagccatagcggcagagagggggtcccggacccgaggtggcagcgaggggctctgctttggcagctgtcggggctggagctcaggaccccaactccagccaagtc

SEQ ID NO: 48509 - DNA, 122 bp, Homo sapiens
gaagttaattgcctaaaattcaccaagtcagtggtagagctgcctcagacctgaggagcccgctcaggtcctcaggcggccttactctatgtacctatggggtctttgagccccattcgacc

SEQ ID NO: 48510 - DNA, 122 bp, Homo sapiens
cagaaatgtgaactttgccggccactcccagctgctccatgagattggccaggttcacatcgttggaccacacgtcaaatttaaacctcctcatgcccaggatgccgcaaaggacggtgccc

SEQ ID NO: 48511 - DNA, 122 bp, Homo sapiens
tcctggccagagctgattctgtcctgttcaattttgaactgaagtgcaaacaagcctcagcgcccgctgctcccaccccaaatcgaattcgtgctaatatttctctgggggcggcgggctgc

SEQ ID NO: 48512 - DNA, 122 bp, Homo sapiens
gacactccctttcctgttgagtgagcacgccctgggctgaggcagggccacaccagggtgcggcggggaggcaactggaattccccgggggcatccagcacgtgggcatgtgattgtgtttt

SEQ ID NO: 48513 - DNA, 122 bp, Homo sapiens
cggccctggtgttgatgaacaggccagcagggccatctccttgcttctgatgcacagcatcgcatgtgtgggatgtaagaggcaagcagaggcggcggctcagagcatgggcctacacgcca

SEQ ID NO: 48514 - DNA, 122 bp, Homo sapiens
gcaaccctgttccaaatgcagcgcgctttacggcggcgcgtccttttaccgcggtgtggccggctcgcttgtcgctcgcacttttgccctattggctctgcggctccgctcgccgcacttta

SEQ ID NO: 48515 - DNA, 122 bp, Homo sapiens
cttggcatttagcttgggccagagcaaggcgcagacccggggcgcccatggagttggcgtcggagcaacagctgcgcgggcggagcaggtaggcgcgctccagtccctgcagcccgagcggg

SEQ ID NO: 48516 - DNA, 122 bp, Homo sapiens
tacaaggcgggcgtgatctgcgttgcaccctgggagttgcggtccaggaatcgtggctgccgctactcccaggcgttatgggaacggagtcccctcctcttcccgacgtgccctgcgactca

SEQ ID NO: 48517 - DNA, 122 bp, Homo sapiens
atcacctctcctgtcgctcaagccccaggggcgggacctggggcaccagccagtcagaggcgctgtgcggcaaactgtccaatcaggtgcgccgggaggaggggcaacttccaaagcccgaa

SEQ ID NO: 48518 - DNA, 122 bp, Homo sapiens
acgagctgcggcggtggcacctccgggtgtggaaggctccagtgagatggagtcgcgagtcgcggacgctgggaccggcgagaccgcgcgagcagcgggcgggagtccggcagttggctgca

SEQ ID NO: 48519 - DNA, 122 bp, Homo sapiens
cgacctctccacagacacctttgtgtgcaactgcccttatggctttgtgggcagccgctgcgagttccccgtgggcttgccgcccagcttcccctgggtggccgtctcgctgggtgtggggc

SEQ ID NO: 48520 - DNA, 122 bp, Homo sapiens
gaagagaaagttcattcacagagactgcctcttaacatgaagatcattggacaagccacacgggtatcccatcccgatctgcctcccagaactgtgacacactgggctctgccctcattttc

SEQ ID NO: 48521 - DNA, 122 bp, Homo sapiens
accctcggacccacagccacgtgccggagttatcgcgtggaaccctcggacccacagccacgtgccggagttatcgcgtggaaccctcggatccacagccacttgctggaatgatcgcgtgg

SEQ ID NO: 48522 - DNA, 122 bp, Homo sapiens
tcctaatatggaagtcgtgccccgccgcagagccggacctgttgtgtctttgcctttctacgcatctgcgcccacctcggcccagaacaaggatttcaaaaagtgccccgcattttgatttc

SEQ ID NO: 48523 - DNA, 122 bp, Homo sapiens
gggcgatgtgcagcggctggcggctatcgtgggcgccggcgaggaggcgggtgcgccgggcgacctgcactgcatcctcatttcggtgagtacagtcccgtcctgtccccgccccagtgtcg

SEQ ID NO: 48524 - DNA, 122 bp, Homo sapiens
cacaggaggtcggtcagctgctacagcagacagaggtcctgatgcagcaggtgctagactcgccatggctggcatggctacaatgccaggggggccgggagctgacatggctgaagcaagag

SEQ ID NO: 48525 - DNA, 122 bp, Homo sapiens
acaggcaatctctttttcagtgtcatatttcagtggctgccaccactgccttattgaggacgtgcttatgcctaagacactcgcctctaaaggaagctgctactctttctcaccttgatttc

SEQ ID NO: 48526 - DNA, 122 bp, Homo sapiens
cctgggccccagccacccttggacaggcccccacatctggacccaactcctgagatccctcggttcacagcacacttcaagacctcctgctagaaggcctgggccaacacggcgatgatctg

SEQ ID NO: 48527 - DNA, 122 bp, Homo sapiens
ggggagccccgcccctccgccatagcagcctcgggcgccgcctcttcctttccagcctcccgccctcgtctgcttccggccctgtggcctggtggggctctgcaggctccctcgggagtggt

SEQ ID NO: 48528 - DNA, 122 bp, Homo sapiens
cccacctccaccctacacaggggcctcctaagatctgaggaacagtaaactttatcttatcggctgtttgggaaaaaactgtcatttgatctgtttatttggaagccagccctgctgagctc

SEQ ID NO: 48529 - DNA, 122 bp, Homo sapiens
ctctagagctaatggtgggagcagaacctgagcccctacacgccctcccttcggtcatggcgcaggccctgaacagagcctcctgacccctagaatctgcatatccatcttcagagctttcc

SEQ ID NO: 48530 - DNA, 122 bp, Homo sapiens
cgttatacgccatgataactgttggcggagcgtagcttcaaaagtgttagtgggcatgcgcgcggttcaacagcgcctacggaaatcctaacgggaatgtaacccaaaccggaagtggccta

SEQ ID NO: 48531 - DNA, 122 bp, Homo sapiens
cgcgaccggaggacgccggcgccccgttcgagcaggtgagcccgcgggggtccctggggtcgcagcccccagcttcctggagcagccccgcctgcgcctagccccgccccaaggccagcccc

SEQ ID NO: 48532 - DNA, 122 bp, Homo sapiens
tcccactgccctatcttgaacctgtaccagtgatttaatttctgtattatatttcaatatcgaataggacaatctttcagaacttctctcattctctcacagatactgctccagatgaattc

SEQ ID NO: 48533 - DNA, 122 bp, Homo sapiens
gccttaacaatcttagtacggatgcattagaccggcctatgaaaggctgtacaatttaaccgctgatgttgcagccgtcgcgcccttctgctgggggacctggcctagtcagctactctgat

SEQ ID NO: 48534 - DNA, 122 bp, Homo sapiens
gcggctgcctgtgatggtggcataggtgttgagtgtgagcacacgagcatggcaggagctcgcgggaacgggccaacgccccactgccccagtcagccctctgtggcctcagagggtagctg

SEQ ID NO: 48535 - DNA, 122 bp, Homo sapiens
gctcatgctgcagacgctgcacaaggcacagacccagagcctgaggcgggcccccaacatcgtgccctgctctgagtggctggtgctgagattgaaacctgacactcctgtcgggactctcc

SEQ ID NO: 48536 - DNA, 122 bp, Homo sapiens
gtcagtattaccgacgatccgggtccctaaggctggagaccgggtccacaaagacgagtgcgccttctccttcgacacgccggtaagcccattccccacgcccgcaacgagcacgacttcct

SEQ ID NO: 48537 - DNA, 122 bp, Homo sapiens
tgtgagagactcccctgggcttatggctttggtggcacctcaggctgtggaatggggtggcgagtctttggaagtcacagagcccagggtcggtggcacgtgatgaggcgcaggcctggctc

SEQ ID NO: 48538 - DNA, 122 bp, Homo sapiens
tcccttgcttttcctttgtctctagccccaatgaactcacatgccaaggcctttgcatgccgcattccctcggcctggatgtcttttccaggccttctctcctggcatacactcattcaact

SEQ ID NO: 48539 - DNA, 122 bp, Homo sapiens
agaagacagtggaagtgtcctccctactgttttctctccttggttcctgggtcctggcaacgtgttaaatgtaccacccatggttgtaggcgtggtcctccaagccgtggaactggataaac

SEQ ID NO: 48540 - DNA, 122 bp, Homo sapiens
gcccagtgcaccccacaaactgttcctttaatcttctttggagcctggccccttaagcaccgactgtgctaagcgattatacgctttcaggggaggggaaaatgcccaagaggtgagatagg

SEQ ID NO: 48541 - DNA, 122 bp, Homo sapiens
actggccagggagcactaaaccttgaagagatttaatgaaatatgtacctccttccaaaccggcttctctaaaacaaaatcattaaaagcacaggtgtaagaccctcatttatgatcaaatg

SEQ ID NO: 48542 - DNA, 122 bp, Homo sapiens
cagggcttcctggagctcccgcagcgtcacctcggcctcagcctctgccgcagggacagccgctggaactgccacttcagcctgtgtatggggaccaggcttaaggctgcctgtggctcctg

SEQ ID NO: 48543 - DNA, 122 bp, Homo sapiens
ctcctttccgccatgtggagttggccggggccagaggcacatgctctggtttggacagcccggccctgggggctggaataggaaatgcctgcgtccctttaccctgcccaggggccaacacc

SEQ ID NO: 48544 - DNA, 122 bp, Homo sapiens
tagttgaatgattctgggaaaatctctattggaacctatcgacttcgcaaatgacaaaggcgaggtccagagacttatccaagaccccagagtaccagtggaaatcaagaccaaaccacacg

SEQ ID NO: 48545 - DNA, 122 bp, Homo sapiens
ggctgcggcaacttcggggagctccgcctaggtgaggccctgctcggtggtaggtggggtcgggaggctgctggcagggccgccccgagtcaccggagcctctggtggggccgcccggggtc

SEQ ID NO: 48546 - DNA, 122 bp, Homo sapiens
gcaccggagagcccctccgcacctcattcttaagaacctggacccggctctcctcaccagcgtctccagctgcacagagaaaggactgctctctgaagggtgaagatggagatgacattccc

SEQ ID NO: 48547 - DNA, 122 bp, Homo sapiens
gtcggagagacagggacgacacttttacgacggcccctgaagtcgggtttgacgcagactcgaggagtggcttccggcccgcttcccggaagcaagcgtcacgacgtgaagggactggagat

SEQ ID NO: 48548 - DNA, 122 bp, Homo sapiens
cgccctgacacccgctctagtggcgcggtgctcactagacacccgctgtcacgtgcagtgcgtctaaggcttggggttttcccgggctcaccccaggggagacgtggtcaagggctctttcc

SEQ ID NO: 48549 - DNA, 122 bp, Homo sapiens
agaccactgtcctagacgattatcccggcaggtgagtttactgttacacattgcataggccgtgcaggtgatgccggagtcccgctttattcccgccttgggctgtttttgggagttctcaa

SEQ ID NO: 48550 - DNA, 122 bp, Homo sapiens
gagggattctcccggattcccacggtccagtcttcaactaggagtggctcctttaagactcgcccttcccgaggtctattaaggagaggcgggggcgggcgtgagcctgtagatccgcccct

SEQ ID NO: 48551 - DNA, 122 bp, Homo sapiens
ggcggggtggaatgtcgcttccggcgtggccctgccatggcctgggagggggagcccatgcgccacaacctagggggcaacctgggggaccccagagcccgggctgtctcagtgccccttgg

SEQ ID NO: 48552 - DNA, 122 bp, Homo sapiens
cgctggtcccatatattacagcagcgacagaaatatggtagtggtcgccacgttagggtccgtgggggcctcctgaggcagcctggtgccaacccgcacgcccaggctggggctcatcctgg

SEQ ID NO: 48553 - DNA, 122 bp, Homo sapiens
gccaaagttgtggaaacagctttgactttattctcctctctctctcatctttttttgcctcgcttacacacgcattcacacttgcccccacaggatccctctaggggtgcaagttcatcccc

SEQ ID NO: 48554 - DNA, 122 bp, Homo sapiens
gacgcacacccggatacatgttaccatcgagtacagtcctatagccaggggatatacacccggatacatattaccatcgggtacagccccatggccaggggacacccacccggatacgtgtt

SEQ ID NO: 48555 - DNA, 122 bp, Homo sapiens
aaactcctacttatcctgcaaagcccaattccaatacctgcttctcctaggaatgctttccggtctgatctccaggaagaatccacaacacccttctctgggctcccacaatctactccaca

SEQ ID NO: 48556 - DNA, 122 bp, Homo sapiens
atatgtatacacacatgggttagcatccacacatatatttacttgctctgtcagctgagacggcctagaagcaacacaccaacagccaccagcacacctaattcccagatcttggtttgttg

SEQ ID NO: 48557 - DNA, 122 bp, Homo sapiens
tgagtcctggagccacgtcagccctttctgttgggagctggccccggggctactgttggacggcttcctcgccaggctgggggcacgggcgggactgccgggcaggagggaggtgggacgca

SEQ ID NO: 48558 - DNA, 122 bp, Homo sapiens
gcaccttgggcagtcactttgcctgtctcagcctgtttcctcgttgacagaaggcaatgccgagaccaccacagctttacaaatgttgggagaatctcctcaaggtagtgaacaaggagtgc

SEQ ID NO: 48559 - DNA, 122 bp, Homo sapiens
tgctagactggtaatcaaattcaagaaccggaggcgtcttgacccgaatgagactgcgggcgccgcctagtaggtgggattaagaattgacgaaccttttcccaattctaatcctaaactca

SEQ ID NO: 48560 - DNA, 122 bp, Homo sapiens
acaataatatataaaaactaacagcaataagcagcaaatttaattttcaatttaagatttcggaaagttatcttgtcttggttgccaatttaagcgaatgtttgatttcttactggggcatg

SEQ ID NO: 48561 - DNA, 122 bp, Homo sapiens
gctgcgcgtcgtgcgacaagagctacaaggacccggccacgctgcggcagcacgagaagacgcactggctgacccggccctacccatgcaccatctgcgggaagaagttcacgcagcgtggg

SEQ ID NO: 48562 - DNA, 122 bp, Homo sapiens
agatggtaagggggcagggccaggataaaatctcagatctcagaagtcccaatccagggacggttcaactccgcccaaagcaattctttagaaaaaaaacgacatccacttgaaagaaaaga

SEQ ID NO: 48563 - DNA, 122 bp, Homo sapiens
ccatctccttggcctacttcttgggctgtttcagtggcttcttcttgccaccttcgcggccggacatggcgcctgccgccgcttccccagaagttaagtttaaaagtagaaggcaaagaatt

SEQ ID NO: 48564 - DNA, 122 bp, Homo sapiens
caactgagcagagcagaagatatttttatatttcctgatacaaaaatctaacttcagttccggtctggcagagagcgcggagagacgcagaacgcagccagctcctccagggccctccaggc

SEQ ID NO: 48565 - DNA, 122 bp, Homo sapiens
cctcgggcactcagagagattccgaaatttgccatcaaagaggtggaaactctaagtgtgcgcattgatagcaggttcaacaaagctctctgcgccaaaggaataaggaatgtcccgtaccg

SEQ ID NO: 48566 - DNA, 122 bp, Homo sapiens
catgtctactctgtgctttcccttctccaagctatttaaatcattcatcatacagcatggcgtccaggtcctctacgttccggtctcctgtagacatgctccagtccccctaagaatatggg

SEQ ID NO: 48567 - DNA, 122 bp, Homo sapiens
aaaagataaacttacgtgagtggctatctggaatataaacaagtcaaaacactgggccagcggggttcaattttggatggcaagtttgagaagaattcctgttggtgactttttaagcagtt

SEQ ID NO: 48568 - DNA, 122 bp, Homo sapiens
atatgctagttagcttgttgtggtcatcatttcacaaggtatgcatatgtcaaaacatcacgttgtatacttaaacatatactacttttatttgtcgattatgcctcagtaaacctagaaaa

SEQ ID NO: 48569 - DNA, 122 bp, Homo sapiens
tgtgtgccttacagggttgttgtgaaaattaaatgcacagataatagcgtaacagtattccgtgcattgtaaagagcctgaaaaccattatgatttgaaaatggaatcggctttgtgagacc

SEQ ID NO: 48570 - DNA, 122 bp, Homo sapiens
agcgtttcattttgagagcgggattcacaagggaattgcggaaacagcagcgaggccccgcgacccctcggcccacgtgcgcgctgtccctcgggtcgccccgcgcccgccgggggcggagt

SEQ ID NO: 48571 - DNA, 122 bp, Homo sapiens
tttcaggatacagtacgggatcctttctggaatggaggtcttatgagctgctattgaacacggcaggtgagagaatttctttatggccaattcttagacaaaaagtaggggaagcggttggg

SEQ ID NO: 48572 - DNA, 122 bp, Homo sapiens
gaatagtttcataatattttatgctgctttatggctggtctattattttcataatcaattcggacacaattatctgactaaacagctgtcgaagctctgggagataggccttagggttttag

SEQ ID NO: 48573 - DNA, 122 bp, Homo sapiens
ccaagccaggctcctagggcagagggcaaacggcccctccaggagggagccgggagattacgcagctccatgtaggtccacgtttaggttgggaggatctaccatgaagaaggtcaagaaga

SEQ ID NO: 48574 - DNA, 122 bp, Homo sapiens
caaacacccatatttatctccacttccaattcgcccccaggctcagggatggggaggaggcgtagagagcggactgggccagaggaacagatagggtgtccctggcctttcctcctttcaag

SEQ ID NO: 48575 - DNA, 122 bp, Homo sapiens
ccaaccaactattattaatggagattgatgaggccggacacgccgctttgtgaaagtttgcggccgacgagaaggcggcggcagctgctgggccggtccccttccctccacccagtccaccc

SEQ ID NO: 48576 - DNA, 122 bp, Homo sapiens
gggtatgaagaagagggagattcctcagatttctagctggaccaacaggatggatggcagcgcccttcaccaggaaaaaagtgagctgatggaagaacataaggtgaaatttgaattcatgg

SEQ ID NO: 48577 - DNA, 122 bp, Homo sapiens
cagagacacaggggttgaataacgtgatcaagtctacacagttggtaagtggggtgcctgcgatttgaagcaagaatacctagctatcatgtgcaagatcctaaacagcatgttgtacgaca

SEQ ID NO: 48578 - DNA, 122 bp, Homo sapiens
atccctgtgcacccggcgcagcctacccttggtggtctaaacggatgctgctgggtgttgcgacccaggacgagatgccttgtttcttttacaataagtcgttggaggaatgccattaaagt

SEQ ID NO: 48579 - DNA, 122 bp, Homo sapiens
tagctggtaagtgacagagcagggatgcaaacccagactgcccaggcaggctcatccgtccgggaaggaggcacagtcccaggctcattatgagttgtttgtttccacaaacgttgaggctt

SEQ ID NO: 48580 - DNA, 122 bp, Homo sapiens
tttctcccaaataatgtaggaacacaatacacagagcacttaagtcattgcaaggggtcgcggaaccccgaaaaccaaacattaggagaaaggggtgcctggctcttgcctccccggggcgg

SEQ ID NO: 48581 - DNA, 122 bp, Homo sapiens
ggcccagcgattacatcagcaggtgcaaacaagcaggcgggagcagggacgggcgtccctcggggctggagacggcactccatccgccccacacgagtctgtttcattccctccttctagct

SEQ ID NO: 48582 - DNA, 122 bp, Homo sapiens
taaaactccagcccctccaggggtctcttgggctaggagagcacagatcggtaaggggtccgtcctcacttgggcaacctatttgtcatgcccagctgttccttgagcgcccgcagctgggc

SEQ ID NO: 48583 - DNA, 122 bp, Homo sapiens
tgtttgcttttattgtgttttcacctaagacttcagaatagaacttgaaaatgcagagggcgagtgagttccactgggacacagaaaaactagtattttagatgtgaaacattaagttgtct

SEQ ID NO: 48584 - DNA, 122 bp, Homo sapiens
gaaggagtgtagggctcatcctctggtgagccctgactgtgatgaatgtcgggcagttgtcgaaggcgtctgacacagcaggccatgtgcgcgggacaggctgcccctgcctgagtgggctt

SEQ ID NO: 48585 - DNA, 122 bp, Homo sapiens
ggacccaaaccgagaatcatacccctagaccaacgagccatctgctgagcaaggtctcctcgaatttactagaggcgatgacagcggcaagcgtgtgggccagcgcttgcgggaaagagttg

SEQ ID NO: 48586 - DNA, 122 bp, Homo sapiens
ctgagctttgttgacgtgcttagagctgtttgtacacacttttaattggtatatatacaccgacttttgttttgctccctttaatgccactgctcataaacacttccctgtactaacataag

SEQ ID NO: 48587 - DNA, 122 bp, Homo sapiens
aataaagcaagatgtactctgttatgatcagtgtgcacgttagagcaagcactacttttccgatcttaattattccagagatgcttgaccaatttactgggtacgtgggcagttttctgatt

SEQ ID NO: 48588 - DNA, 122 bp, Homo sapiens
gctagctggaataagtctggccagccagctggcctgagttctggagcccaagaccttgctcgccctgttggctgggccccctcaagcttgggccgctcattatttctccactggcgggggag

SEQ ID NO: 48589 - DNA, 122 bp, Homo sapiens
tgatcatcagaaaccgtcctggccttggcaatgatgccggcctcactaaacaagctatatcgcagcagtgtaattgccagttaaagagcacttcgtcctaattaacctcttcagggaatgag

SEQ ID NO: 48590 - DNA, 122 bp, Homo sapiens
aatgcaagccatcgcactgttatgtaatatgcaggaaggaccacagaaaagaagcggccccgtctccatggtatcaacccacggctgcagaatgtcacttcccatttgcaggagctggggca

SEQ ID NO: 48591 - DNA, 122 bp, Homo sapiens
cgaggaagggcgaggaggggcagaaagaggtcgtctgccactcccctaccttacaaggcacgtggcactggcagtagcagcagctggatgcaacaactgagatgaggaacctcctcccagca

SEQ ID NO: 48592 - DNA, 122 bp, Homo sapiens
cccacgcccgctgcccccaagagtcgcaaaggtgtggccgccccgttcgcccgtaccgaccggtgggaagaaactcacctacccaaccgacacctaaaatgccagggacacgtagcactgga

SEQ ID NO: 48593 - DNA, 122 bp, Homo sapiens
taagctggctgccgggtcctaatgggcaggtccggtccgccctctaggagaggtgctgtccggtgaggcataaaatcccgggattctggctggaggcagctcctgagactgctggcatgaag

SEQ ID NO: 48594 - DNA, 122 bp, Homo sapiens
ccatatctaacacttccctaaacaaattattttcacagctccccaaaaacatccatggatcgttctttacttttattcagtgcaaatgtttatttcagcacctatgatgtactagcatgatg

SEQ ID NO: 48595 - DNA, 122 bp, Homo sapiens
gctagcagcggggggtgcgggagggaagggtccgcgcgagctcggctgcgcgcagctcagcgggtcccgctcgaagtctgtcggtgccaccgcctgcatttgcaaaaagagtttaaaggcaa

SEQ ID NO: 48596 - DNA, 122 bp, Homo sapiens
gcaccacacacccatcaggatggggcagacgggacagcaatgtgagcatgctgagatgctcgacattgcacactgcagccacgatgagacagcaccacacacccatcaggatggggcagacg

SEQ ID NO: 48597 - DNA, 122 bp, Homo sapiens
tttgccacgacgatcctgtttgcggggcgagaagcgtctgaagacgcggagggaggcttgcgtctgacttctgcaagtgtctcggggactttccctagtcccacctcgcaccgccggaggag

SEQ ID NO: 48598 - DNA, 122 bp, Homo sapiens
ctgtgcctccccttcccgctcccaggaacccatccagcctcaggaactgcccccagccatcgagccttggctacttaagggacctgggcccaatccacagctgggacagtcctggcccactg

SEQ ID NO: 48599 - DNA, 122 bp, Homo sapiens
atttcagcgcaaactgcgagagggtcttcttactctaatcagcctgcctgagctaatggacgagggggtcaggctgagagttattgacacgcccgtgcccttaacctgtttcccaataaagc

SEQ ID NO: 48600 - DNA, 122 bp, Homo sapiens
cccgaggaacccgagtccgccccgccaagttttcctccccgctcctcgctcttcccacggcgcacccggcccggacagccccattgtacagacccgcagagcgaggcctcgagccgcagcag

SEQ ID NO: 48601 - DNA, 122 bp, Homo sapiens
gaaccgtcctgtcaggaatccaagcccagccagcggccccggcaaaacatccgggcttggcgtttctgtggaaatcaggatagcgggcgccttgcagaagtgaggtagaaacaacatcactc

SEQ ID NO: 48602 - DNA, 122 bp, Homo sapiens
ggtgaggacgtgcatgttccctgccccaggtgaatgagacctggaccctggagaactgcacggtggccaggtgcgtgggtgacaaccgtgtcgtcctgctggacccaaagcctgtggccaac

SEQ ID NO: 48603 - DNA, 122 bp, Homo sapiens
tgggggaaatggggcccagagctccgcctcaggctcccgctctctccccagcgagggcagcgtcatcgcctactactggtctgagttcagcatcccgcagcacctggtggaggaggccgagc

SEQ ID NO: 48604 - DNA, 122 bp, Homo sapiens
cttacccattttccagcgggagaaatagaggcaagagcagactaaatcacttgcccaaatcgcatagctactgatggtgtgatgttgggcaagatatgtaacctttccaagtctcagtttcc

SEQ ID NO: 48605 - DNA, 122 bp, Homo sapiens
gattttagatcggggacctggggaggggagaggtggatggtggaagagctgataaacaaacgcttcaaagattaaaaacaccaggaattagcactgatggtctttaggtggcgtgtcagtta

SEQ ID NO: 48606 - DNA, 122 bp, Homo sapiens
ctgaggcacagcgggagtgctgtaggatcagcatctcaaccaaccaggaaggcacatctgcgttttccagctggccttttccagcttctgtgggagcctcttccttatcaggagctctcagg

SEQ ID NO: 48607 - DNA, 122 bp, Homo sapiens
taggaaactcagagccatatgtgaaagcatttttatttactaaaccccctggttttatttcgttttctttgccttccttttcctcccctcctcattctttcctccagatgcataagatgcct

SEQ ID NO: 48608 - DNA, 122 bp, Homo sapiens
ccgcggccgcccattggctgctggggaggcgcgtggccccgccccacccggccgcactcccgtgaagtgctcccgctaggtgctcccgccagatgctccagctgctaggggactggctcagg

SEQ ID NO: 48609 - DNA, 122 bp, Homo sapiens
aacaagatcctcattgtcacccagacaccacattacatgcgccggcacccagggggggaccgcacaggcaaccacacctcgcgtgccaagatgagcgccgaactggccaaggtcattaatga

SEQ ID NO: 48610 - DNA, 122 bp, Homo sapiens
tctctttatcataaagactgcagttggcgccgggcaggagggcacactacagtgtatgtacgtacctcagccctcaccctgaatctaccaagagctcctgggaatcagtaagaaggctgcca

SEQ ID NO: 48611 - DNA, 122 bp, Homo sapiens
ccaagggtccattggttgccatagagatcgtcgagcgctgggcctgtgatcgctgaggggcgagcagttgcgaccctgggctcctggggacctgagcgttatgtctttccgcgacctccgca

SEQ ID NO: 48612 - DNA, 122 bp, Homo sapiens
aagaccgaccagtcaaggaggtgttggtgggagtgttgtgttcaccatgtggagatcaggcggcgattaccgcatcttctttgctgactttggtaaccgggtgtccagggaggagcgatcgg

SEQ ID NO: 48613 - DNA, 122 bp, Homo sapiens
gcctcccgggttcaagcgattctcctgcctcagcctccggagtagctgggactacaggagcgtgccaccacccccggctgctctttttgtattagagacaggtttcaccgtgttagccagga

SEQ ID NO: 48614 - DNA, 122 bp, Homo sapiens
gtttcaggtggtgggaacagatgtgtctctccaccagtcagttcacttctattttcagtccgtaagttatttggctcaggttacaaattccagagaagggggtgtacctcacaagcttagtt

SEQ ID NO: 48615 - DNA, 122 bp, Homo sapiens
gcttttggttttcataatttttttaaatttaggaattgtggataaaggatttgcaggccacgaatatttgatgaaggctattccagagttttgagaaggaacactccattccacatactcag

SEQ ID NO: 48616 - DNA, 122 bp, Homo sapiens
tcctgtttactgactaaaacatagcaaaggatcatgctcctacatgctgttgcagatcttcgcattccctttaaagtttcccctagttatttcaaggagttccctggggcttcatcaagtat

SEQ ID NO: 48617 - DNA, 122 bp, Homo sapiens
tggaaggaagccctctgagagctcaggaacatgcttgtttttcactgagtcctttcaaaccgactttaagtgtttcagctttctcatgctaatttagtattctcatatgtggtcgattttct

SEQ ID NO: 48618 - DNA, 122 bp, Homo sapiens
agaccggtcttcagaatcacaaggaattaggcagaactcatctcccagcgctggggggcacgatgaggtgggttcgggccgaccagggagattggaggggatctttccagctggcaggtcct

SEQ ID NO: 48619 - DNA, 122 bp, Homo sapiens
cagtcatcctctgccatgttcgtagggcagcttctgaagggaagaacaaggccatgtccacgtgcaccactcgtgtcattattatacttcttatgtttggacctgctatcttcatctacatg

SEQ ID NO: 48620 - DNA, 122 bp, Homo sapiens
tgtctcttcagctgggccaaggtggggaagtcgaggccgcactccacacagatgttctcgcgcccactggcgtgcttggcttcgtgggccttgagctcgctggggtaggcaaagccgcggcc

SEQ ID NO: 48621 - DNA, 122 bp, Homo sapiens
cgctgcttggcgcgggccgcgcgctgggcgcgctccctgcggatctgctcagcccgctcccgcccttcctgtagaccttcctcacgttgcttcaggttctgctcctgctgaagcttgcgcag

SEQ ID NO: 48622 - DNA, 122 bp, Homo sapiens
agttatttcccaattgccatgattaatatttgttcggtaagaacagctccaggttcaggccggggggctccaggttcaagcgcctcttgtttactcacccatggcctgtgtggttccaggga

SEQ ID NO: 48623 - DNA, 122 bp, Homo sapiens
cctccatcctgtccttgcggaaggggcttaggacaccccgcagtccgcgccccgaggtggcgaggcccgcacgaatcgcctgctcagccattgtcctagcgagtgatctcgaggagctgtgc

SEQ ID NO: 48624 - DNA, 122 bp, Homo sapiens
atccacccacctctgcctcccaaggtgctgggattacaggcgtgagccaccaagcccggccgacatttttattttctaagaaggttgaattgtgatgggaaggagaagagaaaattctgaaa

SEQ ID NO: 48625 - DNA, 122 bp, Homo sapiens
agtgggatgtggcggcggccggtgctctgtgctcagtcaacgccttggagaggaggactacgaaacccatacactcggacagaaccctggcaggtgttaaaggctgcggcagagcagaaaag

SEQ ID NO: 48626 - DNA, 122 bp, Homo sapiens
cttgctggctgccctggccaccagggagcccgcagtgcctgccccggctcccctttcacacggagaggggcgccttctccatctgtacggcctcaccgggactttcctccccagctctcagg

SEQ ID NO: 48627 - DNA, 122 bp, Homo sapiens
ccatgtgtgtcatctggactttgggcttggatcaataacatggtcacatagaggaattgccgggtcgagcagtcgcgtctgttgttactcacaggcctgagaatcgatgaccctggtttgct

SEQ ID NO: 48628 - DNA, 122 bp, Homo sapiens
cgggtcgtggaggcagagcctggggctgggagaggcccttcaggacccctctgtgggagccggacgcaggcctggggatgttggaggtgggagcgcttccaggccccttgtgtaggaccaga

SEQ ID NO: 48629 - DNA, 122 bp, Homo sapiens
gggtccgacagggcatggaaggaagtaaatggaagccggtaggtaagtgttattttaccgcgcacccataaagaggctggggagaaaccagaaaagggagcaagtcttgtttaaaaaaaaaa

SEQ ID NO: 48630 - DNA, 122 bp, Homo sapiens
tgcagacgagaataacgcctgtcaccatccactggccaactcttctaggctccctcctttcgatggtctggtggctagagaacagcacttgtgtgacacatttgggcttgccctcccgcctc

SEQ ID NO: 48631 - DNA, 122 bp, Homo sapiens
agattgagggaggggttgaggcggagtctgcaatgggggctgtccagcagtagcaagcagcgggccgatcctggtggagggttgggaggctgctgtcattttatgggtcggcagccagagtg

SEQ ID NO: 48632 - DNA, 122 bp, Homo sapiens
accgaatagaatctctggaggtgaagctctgttttaaaattttcccaactggttctgatgcgtaccagagttaagaatcaaccagcacactgaactcgcaattttagcaaaaacccaaggaa

SEQ ID NO: 48633 - DNA, 122 bp, Homo sapiens
caccaggacacgcaggcacacgtgtgctcagacaccaacaccaggacacgcaggcacacacgtggtcagacaccaacaccagtacacgcaggcacacgtgtgctcagacaccaacaccagga

SEQ ID NO: 48634 - DNA, 122 bp, Homo sapiens
ctgccccccgcagtcatctctttcctgtgctgagccactcggaggttgctgtgtggcagccgcccccacccgaacctagctggtgaagcgccttcctaattgccccccgcagcagagacccc

SEQ ID NO: 48635 - DNA, 122 bp, Homo sapiens
actagtgctcttctaagaagaggggattagaacagagacacacatggagcaaagaccatacgaggatatgagaaggtggctgtctgcaaatcacagagagagtcctcagaaagaactcaccc

SEQ ID NO: 48636 - DNA, 122 bp, Homo sapiens
caagtaactgtaaaagtgcgcaaatattgacggggttacaagcacatctcaatgagcaggcggataaggaccagccgtgcgcacaacgccctgcgccgtgcagcccaagctggcctcgtgtg

SEQ ID NO: 48637 - DNA, 122 bp, Homo sapiens
atgatgaagcctgcgggccgacagcagagacgggcgtgaacagaccgccggttgcaccaccgcaggcagggctcagagcccagggcggtcccacagcaaaccctctcaggcggcctgcccct

SEQ ID NO: 48638 - DNA, 122 bp, Homo sapiens
ggatggagaaattggcagactgagattctaaacaagtcacaggcagcctcttttccagtgcgggagattatttgtagacactattacgaggtaaatggaagggaaatgagatagtctgcccc

SEQ ID NO: 48639 - DNA, 122 bp, Homo sapiens
cctgaaccagggattcaggatggaatgggtctgggtcagggagccagggtgaccgtgggccgcacaggcctgcgcgcgcgggtgcacgtgcgtaatggatgcacacgcatgcagctggtgtg

SEQ ID NO: 48640 - DNA, 122 bp, Homo sapiens
ggtgatccacccgcctcggcctcccaaagtgctgggattacaggcgtgagccaccgcgcccggcctacatcgtgctttcttggtcatcacagaatcctcagcagtcaataaactttgaataa

SEQ ID NO: 48641 - DNA, 122 bp, Homo sapiens
cggggtcccctcccagcctgggagccctgggcacagtcccggctcatttgtcagagctatcggagccgtcctcgggctggtgggagttcagggctctgaaaggttttctgtcaaggcttgaa

SEQ ID NO: 48642 - DNA, 122 bp, Homo sapiens
gggcgagtgtgcgcatgcgtgggcactccctgccactgacttcggttaccttggagacagcgaggcgctctccctcgtgggtcgcgcgcgttccgcttcctctctgctgccaagcggtggcg

SEQ ID NO: 48643 - DNA, 122 bp, Homo sapiens
cttcacacacagacactgtcagggccgggtcacccctggaagatccaccgtccactaccccgtccactcctggggaccctgaggccagagaggatgaaagactcacccagattccaacccca

SEQ ID NO: 48644 - DNA, 122 bp, Homo sapiens
aagtagcaatatatattactctataaatctaacagtaacatatatttcttttttccccaacgtttaagttcagaggtacatgtgcaggatgtgcaggtttgttacatgggtaaacatgtgcc

SEQ ID NO: 48645 - DNA, 122 bp, Homo sapiens
tgagagttagttacattaccccaagtttcaaaacaaggagacagacttggacaggtcattcgtttaataagcaacagaaactggaaactgaatgctggttcatctattttcaaagtttgtgc

SEQ ID NO: 48646 - DNA, 122 bp, Homo sapiens
gggaagcaagagggtcacatagagagggatctaatctggccagctcctgaaccagctcctcgaggcactgactaggccatgtgggcctggaaccaggctggccagtgcccctggctagggca

SEQ ID NO: 48647 - DNA, 122 bp, Homo sapiens
gtgaaaattaaatcccagttctgactcccgcccactttctcaggggctgtgtctgagtcccgggtgcctgctcatggggtgggtgacctgcctggtccccagtcaccaagatgtccattgtc

SEQ ID NO: 48648 - DNA, 122 bp, Homo sapiens
ggctagcaggtctctctccggatttctagggctatgggtatatgtaattctttctctcatcgatcgtttcgattctcttgccggtcttgcagtttgcagggtcctaaacgaagaggggtgga

SEQ ID NO: 48649 - DNA, 122 bp, Homo sapiens
aaatcaatggtcagctttgaaatatcccaaatcaacgttcttaaatagagaaatacatggcgcctgaatgtttcaaacttgcactaggggccaacagcctcagaagcatcttagacacctcc

SEQ ID NO: 48650 - DNA, 122 bp, Homo sapiens
tgtagggagctgctttttaaagcatcaagttactcggtcagcccttggttttccccataccgtctggtggctggtttttctgggtggcttagtctcttcaattggacccacaaaatcctaag

SEQ ID NO: 48651 - DNA, 122 bp, Homo sapiens
gtggaaagccagttatcagatcacacggacattcaagcagaggcccagatagaaaggtaccgattccgagaacatatgggtgagctcattttctaggcccagtcaagatttcagaagatgac

SEQ ID NO: 48652 - DNA, 122 bp, Homo sapiens
ccgcgtgtgctgaagctggcacgctgacatggaaagacactcttcttcagggagggaccgcgggaagcactgcacatggttggttgtgaactccgaagcccaaaaggtcaacatccccacca

SEQ ID NO: 48653 - DNA, 122 bp, Homo sapiens
ctagaggcaaacttttgtctctctcggtaaagttgcattggccttcttttgcttgcttttcgtgacgaagcgcctcccacctcggccaagcgcgggccgactgggatgctgcgccgtctcgg

SEQ ID NO: 48654 - DNA, 122 bp, Homo sapiens
ggggaagaaaccagtaaatccacacacaagtttgctcgacatggtaagatttgagcctctcgttgctttgtttttcacatgcccagtgcaaagatttcaggcagtaatagttatgatctatg

SEQ ID NO: 48655 - DNA, 122 bp, Homo sapiens
tcccaagaagcaggcctctccgcgcgcgagaacagaggtgggaggacgggagtttgcaggcgcaaagaacaggagtttaagcagactatttccaccaggggaaataagaagcacaaagagcg

SEQ ID NO: 48656 - DNA, 122 bp, Homo sapiens
ctggctgtggtgagcaatgttagtcccaaatcactttttcacaacttgtttctgttctgtcgtagggctagtgagaccagctttcccttgagttctggggcgggacgtggaatgtttgtgag

SEQ ID NO: 48657 - DNA, 122 bp, Homo sapiens
gcagtgtcctcacagagctgtcaagcgtgtccatgccgtgccgcttgtgcctctgccccgcgagggacaccattccccgtcgttgacgtgcattcctcttgttcatcgtgcgagactcccca

SEQ ID NO: 48658 - DNA, 122 bp, Homo sapiens
caggggtctgcaacccgcgtccaggtgcgaccccagtagcaccggagccagggatctgcgcgcatatgtgaggatgcactggggccagccggtggctttgccgacctctgtcagacaccgct

SEQ ID NO: 48659 - DNA, 122 bp, Homo sapiens
gcggccgtgcgtgagactgcggggacctgagagctctgcaggagggccttcgggacctcccgcactacccacgcggccgcggggcgcgatctctgcggagggcgagggccccttcccgcgtc

SEQ ID NO: 48660 - DNA, 122 bp, Homo sapiens
cccagtaagtgactaaatgaataaatggaaaaatgtcgcagttccctctcctcagagcctcgcacaaaaggtagccattacataggccactgtcaaacagtcctctgagagattcccacact

SEQ ID NO: 48661 - DNA, 122 bp, Homo sapiens
tcccgctcgcatgcaagtcacgtccgccccctcggcgcggccgccccgagacgccggccccgctgagtgatgagaacagacgtcaaactgccttatgaatattgatgcggaggctaggctgc

SEQ ID NO: 48662 - DNA, 122 bp, Homo sapiens
caccacccggacacaagtactttgggaggactgggcctcttccaagttggactcaatgtacgttcctggcagaggcccctcccctggcaggacacagctttgttgtcactcttgtcctggct

SEQ ID NO: 48663 - DNA, 122 bp, Homo sapiens
ttactggcctttggtttatgtgagtgaattctcctattgattcctccaagctggaagtagcgatcaagagaaggggaaagataaaactgagtgaaagtggttaaagggaaaccaataagaaa

SEQ ID NO: 48664 - DNA, 122 bp, Homo sapiens
ccaaaggcgggggatcctgactcctcacggaagggcatggccggccttggcctcttggttcgcgcctaaaggcaacttttaaggctcaacctgacccaatttcaggcgcgggaggctggaga

SEQ ID NO: 48665 - DNA, 122 bp, Homo sapiens
taatctcagaaattcaattgcttagcccatctgctaggggctgcccaggcgggccagaggcgaggaggagagacgttccagggatgtcttcccaccgagttagtaccagtaccatgttcgct

SEQ ID NO: 48666 - DNA, 122 bp, Homo sapiens
gttaccatgggtgcagcctggggacgctgtcgtctgtggccagtgagtgcaccgagcatgcggagagggggacaggaggccttgggaggtaggggtggggcaggaagtgatgggggaggggg

SEQ ID NO: 48667 - DNA, 122 bp, Homo sapiens
gtgaaaaacaatgtatactttaagctaaaaatttagaatttctacaaagtcttatagttgcggggaatcaggagaggcaagtttcattcaatgtcttttagaaccaaggtgacagagctata

SEQ ID NO: 48668 - DNA, 122 bp, Homo sapiens
gacaaactagtataccaatctgatgacgagggtggaaaaacatcctcattgacagggctccgaagagaatgtgggatgacgaaatcttggcattctgtgtctgtacatcacattgtttttct

SEQ ID NO: 48669 - DNA, 122 bp, Homo sapiens
ttctgaccctcttatagcacacatcctaaccatgaagagttggtcggagcactttcaagacgtcacctgaacattatgtcacctctgcgggatatatgcatctgtctaccccagcccaaagc

SEQ ID NO: 48670 - DNA, 122 bp, Homo sapiens
ggaagcaggtgggggccctcggaggcagccgccccacaaacaccaagcacacatggaactcggcagtcctttatttagatcaatgcggggctgaggggccctcattccactgcagggcaaag

SEQ ID NO: 48671 - DNA, 122 bp, Homo sapiens
ggatggcagtaacatcccacattccaccctcatgcccagccactgtcttgcccactgaggcggaaactgtcaactctgcctcccatctacttggggggcaaagggatgcccttgcctgctgg

SEQ ID NO: 48672 - DNA, 122 bp, Homo sapiens
ttaacatgactcacttgggggcataggcgctatgaagttcagtggctgggtgccaggtggcgccaatgacaccctttttctcagagcccgggctgaatggacacctccctcaaagccttcca

SEQ ID NO: 48673 - DNA, 122 bp, Homo sapiens
gcgtggcctgccttgtcgcactctaattgggctttcgcaggaaagtgggcgggcgcggggcggagcttccgataacaacactcggagctggggctgtggctatttgttgctgcgccgccacc

SEQ ID NO: 48674 - DNA, 122 bp, Homo sapiens
ccgagacacggttcgcaattaattatgacgtcacagccaatcgtcaacgcgaaagcctgacgctctagccggctctatctcgctgccccgccgcgggcgcagagctggcgctctagcccacg

SEQ ID NO: 48675 - DNA, 122 bp, Homo sapiens
ggttgagtcgcttctggacgttcttggcgaagatgcccgtcttgatgtcggccatggctgcgggtccggggagctgcgaagagcagagcgcgcagcggggctggcggcggcgcggaggagcg

SEQ ID NO: 48676 - DNA, 122 bp, Homo sapiens
gcgggtgggaggtgtaacttgacaggtcaggatcgttccctagaacgaggcacacccgcacgcagagcgagcccgcctgcggagggcagagcctcccgggctggggaggagaaaccctgggg

SEQ ID NO: 48677 - DNA, 122 bp, Homo sapiens
ctgcaggaggctcagctgtacaaggaggaagggaaccagcgctaccgggaagggaagtaccgagatgctgtgagtaggtaccatcgagctctgcttcagctgcggggtctggatccgagtct

SEQ ID NO: 48678 - DNA, 122 bp, Homo sapiens
taaaattacgtaaaacaaaaaattcatggtctcagttacagtagccacatttcaactgttcgatagccacatgtggccagtggctaccgttagggaaagagcagctttggatcttcgccttt

SEQ ID NO: 48679 - DNA, 122 bp, Homo sapiens
gcggccgagcgacactgcggcattgattcatttctgaccctagtattgcgggaacaacgacgccgttgagttcgctgctagatttatcacttgaggaggtgggaggagaagggggttactgc

SEQ ID NO: 48680 - DNA, 122 bp, Homo sapiens
ctacggggggcggggcttaccgcaaacgaaggcgtcggtgcgatgtgctggtctcgggcacgctggcgcttccaacgcactccttgggtgccctgtcacttacatggaggcttatttgcccg

SEQ ID NO: 48681 - DNA, 122 bp, Homo sapiens
tgcgttaagggaagctgcactaattgttcacagtggcgagaatggtttaggagatcacggcgtttgccccatacagctgccccgaaagcgccgcgtgtctcggtggctgggtccgcggcccg

SEQ ID NO: 48682 - DNA, 122 bp, Homo sapiens
ggggccgcggccggacggggcggggcaccaggaggaacggagtgggcgcttggcggctctcgcgcccagactgggccgcgggcgccccctggtggccgcggagagctcaggtgcccgcggct

SEQ ID NO: 48683 - DNA, 122 bp, Homo sapiens
ccatgatgtacaaacgtagctgtattggggagggggtggggaggggggatgggggagggacgggtcagtcttccttcaggctcccaaacactgcggctggcacgctctgctgctccagccga

SEQ ID NO: 48684 - DNA, 122 bp, Homo sapiens
cacaacaggcgcctggttctagtcctggcccagcactgatccactggggaaacctgggcccgtcagtcctccctctgtctcagcttcctctccaacaaatggggaaaatgacattgatgtgt

SEQ ID NO: 48685 - DNA, 122 bp, Homo sapiens
ggggtcccgggaccctgcagatgggagcgtgcccgaggccctgcctgctcacccgctccccggagagccagacaaaaagaaacagcatgtttctgaagacttgtgtgtcaggctttgtgcac

SEQ ID NO: 48686 - DNA, 122 bp, Homo sapiens
gtgactatgaactagctctgtccagttgacagaggctgtgcgccgagtgctgtctccctccgggatctgcataaaacggcgtgcattcagtcctctaaagcatttatccatgttattactga

SEQ ID NO: 48687 - DNA, 122 bp, Homo sapiens
cttccccttatctcaccccaccctaatgccaggaacaaaagtgagaacacactctcaacccgcacacccgcgagccccccaccgcccctcacacacccgcgagcccaccgcccctcacgccc

SEQ ID NO: 48688 - DNA, 122 bp, Homo sapiens
atgtgtgcatgcatgcacactgagcaccgacacgggtgtgttcatgaacacccgggtgcacgcatgtgcacactgacgcacacgcgtgctctcagacaccatgctccagcaccctagtcggg

SEQ ID NO: 48689 - DNA, 122 bp, Homo sapiens
gtcaaaaggcaagacagtagaaacgacaaagccattgcttgtgttcagcctcttatggaacggagggagtctcttcccagctaccagggctgccatcatgggcaggaacgaggcagataagg

SEQ ID NO: 48690 - DNA, 122 bp, Homo sapiens
tcacctagggcggaggcgcaagctctgctgggtgctctccgcccccttgatcgccgctctcggttttcagcaccaggatccggacagctccccacctggccctgaggggcctctttccttgc

SEQ ID NO: 48691 - DNA, 122 bp, Homo sapiens
gtttggcgagtgtggcccccctccctaggagaatctgagaccctagtggacgcccgagctcgaccggattggaggagggggggctaaggctccattattatccagaaacaggggaaagcgag

SEQ ID NO: 48692 - DNA, 122 bp, Homo sapiens
tgcatatgtgcattcatacatgagtgtgtctgagtgtgccttggtgtctgggagtgagcgcgtcaccatgcatctttctatctggatgtctgtgcacatgtataaatgtgtgtgtgtctgga

SEQ ID NO: 48693 - DNA, 122 bp, Homo sapiens
aggagtatggaaatgtcgaggtgtgttgccggagccgccaaggactgggagctttgctggcgcgggtttgtgggggagcccaagctgctatttttgaataaccagctgatgctggttgcgta

SEQ ID NO: 48694 - DNA, 122 bp, Homo sapiens
attctgcgcagtatgcatgcatagggcaggccctcaatgaacccttgcagaataaaggaccggctcatccccagcacctggctcagtgcgtgcaagcggctacacactacggcataagatgt

SEQ ID NO: 48695 - DNA, 122 bp, Homo sapiens
ggacggacgacgacaagcgacacgaggcccagcgctgccccctcccgcctcctgacagcccggaccagtctctgcagtgccagggccaccacacagatgcctcctccacacactctggtccg

SEQ ID NO: 48696 - DNA, 122 bp, Homo sapiens
tctccttgatgaagggcagccgcaccaggaggatgagcatcaggagcagtgtgatcagggcgcccgccccggccaccgcctccaccacaatgccccagatggcgtccaggtcgcacagggac

SEQ ID NO: 48697 - DNA, 122 bp, Homo sapiens
gcagagagctttctccatctccttcttaattgtcttcagctcgacaatccttcatatttacgggaagcatattctggtctcctacatgtgcatgtgtaaataaatgacacttggcaaatatt

SEQ ID NO: 48698 - DNA, 122 bp, Homo sapiens
ttccaatccgacagccactcctgtgcacctccagactggagcgtctgcagttgtcacaaacggtgaaggttcagatgggctgggcggctgtcaggattctgtgggggagaatgaaacctgtg

SEQ ID NO: 48699 - DNA, 122 bp, Homo sapiens
gaagaagggacgagctctctgaagagatcaacaacttaagagagaaggtcatgaagcagtcggaggagaacaacaacctgcagagccaggtgcagaagctcacagaggagaacaccaccctt

SEQ ID NO: 48700 - DNA, 122 bp, Homo sapiens
attgtcctagtcatgaatggctccaggaaataagtattacatctttaaaactttagctcacgactatacaaaaatctttctcctttagctccccttaatatctgaaaaaggatgacattttc

SEQ ID NO: 48701 - DNA, 122 bp, Homo sapiens
acggctctccgggttttgtagtctcgtgtaggagtgatggggacgactccccactgttctcggccggggttggagttggggggtggggaccgcagttcctaggcggttaatagtctgggagt

SEQ ID NO: 48702 - DNA, 122 bp, Homo sapiens
gcactcgtagggccgctcgcccgtgtggatgcgctggtgctgcagcaggctggaggtgcgcgtgaaggccttgccgcactcgtcgcaagcgtacagtcgctgggccggggggtcggggacaa

SEQ ID NO: 48703 - DNA, 122 bp, Homo sapiens
cgtagagatgcacctgatattcctcctgcccgcagctacgattcatgtgtttgcacccaccgagctgctgcgggcagcctccccagcactggacccagcaagcaagttatctcgccgactcc

SEQ ID NO: 48704 - DNA, 122 bp, Homo sapiens
tgagcctggaaatagtggcgggccgggccgctgcgctgtggcttctgggatctctaggtccgcggctccggacacctccttcccgagatactcagggattggcccttcccttcaggccgacc

SEQ ID NO: 48705 - DNA, 122 bp, Homo sapiens
ccttcccttgcccatgtgaaaagatccgctaagacagcatgtctgccagcggaaacttctcgagctcccccctctaccccgccccaccttgcagctaaatgtgatcctgccttgctgtgaaa

SEQ ID NO: 48706 - DNA, 122 bp, Homo sapiens
gcgcgctcccggttgcgggggatggggatcgggcagtccgggaagggcggggacccggggcgcgttcctcccaagttcagactcgcgacccgaacttgggattcggaggagcgcgcccacag

SEQ ID NO: 48707 - DNA, 122 bp, Homo sapiens
ccataggtgtctgaggcctgtgatgccgtgttcgtggctggcaaggagagccggggcgcccggggggtgcgagtggacttctggtggcgccggctccgcgcctcgctgcggctgaccgtgtg

SEQ ID NO: 48708 - DNA, 122 bp, Homo sapiens
ccggctgcgctggaagcccggccaccttttactgctcagctcgattacacaccataaacccgacctcacaatggaattgccccggaaattctcctgtaaattgtagagtttagttccttgtg

SEQ ID NO: 48709 - DNA, 122 bp, Homo sapiens
agccgagcgctcacacttgggtgtttattttcacacatagtcacatagtggtcacactagcgtgcttgttttcacactgctgtccttctgtggaaagccctgtctgactttttaggttgtgg

SEQ ID NO: 48710 - DNA, 122 bp, Homo sapiens
ggcagccgcagctcgtgtgggaagtgtacggtgggaacacacctcactccttcctagtaccgggcaatgcgtctgcaagtcgggtccctgctccctggcgggtgcctacagcaccaacaagg

SEQ ID NO: 48711 - DNA, 122 bp, Homo sapiens
ggtaagaggaaaaaaaggcacccgggagttctgagttcccacgcaggcgacctgagaacacgaagtcgagaccgaaggagactgtacccagtcttgagagtgacaagggcagggagggactg

SEQ ID NO: 48712 - DNA, 122 bp, Homo sapiens
ccgctacaccgcaaagccccaaagtggagggtccgggagggcgcgcacagcctcgcccggcgccgtgcagggtggctcctgaggcagccaggcccaagcgtgacctgccccgcacgcgtcct

SEQ ID NO: 48713 - DNA, 122 bp, Homo sapiens
atacattactacttaatattatgcaaacgaggccagcctcctctgggtgtttctctcctgcgtgcctccagcattgcaagtaacgtccaatagaggggaagatatcccctaagtctcttgaa

SEQ ID NO: 48714 - DNA, 122 bp, Homo sapiens
gtgtaaagtaggaattcaataattttactcctccctttcccccaacccccatatggaaggcgtgtggtaacccgatttactgaacagtccttcgtgtccctattaatatgtaatgccaccat

SEQ ID NO: 48715 - DNA, 122 bp, Homo sapiens
gttatgacggtttggaaaaaactgtcataaaaattcactctcttggttgagtcagtaatacgagggacatggaagtctggccttggggggcgtcccagtcttgtcacatgagctaaaactaa

SEQ ID NO: 48716 - DNA, 122 bp, Homo sapiens
tggtgtcccgcgatggccacaggcgccctcctgccgtgctcgcgcccgtgcccgatgtcccggctggacttcctcaaggcctcgcacttctcgctggggcctgacctgcggctgcacgaggg

SEQ ID NO: 48717 - DNA, 122 bp, Homo sapiens
gtactctgttttggggctccatttgaggcctgtggctcaatggaagacatagaggcgcttcgccgcacaggtttaatcaagcaagggcttgatagaagtattcatcccacccccgccccgat

SEQ ID NO: 48718 - DNA, 122 bp, Homo sapiens
accctgtgtccccatgagactaaggagggagctactctccctatctggtgggtgctactccgtgtagacatgaactggggataagtaggatggctagtggggaacctaacaagggagaagcc

SEQ ID NO: 48719 - DNA, 122 bp, Homo sapiens
gttattgagatgattctcacagtgcagcgtcagtggatgtacttagaggtcaggactcagcgcctgagctcttcctgcttcctgctcttactccttctttttcttaagacctagattttgcc

SEQ ID NO: 48720 - DNA, 122 bp, Homo sapiens
gacaactgacaggttctggaatcaggactgaattctcactcccccacggctggaaagaaacgtctgtttctagtaagtcatactgagacaaagacaggtggggcaacttcttcaagggtccc

SEQ ID NO: 48721 - DNA, 122 bp, Homo sapiens
ggggaacagcgacacggggggaacagcgacacggggggaacagcgacacggggggaacagcgacacggggggaataccaacacgggaggaacagcaacacgcagggaatatcgacatgggtg

SEQ ID NO: 48722 - DNA, 122 bp, Homo sapiens
atcccagtcatgcagctgtatggaccaatacacaaaccacaggcaatcgggagaaggtgacgtgacatctctttattggttcagtctatgcctggcccagcggcagccccaggtccaggggg

SEQ ID NO: 48723 - DNA, 122 bp, Homo sapiens
cgttgctgacgcagccggcgtagggcgcttgctaggcggctgggaggagcgctgcaaccgcggagctctcccagcacctggtcacggtagaagttttctgcgcaggtgccatgcgtccggta

SEQ ID NO: 48724 - DNA, 122 bp, Homo sapiens
ggattacagcatgagccactgcacctggccgggaagctgccttttaacaagcacctctggcgattccaacccaggctgcctgtaggcacagctttgagaaacccacatctgtgctgatcagc

SEQ ID NO: 48725 - DNA, 122 bp, Homo sapiens
cccgagtctctcgggcacgtcgccatcattctccgaggatgttcctgctttgtgacaccacgcaacatcccacgtccttcccagccctggggttctccgtccctgcagggagccctggttcc

SEQ ID NO: 48726 - DNA, 122 bp, Homo sapiens
ctgtcaccccgtgtgcctgtccacgtcctgtgtgactgggtgcgaggaagtcaatggcaccgtggaatgtgaggctgtgagttgaggcgggagcgggcgactgttcgctgcaccttgttggg

SEQ ID NO: 48727 - DNA, 122 bp, Homo sapiens
cttctccagtagcgacaactctgcggccgccgccatcttccggccgtagctcctggcagacgcgagacctgcagaacaagaacctcccgcattggtggaaacagaagtcccactcctgcaaa

SEQ ID NO: 48728 - DNA, 122 bp, Homo sapiens
cctgggctcaagcaatcctcccaccttggcctcccaaaatgttgggattacaggcatgaacggaggggtgtgaaacccctagttgtcactggtccctgtcacagtctcttctgcccatggct

SEQ ID NO: 48729 - DNA, 122 bp, Homo sapiens
ggtggagggaacgactcggcagcctcttctggccctgaggaagacgtcgatattttggcacgaggggagccactgaaggactaccctacccttgcgagggaccgcaggaggtgacgcccctg

SEQ ID NO: 48730 - DNA, 122 bp, Homo sapiens
gagccagagagctgtggggcatgggcggaggtgtgggagggtgggcgtgttctccagccccggctgcacacccctgtgctgatgagtagcctctcagcccctgctcccagcgtacacagacg

SEQ ID NO: 48731 - DNA, 122 bp, Homo sapiens
gaaatagacccatgtcctccacccccaaccccttgcttgaaactagtcttttgattctaacgaaatggcaggatcttatggatgaactgccacagagaaaggacccttctctttttgaagct

SEQ ID NO: 48732 - DNA, 122 bp, Homo sapiens
atgtacggctgtagcccgtccatttctcatcctgggatagcgaggggtttccggaggaggcgtcagcggtgggaagtgggagaaagcgagcaaaaggggcgggggcgaaggagcggactcgc

SEQ ID NO: 48733 - DNA, 122 bp, Homo sapiens
cgcggaggcggcagcggcgcggacagcgtgggaaagagggacactcacccgcttcagccccgagccttcactgcaccggaagtagtcacccgcccgttgccagggtgaggaagcggggctga

SEQ ID NO: 48734 - DNA, 122 bp, Homo sapiens
ggagacttggagctttacttcctgctcctgcttttcttgatggcctggtgggaatgagctcggccgtccaggcagcaccgccaccttagccgcagccagccgccctggagtctcacttctgc

SEQ ID NO: 48735 - DNA, 122 bp, Homo sapiens
cgcaggcgcacaggattctccgcgctggcccggggcgtgggtggcggcctggttctgagtcgctgcgcggggcttcagccgcccagtccctgggacgcccactgccctccaggcctcgcacc

SEQ ID NO: 48736 - DNA, 122 bp, Homo sapiens
ctccggaggcagacggtctggggctgaaaccgccacaggccggaaaggtgcgggcgtgaacgtcctgcgcgccgacgtccccccgcgccggtctcccctcaatcctcctgctcccctcctcc

SEQ ID NO: 48737 - DNA, 122 bp, Homo sapiens
ttggaaacattgtaattgaggcagaaaaagtggtctgtgaaaatggaaggggaagtccaacgatatattttgtttcttgagaatgcagttgaaagtgggtttccccacttgtggggtgggta

SEQ ID NO: 48738 - DNA, 122 bp, Homo sapiens
ctttattgtactttgcttaacgcgacggcaaaaagaagagagccaaacagggagaggtgccgaaaagcacagcttggacttaaggtctgcaagcaggagaagaggtgatgggtattgagcca

SEQ ID NO: 48739 - DNA, 122 bp, Homo sapiens
ggttgtgctttctgaagtgctcccatggcatcctcatctccctccttctggcacccttggcgccatattaaaacagggcctgtttatttgtctcattgcccaatggactgcaagttccagga

SEQ ID NO: 48740 - DNA, 122 bp, Homo sapiens
ctacgacgccggcgcgggcgcccccagccacgcgcaccctcaccaccaccaccaccaccacgtcccgcacatgtcgcccaacccgggttccacctacatggccagctgcccggtgcccgcgg

SEQ ID NO: 48741 - DNA, 122 bp, Homo sapiens
cctggcctacgacgtatcccattcattcattcacgcgttcgttctttcagctcacgcgttcgttctttcagctcagcctgcattgcgcgcgttccctgctggctctgcagtgaacgactgag

SEQ ID NO: 48742 - DNA, 122 bp, Homo sapiens
tgcaaagtcaccggggagtcattctccttcactttcaatttcaggggtcctgaaaccctgcgtttctctgcggtaataacccgtgctttccgttcccggggcgggcgcgctctgactgatca

SEQ ID NO: 48743 - DNA, 122 bp, Homo sapiens
taccagattgggctgttgggggccaccactggctcaggtgtcaggtaaaaggtgtcattccggcctttcacactctgggggctgaagaatatgcggataaaagttgggtaccaccaatataa

SEQ ID NO: 48744 - DNA, 122 bp, Homo sapiens
tccatccagaatgccaaagcaaagcttgcctgtgtgatgaatgcttgatccgccagactccgggatccagactcacagctcatgtctgaccacattcccggggggtcagtgttaacactccc

SEQ ID NO: 48745 - DNA, 122 bp, Homo sapiens
tgcttcctccaacctctgccactgaaagggactctttggcttaggtaacaaacaccctttcgaaacatgacctactgttccttccaccggcttaccaggaagggtcacggccaaaataaaca

SEQ ID NO: 48746 - DNA, 122 bp, Homo sapiens
tgtgggcaaactatttgaccaattcacaaagactataatagtggcaacggaaaatatgcacggatgttccactttatttacaaaagaacaaatacaaattaaaactacatttagaaaccatt

SEQ ID NO: 48747 - DNA, 122 bp, Homo sapiens
agctgcaacagctcgcattcaaattaaaaccatgaaatagcatcacagtgtcaagattcacgcaaactgatcttttaacagattgtgagggaaaaaaaaacatacattaaaagaagaatctg

SEQ ID NO: 48748 - DNA, 122 bp, Homo sapiens
actcaccccgggggagggtgcaggagcaccttgccaatgccatgactggggcaccaggctcgcccagcaggggccggcagaggcctgcgtggcagcgacagtcagcgcagggcgatcagtgg

SEQ ID NO: 48749 - DNA, 122 bp, Homo sapiens
gccgctggtccggctggcggagatgtgaccgcgggcccggccggcctgcctcaggcgtcgcgtcagctcccgtgtccgtgcccttaacccacaccgatggcgggatccggctgcgcctgggg

SEQ ID NO: 48750 - DNA, 122 bp, Homo sapiens
acctcctacctcttcctcctcctccccaaccattcctgggtagggtacaagggctctaatcgctcaaccccctgactacccgtttgttctccagctggcctccccctttcaccaaccactcc

SEQ ID NO: 48751 - DNA, 122 bp, Homo sapiens
ccgggagctcctggtcatcgagctgtccgacaaccctggcgtccatgagcctggtaagggcgctgccccctgacagccctgggggcatcccggaggggggcggcagagggtgggactggtgg

SEQ ID NO: 48752 - DNA, 122 bp, Homo sapiens
ggcggcacctcacccactccctgacggccggtgccagcccggggcaccctgggtactctgcgcgcgcccgctggccccgcccggccccaacggccccaactcccgtctcctcccagtccccc

SEQ ID NO: 48753 - DNA, 122 bp, Homo sapiens
ataaggactgttgactgattggcggtaggaggtggtaggagaggaagtacctctaagattcggatcacgttgccagggagaatgtcaatatctttaatgcagagttgagaagggctggtttg

SEQ ID NO: 48754 - DNA, 122 bp, Homo sapiens
ctccgcattggccgagagcggcggcacgtgccgcccccgccccccacaacccgcgtggagcgccgccccccgggaccccgaagcacctcgggaagtgtagtcctgtcccggagggcaggagg

SEQ ID NO: 48755 - DNA, 122 bp, Homo sapiens
acagcatgccgtggtcctaagcagggaggtgtccttcctttcccctgcctgttggggctgcgcttccctgcctcgtgtggaggttgcgcccggtctgcagaaggcagagagcatcttgttgg

SEQ ID NO: 48756 - DNA, 122 bp, Homo sapiens
cggcgccctccgcccgccctccctgctgtctccgcccggccccctcccaccggccgcccccgtcgcattttgtttttgtgtttttgcagggaggagctcttcctgcaggcgtggaaaccatg

SEQ ID NO: 48757 - DNA, 122 bp, Homo sapiens
ccggcggcagtgggagtcgtggagcacagaggacaagaacaccttcttcgaggggctgtacgaggtgagtaggctgtggaggcacggccaggcagcctgggcgtccctctcggatccctgcc

SEQ ID NO: 48758 - DNA, 122 bp, Homo sapiens
gcgtggtggcgcgcgcctataatcctagctgaggcacgagaatcgcttgaatccgggaggcggaggttgcagtgggctgagatcacaccactgcattccagcctgggcgacagagcaagact

SEQ ID NO: 48759 - DNA, 122 bp, Homo sapiens
ggcctggccagggcaggtgctgggggcgttggcaccagcgttacaattagactccagacccggctgccaggcggctcctctgacctctactcctgggggatcctttcccagctgcccctcag

SEQ ID NO: 48760 - DNA, 122 bp, Homo sapiens
tagttttgcgcatggtcagcgaagtgccggcgggttaagcccggctagacacggctgccccgactccttgggatgcgagtccctcgcccagccccagcctgctcccggcgaacagctctcgc

SEQ ID NO: 48761 - DNA, 122 bp, Homo sapiens
agaggttgaggttacagtgaggcatgattgcaccactacactccagcctgggcaacagagcgagaacctgtctcaaaagaaaaaaaaaagggaaaaggattatggaaatagaatgggcaggg

SEQ ID NO: 48762 - DNA, 122 bp, Homo sapiens
caaaagttctttgggaagagtccttgagtcatttgaatttggaaaggaaaggaagttttacgtcatctgtagatgctctgatttcagttggtgcattattgccttgggccaggtgcaccaat

SEQ ID NO: 48763 - DNA, 122 bp, Homo sapiens
cacatcatcatccacaccggttcctcccagtgtgctcagggcttccatcgcagccgctcccggctccgtctgcctgactctgttggttcttagttggccttgtgtttagctcccaccttcct

SEQ ID NO: 48764 - DNA, 122 bp, Homo sapiens
ttcatctggggatgggagaaatgtctccaagggagagtccccagcagtgagaaggcccctcggaatggctgggagacagtgccatcctgtggtggggctgtgttgcagggtgcatttgagga

SEQ ID NO: 48765 - DNA, 122 bp, Homo sapiens
cgtcaccctccaagaacattctgactcggagtgagcatttcagcagatgctgatattcagcgtggctccgatctgagagccaggatgtcacttcaaactcatcctgctgagagacctgagtc

SEQ ID NO: 48766 - DNA, 122 bp, Homo sapiens
ccccgttcctggaaagccatcatcattcttaggaacacccgagttccatctttctagggtcggctggaacactccgtgcacccaccccgagccccccgcccgcacttgtccaactttctggc

SEQ ID NO: 48767 - DNA, 122 bp, Homo sapiens
ttgcttgtttttaaattctgaattttcgctacactgtccacagtaccaaatggcaataaccggctagaattgtaatagggcatttctcctctagattgccatctttccctcttgattatctc

SEQ ID NO: 48768 - DNA, 122 bp, Homo sapiens
ccatctgtgaagtagaaatagaaaagaccccattttgcccccacagagcctctgacagggcggcagaggcccacctggcccagggcaatgcctacctttccacagttcctgagaccccactc

SEQ ID NO: 48769 - DNA, 122 bp, Homo sapiens
caacaccgctttgaaacctgacccctgaaggacagataggaacccgcctgcgtgcggtggcgcgggcactcacactgctgaggggcgacacgcgggtcctgctcgcgctccgctctccggtc

SEQ ID NO: 48770 - DNA, 122 bp, Homo sapiens
acacctggcttttctcaggcagtggctcttcccacctgggtctccgtcctaggggtctgtcgccctgatgtcagggagcgggcgcagctctcagacgcgctggtgttgtctcctaactctgc

SEQ ID NO: 48771 - DNA, 122 bp, Homo sapiens
catggtctgagatgcgagggaggctcgggacctggaatgatttcacagctcccaaggtttcgggtttctccagggtggcctcttccatcgcctccctcatcccctcccccagtcctgaacag

SEQ ID NO: 48772 - DNA, 122 bp, Homo sapiens
ccggctcccatgttcaagcgattctcctgcctcagcttctccagtagctgggagtacaggcgcccctgctacgtatcaactttgatttctcagcagtttagagcaggtgaacatgatgggta

SEQ ID NO: 48773 - DNA, 122 bp, Homo sapiens
ccggttcccatctccaggaaaaggcctggctctgggatcacggaagccacgtcctctcggcgtcaaaggcccacccgccggctccagggccagttaccaggacaggaaaagagggtcctgaa

SEQ ID NO: 48774 - DNA, 122 bp, Homo sapiens
ggtcatttatttttcacctttcagtctttctcaagctacagcagatacatttctatgtatcgcacctgctcctataggtacaaatccccttgccctcctccccgcgcagccacagtctccac

SEQ ID NO: 48775 - DNA, 122 bp, Homo sapiens
ctgattagggcgagtaggctgtgagagcctctaagtcttgcagctccttcaccagtgtctcggagcccagcactttgggtcttgccactgtttttgtcagggagctgtcaatctggagtggc

SEQ ID NO: 48776 - DNA, 122 bp, Homo sapiens
gtggcaaaatacccaaaatgcagtaacacaaactttaccaccttaccccctgtgagtctacgactcagtcatgttcagcgcacacacgtggctgtgcaaccatcacgccgtgctgcccccgc

SEQ ID NO: 48777 - DNA, 122 bp, Homo sapiens
agaaggggaggaaagtttgtttgctgtggctacaggtgggcaccgcaagtagggcgccggcgcactctgctagtgcaaagccggcttgactggaagggcgggagtctcctcctgtcccgcgc

SEQ ID NO: 48778 - DNA, 122 bp, Homo sapiens
tgtgcggggcaaccagcaggccctgcgggcccagctgcaccagctgcagctccacgccgccgtgctacgccagggccatgaacctcaggtcagctcccacccaggcaggagactggggggct

SEQ ID NO: 48779 - DNA, 122 bp, Homo sapiens
ccctagggccgggcacgccactccaggccccgcccagaacctccccgcccagtcaagccccgcccccaaactctgtctccccgcggtatcctctggggctctccaggccccgcctcggctcg

SEQ ID NO: 48780 - DNA, 122 bp, Homo sapiens
gtcattaagcttgagttttttcatctgacatttgagaatacaaattataccaccctcatacgacagctgttttaaacaagataatctgcataactcacacagcactagtctgacagataaag

SEQ ID NO: 48781 - DNA, 122 bp, Homo sapiens
tgctccccagagagctagttgctgctcttgttcgcattggagataaagaaagccaagtcccgaacccactgctggccgcgcgcagagagcagatcccagcagtcagcttcctgaggcaggac

SEQ ID NO: 48782 - DNA, 122 bp, Homo sapiens
tgtgatgtggggagtccctggggaagtccctaaagctgtgtcctcgaagccagcttccctcggcctaggactgtcactgacctccatctggctggcccctgtgccccttgtccacttggtca

SEQ ID NO: 48783 - DNA, 122 bp, Homo sapiens
gctccggttcagtttaatgatgtcgtccagagacatgtccattttgtcggccatggcgggcgcggaatcgggcatcggctcgagcccgcgcgtcagcacgccggcacgtcacttccggcgcc

SEQ ID NO: 48784 - DNA, 122 bp, Homo sapiens
ctccctctgtcacctcccgacttttgcattctggagtttcctctgcacattctgcggggacgctgttaaatagacgcatcatactgatctctgcgctggcttcctactgctgccagagcaaa

SEQ ID NO: 48785 - DNA, 122 bp, Homo sapiens
tgcacactccctagccggagcagccgcttgcccgccccacaagtgcggctctccgcgccacgctccctcctgctagggctccaagtgccgacttgcagaggcctcgggagtgacagtggaac

SEQ ID NO: 48786 - DNA, 122 bp, Homo sapiens
tagctcctgctgctcctgaggaggtgcccggtcaccgcagagaggcaccccgagtggaggcggccacaccacgagtggatgctgtggctgccccgactttgatcccagggcgggaacggaga

SEQ ID NO: 48787 - DNA, 122 bp, Homo sapiens
aacctatgaaaataaacaaaagctgctccaagcattctctcggcctttctgaactttctacgctttgggtttttgttttttcctcccgtctcagaggttaaaaacttcgatagggactcgga

SEQ ID NO: 48788 - DNA, 122 bp, Homo sapiens
gtcaacaagttctcccttcgggtgttcggcagccacaaagcagtggaaatcgagcaggagcgggtgaagtcagcgggggcctggatcatccacccctacagcgacttccggtattgggggct

SEQ ID NO: 48789 - DNA, 122 bp, Homo sapiens
ggttagtgggtgtgccaggtggagggaattcagtgggctaacaatgcaatttttaaaatacgggttaaggatatcaaaaggcaattcacaaaagaggaaacctacatggccgaaatagcccc

SEQ ID NO: 48790 - DNA, 122 bp, Homo sapiens
ccacctgaagcggatctttgcggtgaagacaggggcaggtcccgagaaccagactccggtcgtcattcctgcagcttggaacccaccgcagcgggcacgcaggacagccagccctgtgggca

SEQ ID NO: 48791 - DNA, 122 bp, Homo sapiens
agtgatcaccgtttgatatcgacagggtccgaccaacgtgcccgcaggatgcagaaagggcgcgtgatgagcacaggagagtttagagtggccccgcgcctgcttcccaagctccagagaca

SEQ ID NO: 48792 - DNA, 122 bp, Homo sapiens
cttccaatcagtgtcgtgttttatgcaaagcaatcagctggtgaactttgctaatgagttcgattttatgccggatttagcccttattactatttcaagggtgcttcgggctagtgcgggcg

SEQ ID NO: 48793 - DNA, 122 bp, Homo sapiens
cgcttggtcgggccgggtgggtgcccggcttccgtgggagccagcctggcgtgggggcctcgcagcctcgggactgggaggcacttttcagaggaaagtcgctttctcatttcccgcttttg

SEQ ID NO: 48794 - DNA, 122 bp, Homo sapiens
aggagggaaactgccaagaaaattaaaattacctcgtatgtcaaattgtaagtactgtggcgatttaaggcaggtacacatgttagttaaattgctaaacctcagtggtggcagcatgtaaa

SEQ ID NO: 48795 - DNA, 122 bp, Homo sapiens
tcactaaggaaactgttagccgttcacctcgtgcccgcagacttctcaaaaaatacaaatcgggggaaccctgtggagctgggctgtgaatgtttatatacacatactttgtcccaatgact

SEQ ID NO: 48796 - DNA, 122 bp, Homo sapiens
gggtgaacatctcccctccaagaaggagccccagcagcaccacgacctgcttgtctaccacgtgacagatttctacccagacagcattcaagtccgatgcttcctgaatggacaggaggaaa

SEQ ID NO: 48797 - DNA, 122 bp, Homo sapiens
aacacactctgtgttctttcagatatcactcccctcttcttttcccgtctttccagaatgcgctgtgcttgtgtcctctttgccaatcagagtgagccgcttggggactttagtccatgcac

SEQ ID NO: 48798 - DNA, 122 bp, Homo sapiens
ctcatcactcttacagtaaaatccaccctggttcaggagcccagattacttggggtgagccgctctctcgccccgtctcctgcccctgccctgttctttgtctgccagcctctgccaagctt

SEQ ID NO: 48799 - DNA, 122 bp, Homo sapiens
aagaggcactcactctctctccatttaggctgcaaaattattagaatgtaaacctgcagccgctggtggccgtcttatcatcacctgtaacacatcaagcctgcttgagaatgaagccagcg

SEQ ID NO: 48800 - DNA, 122 bp, Homo sapiens
ggccagcgggcagtctactcacgtgggcctccgcatggcccagcgccgccaagggcaaggcggagcctcgcgatcgccccgccccctccgtgccccgcctcctgtagggagcgcgggaccct

SEQ ID NO: 48801 - DNA, 122 bp, Homo sapiens
ggccacctccactggctcagaaactgtgagcactgttgccagagagcaggcaaaggtgagcgcctgacctactgccttttccctcaaaggtgccgtcttttatagcccatcactattcaaag

SEQ ID NO: 48802 - DNA, 122 bp, Homo sapiens
tcttcagagggcctcggccccttgcccaatgagcataagaggactgtgcggggctagttccgagcggcagtatttagggccaacccagtgcggggctggaaggggcacagggctgagcgacg

SEQ ID NO: 48803 - DNA, 122 bp, Homo sapiens
gaagcaggttctgtttagactgaaacgggcgaagctgatcatgtttctgaataagcaagacgtgttgtgttcatttaaaccacttgtgttcatgaatctataaagccatgtttggatttcta

SEQ ID NO: 48804 - DNA, 122 bp, Homo sapiens
gcactgagagatgggggtctttaagaagtgattggatcatgagggctccaccctcacaaacgaattaatccattcatggattaatgtatttctttataaattacccagtttcccaccagggg

SEQ ID NO: 48805 - DNA, 122 bp, Homo sapiens
tatcatttggagagcaggcttgctacaaacggggtgcaggagacgagggagtgggaggctcggaccttgcctgggcctctccatctagatggacctaaagcaacctctactcccagactttt

SEQ ID NO: 48806 - DNA, 122 bp, Homo sapiens
ccaccgctattgtgcgggggaagatgtagcagcttcttctccgaaccaaccctttgccttcggacttctccggggccagcagccgcccgaccaggggcccggggccacgggctcagccgacg

SEQ ID NO: 48807 - DNA, 122 bp, Homo sapiens
gtgcttcccagttctgaggcgatttagtcagcggactcaaggcgcgctccctgccttccccggcctcccagcaggggacgaagtccccaacctggctgccagtccagatgctgcagtacagg

SEQ ID NO: 48808 - DNA, 122 bp, Homo sapiens
ctcagggcagcccggatgacagctaatgcgcctgggcaaggcgttctcaactgcgattcccggccttaaatgtcctctcaacttttaaaagttatttattcaaagtgcatttgctgactaaa

SEQ ID NO: 48809 - DNA, 122 bp, Homo sapiens
gctgggcttcgggaggggattgccctgagaggtccgggaggacttgctgtggaattcaagcgaccgtgggccttgagggaaccggggggcaagacacccacccagcattcgcggaatatttc

SEQ ID NO: 48810 - DNA, 122 bp, Homo sapiens
cacttaaaaaaaaaaagtatacaattcaatggttgctagtatattccatgtagctgcaatcgtcaccgtggtccattttacagcatttgtatcacctcaaaaagaagctctgacccttcagc

SEQ ID NO: 48811 - DNA, 122 bp, Homo sapiens
tttcctcgccccttgtctctctcggcatggtctcggcacagcaaggtgtgttcacctgtgcgcgccgtccaggatcagatgctgacgggctacaccgcggaaggcggcgaggcctcgggttc

SEQ ID NO: 48812 - DNA, 122 bp, Homo sapiens
cgcccgagcaggggatgggggtgaagcggctagggctgctattggtgttcctgcctcatccgcagcggggaggacaggagaggtctgcccacaccccgaggcagcacccagctcgccccact

SEQ ID NO: 48813 - DNA, 122 bp, Homo sapiens
aatatttactctcgtcttatgtttactcaaaggagaatatttactctcgtcttatgtttacgcaaaggagaatatttactctcgtcttatgtttacccaaaggagaagcattgtggctgagc

SEQ ID NO: 48814 - DNA, 122 bp, Homo sapiens
tccacctggcagtcatagacgtcctcggctgagggcacgaagggcaggtagtggaacttgcggaacaaatggtcaggctgggaatagaagctggtctgggccactccctcagtgacagtttg

SEQ ID NO: 48815 - DNA, 122 bp, Homo sapiens
ttttcctctattatggagaggtggtgatattgtgggaaggtctggaatcggggctgcattcgatttcaccctaattaaaagtcatgaggcaactgttaactgcagcttactcacagtaaaag

SEQ ID NO: 48816 - DNA, 122 bp, Homo sapiens
accaaagtccttagactggcatacatggctcatgatggtttagtctctggccagccttatcgcctccagctaccccacccacccaccctctgctggtccacctacaacaatccacatccagc

SEQ ID NO: 48817 - DNA, 122 bp, Homo sapiens
ggttcagaggcatcctcatgtcaggaggggctttggtgtcaccttttccttgtgagggcccggatcccatgacccctatcaccccatcgaagccaaatcacctcccagagacctcctcatac

SEQ ID NO: 48818 - DNA, 122 bp, Homo sapiens
aaaagaaaggctgacaactggatcccgggaatgtcaaggccaccctgggcttgaagggaccggccatgcctccaagccttgcccagagagggggttcaggatgctgcgtggttccaggtgat

SEQ ID NO: 48819 - DNA, 122 bp, Homo sapiens
ggggtccccggcatcgtcctgccgagttggatacctgagctcggttccagcaacaccatccgctctctgccagggtcctttgagattcccacctgccgtgtgagggagctgacaccttactc

SEQ ID NO: 48820 - DNA, 122 bp, Homo sapiens
cgcccgcccgcgggcaccgcgcgccccgcccgtcccgcctccgccccaccgagaaccgcgcgcgccctatcccgcggcccaaagccccctaactcaacccctaccggcccaggacctccctc

SEQ ID NO: 48821 - DNA, 122 bp, Homo sapiens
ctcctgcggggtacgtgagcccggactgggacgtggacgctgagagcgggcgcttggactcggtcacagacacggaccctctctagcacagggacagacattagtttccctttgtgcgtggc

SEQ ID NO: 48822 - DNA, 122 bp, Homo sapiens
tcagattctgaaactttttgtctgggaaagtgccaggtgactcagagctgcgtaatgtaacgaaatgagtcagatcatctctcaatgtgctctaaatgaatctgctgtctttaaaatggtgg

SEQ ID NO: 48823 - DNA, 122 bp, Homo sapiens
tagcggccgatatgtgccctgggccctgcggaagggggcgctcagcctgggcccagtacccgcctccccacccccactccccagctgcccccggccgccatcactcacagggacaggcagaa

SEQ ID NO: 48824 - DNA, 122 bp, Homo sapiens
gttccatttttttttaaacaacagcaactgaatggaactcctcttacatgtatgtggagccgtaaagtcattgcaaggaagtccctgtgtttttaatctcaataattcactttctcactaaa

SEQ ID NO: 48825 - DNA, 122 bp, Homo sapiens
gtgggcctttgaatccctccatccggggtcagtgcacccgagcgactgggcccccgtgctcgccaataaagtgtgtgggacggccttcaattatggaagcgtagccaaccaaatcagctttc

SEQ ID NO: 48826 - DNA, 122 bp, Homo sapiens
cagcttgtcgatgtgtacgcggttttatgcacttcttttaaactgtcaaaaggatgtctccgtgtacaatgtgtccgtgagacaggtaacatgggggtaaacagagaaaagagagtgggggt

SEQ ID NO: 48827 - DNA, 122 bp, Homo sapiens
agggatcatcccgtccaggcctctcaaagtgctcgaattacatgcggatgccattgcatgcgtggcctacgcctacggttcttgacccttctgaacttcaaatttacccttgttaaattgag

SEQ ID NO: 48828 - DNA, 122 bp, Homo sapiens
aacgggttccggccacgagcctataaaaaacgggtggttgggcgccgctgtcttttcagtcgggcgctgagtggtttttcggatcatgtctggtggctccgcggattataacaggtatgcag

SEQ ID NO: 48829 - DNA, 122 bp, Homo sapiens
caagttagtgtgagactgcttggcatagaaagacgataaatgccacagacaaaacctaatcgtaactgaaataaataaattcgaacaacaaattgttaagtgaatggaatgcagctagctag

SEQ ID NO: 48830 - DNA, 122 bp, Homo sapiens
ggccagcagctctccacggacccaggaccagcaatatcagttacagtcacaaagcacacacgtcagcacacaaaaaaaggagcattagagcagaaagtcacataatttggattgatgagata

SEQ ID NO: 48831 - DNA, 122 bp, Homo sapiens
tttattgccatgtgtgggacgtgggtccttctctgctttcaccactttgactgtctgctccgtggctgcggtccctcagtgctgctgcgccacccctcacttgtgcgtttgttccaggagta

SEQ ID NO: 48832 - DNA, 122 bp, Homo sapiens
ttggatgttggcaaaagacaggagactcctgggtcagagacaaaacactttatattaccacggcatgttctccaagtcccatggtggcaatgccatgagccaaatggatgaagaacatgcag

SEQ ID NO: 48833 - DNA, 122 bp, Homo sapiens
actggctccgttctgcccaggtgcctggggcgaggtgccaaaggttctctataaagtgcccggctcccggcccacggccactcgccctccagcttctgccctgcctgctgtgtgcggagccg

SEQ ID NO: 48834 - DNA, 122 bp, Homo sapiens
agatccccagaactcttgaagagtttgttggatttcattaagtgactggatatgtaaagtcgtttaatgtggtgctaaaaagtaaaggacttttaatcacagacagtagaattatgtgttca

SEQ ID NO: 48835 - DNA, 122 bp, Homo sapiens
aggcgtgctttcaagctctgtgtgtgtatgaacccactcaatgctcacacgggcctctgacgtagctaactgctgtgattctcatctacagacgaggaatcctcaaggtgaagccctgccca

SEQ ID NO: 48836 - DNA, 122 bp, Homo sapiens
aactggtgtgtctacagggtcccaggctgagtgagtgtaggtgttaatatgagtgtaccccgtgaagggacagcatcctgtccagggtgcattcccatcttgtaccctgagctgcaaagata

SEQ ID NO: 48837 - DNA, 122 bp, Homo sapiens
agtcggcagtggggcacaaaaaggatttcaaagggctctgaaaaccgaaagcccctaacccggatacgaggggcctcgagagaaaggtttgtcctcccctgcagcccaggcgcgggccaggg

SEQ ID NO: 48838 - DNA, 122 bp, Homo sapiens
ggtcctggagaggtgaaggcttatgtatgcctggccgataaagcattccctccgcccacacgcaccccctgaggagggcagggatccacctgggcattccacaagtggcactccagaagagg

SEQ ID NO: 48839 - DNA, 122 bp, Homo sapiens
acattcagtttcttttcatttgccttgtatttcttgaagtcctaccaagaagtgctccaacggagagcaaacagagatgactgcttaaacagcacctttgcgccacaggaaaatttccttta

SEQ ID NO: 48840 - DNA, 122 bp, Homo sapiens
ccgggactgaagggagggaattcctgtgggtcccaggagtgccaagagtgcgcagcaagacgggaaattgcaaaagacctcacccctctgccctcccccgcggttttccagtaactcccgcc

SEQ ID NO: 48841 - DNA, 122 bp, Homo sapiens
cactgactccgcaccccaccctcgaggccggaaatcggttccctctgcgggcctgagaggcgagagcgctcgcgcccctgacttgcaaagttggggtctttactggcctccgggcttctgct

SEQ ID NO: 48842 - DNA, 122 bp, Homo sapiens
tagttgggagcttctggattccatctgcacctgtgagccccatgctggctgtgcactgcgcgggcctgagactgctggatacaatgttgggcaacaactcagccagcctgatggcagcctca

SEQ ID NO: 48843 - DNA, 122 bp, Homo sapiens
gaagcgagagcttcgtcacccgctgtcttccagctcccggtgcgcggcaccggaggcaggcgttgggctttacctctctaaaagtactggggcaaaggaatggagaacacggcgtcccgagc

SEQ ID NO: 48844 - DNA, 122 bp, Homo sapiens
ggcgcccacacgtactcgcgtgcccgcagtggcgagcggttcttgtagacgagctggatgcgcacctcatagcgggtctcctgggcctggtggtggtggcccagcactcgggcctggaacac

SEQ ID NO: 48845 - DNA, 122 bp, Homo sapiens
tgaaggacagttcgttctggagggccaggtgggggtaaagtcaggagcagccgaagagcccgtccatagcatcgggcagctccttcagggttcccagctcgaaatagttctgtgccccttgc

SEQ ID NO: 48846 - DNA, 122 bp, Homo sapiens
atggctaagttgggagagacagcccttgatctggacctcagaccaggatgggcctgcgtccggggtgcccgagtttaaggggtgagcaaggtgagcctaacgctggctgtaacagtctctga

SEQ ID NO: 48847 - DNA, 122 bp, Homo sapiens
cccgccggccaggaacagtggcgttctcggcgcgtctggctgataaggcctttgtgacaccggggacaggctgtaaaaacgcagccagcttttgtctgcacctccgcgccgctggcaagggc

SEQ ID NO: 48848 - DNA, 122 bp, Homo sapiens
tccccatttcccttagcagcttggtaaatgatatttaaggtggataggtctgtgctaaagcgaaagtgagggtccaccaaacatccctagtgtccggccaccaaggctcaaaaatacgtaca

SEQ ID NO: 48849 - DNA, 122 bp, Homo sapiens
cacgaggggaacgggacctggaaatccccaagcctgggtatgagaaggcagccgagtgtgcggcggcagggcaaggttggcctgggccgcccagaggtcttcagacccaggggcgaagctgg

SEQ ID NO: 48850 - DNA, 122 bp, Homo sapiens
gtggggattcacattttcaaagaattcccagaagtcctaagacaaagaattccagcctgccgtcctcgccacggagcctgtggggcctgctgctgggtctgtcccaggctttcttctctgtt

SEQ ID NO: 48851 - DNA, 122 bp, Homo sapiens
tgaagaaagcaggaatttggctccatggattcggggccgagggcggaatcgtgaaatagacgccgctgggaacgcgtacctggggcaggtctcagacgcgtggggccggatcccggtggggt

SEQ ID NO: 48852 - DNA, 122 bp, Homo sapiens
tgccacagcagtgcccacatgaagggtggtggcccaatgggcccaggaaacccaccttgtcggcagcctcacggacagcactggccgggggctcctgcagcttctccgtgtacttgaggagg

SEQ ID NO: 48853 - DNA, 122 bp, Homo sapiens
catgacgctccagctcatccgaacgagtgaacctcttgccgcagaagagccagttgcagacgaagggcctctcgcctgtgtgccagcgcaagtgggccttcaggtgcgaagccttgccatac

SEQ ID NO: 48854 - DNA, 122 bp, Homo sapiens
gtggggccggctgaccgggcagcggtgctggggatcctatgcagcctggcgagcactgggcgcttcaccctgaacctaagcctgctgagccgggcagagagagagagctgcaagggcttgtt

SEQ ID NO: 48855 - DNA, 122 bp, Homo sapiens
caatacatatgtaatgggaaggaagtgagaagtgaagaatgacacagccctacagaaattcggaggtgatccactcaaggttggggcacttttaacaagtgcagtgctgaacatacacacta

SEQ ID NO: 48856 - DNA, 122 bp, Homo sapiens
aagtggtggagcttcttctggagcaagctcttctccaggaagcacagcaactcgtgcagacgagcgtccagctgccccgccttccagtcggcggcctgccggaggagtaggaggtgcagtag

SEQ ID NO: 48857 - DNA, 122 bp, Homo sapiens
aggcttctgaccattcacactgcccgtccggacttgctgttaccgtgattactgtccccgcggcctccttgggggccaagtcctgggcttccactctgagtgatatccttgaaggaaaagag

SEQ ID NO: 48858 - DNA, 122 bp, Homo sapiens
ggagccttgcttttctcatcataaaatgggtaataacagtccctccctgtaggattggtgcggggaagagtgaatgagaagtcagaacccttcccacagctgggcacagagcacaggtggag

SEQ ID NO: 48859 - DNA, 122 bp, Homo sapiens
ggggcctgagtgccaggcggcaggtggaacacagctccaggaatagggaaaagggcttcgcgttctagctcactgcacctggacaggtgcctgtgtgacttcggccctgccctgtgacatca

SEQ ID NO: 48860 - DNA, 122 bp, Homo sapiens
aagggtggcggcttgagtgtggcggcctcggcgatgcgcacgtggctgcggcacacctcgcgaatcaggcgcaggtgagggtcggcctccacccacttgccgttggtgcccagcacgatgcc

SEQ ID NO: 48861 - DNA, 122 bp, Homo sapiens
agcttgggaatcccccaaggcctctggggcaggctagtgtgaggcctggggcagtgaggccgggggagggctgtgggagaggaggaaggggaggtgagaggagagggagaggtgtccaagag

SEQ ID NO: 48862 - DNA, 122 bp, Homo sapiens
atgtcactcggctctgcgttaggacttcaggaccgcggcagtctcatcattgtgggtgggcgagtggacagggagtacccacggcctggacagctgatgccaggacttgagggtgaaggata

SEQ ID NO: 48863 - DNA, 122 bp, Homo sapiens
tggggcgccggctcggcggggaggagcgggccagctccgggccaggtgtgccgcctgtggcgccggtttctcaacctagttagccagtggcaccaagaagaggactaggctggggtggccgc

SEQ ID NO: 48864 - DNA, 122 bp, Homo sapiens
acgtaaaagagcagtatatggctgagcatgaaaataattccaaactgtataatgttggaacgttcagctgagtgaggaacatgattgtacctaagtcaaagatacggtaatgcagtctctcc

SEQ ID NO: 48865 - DNA, 122 bp, Homo sapiens
tcaatggatccatgagtcacatgcttaatctcctcaaagaactctctgggcgagaacctacgcacaccttttggtctttctgagacactgggtaatagttgtttaaccacacccttgacttt

SEQ ID NO: 48866 - DNA, 122 bp, Homo sapiens
ctcatccaatctcagccccaactaggtgacgtcatctccccgccctgcatccccaagcctcggggagtcctgtctctaagctacagtcccagctccagtcccagctccagtcccagcggcgc

SEQ ID NO: 48867 - DNA, 122 bp, Homo sapiens
tccagatcctagtaggtgtacaagacagagtaggggttccatatagctgctgaataaatgcggaatgagattagaactgagggaaagcacagtgcctggtaaaaggtccatcctctccacta

SEQ ID NO: 48868 - DNA, 122 bp, Homo sapiens
tgctctggctggcttgggacaaaactgaacctcccagtttatcttccagcctctgagctccgttatgatacagtgagctgccaaaattaaggtgaactgcagatctaacttctttgcttgtc

SEQ ID NO: 48869 - DNA, 122 bp, Homo sapiens
gcaggcaacaggcatcgttccgacccactctggcgcgaataacgcgggccagctgtcccccgagccacatcagaaagcgttgattttattccagccccagagcaagcttttgaaagcgcatg

SEQ ID NO: 48870 - DNA, 122 bp, Homo sapiens
catccggtctctcccatcttacaaagaagcagcccaggggttttgtcttcgagacccctccggctgccatccaccgaccctacctcccctcccctgccctcgcctccaggaaacacccactg

SEQ ID NO: 48871 - DNA, 122 bp, Homo sapiens
gggagatatggctggggtccccgcatttgacctgggaaaacctgtgtctagaagagctgccgtatgtatggaggttgggggaattgtgcaacgcttctaattgagaagaccaaatctcaggg

SEQ ID NO: 48872 - DNA, 122 bp, Homo sapiens
catttctgagtcagctcaaagggaaccaatccatgaaacaaactgagatttgagcccgggcgcaagctgctaactctggatttagtttcttgtgtcttctctaaccccagaaaccccaggta

SEQ ID NO: 48873 - DNA, 122 bp, Homo sapiens
tgatcccacttctcttttccgtagcactcactgtcttccaccatgctgtatagtaatttacgcatttatcgtgcttctttcctgcctcccaccactcatgtgtcagccccacagggggtctg

SEQ ID NO: 48874 - DNA, 122 bp, Homo sapiens
gagggagagagtgtgatggaaacttacctggacagtttagtagatggtattgtgttaatccgagtccagtcaggagaaactacgcagtaatttgctaacaggaaaaatgtagtatacaagac

SEQ ID NO: 48875 - DNA, 122 bp, Homo sapiens
ttaccgccaagtggtttaccaaaacgcggcggaaggaatcaggacagtttgcccgacgggcgggtcggcggctttcaggcgggagagatcttgccaggggcagagagagatcccgaaaatcg

SEQ ID NO: 48876 - DNA, 122 bp, Homo sapiens
gggtcagtgcggggataaatgatgagttactgacaggcttgccataatcacctcctagaacggaggacgctaggatctctcctcctcagggaaggtgctgtcttcacgcacaccatcgcggc

SEQ ID NO: 48877 - DNA, 122 bp, Homo sapiens
caagcccagtggggtggctggcgtcagctcagtgttccagaaaagccaaactgttcaccacgacttgccctgattttgccttcactgctattcaaagaggcctgaagcagttactgaaagca

SEQ ID NO: 48878 - DNA, 122 bp, Homo sapiens
caccaaggagcagatgttggagctgctggtgctggaacagttcctgagcgcgctgcccgccgacacgcaggcctgggtgtgcagccggcagccgcagagcggggaggaggcggtggccctgc

SEQ ID NO: 48879 - DNA, 122 bp, Homo sapiens
caaattctctaatgaacttcaagtgtttctagagtaaaatatactcttccattccagaaccgttagtacaactcttaattcaaccagaaaatggaaggcttacacatattcctttgaccaac

SEQ ID NO: 48880 - DNA, 122 bp, Homo sapiens
cattgaacatcttagtaatgtttgacttaatagaaaaagacacttagaatttcataatttcgtatctgcttctgcattcaatctgttatgatacatccagtgttttgttgagcctctgggta

SEQ ID NO: 48881 - DNA, 122 bp, Homo sapiens
tgcgccggccggagattaatttgaaaagtagagggcgggggttctttccagctggttgaccgcagtactgaagcggccaaaaagtggtcttctcctgagcctgatctttcaggcgtttccga

SEQ ID NO: 48882 - DNA, 122 bp, Homo sapiens
caaacacagcccgtgcgtgatccgcacgcgaccaaaagccgagcgcacacctcccgcccccgccccacttgccatcgctcacactaacgtgcacacatgctcgtgcaaacgcgcacgcacgg

SEQ ID NO: 48883 - DNA, 122 bp, Homo sapiens
ggtgaagaacccagcttgtggctcaagttggcctgaatagggttcgaggccctgctcccccgggcctctttgtccatgtgttcaaggaaaaaatgggagagtccaataccaaaaaggtggtc

SEQ ID NO: 48884 - DNA, 122 bp, Homo sapiens
ttctcatccagcaagcaaacctcaacaccttcagactgtccccagcaaccagaatattatcgtttcagagtttcgagggaccatagctgtcagcctgtctgtccaccctgcctggcgctggc

SEQ ID NO: 48885 - DNA, 122 bp, Homo sapiens
tataaaatgtaagctggaaatgctgccccagaaatgtgcgtgcatgcgtacgcacatgtgcgcacacacagtcaggctaaaatggaaatgtattttgtttttctgggaaaaaggtaaaatcc

SEQ ID NO: 48886 - DNA, 122 bp, Homo sapiens
tgaaatgtagagttaataaaatctacctcataatgttcttgcgaggattaaataaaataacgtaatatatgagaaaataacgtaatatatgagaaaatacctattctggaagccggcacata

SEQ ID NO: 48887 - DNA, 122 bp, Homo sapiens
actaaatttcaagactagattttactacatgcactctaaaaaaaatctggcttaaaaatccggttgggcgccatggctcacgcctgtaatcctaacactttgggaggttgaggcaggtggat

SEQ ID NO: 48888 - DNA, 122 bp, Homo sapiens
cgctcgcaaggatcccgaaagctggggttagcgcgccctctgctggacgatgaaagactccgcgcgctctgctccccagtcccccaggtggcccgggggaggtgaagtaaggcgggagggcg

SEQ ID NO: 48889 - DNA, 122 bp, Homo sapiens
gccacggccgccgcgggcgccatcttggctgcagcatcacctaagagactcggtggagggcgggggcggggcggctccaggcggggccggcacgaggcggggcggggccaacgccggctctg

SEQ ID NO: 48890 - DNA, 122 bp, Homo sapiens
cagcgtgcaggggggagcggggagtgtcgtggagacactccgggacccctcactcggttccgctgtgcgtccacttagctgtggtgtcagctgtgtctccgctgatttcaggcaccgccggt

SEQ ID NO: 48891 - DNA, 122 bp, Homo sapiens
ggcaccctggcaccctggcaccgaccgcccggtcgtctctctcccggtcgcgcagcccctcggccagcgggccttgtccccacccaggttctctggccgcgactcagcagcggcgcctcgcc

SEQ ID NO: 48892 - DNA, 122 bp, Homo sapiens
ccgcccggcggcggcctggctgtgcggtcccgcccccggccccgccgcgcttacccggggcgctgcagtccgcacacacctccgctcgcggcccctttcgggacatcctcagcggcgacgcg

SEQ ID NO: 48893 - DNA, 122 bp, Homo sapiens
aattgcctggacttgggctccgggctcgggtcgccagcattaaaattcaatcaggcctagcgctatgctattaaatattcattgggagagcttcccgaaatcgggctgggggatggggacgg

SEQ ID NO: 48894 - DNA, 122 bp, Homo sapiens
gaagcacccagtagtagttaagtctgaagatcatggagagggaatggtgtcaactgaaaccgagagatctacagccatagatggggcttcccaaaggaagctgtatccttacgggaacacag

SEQ ID NO: 48895 - DNA, 122 bp, Homo sapiens
tggagaatcagccacatgccatgtactacgtggcaggggtggcagcccgagccctgagatcggagagcctatcccatgtgacgcatgtcagccacacatcacccaggcctgtgatgaaggac

SEQ ID NO: 48896 - DNA, 122 bp, Homo sapiens
cggcgctctcccgggatcccggggcgagccaagcgagcctgtgcttcccagcagccatcgcgccgttaagggcgctggcagccacgcttccagggctaccgccttcctgaaactgggggctg

SEQ ID NO: 48897 - DNA, 122 bp, Homo sapiens
tgggccttggacacttctagtcctcatcacctattggtcacttcatctagggtggccaagcgcctaatattcagagagaatctgggcaagaatgaagatttaaaattctaatggtagtggtt

SEQ ID NO: 48898 - DNA, 122 bp, Homo sapiens
gggaaagcggagactcagcacagaggcctgggctgcatgcccctcatccgctaacgtgcacgcctgtgggctgggtgtcagcttgccccatgaaaactgcctggcagccttgtcgctgccca

SEQ ID NO: 48899 - DNA, 122 bp, Homo sapiens
ctgtgtcttttgtatctttgcatcactctgtaagtagcagatggctcacggccctgtacgcgcactaggctctcaaaagaaaacatgggactgagacaagaatgctttaagttatccttttg

SEQ ID NO: 48900 - DNA, 122 bp, Homo sapiens
aaattccaagaacagtcaccttctaccagacactctgatgttggaagacaaagcatatttcgtaagtggcatgatttctgtgctcaagtttagaacaaagccacagatttcaacatctcaaa

SEQ ID NO: 48901 - DNA, 122 bp, Homo sapiens
aattgagcatctctgctgatctttgttggccaggcttagctgagctaggctggagttacacgtctgcagtcagctagtgggttaactgggtctggctggtctagtgtggccttgtctgggct

SEQ ID NO: 48902 - DNA, 122 bp, Homo sapiens
ttttgggaatgttctagagatgaatctcctccccatgtcctacgctgggtgaggaagtgtcgggtacccgggcgacctgtcctcaggtgttctaggaacgcggccccatcccttgtcagcct

SEQ ID NO: 48903 - DNA, 122 bp, Homo sapiens
catggcctgccgcttcacctcattcacggcctcttctgcaaaggacatgggcagggctggcggtcacatgggccatcccagatgggtctctggacttcctacgcgtggccacaacctgggga

SEQ ID NO: 48904 - DNA, 122 bp, Homo sapiens
tcccagctactcaggaggctgaggtgggaggatcacctgagcctgggaagttgaggctgccgtgagccatgatcactaatgtacttgagcctcagagacaggatgggaccttgtcttttttt

SEQ ID NO: 48905 - DNA, 122 bp, Homo sapiens
ccagttcaggatcaggactatggaggcacaacatggaggcccagtcccttgcttgcccaacgtccaggggccactaggaccccagtccttttcaggaggcagcctcggggaatcttcaaggc

SEQ ID NO: 48906 - DNA, 122 bp, Homo sapiens
gctgagccacccgtggccgacaagaaacctgagtgggaggggaaacttggttgctgtgatcgacccaggcttgcgagttgttttggcaacacagcctagcaagagccgaccaatatgtcatt

SEQ ID NO: 48907 - DNA, 122 bp, Homo sapiens
tccacctcccaggacggtttcaccgcccttatctgaccaccccctggttctgccgcagcccgggccggaacaaaactgcaacccccagaatacctcacgacggggcactgcgtcgtcaacgt

SEQ ID NO: 48908 - DNA, 122 bp, Homo sapiens
cagccccatgatatagagtctctggcatcagtttgtttgcaagtctctctgggccagcaccgaggacttattttctgcttagagtggtttgtaccctatatttatggagcactgcagtgagc

SEQ ID NO: 48909 - DNA, 122 bp, Homo sapiens
gattaatatctgggtattttcttacactggacctcactcataagggcaggagctctgtcccgttcacacacgatccttccccgccacggcactgcccagcacacatatgctagcaaaaatta

SEQ ID NO: 48910 - DNA, 122 bp, Homo sapiens
ccctttggacaccacagaggccctggttgcccagagctgcccctagaaggggctcacacacgtcggcggggggcctcattcctgcatctggactcagagaagagccagaggggggaggggga

SEQ ID NO: 48911 - DNA, 122 bp, Homo sapiens
cacttgcccttcataagccacagcggctagtagtcaaagtcagtgtgattcccatgccctcgcgcttcccaccaccaaggtggggacgaggtggaaaatattcggctagggaaatcgcgggg

SEQ ID NO: 48912 - DNA, 122 bp, Homo sapiens
taacagtctctggaggaccactttgagcctttggaagttaaggtttcctcagccacctgccgaacagtttctcatgtggtcctattatttgtctactgagacttaatactgagcaatgtttt

SEQ ID NO: 48913 - DNA, 122 bp, Homo sapiens
ctacaagtcggggatggggcccacctcccagggctgggggcaggattaaatgggagtctgcgccaggtcccctgctggggcggggcgtgggactctgagctgggggtccacccctccagcgc

SEQ ID NO: 48914 - DNA, 122 bp, Homo sapiens
taattatatttatgtattgaagaggaatgtcacaccctccaaacttggtctctgtgaaaacggccccatgtccaagctaaaagttggcaatgcattcctgaaatggaacacgataggacaga

SEQ ID NO: 48915 - DNA, 122 bp, Homo sapiens
cctgtctcaaaaaaacaaaccaacaaaaaacagtaagtaacctctacagatgcttacttacgatgggttacttaccaataaaaccatcataataaattgaaccattgttaagtcagcaacta

SEQ ID NO: 48916 - DNA, 122 bp, Homo sapiens
ctttccctggctggtcgaactgcctctacagttgtcccatccagaagccacacacagcagcgggcctcaggaattgcattcctcgcagtgacaggagaggatgtaccggtaggtggcagtga

SEQ ID NO: 48917 - DNA, 122 bp, Homo sapiens
atgatggaaatccttacttacgttaaatatctggtttctaggtcacctccctgacggggacggtagggaccgtcttctcgttcatcagtagggaagtagctatggcagtgcctgatacaaaa

SEQ ID NO: 48918 - DNA, 122 bp, Homo sapiens
ctcgatctcctgacctcgtgatctgcccgccttggcctcccaaagtgctgggattacaggcgtgagccaccgcgcctggccaaaaaatggaactttttaaatcaagagaattaaaaatgttt

SEQ ID NO: 48919 - DNA, 122 bp, Homo sapiens
caacatcctttcataattaaaagctctcaacaaataaggtatagaataaatgtaccacaacgtaataaagaccatatataacaagcccacagctaacattatactccatagtgaaaagctga

SEQ ID NO: 48920 - DNA, 122 bp, Homo sapiens
aggagagttgcagctgctttttcatctatttttctgggtgctggaccttgcttgtttgggcggagcatcacttgtacctacctcttctctggttttctctcccgttattagttagctcctga

SEQ ID NO: 48921 - DNA, 122 bp, Homo sapiens
tcgggactggaagctaattcagagagccgggtagaccccgtgcgtggagaacgcaggacccgctgggactggttgggctgcgctggccccggctgaggctcctgcactgaccacgccctgtc

SEQ ID NO: 48922 - DNA, 122 bp, Homo sapiens
aatgctagctgttattaccagaatgcaggcaacacaaggtcagggacttggtcatgttcacggctctatcttaggttcttaaaaatagtgcctggcacacagtaggaaatcagtaagtattt

SEQ ID NO: 48923 - DNA, 122 bp, Homo sapiens
cctactagaaatcttggtatgatacgctttcacaattagatcttagactgagagatagtgcgtggagcagttaaagagtttcagttttggagtcagcaatttagttcttgcttcacaattta

SEQ ID NO: 48924 - DNA, 122 bp, Homo sapiens
gagactccaaagacgcatctgaggagaaaagctctgggtccctgggatgactgtgccactcgacatagcctcctggagtggccaaagagagtgtggttgaaaaaagaaatattggagtgaac

SEQ ID NO: 48925 - DNA, 122 bp, Homo sapiens
tcgggggagggcttgtcagcactgggagtggccaccaaggagagggggtcatggggcttccgggatggggctgacttgtccttgtttgaactctgacctccaggaccccaaagagaggctcg

SEQ ID NO: 48926 - DNA, 122 bp, Homo sapiens
ttcacgtatttacttattcttcatttgggtgaagtaatacaaataatatgtttctaaatacgttttttcaagtggactctttgtgaattaactagaaggtagaagggaaacacctccagaaa

SEQ ID NO: 48927 - DNA, 122 bp, Homo sapiens
aaccttggaaaccgccctccggagaccagacgcacaacccccaagaaaacacgaaagaaccgtgctgggagacaaaacagaggaaatggagtgcacaggataagcaggaagaaagccaggac

SEQ ID NO: 48928 - DNA, 122 bp, Homo sapiens
tgtgaatgccaggctagcaattccagcaggctgttcctggatggaccctaatacctggatcgcacatgaaaacttggatttggtgcctacttctagactgctgtttcgtctcgtttattttc

SEQ ID NO: 48929 - DNA, 122 bp, Homo sapiens
cgccgtggacgaagagagcacatctcttcttgcgaggcctaaggaagtagggctcccactcgcctcggcaacccaaggacccagccaaggagagagcctccagatgaatccttcctctcctc

SEQ ID NO: 48930 - DNA, 122 bp, Homo sapiens
aggaggtgggatggggggtggtggcattctcttctacagacctcaaggttcccttgattccggggcaggcgtctccccggcgaggatccgcagctccgagggcaagctgggcataagcaata

SEQ ID NO: 48931 - DNA, 122 bp, Homo sapiens
gacttggggactgtgaagaagatgcacctgggtaagtgttagtggcagaaatgaacaactcgaggcagaggccatgcacaggacggagctcttctggcaagcacagtactggacccatatgg

SEQ ID NO: 48932 - DNA, 122 bp, Homo sapiens
gtgtttcagtattttaccttgtgttatggtcccagcctaccgccatgtttcacagaagcccgggtcgccggggctcccgcgtacccggaaatatcgcgagaacaaaagcgactatcacagct

SEQ ID NO: 48933 - DNA, 122 bp, Homo sapiens
ccggatgcgcactgagggactacgttagcagacgcgtcaaaagtaccagaagctggcccccggcgcatgcgcagagatgttccgtggtgggcgcggctcttctcttgcccaaccaccgccct

SEQ ID NO: 48934 - DNA, 122 bp, Homo sapiens
ggctcagtgatttggttcctgggctgggacttgcctctgtcaggggcccctattgcactgcgagttgcaactgaatgcaccacatggggcatgctcggtgtctcgagtagattctctgcctg

SEQ ID NO: 48935 - DNA, 122 bp, Homo sapiens
ttccagaagcaacatgcaaaataacatcagttcaacaagcaggtgctggagtcctcgccccgaggccttccggaagacacccaggacgtcacacctagcccagaacagcccccctctctcca

SEQ ID NO: 48936 - DNA, 122 bp, Homo sapiens
ctcttcacttctcagactgggtggcgggcagagacgctcctcacctcccagatggggtcgcggccgggcagaggcactcctcacatcccagatggggcggtggggcagaggcgctccccaca

SEQ ID NO: 48937 - DNA, 122 bp, Homo sapiens
cctcgggacggcggcggcaccaggcccagaccattctcattacggccagctggacccctgcgagccgtgcgaaatcagaacagtaacaacatcatttatttcagcagcactggggagaaaca

SEQ ID NO: 48938 - DNA, 122 bp, Homo sapiens
tggatcatccagagaaaatggtccaagcctttccagaaaaccagctcttccctgcagctgcgagaagcccctgccagagcatgacctcagaggcttgggaggaaaggctcccatggttccca

SEQ ID NO: 48939 - DNA, 122 bp, Homo sapiens
gggacggggaggggcccggtggctcggggcgccactagtgctgcctgggcggagcggaggcgccagcggcccctctgggatcgacctgcgcgcctggcgagtggagactgtctagggcacgc

SEQ ID NO: 48940 - DNA, 122 bp, Homo sapiens
tgacctcgtgatctgcccgcctccgcctcccaaagtgctgggattacaagcgtgagccaccgcatctggccccagacaggaaatattttagcccactggtttttgccagggacaattttgtt

SEQ ID NO: 48941 - DNA, 122 bp, Homo sapiens
gctgcaggtgcctttgttgcactgcagccattgtcaggctgttccactggggttggcggccgcaccaccaggtggtgaagagcactggactcctgccgggagtgctagctgtagggaccttg

SEQ ID NO: 48942 - DNA, 122 bp, Homo sapiens
ttagtattctgccttaactctcaaaaccgactcggaaactgagagtgcaatagtttcaaccgcattttgaaacatcaataaaatgttagtcatttgcggatgaatgaaaacattttctttac

SEQ ID NO: 48943 - DNA, 122 bp, Homo sapiens
tctcggaagaccgctgcggcatgacaggcgaggaggcggtggtggtgaccgcagtggtggcgcccaaggcgggtcgcgaagaggagcagcctcctccgccagcagggctggggtgcggggcg

SEQ ID NO: 48944 - DNA, 122 bp, Homo sapiens
ctttcagaaagggacctgggcttcctcacaatatggcggttgccctcctaaggtggacatcgggagggtcagatggaagctctgtggcctttcctaactcggcctcacgtcacagagcgtca

SEQ ID NO: 48945 - DNA, 122 bp, Homo sapiens
ccggcccgctccttgttgccctgcactgcgcggccgcagcggcaccatgattgtgtttgccgtgctcctgtcgttggtggcgggtgtttgagggaacgagtttagttcttggtctgttattt

SEQ ID NO: 48946 - DNA, 122 bp, Homo sapiens
ccgtccgttttccgcccacttgggcccagccgtccaatcgacactcatcatgctctgcctcgccgctctctccggccaatccgcatgtgccactgcctctgcccgcaatcggcgctcaccaa

SEQ ID NO: 48947 - DNA, 122 bp, Homo sapiens
tgcccttccttttgttcaagtgcacttccctttagtggcctggattcagagattctctatcgcagctctgcacttgggcagtccttatttgggacagctctttatcttcctttataattgtg

SEQ ID NO: 48948 - DNA, 122 bp, Homo sapiens
cccattcagttttgcagatcagtctttgatggataagccagtctcctggtacttgcttagcgtctgtttttctccttgcatctgatcaactctgaatgtctttaaaactgcaaaatgctgaa

SEQ ID NO: 48949 - DNA, 122 bp, Homo sapiens
gggaaggctaggggaggacccaggctagcttccttcctgtcttttcttcctctgacttttcggctcaattttcctcattcttttgtctctcattttcctttctcatcttttgcgctccctcc

SEQ ID NO: 48950 - DNA, 122 bp, Homo sapiens
gcaccaggtacctcgagccaccaggtcccttgccacatgaagaggctcagccctctgcaccgcacccccgactgtgacttcagtgtcagcagaggcacctacctccagagtacatgtcaaat

SEQ ID NO: 48951 - DNA, 122 bp, Homo sapiens
ggggcagtttgtctatctggccccctgtggattagcattctttattggtttaggattagacgtcattcaggttgaacggagttccctgaggtgggtgggtgcgtgtttatgtgttgagggga

SEQ ID NO: 48952 - DNA, 122 bp, Homo sapiens
gttgctaagagcgttgggggcaaagccaggctggttccttggcctcggggtttcctgggtcggggacacggtgaagaggctccagcgggacctgcccatcagtcctgggccaggaggggctc

SEQ ID NO: 48953 - DNA, 122 bp, Homo sapiens
gtcccggggcaggcgggcggctggagcgctctcgtgggcgggcgcaaggggcaggctgggcgggcgcaggcgggagcgtagcagccgctccactccgcacgcaggcagcatcggggcagcag

SEQ ID NO: 48954 - DNA, 122 bp, Homo sapiens
ctcctccctgctccttcctcgctgtaaaaccttgggccatttctgtgacctctgagcctccgctttcctatctgtgaaatggggcaggctcgtggggcctggagcattcagcaggcggtaac

SEQ ID NO: 48955 - DNA, 122 bp, Homo sapiens
gcatttactcaccggcgcctccaccggcccctccacgtgccacttccgcttccttcttctcgagccttctggaaagattctacccaatgggcagccggtccccggagaacggccgccgttgc

SEQ ID NO: 48956 - DNA, 122 bp, Homo sapiens
gctcctcgaaattacgtgggagctgcccctgtgggggcaggggctcaggtcgggctgtgccgggaaggtccgcaaacgttctgtctaaatgctgactcctgcccctcccacaccaagtgtgt

SEQ ID NO: 48957 - DNA, 122 bp, Homo sapiens
cgcatgcttctttctttactctaggtcaaactctattccacagtccagtctgggaactgacgtaagcttctagttgttagacaatggtagccatcaaagaaacttaaggtgatctaaagtta

SEQ ID NO: 48958 - DNA, 122 bp, Homo sapiens
ggggaagtcgaaaccggcctcacctggcgggcgggtggcgcgggggcgggaggggggagccgggagccctctctgcgcctgagggaggtgtcatcttcacgattccttggtgaccagcgcag

SEQ ID NO: 48959 - DNA, 122 bp, Homo sapiens
gcggcgcagggactcgttcatggcttcactctctagaagcttagtcctgcacaggaagaacgagtggacggggccgagtgagctgccacagcccttggcgtcacctggccgaggcccccagc

SEQ ID NO: 48960 - DNA, 122 bp, Homo sapiens
agggaggaggggaggggcccatgtggaagaaagaagctgagtgcatagatatgcccagtccgctcttggtggagaagagaccaatcgatccttagtggaacaagagcacccagcagcatcct

SEQ ID NO: 48961 - DNA, 122 bp, Homo sapiens
aagatggcctgagtcaggagcaggggcagagctcaggttgtcgtggggtcccgctgcccacgtcagactggaggtgagggatgggcggggcctgacagcaggcctggaaggaacaggatgtc

SEQ ID NO: 48962 - DNA, 122 bp, Homo sapiens
gagtcatggtctgtctccagttccacttctggagcgcctggtccagtgtgtccgacgtggcggtgtacccgtgcaaatgtccacgctggcgtgttgtggagtgccgctgccgtccgaggggg

SEQ ID NO: 48963 - DNA, 122 bp, Homo sapiens
cacctgcctagctgcacgccgatttgcagctggggccagagagtaggaatgcccacacagcgatgcttggcatttccctgcacaactcagaccagcacaaggaaccgcatgaacctgatgct

SEQ ID NO: 48964 - DNA, 122 bp, Homo sapiens
caaaataccacatccggccagagcaggaagcagggaagcaacctgccaggcgtgttccaacgtgggtagagtccccagcgacttcatttgccacgcgggacttcacggaccccctctttgcg

SEQ ID NO: 48965 - DNA, 122 bp, Homo sapiens
attgtaagtggaaaaaaaaaaaggaaattgtgtgcaggaggatgaaaactttggcttaagcgtgggcttaaccaagcaggaagggaaagtggctggcccagctgcccttctccctcctgtcc

SEQ ID NO: 48966 - DNA, 122 bp, Homo sapiens
ggcagctttttagttatttttgtatttccaacccttctgaatatctgccttgagctatgtcgagaaaatatattttatggtaaaatcatttgatttccttcagatgctttgatattgtgatt

SEQ ID NO: 48967 - DNA, 122 bp, Homo sapiens
aggggctggtgccggggtgggagtcggaatcggggctgaagccgggctgggtgcaggagtcggagttggggcaggggctggggactgaaggggccggggctgcgcagccggggccggggtcg

SEQ ID NO: 48968 - DNA, 122 bp, Homo sapiens
ccaggaagtctcgcggaggactcgggaatcacgagtcctgcctgaaaccttagtgttttccgcacattccttccactgagggaacctcctcacccacttcagaggagggtgcgaaagagccc

SEQ ID NO: 48969 - DNA, 122 bp, Homo sapiens
agcctgctaggcatttttttacttcttccttctgttatgcagacaagctaactgaagatgcggttactgagatataatttctctgctaggtcacaaagtctgaaaacatgggccttacgtgt

SEQ ID NO: 48970 - DNA, 122 bp, Homo sapiens
gactttagccatggcttcatcctcgctttaatgagtaataaggcttttttttttccattacgccccatctctctgactcctgcatctatttctcaatgggtttaggtggggaagaaaaggaa

SEQ ID NO: 48971 - DNA, 122 bp, Homo sapiens
ggtttccatctcccacagcctttcttctgtatcagagctctaactccccaagtagagagacgtaactacctgcttataacttaatcaaagagcctgtattggtttgcctttggatgatgctt

SEQ ID NO: 48972 - DNA, 122 bp, Homo sapiens
ggggaggggagcgcgtagtagtggcggggcggggaggcggtggtggttcggcgcggggctcgctcggagcgcacggacgcacgcacgctggtccgtctgcccgcccggggccggaggtcgac

SEQ ID NO: 48973 - DNA, 122 bp, Homo sapiens
ggtgagcgacggagaactggggttcgtgggcagagtggtgagcgacggagaactggggttcgtgggcagagtggttggctgccccactgtcagcctgttctgaaagtaggaatgaccctcag

SEQ ID NO: 48974 - DNA, 122 bp, Homo sapiens
aagcctaaaggctcagggaggccatttaaggtctagggtccagtggactttcggacgcatcgcagcctccgctgagcccttctagcaggcttgtggtgactgcaccctggggcggctgctcc

SEQ ID NO: 48975 - DNA, 122 bp, Homo sapiens
atgttgcatttaaatgttttatctcttcagtttcttttttacctaaaagagtccctgccccggaccgtctccccacctcctcccttcccagcttttcatattaaaatttttcaagtctaggt

SEQ ID NO: 48976 - DNA, 122 bp, Homo sapiens
tatgcctctgcggactgtgggtagcatcaaatccaggataacagagcccatttactaagacgttttgcgagaatccatgtccaaagccttcctgaaaccaaaccccagcatatcggctgttc

SEQ ID NO: 48977 - DNA, 122 bp, Homo sapiens
agtcacatgatcagtcgatggtgagactaggactctagtacttcctggctcagcttgttgcgtggcccctcagcacctttgggtcttgttctgtgtatggtttgagttttggctttagagag

SEQ ID NO: 48978 - DNA, 122 bp, Homo sapiens
tcttcggcagccactccctcatccccattggatactctcagccaagtccctgcctcctctcgctcgctaaagcgtctcctccgcctgcgaccctcacagatccttcctggcccccactagcc

SEQ ID NO: 48979 - DNA, 122 bp, Homo sapiens
acgtaggggaaaaggttctccattttgcaccaaatatatatgagggtgcaagaaggggagcggacttgagctgcgtctcccagtgcgtgctgaggatgctaatacaggtatttagctggtaa

SEQ ID NO: 48980 - DNA, 122 bp, Homo sapiens
agagaccctcttccccacactggctacttagataccggccttggcagaaggccacccctccggacacccactggtttaaaagagcccaggggtctggccctgccttagggctgtggtgggtg

SEQ ID NO: 48981 - DNA, 122 bp, Homo sapiens
caattagctaagcccggggcaccaaagcctttagcagcgaaaccgccgcttccgacctctcggacctagtgagccaggcagagcctttaggcccacgcctgggcaccacagccagcccgagg

SEQ ID NO: 48982 - DNA, 122 bp, Homo sapiens
gctggggtgggctggcaggcggaggtgggcagtaaacagtcctattgtacaaatatatagcgcgggctgggcgggggcggtcaaccccggttccctggcacggggacagggcgcgctgggcc

SEQ ID NO: 48983 - DNA, 122 bp, Homo sapiens
aaggccacttacagtaatcagcagcgtgggtcagcaagacagcggaagcaggacgacagccggccggaagacacctaccccggccggaagacacctaccctggccggaagacacctacctct

SEQ ID NO: 48984 - DNA, 122 bp, Homo sapiens
caggaccatggaaaacaagcgggggtgggctgggggtgcctgggacgtccatgtccgtgtcgtgcaacagtgtgacagcgtgaggctgaccaaacgcaggattgtgggcaaacgagacgcat

SEQ ID NO: 48985 - DNA, 122 bp, Homo sapiens
agtgatctgcctaccttagcctcccaaagttctaggattacaggcgtgaattactatacccggctcttgatttttacatatgaagaaattggagtccaaataaaatctcctgcccagtccag

SEQ ID NO: 48986 - DNA, 122 bp, Homo sapiens
gtaggatgggctcctgcctccgggtgaacacgcttggatttcagaactcacgcaggccttcggtcacagtgctcacggcttcctcaccccggctggccctgttggttccttcatggccaacg

SEQ ID NO: 48987 - DNA, 122 bp, Homo sapiens
aggtcacgtggtgcggggtggggcctgggcgagtcacgtggggacggtgcgcgctcagtgcggctgcgccggccggtagctgcagctggagcagtggcgtttggaggagactcggtgagtgt

SEQ ID NO: 48988 - DNA, 122 bp, Homo sapiens
gggtcttcactagctgctcgggatctgccatagagtcactccttactgccctgagaggcccgcgtccttcccaaacacacctctaggactggtgtggcccccataaactgggttcccaaaca

SEQ ID NO: 48989 - DNA, 122 bp, Homo sapiens
gccccgccccctctggtccggagccttccatctccatggttacgcggcggtggctgcgagcgcccaactgctccgaccgtcgcggtgagggccccaggacagaagcagacagacacggctcc

SEQ ID NO: 48990 - DNA, 122 bp, Homo sapiens
ccccatcccagccaaagcacaagacagcagcactgtattcctcctccctctccaatgtgtcgatggcctactgtgtgccaggcaccagctaggcgcttcacatgggccttctcttcattacc

SEQ ID NO: 48991 - DNA, 122 bp, Homo sapiens
gatgaagaaactgaggctagaagaattgaataccttggtcaagatatctccatttaatctcgctggaactcagtagacacctgaaagaatgggagaacaacctaaggcaattttgcaaagtg

SEQ ID NO: 48992 - DNA, 122 bp, Homo sapiens
agagcgtcgccgagtcggagccggagcctgagccgcgcgctgtgtctccgctgcgtccgccgaggcccccgagtgtcagggacaaaagcctccgcctgctcccgcagacggggctcatctgc

SEQ ID NO: 48993 - DNA, 122 bp, Homo sapiens
ccggagggggggtgcccgggacaaagcgtcggctgcaaaagagaaaaggccaggcgaagacgctaggctctaaaacaccctcagtagaagcattaaaatgccctttcgtgatttatttcccc

SEQ ID NO: 48994 - DNA, 122 bp, Homo sapiens
cccctgctcctaggttccctaccccgggacaagagcaccttctgtttccctgaagagacccggcctccctagagcagggccaccgccgccgcctgtgtcctcggccgcggagcaccagaggg

SEQ ID NO: 48995 - DNA, 122 bp, Homo sapiens
cccataattggccaacatattaaacacatttcagtcttctttaagtgcatatactcacctcgtcttttccactatttggcactctgcaatacacttcccctgttgatgggtcgtaagaatct

SEQ ID NO: 48996 - DNA, 122 bp, Homo sapiens
aggtgtggccggggcgctgggggtcccgggaggaatgggcggtcacgcggcgctgggcggcgcgggccgcacaggagtgcgctggggcgggcgcgggccgggagcgctgggttccgggtccc

SEQ ID NO: 48997 - DNA, 122 bp, Homo sapiens
gttctagccgctttggaacgccttctggttctactgcgcatgtgtcagtgtcagaccaatcggaatgcaccgtgaggtacctctccaccaatcagaggtcacattacctaaacttctgcctc

SEQ ID NO: 48998 - DNA, 122 bp, Homo sapiens
tgaacagccagcctcagcccctacccaaggtagctgctccgcagatgtgatgacaaccaccgtgtgtttctcagaatcctaggaaataagggcttctttctagaaggcagggccaggatgct

SEQ ID NO: 48999 - DNA, 122 bp, Homo sapiens
cacctacagcgttggggtgtgcacctttgcagtcgggccagaacaaggaggctgtaaggacggaggagtctgtctgctctcaggcaccaagggggcatcctttggacggctgcaatcaatga

SEQ ID NO: 49000 - DNA, 122 bp, Homo sapiens
ggggttgtcatctccctgcctcattccagtccccaagccctttgggggcaaagagctcagcgccgaggaccttggatatttctcccctcctttgagggtggcagtggctgtcagttcactcc

SEQ ID NO: 49001 - DNA, 122 bp, Homo sapiens
gtcagctggaccagtgctactcatcaccgcagtgcagctaactggacggcccaccggaggcgtggactcctcgggaacaggcagcttgctatgagcccccggccaggtcagtgcatctctct

SEQ ID NO: 49002 - DNA, 122 bp, Homo sapiens
gtggccttgtccacgctgcccactccgatggcgaacagctcgacgccgctggcccgggcccgcgcagacacgtcctgcacgctgtcctggggcctcccgtctgtcaccacgatgaccacctg

SEQ ID NO: 49003 - DNA, 122 bp, Homo sapiens
ctgccttgtaaaacctttctatcttgcctctgaacattcttgttctttgtttctctcttacgaggaacattgcattataactatttgaatatgtgtcttatcactcaaactcaattgtgagg

SEQ ID NO: 49004 - DNA, 122 bp, Homo sapiens
ccaccaaaggctttcaaacataattgactttggcggtacacatggagaccatgatgcgaacggggactgccagtggatatgagggcttttatgaaagggagtttgctctgtgtgtgtgtttt

SEQ ID NO: 49005 - DNA, 122 bp, Homo sapiens
aaatccaagcttactctgctaagaactgctcacctgtgtttccacctgggggatctagatcgtgaccgtgccatcctttgacacgtgagccactatccactttttacactgcaaagaaacac

SEQ ID NO: 49006 - DNA, 122 bp, Homo sapiens
cctttgtttccatgtttcctgtctcccaaatctgtctgatcccatggagttggtggtatacggcatcgtttgtgttgaacagagcctttgcaggcatgtctgtctaaaacactcaagctgaa

SEQ ID NO: 49007 - DNA, 122 bp, Homo sapiens
tttttaagtctttcagggtactgcatattaattagcttgactcagtgtctctactgctagcggaggtttcagcattctcttagttacttctcaaccacttgctttccaccaaattttggtgc

SEQ ID NO: 49008 - DNA, 122 bp, Homo sapiens
tgatgactttagggaacggagaatctgaggaaggcctcgcaggagagggtcagatgcgatcgagtaaatgtgagccgtctgtaaactgtagagtgcacgcacagcaccggtcagccctgggg

SEQ ID NO: 49009 - DNA, 122 bp, Homo sapiens
gtctccccgtgagtgtcccgtgtcctgccagcctcgggacgccccgcgagctcagggctgcgcagggactgtggtaattgagcgcggcgaagccttccgttcctgcctcctgtcgctcctgc

SEQ ID NO: 49010 - DNA, 122 bp, Homo sapiens
gataacgcgggatttcagcagggccaaaagagtgattgagctctgactggcgacccgacccggcggaaaccacctcgacagcctccagaaaggggcgtggctgaaaatgtaggggcgtggcc

SEQ ID NO: 49011 - DNA, 122 bp, Homo sapiens
tgagggaggaagggcgggcgagcggcccaagacatgatccctggctgagagtagggataccgaagaggtcccagggattcccaaggattgatcggaggattagctgagcacgaggaagcccc

SEQ ID NO: 49012 - DNA, 122 bp, Homo sapiens
ctcgccgcgtctgcccacggaccctggctctgctcccgggctccccatccgtccacctaccgctggacgcccacttttccacgctctgacactcggcctcgcgcgcgccctcgccgccctct

SEQ ID NO: 49013 - DNA, 122 bp, Homo sapiens
atctcaggatctaaatgccagtgttaggtgagggtctggctactccagcccaaggagttccgagtcattcaagggttgcctcagacccacctggcaagtgcaaagagacactagtgaaaagt

SEQ ID NO: 49014 - DNA, 122 bp, Homo sapiens
ggctgcccgaatggggagcccagagtggcgagcggcacccctccccccgccagccctccgcgggaaggtgacctctcgaggtagccccagcccggggatccagagaaccatccctacccctt

SEQ ID NO: 49015 - DNA, 122 bp, Homo sapiens
tcctggggactggctttggccatttgggaaatataaagaggagacagaaagggcaaaaagcgggctgctctgaaagccacgatgacactattggccccaaatggctccatgggacactcttc

SEQ ID NO: 49016 - DNA, 122 bp, Homo sapiens
gtgatcccccacctgtctccacctggagctcagctctgccttccttagcagtgtggatcccgggggtcatgggatcactgctgtctgcaccgggcctccttctcctctcctttgagttaggc

SEQ ID NO: 49017 - DNA, 122 bp, Homo sapiens
gtctgcgcagcgcgccgccttgtgggtaatctcagggtgagacgaggctagcgcgaggtacggctagagcgtcatttccggctcgaatgcccggcagccgtggcggctagagcgttcctccc

SEQ ID NO: 49018 - DNA, 122 bp, Homo sapiens
agttatgtagaaatgaacattaaaggggggatcaaatattactctgtacttcatggataccgcagagcttttcctagttactctgagtatttcctggacatcagggaagatttagtaacagt

SEQ ID NO: 49019 - DNA, 122 bp, Homo sapiens
ttgaaccaccgattcgcgcggcgccttcagctggtcgaacccacggtctctatcctgccgcgactggttatgattcaaagttctttaaaaatgaaaaaccccaaaaaaggaaaaaggaaaaa

SEQ ID NO: 49020 - DNA, 122 bp, Homo sapiens
cagcacccggaagctgagggggcttaaagtctttcgcttcctttccccgcctcttagtcccgcagattgctagtggatatggccaataggagggctgactggtacttcctgttatttgattg

SEQ ID NO: 49021 - DNA, 122 bp, Homo sapiens
ctgagggcgtccaggatgagggttttgagctgagcgaggctctcgttaatacgcgctcggcgccgcttctccatgaccggcttggaggactgcgggtcgggcaccggctgagtcccgcgtcc

SEQ ID NO: 49022 - DNA, 122 bp, Homo sapiens
gggacatcaagagcgactcgatcctgctgacccatgatggcagggtgaggggacgggcggcggggtacgggggcggcaggtttccggctgcggggcttccctgcctcttcccatcccctgtg

SEQ ID NO: 49023 - DNA, 122 bp, Homo sapiens
ggaactccctgaccccttgagcttcccgagtgaggcaatgcctcgccctgcttcagctcacgcacggtgcgctgcacccactgtgctgcgcccactgtctggcactccctagtgagatgaac

SEQ ID NO: 49024 - DNA, 122 bp, Homo sapiens
tcctgtagttctccctcttcccacaaagctgtcagcgcagtggaagaggttgcacttctccgagagaggacaggtttctgttaagatcaccaagtagctgtgctttaattagagccagacaa

SEQ ID NO: 49025 - DNA, 122 bp, Homo sapiens
ggaagcgccagatctggggagtgtgcttcacctgtatacacacactgctgagcgccacggcgtgtgaattccagagagcatttctacgggcgtgaccttggtctcccagaacccgattcatt

SEQ ID NO: 49026 - DNA, 122 bp, Homo sapiens
tgggccaagctaactttgggagaaattagttcgtagtctaaatgataattgcccttcccccgaactaaactggcttcatagagttaatgaaaggccaccaggttaggagtagtagagggacc

SEQ ID NO: 49027 - DNA, 122 bp, Homo sapiens
ctcccagctactgaaatcacaagtctgggaaggggttcaagaatcacccctaggccccaccgggggccccataccaggtccccatgcagacgtcccacccccgcctcccagctgatcacaac

SEQ ID NO: 49028 - DNA, 122 bp, Homo sapiens
ggcaaacctgggatgcgtagcaatgaattcaacaacacagcctttgactcggcaactgcacgtcaagaaacggaactgtcaggaagcatctagaacccagagggcagaatccaggaaatgac

SEQ ID NO: 49029 - DNA, 122 bp, Homo sapiens
tcaagccgcagccaaaaccaaccactgctaggatggcaaatgcggaggtgcgtcggctgccgccaaaattcccgcccgtccccaggctctcgccttaccggattgccggcctggcgtccaac

SEQ ID NO: 49030 - DNA, 122 bp, Homo sapiens
tcacgccaccttgcagggaaataataggtccggccacactggctttcgcgttctgctttccggatgactgaatttctttgctcgcctctcctgtcggggaccatctgaaactgcctccaagc

SEQ ID NO: 49031 - DNA, 122 bp, Homo sapiens
ttcgcatctttgctgccaaaagacagcccctcctaaagagtaaaggcccgaccccctgcacgccctctgcctgcaccgcacgtgcttggttttccccgcccgggtactggccgccgggccgt

SEQ ID NO: 49032 - DNA, 122 bp, Homo sapiens
gggacttgagttggcttccagggcacacattcttgttcagaagaaacacattgcaaaaatcgggaggtgacgggcagatgaagtgtcggcgcttcgcctcgggactccagtgcaacctatgg

SEQ ID NO: 49033 - DNA, 122 bp, Homo sapiens
tgcttataattatcaccatgtcctctgaggcatgagatgtgctatagccatagtacgtggcggtgcctcagtttcccctgcatctcatctcaattaacccccgatgaaatccttagtgattc

SEQ ID NO: 49034 - DNA, 122 bp, Homo sapiens
tgccattcaaagacggcggggggtccgggctgcaagggtggttccatccgggttcttccccgcccccaaggcgggcgcgcgggaaagccacgaggccccaggagtgcgactgcggtgcctgc

SEQ ID NO: 49035 - DNA, 122 bp, Homo sapiens
tcattatcgttatcggatctgattgttgcaataggctagtgcggagtcacctgaactatccgagcaaaataagaataccgcagatgccccaccatcagccagaagcgggtagagccgtcacg

SEQ ID NO: 49036 - DNA, 122 bp, Homo sapiens
ccttgctgggctattggcgcccccagggctgcagctcgcccggcctccgcagtgccaggtcgacccccagcgcctacacccacgcgggttcagacctgccgagcgcccgccgccgcgggagg

SEQ ID NO: 49037 - DNA, 122 bp, Homo sapiens
tgtgaaaaaggcaatgggtgtgtgggttattgaagctggaggtgtcccaccccattcccgcggcacacgggaaagcccctcgcagcttcctgggccccaggagggacggcctgagactgtgg

SEQ ID NO: 49038 - DNA, 122 bp, Homo sapiens
cacttcgggcgggagtacaggagcccttccttgggcaccatgcgaaggctgctcaagtagcggcccctgccctcccttcccctgtccccgtccccgtctccgtctccccgtccctgtccccc

SEQ ID NO: 49039 - DNA, 122 bp, Homo sapiens
aacacactgaagagttgtgtcttttaagcccttgggtctcagtgtgtgagctaccaccaccgcccacccactgacagtgtctctgttttaagagggcaacatgtggaaggaagaagaataat

SEQ ID NO: 49040 - DNA, 122 bp, Homo sapiens
gccatccaggcccttcctcctctcttgctagagaggcctggcacctttctagcaaggtcacgtgttgactgatgtgggcagaggggcagtgggacatgtctggggacatgtggtttctcagc

SEQ ID NO: 49041 - DNA, 122 bp, Homo sapiens
aggcggctgctccagctccaactctcattcatttcgccggttaacatgagagatcatggccgccttcgggcttctcagctatgagcagagaccgctgaagcgcccccggctcgggccgcccg

SEQ ID NO: 49042 - DNA, 122 bp, Homo sapiens
tgcgcctcattcaaggagctgctcctgcaggaggggatgtcagttatgttgagagtcacccggacggccttgtgacctcctctgagttgctgctgcaccctgcccacacagggcaggggagg

SEQ ID NO: 49043 - DNA, 122 bp, Homo sapiens
tccacgcggccgcgctgctcgcgggagcctgccgcagccggcgggaggttgtcattgattcgtgctgggcgagttaagccattccaggagtggttttgagagagcactccctccccaccctc

SEQ ID NO: 49044 - DNA, 122 bp, Homo sapiens
gtcctgcagccgctggcagtctcccgcttgaacccttcgaagggctcacacgaccaggctcgtcagatggctggtcctgaattatactctagaaatgtggtcatagaagctgcagggcccct

SEQ ID NO: 49045 - DNA, 122 bp, Homo sapiens
cagtggttttcgccccagtcccgcccaccgcgtttcgcgcgccaccaggccgtagtgtcgcgagatttcagggtgctttagagtgggaataattccagctttctagtgatgtcataataaca

SEQ ID NO: 49046 - DNA, 122 bp, Homo sapiens
cataccccctccccagggaccttctggactccccggcctccctggtcccccaggacctcccggaccccctgtaagtactgggcagaggctctaagaagtgctgggcatggactaggacactg

SEQ ID NO: 49047 - DNA, 122 bp, Homo sapiens
agggcctccgtgaggcaggagctgggcctgcggaggccgtcccgaggtgggagcctggcccgaggaggccacggcgaggcaagaggtgggcctggagggcacactgttgaggtagaggctgg

SEQ ID NO: 49048 - DNA, 122 bp, Homo sapiens
cttcccccgccccattcgaggatggaagttggggtgccaggggtggccagggtagatccccggcgggacaggcttccctcccccgggagcaggaagcagagccccgcccagcagacctgtta

SEQ ID NO: 49049 - DNA, 122 bp, Homo sapiens
tcccaaagccctgtccacctcatcaaactgtctccggaagaagaaagagccagaggggtgcgagatgccagtagcccctgtgagaggccagctatggggcctgcattttaccccggtgacca

SEQ ID NO: 49050 - DNA, 122 bp, Homo sapiens
cactgacagccatgtgcagacccccgacctgggcgaggataccgccctctgagactcagtcgcctgtctacaaaaaaggaaaagataccacattaccgtgaccatctagtctaatgaaaatg

SEQ ID NO: 49051 - DNA, 122 bp, Homo sapiens
ccggcccagggcaggcggggcccgagcctagcggtaacccccgggcagggcggggccgctcgcagactccatatgagattcacctcgcaggtggttccctcattcgagtgctccggcgcaca

SEQ ID NO: 49052 - DNA, 122 bp, Homo sapiens
aggcagggtcagagaggacagaggaagaggcaaccctaagagagcatttggcagctgagacgataggacgcagtgactgacgtggaaggtgaggaacgcaaaaatgccaagatcacacaagc

SEQ ID NO: 49053 - DNA, 122 bp, Homo sapiens
atcagtcttctgagagatcagcagctgcaggctgagtggccctgcagagggccatggaaccggataagttcctctgggagggaggcagatgccaggaagaagggggaaggctctaaaaaaga

SEQ ID NO: 49054 - DNA, 122 bp, Homo sapiens
tcacaagtaaggtgcctccagcccagctcacctctattctccagacaatgatcccagggtcgttgtccacagccctgaaggcactggtcagaggcatgatgcttgtctttccaggactgaaa

SEQ ID NO: 49055 - DNA, 122 bp, Homo sapiens
cttttctggggactgtgtgccggccccgcccgcctggggcgcggcgccgaggctccggggcgccccctggtgaccgcgggcgcgctccacatccagtcccgctcctcggcccagggacccct

SEQ ID NO: 49056 - DNA, 122 bp, Homo sapiens
cttgggaacccgcgctctttctccctctccctgcagtctcctgggctacctgaccaagtacgactgctccagtgcggacatcaaccccataggcgggatcagcaagacggacctcagggcct

SEQ ID NO: 49057 - DNA, 122 bp, Homo sapiens
gctgctgcagcgaggcgctctggaacggcaggggccgcgttagggcgctggggctgagtccgcgcccgggcgcacccaagcgtggttttaccttttcgttgaaccaggcctccgcgtccctg

SEQ ID NO: 49058 - DNA, 122 bp, Homo sapiens
cagactttaaatttccccatgagaaaacactgttaataaaggctaaatgtaggccagacgcggtggctcacacctgtaatcccagcactttgggagtctgaggcaggcagatcacaaggtca

SEQ ID NO: 49059 - DNA, 122 bp, Homo sapiens
gtggcagggcctgctgggtgccagcccttgggctctggagacctggccacaccaaggcctcggctctcccggggctcctgtgggaaccacactggccacattggctggtggcaatgggtgag

SEQ ID NO: 49060 - DNA, 122 bp, Homo sapiens
cagaacgatgcacggccccgtggccccgcctgctgtgtgtaaacttcccagtcagctccacggcccgccagagcagtcccaccccaagcctcgttcaggatcctatccagggtctcccgtta

SEQ ID NO: 49061 - DNA, 122 bp, Homo sapiens
tttgacattttacccacactcttttcatacagttggtgagtttctaggctctgatttgaacgcaagtttctatctacatctctgatttcacagaggtcaagacctaagttactttcctagtc

SEQ ID NO: 49062 - DNA, 122 bp, Homo sapiens
gggacgctgagagggagacgctccaagaggctcctcagtgtgggcgagtaaaatgccctgcgtgtgagaagcaggtaggtgtggtcaagatgttccgatttctgggtcttttgcataagtaa

SEQ ID NO: 49063 - DNA, 122 bp, Homo sapiens
gcttggttattgcccatccccattcgcatctcagtccctttatccagccaatcttgatgtcgcaaagtttacacagaaccagagataaatagagaagccagacttgtggagagaggagggga

SEQ ID NO: 49064 - DNA, 122 bp, Homo sapiens
tattttaatgtctaaggagatggggaggtataaagtagtcactctaggtgtacacagtaccgctccaggtgtacagtttgcacattgacctctaggtggcactagcatgtttagttaggacc

SEQ ID NO: 49065 - DNA, 122 bp, Homo sapiens
tgggatgacaggcgtgagccaccgcgcccggccgggatgactgttattaacaattcccggcgtggtttctagcaccagcccacctaccacaccccacctcgcttgaggctgaatgggtaaca

SEQ ID NO: 49066 - DNA, 122 bp, Homo sapiens
ggggaatcctagggaggcggagcgcgtactccccctcggcgcccgggctcaggcccatcccgcctctgcggcctcgccggcccccaggccttgcaggggactacgcccctggcgagttccca

SEQ ID NO: 49067 - DNA, 122 bp, Homo sapiens
cctactctgcccatttccggatgaagaaatcccttttacccgcctccgctgtgcttacctcgaaactgtgtttgacgaaagatttggagtagaaaaaacgatgaaacaacacctgccccgtt

SEQ ID NO: 49068 - DNA, 122 bp, Homo sapiens
tcctcttgggctaccctccgctggctgccctggatagagatgaaccacaactcccaacagcgccatgggcagcaaccctctaacattgagggatctggtgcctcggggccttatgggagttg

SEQ ID NO: 49069 - DNA, 122 bp, Homo sapiens
gtggtaaacagcggcgcagccccttcagacgccggagactggtccgactctgcaacctggcgggcctgctggggtccccagacccggaacatacacattagaaaatggaaagccgtgactcg

SEQ ID NO: 49070 - DNA, 122 bp, Homo sapiens
caccgccccctcctcgctccacgtcagagggaaccgggcggagcggccaacatggcggaacgcaggagacacaagaagcggatccaggtagcaaagccgagctctgggcagggggcttcggc

SEQ ID NO: 49071 - DNA, 122 bp, Homo sapiens
acggcctctgacgacgggcacctgcaggagccaatcggaaggcgcaggcagggtgtggggcgcggcccggtgccctgggtacccagctcagggccccggtctggtcaacccggctgttgctg

SEQ ID NO: 49072 - DNA, 122 bp, Homo sapiens
aacacacaccactgctgccgagtcggacacacaaggccggaggctgagggaactcttcgtcgcagcagcctccccaaaacaggtagaccctcagtgagcccagaagaagatggcgcccactg

SEQ ID NO: 49073 - DNA, 122 bp, Homo sapiens
tctgaggccctggacatttcttccagctcatcattcaggttgttcagagcatttggaagacgagcttttctcttgccaacactgaccgcctcttgcgggaagatgtcgcagcattattattt

SEQ ID NO: 49074 - DNA, 122 bp, Homo sapiens
cgtgctgagagcagccactctctctcttcaatgtggttctgattccctccacatccaacacgtgagtgagggagaaagaccaaccaggcccccaatccctaattaaattcaccacacggcaa

SEQ ID NO: 49075 - DNA, 122 bp, Homo sapiens
gtttcccctttgccctgcagcctattcttttgtgaaactccatgtaactatcagactcagcgccccagccaagagcaaagttctccatttgctaataaggaaaggaatttagacatgcataa

SEQ ID NO: 49076 - DNA, 122 bp, Homo sapiens
gggggcccgggccctggcagagacggtgtggaaccgccggccgcatgcggggctggagttcggggctgccaatgggctaaggccctgtgttcaacacatgtcgcggaactgtcgtgaaaaaa

SEQ ID NO: 49077 - DNA, 122 bp, Homo sapiens
ttggtgcactctcggctcactgcaacctctgcctcccgagttcaaacgattctccttcctcggcctcccaagtagctaaaacgacgggtgctcattaccacacccagctaattttttttttt

SEQ ID NO: 49078 - DNA, 122 bp, Homo sapiens
agggccgccccgcagacaggtgagcccgcgcccccgtcctgggcggactgcgacatgcggcgggtgtctggattgcgtggctcctcgggcctcctcgcagtgcttgctctcttccgttctag

SEQ ID NO: 49079 - DNA, 122 bp, Homo sapiens
atcattgaggaggtgaaacgatcccttcacgatgctttgtgtgtcatcagcaacctcatccgcgataatcgtgtggcatacagaggagggtttgctgagatatcctgtgctctggcagttag

SEQ ID NO: 49080 - DNA, 122 bp, Homo sapiens
aaatgcttgcatgagccaattttcaggtttttacatatatgtgcattagtcaacctattgcgaaaccatctgacaaacagaaggagaagcatttgtgaacagtttctgaacagaacactttg

SEQ ID NO: 49081 - DNA, 122 bp, Homo sapiens
tcttgctgtcggcttaaggtccccctcttagtttatgaacaaaatttctctgccagcgtgcgttgtctactaacaagaccacaaagcccgccttgcctgtggtaaccaagcccttctgcgaa

SEQ ID NO: 49082 - DNA, 122 bp, Homo sapiens
gtgttcatcttgatcctagaaaagaggccgctcaggatggggatgagatttcagttgctccgggaccgacgcatctcctcccgtgggccaggtcctcatgcacacaaagcggatccgtggcg

SEQ ID NO: 49083 - DNA, 122 bp, Homo sapiens
agcttcagctgcaggggccctggtccttctccctaatccctgcaggacgctggatgatcccgggaggccttctgacctctttttaggaaagcgagttgcgtccgcttccacgaagggcgggg

SEQ ID NO: 49084 - DNA, 122 bp, Homo sapiens
ctggcagagtggggagccagccggcaaagaattccgttttcagctgggccaaggggccggcgtctccccacccccttaggctccgccccctgtccgctgtgatcgccgggaggccaggcccg

SEQ ID NO: 49085 - DNA, 122 bp, Homo sapiens
tgaaattctaagcattgacaatggtcattttccactatcttttgatcatcccactgtgagcgtggagaaaggaaggaaaaggagatgagaatcagaaactcatagtaagggttcacatttcc

SEQ ID NO: 49086 - DNA, 122 bp, Homo sapiens
tgtggaaacaggttatggcagagttggggggcggggtgacgcggtgccacccctcctggccgccctcaggtcccgctgacgtctctcttccccaccccctggcttctggcttctttctcccc

SEQ ID NO: 49087 - DNA, 122 bp, Homo sapiens
gagcgccagccaccagcgtgagtgccgactgctgcatcccggccggcttgcgcctcggaccggtgcctggtaccttcaagctgggcaagtacctgtcagaccgcagggagcccgggcctaag

SEQ ID NO: 49088 - DNA, 122 bp, Homo sapiens
tttcaagcagcggcttgtggccaccgtcagggctggggagtggtgtttgccggaagtcctcggaatgccagcgcaaggacgaagggtggcccagcctctcccctcctcgtttggccagccgc

SEQ ID NO: 49089 - DNA, 122 bp, Homo sapiens
gctgcggggggcaaggctggggactcagattccaggtgtttcaggttgtagctgcccagccggcaaggtaggcgctgagaggtgcggcagacggtggagagtcgtcaagcgtcgggtatcac

SEQ ID NO: 49090 - DNA, 122 bp, Homo sapiens
gcacactatacccatatccatcatcataattatcttatcatgtgttggtcgctgtccttccgttgaggccattgagcccagcacccatgccttccccgtatttgcattcctagtacagtgct

SEQ ID NO: 49091 - DNA, 122 bp, Homo sapiens
ttttgttttgttttgttttagagactggggtcttgctcgattgcccaggctgtagtgcagcggtgggacaatagctcactgcagactccaactcctgggctcaagcaatcctcctgcctcag

SEQ ID NO: 49092 - DNA, 122 bp, Homo sapiens
aggccagggtgtgggtgggacggcatcggcctagatgtcttcctcagtccaacttagatgcgagggagctatagaatgtgaagcagcagacacgctgttcctctacccctactcttccaact

SEQ ID NO: 49093 - DNA, 122 bp, Homo sapiens
tgtggtgctgacagacccaaggcccagacacagcagaggtccgtgctggggagggcgggtcgtcctgttatggaacaggggtccaaacaagcttgcttctcagagcatcttctggggaactg

SEQ ID NO: 49094 - DNA, 122 bp, Homo sapiens
tctttcctcggaaaggtttgtcttgttggttgtcagggatccacacacctggagccagaccgctcacacgcgggcgcaggagctcgccccacacatctcccttccccggctctcggggcacc

SEQ ID NO: 49095 - DNA, 122 bp, Homo sapiens
cttggctgctttcctagaaccccaataccagtggcttacttaagagggaggtttccctctcgccagccccttgctggacaggtcagggctggctccccacccctgattcagttctagcctgg

SEQ ID NO: 49096 - DNA, 122 bp, Homo sapiens
gcctccccgtccagcctccttccacagcggcatatgccactcatgcggaggcagctctgacgcgggccacacgcgctggaggactccagtatatcttggatcacaacgtgtcaatgcacaga

SEQ ID NO: 49097 - DNA, 122 bp, Homo sapiens
gagaattgtaatcagaaaaaaatgtaggtcagttgtgatggttgaaattgagaatggtaccggaaaagttgatggaaacaaatcatagttcagagaagtgagtcggtaaaacagacaagttg

SEQ ID NO: 49098 - DNA, 122 bp, Homo sapiens
acatgggaaagctaacaatatttgaggtatatctgggttaattgttccaaactacagtgccggctgggaaatcagcctaggttcctgacctagcattcagctcagcccagtgtcactgagca

SEQ ID NO: 49099 - DNA, 122 bp, Homo sapiens
cagcccggaggtcctgggcgtttctgaagacgtggccgcgccgcgggggctgaggatttgcgtcccggcctgctctctcgcccttctgggccctcctttcccctctacaacgacccagtctg

SEQ ID NO: 49100 - DNA, 122 bp, Homo sapiens
tcactttctcctcagttatcaaggcattacaggataagtacgtgtatcaaagtttaacatcgttcagaattgccagtaaagcccctcagttcccacctctttcagttcagtaagaggaaact

SEQ ID NO: 49101 - DNA, 122 bp, Homo sapiens
agtgttagatgtttcagacagtcagcttgaaatgtgttcgcttacagcacagtacgaggccgaattcaatgcaaactgctatagataagagttttaggggtctttaatcacttctttctcgt

SEQ ID NO: 49102 - DNA, 122 bp, Homo sapiens
tgttgaaaaggctattctttcccccactgaatggttttggtaatgttggtagaagtcaatcgaccatagatgagtggactggattctgttccgttggtgcatggactggattctattccatc

SEQ ID NO: 49103 - DNA, 122 bp, Homo sapiens
caggcagcaacatcagcctagtcccaaacaggaggagaaagggcaatgttacttagcttccggtgcctagaggatctgcgtgttctctgtccagtcccaatgttaccgggccttggtttact

SEQ ID NO: 49104 - DNA, 122 bp, Homo sapiens
aggaggcgccccctgggccccctccggctgctgctgggcatggaccgcccgccgacatggcgccgtcaagggcctctcccgactgctgaagaccctcgccgccccccgcgcacgaagggaac

SEQ ID NO: 49105 - DNA, 122 bp, Homo sapiens
cggggaggcccacgagctgggggggccgctggggtggtgtcaggatgttttcacttactgcgactgtggcacttatttaaaaggaaacatacaataaaacttgtccttgtagataaaataga

SEQ ID NO: 49106 - DNA, 122 bp, Homo sapiens
tgacggcatcctatggaaacggttgggtggatttgcgcccaagttggagagtatggttagcgtgatctgacttaaaacttaggccacatggcacatggaaactggagagtgtctggggtccc

SEQ ID NO: 49107 - DNA, 122 bp, Homo sapiens
gcttcccgacgttccgttcccccctgcccgccttctcccgccaccgccgccgccgccttccgcaggccgtttccaccgaggaaaaggaatcgtatcgtatgtccgctatccagaacctccac

SEQ ID NO: 49108 - DNA, 122 bp, Homo sapiens
gccctgagaaaccgatcctggaactcgtgggccttcttgggcttgctctgcccacggccccggcccacctggagctgttaagaacagtcagcccaggcacttaactctcatgagcagtgtag

SEQ ID NO: 49109 - DNA, 122 bp, Homo sapiens
cactggcccgtggcagggcccccaagccttttcccaaactgatcacagaaagtgacgacccgttcgcccggcggaccgggggcgtcgggcaggtcctggtccaagtgagtgcccgcccctgc

SEQ ID NO: 49110 - DNA, 122 bp, Homo sapiens
tccctgcctgagacaggggcccttcctcccttggttctccaaggtggtttgtatagaacacgccttccaaggccagcaacaggctttgtaggtgaaaaggatctcatccctcagagaaagtc

SEQ ID NO: 49111 - DNA, 122 bp, Homo sapiens
ggcccctcagtcgcggctgccccctccccgggtttgtttatctcgggattcaggatgcttcgcccctccccttctccgcgggccgccccctccccatcttacctcgggcagacagcgctggg

SEQ ID NO: 49112 - DNA, 122 bp, Homo sapiens
gggggccttggatccagggcgattcagagggccccggtcggagctgtcggagattgagcgcgcgcggtcccgggatctccgacgaggccctggacccccgggcggcgaagctgcggcgcggc

SEQ ID NO: 49113 - DNA, 122 bp, Homo sapiens
ctcagacacagctgcatgttgggagcacccgtcccttcgtgcccacagtggctggagacgcggctgttccagagggcatccagtctgaattcatgtccgcccatgcccgcccccagctactt

SEQ ID NO: 49114 - DNA, 122 bp, Homo sapiens
taggaaagggaactccctgaacccttgcgcttcccgagtgaggcaatgcctcaccctcttcggctcacgcagtgtgctgcacccactgtcctgcgcccactctctggcactccctagtgaga

SEQ ID NO: 49115 - DNA, 122 bp, Homo sapiens
gggtggggcggagccttgtggcaaggcaggtgggtgcaggcctctggggccccagactgccgcgtctggctctaccaggctgtgtctcgggccccgtgcctgcagctgcaaggcggggaaag

SEQ ID NO: 49116 - DNA, 122 bp, Homo sapiens
cagagaggcccagcatgctctgggggctcagagcaagtgtaattagtctccaggagaggtcgatggaggggtggggcaatcagttttggtccaaactagtcatgaaattatatttcactttg

SEQ ID NO: 49117 - DNA, 122 bp, Homo sapiens
cttcttccttttgaaatttggggcacaattaaataatgatacacaaagtattctccagatcgctatttcttatgttatcttgaaaaattttagcggcatataaataaaaatttccaggccta

SEQ ID NO: 49118 - DNA, 122 bp, Homo sapiens
tggccatattcacagaagcacaactttctacagcaaggtattatcagctgttgctgtcttcggaaaggctttattgtctcctagctaagggaatccctcctttccttccagggttcactacc

SEQ ID NO: 49119 - DNA, 122 bp, Homo sapiens
caggatcggccgggaggcgagagggattttgttgaggagcaaggtcttccacaggaactgcgacttggaaagtattcaccaagggctgtgccatgcgaaaccctctttaaaggaaccgcatc

SEQ ID NO: 49120 - DNA, 122 bp, Homo sapiens
accatccccaggccgctgttccggtgcgccccgattttctcgagtcgccgcacagccggacgccctcagcctgctgggtgggagcagggcgactggatgtccactttccaccacctgaaact

SEQ ID NO: 49121 - DNA, 122 bp, Homo sapiens
gacatggcccgggcgcggggcgtggggtgagccctgggcgcacgggcgcgtccgcggcaacgcctggaagggacccgaggcccttcttgtagagtccccaccgagggaaataagggacgcct

SEQ ID NO: 49122 - DNA, 122 bp, Homo sapiens
atcccggaactggttgggttccagtgccctgaaaggctgcttggttctggagtcgccacacgcaaaacaaggcacctgacggttcgggaatcgcccgctctcttgcctaatcttccctgcct

SEQ ID NO: 49123 - DNA, 122 bp, Homo sapiens
ttctgaggcgcggtggcctgagaaactggcttcagagcccgctcttcctagccttctgcccgaaaatgcagaatttggggaattggaactttggaggcgggagcgaaagacctctccttctc

SEQ ID NO: 49124 - DNA, 122 bp, Homo sapiens
ttagcattttctgtaatgggtttattacagtaaatttttttaatggcatgagcaatgggacgcaataccatcatttaaaatgatttcggtgaaggtcttggtaggaacagatgttcatgatg

SEQ ID NO: 49125 - DNA, 122 bp, Homo sapiens
tgggccgcagccctgccgaccgcacgggacaggcgccgcgtcctctctgggcctccaagacgcagactagaagcccatagctgctgggaagatgggcaccccaggtctccgcgcacggcctt

SEQ ID NO: 49126 - DNA, 122 bp, Homo sapiens
cgttcccgcggctgtccatcacctcttgtttaccctgtctgcgggcaaatccaaccaagccgccccatcaactccggcccccattggccagcggtgcatctctctccaccccctcaggggtc

SEQ ID NO: 49127 - DNA, 122 bp, Homo sapiens
tggaatgccacaggccccacttcgtctcccagcccttcatctttcttccatgtccaaaggcggctccccagaggccaagggctcagctcttgtgttctctgagactgtggcacagctcaccc

SEQ ID NO: 49128 - DNA, 122 bp, Homo sapiens
agcgtgttcctgctctgtgccggctgatatcagcaagtttctatactactccggttccaccgtgcaacctgccacggctccctgagaggcaaaatgtggcgacggcagtgtaagctcgtgct

SEQ ID NO: 49129 - DNA, 122 bp, Homo sapiens
agcattgcctccagcctgaacacagtgctctcctgggtgctcccacagcccccgggcctgcgcagcctagcccagcccatgtcctgcacccctaggctctgggggcccgggctccaacagac

SEQ ID NO: 49130 - DNA, 122 bp, Homo sapiens
aacatataaaaaacaacaatagttgtttaaaaacccaattaggccgggtacagtggctcacgtctgtaatcctagcactttgggaggctgtggcgggtggatcaggagttccagacctgcct

SEQ ID NO: 49131 - DNA, 122 bp, Homo sapiens
ggctctaggcctcccacggtgacctcactctccttgcccccaacacgcaccgcccggggccgcccatccctgtccttgtactgcacggtgaaagagtcgaagctgccctgggggacggtcca

SEQ ID NO: 49132 - DNA, 122 bp, Homo sapiens
gtgagagcaaagttaacgggtaaaaaaaggggggcagggactacattcaactcacccctccgtcagatcctcccagggagagccccttttcagctacgctgcagggagaaaataattcagaa

SEQ ID NO: 49133 - DNA, 122 bp, Homo sapiens
cttgctgtgctccaggaggaaatgtgtggcccgggcaggtgctctgatcggcgctccggtcggtcttgtgggaaatctgtttttaactgtagtctccctgtcacccagccggcggagcttgg

SEQ ID NO: 49134 - DNA, 122 bp, Homo sapiens
tgggaagaacagtcctgctcacttgggagggctgtgtcagcttttacagagcagctttcacggtcctttgttcctctctccccagatcctacagtgtcagtatccgaatcaatcactttcct

SEQ ID NO: 49135 - DNA, 122 bp, Homo sapiens
accggtccttgtgtagtttcagaagcctcttcacatcttctctgcccttggggaccgggccggccttatcaaaggcctccttcaggagctggctcttctccaggccgaagacatgacgggga

SEQ ID NO: 49136 - DNA, 122 bp, Homo sapiens
tagaacccgcccgctgcctgccacgctgccactgccgcttcctctataaagggacctgagcgtccgggcccaggggctccgcacagcaggtgaggctctcctgccccatctccttgggctgc

SEQ ID NO: 49137 - DNA, 122 bp, Homo sapiens
ttccaaagcaaggagcatttgagcttttagagagattagaagaccctaaaaagtgcatctcgctcaaaaggtgtccagcttgtccagtggtcattgtccaatctgattccatttcaaaatca

SEQ ID NO: 49138 - DNA, 122 bp, Homo sapiens
acctcaagtgatctgcccccttcggcctcccaaagtgctgggattacaggcatgagccaccgtgcccagacaggttgtgtgagtctcttgaggacacacagctcaaatgggctgaagctatg

SEQ ID NO: 49139 - DNA, 122 bp, Homo sapiens
ctacaaacagtgtcacctgggaaagacagtgaactcagttatagaacaagaacacctgcccgggctgactgggggccaggatgcagggaaggctgcctggaggaagtgacatacccctgagt

SEQ ID NO: 49140 - DNA, 122 bp, Homo sapiens
agccggtgcccagcgcggctgtcagcatcaagggcgccagcaggaagatccaggggtgcgcgcccacctgccaccccagccactggaaggtgcgggacagcagcccctctaggcagtcggtg

SEQ ID NO: 49141 - DNA, 122 bp, Homo sapiens
atcctttaaaatcccacaaagccctgcgaggaggagctgtggccctgctgccaagcgggccggccagagtgcctcccctggtacgcccgcccaccctgcagtcaggggtctgggggccgtgt

SEQ ID NO: 49142 - DNA, 122 bp, Homo sapiens
caaggcccaaacaccgggaacggcaagagggtgcatttgccactcccgtgtcgctagcaccggccttgacagtggactattacaaggatttctgtgggcccgctctgagccgccgtttctgg

SEQ ID NO: 49143 - DNA, 122 bp, Homo sapiens
gggacagaacaggtggtggagggagcagagggctccggcgtcaccggcactgctgcttgccgggccatttatcactgggggtgtttataccccacctggggccagagcccgagcagaacagg

SEQ ID NO: 49144 - DNA, 122 bp, Homo sapiens
ccttaggggaacttggctcacaggtgcacccagccaggctccgcatccatcgttacagggcgttgttccttccatgtcttcatgtggctcctccttttcttatggggacacccaccgttgca

SEQ ID NO: 49145 - DNA, 122 bp, Homo sapiens
cgagtgtcgcctaggtaaccagattaatctcctttttctctcccttcctctcttgtagtgcggtaatcggtgggctcttttcacaaaaaagccagcctcaaagctggggctctaactaggtt

SEQ ID NO: 49146 - DNA, 122 bp, Homo sapiens
tatgcatgtaacttcagaactgtaaaaagggaacgagtaagagaatttctcataagtgaacgtgctgttaagtgtgtctaaattgtttatacaaagggttgccttcagaaaatcaccccagt

SEQ ID NO: 49147 - DNA, 122 bp, Homo sapiens
agaaggtaagaaactgactatggcaggaggcagagcggagccactgacacccaagagaaacgagaggttgcagagaccaacagcaggtactggaaatagaaacttcagcaaactgtgagtgg

SEQ ID NO: 49148 - DNA, 122 bp, Homo sapiens
tacatacagaagaatgtatatagtaagtgcacagctgggtgggttttcacacaaagggctcgtgtaggcagcaaggaacccttcccagcggcgccctcccctgggcctcacggtggggatcc

SEQ ID NO: 49149 - DNA, 122 bp, Homo sapiens
tggccagaagctgaaatgatggcagtagtgccacctggtgaatgaattggttctgtgacccgggaagctgtgcttggctctgatttcttttctggaggctcggaaacacttcctctcttctt

SEQ ID NO: 49150 - DNA, 122 bp, Homo sapiens
aagtgagttcaaaggctgggtgtggtggctcacttctgtggtgccagctccagcttgagccgagaggattgcttgaacccaggtgtttgaggttgcagtgggctctgatcataccactgcac

SEQ ID NO: 49151 - DNA, 122 bp, Homo sapiens
cctccgcccgcccttcggcggattcctgagccagcgccagggggagggaccccgaccccccgcttctccgcccccggccagccacaggcccctacccggtcccccgcggcgccgccaggagc

SEQ ID NO: 49152 - DNA, 122 bp, Homo sapiens
aagggccaggctaaagcaagcactgcccgagtggtggcagtggacagcttcgggacaggccgcgctcgtcgggcgcagacaagcattcaggagggctcgcgggcaccggcatttacagagcc

SEQ ID NO: 49153 - DNA, 122 bp, Homo sapiens
ggcgcctgcgacaccaggctggtccgagctggcgcgcccccctcgccaccttccccaggccgcggaccccccgacgcagagtctgtgcacagcatctaccatgccgactgccacatagaggg

SEQ ID NO: 49154 - DNA, 122 bp, Homo sapiens
aatatgcaattctgaatagtagccaacatgggcttgtaaaccacgtgaagagctatttaccggacactggcgtctcccgagagggtgtgtccgtgcagaaagctggaggcccctcgcgtgct

SEQ ID NO: 49155 - DNA, 122 bp, Homo sapiens
ctccattcagtgagcacggcagacaccggagacgcggggcccacccctccggcccccccccgaccaagaaacgccaactccgcctcccattggctgcgccgcgcgtcatgtcgactaagttg

SEQ ID NO: 49156 - DNA, 122 bp, Homo sapiens
ccgcggcccgaactcctgggtcaccccgaattacaaacaaaaccttaacgccgttgctcgcgggttagaaggcagctgtgcgcgaaaaacacctcagattttcttcaagcgtgaggaaggtc

SEQ ID NO: 49157 - DNA, 122 bp, Homo sapiens
cccagctcccgctgggggcgggaagaccaaccagccgcttcctgcagctgccaccagctgcgcccggccaccgcggggcaccctctgccggtcaataggagagagaactacagctcagctgc

SEQ ID NO: 49158 - DNA, 122 bp, Homo sapiens
ccccttcgcctccctccccaatacggtcctcagttatcccagctgaggagctgtagcattcggtcacagggaagcgctgctaaaaataaacgccggaccggattttcctctgcaaactagaa

SEQ ID NO: 49159 - DNA, 122 bp, Homo sapiens
tgggccgccttccctcggaggaagagggtggggaccgagggaagcgggcgggggtgggagcgctgtctccgggccgccgctgatggcatcccagggctccgtcctcctcctgcctccatgtg

SEQ ID NO: 49160 - DNA, 122 bp, Homo sapiens
gggcgccgtggatagcagtgacggctctcaggagagtgtgggcgccatgggtagcagtgacggctctcaggagagtgtgggcaccatgggtagcactgaccgctctcaggagagtgtgggcg

SEQ ID NO: 49161 - DNA, 122 bp, Homo sapiens
ggaaccaggcgttgtccggaatcctgcccagccggagtcgtgcagaggcttatggggactcgtagtcccgctcgccggcgttgtccgcaattcctgcaatcggaagactacacttcccggca

SEQ ID NO: 49162 - DNA, 122 bp, Homo sapiens
tctgtctagcagtgtgaggatacagaaaccactattaggataaaagagctaagagagcatcgctaagtttctctgccaacattattctacgtggctctgcaaaaaggatggtggaaacttac

SEQ ID NO: 49163 - DNA, 122 bp, Homo sapiens
ctgctgttactactttccgaatcgctcactgtgccactgggcgccgccatcttgaaccaccgcaaaggattgtggagaacaccgccgttatcaagcctccttcatgacgtcacgtgagagga

SEQ ID NO: 49164 - DNA, 122 bp, Homo sapiens
gtggccaacttgacaaaggacctgggactgagggtgggggagctggcttcgcggggcgctcgggttgttttcaaagggaacagacaacatttgcagtttgatccacagacccatgatttact

SEQ ID NO: 49165 - DNA, 122 bp, Homo sapiens
catcccttgctgacgccagccgtcgggagtcagccccttgctgtctgaaggctgccggcccgtggcccatgccgagctcctgtttgtctcagaagaaccggcttcctcaagctttgataggg

SEQ ID NO: 49166 - DNA, 122 bp, Homo sapiens
caagcagtccactgctttggcctcccaaagtgctgggattacaggcattgggattataggcgtgagccactgctcctggcttctgtgggagtctttgagctggtggagtcagctgttctgct

SEQ ID NO: 49167 - DNA, 122 bp, Homo sapiens
tcaacacgttcacgctcttattctcgatcattcagccgctcacattctcgttcctattcacggtcacctccataccccagaagaggcagaggcaagagccgcaattaccgttcacggtctag

SEQ ID NO: 49168 - DNA, 122 bp, Homo sapiens
gcttgaggctgctgccactgggtagcggtaggcctttccgaggaggcggcatttgaagaccggaggaaggttcatcccagcaagtaggaacagcaagtgtaggtcccctaagtcttggggga

SEQ ID NO: 49169 - DNA, 122 bp, Homo sapiens
tatttttccattttatgtagtattaatgaattacagcaaaatcttttttaaaacacaaaacgcttgttatttttcagattggagagctttgttcttcagcaaaagtaatgaagtggaactat

SEQ ID NO: 49170 - DNA, 122 bp, Homo sapiens
tcagattaaaaggataggaaaaacgagagaaaagtaagacaatgtgagcgtgagatccttcgacagaagggaggtgaaggggacagatccaacaatccccctgcttatttgactccgagaca

SEQ ID NO: 49171 - DNA, 122 bp, Homo sapiens
taatgtttaatgtagccatgcctagactgagattctttttcttttgaaataagtagcctgcggaattaatgcatatttttgttggcactgcatcaaaattgacatcaccggaaataatgtat

SEQ ID NO: 49172 - DNA, 122 bp, Homo sapiens
cgccatcttggaccatgagtcaagatggcgccccctggtcccaggggcacagcccaggcacgctagcgaggctacgcacgcacgtattcgggcgcgaagggtggggcactgacgccagacgt

SEQ ID NO: 49173 - DNA, 122 bp, Homo sapiens
agtgcctgacttgtgctcgctgaacagctgtagaattacccggagctcagccctttgctgcgccctaggaggggctggaagaggagcggcctgtgtccctctgcttgtttgtggagaagctg

SEQ ID NO: 49174 - DNA, 122 bp, Homo sapiens
gctctggaatttattaaatatgtatctataccctgacactgctggttactgtctataatccgagtgttttgggaggctgaggcaggagaattgcttgaggtcaggagttcgaaaccagcctg

SEQ ID NO: 49175 - DNA, 122 bp, Homo sapiens
gccttaggaccaggatggggtctgcaggatcccaggacctggcagaggactcggcctccccgggactggggctgcggcgcggcgctcccggggctgaggagggggaggctgggaggcgccct

SEQ ID NO: 49176 - DNA, 122 bp, Homo sapiens
ttagcgtaaaatctttcaaataaataactactgcttttagtctctgcaccaggaatctcacgtgctttcaaatgttttacaaagcacgtaaaaaagtatttgaaaagtcccacttacccctc

SEQ ID NO: 49177 - DNA, 122 bp, Homo sapiens
gatggccgagtggttaaggcgttggacttaagatccaatggacatatgtccgcgtgggttcgaaccccactcctggtagctttaggtttttctcttaaatcattttattttttaaaaatacg

SEQ ID NO: 49178 - DNA, 122 bp, Homo sapiens
taagaccctgcagtgagggggttgagggggcttcctggagaaagaggtggtgttggaactcggccttagagctcagggagggttgatctcagaggaaagtaaaggaccctgggaaaagatgg

SEQ ID NO: 49179 - DNA, 122 bp, Homo sapiens
gagtcatttacatccaatgagagaaaaacagcctccagagactcttcgtccattggccagcgagagtgtcagttcccaggctcctgccgcgcacgggcgagcccttctaggcgggaaaagtt

SEQ ID NO: 49180 - DNA, 122 bp, Homo sapiens
ataaaggcacttatttttatctttaaatttgtattttagtgattgtttaagaaatgcaatcggattggtctataatatcttttaccgtagcaaagatttggctgtggtgaaaacaaactcca

SEQ ID NO: 49181 - DNA, 122 bp, Homo sapiens
cagggagactgagggccggagaggctgcccctttgctgcgagcttgctgagggcggggcgcgccgtctagcagatcttagaccagcccctcgaaagccctcgcctggcttgaccaaggaggg

SEQ ID NO: 49182 - DNA, 122 bp, Homo sapiens
ggcggggtctccgctgcctcagggacgggtcttttgaagtgcctggtgtgacccatcttccgtgcttgaaatcgacgtagtggaccctggctagcatatttttccctgccaagattattgca

SEQ ID NO: 49183 - DNA, 122 bp, Homo sapiens
tcaggactgctttagtgatttttgccctaaaattagaaggccttgcaggtcaggaagctacggctccatgggtccctgagctgtcctgtgccatatcatgaaggtaggcccagtccatcctc

SEQ ID NO: 49184 - DNA, 122 bp, Homo sapiens
gtttttaaacagtatctgtgtggggcaaaacacattactatggcaccagcttgtaacctacgatatgatctctctttcccactgtgctcacatatacacaaccccatccttcatttaagatt

SEQ ID NO: 49185 - DNA, 122 bp, Homo sapiens
cccgccctgccttgggccaaatcccccccaggtcccagttcctccaggggttttgctgggcgggggcgtcgacgcagcccttctccagtgtcttgctgcccgcggtcgcacagtggtgcgtt

SEQ ID NO: 49186 - DNA, 122 bp, Homo sapiens
cttgggcttcaccacctttaaggtgaggtggatggtcttcttcttggaaatttcataagacgatagcattttcttgggctttggggtcttaaagcccagcagaaaaaccaagtcctgcatgg

SEQ ID NO: 49187 - DNA, 122 bp, Homo sapiens
accgcctgcacggccagcccgctcctgaggctgctgatttgggtctgggaagaacagtcacggcttctgctggccagcggggtggcgggcaccagccacgaggtgtctgtggtgctggcctc

SEQ ID NO: 49188 - DNA, 122 bp, Homo sapiens
tgctgaagtgagtagtgggatcctggaggcccccagggctgaggcccagccagctgcccccgttagcgtcataaagtccagcttgtctccctcatccaaaggccgttttctcagtgggaggg

SEQ ID NO: 49189 - DNA, 122 bp, Homo sapiens
agccaggatgacagcagatctgcagggcggggtcctcgccccgggccacctggctggggccgaaggtcacagctgcgtctaactgggccttgagcagctgaagctgtttcagggcttgcagc

SEQ ID NO: 49190 - DNA, 122 bp, Homo sapiens
gatgaagacgctcaaggaccctcgtgacttggccgagacaggggaagggagaagttgagtcgggcaaggaagagatgctaaagcctggggaattaagaacatgccagaatcatcccgaggga

SEQ ID NO: 49191 - DNA, 122 bp, Homo sapiens
gaggcccttcagctggttaaaaaggaaaagaaagatgcattaacatgctgcctagctgggcgcagtggctcacgtctgtatttccaacaatttgagaggctgaggcggaaagatccttggag

SEQ ID NO: 49192 - DNA, 122 bp, Homo sapiens
tgcggggggcgcgggggtgtgggtgtggggagggggcgccggtgccgggaaggtgcggcgcgcgcctctcttgctgccggatccgctcgagtcactccggcccccaaggactgcggaggcca

SEQ ID NO: 49193 - DNA, 122 bp, Homo sapiens
accttacacagacaagagtgggactatcagccccagtctacagaggaggaaactgaggctcggcaaggctaaatcacttgcccaaagtccccaggcctgtctgaccccagagcccaggctct

SEQ ID NO: 49194 - DNA, 122 bp, Homo sapiens
tgcaccatcttccgcctcgacgccgtgacgtaggcgcccgtgaggacgcgtcgcgtcaggcggcgacccggcctagccccgtcccctccgccgcggcctcacttcctggctgcgcgcgcagg

SEQ ID NO: 49195 - DNA, 122 bp, Homo sapiens
ataggaattaattttctctccagttgcagaggggccttgtacatgaactgcgttggcatgcggaggaggggcaacacatccatgttggggacccctcccatccacagccccagctgccacca

SEQ ID NO: 49196 - DNA, 122 bp, Homo sapiens
aagaggattcgggctaaggcgctgagtcactaacgtgaaggctggcctcagaagaggattcgggctaaggcgctgagtcgctaacgtgaaggccgggcccagaagaggattcgggctaaggc

SEQ ID NO: 49197 - DNA, 122 bp, Homo sapiens
ctgtccctgccctctcgaggcttagaagtctcaggtttctctggggtcctcaggtggagccgggaggtcacccgtgccccagtcagcagacacagtgcccgccacctggcagggcacagagg

SEQ ID NO: 49198 - DNA, 122 bp, Homo sapiens
ttatcccttcggggaaattatttaattgggacaaaggggatgtggagttacagagagcaacgatagggctttcagaacccaaaacctgtctggtataataacagatccttccggtaaccaac

SEQ ID NO: 49199 - DNA, 122 bp, Homo sapiens
tcgctttgttgccgcagcacctcttctccaaaccatgccctcctctctccagagccgcttcggcttttcccaaggccaaggaagaagtcagagcagcacccaaaagggcccgcagttggggg

SEQ ID NO: 49200 - DNA, 122 bp, Homo sapiens
agtttcacttgtttaatggtctgggcttattttggaaaaaaaaaaaacaaacaaaaaaaacgaattctgaccttcgttgtgctacattttgtgggaaaccattggccctgcctctggcctgt

SEQ ID NO: 49201 - DNA, 122 bp, Homo sapiens
gagcccacatctctgtgcaggatttaccaccatgcctgtctggttcatcccatcatgaagcgtgcaggcccctgactagccttcggggccagatctttcactagttacagaaacctgggaaa

SEQ ID NO: 49202 - DNA, 122 bp, Homo sapiens
ggaagagggtggtcacttgcagggtcagaggtcaagcctcctccatttagctggggcagccggattgtcgccaggcccgagggggcgtgtctgtgcatctgcccgggaagccccaaacaggc

SEQ ID NO: 49203 - DNA, 122 bp, Homo sapiens
aactagctagtcacaaacagacagacctggataacttcagttataagaggttcctagagccgtcaaactcatataaagaaaaagtaggatgatggttgccagaggtgaagagagaaggaaat

SEQ ID NO: 49204 - DNA, 122 bp, Homo sapiens
cgaatcagccaataggaattcccggcttgggcctccgcccgacccggaccacgcgggagccggggcaatcaaactacatttcccgacacgcatgtgctcgcgtcgtggccaatcagcgccag

SEQ ID NO: 49205 - DNA, 122 bp, Homo sapiens
acaccagggactgggtgggtgtcagctggtacctgagttgagcagaagacctgaaaaaatcgggaaacctggatgagatttggacctaggacaagcatctcctcccaagtctgtgtggagaa

SEQ ID NO: 49206 - DNA, 122 bp, Homo sapiens
cgcgctgccagccatgctgaggctcgggactgagccgcccctttgttgtccccagccccccgctgccacacagccaggctgaccagtacgtcctcagctgggaccagcagctcaacctcgcc

SEQ ID NO: 49207 - DNA, 122 bp, Homo sapiens
aatggtagccacggcaggcattttagtcttgggccagagattggagcatttgctttggagcgagggaaaggtccccacagccggaaatgggcagtgagtttggagagtgcctagcagtgggt

SEQ ID NO: 49208 - DNA, 122 bp, Homo sapiens
cctcccaggacctccacctgcctcctctccagcccaagccaggcagacgccatgaccaagcggcattcttgtctggggtggggctgttcagccctgtgggaacccctggagagctgagtgtt

SEQ ID NO: 49209 - DNA, 122 bp, Homo sapiens
caccctgtgcaatgtccccgctccaccttgagtcgtcttggaaacggtcgccagggaaaccgttcttcccgctcaggcccgcccgccctcgtcaaaagcttggctcagagagcgggggaggg

SEQ ID NO: 49210 - DNA, 122 bp, Homo sapiens
ccacttggcttgagagagctgggtcctctggagcagttcagggtcaccacagaagtaggccgtctcttgggcctattcgccccagcttcgaggtggtggtgctttattagtgttattaaggt

SEQ ID NO: 49211 - DNA, 122 bp, Homo sapiens
aatggcaggcttgtgggcgaagcgcatgtcgcagtaggagcagcggtagggctgcgctcccgagtgcaggttgaggtggtcgtgcagggtggacttctgtgtgaagcacttgccgcagatgc

SEQ ID NO: 49212 - DNA, 122 bp, Homo sapiens
gcccgctgaatcctaaactctggaggtggggccaagccatctgtgaatgaactcccgctccgggtcgcaccgacccaccctcacgtgtgagaaccccggtctaggaccctggttctccaact

SEQ ID NO: 49213 - DNA, 122 bp, Homo sapiens
taccttgcagagtacactgccctccaccctcccagggcaactgtagcaaggcaggctctgcgtcagaccggctggctcaggcctgccactcaccagctgtgtgacctcaaataagttgcttc

SEQ ID NO: 49214 - DNA, 122 bp, Homo sapiens
aaggggtaaactggtggagtgctgaggactttagggcagggactctctgccgtgatcctgcgagggtgggcaggcatgtcatacctcagcccaaacccacaaccacaaagccaagggcaagc

SEQ ID NO: 49215 - DNA, 122 bp, Homo sapiens
tgcccctcttcctccagccgcgccagcgcctcctgataactggccgcctcccgcacgtgccgctcctcctgctcgcgcatctgcctctccagggactcgttctgtgggatggagccggccgg

SEQ ID NO: 49216 - DNA, 122 bp, Homo sapiens
cactaggtgacatggagtgttaggggcgctatggtagaagtctgcagagagtgcaatgggcgtccaaatgaggaagtgatcacttgcacaagagtgggaggcttggctggaaaggcttctct

SEQ ID NO: 49217 - DNA, 122 bp, Homo sapiens
ccgcaccttccctcccgctccctctggccgccgggcctcagccagcgctgctccctgacccgcctgtgccctcgccagggcccctcgccgccgcctcctgccgcctcccgatatggccaaac

SEQ ID NO: 49218 - DNA, 122 bp, Homo sapiens
cttaggtgatccgcccgcctcggcctcccaaagtgctgggattacaggtgtgagccaccgcgcccggccaaggatctgggccatttaagtggagtcttgaaggatgagtaggtgttaggcac

SEQ ID NO: 49219 - DNA, 122 bp, Homo sapiens
ctgggctttcacctgcgtctctgggtgattttcacctgcatctctgagcatttgtctacacggccgccctccccggggcccctcctgggctttcacctgcgtctctgggcttttgtctacac

SEQ ID NO: 49220 - DNA, 122 bp, Homo sapiens
gagcccacagagcccacagcccaagtacagccacacagacaggccacccaaaggttaagacgctaaaaaataaaaagccctgcagtgtgttagccacattcctttaaggagaaacaacttag

SEQ ID NO: 49221 - DNA, 122 bp, Homo sapiens
agaatcctagcggccgctacggaccgaagtttccaaagatgcggttccccgagtgtacaccgctcccggttgtaacatacacctagtattcacagtcacactaggcaggagcgatgggctgg

SEQ ID NO: 49222 - DNA, 122 bp, Homo sapiens
tttaaataaattagatgaagtttttaactcctaagtgcatcttccctggctttttccagacggtggaaatagggcggtgactaacttttcagagtggaagacacgcacgaagggcgcacctg

SEQ ID NO: 49223 - DNA, 122 bp, Homo sapiens
gcacttacactgtctttagtgctaccacccataggtctcctggatcctcctcttcccctgcgtaagttggagaaaagaagtggacacgatgatgatggccctcatgtccctaggtccctctg

SEQ ID NO: 49224 - DNA, 122 bp, Homo sapiens
cgcaactcgggggcgggtcctcgggctatataaaggagctccgcggtgcgggaggcctttcggagggtggtgagctagtaagtgtggttttagctgtagtagccagattgggcggccgggag

SEQ ID NO: 49225 - DNA, 122 bp, Homo sapiens
cggttaactgccggaggcatgcgcacagcggtggtgctaagtgcttgctgggggagtggccgaagtccctaggcccacgcaggtgctgggtctggttggagtgctgctcccacgccgacttc

SEQ ID NO: 49226 - DNA, 122 bp, Homo sapiens
catgcataccatttccatccgatgccaatactgcttaagtctctaacttcttgtaggaaacgtcagagttgcggtgatgatgattctctgacagctatccgggtgacagttgcccgaaaaat

SEQ ID NO: 49227 - DNA, 122 bp, Homo sapiens
ccagccggccgtactcgccgaggccccaggtgtacagttctccgctggatgtgagggctgcgctgtgcgagctcccacaggcgatatcccggatacgcttggttttcagggcctcgatcagc

SEQ ID NO: 49228 - DNA, 122 bp, Homo sapiens
aaatggcttttgacccgtcgtggaagcatctgtcctgctccaaaaaggctgcaagggtgtcggcagctggaatggtttggtccggggctcagttgtcaccccctgacttcagagccaatgga

SEQ ID NO: 49229 - DNA, 122 bp, Homo sapiens
tctcctcctcccacgcaccggtcagcggtcaaggggcgggttaacaccggtttggcagggcgcagacctccgcccacccgggagaattgaccccggaggcagatctgcagacccagaggacc

SEQ ID NO: 49230 - DNA, 122 bp, Homo sapiens
tgagaagaaggagggtgccattgccaaaaaggatggatatatacatgaacaagaaaaatacggaaatccagtgatgagcttcctccaagcctggaaaaccagtcaataggaagggatgggag

SEQ ID NO: 49231 - DNA, 122 bp, Homo sapiens
cccaaacacttcttattggctaatctggagcaaacctgcatatccattggctgaaagctccgtctattttagggtgactgagagcgtctcttccttctgtgttgcctggaaacggactgttc

SEQ ID NO: 49232 - DNA, 122 bp, Homo sapiens
caggagaagggcgacctctgccagcccaagaagcggtgagaactacattacccagaggcccgtgagccaggttcttggcgtggagccaatgaggctcaggggagggacatttccgctctgtc

SEQ ID NO: 49233 - DNA, 122 bp, Homo sapiens
aaaatacagacttcaaccttgaagaatcattttagaccatttagcaaaaaattaaaaaaacgtaagacattagtgatacaagtgaggtaaacatgttggtggcagtgtaatttggctattct

SEQ ID NO: 49234 - DNA, 122 bp, Homo sapiens
ggtggctgttgccagtgtcttcatcttggttgtgcctctcagcctcatccttgtctcttacggagccattacctgggcagtgctgaggattaactctgcaaaagggcggaggaaagcttttg

SEQ ID NO: 49235 - DNA, 122 bp, Homo sapiens
cggcacagagctgggagcggcacagagcagggaatagcacagagctgggagccaagagcccggatcacgcccttcttgctggcccttactggccactggcacttactgctgactgctcgggt

SEQ ID NO: 49236 - DNA, 122 bp, Homo sapiens
tcctctggctcccgccgtccgtcctctgctgggccgtttgcacgcccggcttcccctgtgcggtatcattgggaccgcatgcatcactaatgacgctgcgtgcctgcgggtcagacgggctc

SEQ ID NO: 49237 - DNA, 122 bp, Homo sapiens
gcacctcctcagcgtctccgccgtgactcactcccgggacccaggggaagcacagccctgcgctgcgggcaaacatcgtccgccgcccgccccgcctccagctccccgcctccacatttgct

SEQ ID NO: 49238 - DNA, 122 bp, Homo sapiens
aaggtgccttaccgagggcaggaggaggcaccggtgcagaacccatgagatagctaggaacgcgagatcaagggcacagtaggtaccaaggtcattggaagggcttttgctctctacctcct

SEQ ID NO: 49239 - DNA, 122 bp, Homo sapiens
tttactttcagctcacagacatggccaccttttgctccacagaaagttcttatcattttccgtttcaaggtaaattgatgtgcaattaccatgctcatcagttacaccaatagcagaaatgc

SEQ ID NO: 49240 - DNA, 122 bp, Homo sapiens
acgcacacgcaggttacatgaatgggaggcggtagccaatcctacgaggccggcgagccgcgcggcgcactggcgctgggagcagggccgcactccggcgcgggggggcgccacgcaggtga

SEQ ID NO: 49241 - DNA, 122 bp, Homo sapiens
attaataatggttaaggctagcaatgcaacaagccagagcagagagctaggagtcaggagcgtctcaacagtacctctcaaatcattccaacagcattgcccaccactgagaaagggtgtcc

SEQ ID NO: 49242 - DNA, 122 bp, Homo sapiens
aaaattcatgaaggcttcgatatatttacagaaatggccctctgcaaaagtcagaggggacgtaaggatgtctattatgccatcctgcagccatgcagagtgcctacactccccaaaacagc

SEQ ID NO: 49243 - DNA, 122 bp, Homo sapiens
ttgtcggtcttgaggccagacttgaggccccggctctccctcttggccaccacgtagacgcggcagtacatgaccaggatgatggccagaggcaggtagaaggagcccagcgctgagaagag

SEQ ID NO: 49244 - DNA, 122 bp, Homo sapiens
cctcccacccactggctccctcccccagcgctctccagtttctgtgccccaggagctacgcgacagtcttccaggattatggagtttctgagcgagaagtttgccctcaagagccctccgag

SEQ ID NO: 49245 - DNA, 122 bp, Homo sapiens
tcagagttgctataatgggccagctcctggtgaggggtatttagttgtttgcaattttcccgaatgaacagttctgcaaagaacaatcttctataagcatttatctttgttgtacagctact

SEQ ID NO: 49246 - DNA, 122 bp, Homo sapiens
cagatgtaaagtagaaaaatacattctgagtattcttttccacttgcgtttaggttcaaacgggaaacaaacccttccgtcctcagctgttaattccttatagaacctccactcccttgact

SEQ ID NO: 49247 - DNA, 122 bp, Homo sapiens
agggcctccggagcccaagcctgcgctagctcagattagcttgcctgtgtaggggacccccggcggccgcacccagtcccggaccttcagacgcgagcccgaccccagcggttccccagcct

SEQ ID NO: 49248 - DNA, 122 bp, Homo sapiens
cgaggtcagtgcggggcgaggtgagcccctcccagggccctctggcccaggaggatgaagcgcgccggcttcgctcttgcacgccggcttgccatccgggtaagcgcgggaaaggcggccac

SEQ ID NO: 49249 - DNA, 122 bp, Homo sapiens
cctaggccaccagcccagtgaccccagggcccagtgggaggcagggcgctcaccctcctccgagacgcagaacttctgggccaaccactgcacgacgtcgctgcctgcacgggagagacaga

SEQ ID NO: 49250 - DNA, 122 bp, Homo sapiens
aattaaatgagacgaagttggagaaggacttaacccatagccaggtttgtagtgggtgctcggtacattcacgacaattgtggcaatgctgctgggtgagtgactgcatgtgaaaatggagt

SEQ ID NO: 49251 - DNA, 122 bp, Homo sapiens
aacagggatggaggaaaggtcccacattcacattcctgatacgtggacaaggtgaggggccgcaatcgctctggcagcattttaaagatggggaagtagcagacacccacgcgtgaaggcag

SEQ ID NO: 49252 - DNA, 122 bp, Homo sapiens
agggtgctgcccggctcacggtccacacatggggatgtgtcaggctgtcagggtgctgcccggctctcagtatcagccgcatatgcacattctccactgaagccactgcatgaagccacgct

SEQ ID NO: 49253 - DNA, 122 bp, Homo sapiens
cgctgtcccagcccacccgtcaatcacccatcaatcaccggccaatcacccgtcaatcaccgtctcttgccagctttgcatcctaaatattttttggaagagtcccgtgtccgccacacccc

SEQ ID NO: 49254 - DNA, 122 bp, Homo sapiens
gcctaaggtgacccagaagggacaatatggcggcgcggccgcatggagggcctctcatcccgccccaagcaggttgacgccacggtacctgcaagccctgccatggcgccgccgccactgtc

SEQ ID NO: 49255 - DNA, 122 bp, Homo sapiens
accgccatcaagtgggactggagttcggccagagaagaaaacgacttcgggaactggcaacgagggagagggaaaagttgagaaacgtgactcagcctctttagttcatctttcacgtgggg

SEQ ID NO: 49256 - DNA, 122 bp, Homo sapiens
aaagcgcgggacggatgaaagtacgggtcgcgagaggttgttcgcgccttgagagttaagcgaagtgtggtggcttccaaggtaccgacacttgccgtaggctgggcttttatttaagtcgt

SEQ ID NO: 49257 - DNA, 122 bp, Homo sapiens
tcccagctactcgggagacccaggaacccagaaggtggaggttgcagtgagtcaagatcacgccactgccctccagccagggcaacacagcagaccctgtctccaaacaaacaaacaaaaat

SEQ ID NO: 49258 - DNA, 122 bp, Homo sapiens
gtgaggggcccacaagtcaggctttccctaaaacactcacttgtggggttctggagaccgcgggctcttatgagctctgctcctcacaaagtttttgaccttgagtgagtttcccgagactc

SEQ ID NO: 49259 - DNA, 122 bp, Homo sapiens
gagaggacacggctggtggggatcgggctcagctgggcctttctgtctctgcaggtagctcgtaagctggtcatcctggagggtgagctggagagggcagaggagcgtgcggaggtgtctga

SEQ ID NO: 49260 - DNA, 122 bp, Homo sapiens
gctcctgtgtcctgcactcagggacctcccggcagggcccgtgtgcccgtgtgtgcgcaccgcaggcctcctgcttcaacactgtggtccctgggagtggcaaggtgggcttcctgcctggg

SEQ ID NO: 49261 - DNA, 122 bp, Homo sapiens
aatgaaataacgccagcattcctgcatgcgggcagtgcgggccctgtacagaaaggtacacgagataggcatcctcacatccattgtcctgggaggaaactgaggctttgagaaacggagaa

SEQ ID NO: 49262 - DNA, 122 bp, Homo sapiens
gttgagctggaactcaggcctttagcgattgtctgtactgagacggtcagctttggtactcgaactcgtggtacagtcatttcttacttgattaattcaactgttaatccggtactcagggt

SEQ ID NO: 49263 - DNA, 122 bp, Homo sapiens
ttccgggcattgtattacatcaggaaggcaatgttaactaagttctaagtagtaatgagacgctgtgagtctattatgaactgaatactcccacagctcaaaggaggacagaaagtggtgtg

SEQ ID NO: 49264 - DNA, 122 bp, Homo sapiens
aacagggacacccagggtcccctgggccttgtgcatgtgtggtggggaggcaatttcgcccgttgggggagacctctgctgtgctgtttgtgttttccttccacaccacaggtgcctcgact

SEQ ID NO: 49265 - DNA, 122 bp, Homo sapiens
aaaggtgagtctgacagagcggcaggctctgtgacaccctgcaggagatagtgagggtctcggggagcgggtctgggtggctgtatttagggcggctgtgatgtcagcggaaaggagggttt

SEQ ID NO: 49266 - DNA, 122 bp, Homo sapiens
accccagctccctcactccttgtggggggcagctctgaggccagctctgcagcatccgcccgagagccccagcagatggaggccagctgctcacaggacagctctgcccacgaaccagggag

SEQ ID NO: 49267 - DNA, 122 bp, Homo sapiens
actttgtagcctgttctgtgacaagttgatgacaagccttcatcttgcttttctcacactcgagcttatagcagaccttcaaagagccctttgggagaacagcccgggaggatggatgagca

SEQ ID NO: 49268 - DNA, 122 bp, Homo sapiens
gtctgcaggaagatcctgctcatcagacccaagatggccttggccaatgaaggcaactaccgcgagctgcgctggttcaccccgtggtcgaggagtcggtgagtcgggtgcctgaccactcc

SEQ ID NO: 49269 - DNA, 122 bp, Homo sapiens
gtctttgaggtcggtctttctggggctgtggcccaaatgaagtcaagagacagcatcgggcgttgactgtcccctcgtgtgggccgggcaccgaccctgcctggggttgctgggcaccagcg

SEQ ID NO: 49270 - DNA, 122 bp, Homo sapiens
ttcacaataatgccatggccttaaggtattaattttccctttcaacggatgagaaacatacgctaaataactggttaaataactgctcaaaatcaaacataaagcaaatggccaggccagaa

SEQ ID NO: 49271 - DNA, 122 bp, Homo sapiens
aaccttagccgctgtcactgatcccaattactctgatccttttgcccttccttcccataacggcctgctggacgccacagcctgaatactggagagagctgggcattgcccaggtcacagga

SEQ ID NO: 49272 - DNA, 122 bp, Homo sapiens
ccggagcttccgccgccggagcttccgccgccgtagccgccgccgaaacttccgccgccgcgtccgccgcctccggaactaaacggggtgaggtcacattcggttatctctaacgttggaaa

SEQ ID NO: 49273 - DNA, 122 bp, Homo sapiens
cagcagtacctctgccaccaagcacccactctgtgctcctgagatctcctcagatcctcacgaacaattctgaggtgggtgtgtcagagacgtgtgaaccagaacaactccatcttgaatag

SEQ ID NO: 49274 - DNA, 122 bp, Homo sapiens
tgacctcgtgatctgcccgccttggcctcccaaagtgctggaattacaggcatgagccaccgcgcccagccctcagactgcttcttaccctgcatgtttagtctaaatgtcgtctccatgga

SEQ ID NO: 49275 - DNA, 122 bp, Homo sapiens
gtccattctgttcctggtgcggttcctcctctagccacatgatggcggcatgagcattgccgtacttctgcgctctcaagtctagcgctttaaatccccagttttaaagccaggggcgccgg

SEQ ID NO: 49276 - DNA, 122 bp, Homo sapiens
gccagcaaaaacagcgaagagcctcgcctcctgggaggccggcggcctgcggcccgggggcggagccatcccagcgccgctgccgccactcaattggctggccgaaccccggttcccgcacc

SEQ ID NO: 49277 - DNA, 122 bp, Homo sapiens
tcgctctcaccgacccgggccacacccgccaagctggtagttctccgaacggatccctcacgcccagcaatggccggagggcccccgggccccaccataatagcgctaagcacgccacaatg

SEQ ID NO: 49278 - DNA, 122 bp, Homo sapiens
tccccctgcagagtcagcacacccttcacctggtctgtgctgtaacatgtggcgtcagagcggtgcctgtggtcacccccccaccacccagccctccctcccggcgggctgcccctcctgtc

SEQ ID NO: 49279 - DNA, 122 bp, Homo sapiens
cccttaaggagacagtccctgggagtttctgcctttggtctccagttattgttctcttctcgcgagaactgctcctcccatcctcttctctcacgaagccccgcccgcggagaggttccata

SEQ ID NO: 49280 - DNA, 122 bp, Homo sapiens
tcctctaagtcttgagcccgcagttcctgagagaagaaccctgaggaacagacgttccctcgcggccctggcacctctaaccccagacatgctgctgctgctgctgcccctgctctggggga

SEQ ID NO: 49281 - DNA, 122 bp, Homo sapiens
gttcctgctctctcagagcctgcagggctgccttctccctgccctgctgcctgggtgaggcgccactgcccatgacagctcattcttgctgcccaggaagaccagcgccagacaagtggaga

SEQ ID NO: 49282 - DNA, 122 bp, Homo sapiens
ttcagcctccagccacagggacaagagctgctggccagggctgcccgcctgggctcactgcgcctgcgcagtgagcagcgcgccccaggtcttctgcccgggcccactgcgcctgcgcacgg

SEQ ID NO: 49283 - DNA, 122 bp, Homo sapiens
cgtacaacttttgagaattttaaatggaaaaaacataacttttctaacttttttccagttcgactaataccagaatgcttagtgtgtgcaaggccctttctgtgctgggcacttcagaggat

SEQ ID NO: 49284 - DNA, 122 bp, Homo sapiens
agaaggacctacccggtcagaccgtccaggctgggcgaggaccaggacggagggctggggcgccctgtgaggtgctgtgtctccctgcctgccaggacgccgagttccccactgaccggcct

SEQ ID NO: 49285 - DNA, 122 bp, Homo sapiens
ttgaggcagaaaatcaatttctaccctggatgacattttcaaaagaagtgtatctggtagcgtggaatcttctatctgacagggcttgtgtcaaaatactaggatgtctagatgagtggccc

SEQ ID NO: 49286 - DNA, 122 bp, Homo sapiens
tggctcctggagactccaggcccacaggctgctccttgataaaccagagaggaaaagtctcggtttcccctgttggatctgatcaatcctagggggaaggaccctggttggcccagcctgga

SEQ ID NO: 49287 - DNA, 122 bp, Homo sapiens
tctttgcacatccacttacggccccggaagaccctgttgacaagctgttgtccctgtgaccgggaaacccagtggcagggactgtggcacagcacagaacagtaccatgcagtttttaaaag

SEQ ID NO: 49288 - DNA, 122 bp, Homo sapiens
tgttcagttaatttactattttgtgggttgacaattcagtcagggctccatttggtggttcggtcttctcatctcagcagattttggctgggaatgttcatgcacttgaggtcagctgcagg

SEQ ID NO: 49289 - DNA, 122 bp, Homo sapiens
cacttacgaagagtgaacacaactgcagcgcattcaacgcagctgatccaaaaaggacttcgaagcctgaattcccttcccctgtgactaaatggcagtccagggctgctaaatgtcttcaa

SEQ ID NO: 49290 - DNA, 122 bp, Homo sapiens
cctcacccctgggagagtcaacagagccagagatgcccgggccaccccgccctcctcggccgcctgctgcaccgctgccagcctgggtcctccgaatgtaccaggtcccagaagccccgcca

SEQ ID NO: 49291 - DNA, 122 bp, Homo sapiens
tgatattctatcatatgtaaacagttatggtctgatacctgcttattctcctctcatttccgtaagaaactgactggagttcatttaggcgcctttccagggcccactgaccccaggaggaa

SEQ ID NO: 49292 - DNA, 122 bp, Homo sapiens
tgtgggcgctccaggtctgcagtttgtacctggacaccgttgccaatctaagtgccaatccgagccgcctgcggatcaggctcgcagacgctcgctcgctcttccctgacgcagcctcagcg

SEQ ID NO: 49293 - DNA, 122 bp, Homo sapiens
cagggagccgtttgcagcttttcaccagtggccggtgtctctgtgttaccaaccaaacgacgctgcaagactagtgactaacgcacgtctgcatgattcaacttcactaaaattccctctgc

SEQ ID NO: 49294 - DNA, 122 bp, Homo sapiens
ctgctcctgcgcctccgggcttcccaaaaatccagacgcaaactgcgcggcctctgcgttcgcttcccggttcaagttacccagtaaagaggaacctcaaacgctctgccctcggggcccag

SEQ ID NO: 49295 - DNA, 122 bp, Homo sapiens
aagctgagctcctgaagaaacttggacctgtctccttgaccacgcctttagtacgtctgccggcccgagagtcctcttttacagtaatgttgaccatattcctaactaaagcaagacctgac

SEQ ID NO: 49296 - DNA, 122 bp, Homo sapiens
ttctcatctctccagaacattcctgagagtctgagaagacacagcagcctggagctaggccggggaacccaggagggttaccccgggggcaggcccacctgtgcagtcaacaccaaggcaga

SEQ ID NO: 49297 - DNA, 122 bp, Homo sapiens
tcatctctttcttcacattttgacttggtggttctgtaagtatatttataggtgacttctcgagaaacctgcctagccaaggcaaagagcattatccttcacacagagttgagcagccgctt

SEQ ID NO: 49298 - DNA, 122 bp, Homo sapiens
aattaaaccatctacttgaggctaagtcgagctaacctttgcccctgagggctgtgtctgcgttaacatcgccagcaaacagttgtataaaccaccgtgcaaatttcgttccaggacacatt

SEQ ID NO: 49299 - DNA, 122 bp, Homo sapiens
tgaggctgatgatgctgtgagcaaaagcggctccagagagtaacgtggccatgcccgggccgtgcccacgtcctccttccaccctaaagagcccggacactgccatgggttggccccactgg

SEQ ID NO: 49300 - DNA, 122 bp, Homo sapiens
ggaacaaccagcctcggatgacgacccttgggtcaccggtctccccacctgtgcggcaggcgccttcacgtttcattattaaacaatggggagaaatccatgtttactgtcctttttaagga

SEQ ID NO: 49301 - DNA, 122 bp, Homo sapiens
cctccaatctaggaaagcttctattgtccttccacttcaattcatttattttgataaggacgggacaaaccctatgttttagaaatatttgttaaacatacatagcacatgacggggagaat

SEQ ID NO: 49302 - DNA, 122 bp, Homo sapiens
ggctccaggccatgtgtgacacgggagtttaccccatcccagtttccagtggagaagcatcgttctcgtccacccccgtcatgctcttttccaccttctccaggggaagggatattttcagt

SEQ ID NO: 49303 - DNA, 122 bp, Homo sapiens
aaaaagggctcagtaaattcaagatatttgatttgggtgtcactggtcaactcggtgagacgtttcaggagagccataaaagtaaaaatatttcatgaattaaataattaatggatcattag

SEQ ID NO: 49304 - DNA, 122 bp, Homo sapiens
taagcaaaaaaaaaaaaaaaaaccgcattcgctggtacccagatttctacaggagttaaacgtctcctgagcagctaaagcagagcttactagtaagaaacttgcaatgactaaggaacttg

SEQ ID NO: 49305 - DNA, 122 bp, Homo sapiens
tggctggtcccaattccctcactcctggagatatctttaagaattacagtgccggccgggcgcagtggctcacgcctgtaatcccagcactttgggaggccgaggtaggcggatcacgaggt

SEQ ID NO: 49306 - DNA, 122 bp, Homo sapiens
ttgtggtcgggttctgaggtggtctggtctttctgaggtacagcgtagttttgtcctccgcgaagtccctcaggctcagagcacagccgtgtaattgtctgcgtctctcccgcgctcaatca

SEQ ID NO: 49307 - DNA, 122 bp, Homo sapiens
gtgctgcttggaaatggtccaccaggtgcagcagtagctgcaagaaaggaacaggaagaacggtgtgttcaaagctctaccatttgtgtagaaaagggagaaaaacacgtttcctttgtgtg

SEQ ID NO: 49308 - DNA, 122 bp, Homo sapiens
cgtcccgggcttcagaatccactgggcttggttcatcatggtttaaggtgaaattcggggcgaaggaggcaggacaggtaggcaggaggaggcggccggtcccgacaggtgcgtgcgcgagg

SEQ ID NO: 49309 - DNA, 122 bp, Homo sapiens
cctggcaccctcacactgtgggagtggcttgggcaggtcctcaaggcctgtccccccacccgaccccaccccaccgcctcccatctgccctgtggcagcttatcgggtaaccagagccggca

SEQ ID NO: 49310 - DNA, 122 bp, Homo sapiens
gagggctctgcactaatgaatagattaatccatttatggattactggattaatagtttaacgggttaatgaattaccacgggactgggacttctagctttgtaagaagaggaagagagaccc

SEQ ID NO: 49311 - DNA, 122 bp, Homo sapiens
cttactcatttttttttttcccctcactgtgctggggtggagaaccgggaccggcaccttcgagaggccaggcctctgctgcagcccctcttctccagctccgctcggcactcagcctcccc

SEQ ID NO: 49312 - DNA, 122 bp, Homo sapiens
attctcttcaagcttgtctcctgttggtccaagggtggccacaactgttgcagatattaccgtctataaacgttgcatccaagggcagaaaagggctcctattccttgggggtctctttagg

SEQ ID NO: 49313 - DNA, 122 bp, Homo sapiens
ctcgcgatccgggcacgcctttcccgaatgttggaagctgagctgcgtgcagccggggagcgagaccttgagaggtcatgaagttggtcatttaggccgacagctaaagaactgttctgctc

SEQ ID NO: 49314 - DNA, 122 bp, Homo sapiens
ctgggacctccctgcaggccgccgcagaggttcgggcccctgagcccatctcgggcctcccgtaatgtctagatagtcacttttaaggccgtcacccacactcctggaatatctccgggtac

SEQ ID NO: 49315 - DNA, 122 bp, Homo sapiens
ctttccttttgctgtttgtgtgggaattatttgttctttccaggtgttctacatacggctcgggagccagcaagtgcgtatgaagccccttcacatggctagtggcatcctaaggacccggc

SEQ ID NO: 49316 - DNA, 122 bp, Homo sapiens
tctgaaacaaattcaaatggatattttgcaggccactcaatctcaaagctaaaacgaatccgccacccccaccatagctttttctcctaatttttctatcttgacaatgggaccgccatcca

SEQ ID NO: 49317 - DNA, 122 bp, Homo sapiens
agaagcatgcggcagctcttgtcgctgccatacagcttgaccttggcaatggccacgtggcgctcaatggcgatggccaggaggctgaagacagaggccgagagcgtgatgaaggcagagcc

SEQ ID NO: 49318 - DNA, 122 bp, Homo sapiens
gacttacggcaacaagtgttgtctcactatggtgatctctaagatccacatcactggatgcgtagtcatcccagtcatggtaccctgtggaggaatgctggaagaacataaagagcagttca

SEQ ID NO: 49319 - DNA, 122 bp, Homo sapiens
gccgtgcactctcactccagatcaccctcactgccgtgcactctcactccagatcaccctcgctgccgtgcactcactccagatcaccctcactgccgtgcactctccagatcaccctcact

SEQ ID NO: 49320 - DNA, 122 bp, Homo sapiens
tacctcatatttgttatccgaaaaaaacaaacagcgttcattcacctgtcaagcaacaaacgactctccacgagaatgcagattttgatcaataggagttttattacttggctcaagtaagg

SEQ ID NO: 49321 - DNA, 122 bp, Homo sapiens
cacccagcttggccccgagccacgcctcccaccccgcccccacactcccgagccccgcctcgtctccacactccggcggcgcctccctacccggccccgcctccgcgctcgggctgccagcc

SEQ ID NO: 49322 - DNA, 122 bp, Homo sapiens
tcctcgtccagctccctggcgtcctccatgctgttgtggcggacctgctcggggacggtgcgtggcagtgggagacccagcccccggtgcacggcgtccacggcctgcgggctcacgtagta

SEQ ID NO: 49323 - DNA, 122 bp, Homo sapiens
tggacatcataatgtgcaaaacatcgctgacaattccaagggcgaatgcccctctccagtcggctctcctccagctcagacgtgaacttgaaagtttcgtgctcacttttaacagttcgaag

SEQ ID NO: 49324 - DNA, 122 bp, Homo sapiens
cgttttctggcttgtaccagtcctaactaaggagtcagatctcctgaatactatttctgccgctgccacttgcctggtgactttggacaagttcattctctaacctgaacctcctctggcta

SEQ ID NO: 49325 - DNA, 122 bp, Homo sapiens
gtaacagaggagtgaggtaaggccccagggaactatccccagtggatccctgctgccctgcggtgagagggggtctagctcctgcactaagagcctgggaagaaaacacttcccgtaatggg

SEQ ID NO: 49326 - DNA, 122 bp, Homo sapiens
aaacattaagtcattatcatgtcatttctctgctcaaaaccctgccatggctcttcatttcggtcatagtaaaagccaaagtctgcaccaggcccacaaagacctatgcgatttgcccttct

SEQ ID NO: 49327 - DNA, 122 bp, Homo sapiens
caggaaagtggctgcatgcagcctggagtgccagcccagccaggctggaaaggtgaggcccgagctcaggccgaggcagtggggctggagagaagcgcagacaatgcgaatctgttgattta

SEQ ID NO: 49328 - DNA, 122 bp, Homo sapiens
gtgaagtggatcaatgcagattggatttcttgaaataccaccaaaaagcaactcaacacacgccagggaagagaaaccaagggaggcttggaaatttgtcacccagcataagaacacagcac

SEQ ID NO: 49329 - DNA, 122 bp, Homo sapiens
aaggtactttccagaccttagcaaggaagatgacagctctgatgagaaatctccctatgccgaggcttcagaagcagcccttccagcagagaaagtattcattagaaaaagaaggcaaagtg

SEQ ID NO: 49330 - DNA, 122 bp, Homo sapiens
ggctggaatcagcagttatgcagaaaacgcaggccaggttactggactggaacatgcgggcgcttaagtgatgaacttggtgggaagtttggagagcagaaaatgaacgagtgagacaagtc

SEQ ID NO: 49331 - DNA, 122 bp, Homo sapiens
gcgtcctccgtagattggcaggtcactgggacggccagcgcgtgcgcactggcctgtcagcggccggtggaccatggaggccgcaaggcccttcgcccgggagtggagggcccagtccctac

SEQ ID NO: 49332 - DNA, 122 bp, Homo sapiens
gcaggtggagccatgagatcgtggaggattgcgggtgtctcctcaaccagggatgctctccgagtataagaagaatcaccaggcagggaccaagctcaggaagaggggtgcatgaaaaccat

SEQ ID NO: 49333 - DNA, 122 bp, Homo sapiens
ttataaaatacacataacataaaacttgtcattttaaccatttctaaatgcacagctcagcggcattaagcaaccaccaccaccaccatctccagaattttctcatcttccgaaactgaaac

SEQ ID NO: 49334 - DNA, 122 bp, Homo sapiens
ggcacgcgtccttttcaccaagtctcctgaacacacaaccgggtgccactggaagtgattcgcagcgcacctgccctttgttaatacaacatcaccttgctccatatcctaccaaagatccc

SEQ ID NO: 49335 - DNA, 122 bp, Homo sapiens
ccagaagctggaggaagcaaggaaaaagctcccctagaggctttggagggagcatggccccgtgaacaccttcattttggacttcttgactccagaactgtgaaagaatttgttattttaag

SEQ ID NO: 49336 - DNA, 122 bp, Homo sapiens
aacttgttgctttttgatatgattttcttgcctgagtgttggccggagggactgctggcccggcctcccttccgtccaggcagccgtgctgcagacagacctagtgccgagggatggacagg

SEQ ID NO: 49337 - DNA, 122 bp, Homo sapiens
taccacctacagtgcgatgctttgccacactgcaaaatgattaaatcaagctgacacacacgtccgtcatctcacatacttatgcttttgtagtgagaacatggaagatctaatcttagcaa

SEQ ID NO: 49338 - DNA, 122 bp, Homo sapiens
gcactcaacagactcagtaactagtcaaggcaggcagctgctctgatcagggctggggcccgggccaggcccaggaagggacttctcaggatacgcctcccataaaggggtcaccagcaaca

SEQ ID NO: 49339 - DNA, 122 bp, Homo sapiens
tcatcttcaaggccctcatcattttgcaaaacctcttgaaccaccactgcactctacgttcgttagcagctccgaggccaaatgcatcgttgatgtttcaagtcgtctcagctactttatga

SEQ ID NO: 49340 - DNA, 122 bp, Homo sapiens
taagcatcaaggtctttggccaatgacaggggtgatgctgatggaccctttccaggccaccggtggaagaggggttgagggtcggccttgggttgtttattagggctggtattagggctggt

SEQ ID NO: 49341 - DNA, 122 bp, Homo sapiens
atggattaatcaagggccaccagttgcattactgattactaactttgcagaaatgaaacacggtatgttgggtcaaggttcagtgaggctggttttcataacattccaggcaataaacaggc

SEQ ID NO: 49342 - DNA, 122 bp, Homo sapiens
gagccgccgcccgaaaggccgggccgtcgtcttaggaggagtcgccgccgccgccacctccgccatggagctgatcaccattctcgagaagaccgtgtctcccggtaggacgcaggagccgg

SEQ ID NO: 49343 - DNA, 122 bp, Homo sapiens
ctgccaggaactcccatccccagcagggatacagagaaataacagcaagacgccattcgccgacgctctcctcatcaggccaactctctaacttggagatgaggccctcccgactttctttc

SEQ ID NO: 49344 - DNA, 122 bp, Homo sapiens
tcactgccactgctgctattgttggtatatcagctttttatttagtacaaactatatccccgaaattgagctaggcagtttcttgtttaagttttacagaccacgctgtgaggtaagtactg

SEQ ID NO: 49345 - DNA, 122 bp, Homo sapiens
caggaggacaggggattgatcttccgagggaggtcccctggtctgattcatggctccaaacgtcaagcccatccatgtgaagagaccaccaacaggctttgttgagcaacaaggctgtttat

SEQ ID NO: 49346 - DNA, 122 bp, Homo sapiens
aagaatggactgctgttgaccacagggagtagtaagactaactttaagaagcttgaacagcgtgcagtcactcccctactgctgttgttttgtagagcataagaagtgggtggagttgtttc

SEQ ID NO: 49347 - DNA, 122 bp, Homo sapiens
acgcgccggccggcggcagaaggcaggcggaggcgggcggcggcaggcgggcagcggtggcggcggcggcggcggggcctgggtgctcgctcgcagctctccctcggttagcggcggcggca

SEQ ID NO: 49348 - DNA, 122 bp, Homo sapiens
cactcacacccacaccacaccctccatgcctcctggccgccacctgtccccacagccccccggcctctcagagccaccctgcccatgtcccccacagcggcgtggcatgaaggggaaggccc

SEQ ID NO: 49349 - DNA, 122 bp, Homo sapiens
gagaccaggtcccaaagggagatgagacttaccaggtgtcacccagcagttctgggactgcgtgaggctcctgttctggttcccagccatgagctcagcttttacctcccctgggaggttct

SEQ ID NO: 49350 - DNA, 122 bp, Homo sapiens
ccgatgtcacaggatagaggatgagtctcccacggtgtcctcaatagtagtagccagagccgcatccatagccacagccacagaagaagcgggagccgtagccatgaccatagccacagcag

SEQ ID NO: 49351 - DNA, 122 bp, Homo sapiens
agaagctccgacccgcactcccccactctctctctgcagaccctgttctggcctttcccccgtcagggacatacctggacacccctgtccctggaagccacattctgagcctcaccctttaa

SEQ ID NO: 49352 - DNA, 122 bp, Homo sapiens
ccttctcttgcacccccaaagtaacgcttcaaaattctgtagtaaagagccccatctaagcggccggacaccacagtaaccgtatgctggttttgtttctctctccccaccccagtccttcc

SEQ ID NO: 49353 - DNA, 122 bp, Homo sapiens
tctgaagataatcctagagaggcagccattaaaggaggatgggttttggaagtagacacacgtgggttctaatcctaacactgcaactcactcactagttgtgatgttgggcaagctgctta

SEQ ID NO: 49354 - DNA, 122 bp, Homo sapiens
tgaactcctgggctcaagccatccttttgcctcagcctcccaaagtgctgggattacaggcgtgagacaccaggcccggcctgtatttatttttatgggtacctgttagttatgccaatgga

SEQ ID NO: 49355 - DNA, 122 bp, Homo sapiens
cgttctcgtcagcgggcggtggggacgcggggtcttggaattgggaatcacgcttgagggcgtccatgcggaacgtgcagcttacctcagcttgcttgcagttacccagtttccacgctgcc

SEQ ID NO: 49356 - DNA, 122 bp, Homo sapiens
ctctctaccaggcagtagctagttcattctctgggcactcagccacatttcagagagagccgtactggtgatggctgggacagcacagacacacaggacagcacagacacatagccccctca

SEQ ID NO: 49357 - DNA, 122 bp, Homo sapiens
tggtatggtttggcattaatgaattgtgggtccattgaaaagaaatctcctcttgtttctcgtgttatggacagttcaaggtttgccttagaactaacttcaaggaaaagtagcagaatcgt

SEQ ID NO: 49358 - DNA, 122 bp, Homo sapiens
ggccccccggatgctgagggcaacttcccagcctggtcccagttggcctggcctgcttgtcgctgggatctgaatgaccaaaccacttcccaccatggctcctggaaggactaaatgaagtc

SEQ ID NO: 49359 - DNA, 122 bp, Homo sapiens
actcacatgcagaaaacctcgagtctcatcttcctgttcaggtcccttgccagccggagccgctctggagcctggctggactccagctcccatgtgcaagaggactcagccgggacgctgcc

SEQ ID NO: 49360 - DNA, 122 bp, Homo sapiens
cggactgagaaatcgcagaggccgtgggtaaggattcaagcttgaggaaacactgggggccgggaggagggctattgtaaagcatttcttaattaatttcaagtcctccatttttttacagg

SEQ ID NO: 49361 - DNA, 122 bp, Homo sapiens
ctgaaggcgaaggactctggcgggcaagggaggcacagggccccctccggggtcttctgacggcagggtccggcagcccccggtccttctagttgtgatgtccccccacgccccggttctgg

SEQ ID NO: 49362 - DNA, 122 bp, Homo sapiens
tggagtatggtgttctgtatattgatgtgtgttgatggatttttctttcctcccggcacccggcttcggatggtctgggagggtgtgatggagtgcagtgttctgtatgttgatgtgtgttg

SEQ ID NO: 49363 - DNA, 122 bp, Homo sapiens
tctccctgtgctggcttgggtccctgtgcccatggggacataggtgtgtccctggagggtcgcttaccatttcccggcctcaggattatcaatgcagagaaatctgaattcaatgaggatca

SEQ ID NO: 49364 - DNA, 122 bp, Homo sapiens
gaagaacaaagcaggagtttgctctttaacaccttagggcatcaccaaggggtatcccagcgagaacagtctggtctggaaattgctttagaacagcaattggggctggatacaggaagtgt

SEQ ID NO: 49365 - DNA, 122 bp, Homo sapiens
gggggaaggggagaaagctggggtggggaaagaaaaaatgtgattaaattttaggaaaaacgtcctgaaaggcaaactgtgcaaagatggaagggacaagctccctgtcagtatcaggaggc

SEQ ID NO: 49366 - DNA, 122 bp, Homo sapiens
ggagagatgggacagctgggagctgctgaactttggaacaaacttggcttggagttgggtcgagcctctgcaatgcacacttttttctttccctctcttttcgcccttaaaaacctagactt

SEQ ID NO: 49367 - DNA, 122 bp, Homo sapiens
tgagaaagccgggattgcctcctggtgtcaaagctcggaactgcagcaggatcctgggggcggggcttgtgttcagcagcactcgccacgcgcccagccctcagccctcgtctcgccttctg

SEQ ID NO: 49368 - DNA, 122 bp, Homo sapiens
tttgggagagggcagcccctggttcagcgtggcgaggctgcgcttgctctcccgggcgggcgtccacaccctcctcgccgagatggagaagcccaaacccctgcagcgctcccccatcacgt

SEQ ID NO: 49369 - DNA, 122 bp, Homo sapiens
gcagccaagacggcagctgcgggccggcggctggctcctcagcccccagccctgcggggccgagcggcgaggaccccttcaccacctgcgtatcccactccatggaggtcgtaaaagaagct

SEQ ID NO: 49370 - DNA, 122 bp, Homo sapiens
ccctgttcgccccgcgccaccggcccgcgccccgccatggaggacctgggtgagtggggccggatccccgggtccgtggcccctcaccgctgcccagagctgcctccccgccgtcgctctcc

SEQ ID NO: 49371 - DNA, 122 bp, Homo sapiens
gcggccgcgcgagccttggagcagggcgcggccattggtgacgcacgccggggagcacggcgcccacgtttccaccattagcgaggcctcacacccggcgctccaagttcggggctggaggc

SEQ ID NO: 49372 - DNA, 122 bp, Homo sapiens
aatttagatttggggtagaatttaaactcttgtccatcaacatgtaatgaatgaatgtgacgcttgcataatagcattttttggagcactgttagagcaagggagtcttcgcaatgctaaag

SEQ ID NO: 49373 - DNA, 122 bp, Homo sapiens
agggcgttctaggcagagagacctcggggacaaaggccttgagggaggccccacccccaccggtggctcagctgccacccaggcttctgcgaccatgaatgggtctttcatgtcctggaccg

SEQ ID NO: 49374 - DNA, 122 bp, Homo sapiens
ctgtgtcctccaatggagggagacacaaaacactcaaaataatccacgcagaagagtgtccgatgtggtgatggatgcggagacagtgaaacctgaataatgtgatagagagtgacgggcag

SEQ ID NO: 49375 - DNA, 122 bp, Homo sapiens
atttgccattctagaaatgcaaattaatctatagttcccaaaagcagggcagtggttgcccgggtgagacagagaaggagagatggactttaaagggcacttggaaacttctgagggtgatg

SEQ ID NO: 49376 - DNA, 122 bp, Homo sapiens
gcggcccgaccgcacaccacacctgccgtccatcacgtctgacagtgacggtgatggatgcgtctttggaggctggtggccatttttaacaaccagttaccaatcactgacaggtacatgct

SEQ ID NO: 49377 - DNA, 122 bp, Homo sapiens
acagtgtccatcctcaccttcaggctcaagagttgtgacacagctcaggcacacagaaggcggttctactgttaaagcctcatcaggaagggcatttctctgcctctctggtcattcctttc

SEQ ID NO: 49378 - DNA, 122 bp, Homo sapiens
cgccgcgcgctcgggctgtttcttaacttgtgacttagctcctgggcggcagaaagtgcgcggacggcgttccggggccggacgttcccccgctggcaccccaagccgcgctccgcagccgc

SEQ ID NO: 49379 - DNA, 122 bp, Homo sapiens
gggagcagccccgggcccgggtggagggccgtactgtcttggcattctttcctcggcaagcgagtgagttcagtcggctttttaatcagcaagacctttgatccagcaggaatgagtaatta

SEQ ID NO: 49380 - DNA, 122 bp, Homo sapiens
gggggactcttcggaaactccgagcctcagagaaatgtgagtcggagggttggactaggccggatccggcgttagggcgggggcccgcaggcggcccgcgcgggcgggaaccggggcggcag

SEQ ID NO: 49381 - DNA, 122 bp, Homo sapiens
aggtggttaagttttggatttttgttccacaagtctgacaaggcacaaaaacacaaaacacgaaaattaaaaagcaatctaataaataaaaatgcaaaaatcatagtctataggctgggcgc

SEQ ID NO: 49382 - DNA, 122 bp, Homo sapiens
gtcctttgttacagcagctgtgggaacttcagacttactctttctagcaatggaccgcagcgacccacgggagtcctcatcctcacacagccgcccagccagcagtcacgttccaccttttt

SEQ ID NO: 49383 - DNA, 122 bp, Homo sapiens
catactagatgcaatcacactggagaccggggtccacggtcgagaacagagaagcgctttcgcatttcccgctgttccgcagagctgaaagactgaggccagacacctcctcagggcttatc

SEQ ID NO: 49384 - DNA, 122 bp, Homo sapiens
cccaagtgtctggcgctgcgctcggggcggccgatcgccgcagactgccggggtgggggtcgacctagctatctcacgcccctcctgatgcggagaagggagaccaggggggcaggcaagcc

SEQ ID NO: 49385 - DNA, 122 bp, Homo sapiens
catacaggcacctggccccctggacacagaggctcccgaccccctagacatacaggctcccggccccctggacacacaggcccctgaccccctggacacacaggcccctgaccccctggaca

SEQ ID NO: 49386 - DNA, 122 bp, Homo sapiens
ctgtagctcatttctgtttgtgattggaccggccctctctgcttcccaagtccatgggcccgtcatgggtgggtgccttaatcctttccacctcggcgcgaccggctcccagccttgggcct

SEQ ID NO: 49387 - DNA, 122 bp, Homo sapiens
tccactctaactcctgtttcccaagcctgtcagtaccccattttctaggcactcggggtccgggtctgcttatcactgtgctgagttgggaataaggatcctcctttgagatttccagggtc

SEQ ID NO: 49388 - DNA, 122 bp, Homo sapiens
gggtagcgcgcgcgcgcacacacacacacacacacacacacacacacacacacacacagtcgagatcacaagctcactcaggggcttaagcagaatcacctccagcgaggagagtgcaaacc

SEQ ID NO: 49389 - DNA, 122 bp, Homo sapiens
aaactgatgcctagagaggtttcatgagttgtctaagatcacactgccagtgatttagagcgaggtggtagaggaacaaaaagtaaagaactcctcccaagctgtcctagcactaagatttt

SEQ ID NO: 49390 - DNA, 122 bp, Homo sapiens
cggcggtttaaaggaggtggcgggaagcctgtgtgtgcttcaaatcgtcaccctcatggtcgctccggtaagtgctgcggggcagcattttctctgaggaggagcggggacgggcgagactg

SEQ ID NO: 49391 - DNA, 122 bp, Homo sapiens
ggggctatggtgaagcccctgtggaggagctggtgagcttcacccaagtccatacataagcgctctcctgagccacccctctgggagacatccttaagtgtacacagacaatagatacacct

SEQ ID NO: 49392 - DNA, 122 bp, Homo sapiens
taatagatccctccagcaaacgacggtgccttaaatccagtctcttgctcgttataataacgaaagctctaaaagttaggcacctccaaaggtacctacttccctgttcaatgtgaattaat

SEQ ID NO: 49393 - DNA, 122 bp, Homo sapiens
ccatctccccagttcgagtgattctcctgcctcagcctcctgagtagctgggattacaggcgtgtaccaccatacccagctgattttttgtatttttagtgcgtacggggtttaatcatgtt

SEQ ID NO: 49394 - DNA, 122 bp, Homo sapiens
ttgcctccacctcttggcgaatgtgaacaaggccgctatgaagatggtgttgagggatctcgtcaagtaaataaaagtggaattgctaggttaggttctgtgtgtaattttttttttttaag

SEQ ID NO: 49395 - DNA, 122 bp, Homo sapiens
ccgagacagggggcttgtttttcctccctgccttgggttcataattccatcggtgttagacgtgctgctctcttggcactctcctcggatgtaggttctgcccagacttcaaccccgggact

SEQ ID NO: 49396 - DNA, 122 bp, Homo sapiens
atagaaggtggcatttttcgctttccccttcgaagactctccccagagctgccagatgaacgcccacgccaccttctcccaccaaaggtggatccagctaacaggagactggatcgcgacca

SEQ ID NO: 49397 - DNA, 122 bp, Homo sapiens
ctttatgaaagataaacacagatgtcaagagtagcacagccctgttatgaaacacctggccggcaggtatcagaggatgacggggcgtttctacaggggcctatgctgtcttcactgttcct

SEQ ID NO: 49398 - DNA, 122 bp, Homo sapiens
cctcacctctgttactccagtagcacttctacaactcagatgttgccttaccatattctacgtaatgcacaactacacgaaagataaatctgtgttttatacagagatgatgcaactacttc

SEQ ID NO: 49399 - DNA, 122 bp, Homo sapiens
ggttgggaaggcgtctgaggctccctgtctcaaaggtgtgccatggggctgttctgtccccggggcaggtcccctcacccctgagcctcaggtcctgttgagtgtgggttctaatcccacag

SEQ ID NO: 49400 - DNA, 122 bp, Homo sapiens
cccagtcagctggtttggcaaagtttctggatgattacggaataacatgtgtccccaacccgcagagcaggttgtgggggcaatgttgcattgaccagcgtcagagaacacacatcagaggc

SEQ ID NO: 49401 - DNA, 122 bp, Homo sapiens
agggccttgaaacaacgaaggctcaaaccagtgggcacaaaggctaccggaacagtagtacgcgctgagagaagggacactattcccttcacctaccaatcgctgctggcccgggcgccgct

SEQ ID NO: 49402 - DNA, 122 bp, Homo sapiens
ttcccgtctgcggacggcggccagtcaccccgatggctcccgaggcctcacaccagccctcggggtccccaacacccctaaccatctcccacgtgcacaggggcagacccgccccggacttt

SEQ ID NO: 49403 - DNA, 122 bp, Homo sapiens
agtaaaacactgactaagaagtgtcgctttgatattgaacccttccacaaccacaaataccgagagcttgccatgttctaggcactgagcaaggcgcttgaagaacgtatcgttgttatttc

SEQ ID NO: 49404 - DNA, 122 bp, Homo sapiens
gctgcgcgtcctccaggcgtggtggtggggtcgtgggtcccagcccagtggtccaggtcacgggccgcacggccgcggccgccatcttgcccgcgtccgggctcctgcggcgggcggggcgg

SEQ ID NO: 49405 - DNA, 122 bp, Homo sapiens
ccagaccagacagacactgcagagcaccgtgtgacatagactggggagaaaccagaaggtcgggggaagggaaaagcaaagtccagaggcctggacagagtccagaccaacatccttcctgc

SEQ ID NO: 49406 - DNA, 122 bp, Homo sapiens
ccatgaaataagcatttaacctccctgatcacagcctcagtgttcaggcacctgaatcatcgaacaggagtgtgaacacctgtcttagcctccgcaacatcttggctgtgcaggtccaagga

SEQ ID NO: 49407 - DNA, 122 bp, Homo sapiens
ttttgataagacaagttaacaggttcacgtattctcataggttcagtattctttcttcaacggatttttatggagcacattccaagtgttttgctaggcatggggaaagattgaaaggtgaa

SEQ ID NO: 49408 - DNA, 122 bp, Homo sapiens
atcacattttaaccctttcttttgactgaatagggagtattcttatccccttctcagattcggtttcttttcccatactctggaaggagattattagaatgttgcccaggtaaagtccaggt

SEQ ID NO: 49409 - DNA, 122 bp, Homo sapiens
tcccaggcgctcacctccctctgacgcactttaaagagtctccccccttccacctcagggcgagtaatagcgaccaatcatcaagccatttaccaggcttcggaggaagctgtttatgtgat

SEQ ID NO: 49410 - DNA, 122 bp, Homo sapiens
ctgccggggccgacccaagcaacttggattccctctcatgtgttgcatctaccccagggccggcgtgctcgccgcagctcccgccgctgctctccccgcgctctctgccggaactgcagcag

SEQ ID NO: 49411 - DNA, 122 bp, Homo sapiens
atttaaaaaaaaaaaaagttctgcctggccagtggctcacccctgtaatcccagcaagcacgttgggagggagaggtggaagcaggaggatcgcctgagcccaggagtttgagaccagccta

SEQ ID NO: 49412 - DNA, 122 bp, Homo sapiens
cccctgggcctgaactccaagctgggggtcactcagcagggtggggcttggcagagtctccgttacagactggacgtcccgtcccttctgcctgggtggaccagggtgtgaactcggccgtt

SEQ ID NO: 49413 - DNA, 122 bp, Homo sapiens
ggatcctactgccccggggctttacctgccagccacctctgaggtcaggccatcgtgagacgacagccggcacccccaggcccactgcccctgacatggctctaagtgactattcagggtac

SEQ ID NO: 49414 - DNA, 122 bp, Homo sapiens
tgctgtgtccccaaaggaattctttccttctctgctattttttcatgtcaaggacagaatcggatgatatgtgatagctggttgtgctctgactcaagcacttaacagggataacagggatg

SEQ ID NO: 49415 - DNA, 122 bp, Homo sapiens
cacaagcattcattttgggaggggtctcctttctctcctaggggattccctgctccctcacgtaagtgtattcctagcaggaaatttcttgggaggtaggggaatgtgtgttgctatcctta

SEQ ID NO: 49416 - DNA, 122 bp, Homo sapiens
ttaagagctgtaacactcaccgcgaaggtccgcagcgtctctcctgagctagtgtgaccacgaaccaaccagaaggaacaaactccgaacacgccgcctttaagaactgtaatactcaccgc

SEQ ID NO: 49417 - DNA, 122 bp, Homo sapiens
atttccactccatttccactatgttggaactgacttctgctttcctacttagccattaggcgacttagttgcctctaggcaagtaacttctctgaaatgtttcatttttcatgaagtttaaa

SEQ ID NO: 49418 - DNA, 122 bp, Homo sapiens
atcaggggccccagcttgtggggtaacttgagggcgatcatctcatccagttgttgactccgcgggcagccacctttcgggaggcagttctgcgcctcaccacagctttgttaaggcagcaa

SEQ ID NO: 49419 - DNA, 122 bp, Homo sapiens
caacatcgtcaaggatctgggactggagccccaggagttggcggagcacggagtccgcatcgtctccagaggtaggatgcagcttttctctctgaatccgcgaaacggcagcttggtcaccg

SEQ ID NO: 49420 - DNA, 122 bp, Homo sapiens
agagacagaaaatggttagtcaccatctaggacagactacaattccagatcattgcaggacgtgcccactcaaatggatgattattgagagctggccacctgaagtgttttacacaggcagt

SEQ ID NO: 49421 - DNA, 122 bp, Homo sapiens
gcactcttacaactaatttattgctttcaaggtctcaaaatatgcataatttcaataacacgtctcacttattaaatggcctacaagattaataggacatgtaatattatcacagcatctat

SEQ ID NO: 49422 - DNA, 122 bp, Homo sapiens
tggacagaatccctgtttgccagtgggtaaactgaggcacagggagggtcacaaatggcccgaggtctcatctcacaggaggtgtgggaggaagaaggggtcaaacgaactccggccctgac

SEQ ID NO: 49423 - DNA, 122 bp, Homo sapiens
gttgctgtcgccctgggagcagggcacgctcttgaccatccactcgcagatctgcgacagcgcgagccgcttctccgccgagctctcgtcggccctggtgctgaggtcggcgtgggacaggc

SEQ ID NO: 49424 - DNA, 122 bp, Homo sapiens
atcctcccacctcagcctcctgaggagctgagattacaagtgcgtgcatgccaccacgcccggctaagttttaagatttttggtagagacaggttttccccatgttgcccaggctggtgttg

SEQ ID NO: 49425 - DNA, 122 bp, Homo sapiens
tgcctccacgcaggtgaggtagtagaccaggggagacgggttcttttcaacatgcttggtcggcagttttctgcagggaaggttatagcgtgtgagttacaaagccctcctgctgcacaggt

SEQ ID NO: 49426 - DNA, 122 bp, Homo sapiens
ttattcgatcagactttagggtctgagaggacccaggcggggtcttaatgggttcgttttcgcattccatccctgatactcaggcaccagtttctcaatttctttaacgtttaacttatgca

SEQ ID NO: 49427 - DNA, 122 bp, Homo sapiens
cgctgggcgcggggctggcgggaggcggcggtggcggcccggcgcgaaggggttaagcggcgcaccgccccctcggcggccgggtgtaaacagaggagcctcagcctatcatgtctggccgc

SEQ ID NO: 49428 - DNA, 122 bp, Homo sapiens
cctgatctgcgcacactcatctgatctgtgtttatcattcttctagggggtggtgttgggcgctctcattttgcttcttttgaatcttatgccgtggaacttcctgcgagtcatgtggtttg

SEQ ID NO: 49429 - DNA, 122 bp, Homo sapiens
ccgggcctccatcagggaacacatgaagtgtgtgtgtgtaccacagcgtgtggcctccgtcggggaacacgtgaagtgcgtgtgtgtaccacagtgtgtggcctccatctgggaacacgtga

SEQ ID NO: 49430 - DNA, 122 bp, Homo sapiens
tttctgacgtgttacgtcacagtgggcggaagtcgcggccgctgttttgaaatcgggccgcggggggtctctcaagctggttccaacgctgaggccccacagcctcccaattccgggcagac

SEQ ID NO: 49431 - DNA, 122 bp, Homo sapiens
accccccgcgcccgctagcgagcgcgacccccagcccccttctcacttcatggcgccggccggactgtgcagcggggtcgacccgcctccctcatgaatattcagcgagaggccgggtcgtg

SEQ ID NO: 49432 - DNA, 122 bp, Homo sapiens
ctgactcgttttcctgtttccgaaagccctcctacttactgtcaagtgaacaaagttaggcgcccacgtgatcctccgagccaatggccgccccgcctgcgattcccggataaggaaatctg

SEQ ID NO: 49433 - DNA, 122 bp, Homo sapiens
cacagaggcaggggtgggtccgtgggtgtggcaatgaaccacgtgtacccacgggactctcgaagtgggggaggggaaggggcgcagcacgccaccctcctttctccgcccctgccctaccc

SEQ ID NO: 49434 - DNA, 122 bp, Homo sapiens
gacggcgtggcctggagggacgcgctgagcccctaatgggtggtgccttcctggtgcggccgcacaggcggggccgggcggaatccaagcacgatgtggacacggagccttgggaatgaaca

SEQ ID NO: 49435 - DNA, 122 bp, Homo sapiens
gcagctttcggtttggagagcccgccctggtttgcaagcacagatacatgtgcccacacccgaacacacgcagacaccgccagagagcgagacagcgagcgggcgcctccgtagcagcggcc

SEQ ID NO: 49436 - DNA, 122 bp, Homo sapiens
gagttcagcactgtcaagcttatgtctgtggcactccttccgtgtgctggggcacagtggcggacaaagctataaggtcaactttgattggctgtataaggctgataaggcctcatagcctt

SEQ ID NO: 49437 - DNA, 122 bp, Homo sapiens
tgaagttggtgagaattcaggtgcctatcggccgggctccacctgtgcaccaggtgtggccgcctcactgtgacttcaaaggtccccggggaggaaggaggctcccagctgcacacaggtga

SEQ ID NO: 49438 - DNA, 122 bp, Homo sapiens
aaaatgtatggacttatttttgctctgtcatgacttgggcagcacttattttactaataacgatttgctgcttattgaactggctgactggtggcaactgagggaggcattaaaagttgctt

SEQ ID NO: 49439 - DNA, 122 bp, Homo sapiens
ctcgatctcctgaccgcatgatccgcccaccttggccttccaaagtgctgtgattacaggcgtgagccaccgctccaggcccgaatcttttagtatgtttaagagctgtaactctggctggg

SEQ ID NO: 49440 - DNA, 122 bp, Homo sapiens
ttataatcaaatgcatgtacggtttcttttacgtgtcttcattgctctcattttttccctcgtttttctttttaaaaatgtaaaaccacatagaaaaacaaacaggataatttctaaaaata

SEQ ID NO: 49441 - DNA, 122 bp, Homo sapiens
ctcggagcctgttaaccagcgcataatgccccatgttaaccatcctgggggatgtcagggcggccacgctgatgcactgcggtcgggcgcagcggcacagccttcagagccgccgccgctcg

SEQ ID NO: 49442 - DNA, 122 bp, Homo sapiens
ctcagccgctgactgtggagtctgcaccctaagcactgccattctcaccagtacctcctacgactctgagttctgtttcttctgatcatatctggccacagcaagtttatggtttccaagaa

SEQ ID NO: 49443 - DNA, 122 bp, Homo sapiens
agccggctagcccctgtaacagggggtgcgcactgcacttggcgagcattgagggagggacgtgggaggaggagatgtaggttgtgggcaaaaccacagtggtttccaggatgttgagtctg

SEQ ID NO: 49444 - DNA, 122 bp, Homo sapiens
aaagcttgagagtcttaaagaaaaatgtaaaacactttaggatatttcagggttatgacacgaaatcctgatttgggtttataatctggctgctgcctgaatctgtagcctgtccctgaatt

SEQ ID NO: 49445 - DNA, 122 bp, Homo sapiens
gtgtgctcgtttggtgcggacctggtacctcttttgtgaagtggcagctgaggagaccggcgctcgccatggccgacgaaaagcccaaccaaggagtcaagtcggagaacaacgatcatact

SEQ ID NO: 49446 - DNA, 122 bp, Homo sapiens
gaaaggcagccggacacggaggtgctcggccccgcaccccagacacaggttgtggaggttcggaggggcttgagtcccgttcgtccctgtccctatcccggggccctcccggacagggccag

SEQ ID NO: 49447 - DNA, 122 bp, Homo sapiens
ttggtttactggagtggggtgagcgtggtgcttctcaaacgaagggaaggaaggtgaatgcggaacaaaagtaaaaaatatcatgtcgccaggtccccagcaataaatcaactgtacaagct

SEQ ID NO: 49448 - DNA, 122 bp, Homo sapiens
tgctgcagacttcatggcaggctgcactgtgtcccctcggctccacggctgccccgggggcgctgctttcggtaggtgccagcccccgtgccagcaggatgggctgacctgtgtaccgcccc

SEQ ID NO: 49449 - DNA, 122 bp, Homo sapiens
cttttgtcccaccaaatgacaagtgtgtattgttacaatacattggtgatcttttgtttgcggcacctaccgaggaagattgcttccagggcaccaaagatctcctttgccttctatggaag

SEQ ID NO: 49450 - DNA, 122 bp, Homo sapiens
ttttaagtactcctgtagacaaaccacaggtaaaacattttgttttggtgtatgtctcaacgagcagtgatttacaaatactatatgtgttcagattccccaggaagccatcacactccttc

SEQ ID NO: 49451 - DNA, 122 bp, Homo sapiens
cacctattcatgaaaaacaggaatacaggggagcttccttgacttgataaacagcatctacggaaaacctgcagctgacactgtacttagctgggagaggctgagtgtgttctctctcaggt

SEQ ID NO: 49452 - DNA, 122 bp, Homo sapiens
aactgggtgaggaaagggacaatggtagcccaggggaagggcatggctggcactgtggtacggggatccagggtgtggacaggccctcccacctggcaagaagcagagacaagccacccaag

SEQ ID NO: 49453 - DNA, 122 bp, Homo sapiens
acttcctacctgtaggatcctctcctgccagcgttggggctccccgtggagtgacccactcgtggggagtggcagagagaaggcccaactagcgaggagcctgaggcggggcctgggtcctg

SEQ ID NO: 49454 - DNA, 122 bp, Homo sapiens
cgccatgcaccatcactggaacgttccaccacggtgacgagagaattagcacagattcttcgggtctcagtgttcctcgggcttagtttctgttcggcttggcttaagtagctattgattac

SEQ ID NO: 49455 - DNA, 122 bp, Homo sapiens
tgggaacagcgagagacaatgtcagtgtccactgggtctgggcttctccctcccaggacccgccaccccgtggaacaggaacatagcaccgagcagggaagagacctggccttgacccggag

SEQ ID NO: 49456 - DNA, 122 bp, Homo sapiens
gaggggacaggagaaggacactttgggctttctgtcctcctcctgtcctgccttagctggcgcccttcactccctgtctcctgcctctgactggaacgagaaaataccttgcacatcccagg

SEQ ID NO: 49457 - DNA, 122 bp, Homo sapiens
gaagggccctctgcctttctttctaaggatgcttgtgattgcattgggtcctactgctaacgccggaaaatctcctatccccaaatctttaatcacatctgcaaagtctttttcttttttcc

SEQ ID NO: 49458 - DNA, 122 bp, Homo sapiens
gcgtggggctgcagctgcactcaccgcatcttgtcgtactcctgggaggtgctggccacacgctcgtcccccacgtagacctcgcagaagggcctgcagccgctcctctgcttgctgaacag

SEQ ID NO: 49459 - DNA, 122 bp, Homo sapiens
cacagcgcggcacctaggcgggccgggtggtagtagccccctgagtcacggctgaggcggcgccaggccagtgctaggccagtggccagcagtaggagcagcagcagcagcaggacaacggt

SEQ ID NO: 49460 - DNA, 122 bp, Homo sapiens
tgtaaactgataccgaactccccgcgtctacgcagtgccgcaggcacagacttatgaattcgggaaatgtggaagtgaaaaggacaaaccctaaactaaaaataattccgtgcgacaaatga

SEQ ID NO: 49461 - DNA, 122 bp, Homo sapiens
gcccagaaggcggagcccagctcgttctgtgccagcgtggtgccctgggaaaccgacgtgcgcctccacctgcaacaggtgcttaagtcgtgctgagtacggccacctgcagggggtcaacc

SEQ ID NO: 49462 - DNA, 122 bp, Homo sapiens
cttgtgcttagttttggatctgtaaacataaatcccaacctggattcttccctgggctgacggagttcagggagaaaggtagcagtagataagtcatatgctggaaaagcttggactctacc

SEQ ID NO: 49463 - DNA, 122 bp, Homo sapiens
gattcggtctcaaaaacaaaacaaaacaaaacaaaacaaaaaaacagctcggcaccaacacgctcaccctcaaatggaccccgggacaagggcacgtctctggtgccacttgcaaccctagc

SEQ ID NO: 49464 - DNA, 122 bp, Homo sapiens
gcagagacacagagctctatgtcagagtcagactttacctgtggtgggaccttggacaaacgggcactaaaaaaagactacctacctagctgttgggaagataaaatgaaagtgtgtgaatc

SEQ ID NO: 49465 - DNA, 122 bp, Homo sapiens
cgagattagacgagcggttctgccccagcctttcctgggtgggtctctaggtatagccggcgttaatcttgccacgtgtcagaagtgtgttaagtgaatccattgcgtggtctcacgtaatt

SEQ ID NO: 49466 - DNA, 122 bp, Homo sapiens
cccggaaatgaaaccaccaggacctctgggatgcctggcggaagagaggcgctctagttccgaatgcggtccggaaaccagaactagagaactctatgacccacctgagcttccgctcccgc

SEQ ID NO: 49467 - DNA, 122 bp, Homo sapiens
tctcctctgtgagctgcctggagtcctccagatcgttggtgttcatcagtttccttttcacgatcatgaggggcacatcagggctgggggtgaggtcaaggtgtgtgactggaggcagggag

SEQ ID NO: 49468 - DNA, 122 bp, Homo sapiens
atgatggcattccacgagattttataaccagagtctagcagtgataaaatgtacaatttacgctctgaatagaaacatgacaccaaagaaagggcattgccatgacatctcaaagcaacagg

SEQ ID NO: 49469 - DNA, 122 bp, Homo sapiens
agccctgccgcccctaaccctgccagagcctccaaaccgcggaaatcaaaccaaattggccgctcaaatctagagaggtttcatccctggggcaagggggagggaacaagcctttttttttt

SEQ ID NO: 49470 - DNA, 122 bp, Homo sapiens
gctgggacgccccggcggagcaggcggcggcggtggcgagttggggagccctaggctcggcgctgccggaggggcccgagccgagccgcctgcgccccggccgggcagcgccgggcccgctt

SEQ ID NO: 49471 - DNA, 122 bp, Homo sapiens
gctcgcggcagcgaacgcaaaatccgatctctctcccgggggagcaaaatggacgaaaggcgaccccccaggcaggggcgctgggtgccttgggaatccgaggaatcccttctctttgccag

SEQ ID NO: 49472 - DNA, 122 bp, Homo sapiens
cgcggtgctgtcccctgtgctccgcgacagggatggagctactcaatcaaatccaaatcccgccgttccttagggcctcggggaatgggatgagaatgaagagacagcggccgagacagtgg

SEQ ID NO: 49473 - DNA, 122 bp, Homo sapiens
cctccacctggcaggtctgagtcatctatgtcgccaggcaggtacctgtgaggggctacgcggtgtgtgctgagtggataaggaaaggcttctcattaactgggtctcccttccaatgtcac

SEQ ID NO: 49474 - DNA, 122 bp, Homo sapiens
ccgctgctgctgtccgaggtgcggctcctgccaggggtggccaatcgcaccggactgcgccgagcacgccccgccccaccgtctcagtccgcccgccccctgccccggaccacgccccaagc

SEQ ID NO: 49475 - DNA, 122 bp, Homo sapiens
aatataccagctttaggtcctaaattaaacctcttcctgctttcccacctgatgaagaaacgtgcctgcagtgtggtgagtctggaccacgcagactcagaacagcactactcacagcaggg

SEQ ID NO: 49476 - DNA, 122 bp, Homo sapiens
ctggaatctcatagcacctctcctgtcacacttcctcacattccagggtacctatgccaccgtctacaaaggcaaaagcaagctcacagacaaccttgtggcactcaaggagatcagactgg

SEQ ID NO: 49477 - DNA, 122 bp, Homo sapiens
tatatgcagcctgctcggctgccccgccccggccctcccagctcggtgcgtcacgccccgcggggcccgcctcccccgcaccggctcccagtcccggcgacctcgtcacccgctgccgggct

SEQ ID NO: 49478 - DNA, 122 bp, Homo sapiens
gaaagtcgctgagtataaaaatcgtcactcctatctggcttaggcagaaggtagggggctcgatgggtacccaggagctctggaggtaggagatgccatctagggaaccccgttctacctga

SEQ ID NO: 49479 - DNA, 122 bp, Homo sapiens
taagagaataaattggtgctatcttaagccactcactttgtgggaatttgttactggaaacgaatacagatggcatccactaacctcacgacagcagaccacaccatcatctccccagcaaa

SEQ ID NO: 49480 - DNA, 122 bp, Homo sapiens
attatatttccaaactgatagattcagcacaatccctatcagattcctaaatgacttcttcgtagaaatttgcaaactaattgtaaatttataaagaaattaaagggacgcagactatgcaa

SEQ ID NO: 49481 - DNA, 122 bp, Homo sapiens
gtgatctcaatgtccccaaacctgtgggaccctgttctacacacctcatttttgttccggcgtttcatcctccttgtgtgattgtactgattttcatgagacacaagttacttctttacatc

SEQ ID NO: 49482 - DNA, 122 bp, Homo sapiens
acagaagcacgcatgcgcacatcgctgtgccggtatcgccaacagatggaagcacgcatgcgcgcaccgctgcgtacctagcactccgacagatgtacgcatgcgcacaacgctctgttctc

SEQ ID NO: 49483 - DNA, 122 bp, Homo sapiens
cccgtgtctccctgcgggatgacctgagagcgtttcctggaagccgcgcagcccctctcccggcctccaccatcggggccgctcaccctctggggactctggccccgggaccccgggatcca

SEQ ID NO: 49484 - DNA, 122 bp, Homo sapiens
ccaaagctaccaccaccaccaccacagcttgaaaatctcccaccacctcctccactgcggcgtgtggagctgctggtggtcctgcgctggtagttgatgatcccagcagagccagagctgaa

SEQ ID NO: 49485 - DNA, 122 bp, Homo sapiens
tcagtgctgtcctgtgatccgagggcaatgctgaatgttcctagagggcctggagggcagcgtccagaacatccaagtatgggggaccaggaaaagggtccagtgtgatcctggccgttggg

SEQ ID NO: 49486 - DNA, 122 bp, Homo sapiens
ggcgatcatgtaccagatggccttcacggtggggctggtggcgcttaccgggctggcctacgccctgcctcactggcgctggctgcagctggcagtctccctgcccaccttcctcttcctgc

SEQ ID NO: 49487 - DNA, 122 bp, Homo sapiens
aaaaaaaaaaaagtataaggaattaataatttattcatcactaattaaaaaaaaaagctacgtttttaaatgtagttggcgaagatacaaacacaagcaaaacagacagactgtcctaatga

SEQ ID NO: 49488 - DNA, 122 bp, Homo sapiens
ccttactgttctcagcccttgtgtggtgggcgcggaggttgcggaggttccaggcaaggccgccaccctctagagctgctgatctgggaaaaggcgctccttgtattaggacagtctgtcaa

SEQ ID NO: 49489 - DNA, 122 bp, Homo sapiens
agcaagtgttttctaccctgttgagtctgtaaggcgcacatgtaattttgtctttttcttcgactgaaatgacacagcggggagagagaacccaagtacagccctctgttccgggtgctttt

SEQ ID NO: 49490 - DNA, 122 bp, Homo sapiens
gcgctccgtagaatgagttccctgggcctcggtgggccacgcctccgcaaagaaggacaacgcgaagctgcccgcgtagtgcctgttgcactcgccaaggaccggcctggcagagatagaaa

SEQ ID NO: 49491 - DNA, 122 bp, Homo sapiens
ccagctccatggtggcaagggaagaggaagaatgcctcctagatatcaagcacctggccccgcctcttgtctaggtttctccagtcaaggagttcagctttcaaaaagcttggatgaccctc

SEQ ID NO: 49492 - DNA, 122 bp, Homo sapiens
ccgccctcctcccctcggccggcctccgccgccttccgcccgcaccccacccctccggcccggactccagcccggcaacgtcatccggcggcttcccgaaacttaaccccttcctccgccag

SEQ ID NO: 49493 - DNA, 122 bp, Homo sapiens
tttaaactgtagtgataagtagaccttttagtcatctactatgttgatgaaatgacctatcggtgcccatcaagggttcatattttattctcggccagtccggcacatgatataatgttaac

SEQ ID NO: 49494 - DNA, 122 bp, Homo sapiens
ctgtcagactggacaggctccttggaggtggtccagtgagtccaatccctttttttgctgcggcttagacgaggggccgctgaggattctccgaattcgctggatctggacccagacttccg

SEQ ID NO: 49495 - DNA, 122 bp, Homo sapiens
catctcagggtttgcaggcaaaagtcagcagactcaccctctgtgatgaaaagcagggatcgtttcgaggctggactcagtgcactctccaggtcttagaagtgatgaaaatgttccctgaa

SEQ ID NO: 49496 - DNA, 122 bp, Homo sapiens
cttgcaagcgcgtttatttgtattttcaaccacacttcagacgctactggtttataggaacgttaagtttactgagtgtgcagctacgctcccctgggtttttgttcctttccttaaagggc

SEQ ID NO: 49497 - DNA, 122 bp, Homo sapiens
ccgggccctgctgggcctgcagatcttcaatgccttcatgttcttctggttggccaacttcgtgctggcgctgggccaggtcacgctggccggggcctttgcctcctactactgggccctgc

SEQ ID NO: 49498 - DNA, 122 bp, Homo sapiens
cacgcacgtgcgcggctggacttacctgtccttccagacacccagacacgtctccatgcacgcacgtgcgcggctggacttacctgtccttccagacgcgtctccatacacgcacgtgcgcg

SEQ ID NO: 49499 - DNA, 122 bp, Homo sapiens
actgttgtggttaggtttaggtcctttgccaaatgaagcagactatgaagaattaggaagcgtaatgcatcctggggttgtgttcctggtaaaggggacttggacctggctggaagccaagg

SEQ ID NO: 49500 - DNA, 122 bp, Homo sapiens
agtgaagggaggaggttggaagggcattctgaaagtgccaggctgaaccttgtggggagccgtctgtttcaagggaggaggcgacaggaagaagcgggatgagaaaggccttgcagaaggcg

SEQ ID NO: 49501 - DNA, 122 bp, Homo sapiens
gattaggtttgatcgcattcggccctttcccggatagctcgtcgcggatacttctcacagcgaagcagcagctcccagaagccgtaaagctatcccagagcgaggcaccatacgtaaatctt

SEQ ID NO: 49502 - DNA, 122 bp, Homo sapiens
agtgatccgcccacctcggcctcccaaaatgctgggattacaggcatgagccaccgcgcccggcctacaatgttatttctgcaagaacctaaactggtgtttccagtctattctctgggtaa

SEQ ID NO: 49503 - DNA, 122 bp, Homo sapiens
tggcccctgaggccataatgagctgcacaggtgcctgaccctggctgggggaactgacttcgtgttgaatgccaaggcttgtgagcacccaactgtctgcccactgacctgcttcccacgag

SEQ ID NO: 49504 - DNA, 122 bp, Homo sapiens
gcatgcgcacaactggggtcttggatcgtagctcctttgtgagaaagggactggctcacccgccatgtcctgctgtccacacacacggctctgcacaccactcacggcctcctcaccgctgt

SEQ ID NO: 49505 - DNA, 122 bp, Homo sapiens
gattttgatgcaaaggtaggtttgcccctttgaggagaaatcccttgctgaacagatattcgtaagtgcttttctctgaagtatgcctgactttgggagcatttgttaattgatgtattcat

SEQ ID NO: 49506 - DNA, 122 bp, Homo sapiens
gcccacggcttgcagtagccatccatcccacaaatgctcatcggcccctccgcacctggacgtgaagccgtctccaggaagacactggcttcctcccgcagcagcgcactgcggttcagtgc

SEQ ID NO: 49507 - DNA, 122 bp, Homo sapiens
ggttggccacacctgcagacatttctccagaggccttttgtggggatgacctggaaactccgaaagactcagcagaggccttgcagtcccctggccacacagcccacccgctcccaggacag

SEQ ID NO: 49508 - DNA, 122 bp, Homo sapiens
caaccacaacccgagggaacgccccgcaggctgcttatatgggtcggccgcccttcccgacggcccccgcgacgctcgctcctcattggacagaccgagcttacgcctcaaggaagccgggc

SEQ ID NO: 49509 - DNA, 122 bp, Homo sapiens
ctttcctcatcactcccagaaactggctctacaggagaggatgggatggtggcctaggagcgcgtgtacaaaggtgggagaaaggctgccatggcagcccctggagtcttagctgaccatct

SEQ ID NO: 49510 - DNA, 122 bp, Homo sapiens
agaatcactacacccccgggtctctgtgcctaggacagtgcttggcagagaagcccagcccggtggaggaaaccacacgggggaactcctggcagaggcagagcagccagagttggtgggtg

SEQ ID NO: 49511 - DNA, 122 bp, Homo sapiens
gccagccggaatccaccgcgctggcagccgggagcggttttacgaaaaccgcgcctgaggcggggggctttctaaaaagagcctggctggctctggcaccgggacagctgcagactcctcct

SEQ ID NO: 49512 - DNA, 122 bp, Homo sapiens
tgggactttccttcggtattggaaatgtaccgtagctgcactgtccagcatggtagtcaccggccttatgtggcaattgtgcgcttgaaatgtggctagcgtgactgaggagctgatttttt

SEQ ID NO: 49513 - DNA, 122 bp, Homo sapiens
ggctggaaaccgtccaatcaggcaggcagctggagcaaagaggacggcttccgggtttggcgcggcctttgtctctcgctgcatctggagctctaggtcgcctcttcgctactctgtgtcct

SEQ ID NO: 49514 - DNA, 122 bp, Homo sapiens
ccgttatcttggggaagtcactttacctcttcagcccttgggtttctggtcaataaaatgcgatgttcggacgcatgcctgaagtgggcttgtctcaccactagggggaaggcaaatacaac

SEQ ID NO: 49515 - DNA, 122 bp, Homo sapiens
acagacctccaaagcttcttcctgcgccccctggcggccggagggggagcagcgcggacacgtcccccggccaaccgttggttaccaggctggagtggggtttttttctgttgttttccatg

SEQ ID NO: 49516 - DNA, 122 bp, Homo sapiens
tttcgccccctgcacctccagcgggctgcggtccgctcccggcctcactcgagcaggccccgccctcccagaggcagttagtccaagtcacgtgatcgtcgactcagctgaccctgcgggac

SEQ ID NO: 49517 - DNA, 122 bp, Homo sapiens
cggcactccaagatcggaaaacaatgtcaggtttcaactggaatgacacagatgtatccacgtgtttcatgaagcgcacagatgcccctcttctctctacgttccctaatccgttgtgacgg

SEQ ID NO: 49518 - DNA, 122 bp, Homo sapiens
agggtattgccagtctttttttatttctttcttttttattttgagacagtctcactctgtcgcccacgctggaatgcagtggcgcaatctcagttcactgcaatctctgcctcccgggttca

SEQ ID NO: 49519 - DNA, 122 bp, Homo sapiens
aggtttctgaaagtaataacataacaataacaccagcttcagtcagctttcaccaggcagcgtgaaaagatcacagaggagaaaaagaaacagttctccatggggtatggagtcacccaaga

SEQ ID NO: 49520 - DNA, 122 bp, Homo sapiens
cgtacttagaagacgaaggccagtacccttaagactgatggtttccgaaagaaacactgtcgtctctagttgctgtcctccttcctcctccctgtctatcccggagaaaagaccctcagaga

SEQ ID NO: 49521 - DNA, 122 bp, Homo sapiens
agggtgagaaactcatccagattcccaccctatgcagggcccaacctctttcttgcttcccggacttgcccttccatttgggtaacattttctgcaaggtgaaattgggtcccatctggcca

SEQ ID NO: 49522 - DNA, 122 bp, Homo sapiens
gcaacctggaccttgcaataaagctgcattcaacataactcagaccacagtgggagcccccgaagggcttcatgtgagtcccgaaaccagagtttagaggcgcggcctggttctcgtttatc

SEQ ID NO: 49523 - DNA, 122 bp, Homo sapiens
agtagcggagcgggttttatagacatttgcatacaatataatgtgttctgaagaccgggacgatggctcaccctcataataccagcactttgggaagtgaagttgggaggattgcttgagcc

SEQ ID NO: 49524 - DNA, 122 bp, Homo sapiens
cggctccagggctgcgtggcctgcggggtcttggttgtcggttggggagcggcctcgggacgcccgaaaaggaggcggggagagggcggaaagggcgcggcgggaaaggagcggcgattctc

SEQ ID NO: 49525 - DNA, 122 bp, Homo sapiens
tctaggccggagaagcgggcgggcttgggatgccggcaggaggcaatgactctccccaggcgctgcatcctggctccggggcacaagcgcctctccgccctgacgctgatgctcgtctggct

SEQ ID NO: 49526 - DNA, 122 bp, Homo sapiens
cataaactggtatagggtttggcaaacaacaggtaatttaacccactgtaatagaatgaacgaaatcacagcctgagctaacaatggttcccagagcgctttttttctttcacctgctgtga

SEQ ID NO: 49527 - DNA, 122 bp, Homo sapiens
cctccaccagctgctctgcctacaatttctcatctgcaaaatggttggagaaaggccttgcgtccgagggcgacggcggtggtgccgaccgcatggggcgacggcggtgatgccaaccgtat

SEQ ID NO: 49528 - DNA, 122 bp, Homo sapiens
acctgtcctgggagtggggtctctgcatctgccaggactggaaggactgaacccccagtccgtgtctcccctacctccctcagttgttgcacagggacccccaagcatccccagcacccccc

SEQ ID NO: 49529 - DNA, 122 bp, Homo sapiens
ttttggatgctttgagcatctggcagaaatcttcgctatgccccgctgatgtcctgggcccgatgtgggcgcctggccatggctcggtcactcctgacggtttttcagggcctcagacacct

SEQ ID NO: 49530 - DNA, 122 bp, Homo sapiens
ggcgcaaggacccggtccccccggcgccgtacgtggagtgagcctgcggtccgccccgcgcgctccgattggctctggggcctggcccgccccttcccgacactgtcattggcctaggcaaa

SEQ ID NO: 49531 - DNA, 122 bp, Homo sapiens
gtggaggcccctgatgtcaggggccggggaagagggggtggagagggctcgggcgtgacgcggctcctcctgccgccaccgccaccctctggggcgtccttcctgcagcgaggacgcccagt

SEQ ID NO: 49532 - DNA, 122 bp, Homo sapiens
cagctgcctggggccaggatcctagggctggtggggcctgcagatcactctgctctgagccgccagcaatctgggtgcgggccagagagccgtcctcctcggttagaatcctgcagccagtc

SEQ ID NO: 49533 - DNA, 122 bp, Homo sapiens
cattttctccccatttacacaaagcaatttcagccttttcagatgagaaaagagcagccccggccgtcattcattcgggtgcgggaatcacatttgggaccaggaagccctgattttatagg

SEQ ID NO: 49534 - DNA, 122 bp, Homo sapiens
caccattgatctatgttaaggccgaatcttttctggatggccaagaaaggcatggtgatccgatgctcatgtctttgtgtcttctctggccgccgcttcaggatgacccctagtctactttt

SEQ ID NO: 49535 - DNA, 122 bp, Homo sapiens
ggaaggttgggccggcgcctacgcgaggcccgcggctgcggcctagtggcccgcgcggcccgcccccctgcgcctgcccggcccgcgcgccggccctcagcacccctcctgggctttcgccc

SEQ ID NO: 49536 - DNA, 122 bp, Homo sapiens
cggccggggagggcgggcacgggccggggcgagccagctgggcccccctctccctcgggccgggccagcccagctccagccgcagtccccagcagcagtcccgggctgcgaggcggccagcg

SEQ ID NO: 49537 - DNA, 122 bp, Homo sapiens
accccgtttttcctgctctgagagggaccggttgccaccgccatacttctgtcgccctgtcgtctgtgttgtgactgctttggacgtgggagtcacctgaaagccaggaaatggtgagtgtg

SEQ ID NO: 49538 - DNA, 122 bp, Homo sapiens
cggtctcccctctccctctccctctctccttctcccgctttccaccgtctccctctgttgcggaagctggactgtactgccatgatctccgcttgctgcaacctccctgcctgattctcctg

SEQ ID NO: 49539 - DNA, 122 bp, Homo sapiens
aagttgtccaggcagctggggagcctcggaggctggcaggtgagtgaccagggccctccccgccaccgccccccaccccagccagtacgcactcatggaggacgaggacgatctcccgcacc

SEQ ID NO: 49540 - DNA, 122 bp, Homo sapiens
acccggctcttccacacctcccggtggcaggatcgccgcttcccgccgacagcggctcggcggccccgacttctcagcagcgccgcggccacgccccgcctcgttcccaccgcgcggggagc

SEQ ID NO: 49541 - DNA, 122 bp, Homo sapiens
cgcggctgccgccggggcggggatgccggggtatagcagcgggaacggggcggcagccgccgccgggtacagatacttctccaggccgctcttgtccaggaagggctgcacgtaggcggcag

SEQ ID NO: 49542 - DNA, 122 bp, Homo sapiens
gaggctgggggagggcccagaagtggaataattcaggaaagtgcaggttctgggaagtctcggtgggttccccgcaaaatcaggtctgtgtgtgggtctgtctgtcaggatgaggggaggag

SEQ ID NO: 49543 - DNA, 122 bp, Homo sapiens
ccgctgcccgctgtcaccgcccacccgacccatttcgaggccacggactcgaaagttattcgaacagaacagccggcgtgagcctggcaggcctttggtgcattttctttatttcattttat

SEQ ID NO: 49544 - DNA, 122 bp, Homo sapiens
gcgagttcttcactttgcgctccgcctcggccaacagcgccatcgcctccgcttccttcccggaattgtccatggcggccacaaagggactcagcaaagcgcctgaccctgaccctgggaag

SEQ ID NO: 49545 - DNA, 122 bp, Homo sapiens
gcccccagtttgggttcctttggagttgtcatggaaacacggaggctagaccaggcgaggcgggtgggactaaggaaaggaaggaaggagaactctctggagtctcccccaccaagactcag

SEQ ID NO: 49546 - DNA, 122 bp, Homo sapiens
gttgacagtgccgtatattgtcatacatcgtggttctaagagggtaatgtgtactgactccgcagggaggaaacaatgaaacgcctgtagttacaatcttcccagaatttgccctacatgtc

SEQ ID NO: 49547 - DNA, 122 bp, Homo sapiens
ctcctggcctgacttggcactcgcagagccctggccatacccggctctaaagcctaagtccgtctcctcagcacagctcaggccggagctacaggctcctggatcctttccccatccgcccc

SEQ ID NO: 49548 - DNA, 122 bp, Homo sapiens
tcgggtttcggtggtggagaacgtagtacctttcggggacattggacactactctaggaccgggtgagagagttcacctcagttctgaggtccggaatccggtagcctgggtcaccagccag

SEQ ID NO: 49549 - DNA, 122 bp, Homo sapiens
caaaacaatcgcatcgagagtcggcacaacgcaggtctcccgactttgactggttccagacgaagtttcttttgtcgtttgctagcctccagggatgcaatctctacactctctgtgggatg

SEQ ID NO: 49550 - DNA, 122 bp, Homo sapiens
tgtcttcctccgctttctctatccctgggtttccccctgcctaaaaaggattttgtgcttcgtggcttgtccaggcaagcaggccgtcgcgggacctagaccgagacagtgagtctctcttt

SEQ ID NO: 49551 - DNA, 122 bp, Homo sapiens
ggtcagcgcggggcagggacgccgcctcccagcttttccaagcccaggaccgggttcgcccgattccctccaaaggatgcttcattccatgctgatcaacttcagggacaaatccctcccac

SEQ ID NO: 49552 - DNA, 122 bp, Homo sapiens
cgggcgcactcgccgggacgagcccgaagaggaggaggacgacgaggacgacctcaaggccgtggccacctctctggacggccgcttcctcaagttcgacatcgagctgggccgcggttcct

SEQ ID NO: 49553 - DNA, 122 bp, Homo sapiens
cactggatggggcagggaactgggtccggcgggggcgctgtgcctcgaggctcagtgcctcgaagctagatttgcatttggctgcgcctgacaggctttcagtttctgctcaaattgtgcgg

SEQ ID NO: 49554 - DNA, 122 bp, Homo sapiens
gagatcgggcccctgcccgtcccctttctgcgccccgggatgaggcagagactgaacagccggcgagcaaatcaacggcatccagaaagccatgtcggactcggcgcccagcgcccaagcgc

SEQ ID NO: 49555 - DNA, 122 bp, Homo sapiens
cccctccccataccctctccgcctcccaccctctccccagccccatgggacttgtgaaggcggacttgcttttttcgccgtccacacaaccgcactagccgggccttcggcaccgacggaac

SEQ ID NO: 49556 - DNA, 122 bp, Homo sapiens
cccccttctggccttacccttggccccaagcctccctggccctgggcccagcctgcccagcgggcacatgcctgcaagcctcaccaggaggcgccagcctggcagttggcctcatgcccaga

SEQ ID NO: 49557 - DNA, 122 bp, Homo sapiens
tgccggcatggcacattacaacttcaagaaaattacggtggtgccgtccgccaaggtaggcggccccgggagggccactgcaactttcgcgttctcctcagctgggtccccggggagggtcc

SEQ ID NO: 49558 - DNA, 122 bp, Homo sapiens
gaggccaatttagggccagttttctttggggccagcatgtggctgcagcagatgtcctctcgggtaagatcctggctacagctgtctgtggctgagttacagactgtctttttttttttttt

SEQ ID NO: 49559 - DNA, 122 bp, Homo sapiens
ctggggtcctgggggctggggcttctgcggagttgcccgcggaccgtagcgcgctgagggcgctggctccaccccgcggcccgcgccctgggaaggaagcgcgccgccccttccgcgtcccg

SEQ ID NO: 49560 - DNA, 122 bp, Homo sapiens
gcctcaccttgccacatatttgaacagtgatgagtttggggctggtttctgggaagggaacgtttatttagtaaagagcagaacacccttgcgttttgttgggacatgtggaccgtgagtcg

SEQ ID NO: 49561 - DNA, 122 bp, Homo sapiens
ccgcacccggccccagtccctcccaggcttgcgggtagagcctgtctttgcccagaaggccgtctccaagctgggggcttgctccgcccggagggctctgcggggaccctggcacagcggcc

SEQ ID NO: 49562 - DNA, 122 bp, Homo sapiens
cccttctcccaccttcggaaaccggtctagttttcccggcagcaccggacagaaatgtcacggtcatgttgcatcacttcacttgttgagctgtgcgaaggcagcacttgaccacagaaact

SEQ ID NO: 49563 - DNA, 122 bp, Homo sapiens
tctgccccacgatgacagacacctgcccaggctgtggaggcccatggtcagtttgtccagcgctggagctcatgttaggcatctcactggcctgcagacagaagccatgttctccaaaatcc

SEQ ID NO: 49564 - DNA, 122 bp, Homo sapiens
cgaggggcgtcaaagggtctctccggttcggcgaatgcgtactgcagcctgctgtggcctcgggattaccccgtccccctcccacatctcccggggggcggaagaagcgcatcccatgcaag

SEQ ID NO: 49565 - DNA, 122 bp, Homo sapiens
aaacctgctcttcccagtcttccctatctcagcaaatgctcacgttaaaaatcttgaagtcggctgggcgcggtggctcagagcctgttctagcactttgggagaccgacacaggaggactg

SEQ ID NO: 49566 - DNA, 122 bp, Homo sapiens
tggtaaggtgggaccaaggctgcaggcgcttgccaaccgcttggtcccagggagagctggcggtctccgaggctccccaaccaactccatggcctttctgtctgttctcgctcctcaggtac

SEQ ID NO: 49567 - DNA, 122 bp, Homo sapiens
atgcaaactcagagccgagctaatgacatgagcaacttttacttttacacaagatgagcacgcgtgccgaggcgctgggcggcggctgtgtgagttggtggcccagacgaacagcttgtgcg

SEQ ID NO: 49568 - DNA, 122 bp, Homo sapiens
gcattcattaatggatgataggattgctgtagatttcctcctttgggccaagacacagttcgtgcaattgctaacacatcttgtattatccgtgtcagtggccccaaccaaaaggaaatgtc

SEQ ID NO: 49569 - DNA, 122 bp, Homo sapiens
gcccgcgtcgcagcagcccggacaggaagattggtctggatgtgggtccggtcttacagtcgcgggccaggatgagggcaggttgcgacagcgcgcacccggataccttcagcggcgttaag

SEQ ID NO: 49570 - DNA, 122 bp, Homo sapiens
gggagagtagggatgctgctccgggccgccagggtccctcactcccgagttctcaaagggcggaggggtttgggaggccgtctggttacctattaaccctgcggctccttctgagcttgcca

SEQ ID NO: 49571 - DNA, 122 bp, Homo sapiens
atctcctggtgcactctgcggtaggtgcatctttgctgagtaaatacaaagtgaacttgacgggaaaggagaccttagcagtcctacaaaggcaattttgcaagctgtctggctgtggaatt

SEQ ID NO: 49572 - DNA, 122 bp, Homo sapiens
tcctggaaccaggcactgatctccaccatctggttgtcctccacagggatactcttgtagcggaaaaggccctcaaagtggttggggcagctggcggacacgttgaggacggctgtgatgcc

SEQ ID NO: 49573 - DNA, 122 bp, Homo sapiens
tctggatgctgctcaacttctagcccaagcgcaggagctttgaagtcatttgtcccttttcgcttggatcgacttcttattttgagattttgggcattgcggtttacgcaggaacctcaata

SEQ ID NO: 49574 - DNA, 122 bp, Homo sapiens
gttgggggcgaggtgggcgctgaggattggagcccattggcgggaggcccccaggaaggccgtctgctccgtacatccagggtagcaaaggctaccgttcccggacagagaagccgaggcta

SEQ ID NO: 49575 - DNA, 122 bp, Homo sapiens
accacccagttcggcaagtggaggtaagtcatggacaaacatggtggcaatgctcagtggcgagctatccagcacgtcagaagtccagcccacgtgctgaggaagtcccaaagagagcaaga

SEQ ID NO: 49576 - DNA, 122 bp, Homo sapiens
tcctgccctccctctgcgtcttgagtatgcggctagtgcgcccttcctctctcccggggccgcacctgcgaccccaggacccctcccgggccctgtcctgcgccctccacgcgtcgcccctg

SEQ ID NO: 49577 - DNA, 122 bp, Homo sapiens
atccctctgcacccatcacgccagtgggcatgctggctgtaggtggggatggcctttgcccgggttcctgggagcacctggtgttttatggtcacctacccacttacacctgaccctggggc

SEQ ID NO: 49578 - DNA, 122 bp, Homo sapiens
gtgctgagccgccactcctgccaatgccatcagctctacgggagctctgctgggagctggcggctgcaccgcgcctccaccgggcacggagcccttcccggagatgagaggggccaaaaacg

SEQ ID NO: 49579 - DNA, 122 bp, Homo sapiens
gctttattaggccaagccgcgctgagcaggtggggccccgggggccaagcacccccatgccgccaccatcagatgtacccgccctggagccctcagggctccctgcctgcccctcggctctc

SEQ ID NO: 49580 - DNA, 122 bp, Homo sapiens
catctcacctgaagcatgctggccactccagtccaccaaatgcagttcccttgggacctacgctggatggatacccaaggtctcatgaggtaaaggctaggacacttgctctttctgaccag

SEQ ID NO: 49581 - DNA, 122 bp, Homo sapiens
caatggtaaagtacgattccccaataatggaaatgaccagaaatgtagtctttctgctagcgagatacgaaaatagacaagtcaatagaaagtctaggtttggcttattgctgcattttgca

SEQ ID NO: 49582 - DNA, 122 bp, Homo sapiens
cacccggagactgcggcagcctgaagtcggggccctctacgtctttgtcacgctctctcccggaacaaaaccgcccttgggcttcaggccccagaggttatgcccacgggcagctgcccagc

SEQ ID NO: 49583 - DNA, 122 bp, Homo sapiens
acccagctaagggccatagccatgacgcaggcctaagaaatgaaccccagcacctgcggccgcaccctccctgtcctgcccatttcaagagggacttgggcagcggctggagaactgtgctc

SEQ ID NO: 49584 - DNA, 122 bp, Homo sapiens
ttgcagcttgtctatttgtgccttcaacccatttttctctagaattttggtcttttctctcgcaatacttaaaaggtctttttatattagaactatcacttgtatttgtgatatttgtggca

SEQ ID NO: 49585 - DNA, 122 bp, Homo sapiens
ccgtcttgacgaaagaaccgagagatggatgcgctaaggtctaaagatacctttctccctcgactaaattaagaattgctgcggcagttcccaaaagctgagtcccgctgcagctgccaggt

SEQ ID NO: 49586 - DNA, 122 bp, Homo sapiens
ccggttgtttaaaatctcctcggaaaggcttgctctggtctgcagctgatattggtgccacggtttgggcagcggagttccactcttacctttcagtccgaatgaggaaaacagatccattt

SEQ ID NO: 49587 - DNA, 122 bp, Homo sapiens
ccggctggggaagatccggagtctggagtaagagccgggcagcgggtgaggctgtgtcctcggggccgggcggtcggggagaagagcggggaccctccccaacggcccgcttgtccccgtta

SEQ ID NO: 49588 - DNA, 122 bp, Homo sapiens
gcccctggcgctaccgttccgctccacggcaggaaaccaaaggttccggcgtccagagggcgcctcccagtcccgggcagcttttcttggaacaccggcggctctcggaagcccagctgctg

SEQ ID NO: 49589 - DNA, 122 bp, Homo sapiens
attttaaaaggttgataaaacactgatttaggtgatcactgccctcgagtctcactctgtcgcccaggctggagtgcaatggcatgatctcggctcactgcaacctccgcttcctgggttca

SEQ ID NO: 49590 - DNA, 122 bp, Homo sapiens
gcgagaccgggtcggaacccgagtctcctccccaaaccaccacattggctctgggtcccgcgtgtcgaacccgtcaggtcgccctgcctccatcacccggcctctgggatttcctgcaacct

SEQ ID NO: 49591 - DNA, 122 bp, Homo sapiens
cttgattctagaacagaaggcattttgggctaaggacgctcacaacccggtttcctgtcccgcgtggttcatggggcttgccctgggcctgggaggccggtggcgggagcctcccctacagt

SEQ ID NO: 49592 - DNA, 122 bp, Homo sapiens
ggcttcgagtaggcaggcagtgacagctgtacctagaataatactccttggcccggcacccgtctctgcccttgctcactcctgccctcccagaaccagcgggccttctgctgttccctgca

SEQ ID NO: 49593 - DNA, 122 bp, Homo sapiens
ggactgtgatctcactctcattttctttttctgtctcttcctctttctcctccctctccccggggtaagcctgctgcttcttaccaagaggtggaagtggacaggaaatgatgtctccagcc

SEQ ID NO: 49594 - DNA, 122 bp, Homo sapiens
acagggactgggccgtggcgtttcccattctggagtccaaagagcaggaacttgtacttgcgggccgggtccagccccgagacggcgaccgctcggaggtctccgctcacaggcactgcctg

SEQ ID NO: 49595 - DNA, 122 bp, Homo sapiens
agccgaccacagcccaggactgtcccacctgggcagagagcccattctgggtgcccagcccgggcaggcccaggcacccccagcagtgccccgggcagcacctgccagccaggtagtgcagg

SEQ ID NO: 49596 - DNA, 122 bp, Homo sapiens
gggggtcaccgcgtccggaaacaccctcccagccgcacccagaaacactgtcccagccgccgccctggtgccatcaggtagatgcacaaagtgaagcccccaggctttgtcctggacggggt

SEQ ID NO: 49597 - DNA, 122 bp, Homo sapiens
cgagccctcctgagtggtgggatgccaccgacaccttgcttctccctagcttctagtgctcggcgctcagaggtgagagttgggctgggaagtgttcagatttcaggaaacggtgaaaaata

SEQ ID NO: 49598 - DNA, 122 bp, Homo sapiens
ggccgcgcagccccaccctgaaaagtagtgggcacaaatggtggagctctgagtcctggtcgtgccgccggaccccctcctggcttgctttatgtccccttcgttccgttggacactagatg

SEQ ID NO: 49599 - DNA, 122 bp, Homo sapiens
ggtcggggtcagaggtgaagctcgtggggagggcgagacccgggcgcaggtgctcacaggcgagggcggggttcaggttccagctgggctttgagttccggttcaggcttccatctgtggtt

SEQ ID NO: 49600 - DNA, 122 bp, Homo sapiens
gtccttccccgggccctggcccttcccctggagccatgctgggccctagcccgggtccctcgccgggctccgcccacagcatgatggggcccagcccagggccgccctcagcaggacacccc

SEQ ID NO: 49601 - DNA, 122 bp, Homo sapiens
taaatcttgctactactcactctttgggtccgggttgcttttatgagttgtaacactcaccgtgaagatttgcagcttcactcctgagcccagcaagaccacgagcccaccgggaggaacga

SEQ ID NO: 49602 - DNA, 122 bp, Homo sapiens
attgatagaatgtttgaactgtttgacttactattgttttagattcaaaacattggttttcgtaggcatttcagttcaatgcaatgtcaattaattaggtctgaagtagaacagttaccatg

SEQ ID NO: 49603 - DNA, 122 bp, Homo sapiens
ggcggccctgagcgtgtggagaaaccggatccaggggcggccctgagcgtgtggagaaaccggaactcgctctaagcagccgggcaactccttctccacagaaaggacttgaaaagtatctt

SEQ ID NO: 49604 - DNA, 122 bp, Homo sapiens
acgactcccaaatgtgtcctccagccgggcccctctgctgagctcagcctgcacagcccacgcgacacccccgcccagatgtctcctgggcctcgacaaagcggccgctcctctcggcgccc

SEQ ID NO: 49605 - DNA, 122 bp, Homo sapiens
gctgggagttgccactcccagacttgttggaatgcagttggagggggcgagctgggagcgcgcttgctcccaatcacaggagaaggaggaggtggaggaggagggctgcttgaggaagtata

SEQ ID NO: 49606 - DNA, 122 bp, Homo sapiens
tatttaattattacaaagactttttgaaaagcagaatttctaaaaacactgacagtgggccgggcacggtggctcatgcctgtaatcccagcacttcgggaggccgaggtgggtggatcact

SEQ ID NO: 49607 - DNA, 122 bp, Homo sapiens
tgacctcattccttcaggatgctggcagagacgggaagaggagggggaggctggcgcggccgctccccgccaccggctgccgggtccctagccaggacgagacccctcccttcccatgcggc

SEQ ID NO: 49608 - DNA, 122 bp, Homo sapiens
gtactattttgtttttaaaacttctttgtgtatggctaaactgaaacaaacgtactatttcgccatgatagcaattataaagggtacctttaaagcatttgaaactgaatcatgttgcttcg

SEQ ID NO: 49609 - DNA, 122 bp, Homo sapiens
tggcccgtagagggtagggagagcatagtgtggggaggaagagagctgcacatggtgaaacgcagggcccaacagcaggccctggtcttaggtgctgccaggttcattccaactgctcacag

SEQ ID NO: 49610 - DNA, 122 bp, Homo sapiens
ttttctcccagtcagcagctctttcaaactatggggcatcatttgttcactgtggcgagccgggtccatgtgaggaaagttgatctgagaatcaatctctagaaagggcgctaaattgctag

SEQ ID NO: 49611 - DNA, 122 bp, Homo sapiens
gctctttttgatccacgtaaaagggggtggggggcgggaaatctggcgtggacttggaggcgttcagcacacccgcgaccgctgcgtggcataaactacagggggcgccattcacataggat

SEQ ID NO: 49612 - DNA, 122 bp, Homo sapiens
ctaggcccgcgggggaagcagtggcggcaactccgccagctccgagagtagggggtctggcgccgacacctgcccctgcagcggagagctccggcgccgcggccgcagtggccttggtggag

SEQ ID NO: 49613 - DNA, 122 bp, Homo sapiens
tggagagtcaggagctcaggtagcctggagtcccctggaactcagcagcaggggtggaggcgggtagggtctttgtcatgaaccggaagcataccaggccttcacttagaacactgacccct

SEQ ID NO: 49614 - DNA, 122 bp, Homo sapiens
ccccaggaggggactccagggcaagttcagattgggagcagataccgtccgacgggcgggcgcttggagtttctggacctgcgggtcaccagggatgcggggtccggggatcccttgtcccc

SEQ ID NO: 49615 - DNA, 122 bp, Homo sapiens
cgcttcccttctaagtgagccttctttttcctttccctcagccagccttgaagtctccttcgacagagagtgagacctgctgtcctccctgcccttagtcgctgtccactcagcctaatgcc

SEQ ID NO: 49616 - DNA, 122 bp, Homo sapiens
aagagagataagcgaataaatgtcaagacataagaatctgtagctgctaacttaaatttacggatttagtgaaactacttctcacaagctaccaaatcacagtgccatggggccgcaagatg

SEQ ID NO: 49617 - DNA, 122 bp, Homo sapiens
tggccactgctgttgaggagggagccagggctcagacggatagagctgcctgcccaaggtcgcaagctcaggggtggcaagccagcactcccagcttcatggccctggctggagtcacttgc

SEQ ID NO: 49618 - DNA, 122 bp, Homo sapiens
tcagaaggcttggttgggaaagaagtgagccccaagctatccgccccacccccagccctgcggggctttctgcctgccacacgccgtccctgctcactaccccatcggtttccttcgggagt

SEQ ID NO: 49619 - DNA, 122 bp, Homo sapiens
ctggtcggcctcacctggtcgctggtgtggcgccgccagccttgtcaaaccacccgcaggcgagagctactgccgcagccggcaaaccccacccacgctgcgcggaggctgcgggaattggg

SEQ ID NO: 49620 - DNA, 122 bp, Homo sapiens
cttctaaatgtaaagaaatctgtggaaagctcaagtttaagttaggtgttttaaaacaaacgtagttaacaatcggccagatagattggctaccctccagcacgcctcaagttttaagatca

SEQ ID NO: 49621 - DNA, 122 bp, Homo sapiens
ggctgcgagctcggcctggcaaagttcctgtggaaactccatgttttgaaactcctgcggcgtcgcagaaggagggggagaggggagcgcgggaagcgcgcgggggcggtctgcacccgcct

SEQ ID NO: 49622 - DNA, 122 bp, Homo sapiens
ttgccagtgtaacaactgaaccacaggaggcagccatggtctcagtgatacccatggatacgttcacatcaaccctctttgactggagggcccacaggcaaatgacagtcaacattgaattt

SEQ ID NO: 49623 - DNA, 122 bp, Homo sapiens
ggaggcctcatcctctcaggagcaaattcaaacaaagaagctcctgccccacatacaccccgctgtgatctagccaggttgacttctacagcctcctcttgcattgccctgcacaatctcca

SEQ ID NO: 49624 - DNA, 122 bp, Homo sapiens
gaacgagtctgtttaccttgcgcctgcaaaatattcagatggaaacatgtatttattcatcgctttgcagaagggaacagctgaggaaggggaggcagaagcttaaacagttaacacattga

SEQ ID NO: 49625 - DNA, 122 bp, Homo sapiens
ggccagggcgctgggggaggccatcggccccctccttgtacagagtgtatctgatgtagccgacatcagagccacactggagggtcagattctctccgggggtcacgacagggccctgcagg

SEQ ID NO: 49626 - DNA, 122 bp, Homo sapiens
attactccaggcagggtatcacagagggcttcctgaggaggtggcatttgcatataaatacgtctccaaatagatgtaagatcttacattaacagaacgctttaacagaagttagattctgg

SEQ ID NO: 49627 - DNA, 122 bp, Homo sapiens
ctcctaccgctgcgcggggggctatacatgggggtgggcaggattcacgttgttgatgaccggccaaactcaaccctttattgccactattttacatatttgcccaactttacccatctaat

SEQ ID NO: 49628 - DNA, 122 bp, Homo sapiens
gaggtgttcgtggcgtttgcaattttcttgtggtttttagatttctttgtgctgagaacacgtctttgcagcggtcatgaggctgctcccagagcccagcttgggccgcgatgcgcgtgggg

SEQ ID NO: 49629 - DNA, 122 bp, Homo sapiens
ccgggcgagttcctggggcgggttctggctccgactgctgcgctttaggtcattgctccacgcttcccaggtgtgtgaccttccacaagcttgagtttgggaccctgctgtgcagctccgta

SEQ ID NO: 49630 - DNA, 122 bp, Homo sapiens
tggagggcgcctgtaatcctagctactagggcggctgaggcatgagaatcgcttgaacctcggaggcagaggctacagtgagccaagattgcaccactgcactccagcctgggtgacagagc

SEQ ID NO: 49631 - DNA, 122 bp, Homo sapiens
caatcttgtttccagagcctgagttgcgcgagccgccaaaggatgtggccagcctgggggcgtggctgtcaagatcttgtccaatcctagagtgagcccaaactcaggggcggagtttcatg

SEQ ID NO: 49632 - DNA, 122 bp, Homo sapiens
gccgcggagagggtgggggcgggagttctgctgagctgcattttctcacgtttgcagcagcgaaacttctctgcgggttctggcgctggggcaccgaccccgcaacgactgcccgggctgcg

SEQ ID NO: 49633 - DNA, 122 bp, Homo sapiens
ggcgggggagaacggggcggggggtggggcgggggccaggggcggcctctcgggctgggccggcagagcggccactttgcgcgcggcctctggagctccagctgcgccccgccaccactggc

SEQ ID NO: 49634 - DNA, 122 bp, Homo sapiens
cagcttggaaaaatcaggtctcaggagacaatctgtggttacttttctgggaaggggagtcggggtccccaggtttcatcattcctgggcacatataggtaagagcgaaccactacccctcc

SEQ ID NO: 49635 - DNA, 122 bp, Homo sapiens
gacctgcgcgagactggggacggcgcggggcccatctctcccctgggaggctcagaggcccgcaggtttctcatggaagcccctcacagggtaagtttcccccgacaggccatgtgaccttg

SEQ ID NO: 49636 - DNA, 122 bp, Homo sapiens
acagctgtcacccagcctactgaagaaaaacttaaagaaagcatttccccggaagcaagacgcaaaaggaatccactcggttccaggtgtcagggggcctcagggaataaactgtttcttga

SEQ ID NO: 49637 - DNA, 122 bp, Homo sapiens
gcatcctaggcagtaataaaggggtctctatataaggcaaagaatatggaattaagtaagcgaggtaccatatatgaataggtacaagaagagactgaaacatgttagaatttgtgttttga

SEQ ID NO: 49638 - DNA, 122 bp, Homo sapiens
cattttcactatttatggagagctttacagtaagaaagtatcaacaaaagcaggcacatccgtgtacaaagtgttgctgttgggtgttctcacttcttctttctgaattaccagctgctctg

SEQ ID NO: 49639 - DNA, 122 bp, Homo sapiens
tcagagtgatttttgattttcggaggggcctgggcaggagactctgccctcagggacgcccgggccgccgtttcctgcttctcagagtgattttctgacggggctctgtcaccacctggggc

SEQ ID NO: 49640 - DNA, 122 bp, Homo sapiens
aacctgtgttccaagccctgatccttgaccttggagtggaggcagcactgaagactgctacgcccaagagaaggaggtggaggcagccaagaatctcaggagccagcttcctctcctcgttt

SEQ ID NO: 49641 - DNA, 122 bp, Homo sapiens
ggtgggcagcagagtggaggggtcgaaggggcgcatggccgcccgcgcgtcctgagagaccgagaagcacaggacgtgtcagtcctcaggggagactaggagcttccatcttgtctcagcac

SEQ ID NO: 49642 - DNA, 122 bp, Homo sapiens
gggtcaggatctgccattctttacaagtttccttaacgtattgcgtcaaagcgagacaaccgagtcttactcaaacttgttttaaccggagatggagggttgctgctgtgtcaccgcctgca

SEQ ID NO: 49643 - DNA, 122 bp, Homo sapiens
tcccacacaacaaagatctgccgggaaaaaaaagaggagggacggcggcggcggcggcggcggcagaaggttctgctgacagcggctccattataagcgctctggggcccggaaataaataa

SEQ ID NO: 49644 - DNA, 122 bp, Homo sapiens
cgccgcggcggagggtgggcgcgcggggagcgggatggagccggggctgtgaggccgaggcggcggtgcctgggaggaagggtcggatgccggaccgggggcaccgctgaggcggtgggtcc

SEQ ID NO: 49645 - DNA, 122 bp, Homo sapiens
cgctgcccctagaggtcagtctgatccagggattgtctcgaatccgcgcagctctggacccgaaaggagaggctcagggagaggataatgcggttgccaagtgccaggcttggcctgggtga

SEQ ID NO: 49646 - DNA, 122 bp, Homo sapiens
attattaagtgcttcctggccaaattaagagcaaagactctttgtcattttatgtcctgccgtatattacctagcaaacaccagactgtcagtaagtgtttccataaatgggggtggctgga

SEQ ID NO: 49647 - DNA, 122 bp, Homo sapiens
gccttggccttccaaagtgctggggttacaggcgtgagccactgcccccggcctaatcatcgtgttctagtctgccctccaatgggagaaacaagtaaaattatgccatgtgaggattattc

SEQ ID NO: 49648 - DNA, 122 bp, Homo sapiens
ccggcagccctggcgccccagccgctcctaggggccactctctcgacccctcttagcctccgcgactcacaccttccgcctcgcggaactctcttgcaggagttctctcccggtaggggaga

SEQ ID NO: 49649 - DNA, 122 bp, Homo sapiens
acggcgccccctctagtcacctgcgccacagcgcctcctggcaatgaggggaaggccactcgcccaactcacaccaaggcagttacctccagtctcggggaattaggatctccccagggaat

SEQ ID NO: 49650 - DNA, 122 bp, Homo sapiens
cctgccccttttcttcaatatgaagataaagctgcccctggctgtactggaggccaattccgggccatagcaggaggaactgagttctaattctgtctttgccatgtaactgaattacccag

SEQ ID NO: 49651 - DNA, 122 bp, Homo sapiens
ggtggtgaaaaggtgagataaactaggacaaatcagaggggctgaaagacaagggaggaacgtccttggctgctctgtttaaaccaaggcaagatcctccctgggaacaccgggtttctatc

SEQ ID NO: 49652 - DNA, 122 bp, Homo sapiens
ggggtaaggccggcaagggcggcccgaccccccaggaggccatccagcggctgcgggacacggaagagatgttaagcaagaaacaggagttcctggagaagaaaatcgagcaggagctgacg

SEQ ID NO: 49653 - DNA, 122 bp, Homo sapiens
ttttaagggctctccgagcataacgcttccctgcccaccaccccgcttcattcccattcccgggccttccacttgcaggagccacaggtgtcaagttctggagagaagggatgaatgggact

SEQ ID NO: 49654 - DNA, 122 bp, Homo sapiens
cccgctttccgtcgcttcctgttccgtcttggtcccgcctgccgctggcgccgttgtttccggctcaactggggagctgctggagctcttctggcctctggttttccgactgcttatccgac

SEQ ID NO: 49655 - DNA, 122 bp, Homo sapiens
gggaatgccagggtctcgtggcctgtggctccgagaaatgggaagacaagaggcccgaggcgggcctgctgtgcccaggtaaccaaatactccctctggttaaagtccctataaccagggtt

SEQ ID NO: 49656 - DNA, 122 bp, Homo sapiens
atgagctcccaagtggcctgtggggacttggcctcagttttgccagctgtgaactgggaccgtcgctgctaaggtaattggcaggtgatctgaaggacacctgccgcctcctggccttttct

SEQ ID NO: 49657 - DNA, 122 bp, Homo sapiens
ccttccagagaatatacatgtacgcatacacgatgaacagaagcagtacgctggtgaccccgatccagaacatcaggtaggtttcatcaatgtgtgggaaaatgtctgagcaaacagattgc

SEQ ID NO: 49658 - DNA, 122 bp, Homo sapiens
aacgttatatacaggaaatcattgcacagcacaagagatgtgtattacaaaccccgacgtcgaaggtcacctgccatactccatggtgcttagggtgctaaacaatatgaatggaagatgat

SEQ ID NO: 49659 - DNA, 122 bp, Homo sapiens
gtcatcacgtgtgtgcgtcagttacctggtgagtattgaatgttgtgatgacccggtcaccgtcatcacgtgtgtccgtcagttacctggtgcatattgaatgttgtgatgacccagtcacc

SEQ ID NO: 49660 - DNA, 122 bp, Homo sapiens
gcatcaggagtggatgcatccatcctgagctctcttagagatacaagctgccacagccttcgttgtcctgaaaaggaaattaacggaaaaccagaacctctgttaaccacattgaggacact

SEQ ID NO: 49661 - DNA, 122 bp, Homo sapiens
cgatgtgctgctcttctcaggagagtttcaaatggcaacttcagctttctaaaacccctacgttctgaatatacctgtgtttctgcacagcatacgttttgaaacagcctaggaaatatatt

SEQ ID NO: 49662 - DNA, 122 bp, Homo sapiens
tcttgagatgtttaattggctctttgacccctgtactttcataaacagtaaattgagacacgaattattgcagttacaccttatcaaggtgtttctatatttacgatggatcacaagcaaag

SEQ ID NO: 49663 - DNA, 122 bp, Homo sapiens
gaaaaaaggaattccaaaagctgtattccaaactcaccccacaataaaataaattccagacgtatccaacattttacaagtaccacagaaaaacaagagtttattttaaaaataatcttgga

SEQ ID NO: 49664 - DNA, 122 bp, Homo sapiens
gcccaccgtcctgaccagccaggaggcatgggcacccgcctctcaccacggggctccctccgtgttgaagatgtccccagcacacagggacgcccaggacgacctcccaggagggccagggt

SEQ ID NO: 49665 - DNA, 122 bp, Homo sapiens
tgtctgtctcttttcggaagcggaatttcctcagcttttctgttagctctgggtctacctcgcacaccaccagggagtcagactgccggagggacccaggaagagctgaaatggcctggcct

SEQ ID NO: 49666 - DNA, 122 bp, Homo sapiens
taggagaggcgggagctgtcaggccaggagggaaacccgtcgggcggcggttactatggacgcgctcacgcttagtaaccgaggctccccgccctccgggagacctccttggtttgggaggt

SEQ ID NO: 49667 - DNA, 122 bp, Homo sapiens
gttttcagtgatctttgctcgtctcccttccctgtaaagctacatatgctcagcaagtgccgcgtgcctcccatccttggtcggtggtaaatgcaggaggtaattaacaggatcttcacaaa

SEQ ID NO: 49668 - DNA, 122 bp, Homo sapiens
tggcggatttggggctgggtgggggtggaaaggccacgaggagccgcggcggctcaggagcgggtggtgggcgtctgaaaagtcgccaccatgaggaagctcttcagcttcgggagacgcct

SEQ ID NO: 49669 - DNA, 122 bp, Homo sapiens
taggggagacgaggcgggggtgcttagacttgataggacgtagagccccgaaagtgggcgcgggaggaaggcttcggccggtgggaggcgcccggcgtccccggcagcggggtcaggccggc

SEQ ID NO: 49670 - DNA, 122 bp, Homo sapiens
agggacatcagaccatactacacatcattagatctcaatgaagaacacctctagttggcccgtctctttgtaagtaactttatttttatttacaacagaattggtggctttattcctccatc

SEQ ID NO: 49671 - DNA, 122 bp, Homo sapiens
tttggcaaccagatttccgttggaagatgcaacggttccggtgacggtagcaagttctcgcgtccaggcatctccgcttccgctcggggcgcaacaacttccgactccaccttcccagcctc

SEQ ID NO: 49672 - DNA, 122 bp, Homo sapiens
cctgagtggggaggagccgcggaagagaaagcgtaaggcggcgtggaaatgggtggggcacgctaggacccgctcacatttgttcagggagaggcagtcccaaaaagcctctcaggcacaca

SEQ ID NO: 49673 - DNA, 122 bp, Homo sapiens
tttaggagttgccacttatgctaactgcttgccaccctgcaccaaactccactgcagccacgagaatgacatcagaaggctccaaccccgggcattgtgccactgagctggagaatctaacc

SEQ ID NO: 49674 - DNA, 122 bp, Homo sapiens
atcaaagaaagaggttccatgagcgtcatgagataggacacggcagggttctaagggaagcgggaaggtgggggctgtggacacagggtggcgggcgctgcctctcatggcttcttttctcc

SEQ ID NO: 49675 - DNA, 122 bp, Homo sapiens
aaatgtcaccaatttccccttcatcagataatttcaggagacagaaccgtttctgtagggcgagagggagggagtatgtgtacatgtgctgctacctcccctccctttccacatcagccctt

SEQ ID NO: 49676 - DNA, 122 bp, Homo sapiens
ctcctccgggcgccccctgccggtgggccgcttgcccgtgctccaagcccaaaacagacgcgtcccctctagtcgcttttagccttcggtctcggtcctgattggctcagagtcgctcgtga

SEQ ID NO: 49677 - DNA, 122 bp, Homo sapiens
aggggaaggtgtcgggagcagtaactgggagtctttaaataagtgacggatttctgtttgcgaaataggcaaacaggctcgtaaatttgcctttatgcgcggagttcctgggacccgggatg

SEQ ID NO: 49678 - DNA, 122 bp, Homo sapiens
cctctttcctttctcgcccctaacgctgtctcgttttgctctctccttctgtactattgacggttctatcccatctcggagactaaaacaatgtccctgtgcaggggtgaagcctgacccgc

SEQ ID NO: 49679 - DNA, 122 bp, Homo sapiens
ggtgatctggctctagtcccccactccaggtgggagcttcgcaggcatgggctagttactcgagttccgggtgcctgcgtgacccatttgtaacatggaaatagcaaaagtccctccccaat

SEQ ID NO: 49680 - DNA, 122 bp, Homo sapiens
atttcaaaacgaacttagtttccagattgtccatgaacctagaatattatttctcctaaacgtctgtgtttgtctaaacacttccacttaatgttctcgccactccagcttacctggtttat

SEQ ID NO: 49681 - DNA, 122 bp, Homo sapiens
tgggttttccctccttggggcagcccccatcctgtgaggactggacctgggctggggaggcgggcttggctgggggcggctggaggtcccccacgtcgcactgcacggccgtctccttggtc

SEQ ID NO: 49682 - DNA, 122 bp, Homo sapiens
atcacccaggccaaagataagctgctggacactgtgtacaagggcattccgtactcccagcgtcccaaagctgaggacatggacctgggtgaggtccccaccctctcctcctggctcccact

SEQ ID NO: 49683 - DNA, 122 bp, Homo sapiens
catttcttttggagacggtctctcagacccagacccgaagctcctcccttatgcagagtccgtgaagcctaacggtgagtgacggatgaacaaagccaatcagacttcgatctgcaacatag

SEQ ID NO: 49684 - DNA, 122 bp, Homo sapiens
taatctgacactgctaaggagtgtccacagggccgtgcgtctgcaagaatcggactcatccgcagtccaccagccagctggtcctcggaaaccatccacggcgctgtcctaccttcactctc

SEQ ID NO: 49685 - DNA, 122 bp, Homo sapiens
agtaggggccgccccccgccccgccccccacctccaaccccgaggctccaggcccctgcccgaggccaggcttccagcctagggcgcaggacaccgctctccaacaaatgcacgtccccgcc

SEQ ID NO: 49686 - DNA, 122 bp, Homo sapiens
agttctttcccatctcggcctcagtctccttcagccataagatggcgaatgcgctgactgcgggaccctgggcgacctgtctcctccatgcgctgtgactgtgccctggcctggagccctct

SEQ ID NO: 49687 - DNA, 122 bp, Homo sapiens
aggcggacgcaggcagagtggcctcagggtcccattcggcctcttggtgctgcggtgccccgtggctccccagaggagagcaagttagggggtcgggggagcggggatggcttccgggggag

SEQ ID NO: 49688 - DNA, 122 bp, Homo sapiens
catgatccacctgcctcggcctcccaaagtgctgggattacaggcgtgagccaccgcgcccggcctaggtcaatttttaaaagtaaaaatggtaggagaaagttgcatcaattgtggcagtt

SEQ ID NO: 49689 - DNA, 122 bp, Homo sapiens
ccgcggcgcggtgtacaaaggggcagccgagacgcgcgggtttgtgcaacacggggcggccgcgcgggggaaagaggcagcgcgagggcgggggggtcatgcgctcgcccccccgggagcag

SEQ ID NO: 49690 - DNA, 122 bp, Homo sapiens
ttgttgcccacatcccccaatccctgcctggtgtggcagggccacagaagacctgggtgtcggctcagggccactcactttgatctctgggctcagctttccttatttgcacaagagtgatc

SEQ ID NO: 49691 - DNA, 122 bp, Homo sapiens
ggcgggtgcaggggcggctctcccaggcttggaggctggctaggtggggcgctcagggtgcgcaggcacgcctcactcagttcgtgtgccttggggtggcccccggcgctggagggagactg

SEQ ID NO: 49692 - DNA, 122 bp, Homo sapiens
cgccgacccagcggttccccagagcccgccggcagaggcggagccgcccgagcgcccggacgcaggtggggaacctgtggcgcctacaacaagcaacacgtggaattgaatgttgaagagcc

SEQ ID NO: 49693 - DNA, 122 bp, Homo sapiens
agtagagatcaggtctttggcgtccacccactgccaggcactgaagcctcccaacttttgcgcactcgcggagcctgagccagaagggtcggacgcccacgcccctggcaggagctcggtgg

SEQ ID NO: 49694 - DNA, 122 bp, Homo sapiens
tgcatcttagaattgatgaaataccgtatatacacatatacacactttaaaaattttatgcgagtggtgttattatgcaatgtgtcttgctttttatgtaacgatgtgtcttggagagtttt

SEQ ID NO: 49695 - DNA, 122 bp, Homo sapiens
ggaggagcggcctgtcccccaggggctgcatgggatggtaattgtgttaatcccagccagcggggcagacaggaggcagaggcggtggctccgctgtggctgccgctggggtgggcttggag

SEQ ID NO: 49696 - DNA, 122 bp, Homo sapiens
ccaaaagtggcctgcccagactattttggtagcaagcgtggaaatcagatctgagaatctcgggagcagccctggtgcccaattttctccatcacgcacacccttctcgcctctccctgcct

SEQ ID NO: 49697 - DNA, 122 bp, Homo sapiens
ggggggcccaggatgcaggggtctgcccctggccaggctctgccttcagaggaggctgagcgtcgtcacacgggccgggctgaggccctgggccctgaccgtgcagcctaagacaggactgt

SEQ ID NO: 49698 - DNA, 122 bp, Homo sapiens
tagaaatttccaggtatgtggggaccccacgtcccctgggacagaagtcccagggacctgcggagcgcagacataacacaacacagagcaaaactcaccgctgcggtgactttcactccacg

SEQ ID NO: 49699 - DNA, 122 bp, Homo sapiens
aaagatagcttggctgacatggagtggaagtttgtcccagcatcactaagaatagtattacgtttgacaggcagccaaaatggcaagcatgtttacactgtaataagtccttgcataatcct

SEQ ID NO: 49700 - DNA, 122 bp, Homo sapiens
ggaacaccactgccacaccaacgtggccattattctagagggagaagtatagggcagtgccgctcaggccaccaggagcagctccaggtcctcgccccattttagattggaaatctgactcc

SEQ ID NO: 49701 - DNA, 122 bp, Homo sapiens
tctggagcggaggaggaagcgcggcggggcgggggcgggggtgtgtcgggttttataacccgcagggcggccgcggcgcaggagaaggggcagagccgagcaccgcgcaccgcgtcatgggg

SEQ ID NO: 49702 - DNA, 122 bp, Homo sapiens
actgccttctgtcccctccactggtgaattatccaagcaaggaggctgcattttccaagccgtttgaatcacatccccaggatgtttccatgagccagccaagtgcattcttgagctgtgcc

SEQ ID NO: 49703 - DNA, 122 bp, Homo sapiens
tgtcttgctggttcgaaccccagcggctgttcaatcgcgcgcctccttctagccagaccccgcccccccggcaccgccttcctaacggctgtttgtttttgcacacggcacgcggaggcggg

SEQ ID NO: 49704 - DNA, 122 bp, Homo sapiens
gtcatttcccccagcttgtcactggttcagtggcccccattacacaatgaagataacaatcgttgccttgccaacctcacagtgattattgggccagggtactctctcccagaaagccttcc

SEQ ID NO: 49705 - DNA, 122 bp, Homo sapiens
acaagcgatgggaacaggccctcggggtgggccgtagcgggtagggcgggcggcgggggtcgcacccgggtcggcgcacgcgcagcaggctagtgccgccccctccccctcgccggctgcca

SEQ ID NO: 49706 - DNA, 122 bp, Homo sapiens
cgtgtccttcctgctcactatatcatgtcaactccatcaacctttagccaggtccacgctcgccaaccagcagtccagtttcccaactcagcacagggggaaacggatgcctagtagagagg

SEQ ID NO: 49707 - DNA, 122 bp, Homo sapiens
cctggggcccagcatatgttttgggggtaagcgcttcttgggtgcagaggcgccgcctgccgcccgccgcccgcgccgcttccgctctccggctctagagggcgccctagcacaaggagccg

SEQ ID NO: 49708 - DNA, 122 bp, Homo sapiens
ggggcgcgggcatccctgccgcctacggatctcttcccaagcacctagaactttccaaagcgtgcttggaatttaacaccttggtcgtcgatccccgcaaatatactctgatgagaccggct

SEQ ID NO: 49709 - DNA, 122 bp, Homo sapiens
ctcattcctccccaacttcatcccaactccccggtctacccaggtagttttcgtcttattcggaggctggacatttgctactggtccctgaagttttgcggctgcacccacagacagcaata

SEQ ID NO: 49710 - DNA, 122 bp, Homo sapiens
accccaggctccagcgatcctcctgtctcagccccccgagtagctgggcctacaggcacacgccaccacacctggctattttttgtatttttactcgagacggggtcttgccatgttgccca

SEQ ID NO: 49711 - DNA, 122 bp, Homo sapiens
tgttcgcgagctgccggccacgcaccagccccggaggcgctcccggggcacagccggcggcgactacgcctcctcaggcccccggcgccgccgacgcgcacgcctccacacgcgcgcgtcca

SEQ ID NO: 49712 - DNA, 122 bp, Homo sapiens
gcacccgcacggtgtaggtctcgtcctccagcaggctgcccacggtggtcagcaggctgtcgtccacgttgtgcttctgccagttgcccacggggtgctccggttccatggtgtagtagacg

SEQ ID NO: 49713 - DNA, 122 bp, Homo sapiens
cccttctccccacatctggccttggcttacatagagtaagtttgctgtgagcacttgcctcgaactgtcggtcaagaggtgtgagcaacaaggcttgcagaggaacaagattaagactggac

SEQ ID NO: 49714 - DNA, 122 bp, Homo sapiens
agtgaaatataatttaacatagctgagtttagtgtactatcaagggaaaagtaatattagcgatgtcagagtcaagtgataccattgtactatgacttcctgtgctcccaaagcttttgcca

SEQ ID NO: 49715 - DNA, 122 bp, Homo sapiens
tgttaagaggacatttgaaagctcctgtaactatcttgctaaagaacagtgcattcagtacgtttcagtactacttgccaaacctacaccccagaaataagtaaatcaaaagcagagaagaa

SEQ ID NO: 49716 - DNA, 122 bp, Homo sapiens
taaattagattttttaaaacacagagcaagcgccagaggcgtcggcatcccaggtgtcgccgcttcctgctgcacagggctcggcgtacaggtccctccctcctcaagccccctccccttct

SEQ ID NO: 49717 - DNA, 122 bp, Homo sapiens
catcttggggtcagggtcctgcaagcccctagggcgcctaccgcagtgcctgacgggccgcgccgcaggtccaccgcgcatgcctgaagaggaagcccaggcccgtaagtgcaaagagcgca

SEQ ID NO: 49718 - DNA, 122 bp, Homo sapiens
tgacatagaagcagcctgggacctggacagcaggcaaggaaggaactgccagccgtcccacggcctctcaggccaccagttgggccagccttgggctgtgacccctgagttcagcgtgtgag

SEQ ID NO: 49719 - DNA, 122 bp, Homo sapiens
ccacgggtgtgggcgaggcctgacgcggtgggcgtgccgcgagtcacctggccccgcccacggcgcacttttcctgcaggatggggacgtgcagcgccacctctacctccaggacgtgatca

SEQ ID NO: 49720 - DNA, 122 bp, Homo sapiens
acagagtgtggttgaggcaaaatgctgagatgaaacctaacctaatatgtgtgtattagacggtagcatcattgtcaaaataatacttgttcaaagtccctgaaaaccaaacggacaacttg

SEQ ID NO: 49721 - DNA, 122 bp, Homo sapiens
gtgggtgtggggccgtccgccccctgcagcctcactgaacacacctgcagcacgtgtgtccgcatcatgatgtccacaggggtgttcaggaggttgtgtcaggttctgctggacagcaggag

SEQ ID NO: 49722 - DNA, 122 bp, Homo sapiens
atgagtatttattaagcgcctactatatgccagctcacactgttctggaaactgaggatacggagaggaacttagcaactacactttaaggctgtgtagagctgataggttttttcggggta

SEQ ID NO: 49723 - DNA, 122 bp, Homo sapiens
cggcatgtgcatgctggagatggccacctctgagtacccgtactccgagtgccagaatgccgcgcaaatctaccgcaaggtcacttcggtgagagggatggggctggcgggaaaggcaattc

SEQ ID NO: 49724 - DNA, 122 bp, Homo sapiens
gatcacagcccttccccgatcctctccgtgggagccagcgagcctctctccctgatcttacgtgctcaaggtaagacagcacttctgcaggcagctcacctaccaggggttgctatggggga

SEQ ID NO: 49725 - DNA, 122 bp, Homo sapiens
cgtgtgtccaccagcttgtgtgcacgcatatgagcgagtgcgttttgctcccagcttggtcgcagcgacggcgcagggaaccccgggtgaggccgaggaccgggaagggaggagggggctcc

SEQ ID NO: 49726 - DNA, 122 bp, Homo sapiens
ccggacctgttgcgcctctgtgagtttgccttatttctacctactcggtgtctttcggcacgccgacctgtttcccacctgcattcagttcaaggcaaaaaggctgtgagagcacgctacag

SEQ ID NO: 49727 - DNA, 122 bp, Homo sapiens
gggccgtgggcagcgccgcctaccagaccgagggcggctggcagcagcacggcaagggtgcgtccatctgggatacgttcacccaccaccccctggcacccccgggagactcccggaacgcc

SEQ ID NO: 49728 - DNA, 122 bp, Homo sapiens
gatagcaggctgggcaggcgacagcgccggtgacagctgtgttagggtgggcagttcggacgcccgccctgcgggagcgggcggggaacgtcagcctggaatcctggggtcccccgaccccc

SEQ ID NO: 49729 - DNA, 122 bp, Homo sapiens
agatggttttgtgctgagtcactgtccacaggtgcccttagcagagaaggcttcctgtgccgggcagcaggaagtaccaatgcaactggaatcacttctcccatccacccccaaccaagaca

SEQ ID NO: 49730 - DNA, 122 bp, Homo sapiens
tggtacggtgactatccataaatctgtcatctagattcagcaagaatttggccatacttccgtcttccttctttatccctacccctgcctcacccccgcttgttctcactgtacatatgtgt

SEQ ID NO: 49731 - DNA, 122 bp, Homo sapiens
ccaagaaggaagcttagaagccgtctagagcactcctgtgggcatgcagagcgcctagtgcgtgccaggtccccagtgcttgagcaccatggtgtattttaccttctcctaaggatttttgt

SEQ ID NO: 49732 - DNA, 122 bp, Homo sapiens
taacaacacagaaggtaaaccgacatggatggaggaaaagggcacatcattagcaatactcgatgacatcacaacccagtggcctattccccgaggcctctaaagttctcaacgaaaaaaga

SEQ ID NO: 49733 - DNA, 122 bp, Homo sapiens
ggaggagctgtgaaaatggaacggggccggcgacgctggagggagcgctccgaaggagcgcggaagaaagccctgcttagctacagccaatcaggagcgcccgtgcggcgcttatagacaaa

SEQ ID NO: 49734 - DNA, 122 bp, Homo sapiens
cacggcactgcgcgctggtgggcacctcacccgacgccagctgccagcgcgctccctccccgaaaccctgaagtggggtgtcttgtctagcgcccagcgaacaacattatccaattgcttcc

SEQ ID NO: 49735 - DNA, 122 bp, Homo sapiens
gaggctgaggtgcaaggattgctcgagcctgggaaggttggggctgcagtgagctatgatcgcactactgcattccagcctgggcgaccctgtctcaaaaacaaaaacaaaagagagatgaa

SEQ ID NO: 49736 - DNA, 122 bp, Homo sapiens
acacccgcacggggcaccgggtttgtccatgtgggtgacactgccttcaaggcccaggcccgatggggcccttcctggcgtcctcctcacccccactccgccgcgcctcccctgtccagctg

SEQ ID NO: 49737 - DNA, 122 bp, Homo sapiens
gaggacatcccggggttgcggggcccggactggggtgggggtcgccggaccgggggtcaccgacgctgggccactggagggggacggtatcggcccgggcccgccaatgtcgtcctgccgat

SEQ ID NO: 49738 - DNA, 122 bp, Homo sapiens
accagcactggcgtgattttataatgtttgcactttcaactatagcaagataaatgggtgcgattaccccgctccccgcctgggaacatgtggcctggcatatgtggggccaacctcagcag

SEQ ID NO: 49739 - DNA, 122 bp, Homo sapiens
aagtaaggtaggtaaagagaaactgcatcccactcacccaaatcagaacactggaccactcgaagatggcattgacagcggaaggggcacactgggcctagggagggctcgaagtcgcggtc

SEQ ID NO: 49740 - DNA, 122 bp, Homo sapiens
atgcttgctctttccagggcgaccctaccaatgagaaaacaggctgcagtggggagtgaccgccccaaggacacacaactgctgcaagggtgtcattgtgtaggtgttcctcacttgcctcc

SEQ ID NO: 49741 - DNA, 122 bp, Homo sapiens
ctccaagggggcccccagcgggcggggttgatggtgccgtctctctctctgtcactagaacggacatgaggattgtgtcttgtcgatccacgtcctgagttcccagacgtcataggtgcttg

SEQ ID NO: 49742 - DNA, 122 bp, Homo sapiens
ctggaagagtccgctcagagcaggtgctccagggagattctggagtgaacaggtgtgtggcgggtgggtggagggacgaaagggcgaatgaatgagcgctggccgccttctcccggcaggcc

SEQ ID NO: 49743 - DNA, 122 bp, Homo sapiens
tggctggcagcgcccacggggtgcgcatccgcattcacaacttggtccaaccatcgggcccgcctccatgacttgttgagagccaccagccaagttttggctagggctgctccccgatccct

SEQ ID NO: 49744 - DNA, 122 bp, Homo sapiens
cgtttccaggagggagcggcctttgctcagcgcgagacggctgggcgccgagtgggacagcgctggtgcggagactgcttccggactccaggtaccgcgcttggcggcagctggccccagac

SEQ ID NO: 49745 - DNA, 122 bp, Homo sapiens
acatatttcaagactcatctattttaaatttcttctctgcctttcttgtttagacttgaccgctcactccttagtgtctttactttaaccctgacctgtgatgtaacctataaaacatttct

SEQ ID NO: 49746 - DNA, 122 bp, Homo sapiens
ctagagcagtgtgcttttaattgctcctttaatatctttctcttttgtgcctttttagcgcgaaaagtgtatgggaagactaggtgctcgttagcggctcggttagaactacattgcccaca

SEQ ID NO: 49747 - DNA, 122 bp, Homo sapiens
ccagctgctgtgtactgtggccctgtgagcctcagtgtcccttcttcatgtctgccagtgcgtccagggcacaccctgggcctcttgacacccccacccacacaggcacacattgcccctta

SEQ ID NO: 49748 - DNA, 122 bp, Homo sapiens
gtctggaggattttcctctgaggaaggtaagattgaaggtatctggactggggaaacttccggcacagttgtgaacagataagccagactgaaaatgctgaaaatgaggggattaagtgacc

SEQ ID NO: 49749 - DNA, 122 bp, Homo sapiens
cgctctgcgggtaggaccgaggagcaaagcattatcgcgagatcagggccactatttgagcgcatgcgcaagacatgctagtctcttttccggttagcgcggcgtgagaagccatgaggtga

SEQ ID NO: 49750 - DNA, 122 bp, Homo sapiens
gctactagtccaggaggctcagcctctggagtgggtccaggaccggctccagccgacttccgaccctctggggccgactgagccctggttttcctgctcccccagtctcccacccgaatctc

SEQ ID NO: 49751 - DNA, 122 bp, Homo sapiens
cactggcggcacatattgaggccatatttccggatcagaccgtgccggtttgaacagacacgactgtaagaaaagagacagcggttttgcaggtcatagaaattacaagactccgcactcag

SEQ ID NO: 49752 - DNA, 122 bp, Homo sapiens
gcctccgcgacgcattgtatttttcctaaactgcagttccccggcaccctgtctgtattgcgtattggcttgctcagctatactgtgtgcatttcctaagaaagacggagcagcagatgagg

SEQ ID NO: 49753 - DNA, 122 bp, Homo sapiens
ccagactagacacagggcaaggtatgcaccgctgtcgtcatggagcaggcccttgcgtaacgggccccgctctcccacttgggctacgcacgttcctaactaacaaaacacgacgctcatcc

SEQ ID NO: 49754 - DNA, 122 bp, Homo sapiens
aacaaagacgtagctccttctgggtagggcattttgttcatgctctcagatgccgcctaccgccctagagcaggaaatagcggtcagcgccagctgtgaggagcacagcattgcggccaaca

SEQ ID NO: 49755 - DNA, 122 bp, Homo sapiens
cccgatgcaaggcaaggagagagctcgaggtggtggctgctggttagctccctctgggcgcggatctggccagaagtgaatgcaccaacatccataactcctcggaaaagccggctgactcc

SEQ ID NO: 49756 - DNA, 122 bp, Homo sapiens
agttgaggaaagtctgttccaatcttaacccttttggtgctggctttgttttactgaagacgaaacagagggtccaagtggttacatcccgagcgccggcagtggctgcacgaggcaggact

SEQ ID NO: 49757 - DNA, 122 bp, Homo sapiens
gagcagagcccttggagcaaggctctcctggaccacagtcgtgaagtggcgaggaccccacgggacccctcatgcatgccctgctttctgtcgtctattgcaggtgcctgcacagctcacgt

SEQ ID NO: 49758 - DNA, 122 bp, Homo sapiens
ctaggcgcagacgcactgagcctaagcagccggtgatggcggcagcggctgtggtggctgcggcgggtccgggcccatgaggcgacgaaggaggcgggacggcttttacccagccccggact

SEQ ID NO: 49759 - DNA, 122 bp, Homo sapiens
ccaggcgcacccaatgcaaaaatttgctgtgtttcatgaagcattttttgagcatcacctcgcctcttaccacctaaacactctgagcttgtattacctgtttaattactgcctcgctattc

SEQ ID NO: 49760 - DNA, 122 bp, Homo sapiens
gcatctgtttttgtcatcaaggagggggctgtatgtggaattgcaaggccaaagacatctcgggtcaactcttctcaggaccagatccaagtcgccagtgagaacacacattcaggcagcct

SEQ ID NO: 49761 - DNA, 122 bp, Homo sapiens
agggtggcgctgctttgccggaccatcctgaattttctcctcaggcgtccttcccgacatcgagcagttcttcaacatcggggacagtagctctgggctcatccagaccggtgagtggggac

SEQ ID NO: 49762 - DNA, 122 bp, Homo sapiens
cccacccaccatgggtggcaggtgctcacctggccggaggggcggtacgcgcggagcttgcgcagagaggccgtggcgtagcacagcagcaggaggacgccggggctggcatacacaggcca

SEQ ID NO: 49763 - DNA, 122 bp, Homo sapiens
gggagctgaggcgagtgcagggagccaggccagtggaaggcctggagtccaggctgggtgcggggagccaaggacggttggcgggactgatgcagcgcagtggggctccgagaaccgcagga

SEQ ID NO: 49764 - DNA, 122 bp, Homo sapiens
gaccgtacgctggaccttgcctccccggctcctaacgggagacgggctgccgtaaagcttcgctttgccgactgctgcaaagcgccttacgactgaacccggaatcgacctatggccagcag

SEQ ID NO: 49765 - DNA, 122 bp, Homo sapiens
cttgaggcatcaagacaggcccatcatctacccaggagttcttttctcagtaggactttacggagcgtggtcaccgccctgggacccggcccactcagccaaggctatgtcactcactgggg

SEQ ID NO: 49766 - DNA, 122 bp, Homo sapiens
cgagcctgggcgctgagctgtcgtagccgtcgtaggcttccatgtagtcgtagccgcagtcggcctcctcctcaacctcaaaggtccggaatgtcagctccacgccgtagccgtcctctgcc

SEQ ID NO: 49767 - DNA, 122 bp, Homo sapiens
atattcaccagcctgtatcctctgacgggggataaagcggcctctgctgagcccatttttcgcttcttggtcccattctgaaggaacagcttcatctcatgtattcgtgtgctctctgctcc

SEQ ID NO: 49768 - DNA, 122 bp, Homo sapiens
tgtgtgtatgcatgcgtgtgtgagagagtgtgtatacgtgcatgtttgtgtgttcatgtgcgtgcgtgcatgtgtgagtgagcattagtgtccgtgattctttctgtgccctgggctcctgg

SEQ ID NO: 49769 - DNA, 122 bp, Homo sapiens
atgactgtttcaattagagaaaaatcaacaatatgtgttatggatgaaaaatggtttggccgtgtttacttccactgtctgttgttcataaacatgcatgcacagccctgtcagtttatctt

SEQ ID NO: 49770 - DNA, 122 bp, Homo sapiens
cggcagctgtagcggaggtggagggatgggggactgtgacccccgtgagtgccggcggggcggggcagctttaaaaacttctgaaaggcctggttcaaagcctcaaaggatagaacttgggc

SEQ ID NO: 49771 - DNA, 122 bp, Homo sapiens
atgcgcggtggagcttgtgctccggaatccggtgcggaggcttgggctccctgcgcttagcggtgtagtcgctggacagctccttcagccggaatctccgcgggtgaagactgcggggatcc

SEQ ID NO: 49772 - DNA, 122 bp, Homo sapiens
cgggaaagttgccattgcccggcgtatgccacctccagccaaccttccaagcctgaaagccgagaacaaaggcaatgaccccaatgtctcactagtgccaaaagacggaacaggatgggcaa

SEQ ID NO: 49773 - DNA, 122 bp, Homo sapiens
cgcaaacaccggagttggggaaaaccaagtaataaaaccctcgaaactgcgcctgcgcgccggagggttacacgcaatcccctctgggaggggagggaccttcctcaggggcgggaagagcc

SEQ ID NO: 49774 - DNA, 122 bp, Homo sapiens
aaaaatccaagcacttccgaggtctaaatagttttacttcctatagctatcatacaagaacgattcaaagtgccaattgttgccaatgtcgtgtcattcatggatatgtcagtgattcttcc

SEQ ID NO: 49775 - DNA, 122 bp, Homo sapiens
cagcagaggaattcatcaaggtgcttcattattttagcagtgaaccaagaagatgtacatcgacagtgtttattttcaagatgatagaaaggaaaggacaacgagacgttttcctttactac

SEQ ID NO: 49776 - DNA, 122 bp, Homo sapiens
gggaaaagtgacggcgtgtcgcagcgggaggtgtgtggtgcaggcccacaaatacggacgcgtggcggaacccacacctagggcgctggctccgccccgcaagccgctcgccgtgaaggggc

SEQ ID NO: 49777 - DNA, 122 bp, Homo sapiens
tggtgccgaggttaaagccctggagccagactggatgggttcgaatcccaggcccacctgcgagaccctcgatgtgttacttaaattttatttcctcctctctaaagtggaggcagtaagct

SEQ ID NO: 49778 - DNA, 122 bp, Homo sapiens
tcggggcaacacctaagtcagtctcccacatgtgggtcatggaaagagccagggcctggacgccaggaggcctgggttccagtcaacattccctgtgacttttacaagtcgcaagtggatga

SEQ ID NO: 49779 - DNA, 122 bp, Homo sapiens
aatgtaacgttgcaagggaagcaaggtctctgtgtaaacctcgtaatcgccaccaaaagtcggtagctgggagccttcaaagcccgccaaacacactggaagcatccacagctgttttaaat

SEQ ID NO: 49780 - DNA, 122 bp, Homo sapiens
tgtgacacgtgactcacgtgtgcgattgacatgattggcacatgacctatatcattggcacgtgattggcataggtccaaaatgtgacaaatgatcgacataagtgacacgtgatcgtcaag

SEQ ID NO: 49781 - DNA, 122 bp, Homo sapiens
tgcgggcacacagcgctctcctctccccactgctatctcctcgtccacgctgtcgtctgccgcccccacccagaagggatacaattttcgcccaacagggaccgtgggaatcccttgggagg

SEQ ID NO: 49782 - DNA, 122 bp, Homo sapiens
gggagataaggagcagagaggctggctagaccgagccatggtgaggaaagacagggcggacgacagaagtgctccacgggtgaagggacatgctgggccatcagccacataagtctgatttg

SEQ ID NO: 49783 - DNA, 122 bp, Homo sapiens
gagacggtgctgcagcagctggacgaggcgcagtcgcagatggaggagctcttccaggagcgcaagatcaagctggagctcttcctgcagctgcgcatcttcgagagggacgccatcgacgt

SEQ ID NO: 49784 - DNA, 122 bp, Homo sapiens
attagaaaatcagttcagaaaggcaaggatttgttttcttattctctcccctattgtatccggagtgtttagaatagtgcctggaatacagaaggtatttttgaatgttttggatatttgtt

SEQ ID NO: 49785 - DNA, 122 bp, Homo sapiens
ttccgtcccagcgctgatctctgcaggggcggggctgcgtgtgcggcgtcatgacgtaagcgcacgccggcgcgccggaggggaggaatgcggcaggcggaaaacttaggaagagctggatg

SEQ ID NO: 49786 - DNA, 122 bp, Homo sapiens
acacaccctggggtctcctcagaagcagtgcctgtgccccgagatgcacggccaccaccccgcccctgaggccctggatacacggccactaccccgcccccgacgccctggatacatggcca

SEQ ID NO: 49787 - DNA, 122 bp, Homo sapiens
cccagctctccgcacccggaaggacctgttccacctctccggctcccgtacccctctatccgcatctgagtgaccagatcccactgcagtcaacagcccgcggggtagccagcttcgaggga

SEQ ID NO: 49788 - DNA, 122 bp, Homo sapiens
ggggactgcagttaggcccctactagtggcactcctcccatagggacgctttccacaccccgggccagaccctggtggtcacagaggcctccagggccagcctggtcctgacacagccgagc

SEQ ID NO: 49789 - DNA, 122 bp, Homo sapiens
gagaaaccccgccgtgtcatttgaccatataaggagatgcacgcctcggctcgctggcaccgggcgtggggcgcggggggcgggcgcccccaggcctcgcggttgccgtgcccccgccccgg

SEQ ID NO: 49790 - DNA, 122 bp, Homo sapiens
acagagcgcctcagcggggtcctagacacagagcgcctcagcggggtcctagacacagagcgcctcagcggggtcctacacacagagcgcctcagcggatcctagatgcagagcccatcagt

SEQ ID NO: 49791 - DNA, 122 bp, Homo sapiens
cctggggcccgtttgctgcccacgggaggagccgccgtcaggggtatgtgagtgcccgggcgcggggactgcgggctgtggacagtcggggagcccggcggcttggtctcctccacagtccg

SEQ ID NO: 49792 - DNA, 122 bp, Homo sapiens
gctggtactaggggcctggctagttatggctgcccctattcctcaaaggtgtttccaggacgggtggccgcttgcaattggagcagtggagaaccagaaagacgaagatgccctcagggatg

SEQ ID NO: 49793 - DNA, 122 bp, Homo sapiens
acttcttgggtggccaggcctctggactggaaacatctgcagcccccctcttggcctcctcggagccgtgtttcttggggtttgtctttgaggttctcttgaggcttgtctttttctcttgg

SEQ ID NO: 49794 - DNA, 122 bp, Homo sapiens
acctgccaatcgagctatgctttccctttctcgaaggagagagaagtaatccttttccatcgtatttgcttataagaccttgggacaaggaagccttgagagatccggtgagggacttcggc

SEQ ID NO: 49795 - DNA, 122 bp, Homo sapiens
cattgtcaaccccctggccctgcagttggggccctgattcctgcacgtcccaggactggacgaggattgccggctttcctacttcacagatgatgaatggggggagtggccacagcttgcag

SEQ ID NO: 49796 - DNA, 122 bp, Homo sapiens
aaagccggccgagggtggggagcagggtgagggctaggtcagagtcttggccacacccatcgttcccctcccttagagtcttttcagacctatcctccacctttcccacccctcccccacac

SEQ ID NO: 49797 - DNA, 122 bp, Homo sapiens
ggttcaggggaaggggtagggtggccgggatgaatgggaggccagcgaactgacctacggcggggagggacaaaggatcagggagcgcacgctgggcggggaggccgggaggaataccccag

SEQ ID NO: 49798 - DNA, 122 bp, Homo sapiens
ggcgcgcaggcgcggtccatcccgcccgcagagccgcagtgccgggcgccagagcagcggcgccagagcagctgcaccatcccggcgttcgcgtgtgccgccgctttcctcctccatctctt

SEQ ID NO: 49799 - DNA, 122 bp, Homo sapiens
tggggggcggcggggcctcgtcggctccgccttcgcttgggacccagccaggccgcgggacgctccagtctttacagtgatgacctgatggctttcctcaaaagagctcggaccactctcct

SEQ ID NO: 49800 - DNA, 122 bp, Homo sapiens
tttcccagtatagttcgtcctctattgcttttcattgccctcagccttttcttgttccgtcgtctcctccttcttctctccccagttctgactcttggcctctgtgtgtctctgggtttctt

SEQ ID NO: 49801 - DNA, 122 bp, Homo sapiens
ccggaggctacagaaagctccagatgccggcgccacagacaaggcgaggattgtcccgggcgcacgggaggcgggggaggggcggcggctcgggccggcgggcgggagacagggactctggg

SEQ ID NO: 49802 - DNA, 122 bp, Homo sapiens
agaagccaagcactacccccgagggttttgcagctttgcagtggctaggattcattctttcgttcactaaatacacctacgtatccaggctaccgaatattgggccggacactctcctggct

SEQ ID NO: 49803 - DNA, 122 bp, Homo sapiens
cctggtccagggtctctgcactggccctgaccctggcaaatgtccctgactcctggggctcgatttcctccggccaagaatggacggtctcgcgcttggtccctggcctccgagttgtgccc

SEQ ID NO: 49804 - DNA, 122 bp, Homo sapiens
ggccggacctcttcgccggtcctcgcgcgccctctgctggcggcttccaggaagcgcgcccgtggcccccaatacccgccccgcccccagccaggccccgcagcccggcaggccccgcaccc

SEQ ID NO: 49805 - DNA, 122 bp, Homo sapiens
ccttcaccagggtcttgtccgtcccggttttggcgcgctgcagcccgctgacgttctcaccgatccacgtgatgagggcaaacttggacctcttgctcatggcatccccggtggtgaagcgc

SEQ ID NO: 49806 - DNA, 122 bp, Homo sapiens
tgacttcctgctgtacctggaccctcactactgccagcccactgtggatgtcagccaggccgacttccccctggaggtgagtgggagccccagtgtgtggttggggccatggcgggtgggca

SEQ ID NO: 49807 - DNA, 122 bp, Homo sapiens
cttccctctccaccctcctcctcccccgccccctcccgccccgcccgcgcgccgcccgctcgcagccactcgcagcccaggctcagtcgcagcccctcggagtccggagcccgccgtccctg

SEQ ID NO: 49808 - DNA, 122 bp, Homo sapiens
caagcagcgagtgtagccaatgaaggcctagcagagcggcgtctacgggggttcgcaatgcgtgtgggcgggacttcctgcaacgcctcctggggttgtcaatatggctgcgttgggatctg

SEQ ID NO: 49809 - DNA, 122 bp, Homo sapiens
gagtggagagagagagacacacggatatagaccgacgagagtcaatgcgagtcaagttaacgctttctccgccccgatgcacaagtacccccctcccgtgttaattaattccaaacaaagca

SEQ ID NO: 49810 - DNA, 122 bp, Homo sapiens
ctgaacctgcgtcatccacgtttgtgcggaatccctgtgtgtgtgcacacgcatccaccccgagcctctgtgtgcagagctccaagcacagacgtgttcatcaaggacaagcgggaagccgg

SEQ ID NO: 49811 - DNA, 122 bp, Homo sapiens
gggacatgaaatctccttgtcgtaggcggacttaaagtgtccttcgaggaagctcctgtccggagccaccacccagccagacagcagcatctgcaggtgcggtgccctggacctgccccagg

SEQ ID NO: 49812 - DNA, 122 bp, Homo sapiens
ggattcaggcgcaggtccctccgctgaccctgcctgagctccccctgtatgggactttgccgggggttcgcgctgggaacacagacccctgccccatcaggctcagtgtccagagagggagg

SEQ ID NO: 49813 - DNA, 122 bp, Homo sapiens
ggtgcccggtgcccggtgcccgacgctccgcctcctcccagccttcggccctcgggttttcgcccggataccctaggcgcctccgggacatctccacatctttgcctacggcgcctagccca

SEQ ID NO: 49814 - DNA, 122 bp, Homo sapiens
agttccaggcaattccgggggctgccccacagaagcaggtggggatcgacagtggctctccggcccagggaggagagcgcggtcgcgggtccctcccctcagcctggaggctgcagccgctc

SEQ ID NO: 49815 - DNA, 122 bp, Homo sapiens
gcggccgccggggctcggacctgcggcggggcgccgagggggcggggtaggcggggaggccgcgccggggtcaggggggccagcgcccaccgggtacgagcgcgctggtgaggcaggcccgg

SEQ ID NO: 49816 - DNA, 122 bp, Homo sapiens
tggcaagaaaaacttaaacattatttactcagccatgtgcgagttaaaaccaatatctgccggccatctgttcagcccagtgaccccttggaatttcacgccccttcccggtgacgtcagca

SEQ ID NO: 49817 - DNA, 122 bp, Homo sapiens
tgctagtaacaccatgcaggttgaacctggaaaccagcagaagcactgggtaggtgaaatcggatcctagaaagctcatgagccgtaagcaggagggggcaaccatgggctcctggggtggt

SEQ ID NO: 49818 - DNA, 122 bp, Homo sapiens
ccgccaccgacgcctgcatcattgaaaaacatgttcccccttagtcttctgggttcccagcgagcagagggttaaatctattctctcagcgtcgtgacctcctttttcagttcgcgcatctg

SEQ ID NO: 49819 - DNA, 122 bp, Homo sapiens
aaccaattactatgctactggggggcccaggagaagcagaaggaactggaccgggacagccgctcacgcttcaagggcaggaatggaggtgactccaggaacctgtcaactgtgggggcagg

SEQ ID NO: 49820 - DNA, 122 bp, Homo sapiens
cttggaggctcgggctccgatccggcccccttcccacgctcggggcgctgtcttcccccccggaagcctggccctgcccctgcgtttacctgtgcgggaactcggccaccgcgtgctccggg

SEQ ID NO: 49821 - DNA, 122 bp, Homo sapiens
agcttctgggagaaaggacctcccctggggtggcagaagcgctcgcctgttcacagccaacggagggtacggtataaaagtcaagccaggtttcaaataaattcaattatgtcataataata

SEQ ID NO: 49822 - DNA, 122 bp, Homo sapiens
atagacacttagcatttattgtaaaagctgtattttatagagaacagtagaaatccaaatcgttgatagttttgcaagacatagccaaaaagtgaagataaatggtggattttaaaaattgg

SEQ ID NO: 49823 - DNA, 122 bp, Homo sapiens
aatgggcttagttttaaatgtttctgcattcggccaagtggagcccaagaagccagaagtcgcccgcgggagctgtccgcggtgctgaacgcggtagccggcttcagcctttgacctcccca

SEQ ID NO: 49824 - DNA, 122 bp, Homo sapiens
cgacctgctggggcggaatgtctgtgggttttagggtcctccggaatgcactcttgctcgcggagggagatgagcagatgtgatgagtttccatcgacagagctggtgacagaaattacaga

SEQ ID NO: 49825 - DNA, 122 bp, Homo sapiens
gaggcggtggacagggtccccacgtgttctggggtcagaggaggtgctggacagggtccccgcgtgttccggggtcagaggaggctggacagggtccccacgtgttccggggtcagaggagg

SEQ ID NO: 49826 - DNA, 122 bp, Homo sapiens
ctgctaacggtatttctagaagatgggcagaggacaagccaaaccccgggagggaccacgcggcctgggaaacagttcggcaaggaggccgggcccctgtcccgcctctgagggcggaggac

SEQ ID NO: 49827 - DNA, 122 bp, Homo sapiens
ctcccgggaccagaacagatgagtttggagaggagggaacttgaacttgggtccaatgctcgatggctccaaggtccgcgccgtccctaccatagcagattcaccgttcgagcgttccattt

SEQ ID NO: 49828 - DNA, 122 bp, Homo sapiens
ctgcgccgtcctttcctctgtgaggggcgaggtggggcgggaatccctcagccagcccgacgaaaactgcagaggcttctgggccttttaactttggagaagttgaggaccttgtcgctcat

SEQ ID NO: 49829 - DNA, 122 bp, Homo sapiens
gagccacttcacaagcagagaacctgggttttctcttttcttggagtacggaggtcactccgcttagcgcatcactccactttggctcgtaatttcaacctctcctaaaatagcaaaggcgc

SEQ ID NO: 49830 - DNA, 122 bp, Homo sapiens
ggccacgagcgcttcaggtgcgggtagccggggcgcgggagggacttctggtggggggctcggtgagcgtgctttaggccacggcaactcccgagaggccaactcagaggtcaggcggaggg

SEQ ID NO: 49831 - DNA, 122 bp, Homo sapiens
ccccgtgtagcgcagtccctcctgcggcgctgggatccccggcccaccctcactccaccccgcctacaccgcgccccgggtccagcctcgacctctcctgctgcatggggaccccgccccac

SEQ ID NO: 49832 - DNA, 122 bp, Homo sapiens
cctacagcctcttcagttcagtttcccgtcctcattctctgccttttaccaggactgtatcggttcatttggtccttgttctcaagtagaccacagggcagtctacttgagaatgaatgtct

SEQ ID NO: 49833 - DNA, 122 bp, Homo sapiens
aagctaggattgaatgatgctggaggccatgctccctctgctgtgcctcccatgggtccacggcatctccacctgagtgtccctgaggcccccaaaactgcccactcaggggaaaagagacc

SEQ ID NO: 49834 - DNA, 122 bp, Homo sapiens
tgctggtgtgtgctgctgcctcagacgcccagcgtcgtggggacccttgtggagggtctgcgaagcctcgtggggcaggcggcaggcaggagtggagggtctgtggcgggaggtggagggtc

SEQ ID NO: 49835 - DNA, 122 bp, Homo sapiens
cgtccccgggcgtgtactgggctcggtggcgtccaggttccggtgaggacgggacggccccgagaggagggtgcgggtctgcaggaagagcgggtgtctctgagagtgcatctgcgtgtgtg

SEQ ID NO: 49836 - DNA, 122 bp, Homo sapiens
ctagtctttggtagcctaacccttctggctttttcaactgttctttctttctgaaactcacgtgttgcatttggacttaatgaactggctctttgcatttttttcttttgagacagagtctt

SEQ ID NO: 49837 - DNA, 122 bp, Homo sapiens
cccgccgtgcgaggcagtggctccggcccttccagctcgggatggagtcagggagccgcccgcgcccgaatgcagaggctcctgcgatggccccggagtgagtcccccagaggagccggatt

SEQ ID NO: 49838 - DNA, 122 bp, Homo sapiens
gaagagtctgcggaacagaagcagcccaggtcttgggtcagagaatggtccttgctgtgccgggtcctgtgtaggagtgtgggccggtcccatcacccagaaagcagagccctcttcaagcc

SEQ ID NO: 49839 - DNA, 122 bp, Homo sapiens
tatctctgatagagtagtgggagactattcatgagtctcctcagttcatccttcccagagcgccctcagtgcatcctccccagagtatcctcaatccatcctctccgagtcccctcagtcca

SEQ ID NO: 49840 - DNA, 122 bp, Homo sapiens
agcctccgtgacttggggcaccgtcatggtggatgctgacgtgtcctgctgtgagcctggcggtgcgactcatcctccggccgcgggaacagcatctgtgactcttctgcgcaacacgtgga

SEQ ID NO: 49841 - DNA, 122 bp, Homo sapiens
gccggagccggccttcgttcaaggtctccatgaccagggctcggaccgcgcggtagttggcgtagatgtggagggcagtgaggaagaagaaacatccaaggctgaagctggggtgagagagt

SEQ ID NO: 49842 - DNA, 122 bp, Homo sapiens
cacagtttccagaaaaggaggatgctgtctcggcggctcacttaactcaaaacaaatgctcgctctgccggctccgcgcccgcctctcccggctcccgggccctgccgtcctcttgttccgt

SEQ ID NO: 49843 - DNA, 122 bp, Homo sapiens
ttcaagcgattctcctgtctcagcctcccaagtagctgggtttacagccatgtgccaccacgcccagctaattttgtatttttttagtagaaacggggtttctccatgttggtcaggctggt

SEQ ID NO: 49844 - DNA, 122 bp, Homo sapiens
gaagtgaggagcgtttctgcctggctgcccatcatctgggatgtgaggagcgcctctgcccggccaccccatctgggatgtgaggagcgcctatgcccggccgccccttctgggaagtgagg

SEQ ID NO: 49845 - DNA, 122 bp, Homo sapiens
tggcttctgactagcctcagtgaagtcactttgcaatcagcacctgtgtgtctgtagctgcgggccctgaggccttcgtgtatgtagcacagggagccagcagagggagctgtcgtcccaga

SEQ ID NO: 49846 - DNA, 122 bp, Homo sapiens
cctcccagggccagatggggattgcttgaatatttctggcgtatttcacatatttaataacgcccttggaggttcttccagaactgataaaaatgtgggatagacagtgttcacagaaagga

SEQ ID NO: 49847 - DNA, 122 bp, Homo sapiens
ggctgcagactccttcctctcccgcagggtcctagaggcctcggtgcagtcggcggtgcgcggcggtgtccagcgagccatcctcacccagctccggccggctgagctcaggcgcttcctgc

SEQ ID NO: 49848 - DNA, 122 bp, Homo sapiens
cggacacctctagcgccctgtagggttgccatggtgacggagcgcttaagggactggcaacggggattcccagagaagggtaaagggatcactctcccgtgtgtgcaggttcctaatgccca

SEQ ID NO: 49849 - DNA, 122 bp, Homo sapiens
gagtcttgacgggagaacggagcccttctaaaacccggggatttgaatgcctgcaggatgcgcggtgcgctaggggcggtcacagcttcctccggagcgcccgcctcctagaaggccttgcg

SEQ ID NO: 49850 - DNA, 122 bp, Homo sapiens
cgcagcgtctagcagggaagacggtggcccatgggcaggtgccggcaggtgtgtggggtgcgattcccactgctgtggagaaagcaaagcagttgggggactatgatatatgggtgcttagg

SEQ ID NO: 49851 - DNA, 122 bp, Homo sapiens
cagtggctctgctgccacctcggacggacagatgcaaacttataatccttccgtgaccttcgcattttctttgttggtgtttttattgcagatgagctcggccttctttctgtgtcagtcaa

SEQ ID NO: 49852 - DNA, 122 bp, Homo sapiens
tgggaaaaactcctccagctgcaggagtggagggggctcatggtggggaaggactcctggcggtctcatctccagagcctcagtagtcccctaatccctggctctgctccctccaccccacc

SEQ ID NO: 49853 - DNA, 122 bp, Homo sapiens
cctcttcttctgttcactggatttgacttcttcagctggtgccaacttcagggtccccagcgtgggtgggggcggctgctggggggccagctgaggctggactccagggtgtggcgctatgg

SEQ ID NO: 49854 - DNA, 122 bp, Homo sapiens
cctgaccgtgtcctgttaacctttgatggctttgacgagttcaagttcaggttcacggatcgtgaacgccactgctccccgaccgaccccacctctgtccagaccctgctcttcaaccttct

SEQ ID NO: 49855 - DNA, 122 bp, Homo sapiens
gtgtatcatgtctttgccagactggatgcctttgctgggccatgctattctcagacctcccgccttcacccccagggccccagatcgtgtcacatccatatgacacttggaatgtgacaggg

SEQ ID NO: 49856 - DNA, 122 bp, Homo sapiens
tgcggagggcgttcagtgagagctgagcctctggggacagagcatagaacccacgaaagacgcaggcacaggcagtaccccagcagcccatcagtcttgggaagccagacctttccggataa

SEQ ID NO: 49857 - DNA, 122 bp, Homo sapiens
gcagttggagttttcctaaagaagcagcctcgcacctgcatcctggctcgtggcggaagacgggccttgccctgagcggccggctccttcctaggcctcgccctgaggggccggctccttcc

SEQ ID NO: 49858 - DNA, 122 bp, Homo sapiens
cttgtaccagtacgcgggcccaggactgagcctgggcgcgcccggcggcggcgcgccgcccgacgacctggacctgttccccacgcccgacccccactacgagaagaagcactacttcccgg

SEQ ID NO: 49859 - DNA, 122 bp, Homo sapiens
gatctcagaagggtaagatacacaggtgtgtgtctctcctcagattgtggagttactttgcgccttccagggacccttccctttatgtttatggcctaatggggttgaaggtgccatagtag

SEQ ID NO: 49860 - DNA, 122 bp, Homo sapiens
ggcgggtcaggcctcattggtttccggcggccccaagggcgaggtagccagccaccaagccgtcgcaggaacatggctggggtgtgtaatgggcccccaaattctgaggctgcttcctggca

SEQ ID NO: 49861 - DNA, 122 bp, Homo sapiens
ccgttcgcggggcctgggctccatgtcctacaacaacacaaccgcgagccccttcctttccgcacatgttaaactcatttcctagtgaattactgggaaggcgcggctgctgcccccaccac

SEQ ID NO: 49862 - DNA, 122 bp, Homo sapiens
ctttgacaacctttattggcactacggtacatatggaagggtcaaagtttctaatacgaccgtcagggtaaagtctaaacggtatttatgacaaggtgtgtgctaaaatcagctcacttgca

SEQ ID NO: 49863 - DNA, 122 bp, Homo sapiens
tccaccactgtgcctcctgcgcttagaacagtggctaaaacagatcatgcactccaggatcgtttgttaaaggatggatgaagtacaaattgacactggataatattgttctcttatcgaat

SEQ ID NO: 49864 - DNA, 122 bp, Homo sapiens
tcgggcactttctccccttgaggggtggggaggagggagaaatcggaaccggaatctttgcgctttaagattagataggggcagaaggcacgtaacccattaaagggacgtgcaaaacatca

SEQ ID NO: 49865 - DNA, 122 bp, Homo sapiens
tccccagatcggggatgcaggggaccgcgccctgcccctccgccccgtcattgacctgcgcgaaggcttcacccagggcaggctacctggcttctgagcagccgcagcatcattgcgtggac

SEQ ID NO: 49866 - DNA, 122 bp, Homo sapiens
agtagatggatgggatctatttggatgaaatgcgatctgttttccccaggctgggggtggcggggggcgctctaccctgtgtgatgtgtgtgtttccacttctggccatgtggggcctgaag

SEQ ID NO: 49867 - DNA, 122 bp, Homo sapiens
agtgatatctattttcatctttaaagttttctacattaccaaaatagtacctaataatcacgttagttttacaatcagaaaacggtggcagcaagcaatgacattaaactgaacatttttat

SEQ ID NO: 49868 - DNA, 122 bp, Homo sapiens
ggaggctgaggcaggaagatcacttgagcccagaaggcagaggtagcagtgagccaaaatcgtaccactgcacaaagaaagaaagaaaagaaagtggaaggaaagcagtcacccttagaagg

SEQ ID NO: 49869 - DNA, 122 bp, Homo sapiens
tacagcaagctggatcaagaggatgcgctcctgggctcctaccctgtagatgacggctgccgcatccacgtgaggactctctatctgggacactcccccaccccacctttcatttggttatt

SEQ ID NO: 49870 - DNA, 122 bp, Homo sapiens
cacttgggtcagagaactggctttgctcatcgccacatggtgtgacacgcaggatgtgcacgtggggtggggaaatcacattcagtctggaacatggaggtcaccgtgcgcaaggaaatgtc

SEQ ID NO: 49871 - DNA, 122 bp, Homo sapiens
ctactcccgagaggctccggcaatgagaataggccccgcccccccgcgcagccaagtctacggaccaagtccgagcctgcagacaagctccgcccccacgagggcctgctccggctgacagc

SEQ ID NO: 49872 - DNA, 122 bp, Homo sapiens
gtcccgcggcgtcctgcgcaagatgagcgacctgctggagctgatggtgaagcgcatggacgcactggccaggctggagaacagcagtgagctgcaccgggccggcggcgacctgcactttc

SEQ ID NO: 49873 - DNA, 122 bp, Homo sapiens
gtaggtagaaggcagggttggctctaacgaatttgaatgaggagcctcagcacttttcggcgccattttcgagtgatacctgatctcatcaatctagcggaagagacaggataacctatcca

SEQ ID NO: 49874 - DNA, 122 bp, Homo sapiens
cacaacccaaggccaatatgtgtaagtctactgtttaattactatcatagaattaatacacgctggtcaaaagagaacaagaagaccttgagaaaaggttcagggaagttagaatcccaatg

SEQ ID NO: 49875 - DNA, 122 bp, Homo sapiens
tttgaggttacagcatggaaggaaagagctgagcttcaaaggccgcagaagaagaacaggcggagttaacaggaaaaaccacagtcaggccctctgggagaggctggggttgcatggagggc

SEQ ID NO: 49876 - DNA, 122 bp, Homo sapiens
gccgtccggcactgatcaccgccatcgcagacccgccgctgacttccacccctccagattcggcagggtgtccactgcgcctctgatccagctaggcgcccactgccgctcccgatcgggct

SEQ ID NO: 49877 - DNA, 122 bp, Homo sapiens
cgaggctgcctgtgctgcctcccgccggcggggccctgagcctcctcgccctgtcggcggcggtcccctctgaccgcagggtcttcttctagagtcctgatcgccgaggctgagcggaggcg

SEQ ID NO: 49878 - DNA, 122 bp, Homo sapiens
ccagaagtgaatggctggctctccccgggaaatgacactgtcaaagccttgcccaaaccacgtctctttcggtctcttttgaagcaagatgagggccagggcagcagccgtcaccagggccg

SEQ ID NO: 49879 - DNA, 122 bp, Homo sapiens
gttcctcttttctttcaataggtctcaattctcattgtttcagcatggattccctttactcgcaggtgaccctgcttgttggtcctgtactcggcaattcctccttcagaaaagtgagctcg

SEQ ID NO: 49880 - DNA, 122 bp, Homo sapiens
aaaatgagagggggagcagaggtcaatgaaaactcccagcagaacctgcgaggcgctgctcgcggctgaaaggcccctttgccccgtcgcatgctgggaagcgtagttcccatcgcgagctg

SEQ ID NO: 49881 - DNA, 122 bp, Homo sapiens
agcgggggcctatggtactggaggtcccggcggccccggaggcccggcaggcggcggcggcgcctgcagcatgggtcctctgaccggctcctacaacgtgaacatggccttggcaggcggcc

SEQ ID NO: 49882 - DNA, 122 bp, Homo sapiens
ctctcaccagcctcactcagcttcaccacctgctgctcatacatttgcgtcccaaatttccggctcaactcaggcatctccaggtggtcatggatttggtccatgagcttcttcagcaagtc

SEQ ID NO: 49883 - DNA, 122 bp, Homo sapiens
acctaggagcctcggttaggtgtactggctccctttctcgtttgattagaatgacatacacgctaattgatctctttccggctcagtcatctccatgcagtaaagaatttcaagctgctatt

SEQ ID NO: 49884 - DNA, 122 bp, Homo sapiens
tcaagtgtgctcatccaagccgtgctcagctctgtgctcacctctgttcagggcagaggccgtgggctcagcttcctctagcctgagttccaagctcatggggacccttgcagcagcctcct

SEQ ID NO: 49885 - DNA, 122 bp, Homo sapiens
gtgactctcaggatccggaatgtaaggttctcagatgaaggaggtttcacctgcttcttccgagatcattcttaccaagaggaggcagcaatggaattgaaagtagaaggtgagtagtgcca

SEQ ID NO: 49886 - DNA, 122 bp, Homo sapiens
tgttggggatccagagactgggtagccaggaggcctgcagcctgcagccctggttcctgccgctactcacaaggagcacaggctccgggaagacgactctgagcaaacatcccaggtcatcc

SEQ ID NO: 49887 - DNA, 122 bp, Homo sapiens
ggtttgtctgatgctgctgccggagctgaggtcttgcctggagatccgaacgagacaccacgtcaaccggcgcggggagtcccgtgaagacatgagggcgccaggagcgcaggctggtcttc

SEQ ID NO: 49888 - DNA, 122 bp, Homo sapiens
gccgccacgacccttctgcgcaggcgcgggggtggtgcctggcggaggcgcgaggtggggcgcggccggcggcgaggcgggacaaccgctgggcgggcgccaagcgtgcccgtgcgctggtg

SEQ ID NO: 49889 - DNA, 122 bp, Homo sapiens
gcgggtggaaggcagtggttgtttcaggaagaattatcccagttccccatactccaccttcgccacaagtggaagtccccttactaacttcttgactttgtctgttacttcttaaagtactt

SEQ ID NO: 49890 - DNA, 122 bp, Homo sapiens
cttttccgggtccactgagcggctctggagcccgggtttgtgtttagccgaggctctccccgctgcaccctctgccttctgctcccagcagggcgctgcagcatcgtccggttttaacaggg

SEQ ID NO: 49891 - DNA, 122 bp, Homo sapiens
tgccctccgatctcttgcccactgtccggctccacccccctatgcccgggtgtgcgtgtgcgagggacagttccgccaagcgccgactacctccccgccatagccaggagaggggatcctat

SEQ ID NO: 49892 - DNA, 122 bp, Homo sapiens
gaacccagtgtgctggtaacacttctgactgtccagctgtaagttggagttcccaagacccgccacttacgtttgattaatttggtagcatggctcacagaactcagagaaacactaacatt

SEQ ID NO: 49893 - DNA, 122 bp, Homo sapiens
gggggaaatacgaattccctgtaatgagtctggatctcgtttgtggcagctggaggccagcggctgttggggatcgagtagggttccccagaaaggagggagctgaggctcacaaagaagcg

SEQ ID NO: 49894 - DNA, 122 bp, Homo sapiens
attctcctaactgtggcaaaattatggatttaaaaatctctttgtggatcaatttctctacgactattgaattacagagaggccactcacatactgaagcaaaagggaacaaagaatgtggt

SEQ ID NO: 49895 - DNA, 122 bp, Homo sapiens
ttgtagctttggccaacagttacagtgatggtggcctccctcgggggtgactagtgtgcccgttttgttgtttgcattagcagaaggaccacagccatcgcccgtctcccatctccaagatg

SEQ ID NO: 49896 - DNA, 122 bp, Homo sapiens
gaccttgggtaagtctcaaaggctcagttcactcatctgtaaaataggaagttaaaccaacgtctttctttctctctcttttttttttttttttggatagagtcttgctctgttgcccaggc

SEQ ID NO: 49897 - DNA, 122 bp, Homo sapiens
gtttcttcatctgtaaaatggggatactaattcataggattagaatgatgtttaagggtgcggccattgtaccattgctgaatgtgccttgaactcccaaatgtttgaaagggaacaccata

SEQ ID NO: 49898 - DNA, 122 bp, Homo sapiens
ttcttgtccccggcccttttgccagccccggctcccggcgccgcgcgtcctccccatccgcgtcccactgcaggttccggtccccggccctgcccagggccccgccctggccccgcatcccc

SEQ ID NO: 49899 - DNA, 122 bp, Homo sapiens
cgccgctccacagacgtcacatgatgtttggtcacgtgggctccattcatgaagcggcgacgcggccggccggcgcttaaaggggaaggcgcggcggcgggagggcaaactgcgcatgcgca

SEQ ID NO: 49900 - DNA, 122 bp, Homo sapiens
cccggaaagccgggccggggagctggcagggacaccccaggtctctgcgtcctgccttcccgcgccctcagcagcccaagccggggctccagcagggagagcaaatgttgtctgcagaaggc

SEQ ID NO: 49901 - DNA, 122 bp, Homo sapiens
aaatgggagggcctcatccataaatgatttctggcaacgtcttcttcaggtggagcttgacgtctttttaatgttacttggggagggagtgctcattaagggatgccagggccagctctggt

SEQ ID NO: 49902 - DNA, 122 bp, Homo sapiens
acactccaagttgtgctggtccacgtgtccccggcaccactgtgagccacggtgcatgtccgtctgggagttcctggggagacagaggcccttgtgtgcatccacaccctgctattgacaag

SEQ ID NO: 49903 - DNA, 122 bp, Homo sapiens
caccgtgtccttctcccttgccagctgctcctgggtcgtcttcagaagctcctgcagtctcgtggcggcgcgccccaggtcacttgttaacttcttctctttttctagtctctcctgatggt

SEQ ID NO: 49904 - DNA, 122 bp, Homo sapiens
ctctttccttacctttcgcaaagcaatgaacttaatgcactaggcattagcaaagggaatcgttcactagctgcttccatcactgggcctgccaatgtcccagcacttcacacctggaacac

SEQ ID NO: 49905 - DNA, 122 bp, Homo sapiens
gggaagtggctcaaacccttctgagttctagtccagttctccaacattatatattggctacgattaatcaagatttaattgtataccagctgccgaaatgtttcccgtacaataaaaatcct

SEQ ID NO: 49906 - DNA, 122 bp, Homo sapiens
tttgaataaccaccccgcttttccctaggctctcctgctgtcagtttcccacagtgttgtcggctttcatctctcagtggcttcacctgactgagctgcctgccatctctagtgtatcctcc

SEQ ID NO: 49907 - DNA, 122 bp, Homo sapiens
gaaagtaggtgtgtgtgtgccgaggggagggttgcagaagaaagcacagtatgtgccccacgtgggatttgcatttaaaaactgtaacatacgcgaaataaacgactccaggcccccagtaa

SEQ ID NO: 49908 - DNA, 122 bp, Homo sapiens
cccctcttcgtctccctcttcgatgttccgggtcccagaaaccaggttatcacagtggcccggatcatagggaaattgcgaaatcatccagttgggatcaccgagcctgcagggtccccttc

SEQ ID NO: 49909 - DNA, 122 bp, Homo sapiens
gttcaggctccaatgtatccaggtcacaggaggctgcctctccaggcagagaaactgatccgtccctatcagtgccaggcagagggcaggggatttcgcacctgagcaagggttgggatgac

SEQ ID NO: 49910 - DNA, 122 bp, Homo sapiens
tcagggcaactctgccagcagctctcattcatgcccagatggggacactggggggctcttcggggagttaagtgacttgcccaggatccaaaggccagaaagctctgcccccaggtcttctg

SEQ ID NO: 49911 - DNA, 122 bp, Homo sapiens
tcaacacaccaccagggggttttctagggaagaaggccacgttctagaagcccatgctctcgggatcttaaagggcccactaatgccttcacccagggctgctggcctcagcccctcggatc

SEQ ID NO: 49912 - DNA, 122 bp, Homo sapiens
ggacccccgctcagccccttcccgcccccaaccgactcttcccgaacgtcccttaccaaccgcgagagccccctactgcgctttggccacaccccctacgcctcgctcccggccccgcctct

SEQ ID NO: 49913 - DNA, 122 bp, Homo sapiens
agctgctaactgttaagtatgatgatgactgagcctcgactgctggatttagcaacatggcggtgttgggtgatcttgactaggcagtgctgaaggaatgactaagggatcagactgggctc

SEQ ID NO: 49914 - DNA, 122 bp, Homo sapiens
agagagcccctaagtgaatcagtgacacaatgccgcctgcaaaagcatcagagccgcggccgcacgcacacagagcggggtgtgagatatcccagccgcacacacacagagcggggtgtgaa

SEQ ID NO: 49915 - DNA, 122 bp, Homo sapiens
tacattgcactagaaactatatccacatcaacctgttcacgtctttcatgctgcgagctgcggccattctcagccgagaccgtctgctacctcgacctggcccctaccttggggaccaggcc

SEQ ID NO: 49916 - DNA, 122 bp, Homo sapiens
tcgctcgctctctcctgccccttgtaggtctcaacggcctgtaccctaagattctcttttcgggaaccccaatatcttccctagccccttccttttctaggacccaaacgtccagtcacaca

SEQ ID NO: 49917 - DNA, 122 bp, Homo sapiens
cggcggcctggtggagggcgccaagaaggtgacggtgaccgagctcctggcaggcatgcccgaccccaccagcgacgaggtgcacggcgagcagccggccgggccgggcggagacgcagacg

SEQ ID NO: 49918 - DNA, 122 bp, Homo sapiens
cgggttaaactggaatattataaatgcaccatttatttgcagattgaaattctgtgcgtccggaggtggcgggtgggagagggaatgagcagggatgcagggtaggccctgagttgctgggg

SEQ ID NO: 49919 - DNA, 122 bp, Homo sapiens
gctgttcagaaagtccggcaagctattttgttgtaaaagaaaatagcattaactaccaaacgaaatcatactgcctgtggattttatcattcaagatgttctgagtaaagctgtccttcgta

SEQ ID NO: 49920 - DNA, 122 bp, Homo sapiens
ctgctctaagagttctgacttcctgggatcagtgtcacagaggatctgagtgagcttcctcgagccattttgggcaggctgaagaagcttgttagtatctatatgcttccaggttggcgggg

SEQ ID NO: 49921 - DNA, 122 bp, Homo sapiens
tgaggatctggaaagggcaggcattgtggtagcaagaaagaggaaacctggaactaaacacgcaaaagcctaggccatcccctgggaccatcctgcacagggccttttcatctttgtggttc

SEQ ID NO: 49922 - DNA, 122 bp, Homo sapiens
cggactgggaagagcagttgtaagaggagccagggagcgggagggggtgatctcctcccccgggccctgctgcctccagctcaccctgtcgcctgatgtctaaataaggtgcagaggcacac

SEQ ID NO: 49923 - DNA, 122 bp, Homo sapiens
accgcggagggcattcgctgtgtgactcagggcaagtgtgcgcacctctctgagcctccgcggccttctctagcaaaatggtggagccggtacccggctgtaaggcaagctgggatgcgcgg

SEQ ID NO: 49924 - DNA, 122 bp, Homo sapiens
gcagaagtctcaggaggagctgctaaagcggcgtgagcagcagctggcagagcgcgagatcgacgtgctggagcgggaacttaacattctgatattccagctaaaccaggagaagcccaagg

SEQ ID NO: 49925 - DNA, 122 bp, Homo sapiens
cagccctgaaaagacagctctcccagggtccctcgctcctccccggctcgacgcggctcccgctagactccgcccagaccccgagcagtccccgcccatctcttgactatgcccctcccacg

SEQ ID NO: 49926 - DNA, 122 bp, Homo sapiens
ttcccgtcgagttgaaaatgtcaaaggcttccagagtgcgacgtgaactcagataagactcgttctgcctctggcctgccttgcagccttcgtgtatgagccccggtctcaccccagggtgc

SEQ ID NO: 49927 - DNA, 122 bp, Homo sapiens
attattctaggctctagggaaataatccattgacaaagcagggtctaccaatgggcttgtcggagattgctgggaatggttgatgggggccagtttgcagttggggtgaggtggctttcctt

SEQ ID NO: 49928 - DNA, 122 bp, Homo sapiens
ggtctgcccagcagtggcaagcgcagggcccctcgcagggtttatcagatcccccagcgacgcaggctgcagggcaaagacccccgctgggccaccatggctgacctgaagatgcaggcggt

SEQ ID NO: 49929 - DNA, 122 bp, Homo sapiens
ggatgggttttggtgactgcacacctacaacacacagtgttatataacatggaataagctcgctcaaaaaaaaaaattcagaaaaatcttcctgagcaactgtgttagaaaatggttttgaa

SEQ ID NO: 49930 - DNA, 122 bp, Homo sapiens
aacgaaatatcctttctgggagttcaagattgtgcagtaattggttaggactctgagcgccgctgttcaccaatcggggagagaaaagcggagatcctgctcgccttgcacgcgcctgaagc

SEQ ID NO: 49931 - DNA, 122 bp, Homo sapiens
gcagccggccgggccgggcggagacgcagacggcgagggtgccagcgagggcgctggagacgccgcggagggcgctggagacgaggaggaggcggtgcacgaggccgggccgggcggtgccg

SEQ ID NO: 49932 - DNA, 122 bp, Homo sapiens
agacacttacgggtgatgagctccctctgggacaagtgctgcgggttgccctgtttgcggcgggacattgccccggcatctattctggcatcgcccggagagctgcactgatggggggagcc

SEQ ID NO: 49933 - DNA, 122 bp, Homo sapiens
gcaaggggcatctgcccggcttctccccgggaagccactccttccccttagtgatgactgcgtgttttgtggggagattccttgacaccctgtaactagccaagttctcatcagactatgta

SEQ ID NO: 49934 - DNA, 122 bp, Homo sapiens
tgaagtaaagaggatgcacaggacccttttattttagtccctaaaaattggcttcataaccgttcacaggccacatcccttttacgggccctggtttccttacaaaacataaaaggtttgtg

SEQ ID NO: 49935 - DNA, 122 bp, Homo sapiens
gaggccgggcaccactgcccagcctttgccattcacgggtgaaaaaagtaaccgtagcatcgtgcggcctttccctctcccgtcctcattttctgcatctggaacggggagtggctgattcg

SEQ ID NO: 49936 - DNA, 122 bp, Homo sapiens
ttttcagcaaactggccatccagtttaatctccaccctctgtcctgactgtctttccctccgatttctgcacagacttttgccaagcccctgctgggggggctctaattgcagaaccacact

SEQ ID NO: 49937 - DNA, 122 bp, Homo sapiens
acctgtatgagatagcacagctgctcatggaacagggccacaccattgcccggccccacccggtctcctgtgcctgcctcgagtgcagcaacgcccgccgctatgacctgctgaaactctct

SEQ ID NO: 49938 - DNA, 122 bp, Homo sapiens
gcctctccctcggtagttccgagaaagggacaagccggctgcagcggggagcggttgggccggttcctcggacgccccagcactctggaactggctttggagccccttctccctgtgttccc

SEQ ID NO: 49939 - DNA, 122 bp, Homo sapiens
tggctaggatttgtcaggcattgtaatgtactgaccctgaagtcccggatgcttccagggcgctaacggccggggacgcccaccaggtgggcggggcgagagtggggcgcgtcagggagggg

SEQ ID NO: 49940 - DNA, 122 bp, Homo sapiens
agtggcgcgggggagtctggcagccccgagcccaacctttaggaaagatgagctgtgaggcgtcctcctctacgtcgccagcccgcggatcgctgccacccgccgccatcgccgcgccgcgc

SEQ ID NO: 49941 - DNA, 122 bp, Homo sapiens
gattcgccctatatgcaaccactttattcaaaagcctattgacatacagactaggccgggcgcggtggctcacgcctgtaaacccagcactttgagagcccgagagggcggatcacctgagg

SEQ ID NO: 49942 - DNA, 122 bp, Homo sapiens
ctatgggcctcctcttgcctgggagcctgtggcaagttgcgttcctggagcctcccagagcgggtggatgtagcgggagagacgaaggctttaggctaaattgccaaatcctatatttgtac

SEQ ID NO: 49943 - DNA, 122 bp, Homo sapiens
tcagggacacaagggtgcccattgccccctgctggcagcccacgtgacagtctcactatccgccccgcaatcgtccccctgtgtgcctgacagtgaacaaggcaaggggctgacagtcgcag

SEQ ID NO: 49944 - DNA, 122 bp, Homo sapiens
tctgcttggtgccatccatggagggcgtgcgctgggccttttcctgcggcacttggctgccgagccgagccgaatggctgctggcagtgcgatcgattcagcccgaggagaaggagcgcatt

SEQ ID NO: 49945 - DNA, 122 bp, Homo sapiens
actctaacttccaggctgggggcggatccgcagtctacacttccgggctgggggcggatccgcacgctacgcttccgggttgggggccgatccacagtctaggcttccagccaggtggcctt

SEQ ID NO: 49946 - DNA, 122 bp, Homo sapiens
atgctgggagcccacgctcaccccctcacccctccaagctcactccccaacccccaactccgtgtggtaagcaacatggctttgatgataaacgactttactctaaaagcggctggaactca

SEQ ID NO: 49947 - DNA, 122 bp, Homo sapiens
agcagttccaagcaactaaacgaaaggttggctcctccccttcccctccagtgcaggtctcgggtcactcaggtgccagaaaacacaggtgggtgtcaacactctcagcttctccccatccc

SEQ ID NO: 49948 - DNA, 122 bp, Homo sapiens
gcaaacggagaacgtcagccgcacccggaagcccctggcccgccccaactcacgcgctgccgcccccaaagccactccagtggctgctgccaaaaccaaggggcttgctggtggggaccgtg

SEQ ID NO: 49949 - DNA, 122 bp, Homo sapiens
gccagcactatggccggcggagcgtccacattgaggtactgtgcacactgtgctccaagacgctgctcttcttcaacaagtgcagcctgctccggcacgcccgtgaccacaagagcaagggg

SEQ ID NO: 49950 - DNA, 122 bp, Homo sapiens
ctgccatctcgaggccgggtcctttccggcagctgcctcagccaatcagcgagcgaagttcgtgaaccactctgccaatcagaggcggaacactatgcccgcctcccacagcctggccaaga

SEQ ID NO: 49951 - DNA, 122 bp, Homo sapiens
cccctcccgttattttgaggaccgggctggtgcgactatactactgccggatggcaaatccgggatctcggctccgagaggctcatctggcaaaagggcgcggaaaccacgggggccctgag

SEQ ID NO: 49952 - DNA, 122 bp, Homo sapiens
ggtaaagaaggcgtggctactgcccaaatccaagatggctaccaggaggccgtcagttctcggaagtgcggcacatcctcactcctgggaggctcaaaggctcaaacgccattggcagaatc

SEQ ID NO: 49953 - DNA, 122 bp, Homo sapiens
ggtccggcgcgggccccggggccattcccgagcccgaggcgctggtcggccccgtcgcagcgccagtgagctaccctgacggagctcggcgcggcctggaactcagcctccgccgggtctgg

SEQ ID NO: 49954 - DNA, 122 bp, Homo sapiens
ttccaataaaatcatcctgctgagatgtgactcagatgtactggtgcccagcagacaacacgttttcgccctgattttatcctccattcatccgtccgccccctcccccatagaccccgcct

SEQ ID NO: 49955 - DNA, 122 bp, Homo sapiens
agcagaagagcaaagagcgtgttcagcaattccggtcccccgaggtccttctcaggcacacgcccaagcacggcctgcacccacttacacgggggcgtcatcccgggcctggtcctggtgcc

SEQ ID NO: 49956 - DNA, 122 bp, Homo sapiens
ccgcagccgccgccgccgccgccgcccaggtgactgaggagagaggcacctcctcgctcccgccgccgccggacttcaatgcccagtccccagctcgccagcgtttttcgttggaatatacg

SEQ ID NO: 49957 - DNA, 122 bp, Homo sapiens
acccagagaccttcagaacttccatggagcccccgtgatcccataggacccctcaatactcgtggggttcatgtgacctcatcggaactctcaggagcctagaatacatcaggacttccggt

SEQ ID NO: 49958 - DNA, 122 bp, Homo sapiens
ttatctgttgcctcggtgacaaccccatcagagggagtctgtgtgcagagtgtgtgcctacgagtctccagtctttttaaaaccagctggctggagccatgtcctcccccattgcagactgc

SEQ ID NO: 49959 - DNA, 122 bp, Homo sapiens
gcgggtcggtgcctccagcactccgtgcgcccgctgatgtgagaaccccacctcccatgtcgtcccctcgcgctactccttgagaacatcgcggagggcccctccgcctgggagccgttttc

SEQ ID NO: 49960 - DNA, 122 bp, Homo sapiens
ctgcataaatgcacacatttcctgaggcctccaccctcccgggttaatggggagtggagacgcacggctgtccggctccgcagcgccacctggaggcttctaggtcctagctcggtgagcgt

SEQ ID NO: 49961 - DNA, 122 bp, Homo sapiens
gtgcaaagtccaaggtgcctgatgtgtttgaagaacagcccggaggccccaggggtggagcggagtgagccagtggggaaggcacagaggaggaagtcagaaatgcaggagagccagatcac

SEQ ID NO: 49962 - DNA, 122 bp, Homo sapiens
tagctgggaccacaggcccatgccacgatgcccagttaatattttattttggggtagggacgaggtctctatatgttgcccattgtggtctcaaactcctgggctctcaaagtgttgggatt

SEQ ID NO: 49963 - DNA, 122 bp, Homo sapiens
gcacgtcgcccacgctgctataaaaggggtcccgcgcgacttccaaactcagcgccaacccgcagaaccaggaaagtaacggctacagacagtgagaaatagtttcgctcgccggctagaaa

SEQ ID NO: 49964 - DNA, 122 bp, Homo sapiens
ggcacccggggacgggacctcatgccctgtgaaggacacacaggcaaagcctcgaggggccgccggtggggcctgggggacgtactcacccttcccgatctggacgaagcccagcaggatga

SEQ ID NO: 49965 - DNA, 122 bp, Homo sapiens
gccggcgctcgaaggccaggaacgcgccgttgaggacgtagcgggactgggtgcccagcacgttggtcaggttccgcaggttcttgagaacaatgaagtccgtgtccaggtagatgccgccg

SEQ ID NO: 49966 - DNA, 122 bp, Homo sapiens
gttctcctctcctttccccacagatcactcaccgggactgtcttttctgtacaagacagacgtgaaaaaaagccagttttcgattttctttacaagtttctgtaggtgcaaaggcttgggca

SEQ ID NO: 49967 - DNA, 122 bp, Homo sapiens
ttcgtaatgtctgatgctgagctgagttgattcccaaatataaatgttcttttcagaatccgctcccatctgattagtaagcaaatcaccacccacaactaaggggacagcggaagccagcc

SEQ ID NO: 49968 - DNA, 122 bp, Homo sapiens
ggtcagtgcttgggagcctgtggccagcagcccccactgcacccctgcccccaggtgacacgcttctgagcaggggcccctggggacttcaactgcccagcaacatggaggatggtgtcctg

SEQ ID NO: 49969 - DNA, 122 bp, Homo sapiens
ggccgcttcgcagggaaagttacataacacgcctgcaaagccttctgggaaacgtagtcccgccggggccggctcttaaagggaacggcgggcagacgcgggctgggggggttgtcgcctct

SEQ ID NO: 49970 - DNA, 122 bp, Homo sapiens
ttaaattttgataaagtccagtttatttttttattttgtcacttttgcctttggtgtctgcgttccaacactaattctgtagcatcagctgggtgtcccccacttccgtttagttctggcac

SEQ ID NO: 49971 - DNA, 122 bp, Homo sapiens
tgccacctctggctggggaggggcgggctcggcggccctcgctcgcacttgggaaggaaccggcacccaggagccgcacccgtgccccaacacccgcaccggctctcctctccagaggacgc

SEQ ID NO: 49972 - DNA, 122 bp, Homo sapiens
gccccgcccccggccccttctggaccaggcgcctccccgctactggccccagaccttccccgcatggccccgcccaccactctagccccgccaccttccggaccagacacctccccgctgct

SEQ ID NO: 49973 - DNA, 122 bp, Homo sapiens
ccggggactcgggagaaggcgcatgcgtggtcttgagggcggtgcttccggtcaaagcaccgcttgggggcggggcctgcgacacgcggtgggcgggtcctgagtcgcgaccctggtccgga

SEQ ID NO: 49974 - DNA, 122 bp, Homo sapiens
cgcagagggtgctgtgccggtctcaggggactctctccgacctgctccggaatccaaaaccgtggagtaaactcaaatctggcagggagaccttccgcaggatgtggaagtggcttcaggag

SEQ ID NO: 49975 - DNA, 122 bp, Homo sapiens
agcgggtcctgggccgtggcgcctccgtctgcagggacttcttgtaatcaccaagcagcgcggttgtattcttcacagtcccccacattggcgtggctggagcctcccattcgaagctcaga

SEQ ID NO: 49976 - DNA, 122 bp, Homo sapiens
cgagtcccctcctccacggccaggggtcacacaggccactcgttcattccttcattcttccgactcaacataaaacctgagagggctgctgcctaccagcaccatgctgggccctggatgct

SEQ ID NO: 49977 - DNA, 122 bp, Homo sapiens
acttctaaaagaggactttatagagaccaccatgtgtaaaacagcttttctacatgcccccgccagctaatttttattagagtacttatattatttgaaataatatttttacatgcctccat

SEQ ID NO: 49978 - DNA, 122 bp, Homo sapiens
ggggccattcggtgtatgtgcgaagggctttctgaatgagggtggaatcgacagttaacacgaaacagtttcaagccttacggggacccccaggctggcaggtcaaggactggacactgaac

SEQ ID NO: 49979 - DNA, 122 bp, Homo sapiens
acaaaggggaagctggctcagcaggcctgggcagggagtgggggactggggccctgacctcgcctggatcactgcagacagcagcactttcctttgtgagaccagcacacacagcagaaacc

SEQ ID NO: 49980 - DNA, 122 bp, Homo sapiens
tctgaagtgaatatgtttgcacagttgccttggaaaggtgcctggggcactggctctgcccggagctggctggtggaaggaagagcgtgcacaagctccctgtcccttcctttccacagcct

SEQ ID NO: 49981 - DNA, 122 bp, Homo sapiens
cgcccgccttccacccagtccccgcctgcggcactgcggcttccttctcctccggtgccccgcacccagcccgccgcgaggtcacccggcagattccctctagctcgccatcctccatcctc

SEQ ID NO: 49982 - DNA, 122 bp, Homo sapiens
ccataaaggaatgctctcccgacctatggaactccttctattcaagcagatatgaatccacgctataactaaagagatctacaagtgtgagacctgatggggaagagggggaaaaggacata

SEQ ID NO: 49983 - DNA, 122 bp, Homo sapiens
tactgcttttgttaggagtgtgtaattagccacatatgcattgttctttaaaaaaaaaagcgcaggtttgggagctggatcataagtctaggggtgggcaaacagagcttggacaggtcacc

SEQ ID NO: 49984 - DNA, 122 bp, Homo sapiens
ctcgcctcccaatgacgtccgaaccctgctttctgggagcctagcaacagaagcgacctccgggattggtgtctggaagaaattcgcctttctcattgcacgatggagttaccgcccacact

SEQ ID NO: 49985 - DNA, 122 bp, Homo sapiens
atgggaagttggttcctgatattcatacatttattgagcaaacatttattgattactgtgcgtcaggcatgtgtgagcctgaatacatatcactcctttcttctctcaggttcaggatcagt

SEQ ID NO: 49986 - DNA, 122 bp, Homo sapiens
cgaggaggaggtgtgtggcttccgcattaacttccggggcagtgggcggggctaatttcgcgactctggttattccgagcgtgcagaaagcagcgagatcccggggcgggcccaattcctgg

SEQ ID NO: 49987 - DNA, 122 bp, Homo sapiens
ggtccccctgggctgcatccgaggatgcggatgatggtggaggtggggcagcggctggggcgggtcctgcatgcttcacccgcagcacgcggccgggcttgacctctacaaaggtgtagcca

SEQ ID NO: 49988 - DNA, 122 bp, Homo sapiens
gaacgtatccaagcaccaaggcttccgcctgccggaaagaacaatgagcttaattgtgttcgcttaccaaactcgcccccgctcacggcgattttagaggaattctgaaatggtcgcttcat

SEQ ID NO: 49989 - DNA, 122 bp, Homo sapiens
gatctgagaggctcctaggcgacagcgcgcaatcattcctttgccgccccctgctatccccgggaccgccaaggaggtggaactcaccacagcctgggcagactccaccaccataaaggcga

SEQ ID NO: 49990 - DNA, 122 bp, Homo sapiens
ctctggaggcgcccccattcctgtgtccagcctgtgccctcaatgccaaggccacagaagcgaagtgccagcaggagcagcttggggaatggagacactgcaggcccctccaggaccatcca

SEQ ID NO: 49991 - DNA, 122 bp, Homo sapiens
tccctctgcacccttgggacctgcagcagcaccttcctgtcccgtcctcaccatcggctccgggttgaaaggcacccacagggttggatgatgcagagaatccttcctctgggatgaatatg

SEQ ID NO: 49992 - DNA, 122 bp, Homo sapiens
gcgcccaatcgaggggcggaggcggggttggctcgcaggccccacttgcgcagcaggcgacgctggcggtcgggtaccccccaccccacccgaatcccaggggcaggtagagtccggtgtgg

SEQ ID NO: 49993 - DNA, 122 bp, Homo sapiens
gcctccttccccatcaattcccatcaagcgttattagagtcatctgccgtctccgaggtgcgtcccccgcgctcgccccgcagaagcgacaatgacatttggctgcgctgcaggtgcggctg

SEQ ID NO: 49994 - DNA, 122 bp, Homo sapiens
cccaccccacccgtgatagctcagcaaaccaaccagcacctgtggctgccactgggaggccgcggaagggtcctgcctgggccacgggcgagcgcggcgcaagcttgggctgcagagttccc

SEQ ID NO: 49995 - DNA, 122 bp, Homo sapiens
ctgtggcgtggtcctctgcacgttcttcatctgcacgcactgcgtggccatccccagcaccgtgtctcccacgcgcttgacctcggctaagggacatgagaggcacacacagctctgccggc

SEQ ID NO: 49996 - DNA, 122 bp, Homo sapiens
tttgggaggaaattgcacttttccccatctttgttgaccatctgtaattccgctataaatcgcccgtgccctttaacccatttttttctatggaagtgttagtatttttcttacaggtttgt

SEQ ID NO: 49997 - DNA, 122 bp, Homo sapiens
gagcgcggcacaggttgctggtagcttctggactctggaggcttggccttccttctaagccgatggcggggaaagaacctcgtttccacagcttccccgacccccgccgcttgccatttggg

SEQ ID NO: 49998 - DNA, 122 bp, Homo sapiens
aacataggaaggataaactagaagctgatgagattggccgctgagggtgaggtgtgatgacgggaaggatggcgcttttttcctgatacacatttctgtacagcattggcatttatgccaca

SEQ ID NO: 49999 - DNA, 122 bp, Homo sapiens
catgtgctagtggcgcagctcagagaggggatgtgagtgggaggaaaggggtctgtaaagcgggagaacaaggctagcctccccctaacaatcctagactgagacgcagtcaggcgcacgcc

SEQ ID NO: 50000 - DNA, 122 bp, Homo sapiens
cgctccgagccgacttttcgccaatggtccaaagggacatgtccaagtcgcctcccacagcggcggcggcggtggcgcaggagatccagatggaactgctagagaacgtggctcccgcgggg

SEQ ID NO: 50001 - DNA, 122 bp, Homo sapiens
tctaggtaaggttaaatccttctcctgtgatctggatttttaggttccctagtgggtttgcgtgtttggaggcagattttttcccccactcacactttgggcactcacagtttttcagctgt

SEQ ID NO: 50002 - DNA, 122 bp, Homo sapiens
agccattagctcgtaggcttgcaatgatatctgctcaataaatatttaccatttagctgacgcacatcttgggcagtatgtaagaacttctctcacactgtgttggcagcgacagacatgtg

SEQ ID NO: 50003 - DNA, 122 bp, Homo sapiens
gcctgccagccccgcccggccgggcccctccggcgggatagagccctgctttgctcttttcgttggccaagcacaattgtgttattggagataatgaattcaatccccatcaaagggcatta

SEQ ID NO: 50004 - DNA, 122 bp, Homo sapiens
acagagcatgggtctggggatccggagaaggcagtctggaggaggcatggctttggaagacgtgagttcagtttaggacacaggaaaccataggtatctacgggactccaggaggggagggc

SEQ ID NO: 50005 - DNA, 122 bp, Homo sapiens
cccagaaagctctgggaaagttctgggcccacaccccagtcctggtggctttgcactcaccgttgggctagatagtggtcgccacctgactgccacatgatccggccggctgtatgagcggg

SEQ ID NO: 50006 - DNA, 122 bp, Homo sapiens
gggctcccctaaatccgaagctatcccctgccctcccttcctcgcgtggcttcccgggcgcgctctgcctgtctgcggggactccaggcgtccttgtgttttcagctcccggctcttgcccg

SEQ ID NO: 50007 - DNA, 122 bp, Homo sapiens
ccagcttctgctgggggctggtgcgcgcaaacaccatctcggggtgggtgcgcagggcctcgaccagttccgatgggtccatgtccttcagctgcatgccattgatcacacaggcacgggca

SEQ ID NO: 50008 - DNA, 122 bp, Homo sapiens
accagccaactctgatttctttaaaaccatttacttacaaactttaattcagcaaaggtccgtgtggggagactggggtggggtcgggggaatagtccccttggagtggatgtggaccccca

SEQ ID NO: 50009 - DNA, 122 bp, Homo sapiens
gcgctgcagctgtgcagctgctctacagactgcagggacctgctgagacgaatccccggacgaggaaaggggccccccgcctgccctactgagccttgcgcgctgacccggttcctacactt

SEQ ID NO: 50010 - DNA, 122 bp, Homo sapiens
tttgagagttgcggtgttagccaatagcgtaagatagcgcacgcgcagtgctttccagtgcggtgaatatttgcgtttagctttattcttgtgcttgttttaaagaaaaaagctgtcgtggt

SEQ ID NO: 50011 - DNA, 122 bp, Homo sapiens
tgctgtcactcacaggcactgcccatgtcacactggggtagaagttgtcattcatgctgacggagaacctggagatcttgttggtggggccaaccagggtcacagtttctgtggtgttcccg

SEQ ID NO: 50012 - DNA, 122 bp, Homo sapiens
taaaagccacaggtctgggtgacctacaaatgtgtgtgtctgactttctgcagtttaaatcgccactgagccttaaggcgtctggcccgcgcattgaggaatccacgtgggtctcggggtcc

SEQ ID NO: 50013 - DNA, 122 bp, Homo sapiens
gctcagtgggaatttaccattcctctggccagccaggcagggtggggcatcactggctaacgccagctccagggccctgagcttggggcctgtgggctgtgccttccgcctctcttgcccca

SEQ ID NO: 50014 - DNA, 122 bp, Homo sapiens
tctcttttctccgggcttgcccatgagcctcctcgggagctaccggaaaaagaccagcaacgatggttatgaatctttgcagctggtggacagtaacggggacttaagtgcgggaagcggcg

SEQ ID NO: 50015 - DNA, 122 bp, Homo sapiens
acagcctcaggaacacaggcagcaggtgctgaggtcacaccccagttctgtgtgagctggcggctcgtctcagcatcctgaataaccgtcctggaagcacacaggaggaaggtacctgcagc

SEQ ID NO: 50016 - DNA, 122 bp, Homo sapiens
cgttgcgtagccctctgcgccggtagttgttctgtctcagttccggttttcccttccaagcgtcaatgtttcttgttcccaggcggcagctagagcagaaggcggatgagttttggacagaa

SEQ ID NO: 50017 - DNA, 122 bp, Homo sapiens
aggatccacccacgttcgtgcgggcatcactggctcgttcccttttctcactgggtcttccgtttgaagggaggaccagccttgctctacccattcccgtgttgaaggccgtccccgaaggc

SEQ ID NO: 50018 - DNA, 122 bp, Homo sapiens
agacccccatagccaagacagtgggccctgccctgagacccccccacagccatgggaccccgccctgagacccccacagccacatgatcatgggcccccaccctgagacctcctacaaccac

SEQ ID NO: 50019 - DNA, 122 bp, Homo sapiens
tcgctcgccgcctgcattacttgcagattcagtttgcgtgtctccagccaagcggaaagccgagcgcaaaatgcatcttacaaaacccaacaaagaacgggtagccagcacgtcttccagag

SEQ ID NO: 50020 - DNA, 122 bp, Homo sapiens
cgcagggctgcaggcggcctggcggaggcagatcaggcagttcagtcgggtcagcccagccgtggctgatgcagttgtcacagccttcccctccccccgccttctgcagcaggtgggcccct

SEQ ID NO: 50021 - DNA, 122 bp, Homo sapiens
cgatacttttcaaatgccagacttcctcagcttgtgctatacttcccgttcacacactgccgtgtctttgctatgccctcccatacaccaaaaaaaaaaaaaaaaaaaaaaaccccaaataa

SEQ ID NO: 50022 - DNA, 122 bp, Homo sapiens
gagccgcatttctcctagagcgtttcaccggacccgggggctccccctctcgtcttcctccgttccccaacttggaataaagaatcacctagtaagtggcgccctgtctcagctggttttct

SEQ ID NO: 50023 - DNA, 122 bp, Homo sapiens
gaagcacgggcagtttgggggccttggaatcagcctgacgccagcgagttcctaacccgccgtctggcctccagtttcccctctgcacaatggaaagcctgctctccacggtagaggtgaca

SEQ ID NO: 50024 - DNA, 122 bp, Homo sapiens
actgctgagtctcccctctgcctccccaggtggaaggaggcctctcatcggaaccagcttcgttactcagaaagcatgaagatcctacgagagatgtacgaacgacagtgatgttcccaggt

SEQ ID NO: 50025 - DNA, 122 bp, Homo sapiens
gcagagagcccccttctgccgccgacagcccgcgtctgcaccgagccggtctcggccgggcgctgccttcacacgcgcccaggagtgtcacgtgcgccgctcacccccgggaaggaagcccc

SEQ ID NO: 50026 - DNA, 122 bp, Homo sapiens
aggaaaagacctgagcgctaagagcttgggatacgggtcaggcccatccttaggggaaaccggctgggaagcgagggggggcgcaggccgagccggaacgagacacagaccgggtaggtcaa

SEQ ID NO: 50027 - DNA, 122 bp, Homo sapiens
taaaaccctagtgggggtctcttggggctgggattcaggctggcaccgctgggaggacctcgcctagcatccctttattaatatttcacgaaggcaggctcctgccttctctggagcctctt

SEQ ID NO: 50028 - DNA, 122 bp, Homo sapiens
tatgtggagcacttaccattagtttgtttctaacctccagcatctacctgcttcaaatatcgcaacctcctgggttcctggccactgccttgtatccgactaatggtagctgcaactcctta

SEQ ID NO: 50029 - DNA, 122 bp, Homo sapiens
gaactcctgacctcaagtgatttgcctgcctcggcctcccaaagtgctgggtttacaggccggggccactgtgcctggctgatctgagccatgtaaaagtggtgtttggctgggcgcggttt

SEQ ID NO: 50030 - DNA, 122 bp, Homo sapiens
gcggccgctccgcagccgcggcctcctgccacccgggagcccagccccctctctcttgcacgccccttggctctccgcctcctactgggagccaggagtactctcccggaggtggctggtat

SEQ ID NO: 50031 - DNA, 122 bp, Homo sapiens
gccaggcggcgataggccaccccgcacgcccgtcagccggcccggccccgcccagccagccggcggctcgccaaccattggctgcggcagccttgcgtcacctccccttgcgggccccgccc

SEQ ID NO: 50032 - DNA, 122 bp, Homo sapiens
gccagtttctttccacgggccgtcaaggccaatataagtccccacccaggctcctctgctcgtaacttccagcacgattcccactgtattagcccatgtttcccagaagtgagtatttgatc

SEQ ID NO: 50033 - DNA, 122 bp, Homo sapiens
gggcgcaggggccggccagactcacttcatctcaggtcatccttttcctgggcctccacccgcttcccactccgcccggctccacctaccctgagcgcggacaccgtgggcaggttcatttc

SEQ ID NO: 50034 - DNA, 122 bp, Homo sapiens
ccgggggaggctggcagcctgtaatctgggggcgctgacagtgctctgcccagaccctcgcgccagctccagctccagcacagcagccctgggtccctctggccccctgcccgcagagtcca

SEQ ID NO: 50035 - DNA, 122 bp, Homo sapiens
gcagctgccgttgagctccttgctcttggcatgtggggcagcgttgcccagggactgcagcgagcaagctgagcgctggtagtcgccctccaggtgcgtggcggcctgaaatgggggttggg

SEQ ID NO: 50036 - DNA, 122 bp, Homo sapiens
cggacagtgggcgctcccctccaggggcagacgacggaggagctcggggatcgcgaagggcgctagtccacatcccgaatgaggactcgacttggcgcggggcccaagcagagggttttaag

SEQ ID NO: 50037 - DNA, 122 bp, Homo sapiens
agcacacttacacgtgcaagtgtcgcccgcatcttcgcacacaagcagaactatgacctccgccgcctgctggctggttcagagcgcacactggaccgacttctggacagtatggagcagga

SEQ ID NO: 50038 - DNA, 122 bp, Homo sapiens
gaccaacggactctggagctgggctgcttgggatcaagtcgctgcccctctgcttattaacgtgtgaccttgggccagtcatggacgctatctgcttcagctcagcattcagtgctctccgt

SEQ ID NO: 50039 - DNA, 122 bp, Homo sapiens
ccaggccccaggctgagctgtggggaaagctatgacccagtttgctgagagctgcaatgacgaacattggctctgtgcccagaggcccaagaaggccatggactgggctggcctttcctggg

SEQ ID NO: 50040 - DNA, 122 bp, Homo sapiens
ctcctcattgcccagcatgagaactggctgcaaactggaaggcaccctgagtaagacaggcgcacccttcctgcacaagtgggtcagctctcgaatcctataacatggctcagggtgctgtg

SEQ ID NO: 50041 - DNA, 122 bp, Homo sapiens
accctgccagcaacagaaattataactgccgtgagtcactgtgagtcacatgggttgccacggaaacctactaactatatcaccaaagcaccttccattagctttgccaagaatggttcctg

SEQ ID NO: 50042 - DNA, 122 bp, Homo sapiens
tggccgccacctcggcgcgatggcatcttcgctgcctgcctggccgcccttggccgggcgcgatgacgttaacgctcttccttggcgttctcacactgtggacccagggatggctccagctc

SEQ ID NO: 50043 - DNA, 122 bp, Homo sapiens
ggtccacagggatgggtgggtgggcggcttgagaatctgggtccagtcagctaggggttgcgttgtcagttttgaccgaagggctaggcgtggtgtggccggactgggccttcctagctccg

SEQ ID NO: 50044 - DNA, 122 bp, Homo sapiens
cgcgctgttgggcgaggcccggtcccgtctctttcccaggcctgagattctcgcccggcacggccgccctgagcgccccggccacccccagccccggctcgcccctcaggccccgggcctcc

SEQ ID NO: 50045 - DNA, 122 bp, Homo sapiens
gagccacactgcgagcccaggggcagggtcaggttgacggctctacgcacggaccgcacccgacagctggtacccccacatcccagaacgccgaaaagcaggagtaaacgctggctacaaat

SEQ ID NO: 50046 - DNA, 122 bp, Homo sapiens
tgagtgtgagaactgggcgtcggtgctggaaccctgtagacacttagtgtgagaactgggcgtgggtgctgggaccctctagacactgtgagtgtgagaactgggcgtcggtgctgggaccc

SEQ ID NO: 50047 - DNA, 122 bp, Homo sapiens
aagggctatcctcatcttgccaccaaagggtgaggcaggaacacagtggacctgggcccccgctgcacaccgaagatggttggagcctggaaggtgtggtaaagagcgaggaggcgacccca

SEQ ID NO: 50048 - DNA, 122 bp, Homo sapiens
gctgccttcaaaagtttggcagaaaacagtatctaagagttatagcacctaaaactataacgttaagaagaacaaccagattcttcattattagaacaaataatctccagttaagtcagatt

SEQ ID NO: 50049 - DNA, 122 bp, Homo sapiens
tcctgcaattttcaactaatgtcaaacaaaaataacaagtaaggcaggcaagctctagttcggcagcccttagaaggacaataggtgctttgagaaatttaggctttaggagaaaatgcacc

SEQ ID NO: 50050 - DNA, 122 bp, Homo sapiens
tttgtttacttatttgaattcaaaatcgccccttcccacaagtgaagggatccaaactctcggggaaccagcaagaacagcctgatgtgcatcctacaaaatactccactgcgcggacgggc

SEQ ID NO: 50051 - DNA, 122 bp, Homo sapiens
ttggccacgtggaaacccggggctggccgtgcccagggcagtagcggtgactccggcggacgtcagtgaggacctggaagtgaggttcccccaggagaacccccgtcagggacccggggtcc

SEQ ID NO: 50052 - DNA, 122 bp, Homo sapiens
cccttcctctcccttcctctcctccctctccctctgctcatctcatcatgagacagctggcgaggcccttcggctgccctggagtgcccctgccctggccaagctcttgctgcccccttctc

SEQ ID NO: 50053 - DNA, 122 bp, Homo sapiens
tttccatctgctcatgtgctcatctgctcacctagctcccatcactgttatgcattgactcgtgtccttcacaaagttatatgttgaagtcttaacctccaatacctcagactgtgacctta

SEQ ID NO: 50054 - DNA, 122 bp, Homo sapiens
ccatatgcctggcttgcggactcattacacgtttgttgaatgaatgaatgaatgaatgagcggactgggggaaggaggacaatcaggcagctattgctgagacctcagcacaagaccccgcg

SEQ ID NO: 50055 - DNA, 122 bp, Homo sapiens
aagggaaagccgccggagctggagacaggctggaaagagcaggtaacagcccacaaggagcgggggccctggctgtcagactcaacttgcaggaccatcaagtgcaggtgtggttcaagaac

SEQ ID NO: 50056 - DNA, 122 bp, Homo sapiens
agccaagccgggcggcaggtgagccagggcagggggctgcagcggtgggcgagggggcggcggctccttcccggcgggcgcttccgcggcctgaaaacggtacccgccgccctgccccgcgg

SEQ ID NO: 50057 - DNA, 122 bp, Homo sapiens
aagccccgccggctctggggtatattcccagggcaggcggataagaacctgggcctagagcggggcacggagctgtgaaacgttgcgtggcaaaggcgaccgcacgcgggcgggcgctccta

SEQ ID NO: 50058 - DNA, 122 bp, Homo sapiens
tgcgcgcgcgttggggctgtgagttgtgcaacccagggagggggcgccggggctgcggcccgcggagagggcgcgcgggcgggcgcggcttggcgcgggagggccgcggtggccgcttctcc

SEQ ID NO: 50059 - DNA, 122 bp, Homo sapiens
ttatttatttatttgacagtctagctctatcgcacagaccggagcgcagtggagcgatctcggctctctgcaacctccacctctccggttcaagccattcttgtgcctcagcctcccgagta

SEQ ID NO: 50060 - DNA, 122 bp, Homo sapiens
gcagtcgccgccccccgcgcgccaggatctccaggggccaccgctgcccgaggcagcacccgggatcaccagttttcgaagcagcccctggcagcagccacctccgctgcagcagcggcggc

SEQ ID NO: 50061 - DNA, 122 bp, Homo sapiens
ccctccttcctggctgggctcccaaaccgcggttcagatgttgtcttgtgagcgtgcgcgcgcctggctggaggggcactgagcctggccgcagtgttgcgtaagtagggcctgaggagaga

SEQ ID NO: 50062 - DNA, 122 bp, Homo sapiens
tttccacccttctgacttccagtcacacttttcatggtgctgctaattctgccttttattcgcctgccatgtttcatcattaagtgaccatggaagtttctatcttgcagaggacacgagcc

SEQ ID NO: 50063 - DNA, 122 bp, Homo sapiens
ggcgggagggtcggaaggaaatgggaggagcgcacgatccatcagcgagtttcatcgcagcgtttcatctccttcgtgaactgggctcagggaggccgtgactcccatttccatttggctcc

SEQ ID NO: 50064 - DNA, 122 bp, Homo sapiens
tgcaagaagtgatcatgggctatggctttgtgaaaatgtcaccctcaccagtgcctttttcgcggacgtggacgtggaggaatgagggagggtaatcactgggctaccaaggtactgctaag
